United States Patent Application Publication US 2026/0103690 A1 - sequence listing, part 100

SEQ ID NO: 496844 - protein, 467 aa, unidentified
MTPHKDYCLAPPPPVPTPMLPESSVLSDTLQVCHPHAAGIDIGEAEPWVAVPPGCDPQPVRRFGTFTVDLDAVADWLIDCGVTTVAMESTGVYWIPLFELLEARGVQGLLIDPRQAKRVPGRPKTDRLDCKWLQRLHTYGLLAGAFRPEAHVCVLRSYLRHRQMLLTYAAHHIQHRHKALEQMHRKLTQVVSAITGVTGMAILKAILAGERDPQHLAKLRNPHCHHDEDDIAKALQGTWRAEHLFALRQAIELYDFSHQQMTQCDQQIKAHLAPFDDKSAGRPLPPKARRHKKTNEPRFDARTPLYHLAGVDLTTIEGIEEGTALVILSEIGTDMHRWPSVKHFCSWLGLCPQHKISGGKVLSRRVRPGAHRVTVALRLAARTLHHSQSALGAFFRRMKARLGAPKAITATAHKLARLVYSLLQHGSAYVQQGLDAYEAQYRERKVTTIAKQAKALGYTLVPLAAQG

SEQ ID NO: 496845 - protein, 463 aa, unidentified
MEKKPPVEFNELNRNVAGIDLASRGNNYVCGPRGEDGECEIASFGTTTPELHRMLHWLQERQVESVAMESTSVYWIPVADLLEANGIKAVLVDTREVRMVPGRKSDVKDCQWLQKLHSCGLLHGAFRPPEDVAAVRSVLREKDNLTAMRTQAIQQMQKSLDQMNIRVHHAVSDIDGVTGTAIIKAIVEGERDPVKLAALRDKRCKKSELEIAAHLTGVWRDEHLFNLAQAFELLQFLDKKIKEYDEKAERMFEALAAAAAPAENPPPPPAPGKKKSAKELLEAAVRNAMQKFMGIDLTVIPGIGCGTAKVIASELGKNFECFPTERHFVSYIGLAPSLGKSAGKNVRQKKRCKNTSRIGRALRMAAATLYNSKTELGAYSRNVARQTDKKTAVKATARRMAHMVYRGVKYGIEYIDLGAQKYEERLRERKVYAANMLIKTFDIKISELTATPEGIAALAALAV

SEQ ID NO: 496846 - protein, 405 aa, unidentified
MNMNAVGIDVSKCKSMVAILRPGGEVVARPFEVPHLSGDIQTLIDRIKGLDGDSRIVMECTGRYYEPLARELAAAGLFISAVNPKLISNYQDEDNALRHVKSDKADSVKIARYTLDRWAKLKQYGLMDEIRNQLKTMNRQFDFYMKHKTAMKNNLIGLLDQTYPGVNTYFDSPARPDGHQKWVDFASTYWHVDCVRKMSLNAFTDHYQKWCSRKGYNFCKAKAEEIYGATKELIPVLPKDDFTKRIIKQAAGQLYAASQTVEELRSLMNQTAARLPEYPIVMAMKGVGPSLGPQLIAEIGDVARFTHRNAITAFAGVDPGVNESGDYSQKSVHASKHGSPALRKTLFQVMDVLIKTKPQDDPVYLFMDKKRAQGKPYYVYMTAGANKFLRIYYGRVKEYLASLPQ

SEQ ID NO: 496847 - protein, 445 aa, unidentified
MSQKDIPDPLEAEFAAFIAIDWADQKHVWKLKVPGSSKIETGELEQKPEAVEVWASQLAQRFQGLLAVCVEQSRGALVYQLLKYPHLVIFPVHPSSAARFRQALHPSGAKDDPLDTEVLLELLLHHRQHLRRLVPDTPETRLLQGLVEQRRRLVDEKTRQKNRLTDCLKIYFPQALEWFDLDTALAGEALRRWPSLPQLQGNHPGALAKFFRQHHNRQAEEELLERIRQIHAAVPATKDLAVVETGMAVVRAGMDLLEVLHRHITALDKLALAAAAHADAFIFASFPGAGPALMPRLIAAFGSLRERYQQATELRCYSGIAPITERSGKTSWTHFRWQCPKFLRQTFHEYALHSLPGSAWARACYQAQPEKGKGHHAAVRVVAFKWIPILFRCWKDRVPYDEHIYLQALRKRKSPYVPALAPLIDVTQIRWQSASGFQKLTADFS

SEQ ID NO: 496848 - protein, 412 aa, unidentified
MDVIVQRPASLDVHKEQVTACARFPAADGGRAQEVREFKTTVGGLLVLHDWLKAHGITHVAMEATGVYWKPVWAILEGDFDCILVNARHVKNVPGRKTDVKDAEWLCQLLEAGLLAASFVPPKPIRQLRNFTRYRATQIKERQREANRLHKALEDTGIKLDCVATDILGKSGRAMLDALCQGTTDPEVLADLAKGKLRKKIPALREALEGRFDSQHALLIGAILAHLDFLDEQVERLSDAIEEQLRPLQPAVELLCTLPGIETRLAQNILAEIGADMSVFPTAGHLASWAGLCPGNHQSAGKRKSGKTRKGSKWLDATLKISAIAAIRTNDSYLQAQYRRLKPRIGHGRALGAVKHSILCAIWHMLKNGELYRDLGGDYFRKRDPERQTRRLVAQLERLGHTVTLDTLPEAA

SEQ ID NO: 496849 - protein, 340 aa, unidentified
MTITTVGIDLAKNVCAVHCVDQHGKTVLVKPKVSRAALPELIASLPPCVIGMEACSGAHYWARLFRQYGHEPRLMAAKFVSPYRMAGKSGKNDAADAQAICEAVRRPHMRFVPVKDESQQAMQCLHRIRQGFIEEKTATYNRLRGLISEFGVIAPQSTDALRHMVSEQKSSLPLQVQQCVNDLLEHIDRIEDNITEYDRILSRMAKTDHRSQRLMELKGIGPTTACALVASIGNAHDFKNGRQLAAWLGLTPSQYSSGGKSKLGRITKAGDSYLRTLLVQGARSVLIGAGKRTDLFSRWVCSLVDRRGYWRAVVAIAAKNARLCWASLHYGDDFRLYSAS

SEQ ID NO: 496850 - protein, 326 aa, unidentified
MEHELHYIGIDTAKEKLDVDVLRPDGRHRTKKFANTTKGHDELVSWLKGHKIDHAHICIEATGTYMEPVAECLYDAGYIVSVINPALGKAFAQSEGLRNKTDTVDARMLAEFCRQKRPAAWEAPHPLELALRALVVRHQALTDMHTQELNRTETAREVQRPSIDAHLLWLEAELKRLEKQIKDLTDDDPDMKHRRKLLESIPGIGEKTSAVLLAYIGLKDRFAHARQFAAFAGLTPRRYESGSSVRGASRMSKAGHVSLRRALYMPAMVATSKTEWGRAFRDRLAANGKKGKVILGAMMRKLAQVAYGVLKSGVPFDASRHNPVAA

SEQ ID NO: 496851 - protein, 315 aa, unidentified
MTKPAATKLSVGIDVSKSTLEIATHETGERWSCNNKTAECAALALKLKLLQATSIVLEATGGFETLVAATLAATDLPVIVVNPRQVRDFAKATGQLAKTDLIDAQVLAHFAAAIDPQPRPSKSAAAQHLEALLARRRQVVEMLVAEKNRLANNRDRAVVKDLKSHIAWLETRLKSSDDELQRVLKASPAWCQHDALVRSVPGVGPVLSLTLLAQLPELGQLNRREIAKLVGVAPFNRDSGRWRGKRHIWGGRAAIRSPLFMATLCAIRVNPAIKYFYQRLIKVGKAPKVAITACMRKLLTILNVMIKTQTSWRTA

SEQ ID NO: 496852 - protein, 345 aa, unidentified
MDYFAGLDVSVKETSVCIVDDTGRLVREVKVASEPEALLPVMTNPIYRFKRIGLEAGPLSQWLFSGLAEAGLPVICVETRHMRAVLQAQINKTDRNDARGIAQMMRAGLYRPVHVKTLRSQKLRMLLTHRKLLQSKAIAIDNDLRGTLRNFGLKVGVVGALKFEVRIRELVEDLPDLAELVEPMLVVRRTLREQIGILHRRLLAVVRHDDVCRRLMTVPGVGPVVALTYRATVDVPARFRNSKAVGAVFGLTPSRYQSGEINRSGAISRCGDEMMRAMLYEAAHIMLVRLAKWSWLKAWAMKIAGQRGMKKAIVALARRLAVIMHRIWVDGTEFRWTREQAAAAA

SEQ ID NO: 496853 - protein, 372 aa, unidentified
MKKVSKQMRKMEATAPGGTIVSASEAVKPGMTVGLDLGDRFSHYCLLNGDGEIVEEGRVQTSENALRRHFEGESRLRIALECGTHSPWVSRLLKALGHQVIVANARKIPAITGSESKNDRNDAEKLARFAAYDPKLLSPIAHRSPERQLDLNLIHARSTLVRARTMIVNALRGLVKSAGGRLPASSTEALAARAPAAIPPALATVATPLIEQIALLNAQIAGMDKQVEALAAKYPEIKLLRTAPGVGPIVAAAYVLTLERPDAASNRSAGAFLGLRPAQSQSGGADPQRRISKTGDGCLRSLLVQSAQYILGRFGPDSELRRWGLKLAATGGKRGKKRAVVAVARKLAVVLHAMWRNGECFQAFPQPMDKAA

SEQ ID NO: 496854 - protein, 340 aa, unidentified
MPHYVGLDVSQKTTTICVVDEQGQRLWRGVCATDPAAISVRLLRYAGVDARVGVETGSMTPWLVHGLRGAGLNVECLDARRVKAALHMRLNKTDENDAEGLAQIMRTGWYRPVHVKSLDAHRARALLGARAQLVGMTTRLSNMIRGVLKTFGLLPGAGRGVRFDQSVEALLEGAPEIALVVRPLLVTWRQLRQQITAFDKAVRQQVKMDPVCRLLMSVPGIGALSSLMYVSTVEDPGRFSRSRAVGAHLGLTPRRYQSGETDRTGRISRCGDGLARTLMYEAATVILYRVKRSLHLKDWAEAIERRSGPGKARVALARKLSVILHSVWRSGEPFRWASPV

SEQ ID NO: 496855 - protein, 331 aa, unidentified
MAIESYVGIDVSKLNIDVFIRENCIHKQFKNELNGFLQLVRWLQKQGYNSLESVLICFEHTGLYSLPLALFLEKEGIPFAMVSALEIKKSMGITRGKNDVIDSKRIAEFAYRFKDKISLTILPIVDIRKVHSLLTLRDRLVTNMQGYVVSMNETLRTMNMEDFPELFSAYQMQIATLKEEIKKLEKSIKSIIKNNPQLWASYQLITTIKGIGFIVASYLIVYTYNFTRFDNWRKFACYSGIAPFDYQSGTSVRGKTQVSPIANQQVKKMLHLAAMCAVHFDPELKEYYLRRQADGKTKMSIINIIRNKLVSRVFAVVKRGTPFVDIKKYIT

SEQ ID NO: 496856 - protein, 352 aa, unidentified
MTMLADECDVVIGVDTHKLTITAAVVLAATGGVLEQLTIQTCQAGYGSLLTRASVQGDSRVWAIEGTNSYGAGLTRFLRERGERVIELDRPARTKRRGGKKSDPLDAVRAAREALSRPELGEPRTLGDRAALSVLLAARRSAVEARTAAQRQVHALIVAAPDALRARFSGRSSRQVLNLAVRLRVGAQHDTETNVTITVLRSLARRIAELEAETRAHERAVENLVRGWRPDLLGLCGVGPIVAANVLCAWSHSGRFRSEGAFASLAGVAPIPASSGLIVRNRLSRRGDRQLNRALHVVVINRLRHDKATQEYVDRRRSEGKSDREIKRCLKRYVARQLFRQLEAAPGGLDGL

SEQ ID NO: 496857 - protein, 419 aa, unidentified
MEVEEADSELGDALSFPRKRTQKVQKGRNRPMKKNSKNETMKSKRETKKVAELEAGWTRLDEREANTLVIGIDLGDRTSAYCVRTLGQQIVKEATVVTTVTAMLEAFQGVRRQRFVIETGTHSRWVAQLLELMGHEVIVANARKLKLISENNQKSDKVDARLLSKLGCMDVEWLHPVYQRSQEAHSDLLLARARQALVDARTALINHVRGSVKSYGSRLVKCGAERFVEVARETLPEALKPALSGVLAALEEINEQIYGNDCQIEHLCNTKYQEAAKCLLQVNGVGPVTTLTYVLTIEDKDRFEQSRDVGPYLGLIPKKRQSGQRDPQLGISKAGDEMLRKLLVNCAHHILGAKGQDSDLRRWGLELVRAVERKGKKGGRKLAAAAVARKLAVLLHRLWVTGAAYEPLRNRGAQQVPAA

SEQ ID NO: 496858 - protein, 449 aa, unidentified
MKILALDLGKFNTMCCFFDTKTRKHSFLNAPTERNYLNTLFKKHKVDLVVMEACGPSGWINDLAISHGLKTLVCSTNEDAWKWSNVKRKTDKDDALKLARMAAMNELKAVHMPSETHREFRSLVKYRKTLDHRINKMKCTIRAWFVNHGISIDTGEKAWHSGRELINSFRKPLIQCEPNELWKGELDIELTQLDALTTQLDIVVKKLEAIGKNDPRIQRIRTIPGVGPRTAEILVACIDDPHRFTNGRQVSAYFGLVPRQYQSGETDRNGRITKRGNPLARTILVECAWASLRYNPWAKGVYERICGKQKTRKKKAAVALARKIAVLAWAMLRDEKDWDTSVMISTTKSFGGKLPVDEQELLAMKPKECRHKRKNRRIKEARMAARQAEQTNQGRSSTRTKTPTRKTTVVRNASPPTNTTKRATPKPTIRTTLEGKPKPRRARKLVSPG

SEQ ID NO: 496859 - protein, 502 aa, unidentified
MMLANQKKPSISVCHPTRLRKKRQSSQDENDFTAFGIGMDVHKDSIVICVSGRLPKGEIVVYREHSFRNNFQGVDELCRFLRTYITRATILMECTGVYHVSLYQTLQDRFRGRRDHLIAMNPLLVHNRIADLGTKTDRADARTLSNLAFYERILRPSYVGSPDFFTARDFMRSYHRTMSHCTMFKNRIHRHLHLANQKFPFDLGSEWGIQLLDRYINSSQPLGDIYTEYLADLKDQGKGKVLEKRAEDIVPNADVCLTESQQFLLQVDLIRLLQSQQAAALLLGKAERYVLAHPTLRVYYEQMCIIPGFNAVTILTVLTEIGDYSRFRTADAFSKFCGVVPTVEQSGNYRAKGHVNRFTNKHLRGALTQAAASIIGRPDRTTDIGAYAYKQFHLRKLPFKKCMLKVAYKFSRILYGMLTEIRQYDPHHESMRKKRARLQNRLKNQDTLIESNRTRALRRDISSLLVSHSELLNSTSKYHLVNGFNRLIRKARYYDQQDPSGK

SEQ ID NO: 496860 - protein, 342 aa, unidentified
MEITTIGLDLAKNVFQVHGIDANGKVVVRRRLRRAQVVNFFAALPPCLIGMEACGTAHFWARQLIGLGHEVRLMPPSYVKAYVRRGKNDATDAAAICEAVTRPHMRFVPVKTEDQQAALMLHKARELLVRQQTMLVNALRGHMAEFGMIAPQGRGKVEDIIAVIEDAEDESIPALAKAALGPLVAQLRATEAATASLNAEIKAWHKGNEASRRLATIPGIGFLSASAIAATVPDPSFFRSGREFAAWLGLTPRQNSSGDKQRLGRISKQGNRYIRRLLVIGATSMLRRTRAKSAPGADWVNSLLERRPPRLVTVAMANKTARIAWAVLAKRESYRAPAVATC

SEQ ID NO: 496861 - protein, 416 aa, unidentified
MTPITWFLGVDWGQETHVVCLVNADGIVVGTRTVAHTVDAMTAAVQWVQEQSGAAPEAVGVAIETPRGVVVHALLERGFSVFALNPKQLDRFRDRFTAAGAKDDRRDAWALADGLRTDRRAFRVVRPEPAHLVLLREWVRVFEDLQADEQRLVNRLREQLTRVDAPWLSLSPAASDPWVWTILARASDPDAWPTLPRRTITAALREHRIRRHTPEAVVAALRQPRLPAAPGVGAAVAARMATLVPQLRLVHQQRLDAERQIDGILAQLATETLPDEPREHRDVQILLSLPGVGRMVTATMLTEAAGPLATRDYDRLRTYTGAAPVTKRSGKRTPHVQMRYACHPRLRQALYHWAKNSIQHDDAARCYYRQLRERGHGHARALRSVADRWLRILITMLRTDTLYDPTRPQKILATAA

SEQ ID NO: 496862 - protein, 445 aa, unidentified
MKQKKSLKKVDMALPRHLQHINVNAAGIDIGSRSHFVAVPEGSDEKPVREFSGFTGDLERMAEWLIACGVTTVAMESTGIYWIPVFEILESHGLEVKLVNARHVKNVPGRKSDVLDCQWLQQLHTYGLLRGAFRPAEQVCTLRAYVRQRAMLVRSAASYIQRMQKALAQMNLQLHNVVADITGMTGMRIIKAILGGERTPDVLAAMRDRRCKNSATTIARSLQGSYRPEHLFSLQQAVELYEFHQEKIADCDRQILEQLKRFDAQNAPDDAPPSNVEEALQRMSGVDLTSIDGIDTNTALKILAEIGTDMNRWKTAKHFASWLGLSPGTKVSGGKVLSSATKPVANKAAAALRMAAFTLFNSKSALGAYLRRQRARLGAPKAITATAHKLARLVYTMLKQGTAYVDAGQEYYEKRYRSRVIQNMKRKAQELGFELVAIQGAAVPA

SEQ ID NO: 496863 - protein, 397 aa, unidentified
MKLPNTHELHVSVDVGCYKHHISVGLASGEYLGDFEINHDKAGFADFFEHVEQYKQQSNGQVSVAMEGYNGHARPLDKMVLSKHYRLLNINNLKLARFKEIFPGAAKTDPIDSRKGLELFQLQQTLPLAKNVLQEVYTTPQENQELKQLSRRRKRLVNERVRYLNTLQSDLRALSPGLVEITHDVKSVWYLNFLSSSADLRILARKNRATLLNIKGVGKKYVEVILGWQKTAIFSDDVEYMSDLIQQDVARIIELRNMIKSLDKRIAELLEHSEIGQRLLSIQGFGLTCCGVLSGEIGCIERFKKESSLALYLGMASLDNSSGKRQGSKKPKQVNKHAKAAMMTAVDHQRRGNEESQRYYEKKRNEGKTHNQAIRSLGRHLCRVIFKMLKNNRDYYI

SEQ ID NO: 496864 - protein, 489 aa, unidentified
MSTARKQQRGKKDPMLNAQLLKRKARGSHCQQGKGDQRRSKLTITNPDAAGIDVGAQVHYAAVPEGRDQVSVRSFGAYTAQLDELVQWFKDCGIKTVAMESTGVYWIPLYQKLEEAGFEVLLVDARQAKHVPGRKSDVQDCQWLQQLHTYGLLRAAFRPEDSICRLRTLQRHRKNLVECAAMWIQHMQKALNEMNLHLHHVLSDISGHSGLTILDAILAGERDPKKLASLADRRVKKSQAQIEAALTGDYRPELLFVLSQSLQNYRQIQQQIAQCDLSIEKQLAKMADCTNPSQDSESTQQSPDSSGCKPRKTKPKDALELSLAGHLKRILGVDLTTIPGLNVLAILTLVSEIGTNMAKWRNEKAFVSWLGLSPNNKISGQRVLSSRTRKVVNRAATTLRLAAMLLGKTSTPLGSFYRRKRAQFGAPKAITATARKLGCLIYRLIKNGQAYQEPDLHTYELKYKDQILNSLRKRANSFGFDLVELPKAA

SEQ ID NO: 496865 - protein, 370 aa, unidentified
MRDGSTLYVGLDVHKDSIAVAYASTEGPTDPVHVGAIGTRQCDIDALVRKMHSKSAQLVFIYEAGPCGYWLYRYLTRKDLTCFVVAPSLIPRKPGDRVKTDKRDAVTLARLARSGDLTAVYVPDVPDEAIRDLARAREDALHDLNAARFRLKALLLRNDIRYVGRANWAADHIRWLARLVLPTPAQQIVFQEYVRTITERTELLQRLEAELLAQAKPWRLYPVVEALQALRGVQFTVAITAIAELGDLTRFDNPRQLMSYLGLTPSEYTSGDRRRLGGITKAGNSHARRVLIEAAKAYRHRAKVSEQIQARQQHLPTSIRDIAWRAQVRLCGRYRKLRARGKHPNTIAAAVARELAAFMWAIARTQPASA

SEQ ID NO: 496866 - protein, 275 aa, unidentified
MNIKRIGLDLAKNVFQIHAVDHREHVVLRKTLRRDRMAAFFTQLSPCLIGIEACGSAHYWARELTRMGHTVRIIPPRLVKPYLKGQKNDANDAEAICEAVSRPGMRFVAIRTERQQTLQAEHRVRARLIRARTALSNEIRGLLGEFGVVLPAGIAQLRKALPEIVSQQVQWDECFIRLLCELSEELQGLDERVARHDRRLQQSARDDIRIKRLLAIEGMGPVVASALVAAVGDGRQFRSGREMAAYLGLVPRQHSSGGKARLGHISKRGTATCGR

SEQ ID NO: 496867 - protein, 359 aa, unidentified
MYFSGLDAHLRYVTVAVLDRLGGVALETTVPTREPDRLLAVLAPFRPLEVVVETCPFWPWLYDLLVPAGIGFHLAHAKALRAIATAPQKSDAVDARLLARMLLSGLIPEAYPRSADQRELLRLLRHRTALVRFRTRLAGRIHSQLHQQRLSLPREKLLRRATRAWLEATAWPQLTVEQRAIVTTHVELIDHLTPLIRALERRIAAAAAGDATAPLLATIPGIGPYRSLLLAAELVPISRFPRAEHLVSYAGLAPVTRSSGGHTHHGSIPPAANRWVRGALVSAIPSHVRYAPTSPVTVAYEQLKARLGWRVARVAAARKLARVVYVMLTRRTPWHGVPAAGDVRDEVQNSHVAPTTSFC

SEQ ID NO: 496868 - protein, 451 aa, unidentified
MKKKKMEMEIINPNAAGIDVGSRSHFVAVGQSLDDVQEFGVYAEDLTAICKHLKSYGVTSVALESTGDYWQNLFAELVKFNFEVVLCNGKFTKHAKGKKTDVKDARWIQKLHALGLLSSSFLPDEQTEILRTYCRQRANLIDQASSTSHKMQKFLKFLNFRLDVVVKDICGLTGLTIIEEICKGNLEPKELAKHRHYNCRKSEEEIAKALQGNNRSDYLFGLKQEFQAYQFFQKQIARCDKEINRLVKQYLKQFPERKKMKTSEKPYKRINKNAPQIKGFNQVAFKYFGGVDLLAIEGMSYATVLSIMSEIGPDGFKKFKTAKQFTSWLRLAPNNKISGGKVLSHKLPKGSNRLKIALRQAANAIGNLKDTHLSNFFKRIAYRKGRTAAVSATARKLAVIIWNMIIKSVPYSPPTEYLFLDQKRKRGLVKRIKNQINKFDLNPQDLGFVTN

SEQ ID NO: 496869 - protein, 383 aa, unidentified
MKRRSNCRGGRLLSQTASKCQSGGLDVPLDGKEPRIKRTTIGLDIAKRVFQAHAVDSISGEVTRTKLRRSEVLSHFAQLQPSVIVMEACGSSQHWAREFAKLGHEVKLIAAQFVRPFVMANKNDAADAKAIWTAAQQPEMRFVAIKTEEQQAVLGLHAIRERLKKNRTAAVNQIHGLMGEFGVELPKGWRGMLPKAVAALDDATSSMPALLRSQLRRQIEGIRSLTEQMAEVERQIAAWQRQQADCERIAAIPGVGLLTATAAVATVGDARTFRSGRQLAAYLGLVPRQSGTGGRVQLLGISKRGDTYLRTLLIHGARSVLVNSAASKDPNSWLGRMIQRRHHNVAAVALASKMARQIWALLAHQRTYEPNYGQWAPLPPVPA

SEQ ID NO: 496870 - protein, 385 aa, unidentified
MKNTIVHDEGAASLEDAVQRIKLSGSMIKIGLDVHARLYVAVAQYDHLLPKPARRLAPTEFLAWVEQLLRAGHTVHVVYEACGFGFGLYRELKALGAHCYVITPRKLDEHCTRVKTDPRDATTLCQRLSRYLDGNTRELAVIRVPTEAEEQARHVSRQREQLVHLRQKLEAQGRSLLISHGLPSPAHWWKHQTWSRLSKLLPSWICIRLEVHRPALLTLQQQIDALTAELEAAAPADVPAGVGKLTTVIMTREICSWERFSNRRAISCYTGLCPGERTSGSKRVPGSVTKRGNPRLRAALVECAWRMVRFQRNYPPVKKRLTILAKGARATGAQRKKAIVAVARHLAVDLWRIHTGRCSAVQLGLNSAETLPVRGEQKAELNALA

SEQ ID NO: 496871 - protein, 415 aa, unidentified
MTTACSVTLGVDTHKDLHVAVTLDQLGRRLGVATFGTDDAHHASLWAWASDFGPIGQAGVEGTGSFGYRLAQFLTSSGVQVFEVNRPNRVTRRRRGKSDPIDAEAAARAVLAGDATATPKRRTGPAGQLRALLVARRSAIKARTQTEQQLRSLILELHDQQRQQVDRRRIVDLTSACATLTGADGTSLALQALARRWQHLDQEVGDNDQHVTAIIRRVVPSLLARPGIGPVCAAQLLVTAGDNPDRLHSQAAFAALCGASPVEHSSGKTQRHRLNRGGDRAANSALWTIANNRLMHDPQTRAYAARRTATGASRKEILRLLKRYIARQVFPEIRHALSPANPVPNNSLTSVNGLYKAELIGPRGPWRTAEQVELATLAWVGWWNQRRLHGALDHIPPAEHEARYYREHPQSKEVR

SEQ ID NO: 496872 - protein, 324 aa, unidentified
MTLPALGIDIAKLKFDVCLMNTQGKLKHKIFSNTAAGFAQLAAWLSKQQVERTHVCMEATGAYGEALAYALHAAGHRVSVINPAAIRAFAGSRLSRTKTDKVDAELIARFCLAQQPLAWTPPAPAVRELQALVRRLEALIEMRVAEENRLEAGSTVEAVRSSVEDHVAYLAAESKRTKVLIREHIGNHPDLKQQHELLNSIPGIGEMTAALLLAEVVDVTQYRSARQVAAYAGLVPRERRSGSSVRGRTRLSKIGNSRLRKALYFPAITALRCSPFFKEWAVGLRERGKCKMSVIGAAMRKLIHLAYGVLKTGKPFDPQWAKTA

SEQ ID NO: 496873 - protein, 361 aa, unidentified
MAQSTTVVAFDQHAASTVAAVLLPEQSTPALHTLPSDSPTILRFVRRLGVERVTCCYEAGPCGFELQRVLTRHGVACEVIAPALIPRRPGDRVKTDRRDACHLAILYRVGALTAIHIPTEQEEAARDLLRCREDIRVDLLRARHRLSKFLLRHGRRFTGTKKAWTKQHAAWLQVQQWPLPALEQTHRAYVRAVDETLARLHAVEGELRDLLTVEPLRTRATRVRCFRGMDDLTALTIAVELGDARRFPSAPKAMAFTGLVPAEHSSGMKKARGAITKTGNAHLRRVLVEAAWHYRHHPFVGRSLRLRQRGAPAVVIDHAWHAQQRLHRRYRRLEARGKPKQHIVTAIARELTGFVWAALAL

SEQ ID NO: 496874 - protein, 421 aa, unidentified
MALAEAQDNEQIIQRVAALDIGKAELVCCVRVPGAGRKRLQEVRTFSTMTRSLLSLADYLTDLGVTRVVMEATSDYWKPIFYLLEAHGLDTWLVNAKDVKHLPGRAKTDTLDAMWLCKITERQMIRPSFVPPPPIRRLRDVTRYRIDLVGARTAEKNRVEKLLEDACIKLSVVASDIFGVSGRDMMAALIAGERDPKRLAQLARSRMRSKIALLEEAFTGHFTDHHAFLLARMLARIDAINTDLAALEAKIEEMVLPFEAAIARLDEIPGIGPIAAAVVIAEIGLDMSRFPTPGHLASWARFAPRVKESAGKKKGNAATGHGNRYLARILGEAAIGAARTSTFLGERYRRLARRRGKKKALVAVGRSILVIIWHLLSDPEARFQDLGPDFYDTRLGEDRRKRNHIRQLEALGYRVTLEPAA

SEQ ID NO: 496875 - protein, 377 aa, unidentified
MSEHGITFVGMDAHKKAINVAMLLPGKREPVEWQVANEPAAIRRLAKRLSREAPGEVRCCYEAGPCGYVLQRELEAAGGVICEVIAPALIPIKPGERIKTDRRDARKLAVSLRADDLTAVHPPTPADEAVRDLCRCREDAREDLMRARHRLGKFLLRRGRVYTIGKRAWGLLHRQWLKGLKLEHAADQVTFEDYLAAIEQLEERLRGLDQRLAALAEQHPYREPVGWLRCFRGIDTVTAIALVAELHDFRRFQTARALMAYLGLVPSENSSGERHRRGAITKAGNVHVRRLLIEAAWHYRHRPGVGAGLRRRRQGQPSAILTIADRAQHRLCRRFRHLTERSKPFNKAVVAVARELIGFVWAALYPATLGQAIRGRS

SEQ ID NO: 496876 - protein, 355 aa, unidentified
MDSKKYIGMDVHKESISIAVMNGAGKIVMECVIETKASMILQFIDGLRGDLQVTFEEGTSAAWLYDLLKPHVTKLLVCDPRKNASMREGHQSDKIDARGLAELLRLNHLSPVYHGEHGLRTLKELVRSYLTITKDLARIMTRVKAIYRSWAIPCTGKQVYAPRHRAEWLGKIGEPGVRRRAEFYYQQLDALRTVRQEVRRELLAEAKKHPAWKRLCQIPSIGPIRAAVLLGILQTPHRFRTKRQLWSFSGVGIETHSSADYRSVDGRLQRTKKQISIRGLNRNCNRDLKNLFKGAAIVASSKPGPFQEFYNGLLTKGIRPEMARLTLARKIATIVLIMWKRGACFDAQHLKPQTA

SEQ ID NO: 496877 - protein, 422 aa, unidentified
MRNHKPARSSRSKAARATGGRVVKVSQSGDLRRLNEHAAGIDIGGQRHYVAVPPSACAEPVREFGVFTKDLYAIADWLSQCGVTTVAMESTGVYWVPLYEVLDERGFGVKLVDAGKVKNVSGRKSDVLDCQWLQQLESYGLLTAAYRPSDEIVVLRAYMRQREMLVKYASSHLLHMQKALQQMNLRLDNVVTDLSGQTGMRILKAILAGERDVQKLGAMRHPSCHASAEVIAQSLVGNYRQEHLFALQQAVELFEFYQQKIKDCESEMEKYLQKLPGKRDDQPPASQGRNKRQSMCFNVRDHAWKLLGVDLFRIKGLGAETVLRVVSEVGADLRGFETEKHFTSWLSLSPNRRVSGGKVLSSRTKANRNRAAQAFRQAAVSVARSDSELGAYYRRMQTRKGPASAVTATAHKLARIYYNLVK

SEQ ID NO: 496878 - protein, 343 aa, unidentified
MNDTIYNHYIAIDWSIENMAIARMTKKSNKIILIDVPSDIAEMKVYLKKLKGSKILMVEETTTSQWLYTELRDYVDRMVICDPYRNKLLNDGPKTDKIDAAKLVHLLKAGLIKEVYHSTDKFLYLRRFVSGYEDLVKAGVRLKNQRYSFLRACGKRGFEWAGTKLDSEDDKFVLDCMDRQIEAHKQEKEGYEKEFERLAKDYPEISHQKSLPGIGPIHAVKIVARVVTPYRFADKGHFLSYTGLIKLEKISGGRSYGRKNSRYCRQLKSVYKTSTWAAIGGNNPINDYYEYLIQEKGYPEHNARHKACRKLAVLSLGVFKSGKKYQPYRRDHVKGNKEVTSGL

SEQ ID NO: 496879 - protein, 306 aa, unidentified
MEAMIERCAGLDVHQETVVACVLFGPLDKKPKTSIETFSTTTTGLLALSDWLATLQVSDIVMESTGVYWKPIWNILEGSFHLVLANARHVKNVPGRKTDVKDAEWLAKLLRCGLIESNFVPPEDIRDLRDLTRYRKKLIHHLTSEQNRIHKILQVANIKLTSVLSDIFGVSGRRILEAILNGEKIETDGLRKMVDWRTKASITDIANAINGRIRRHQRDMLRYHWEHMSYLEKAIEELEKQIDQLLSPYRKEVELLDGIPGVNKAAAATFIAEMGVDMSVFKSAKHLASWAGVSPGNYESAGKKNE

SEQ ID NO: 496880 - protein, 409 aa, unidentified
MTATNQFAAHVGLDWADKKHDVCVQFKNGERVFHVIEHTAEALDIWLTELHQKVKGRIAIALELKKGPVVYALQKYPFITVFSVHALSLARYRQAFSPSGAKNDPQDAELALELMLRYPQKIKAIEPDNADIRLLQQLVEQRRLLVEDKRRFVNRLINTLKQYYPLPLEWFSHRDNSLFCELIIRWPSLQQLKRARSDTVRHFMNAKGGPAVAYTEQRVASIANAIPLTTDKSVIEANALMATALASQIKLAGDLIRTYDERIESLFGTLPDAELFKSLPGMGPCMGPRMLAALGDNRNRFNSAEEIQNYAGIAPVTERSGQKSWVHWRWQCAKFVRQTFVEWAAKTVNSSYWARLYYQGLREKEKSHQSAIRALAFKWITIIYRCWKTKLGTMKRSICWLSKRDTRPY

SEQ ID NO: 496881 - protein, 404 aa, unidentified
MVFVGIDWSERHHDVCVMDVEGHVLVTGRVPDGVDGAAQLHEMVAAHAEEPSEVVVAIEVDRGLLVGALVASGYAVHAVNPLSVDRYRDRHRTSGAKSDPGDAKVLADLVRTDRHLHREVAGDSELAEAVKVLARAHQSMIWSRQRHANQLRNLLREYYPAALAAFGTDLASSDTLAVLALAPTPAQGRSLRAPRIAAALTRGGRRRGSAERAEQITAALRSAQLEAPEVVSSAYGEVVRSTVAILAEMTSQIEALAQELQDRFEEHPDAEILRSLPGLGSVLGARVLAEFGDDPTRYADPRGRKNYAGTSPITRASGRSRVALARFARNRRLADALEMWAFCSLTSSEGARRYYDAHRAKGQTHRRALRSLANRWVGILHGCLQHRACYSERLAWPATDEVAA

SEQ ID NO: 496882 - protein, 415 aa, unidentified
MSARFTVAIDLSKFKHTASLIDTETGEVAQALTFKVDEVGFKQFDQLLRSFSTDPHDFIIGCEATGHYGETLLRRLQAQDYAIVRMNPAQVAQFRRGLGRKAKTDALDAEAMAKQLSVTDWVIDQAVSQPLRQLRSLTRLRLDFVEEQSRWINRIRAVINQIYPEIEPLLKKLTTATSMAILSHYPSRQLLAEADLSELTVLVQKASRQNKGADFAIQLQQTAQSSVGLDDPCLEVELRIMMQQFTTIANSIREIEREIRQYTELVLAGYSERLDLDEPLTFKAFPYGNYLTIATLLSELGDINRFPSIKQLLSYLGWCPNTQESGMSQVKHPRMSHRGNRFARRIVWLMSVGAVRWVEEYRTYFHQRIEAGKNKMKTLVAIGRKLLSVFYAVLKTGQPYDPQRYLERQSLPIVS

SEQ ID NO: 496883 - protein, 378 aa, unidentified
MNETTRATECTTEPTLYLAFELGKTSWKLGFSTGLGQNARIRTMDAGELAVLRQEIDQARRRFRLPEGAVIRSCYEAGRDGFWLHRYLTSLGFSNLVVDSASIEVNRRARRTKTDRLDAAKLLTMLIRYHHGEERVWSVVHVPSVEAEDMRHLQRQLHSLKVARTQHVNRIKGLLVSQGVDVPIHAGFLEALTRARMWDGSPLPPRLCARVGREYARLRSAEEEIEELEAERDKVIETSGLPCVAQVRQLMKLKGIGPASAWLFVMEFFAWREFRNRRQVGSLAGLTPTVFQSGEESHDLGISKAGNRLVRGMAIEVAWGWLRYQPESELARWYYEVFGEGGKRRHKVGIVAMARKLLVALWHYLERGEIPTGAELKA

SEQ ID NO: 496884 - protein, 344 aa, unidentified
MTAVMIGVDPHKGSHTATALDATEHELACLRVRAGRRQVEQLLAWATPFEARTWAIESANGLGYLLAQQLVAAGEVVLDVPATLAARVRVLSSGQSNKNDPNDARSVAIAAMHAPMLAAVPVEDHRTVLRLMAKNHTDLARWRNKICCRLHALVAELVAGGISKEVVVSDAFALLESIHPEGVAAIERHRLAGQLADELVHVDDQLTLAKANIRTAVAASGTTLTDIFGVGPVVAAMLIGYTGDPFRFPTSGHYAAYTGTAPIEFSSAGRVVHRLSRRGNRRLNHALHIVAVTQIRHAHSPGRGYYDRKRAQGKTPREALRSLKRRLSDIVWRQLVDDARRAAG

SEQ ID NO: 496885 - protein, 324 aa, unidentified
MSKHSTVCAGIDTGKHKLDVALEGRSQELQVPNTAEGHRQVSNWLRKQRVARVGIEASGGYEQAVVRQLRQDGFVVIVFQPAQVRAYAVFHLQKAKNDKIDAGLIADCTAAVKKIHEPPDPRLAPFAEVATLLDQLTEDIAHLKTRRESFRDERIKAHLTGEIRRHKALVRAELKKLAADIRRHDDLGKRLDLILSVDGVGLRTAVAILVRMPEIGRVTRERAAALAGFAPYDNDSSDHSGPRHISGGRTRVRGNLYTAALPASMRWNPQLMALYKRLIAKGKPHKVALVACARKLLIFVNTVVERETPWTKEVPALANVERGA

SEQ ID NO: 496886 - protein, 342 aa, unidentified
MDTIGLDLHKRESQLCTLADAGTVTERRIVTSRERFTMALGNRPAATVLLEASTESEWVARHLESLGHTVIVADPNYAPMYASRTRKVKTDRRDARALADACQTGAYRPAHRLCDARRHVRAELAVREALVRTRTRYIALAKALVRRDGFRVPGSESHLVVARIAALSLPSTLSAELAPLVALLGPLNEQIAAADRRITDLEREDPMVRRLATAPGVGPLTASAVVATVDDITRFASAHQLEAYLGLVPGEKSSGEKRRIGRITKAGNSRARWLLVEAAWRITRSKSPETAALRAWAGKVATRRGKRVAVVALARRLAGILFAMWRDGVSYRAEKIRTPRPA

SEQ ID NO: 496887 - protein, 316 aa, unidentified
MSKRKTNIGIDVSKQLLEVAVHESQFHYRCPNQAQAFGGLLAELIDLRPARIVVEATGGLEKPVVAALHAASLPVVVINPRQVRAFAKAIGQLAKTDRLDAGVLAHFAAAIKPPLRPLKSTDEQELEALMGRRGQLIEMLVAEKNRRNSATSEVVRETIKEHIDWLEDRIAELDEQLQARLVSSATWQNKDAILQSVPGIGRVVSFSLLAELPELGTLNRQRISKLVGVAPLNCDSGQQRGVRHIFGGRARVRSMLYMATFTAMRFNPVIKEFYQRLVAKGKPYKVAITACMRKLLSIINLMVRNQTLWRSASVSA

SEQ ID NO: 496888 - protein, 412 aa, unidentified
MDVYCGIDWAEDHHDIALVDRDGKLLARRRISDDAAGLAQLLALLAEHGDSGDERIPVAIETPRGLLVACLRAAGRQVYPINPMAVARYRDRHSIAGKKSDHGDAVVLANVLRTDLHAHRPLPADTELAQAIAVLARAQQDAVWDRTTAHNKLRSHLREYYPAFLAAFAEARGGILRPEARAVLAAAPTPADAATLTLTQLRGLLRKAGRIRGIDAEATRLREAFRAGQMRQLPLVEAAMGRQALALLGQLNAACAAADDLERAATESFSLHPDAGIITSFPGLGALTGARVLAEIGDDRSRFQDAKGLKAYAGAAPITRASGKTKSVTRRHIKNNRLNAAGYTWAFSALTASPGARAHYDRRRADGDRHAGAQRNLFGRLLGCLWHCLTTGCEYDEATAFPTTPEKLPKAA

SEQ ID NO: 496889 - protein, 429 aa, unidentified
MDVVDRIRLDDFHQLKKEIRGSKEHVIVGIDVAKDNHNAFFGTATGNTLLKRLVFKNDMEGFNRLLTYAEAVKVKHALDKVVFGFEPTGNYHKPLGEYLVKCGLSVLLVSGKAVRNNREMLDNRWDKNDTKDSANIADLISQGKFMYYDHPVLPLRDLRNLLSLKRRFKKQEHGLKVRIRNHLLAQYFPELDRYYGQWEKGGLSIVKWCLSPSAIAEMKYEQFKQLISPSSRMNVSRQERLKAIWHKATESIGCEVGETLGFEAQIMVEGLKQVRDAIGLTDEKTKGVCLHFPEYSYLLTIPGFGPDISSKVLAAIGNPFRFNSGKQVLKMAGYDLSASRSGKTSKRAVPVISKRGKADLRYALYQAALVASTKNQYFVMYYTNKLRGREKEKGIKTKMRVKLAAKLLVIAWTLMKKEEPFNPDYLNIE

SEQ ID NO: 496890 - protein, 347 aa, unidentified
MDHYAGIDVSLEASSVCIVDTTGKIVREAKIASEPEALIGWFASLGLDLVRIGLEAGPLSQWLYAAMKEAGLAVELLETRHVQIALQTMPVKTDRNDARGIAQLMRLGWFRPVHCKSIAAQETRALLTARKLVQSKLYDIEMSLRGILRGFGLRVGPTTPKRFASRVEELVTGHATLELIAKALLAAHAALLREFDMFEKRVRAMARADKRARLIMSAPGVGAIVALTYVSAIDDPSRFSSSKRVGPHFGLTPKKYQSGEKDVTGRITKIGDAGVRTALYEAANVILTRPVKGAGLKSWAMKLAKRAGMKKAKVALARKLGVVLHRMWIDGTPFDARRAACATPSAA

SEQ ID NO: 496891 - protein, 389 aa, unidentified
MCARAGPNRRPQQDVRTFGTTAAELLALRDWLEGHGVTHVAMESTGVYWKPVFYALEDSFTCLLVNATHIKQVPGRKTDVRDCVWIAQLLEHGLLRGSFVPPAPIRELRDLTRHRKVLIQERSRAANRLHKLLQDAGIKLASVATDILGVSARAMLDALVEGTTDPDVLADLARGKLRKKLPALRQALTGRFRPHHAFLVSQLLAHVDYLNESITAVSEEVAVRITPFAAQVEQLDTIPWINMRTAEVIIAELGVDMHFFPSDRHLASWAALCPGNHESAGKHASGKTRQANRWLRTALVEAAAAAIRTKDSALGAGYRRIMGHRGHKKAVVAVAHAMLRSIYHLLAEGTTYHDPDADCFDRRHSQRVTRRAIQLLERQGFRVVLEPAA

SEQ ID NO: 496892 - protein, 341 aa, unidentified
MDITIVGLDLAKNVFQVHGINAAGEVIVRRRLRRAQVCAFFSGLSPCLVGMEACGTAHFWARELVALGHEVKIIPPSYVKAYVRRGKSDAADAAAICEAVGRPNMRFVPIKTEDQQAALMLHKARELLMRQQIMVVNALRGHMAELGMTAPLGRGKVEDIIAVIEDDEDESIPTLAKAALKPLVAQLRANEEATAALDGEIKAWHKGNAASQRLATIPGIGILTASAIAATVPDPSFFRSGREFSAWLGLVPRQNSTGGKDRLGRISKQGNPYIRRLLVLGATSMLRYARAKTAPGADWVNGLLERRPARLVTVAMANKTARIAWALLSREETYRAPMATA

SEQ ID NO: 496893 - protein, 360 aa, unidentified
MHKATISVAVAESGRNGEVRQVGVIENRVEVVLKLTKRLNEGGRRLSFCYEAGPCGYGLHRLLSRCGHDCVVVAPSLIPTKAGDRVKTDRRDARMLAKLHRAGELTPIWVPDAAHEAMRDLVRARATAGRVLSKARQHLQSFLLRHEWIYRGTRAWTLAYRRWLTTVRLDHPAQQIVLQDYIHAVQDAEARLARLTGQIEELLPNWTMAPVVKALQAMRGVAQIVAVTVVAEVGDFRRFTNARQLMAYLGLVPSEHSSGGSTRRGGITKAGNVLARRVLIEGAWTYRMSARISRKLHDRNEELPTVIRDIAWKAQVRLCGRYRRLAAAGKAKVIVTTAIAREMVGFIWAIAQIAQPAFAG

SEQ ID NO: 496894 - protein, 268 aa, unidentified
MVAQPVFVGIDVAKAALDVAVSPTAERWTLAYTEREVAGLVPRLTALDPALVVLEATGGLEGPLAGALAAAGLPVVVVNPRQVRDFAKATGRLAKTDALDAAVLAHFAAAVRPTPRPLPDAATQSLAALVTRRRQLVEMLTAERNRLGSAPRVLRAEIQAHITWLKRRLGRLNRKAIAALVGVAPLNRDSGTLRGRRMVWGGRAAVRAVLYMGTLVAVRHNPILRAFYQRLRAAGKLPKVALTACMRKLLTILNAMLKHQRPWNPNYA

SEQ ID NO: 496895 - protein, 410 aa, unidentified
MHPKLKLVFSGVDIHRRTHSAVFINAFGEKLGEIKFENKPSAFEGFLKQAKKYLKRGQSFAWGLEDCEGSGRSFAIFLKSKGMTVKKVSSNLSSSERKSNPANGKTDFIDAENVARVMLTRLDTLPDFLQSDIYWTIGTLVRKRASIVNDNITLKNQVQSYIIQHYPSYKSFFSVFDCATGLEFWERFPSPSKLKGITEEELGTILYQKSSGFFDVVKARSILDTVAKDGDTSTEFQESRDFIVSSTIKEIRHNNNEITKIEKEIKSLMKTLPYKLETMKGIDFVTAAAIIAEVGDIKRFANADKLAKFAGCSPVSHSSGDTERNFRNKYGNRRLYYIFQGIAARNISAGRNKKKPVNGIFYEYYHKKISQGKTSGQAIKSVTRRVINIVFGLMKSGKPYIPPQEENIKG

SEQ ID NO: 496896 - protein, 356 aa, unidentified
MSEGSWVGLDVHARSVVAGVIDQGSGEVRSLRVPPGNDGTVAWLKTLPTPVRVVYEAGPTGYRLARACAGAGIKCVVAAPSRIRPAADRVKTDRRDAERLARLLRLGEITPVRVPEPEEEAARDLVRAREDARGDLMRARHRLSKLLLRHGMVYDATAWTRAHDAWLRRQRFQSGPLAVVFDECYGRMLDAKTRRDALDRAITELAGAPPYVDVVERLVCLRGVSTLTAFALSVELGDWNRFRPTSLGAFLGLTPSENSSGERRRQGAITKAGNSHARRLLVEAAWHQRRPPRLSVTLERRRTGKSLAVRAQADRSARRLHGRWHALEGRGKPRTIVVVAVARELAGHCWALATME

SEQ ID NO: 496897 - protein, 396 aa, unidentified
MRNDVTIYVGIDFSKEKFNACLLMEQGVMGESEFPNTKTGYLKLTKWVKNTSELGRSFDPFLVLFCGEHTGTCSIGLCEYLYSKGMKIWLESALKIKYGSGLKRVKDDKADAEMIAYYAKRFYEPGSCALFEPDSTNLKTLRTLYQFRNRVVCDRVAIGNRISSGAFDCSTLVKNRMIKHHKEAQKDEKDIEKEMIKLMETSAELASNYQILISFKGIGPITAAALIIYTSNFKKFDNPRKFACYCGIAPFGKQSGTSINTKPHVSRFAHIGIKAAMVQACKSAMQHNAVIKAYAQRLYAKGKHEGIVMNNVKNKVMHIIFKMIQTQTLWEQEYQQKHTKECKPIPGKNGIGATEAAPIINATLKTSSSVVECTFLEKHSFQKNSKKTSSFSCVET

SEQ ID NO: 496898 - protein, 393 aa, unidentified
MLKISVSCLAHRGDIMRTDIEERVLAVSLELAAAKWKVALHDGHREQPAVHTVAQPQASARLQEVLDLIEQHKKKWSLPAGLRVVVSYEAGQDGFWICRALQAHGIKCYVIDPASIPVERHKRRAKTDRLDVIKLVINLRAWLRGERDRMHVVHAPSPQDEASRHLMRDRGQLQKEVLQHRDRMRKLLATFGCWDEVDHKHFAGRLARDEVKCHDGAPLPPEMRERLLRECERLALAQQQLTALEKTRQASLPAPARNRRDDLARLKGIGEVGASRLALELFWRDFSNRRQVGACTGLVPQPYDSGESQVDQGISKQGNRRVRALLVEMAWCWLRHQPDSALTRWFNARTQSTGPNRRARRIAIVAVARRLAIALWRYLKDGEIPEGARLKSA

SEQ ID NO: 496899 - protein, 440 aa, unidentified
MKLKIVNPNAAGIDIAYGEMQVCVPEDRDGENNRCFGSFTCDYEEIASWLKACGITTVAMESTGSYWVGLYFFLEEKGFDVLLANAKDVKNVSGKKTDEADAEWIMLMHSYGLLKPSFHPDAAARNIRELARHRDNMLRSAGKEVQHMQKSLVLMNIKVDTVISDILGKSGKAIIEAILEGNHDPKSLAQLADRRCKASRETIEKSLEGTWDAVHLFELKQSYDLYKYIHTQIADCEAEMDRMLSDYTDGCGTDMTGYKATEKRVAKKNAISFDAEKHAFSMWGVNIMEMPGMSLGGLSVLMGELGSGFVEKFPSAKSFCRWCNLVPNNKISGGKLLSSKVPKQKNRVGQVFRLCANSVKGVKTGLGVYFRRQKSKGGHLQAIVATANKMARIFYTMVVSKKTFDETKVGIDEKTLLQRKINIAQRSLEKLNLRLSVAQG

SEQ ID NO: 496900 - protein, 340 aa, unidentified
MTEFTRIGVDTSKNVFTLHGVSANGEVMRRELRRPKFLAFFERITPTEVALEACGSSHHWGRMLQAIGHRVRLIPPNYVKPFVRRSKNDRNDAEAICTAAAQPAIGSVPVKSVQQQADAMLLKVREQLKGQRTGLVNALRGHAAELGYTEAKGDKGLGRLRQAICGAPEQDVPVAAKQALALLGKQIDDLDTRLAEIDGQLKRQFAADPQSKRLSAVPGIGIITALTLTRTVDMPQFRSPRHFAAWLGLVPKEHSTGGKHRFGGISRAGNERLRSLLVVGATAVIRHAKAGGKGLMAWLNALLERKPRKLAAVALANKMARIVWAMVTRGEDFRLIPQAG

SEQ ID NO: 496901 - protein, 353 aa, unidentified
MNEDKYIAFDVHQETTVVSVLNAAGRELGTAILPTQAQALIGYLETLRGRLHLTLEEGTYSAWLYDLLEGRVGELVVCDPRRNALLREGNQTDHQDARKLADLLRTGMLRPVYHGSRSLRNLQELAHAYQALVGDTTRVMNRIKAFYRSRGIDCAGRGVYSRKQRGSWLERLPGGASRLRGELLHEQLEELRKLRRKARRALLAESRKHTVAARLREIPGLGPVRVALLIAALQTPHRFRTLRKLWTYAGLGLVQEGSSEYRWVEGRAVRRHHALQLRGLNRNHRPGLKEIFKSAALAAIRQPGPFKDYYQVRAQRGVDPAILRVTVARKLAAVTLSLWKKGGRYRAEGVKQA

SEQ ID NO: 496902 - protein, 361 aa, unidentified
MSGTMTWVGFDVHARSTHGAAIDTMTGELSRLRFGPGIEGPLAWLAELPGPVRACYEAGPTGFGLYRAATAAGIGMQVIAPGKTPRGPSDRVKTDRKDAELLARLLLAGSLTRVVVPPPEVETARELTRSHDACRRDLMNARHRVSKMLLRHGRVYPKSTTWTAEHRRWLSAQQFPEPTSDLVFADLIASVDGLTSRKAAIALSLSEVATDERWWPTVSRLRAFRGIDTLTALSLHLELGGDWKRFERAPTLSAWLGLTPSLSQSGESSKQGAITKTGSTLARRLLVESAWHYSRQPRLGATLANRQAGQPDHILAISNRAQQRLFKVNRAMKARGKPHNVVVVACARELAGFLWAAVTAD

SEQ ID NO: 496903 - protein, 438 aa, unidentified
MSNKVIFNLDDLFISVGIDVGADFSWMSIALPNQQFVGKPYKILHNSIDSLTTAVSKIKEAEELYSLESRIFLESTGIYHYPLFCYLRDKGFNCSVINPIITKNSTNINIRKVHNDRFDSKKAALVGLKPDLKVSLMPSDLALNCRNLCREYYDLMNNRGAYVNKLQGELRMAFPQYLGIFSKVTINTSLTLLETYTSPSAFLEADKQEIIDIIKSTARFGLTYAQNKYNAIIQAATDANQFGYIIDSNIKRIRLYISFIRKYDEEINNILESLHELVDANEDADFVKQIHLIETFKGAGFLSAVSIMGEIGDFSAFSKPKQLFAYFGLDPAVKQSGKFEGTKVQMSKRGSAIARRVIHTLTLQSISISRNGEAKNPVLREYYLKKCDSKPKLVAMGAVSHKVCNMIFAILRDNKSFEIITPQEHIKQYNAAKCDIAA

SEQ ID NO: 496904 - protein, 414 aa, unidentified
MGREIWVGIDWGNEEHQFCVLDKSRTVVLEDRVKHSAEGLRSLVAKVLSFGTADKIAVAIETPRGPVVDAFLDRGIAVYALNPKQLDRFRDRHSLAGAKDDRRDAFVLATSLVTDERCFREARIQDGRLVELRELVRLHEDLAAERIALGNRLRDQLLRYFPQVLELGSVYEDTWIWRILDLAPSPAAAEKISRAKVEDVLKKHRIRRLKVDDVLRILRAGALVVAPGVTAAAIRHIGTLLPRLRLVKEQLGSCTEDMDRLLDALEETSAQVGEQKVEQRDVQVVRSLPGVGTHVGATLLAEASSALQARDYHALRGLAGVAPVTKATGKRSGHFAQISMRRACNERLRDAVFFWAFASLTRDPRARALYARLRASGHNHARALRGLGDRLLAMLVAMLRNGTIYDASRRQAPA

SEQ ID NO: 496905 - protein, 425 aa, unidentified
MGKTIPVCCGVDVHKKFLIATILTGDYLIPQFIQKHFGTSYRNLLAFRQWLLENGCKDVCMESTGKYWVPVWNVLEGFVRVVIANPKWVSAVKGNKDDKKDSKWIGNLFRMGLVPASYIPGKDIRILREFTRYRSKLVSMRSSEKCRFQNAFTVCNLTLDAVVSDMFGKSATDIENYLLNTDSVDPEHCVSLLQRSLKKKADAVVEAVEGFHMTLEQKERVRIIQGHFADIDKRIGQIDEIVSHLVAEYESQISLLCTVPGIDRRLAITIISEIGADMSEFGSSRKLCAWAGLAPGSNQSAGKKKSVKITRAGVYLKPALVEAAHAAVKSTEKQPYFRMKYERIMKRRGKKRAIIAIARMILTSIYAMLSSGEVFNPSDLLKYDMPDELKKKMTLASAKDAVKLLVSLGVVAEGSISLESLALAG

SEQ ID NO: 496906 - protein, 400 aa, unidentified
MLSIGIDVSKGKSTVCGMKPGGEIVYTPFEVQHTREGMSELVSLLRGSGEEVRVVLESTGSYHCPVVAALLENGIFVSVVNSLRMKRFCSQSIRRVKTDQIDAMQIALYGLAYWQELQPTRLPENTYRELQLLARQYYQMTSILIKAKVDFNALCDQVLPGMQELMNDHAGRHKLSDFVLRYHHTAHILKMGETRFRKDYCKWAEKKGYRNRERMAALIFATAQNGIPVLPNAPSTQIVITEAIRVLHTVEASRDAILTQMQALAKTLPEYSLVREMPCIGDTLAPRLIAEIGDVRRFHSKRALIAYAGIDAPPYQSGKFCANNRHISKRGNRYLRKTGYEVMQSYVMHKPANDPIFTFIEKKRGEGKSGKLAMVAGLNKFLRVYYGKVTELYRSLPAIE

SEQ ID NO: 496907 - protein, 339 aa, unidentified
MSRYVGVDLHKNMFVASFYDADTGKHHLVTFRLKDVSKFKRRLRKTDILGVECTTNTRYFVEQIEGAVASVKVVNPSQFKVISRSVKKTDENDARVIAEFLSKDMIPEVRLKEKRLSELSSMAHTRDKLVKLRTALKNKIHNILNSYGIVLKKEQLSSDKALNKILKMRTSETARIELEVIISQIKNLNEGIKKLDSEIEDRGKTLPGHENITSIKGIGDKSGTILLCAIGNVNDFESEKKLASYFGIVPRVSNSNETMHQGRITKRGNKLARTTLVQCTLVAIRYSPYLRAFYDRIKAKKGSGKAIIATSKKLLGIIYQTLKNNWVFEDFPNFVLKSA

SEQ ID NO: 496908 - protein, 401 aa, unidentified
MILNFPNEGRTMSKVIMIGCDLHDRSMLLRYSVGEGAPVQASFFNDLSGRARMIRQMLALAKKVQSDRIVFAYEASGQGYGLSDLLDAHGIECYILSPTHLPKTPKSAKLKTDAKDAQMLLEQVRGFVLAGNHLPVVWTPPQRLRDDRELVRARVDAADEITRIKLQVLSMLKRRGIVKPTWYTARWSKRFMKWLRADIVAHLDSVVAVVLENLVDRYEFYHREQLKFDKAIQALATTDRYQASHQELRKLAGVGLLSAMTFLTEMGDVNRFHNRREVAAYLGLCPSSFESGKADNRKGRITRQGPSRLRKMLCQAAWVSLSHCEKSSQTYQRIKQGQSKRTKKALVAVMRLLSIKMWHRAVSCGVSDELWGRGGPHAPEADHPPQGNTAFVSVLPVGGGA

SEQ ID NO: 496909 - protein, 391 aa, unidentified
MIYVGIDVAKDKHDCIIKNSVGEVVFKTFTIKNNLDGFNDLYQKIESAMEDASKVKVGLEATGHYSYNLLGYLIDKGLPTFVINPLHTNLYRKSLSLRQTKTDKVDASTIASMLMSDVNLKSYSDTSYHNEELKSLTRYRFDKVRERAKLKTSISRLVCILFPELEKLVPTIHMNSVYSLLYEFPGAKQVANAHLTRLSNLLNEASKGHYDKDVAISFREAARASIGSNMPAKSLELKHTIKLIRELDSEIDEIEGEIKAIMDTINSPILSIPGISYRMGAMIIAEIGDFDRFDSADKILAYAGLSPSTYQSGQLDNCHPRMEKRGSRYLRYALFNATIYVCHWDSTFNAYLAKKRAEGKHYYVAVSHATKKLVRLIYQLEKNNQLYNKAF

SEQ ID NO: 496910 - protein, 460 aa, unidentified
MPDGGENSSTRRKKQIEGLPVVLHNVAGIDLGSEHHWVCAPVAGGISREVADFGATTAELIRMTKWLQACGVESVAMESTGVYWIAPHEVLEAAGLEVLLVDTRQLARVPGRDKKTDPTDCEWIQRLHSCGLLRGSFRPREEVCMLRTLVRDKANLVAECGDWLRRMQKSLDQMNVRVHRAVSDIDGVTGMAILRAIAEGERDARKLAKLRDTRCHKSEEEIAEQLSGHWREDHLFSLRQSLKMYDAIQQRLADYDREILQRLAAMQREELRQQPPPPVKNPQKAKNMKKRGEEPMREALFRMSGVDLTGIDAIGVETVQVVLSEYGPDLSRFPTEKQFASHVTLVPHKPMSGGKPVRKKRRNSASTRVAAALRMAAVTLRNSATALGAYYRKMARRLGGDVAVFATARKLATLIYRLLRWGQPYVDEGVEAFERRYQETRLKNLKAKVKELGYELVASN

SEQ ID NO: 496911 - protein, 411 aa, unidentified
MHDFKQLVFVGIDPHKYQHTAVMIDHWGEVFFELDFPNQPKGFEELLRTVNMHTPTGRIAIFGIEDTGGFGRPCAQWLTSEGLLVKGVNPVMSCSQRKRRPHKDKSDADDAAAVAKVVIAEFSTLPEVKKDDYYHALRQLVNRREQLVKTSTQCKNRLHKLLYEHYPEYKEFFSDSFGVTSLAFWHKYPHPSLLENIGPKRLGSFLQKHARNFSTSKAEHILSLVDKNQAMSIETEICISVIKQLVEQLQQLQTHIEEIEGLISGMLKQSDTHLNTLPGVGDITAASILSRVGPIERFSSASKLARHAGISPEENSSGRTTRQQRSKSGDRQLNAAIHRIALNQIGVCKNGTHRCPIAYEYYQRKISEGKTKLSALTCLKRRLCDIIYAMLRDKSNYIEPELKDEQELSVA

SEQ ID NO: 496912 - protein, 416 aa, unidentified
MRTLKLTLKGFIMFYVGIDVAKEKHYVCILDDTGEYAVKPFWIYADVLGLRELIKRFGDLSLDNDDFLVGLESTGAFSENLYEYITDSDYKAVLLNSYQTAKFRDFSTMKKIKNDAIDAFVIAELLSTGKYKESHISNDAYHSLKVLGRTKKSLMDKIKTIKREISTVMATVNPEISRVFPNIFTKTALEVIKVYPTATHIAQATPKKLTRLFRHIKGNNFSEDKARFLIDLAQTSVYAGRACKARASLLSSYIRILELYCQEKKQIEDQIKHLIATEIDTIDNSVENLQSIPGVSDKTISAILGECGDLRRFDSAKSFIGYLGLYPTQYQSGNSLSVGRLAKRGIPIAKHALYMAAVGSVLHNPQLNKIFRDKVSSGKSKKEALIILSKKIASIMYSIVKHNKPYQSHRVFIPNR

SEQ ID NO: 496913 - protein, 330 aa, unidentified
MITNEIVGIDVSKVKLDLYILRKKYCFTVNNNTSGFNDLIDVCCTRLNCTPKNLFFCFENTGRYSRLLSFFLSEKNVQYAMVSALDVKKSKGLLRGKSDRKDAKMLAHYAKQRAEYLSATKLQLPEVSQLRQLLNLRNKLLKHRTAYKSSLKDLLDIYRVGESDFIRGIQHFMVDQITKEIKVVEQRMDDIIASIPGWSVNVKLIRSVKGIGPVLTRVLIISTENFTRFSDPKKFASYVGIAPFEYSSGSSVNGRMRVHPCANKQIKCLLNIAAMSVIQYDGEYKSYYERRAKAGKNNMSTLNVIRNKLVHRVFAVVRNRKPYVDKTLIG

SEQ ID NO: 496914 - protein, 337 aa, unidentified
MEQYVGLDVSMRETSIAVRQNGKRVWRGKCPSDPRAMADVIRQRAPNAVRIVFETGPLSTWLYHALKADALPAVCIDARHAKAALDMAPNKTDANDADGLAQIAEIGFYREVRVKGYGPMLMRTLVGARSQLLRISIQLSNQIRGIMKTFGLIVPKGAGRIFESNARALLKTNEAVARVVLPLLETWRVVRARAAELDRQLIAAARTGPSYRLLMTIPGVGAITAVSFVAAIGVPENFKRSRAVGAWLGLTTRRYQSGETDYDGHISRRGDRHLRALVYEAAVAVLTRARTDCALRSWGLKLKAKVGFKRAAVAVARKLSVIMHTMLKTRAAFAAAA

SEQ ID NO: 496915 - protein, 312 aa, unidentified
MIKIICGVDVSKAWLDAHILPGAASGRFANDAGGVEELASFCRKQTVELVVMEASGGCERRPFAMLWAMELPCAIVNPRQMRRFAEAMGYLEKTDRIDAAVIAHFGQVKPVAPTPLPSTAAERLKALVARLSQVARDITVNKQRRSSAFDPDALASIEEIIALLNRQSRRLEGEIASLIDDDPLWARLNEAFRQIKGVAGRTVARLMAELPEIGTISSKAIAKLAGLAPIANDSGRRSGRRSIRGGRAGPRSILFLVAGIAAKYDPHLMAFHHRLKQAGKEKMVIRVALARKLLVILNAKARDARDEFAHAA

SEQ ID NO: 496916 - protein, 327 aa, unidentified
MRQAKSLTEKAKTTVAFDVCKAALDVHIRVDGKAFQVPNTYEGFDQIALVLADYDVSLVLMESTGGYEDAAACNFHSLGYDVAVINPRHGRNFAMAMGKFAKTDRLDAAILADFAAVIDTRPDRARFIKPPTDEERKFLSQMVARRRQVVDLLSTEKQRLSHADDYAKQSINKVVAFIESQLDEINKDVSFYLKKNYSGLSKMLSEIPGIGELSVGLLVGDVPELGQIGNRQLSAVIGVAPFNHDSGKMRGKRCISGGRQNVRNVLFMGVMSATRYNPVIKAFYDRLINKGKPKRVAYIACVHKLLRIINAMVRDGTSFNPDLHAVS

SEQ ID NO: 496917 - protein, 319 aa, unidentified
MLIGIDVAKAELVVAVRPSGERWTVANDERGVRTLVERFRQEAPELIVLEATGGYELLCVGGLAAVGLPVVVVNPRQVRDFAKATGQLAKTDRIDADILALFAERVRPAVRPLPDADAQELDALLARRRQLIEMLQAERNRLGQVFGRGKRPVKKSLKSHITYLERELRLADTDLGDMVRKSPAWRERDDLLQSVPGVGRVLSLTLLADLPELGRLSRREIAKLVGVAPLSRDSGTLRGHRFVQGGRASVRAVLYMGALVATRRNSLIRAFYQRLLARGKAKKLALVACMRKLLTMLNTMVRTNQRWSADHISAALIPA

SEQ ID NO: 496918 - protein, 343 aa, unidentified
MDYFAGLDVSVKDTSVCIVDDVGKIIREVKVASEPEALLGVLKHTAYRFKRIGLEAGPLSQWLFSALGEANLPVICVETRHMRAVLKAQINKTDRNDARGIAQMMRVGLYRPVHVKTLRSQKLRMLLTHRRKLLQSKAIAIENDLRGTLRNFGLKVGIAGRTKFEARIKELVEDMPDLAVLVEPLLVVRRALREQIAVLHRRLLTIVRDDEVCRRLMTIPGVGSVVALTYRATVDVPARFRKSKSVGAVFGLTCSKYQSGEIDRSGRISRCGDEMMRVMLYEAAQSMLRSKKWSWLKAWAMQVARRCGMKKAIVALARRLAVIMHRIWTDGTEFCWTREAAAA

SEQ ID NO: 496919 - protein, 343 aa, unidentified
MKIAILGIDLGKNSCSVVGLDHAGTVVKRRRMRPESIPAFTRTMPACTVAMEACCGAHHFGRLLRSQGHTVRLISPEYVRPYVKAQKNDDRDAEAIAEAATRPTMRFVELKSEEQLDMQTLHRVRDRLVGERTALINQLRAILLERGCAVPQGRRKLEQHLAAMPDPDNDTSLSPRVRRLIDDMRAEWLELDRRIATFDNEFAARARNDADARRLTTIPGIGVLNATALVAAIGNGETFARGRDLAAWLGLVPRQVTTGGKPRLVGITKRGNKYLRKLIIHGARSALPVLASGPTPLGEWLRALMKRVHKNVAVVALANKLARITWAVLRRGEELAATARAAT

SEQ ID NO: 496920 - protein, 402 aa, unidentified
MTYDYVIGMDACKYFHYACVLDIDGTQVLSKRINQNEQSLRALFSVFSAHDHKVLVVVDQPNNIGRLTVAVAQDIGIDVRYLPGLAMRQLSRIHAGNAKTDIRDAYIIAHAAKNLPESLRSVDRVEEAFLQLKVLNGIDEDLARSYTRLINQIRSALVGCYPQFEQALRGQIIHRKWVLHLLARYGGPTKIKRLGKAKAAAFARRYKARNPEPVLDAIFAAISEQTVTIAGAHYAEMGVAMSAKDALLKLEHRQQIEKEVIELINDIPHTQFLLSMLGIGPKTAAQILMTAGDMSDFPSAGHLASYAGLSPRTNQSGTSIMSNSLNRAGNKKLKNALWQSSFASIRFHERSRQFYERKRREGKRHNAAVVALARRRLNVLYAMMRNHEHYHDPAPSQEDLAA

SEQ ID NO: 496921 - protein, 335 aa, unidentified
MNQARMHVGVDVGKECLDICYPDGSKEHIGNTKRSRAKLIRKARAMSAIVSFEATGPYEEKLSDECLAAGVPAVRLDAWKTRKYAESQGMLEKTDAIDCEMIRDFAASLKPEQLRFVRPMSDGYRRLKRATSVRRNLIKAKTLVVNQLENILDKDVRASVSRVIDALERQIEKMDALCTEAIRSDDKMNALAVRFEQVVGVGPVLISTMLSSCPDIGSFTSKGIAKMAGVAPIENKSCTIRKKSKPRRGRRELRSALYMAAVSACHSNHLLEPVYKRFVDRGMPRRVALIALARHIAILMNYIAKYPDFNPAVDPKKAALLALPKRKPGRPRKNP

SEQ ID NO: 496922 - protein, 343 aa, unidentified
MGEVSTIGLDIAKSVFQIHGVDADGTVVIRKRVSRAKILEFFSDLPPCLVGIEACPTAHHWSRELQGLGHAVRLMPPSYVKAYLKRSKNDANDAAAICEAVQRPTMRFVPIKTREQQAVLMLHRARQLLVRQRTMLSNAIRGHLAEFGIVSAKGRNGTADLLTIIADAKDDRIPPAAHTCLDALGRQYNRITIEIGEIDKRIHAWHRSCEASRRLEQIPGIGPIVATALVAEIGDWNAFSSGRSLAAWIGLVPKQHSTGGKDKLGHITKQGNRYLRWLLVTGAMAVIRYAQKHGTKRAWLIRLMGRRPIKVAGVALANKIARIAWAIMVRGERYNEPKLLLAA

SEQ ID NO: 496923 - protein, 370 aa, unidentified
MRFVGIDLHTNRFTCCYLSDNSKEKQTESFELDPVGLRKFYSTIDKDTYVLVEATINTFSFVALFKDLVKEVIVANTYQLKSVGIPGKKTDKLDAAKLAEKLKAQIISGVEQIIPVTIPPKEIRDLRALFATYRILRKEIGQTKNRIHSLLKENLYPFTKEYIFGKKARKEIRNISTDYLLSFQINLLMDTLEQLEEAFEKLVVEIMKAGAQFMPQIEILTSMTGISVITAIAVIADVSDVSRFKNSKHFASYLRSAPRVESSNDKTIIKSTTKAGRKLSITLLSQSLNHFRDNNKILNQFYERSKLGKKKGVVRMALCRKVITQVYQMLKKQEYHYFCNPVLHEKKLTEYKRFLKGENFIFSENFQISA

SEQ ID NO: 496924 - protein, 417 aa, unidentified
MSTDVRFFGGIDWASETHQVCLVAADGKIIGERAFAHGGAGLAEMCDWLVTTSGEEPPTVAVAIEVPHGPVVEILLERRFQVDAVNPKQLDRFRDRFTVAGAKDDRRDAYVLADALRTDRHCFRRLTVEDPVVIELREWSRMSEDLSQERNRLANRVREQLWRYYPQALELGDDLAAEWFLDLWALAPTPAKAARLRESRVASLLKAHRVRRIEAAEVLRILRQKPLVVASGTVEAATAHITAVAARLKLVNQQIKQAHRRLDELADKLAEGREEDASGQKSKQRDVTILRSLPGVGRIVLATLLGEAAEPLRKRDYHALRTLSGVAPVTRRSGKRCVVLMRQACHLRLRTAVYHWARVAIQHDVRSRARYAELRKRGHSHGRALRSVADRLLAVACAMLKSQTTFDPEHAVEAVAA

SEQ ID NO: 496925 - protein, 382 aa, unidentified
MNENAKSTVSVYAAIELSKSTWLVAVLSPSSDRVKLRQVRGGDTAALVGMLESTQANAAAVDGRPTEIVVCFEAGYEGFWLARFLQKRGIRTSVLDSTSFLVNRRSRRAKTDRLDAESMVRMFRSFDQGDRTVCREVRVPTPEEEDAKRLDRERLQLSAERTRHVNRIRALLNLHGIREVKALWGGDWRKWLQVVRTADDQPLGKFLAAELTREFERLELVHAHIRDLDRQLEESLKGCTLGIPNVDKVHRIATLKGIGRLSAILLVSEVFHRQFANRKCLASFLGLAPSPYASGAVKHDQGISKAGNRFARRLLVELAWCWLRYQPASALSQWYRSTFGAGSGRSRKIGIIALARKLAVAIWHFVEDGLVPQGASLKEEAL

SEQ ID NO: 496926 - protein, 418 aa, unidentified
MEVEHDEQEIIQRVAALDIGKAEVVCCVRVPGPGRRRMQEVRTFLTMTRSLLVLSDWLRSLGVTRVVMEATSDYWRPPFYLLEDSFETWLVNAGDVKHLPGRPKTDRLDAVWLCKVAERQMLQPSFVPPPPIRILRDLTRYRVDLVTARTAEKQRVEKLLEDAQIKLSVVVSDIFGVSGREMMAALIAGERDPRVLAEMARGRMRSKTARLVEAFIGRFSDHHGFLLTTMLARIDALSADIEAVQHRTEQELAPFASAVARLDEIPGIGATAAAVIIAEIGVDMTRFPTPAHLSSWAKFAPGVKESAGRKKGNGATGHGNRYLARVLGDAAVNAGRTDTFLGERYRRIARRRGKKRAIVAVGRSILVIAWHLLNDNNTQFRDLGPGYYDSRVNLNRKMRNHVRELQALGYKVTLEAAA

SEQ ID NO: 496927 - protein, 355 aa, unidentified
MQKYKFSFKGQNIYVGIDVHLKTWHVTTLTESGCKYSFAQHADAKELFDRLNKKFPDAQFKSAYEAGFCGFSAHYALTDLGIENIVVHAADIPTTGKEKALKTDAVDSEKIAWSLKRGELTGIHVKDRAFMDDTNLVRLRQRFIADLARQKNRTKHLLYTQGVTYPERFRKSSSHWSRNFMSWLRDEVRLLSEEKRTLLLLCEQVENTRKAILRVTREIRCLSMTDRYKENYNLLASVPGFGLMTSMSMLTELDNDIMRFPNERSFVPIMGLIPTCHDSGDRKSNGEKINRGNKLLGPLIVEASWVTIQRDAEMGAYFSNCCQSMKPHKAIIKVARKLACRAYAVLKTKTMYAQP

SEQ ID NO: 496928 - protein, 357 aa, unidentified
MKTIQVKEKPDFTGEPIYIGIDVHKKQWNVSIMSSFMEHKTFTQPPDANVLSNYLKVHFPNASYFSTYEAGFCGFWIHEALKKEGIENTVVNPCDVPTTNKEKKQKRDGVDSRKLCRSLRERALTGIYVPTQEQLEDRGMMRLRKKLVSDIGRCKNRIKGMLNFYGIKLPVEYDSDYWSKAFIAWLVGLELTQATGTLSLRILVEELKAIQTLKKQVERHLIQLARQKYATQVELLRSIPGIGSIAALTFITELGDMKRFKRLDELCSYVGLVPNVHSSGDTEHVGHLTMRRNPYVRPILIQCAWVAASKDPVLMKAHQDWCKKMTANKAIIRVARKLLNRIRFVSMNEKKYELMNV

SEQ ID NO: 496929 - protein, 441 aa, unidentified
MKNEPTQNNNSIPAADPIAAWVGLDWADKKHSLFVRPTDGAATTACELEHKPQALDQFFLQLHQKHPQGRIAVCLEQSRGPVLYALMKYDFVVIYPVNPRCLADFRRAFKVSGAKADPTDADLLSELGCKHHQRLRALVPEDLATRQLRFLVEARRDFVNKRTALANELTATLKSYYPLALEVVGENLEGPMGLEFLRRWPNLAKLQGAKPSVVRAFFYAHNSRSEEKIAARLEAINTAVPLTEDPAIVGSLQLQAAGLARQLAAVQKTVAEYDQQIRVVFEGHSEKWLFEKLPGAGPVLAPRVAAAFGTIRTNLGAALDLLCLSGVAPVKRQSGQQETVHFRFARPKFLHQSLVEFAKCSIGQCDWARLLYEKQITQGKSAYAAIRVVAFKWVRILWRCWKDGRAYDEVKYLHSLKKRGIKLYESLYNALPAETGPVNNS

SEQ ID NO: 496930 - protein, 459 aa, unidentified
MENEKKVRKTKVVPALLAIRPEVAGIDVGSREHWVCGPSLASGKPNVRVFGTTTAQLEDLVAWLKDQGVKSVAMESTGVYWIPVYELLESHGIEAVLVNARQLHNVPGRKTDFADCQWIQLLHSCGLLRGSFRPGPAITAMRAVHRHLANLVEQRTQCVQWMQKALDQMNVQIHRAVTDIAGTTGMAIVRAIVAGERDPASLSALRDPRCSKSAEEIARYLTGTWRDEHLFTLGSTLGLYDAIDELIRRSESRLFDAIQALQSEERKTAQLPAHPNPNKERSLRSHGDQPARTALWRFAGVDLTRIDGIGPGAAKIVLTEIGADLSAFPSEHHFVSWLRLCPRTPISGGKLLKKRRNGAGANRVANALRMAASSLQRGKTALGAAYRRIARAKGALVAIFATARKLAQLVFRMLRYGQDYTDIGEATYQARFEARRLVGLKDAARSLGYSLTKNPAPAP

SEQ ID NO: 496931 - protein, 317 aa, unidentified
MTESVKVNVGIDVSKDFLDVHVGDVALRRVPNRSSGLSVLKRILSRYTVSLVLLESTGGYENLAVTYLQSLGYDVCVINPRQARDFARSMGRLAKTDKIDAHMLCRLADVIDASPERARFVKPLTDERRQRLVSMVRRRRQLCDLMIAERNRRAKTDAYGSESISTVLDFLTDEVARIDRDIAAHVGSCFSDISSLLQSFTGIGPVTASTLLGELPELGKLNRRQITALVGVAPFNRDSGYMRGRRRISGGRSGVRNMLFMAALSAVRFNPVLKAFFARLVAAGKPKKVALVACMRRMVCILNAMLRDGSRFKVAVG

SEQ ID NO: 496932 - protein, 412 aa, unidentified
MEVLYASCCGIDVHARMLVACLIKDGKKEVRTFSTMTDDLLRLLDWLVAEGCTHVAIESTGVYWRPVFNILEGSLEVMLVNARDAKGFKARKTDVIDAEWLADLLRHGLLKASFIPPLHIRELRELTRYRESLVREQTALANRIQKLIESGNIKLGQVVSDALGVSGKQMLRALAAGETDAEKMSELARRRMKRKKPELKRALSGRLTEAQRWVLTELLDQYEVVEAAITRVAEKIGAEVEQAADPFVSEAVTLLDTIPGVGETVAQTIVAEIGVEMERFATDGHLASWAGMCPGNNESAGKRKSGKTSKGNRYLRAALVQAAWAASHQKGTYLSAQYQRLVKRMGKKKALVAVGHSILVIVYHVLANKAGYEELGGDYFDRQHADKQRQRLVHQLEALGLKVTVEELAQAA

SEQ ID NO: 496933 - protein, 386 aa, unidentified
MQASTVGTPTASHYGTIFITIELSQKSWLVTLHSPDQDKLSRHQLAGGDHAGLLALIGRIRDRAARALGGVPAVASCYEAGYDGFWLHRLLLAAGITNYVLDPASIAVDQRARRVKTDRIDGETMLRTLMAFLRGEPRVVRIVRVPSAEQEDARRASRERDRLVKEQTAHTNRIKALLRLLGMAIGNPRRRDWLSWLATQRDWQGQAVPPQMLGEIRHEHARLMLVRERLDALAKTPAQADPTPAAAQMTERSELLLRLKCLGPAFATTLTNEVFYKDFRNRREVASYFGLTPSPWRSGGIDRDQGISKAGNPRARCAAIELAWLWLRHQPNSKLTLEYRKRTLDAGKRIKRVAIVALARKLVVALWRYLTTGLVPEGAVLKTVKV

SEQ ID NO: 496934 - protein, 409 aa, unidentified
MDVIHPRCAGLDVHKGSVVACARAVAGGKVQQEVRTFSTTTQGLLELADWLRERECTHAAMESTGVYWKPVWHVLEDSVELVLANAMHIKNVPGRKTDVNDATWIADLLAHGLIRGSFVPPQPVQEMRDLTRTRKQLVREAAQHSQRLQKTLEDANIKVASYVTDILGKSGRAILDALEKGETDPEKLADLTGGRLKASRKELVEALRGRLRPHHRFLLKLHLQQIDTLDKAVREVEARLGEALQPFRDLEGLLTTIPGVSATTAQVILSEIGTDMSRFPTAAHLISWAGLCPGNDESAGKRRSTRLRKGGQWLKATLVQSAWPAAKKKGSYLKALFHRIKSRRGPKKAAIAVAASMLTAAYHMLKNGVEYEDLTESYFDRRDSTKLAKRLIKRLEGLGLAVTTSPLAA

SEQ ID NO: 496935 - protein, 408 aa, unidentified
MDHNLEFFAGIDWGSERHRVCLMNRSGQTLAERWIEHSGDSLAELTAWFRQQTSESPSRLAAAIEIPRGAIVETLLEHGFVVFSINPKQLDRFRDRYSPAGAKDDRRDAFVLADALRTDMHCFRPVRLDDPVLIRLRELSRLDDELAQEQNRAINRLREQFHRFFPQLLQLSECADEPWLWALFELAPSPLGAARLTEAKIARLLQQHRIRRITAAQVRAVLKTKPLTLAPGAAEAAAEHALWLLPRLRLLDQQRTHLGRRIRALLDELAAPVEGQNEHRDAAILLSLPGLGRKIAATMLSEASQAIADRDYHALRCYSGAAPITHQSGKKKVVLMRRGANERLRNALYHWARVSVVFDPPSKKRYAAMRACGHSHGRALRGMADRWLKVLTAMLTTGTLYDPKRRAA

SEQ ID NO: 496936 - protein, 355 aa, unidentified
MEYGAIDLHKKESQIRIITETGQVIDHRILTRRERFTEVFGGRPRMRVLVEASTESEWVAQHLEELGHDVIVADPNYGLMYGHRSRRVKTDHRDVVGLSEACQHGTYRRAHRRSAQQHEVQCRLNVRQELVEARTRAISLTRSITRAAGLRLRGGRTETFRMRLAALAMPSAMTVTLSPLSRVIEVLDHELATADAQFEQLVASDPIVKRLTTLPCIGPITASAFVAALDVASRFERAGQVTSYLGLVPQEYSSGETQRRGCVMRSAHPQVQSLRVQAAWRIRRSTDPRTAAFRLWAQGVAHRRGTKVAMVALARRLARTLFAMWRDETDFEPARIRVGRSTGDVATATTAAAPM

SEQ ID NO: 496937 - protein, 344 aa, unidentified
MEHYAGIDVSMECSSVCVVNASGKIVREARVASEPEALIGWFGPLGPGLARIGLEAGPLAQWLYAAMKQAGLAVELLETRHVYEAFKSMPVKSDRNDARKIAQLMRLGWFRPVHCKSITAQEIRAMLTARKLVQSKLLDVENSLRGILRGFGLKVGNTTRTNFAGRIDELVKAHPNLQTIAQALLRARAVLLAEFSGFEKRVRTMSRLHDQARLLMSTPAVGPIVSLTFACAIDDPCRFSSSKQAGPHFGLTPKKYQSGETDYTGRISRHGDASVREALYEAAHIMLTKPIKRCSELKSWAMRIARRAGVNKAKVALARKLAVIMLRMLKDNVPFNPAAKATMA

SEQ ID NO: 496938 - protein, 375 aa, unidentified
MDSIIYLGIDVHSTNFTFCALSVTLGEAPKVIAENQTEADGICALEMVEYLKKQYGENTNVICGYEAGCLGYTLYHTLESHGIECKILAPTTMPSPRGKKRIKTDKRDAKVIAENLAYNTCSFVTVPEDGDMEIRDFIRMRDDHKLALKKVKQQILSFCMSHGYRCDSKHWTIAHIKWLRTFECTKMHREILNEYLLTFDSLIEKINRFDSRIEELSFGEKYHQDVKNLSCLLGIKTIGALSVLVETGDFTRFPTAQKYASFLGLVPGEHSSAEDVNRLGITKAGNTHLRKILIEASQSICKGSPGYKSKALRARQQGCDAKVIAYADKANERMRRRYYKLISKGKKRNVAVTAIARELACFIWGIKTGNIEIAS

SEQ ID NO: 496939 - protein, 464 aa, unidentified
MRRKSKQKTKTKTKAKEQEFVAMALVNPHAAGIDIGDTFHSVAVPEGVATPCVRQFGAMTCDLEDLVAWLEACHIDTVGMESTGVYWKPLFSLLIKHGFEVTLTNARQARNVTGRKDDDGDARWIQKLHSCGLLKSSYLPEDEQEALRTLVRHRRTMTQDSSRCILRMQKAMELMNIKLHTIISDLTGKTGLAIVDAILAGERNAENFLPLVDGRIKADPSLIVKSLQGNWRPEQLFTLGENYACYRFFQQHIKVCETAIEQQLKQYEASRNEGEIQQQEQPVINQESPRIKKKNKNAPFFNTRSYLERIHGVDVMAIYGLSELSALEILAETGTDMTKWATEKHFVSWLNLCPNNKITGGKLISSMLMKKKPNPASQAFRSAANAVQRSDHWLGDYFRRMKARGGNKYAIVATANKMATIYYKMVRYKQEFTPMDLNQYQQRYKQAKIAYLERKLQQLKNQAA

SEQ ID NO: 496940 - protein, 395 aa, unidentified
MQVMHPVCCGIDVHQKSIVCCILDGPLTSNEPKKYQTSFGTTTKELKAALDWILEHQVTHVFFESTGQYWIPLFNIFSDSDLELVLANPQHIKNVPGRKTDVKDAEWIAQLGRCGLINQSYIPSQEVLQLRYLTRYRISVKQRLTQIKNHIHVILQRGNIKITSYLADIFCKTGQALLTLFINGEVINEDNVESCIHGRIKASTKQLIEAMEGKLSTVDRFLIKKCLEEYQLQKKISDELNKEINEYILEHFPEEYQLLLTIPGISDNCCATILAEIGPNVDAFKTDKKLASWAGMCPGSNESAGVKKSSHTTQGNKYLKQALVMSVLSVQRAKEETFSLFYQRISSRGSKMKAIIACGHKMLRIIYKILQSHQPYNSQKALGLRQQTNALSLTI

SEQ ID NO: 496941 - protein, 352 aa, unidentified
MNNYKRFIPEGKTVFIGIDLHQKSWHVTALVEDQKVFSSSISPDIEALFKLLERFGHNQIEVAYEAGCFGFWLYESLMANSINCLVVPPSLVPVETGNRVKTDRRDSRKLAYLLAGGMLKEVWVPNPKQLAHRQVTRRRRQLIGDRVRVQHRIKSELRCFGFPVPVSRGPWSRTLVRWLKAIRFPDYYQQQSFKQLLIEYENLCKQFREQTRLLEQLAATEAYASQVELLRTIPGIGLISAMELLLELGDISRFARGEQLAAYLGLTPSQYSSGDKIRLGRITRTGKASLRATLTEAAWRTLKKDRELQTVFVNLKQRCGSKRAIIAVARRLALRARRILLDQKPYNLVEAA

SEQ ID NO: 496942 - protein, 372 aa, unidentified
MASIIYVGMDVHTTNFTFCCYTADSDRGFAVAQTEPDYRQVIKYMERVQKQRGEECKFVCGYEAGCLGYSLYHQLTRCGVDCVILAPSTMHQEKGKRIKTDRRDAENIARCLAFSLYSPVYVPTTEDDAVKEYIRMRDDIKADLKRVKQQIIAFTTRHGFAFDGKSYWTQKHLKWLEALVFEHPLYKETLQEYLILYYMLDEKVAVYATRIEEMSHLEHYEENVQKLCCFRGVAAHTALSLLVEVGDFQRFRSAKHFAAYLGLVPGEHSSSDKQIRTSITKAGNTHLRRLLVEAAQSYNRGAIGKKSAALKARQGGNPAEVIAYADKANERMQRKYYRIAFKSRHNIAKTAIARELACFVWGMMTGNISNAA

SEQ ID NO: 496943 - protein, 341 aa, unidentified
MKKFIRTAVDLGKNYFQVHGLGSEGGLSVSRKLKRSKVLEFYSQIEPCRVGMEACGSAHYWARELIAMGHEVVLIPPAYIKPYVKRGKNDAVDAAAICEAMSRPGMRFVPVKSADQQAVLMLHKTRELLVKQRTMSVNALRGHLAEFGIVAAKGIGRVDELLALAQADAALPQIAKSAVAGLAQHLEGLDQSIETVEEDIAKAHRQNPTSRLLDEIPGIGTLIASVTAASVPDPGVFKSGRDFAAWLGLTPRQNSSGGKEKLGAITKQGNRYIRKMLVTGATSVLRVAGKRKGALADWINALRARKPERVVAVALANKLARICWAIMTTGEGFRTDTYVKA

SEQ ID NO: 496944 - protein, 342 aa, unidentified
MDTIGLDLHKRESQLCILTDDGEVIERRIVTSRERFTAVLGGRPPARILLEASTESEWVARHLETLGHEVIIADPNFAPMYATRRRGVKTDRRDARTLAEACRLGAYRRAHRASDEQRHVRAELAVRDALIRTRTRTVALATALIRRDGLRLPSGGPAHTEAQLAALPLPPALAAELAPLRALWAPMNTQIAAADARLAHVAAGDPVVVQLMTTPGIGPVTAVAFVATLDDVTRFTSAHQVEAYLGLTPREYSSGEQQRRGRISKTGNARMRALLVEAAWRVLRTKDPAAAPLRAWAERIAQRRGPSVAAVALARRLAGILYAMWRDGRDYRTPRPSGVEAA

SEQ ID NO: 496945 - protein, 410 aa, unidentified
MNPLYVGIDMSSKSNVAYLMKPDGSKHSNFSIPNTRDGSRQLVKCILSAITSESLTDVVIGLEATSVYGDNLVCFLREDGSLAPYNKKIHVLNPKQVNKFKLSYNDLPKNDYVDSFVIADCLRFGRINKEVYLDDYRYAALKNLTRARFFAVQNLTREKQRFLNQLFKKYSTMAQEKVFSDTFSTTALAVYESFESAEALANMDLHQLTEFIIEKGKKRFPDPDSVAKAIRKAARSSYRLPKTVNDSVNQVLSISISSIRAMESQIKAFDKAIAEQMTLIPNTLTSVNGIGPVYSAGIIAEIGDINRFPNQASLAKYAGLVWSQHQSGDFEAQNTRLIHSGNRYLKYYLCEAALSLVRCDTEYRSFYHRKYNEVNQYQHKRALALTARKLVRLVFRLLKDNCLYRAPESK

SEQ ID NO: 496946 - protein, 423 aa, unidentified
MAAREKVGEPEFVAFVGIDWADQKHVWCLQAANSSKREGGELEHKPEVVEAWVSELCRRFGHGPIAVAVEQVKGALVYMLGKYECLHLYPVPSTMSASMRQALYPSGAKDDPRDADLLLQNRDKLRRLTPDNEVTRRVQNLVEERRKLVEEKTAQLNRLTGYLKVYFPQMLEWFAKLDTKLACELLERWPSLEELQAAAPAEVRKFFRQHRGRHPELTEWRLQGIGQAMSAIRDGAVIEAKGMVVQVIARVLRTLLEGIAALDGKITEAAEAHPDFFIFQSFPGAGAALAPRLLAALGSQRDRYASAEEVQKYSGIAPVTERSGKKKWVHFRWACPKFLRQSFHEWAGHSIAQSVWARAYDQQQRQRGKDHHAAVRALAFKWIRIVFRCWQVGAVYDENRYLATLAKRGSPLIPVSAAAATGL

SEQ ID NO: 496947 - protein, 438 aa, unidentified
MKKEISMQVVNSQAAGIDVGSRSHFVSVGQNPEDVREFGVYTEDHQDLIQWLTIQKITTVAMESTGSYWQTLFSALQRAGFEVMLVNGRQIKNVKGKTDVKDCQWIQRLHSLGLLTGSFLPSEQIEKLRTYQRHRNWLVEQCAKMTNKMQKALRLMNIRLDVALSDVMGKSGRKIVEAILEGNHDGKQLSLLVDARVKKTRHEIAKSLEGQWHEELLFELKDCYELYETFEKRIIGCDKQIELLLCGFTSSVEQEQQQQIKIKRAAKNQQKFNVPMLSYRFLGVDLFDIDGVSYGTVMTFISEMGNDIFKFKTSKQFTSWLRLAPNNKISGGKVLSSRTPKGKNQLATALRNAANSIGQMKKGALKSFFNRIAYKKGRTAAITATARKLAVIIWNMITKQQPFQTWDENAYIEKIKASVIYNMKSKMKRLNLTTSDLI

SEQ ID NO: 496948 - protein, 371 aa, unidentified
MKKSSMFVGLDIHKSSIEIAIAEAGRDGEVRSYGAIDGTLDALDKVVRKLVSKGCDLHFVYEAGPCGYDVYRHLTAQGFDCVVVAPSKIPRQSGNRIKNDRRDAQMLARLHRAGELTAVYVPCVEDEAMRDLTRSREDAKAMERNAKQRILAFLLRHGHSYSGKSPWSRAHFRWISLLKMPHPAQQIVLQESLDTLAGCTRRVDRLTEQIQKLSPQWRLFPVTQALQTLRGVSLIVATTTIAEIGDLTRFEGPPELMSYLGLVPSEHSSGRTTRRGSITKTGNGHVRRVLVEAAWAYRLPARVSRKLLIRQEGVSQEVCAISWKAQLRLCARYKRFIAKGKSHQLVVTAIARELCAFMWAIANEVQGPVKV

SEQ ID NO: 496949 - protein, 347 aa, unidentified
MSFYNSTHSHCCGIDLHARSLYVCILGHQGETLLHKEIPANPDSLLRLIEPYMDDLVIGVECMHCWYWIADFCEDQGIAFILGHALYMKAIHGGKTKNDRIDSYKIAALIRGGNFPLAYVYPRTMRATRDLLRRRTNLVRHGADLKAHVVNTTSQYNLPPNKVNLKNVSAREQLGRTFGDPVVQRNIDLDMAVLECYHRELSQIEWLLEKQAKKHRPIYYHLLQTIPSIGRILAQTILYEIGDIRRFESVQKFASYSRLIKCKAESAGKTYGTQGNKIGNAHLKWAFSEAAVLYLRGNPGAQKLLQRLQKRMNKAKALSALAHKLGRAVYFMLKNEKVFDEQRFLMS

SEQ ID NO: 496950 - protein, 331 aa, unidentified
MKFEEVIGIDVSKLTLDACIHSQQIFTQVPNTKKGYSKLLTWATKSTGCSMANVLFCFEHTGMYSYALACHMSEKQMNYIMVPGLEIKRSLGIQRGKNDRVDAIRIAQYAYRRREEVTTCQLPEKAINKIRQLLSLREKLVKQRAGYEATLKDLSDFIESSESKVLVGVQRNMVKALAREIDKVEKEIDSVLEASPDIMDNYRLITSITGVGRQTALYLIIVTNNFLSFDDHRKLASYAGVAPFANTSGTSIKGRTKVSPLANRKLKSLLSACAISAIRHDPEMKIYFNRRTDIGKHKMNSINAVRNKLLARVFAVIRRGTPYVPLCQYAA

SEQ ID NO: 496951 - protein, 433 aa, unidentified
MSFTLESIPIQRFIGIDSHKHYVMVGGMNQQRKWVLRPRKISMARFRDWAAKNLRPDDAVVLETTSNVWDIHDVISPLVSKTLVANAYKVRQIAEARVKTDKEDVKRLLTLLIANIVPEVWAPPIHVRELRSLISFRSRIGKQLTMSKNRLHSVVQRFNLIPPDGELLADKNQSWWLEQDFSELTALQLQLDLEIITHLEAQKNKIDQKLALLSNSQPWANDVVFLMQIPGFGLLTSMTILAAVGDISRFSHPKKLVGYAGLGAGIHESGQKHQQKSITKEGRKELRWALGQAAWAAVRSDPYWKEQYKRLSQHKHPNQAIVAIARRLLVSAWHILTKREPYRRSDDETIAYKMMTLVPMRDLVSTHGRNRTPRPHSPAVYQIWLASPRRWTSAHSYCSQRQTQTDCSLQRYCFPLTSAQFARIGLLLRPVYN

SEQ ID NO: 496952 - protein, 377 aa, unidentified
MTNCTRYLGLDVHAQTISAAIAEGRGRIRNLGKIPNRPGPVRKLIEGLGGPRGLKVCYEAGPTGYALYWQLTKLGVECEVIAPSLVPKKAGDKVKTDRRDAERLAQCYQSGELTPVWVPTPEHEALRDLVRQRAAAKTDESRAKHRLVKLLLRHGLREPNESRAWTHPWWRWVQGLKFEHEARQVAFADCVAEVLRMGERLARLDQAIERLVESVPAHMRAVIGALQAFRGLAKLSAVSIVAEVGTFQRFLRPTEMMGYTGLVPCEYSSGERAAKGAITHTGNAHLRSILVEAAWHARHRPWLNLRLKKVLPTLPAGVADIAWKAQERLHRKFTRMLYCRKHAGVVATAVARELVGFIWAVGCLVEAQHATTQARAA

SEQ ID NO: 496953 - protein, 370 aa, unidentified
MKYVGIDLHTNRFTCCYLIDNSKEKQTETFELDSRGLKDFYSTIGKDTYVLVEATINTFAFVALFKDLVNEVIVANTCQLKSVGVPGKKTDKLDAAKLAEKLKAQAVSGVQQIAPVTIPPKEIRDLRALFASYRTFRKEIGRAKNRIHSLLKENLYPFTKEYIFGKKARKEIRTISDDYLLSFQINLLMDTLEHLEEAFERLVVEIKKAGSLFMPQIEILTSMSGISVVTAIAVIADVIDVSRFRNSKHFASYLRSVPRVESSNDKTVIKSTAKAGRKLSITLLSQSLNHFRDENKNLSRWVEKISGHKKKGIVRMALCRRVITEIYQMLKKEEYHYFYNPVLHGKKMTEYQKFLGKDKKYFSKESRISA

SEQ ID NO: 496954 - protein, 388 aa, unidentified
MMLIGIDPHKSTHTATAVDPETNRDHASIRIDVTLQDYQCLLDWARQWPERRWAVENAKGLGHHLTSWLLARDEQVVDVAPSATARVRQLSRGAGRKNDRIDAAAAACVAALQGDARPVKPEGSTDALALLDERRSNLAQSRVRAVNQLHALLRALLPGGAPRDLSAAKAEQLLDTVVPAGSAELTRHTLAADLIAEIRTWDVKLKDNTKAMAALVAESESRLTDTPGIGAVTAARLLGRTGNPTRFATASAFAQYVGTAPIEIASADRARHRLSRRGDRQLNAALHTVAITQIRMPGTRGHTYYQAKLAEGKTPREAQRCLKRRLADHVWRTMIGDERRRTRTTGPGGQLGATTASSAAGPTPTAGSSDKSLPGPAKPEPTRPHQAA

SEQ ID NO: 496955 - protein, 408 aa, unidentified
MKVYMGIDWSQSKHDLCVLNPAGACLAQLVIAHAQEGFWQIEELRGQLGVSHAECTVGIETTHNLLVDFLWDQGYSPIYLLHPGLVKSSRGRFRQSAARSDPSDALLLAEILRTDQGRLLPWQPDQPLTRQIRVKINFVSFLTDNITRLTNRQRTLLLRYYPVAAELFSLLHSRIAQQFIRAFPSLQAAKELDLATLQAFARQHRYPRTDKLPALLAKLQQATLQAAPTITAACQTEAQALATLLLEMLAARKTLQREIRDLFLQHPDHAIYQSLPGTGAFLQPALLAKFGDDRQRLPTASRVQALAGTSPVTIRSGKRHSVQFRRACDHQFRHIAQQWARLSLRSSVWANAYYAQVRPRCHSDSHAFRCLANRWLAILWRLWQDRVPYDESYHLMQRARRSQPLEIG

SEQ ID NO: 496956 - protein, 414 aa, unidentified
MDVLHERCAALDIGKKDLKACVRTSNPSGRRSRRQEIRTFATVTNSLLELRDWLLAEKVTLVVLEATGDYWRGAFYLLEDCLNVILVNAAHAKGLPGRKTDVADAAWLCQLGECGLLKASFVPPEPVRHLRDLTRYRTSLTAERSREVQRLEKELEDAGIKLSSVATDIMGVSGRAMLAALIDGERDVHTLAQMAKARMRPKIPALVEALTGNFGEHHAFLCRLHLERIDHLTAAIGELSVRIEAEMLPFAQQIELLQTIPGVGRTTAEALIAETGGDMTRFRTAGHLASWAGVCPGHHESAGKHKSGRRRHGNRRLSAALGTAAMAASRTKDTTYLGARYHRLVPRLGKKKALVALEHSILTAVWHILTDNVAFHDLGGDYYAKHNPERAMRRLTRQANALGFTARFDPIEAA

SEQ ID NO: 496957 - protein, 339 aa, unidentified
MFDHYVALDWAMSNMAIARMTKVSNEIKVIDVPADIKELKIYLKNLKGTISLAFEETTTSHWLYTELKEHVDNLLVCDPYRNRLLSEGPKTDKIDAQKLVQLLRAGLLKEVFQSSDKFIELRRIVSAYEDVIKAGVRLKNQRSALFRAIQKNHKKETTLENNIDAFVLRGIDKGIEAYEEERARYQKEFSSLRKQHGNIKMVSNIPGIGEIGAVKVISRVVDAHRFKTRNHFLSYCGLVKLEKMSGGRSYGKKNPRFCRTMKAVFKSAALAVIGGNNALNDYYEHLLTEKKYADHDARNAVARKIATIAYGIMKSNKKYDPFIRKGKNADKIVDSNADL

SEQ ID NO: 496958 - protein, 321 aa, unidentified
MSRVLIGVDVCKDFLDAHARPAGLQQRFANDPAGIEQLVAWVRSLAPERIVFESTGPYQKAAVGALLAAGLPAVVVNARQVRDFAKGIGQLAKTDTIDAAILAHFGEVVATVVRPLPPEEILEFRDLCDRRGQLVRMLATEKNHRHAAQGCSPKVIKNIAKHIAFLQRQISDLEERMDRIVTASETFKAKDEILQSIVGIGPQVSRTLLVHLPELGNGSRQSITALVGLAPFADDSGTCSRIRHIRGGRAKVRSALYQAAVAAIRYCATMKGFYAALKARGKASKVALIAVARKLLVLANALLRDGVPYQARTNSVCPKNA

SEQ ID NO: 496959 - protein, 349 aa, unidentified
MDRTTYGLDIAKNVMQLLWIEAQTGEIGRKKLARAKLGEYFAQRLPVRVVMEACGSANHWARVLGKRGHEVELLPAAQVRPCVRSNKDDAADARAIWLAAQHGDIRRVPLKRVEQQAVLALHRTRSHWVSVRTATVNALRGLLYEFGVVLRGGRQAGLKALAEQRAQIDEQLPQIMRSLVDGQLHTLVQVQQRIEQLEHELAAQQQQLKKADELRRVPGIGVLGATALAATLGDGKAWRSAREFSASLGLVPTHSGTGGKVRMGHISKRSDPYLRTLLIHGARSVIEHAKDRPKWLQQMLARRRPNVVVVALANKMAPTAWALVARGRKYQRHWQSAKPGCSTAQAAAA

SEQ ID NO: 496960 - protein, 345 aa, unidentified
MKIIGCDFHPSFQQIAICDLETGELQELKLSHADGQAERFYRELGESALIGIEATGNCQWFLDLVQRLGHEVRVGDAAKIRASYVRKQKTDKRDAGHILKLLLEKRFPELWTPSAAMRDQRQLLRHRDKLVEIRTTVKNSLQHLAMNRGMQKKSRLWTRLGMEQFQQLAMPGWAARRRQDLLQLLKELNGQIEPLDQAVKQAAEQHPQARLLMTQPGVGPVTALAFVLTIGDVTRFAGSKQLTSYLGLVPSEHSSGSKRWLGAITKQGNRFLRKLLVEAAQTTVRKDEGFRKEYQHRCHHRPKAVAKVAAARKLAVRLYWMLRSNVGYPEIVHIESNPRVPLGEV

SEQ ID NO: 496961 - protein, 461 aa, unidentified
MGEYKMKGKRNSTKIHKKRLQQHLKQINLYAAGIDIGSREHYVAVPPSLDEDSVKKFGCFTPDLESMADWLVKIGITTVAMESTGVYWIPTFEILESRGLKVILVNARHVKNVTGRKSDVKDCQWLQQLHTYGLLNAAFRPEDDYVTLRTYMRQRETMVSHLSSKIQHMQKALRQMNVLLDNVVSDITSQTGMAIIRDILSGIREPQKLAENRDRRCKNSAEIIAKSLVGNYRDEHLFSLKQSVELYDVYNKKLDECDQVINQHLNILHKQADINERPVQKKRKKNNTNALRFDASINLYELCGVDLTAIDGMDEHGLLKIIAETGIDMSKWATEHRFSSWLGLSPNNKVSGGKILSSSSIKTKNRAKQAFKMAAFSLSNSKSGLGAFYRRLRGRIGAPKAINATARKLAIIFYKMLKNKTEYRKQSQDEYNELNKDRMLKQLKRKAKLLGMELIPNEQLA

SEQ ID NO: 496962 - protein, 312 aa, unidentified
MYYIGLDVHKKMISYCVKDASGQVHQEGKVGATRWELNGWMKTLPQPWTVAMEATIFTGWIYDHLLPHAQQVKVAHPLMLRAIAAAKKKNDRIDAGKIADCLRCDFLPECHMASTSIRDRRRTLRYRHLLVRQMVQMKNRISGLLMETGVSYNKQRLHKVRYFRELLSTNEEVNESIRPLLRLSRDSIVRLQKTEYALVSSLQRDPLLAERIRRLRTVPGVGPITALTWALEIGDVSRFPSIREAISYCGLCGDEKSSADKVTRTPLSKQRNKHIQRVLVEAAKLAPRQDHDLALVYETAKQKGMAIERRLP

SEQ ID NO: 496963 - protein, 315 aa, unidentified
MSDMPCFVGIDVAKAQLDIALRPSGERWTVPNDTNGVTTLVERMQTLQPTLIVLEATGGLERLVTSALATGGLPVVVVNPRQARDFARATGQLAKTDALDARALAHFADVIRPTPRPLPDAQTQELRALLGRRQQLIGMRTAEQNRLAGTNARLAKDIEAHIAWLNAGIATLDDDLETMLRASPLWRENDDLLQSAKGIGPVCARTLLLELPELGTLTRQHIAALVGVAPLNCDSGTLRGRRTIWGGRAHVRTVLYMSTLVATRYNPRIKAFYERLLAAGKVKKVALTACMHKFLTILNAMLKHRTPWQSQEVQG

SEQ ID NO: 496964 - protein, 360 aa, unidentified
MLYLGIDQHRKQLTVSIRNEAGDVILRRQVSTEWARVRAFFDELRRLAEPEGGFVAIVEVCGFNDWLLKMLTEYGCRETVLIQVEKRSKKKTDRRDAHQLSGLLWVNRLRLLAGQRIEGVRRVQPPTEQAAEDRQLTVLRQRLGQLRTRTINRIKHLLRKHNIEQDQPAKGLDTKRTRKWLTALPLAPFDRLEMNLLLAQWKVWDEQIETLEMEIKKRQAENATAGVVATIPGCAAYGSLALAARIGSIERFPRPASLANYWGLTPGCRNSGEATDRLGSITKQGSAMARFILGQLVMHVLRRDPWMKAWYGRIKRRRGSKIARVAVMRRLTTVIWHMVKNNEAYVAGGPPRRKLRVGVA

SEQ ID NO: 496965 - protein, 406 aa, unidentified
MISVGIDVSKGKSIVCVMKPGGEVLKPPFRMLHTMEGILALAKLIKTYDEEVRVVLEDTGHYHWPIVTLLVENSIFVCTVNALRMKKYCSQSLRRAKTDKIDSVRIATFGLTYWSELNPVLPPEDTYRELKLLTRQYYQTVSMLIKAKVNLGNLLDQAMPGIQNLMSDSANNHKLTDFVKRYWHYSHILNMGEKRFEADYCKWAEKQGYRMYEQLAKKILDAAQNGIPVLPNSLSTKIAVTEAVRVLHEIEVSRNAILAQMQILAKSLPEYSVVREIPCIGDTLAPRLIAEVGDVHRFHSKHALIAYAGIDAPPYQSGTFNATERHISKRGNRYLRKTGYEVMQSFIQHKPKGDPVYEFIQKKRGEGKCSKKAMIAGLNKFLRIYYGKVTEVYDSMHEQMIFDSEI

SEQ ID NO: 496966 - protein, 412 aa, unidentified
MTVTNQFAAHVGLDWADKKHDVCVQFKNGERVFHVIEHTAEALDVWLTELHQKVKGRIAIALELKKGPVVYALQKYPFITVFPVHALSLARYRQAFSPSGAKDDPQDAELALELMLRYPQKIKAIEPDNADIRLLQQLVEQRRQLVEDKRRFVNRIINTLKQYYPQPLEWFSHRGSLLLCELIIRWPSLQQLKRARRDTIRNFLNAKGGRAMALTEQRVVSIDNAIPLTTDSSVIEANALMATALATQIKVVSEIIKTYDERIETLFDTLPDAGLFKSLPGMGPCMGPRMLAALGDNRDRFNSAEEIQNYAGIAPVTERSGQKSWVHWRWQCAKFVRQTFVEWAAKTVNSSYWARLYYQGLREKGKSHQSAIRALAFKWIRIIYRCWKTRTPYDEAKYLLALEARHSPLLKS

SEQ ID NO: 496967 - protein, 343 aa, unidentified
MNPTTVGIDLAKNVFQVHGVDRHGKTVLRKQLKRSQVTVFFANLPSCLIGMEACGSAHFWARKLQALGHQVKVMPPQFVKPYVKTNKNDAADAEAICEAVARPNMRFVPIKNVDQQAILSLHRVRQGFIKARTAQANQIRGLLAEFGLIMPKGLSHVSRAVPELIEDAANELPAPFRMLIDRLVDHFKELDRQVREIELQLKLWHRQNPLSRKLEQIPGIGPITASALVATVGDGKCFQNGRQMSAWMGLVPAQSSSGGKSTLLSISKRGDSYLRTLLIHGARAVVRIVKAKPGESWLHKLIGRRNPNVAAVALANKNARIVWALLARDRDYCAGYGLAQPAG

SEQ ID NO: 496968 - protein, 332 aa, unidentified
MMASPDVFVGIDVSKDRLDVHVRPLEAGFAVSNEAAGYAALIARLRPLRATRIVLEATGGYERALWLALSEAGLVAAVVNPRHVREFARAAGRLAKTDRLDAAVIAHFAETFVPRPGKPDAVADRLGEHVLYRRSLQEEIVALEHQRRRLETPALRERAARRHAALRAEVKEIEREMRAIVDSDPGKKALFACLTALKGVGLVLACTLIANMRELGSLTRHQAAALIGVAPLNHDSGVRQGYRAIAGGRRRVRNVLYVATLSAVRCNGPIREFYRRLSAGGKPAKVALVACMRKMLVMLNGRVRDHLAHHNGLSGVSLFDRAPFLRPDPSSG

SEQ ID NO: 496969 - protein, 339 aa, unidentified
MELYAGIDLHSTNSFVGIMDREERKVFKKKLANEPGVILKALDRFKGDIVGVVVESTYNWYWLVDVLMGEGYRVHLANPSAIKQYEGLKHKDDNDEALWLGNLLRLGILPEGYIYPKEERPIRDLLRKRGHLVRLRTSLILSLQGIIMRNCGYKVPANKIKQFREDHVAPMLAGQEDLALSGRVSKETIDFLTREIRAIEKVVEGKVKVKEPFSYLKTICGIGKILSVTIMLETGSIDRFPKVGNYVSYCRKVPTSWTSNGKHKGKGNKKNGNKYLAWAFSEAAELARRYDEHARAYYNRKAAKSNFMVAHSALAHKLARAAYYVMKDCVPFDPYKLFA

SEQ ID NO: 496970 - protein, 354 aa, unidentified
MKILAIDLGKFNSVACLFDTATNQSEFETVASKHWAFEQLLAKTQPEQVVIETSSISGWVHDLCEKLNYKVLVANANQEAWRWKNVKRKTDKDDALKLAKLAALGQISAVYVPAAERRQYRHLVKYRKTLIHRINRIQNNIRSLFDQQGISIPQGHRAWSVAGIETLSQYRKPLAQCQVEEFWQGELDLELQSLDGLWQQLQSVDDQLEKIAKQDEQIQLLQTIPGVGRKTAEVIVAILDDPHRFQNARQVSAYAGLVPDQRQSGQSNRMGNITRRGSRLLRSALVEVAWIMLRYNAWAAAVYGRICGGQKTRKKTAIVAVARKLLVRCWAMLRHKQPWQDNTPILSASTSPSS

SEQ ID NO: 496971 - protein, 336 aa, unidentified
MVYVGVDLHRKVAHVVALDQRGEPVLNRRVAARPDEMLRVFGELDHQPLEVAFEATLGWGWFADLLADAGIPAHMGHPLATKAISSARVKNDSVDARTLAHLLRTNLLPEAWIAPPEAREARRLARMRTSLVRIRSQLRCQIHAVLADHGVHSEVSDVFGKAGRIFLEELRLPPISSDRLETNLRLIDALTDEVAEAERQLRQLFRGDERIRRLMAIPGVGFITAVVVVTKVWDITRFASPDRLCSWAGLTPSEHSSAEHTRRGHISKQGSRWLRWVLVEAAARPQTDPSLRAFIDRIASRRGTKIARVALARRLLTLCYYALRDEGGCRAFPLAG

SEQ ID NO: 496972 - protein, 319 aa, unidentified
MGEISFKQIVQVGCGIDVHQNLIVASIRKSNTEVETREFTAYTSSLTSLRDWCKEECVTHAVMESTGVYWKPVFNILEEDFEIMLVNARHVKNVPGHKTDKKDSRWLSKLLLSGLLKGSFIPPRDIRDLRDLVRYRKKVIAQAASDKNRIIKILEDGNIKLSSVLSNVDGSVGTKIIDKMIEGVTDVDELMKFYHGKIKVSREEFRLALEGCLTAHHRLMLQIYKDSISDKERQVKRLDAEIEKATKDYQVEIDLLQTIPGVGKDSAITIISETGVDMEKFPNEQNLSSWSGMSPGNNESGGKKKRQKQFMATRIYSAH

SEQ ID NO: 496973 - protein, 474 aa, unidentified
MSKPTQQPAAAGQSEPKVARSKRASQSQGVEHAMFQADAAGIDIGAREIYVAVPADRDDHPVRKCETFTGDLHQMAEWLVHCGITTAAMESTGVYWIPVYDVLEQHGIRPCLVNPRNMKNVPGKRTDFHECQWIQHLHSMGLLHSAFRPDGEVCAVRSLLRHRNDLVEMASQHVQPMQKALTQMNVQFQHVISDITGTTGLAVLDAIVAGERDPGKLAKLRDPRIQASEETIRKSLEGNWRAEHLLVLKQRLALYRSYRDQINDCDQEIEKLVAAFEPKVDPEQKPLPEDRKQKQRRRKKKGASSNFDMRTEAYKLFGVDLTQIPGLMTLVFMLFSEIGRDMSRWPTAAHFVSWLGLCPDNDISGGKVLWRGARRTKSRAGTLFRLAAHSLHRNQTPMGDYLRRMKAKLGPAAATTATAHKIAIIFYTMVNKQVEYDASLWAQRDAMREKRLEARLRKQAAQRGYKLVPLKPTA

SEQ ID NO: 496974 - protein, 376 aa, unidentified
MKIYVGIDIAKLNHFAAAISSDGEIIIEPFKFTNDADGFQLLVSKLESFDKNSLIIGLESTAHYGDNLVRYLVTELYQVCVLNPIKTCQMRKNNVRKTKTDKVDTYVIAKTLMMQDNLRFVSFFDLDMMDLKALGRFRQKTIKQRTRLKIQLTTYVDQVFPEIQYFFKSGLHQHAVYALLKEAPSPKEIASMHMTHLANLLKVNSHGHFTKEQAKELRVLAQKSVGANDSAISIQITQTIQQIELLDSQLEKIEAEMTDIMKFNDSVIMTIPGIGYINGGMILGEIGDIHRFSNPNKLLAFAGLDPSVYQSGNFQAKTTRMSKRGSRVLRYALVNAAWNVVRNNATFKAYYDAKRAEGRSHYNALGHCSGKLVRVI

SEQ ID NO: 496975 - protein, 403 aa, unidentified
MLFVGDDWAEDHHDVELQDETGRRLGRARLAEGVAGITRLHAMIAEHADDPNQVRIGIETDRGPWVHALVGAGYQVHAANPLQVARYRERHSVSGAKSDAADAHTLADMVRTDGHQLRVVAGDSDQAQAIKVVARAHKTLIWERTRHMLRLRHALREFFPAALVAFPDLTGPDALELLNRAPDPRSAARLTKTQIVAALKRARRHHADAKAEVIQAALRGEQLGQPDAVTAAYAATVRAQVAILLTLRSQIKALEEQVQAHFGTHPDAEIYLSQPGLGPILGARVLAEFGDDPTRYEDARARKNYAGTSPITRQSGKKKAVLARYVHNDRLLDALGRQAFAAMICSPGARTYYDELRARGVGHHAALRQLGNRLVGILHGCLKTGTPYDEATAWSHRQERAAA

SEQ ID NO: 496976 - protein, 429 aa, unidentified
MHYTQNEKLEQVTEKTIVIGVDIGSESHHARAFNYRGIEYSQKDFKYGNDAKGFETFKGWMQGYVRMNGAKKVIVGFEPTGHYWYNFADFLKALGIMFVMVAPQHVKHSKEMDDNTQRKDDHKDPRVIAKLVTEGRYIIPYVPEGIYAELRTAYGRYCELTEAKVRLENRITRWFDIYFPEYREVYKNPGAKTGMMVLRIAPLPADVLKLGADGINQLWRSMKVKAAGMKRAETLVAAAARSTGRAGGDAVRRDLWQMLEEYELVTRHLAEMQTMLEELVAQIDGAERLLRIKGIGFITVAGFFAEVGDLSRFTDPKQIQKLAGLSVVTPDSSGKHNGQSEISRRGRKRLRMILFRAAMSLVKSNREMKMLHEYYTTREQNPLKKMQSLMAIAGKIIRVFYGIMRNGTEYDPVRLLTDIRRPGTDKNAA

SEQ ID NO: 496977 - protein, 391 aa, unidentified
MTILVGIDVAKDKHDCFFMNSEGEVLAKPFTIFNNKEGFDFLYEKIQSVSSSDNIKVGLEATGHYSYNIIGFLLNKGLATFILNPLHTNLYRKSLSLRKTKTDKIDSKTIAMMLLSDVSLKSYSDISYHNEDLKSLTRYRFSKVEERAKLKTSLSRLAQILFPELEKLVPTFHMTSIYQLLEEFPSASAIASVHLTRLTNLLSKASKGHYDRETAIKIRDAAKNSIGSNMPAKSLELKHTIKLIRALTIDIGEIEAEISKMMDMIASPITTIPGIGRNIGAMIISEIGDFSRFSSPDKILAYAGFSPSIYQSGKLDNCYAHMEKRGSRYLRYALFHAAKLVCHWDKTFADYLAKKRAEGKHYYVAISHAVKKLVRVIFQIEKTKQAFLKAS

SEQ ID NO: 496978 - protein, 349 aa, unidentified
MYEYIAFDSHKRYTLAERDPVVEGRARQRRIEHRRGAIREYLADCPDGAAVAVEATGNWYWIVEEIEQAGLRPLLVHPGKAKLMMGMINKTDKLDVHGLNRLQRAGTLPTVWIPPGPLRDQRELTRTRMVFSRQRTRLKNRLSATLGKYGLAVEGSSDSFGAGARSQWPKLLEALPGHTRFCAEILLSELDGVCARITRFERRLLKVIEQTAPMQLLLSMPGIGKVLSPVVVLEVGDPWRFPDAEHFASYAGTTPRVHSSGDKTRYGRLRPDVNRYLKWAFVEAANTIALHHRRRPHRHVSQLYCRLKNRKGHPKAIGAVARHLAEATWHILTKEQPYRDPALGRTRKA

SEQ ID NO: 496979 - protein, 368 aa, unidentified
MNESITALSTLTIGIDLGDRKSHLCVLDASGEIVEESQLATTPTAMRARFEGLAPARIALEVGGHSAWVSELLKELGHEVIVANARKLRMIFQNDSKNDRLDAEQLARVARMDPKLLYPIEHRDRSARADLAVMRSRDALVATRTRLVNHIHGVLKSFGHRVKKYAAPGFHRQVVDQIPDELRASLQPILDTLAALAEQILVLDREMRRLSTAIYPETSLLSQVGGVGPITALRYVLTIEDPRRIKRSRNVGAYLGLRPRQRQSGQRDPELRITKAGDRDLRRLLVQCAQQILGPFGKDSDLRRWGLELASRGKATAKKKAVIAVARKLAVLLHRLWLTGEVYEPLRNTNRLAAGRARKPSAVSAMVA

SEQ ID NO: 496980 - protein, 372 aa, unidentified
MTSIIYVGMDVHTTNYTLCCYSMEDDRFFAEVQVEPDAKNILKYLARIEKQQSRGCRIVCGYEAGCLGYSLYHQLHAHGIDCVILAPTTMMTKPGKRIKTDRRDARLISKCLAFHTYSPVYIPTEVDDAVKEYIRMRDDANSALARVKQQIIAFCIRHGKIHGGKSYWTNKHLEWLSSLNLGNKILSEVLQEYLIRYYQLREQVDMYDMRINELAQAEPYQQKVEKLGCFRGIAAHTALSFCVEIGDFRRFATAQQFASYLGLVPGECSSGDKQQYTGITKAGNSHLRKLLVETAQVFGRSATKSGKSVALKERQAKRDSLTVAYADKANARLKKKYFKIAMRSKVNIAKTAVAREMACFIWGMMTDNISCA

SEQ ID NO: 496981 - protein, 353 aa, unidentified
MSMLAELVEVVIGVDTHKDTHTAAVVDARTGGVLARVTVAADPDGYAELSVLAEQHSGLRAWALEGTGGYGAGLARHLQQAGELVVELDRPKRPARRAGAKSDPIDAERAARDALARTRLAQPKTGAERAALQMRLTARRAAVEAAADAQRQLQALVITAPEPVRARFRGQTTRVMLATAARLRPAATSGDIDLTTALTVLRDLARRVRFLETEAAGHETAIRAIVRTWRPDLLQLTGVGPIVAATVLAAWSHPGRCRDDAAFAMLAGAAPIPASSGQTVRYRLNRSGDRQLNRALHTVALCRLQRDPRTRAYADRRRQEGKTDREIKRCLKRYIARELYRRLESAPHPLDVS

SEQ ID NO: 496982 - protein, 408 aa, unidentified
MEVVHERCAGLDVHKKCVYACAIWPGDRGGKQQEIRSFGTMTADLLQLADWLRGHGITHVAMEAAGVFWLPVWAILDGQFELMLVNPHHIKAIPGRKTDAKDSEWIADLLQHGLLRGSFVPPAEVQDLRELTRYRTELVQAQNQVDNRIQKLLEQCNIKLSSVASDTLGLSGRLMIEAMSQGEDDLERLADLAKRALRKKIPELRLALAGRVRDHHRFLLKEFLDECNALQKPIRRIQEEIDRGIAAFETAVQPWESIPGVDHIAGCNLVAEIGANMAQFPSAQHLASWAGVCPGNHQRAGKRFATTTRDGNKWLRRTLCQVAWAVTRQKDCYLAAQFRRLAARRGIKRAVMAVAHSILVIGYAMLKTGRSYQELGGYLEQINKEQLQRYFVKRLNRPGLTVSVAPVA

SEQ ID NO: 496983 - protein, 329 aa, unidentified
MQKEVLYCAIDVCKDKLDVEGAALALPAQLGNDQCGYRQLIKAAKKYPGPVQFVFESTGPYHLGLALALWEAQMPLSILNPARVRFYAKAQGKAKTDPLDKQVIGAFAQAMRPGPTPAPDELSRQLTELLQRRDELIASRGAEQSRLGQSRHRLIKQQMGRLIGQLTEQIKQIDGLMHQLVGSCAELKSKVEQLCQIKGVGQLTALILLITVPELGTLGRNRISRLVGLAPLNDDSGTQKNKRFIQGGRRRPRNALYMAALSASQHNAVLRPFYQRLLKAGKAKKVALTAVMRKLLICINALLCRWAQQKAALGAFCPAKAAVTQPLNA

SEQ ID NO: 496984 - protein, 368 aa, unidentified
MDESITGFVGLDAHAESTAIGVAEAGRAAARFVGTVGAKRAELMKALGKLGSPQSLLVVYEAGPCGYGLARELTAAGYRCEVIAPSKIPKQPGERIKTDRRDALKLASLARAGELTPVSIPDERDEAIRDLSRARVDAVRARLKARQQLKALLLRHDRRYSGKTSWSAAHERYLSRITFAHPAQDIAFAEYRQAVGEGEARVERLTQVLRQQVEGWRMQPVVNAVMTLRGLDLVAATTVVAELGDLKRFAHPRELMGYLGLVPSEYSTGSRRRQGAITKSGNGHVRRVLVEAAWNYRHPARLSKSQQLRQEGQSAATRAIAWRAQLRLGHRYRSLTDRGLQHNKVCVAIARELAGFIWDIGRQVGPRA

SEQ ID NO: 496985 - protein, 481 aa, unidentified
MTEKIRWYVGFDWATQQHRACLLDPEGKRLCERDVAHDGVGLAEFCSWLVDKTGARAQEIAIAIEVPRGPVVEVLLERGFQVFAINPKQLDRFRDRFSMSGAKDDSRDALVLGHSLRTDPQAYRRLAIDDPLVIELREWSRIYEELKQEQNRLGNRVRDQLWRYYPQTAELGDPAANWFLDLWEKVPTPAKAARVSEQTVARILKNHRIRRFDATEVLQILRQKPVTVAPGTVEAASAHIRTVAARLRLVNQQIKEAEHRLDELCAAIETAAETTPGQICEQRDVAILRSMPGLGRITIATLLAEACEPLRQRDYHVLRVLSGQAPVTRRSGKSCIVLRRHACNKRLENAVHHWGRVAIQHDPVSKQRYAELRRRGHGHARSLRTIGDRLLYVLCTLLERQTLFNPSYKTNAVSSCGPDRPIPLFDRGHPFVPTCPRGRAPRADAVQDAACGTGEAGAKRPGRRRARRYALGAGDEGRPPI

SEQ ID NO: 496986 - protein, 314 aa, unidentified
MSSSVFIGIDVSQARLDLAVNDGQKWSLPHDESAMTTLVDQLATLHPTLVVLEATGGLEIPLTSALAAAGLPVVVVNPRQVRDFARAKGLLAKTDALDAQVLAQFAERIRPQPRPLPDTEARALAALLTRRRQLVEMLSAEKNRLLSASSSIRKSLRAHITWLERELQHTDTELTATIQQSPVWREKDELLRSVPGVGPVLTSTLLANLPELGTLTNKQIAALVGVAPLNRDSGTLRGRRTVWGGRAHVRAVLYMSAIVAARFNPVIRAFYRRLCAVGKAKKVALTACMRKLLTILNAMLKHRTSWRQMEAQHA

SEQ ID NO: 496987 - protein, 355 aa, unidentified
MLSIKYIGMDVHKETISIAVLSPSGKLVMESLLETKASTIIQFVQGLRGDLRVTLEEGTWASWLYDLLRPHVTEVVVCDPRKNALLKVGNKSDRIDARKLAELLYLNRLQPVYHGEHGVRTLKELSRSYLAISADQARVMTRIKALYRSWAIPCAGKQVYAPRYRLEWLGKITEAGVRRRAGFYYQQLDALRALRQQVRRELLAESGKHQASKLLCQIPAIGPIRAAQLIAILQTPHRFRTKRQLWAYGGLGIETHSSADHRYVDGQLQPSKRQVSLRGLNRNHNHELKNIFKGAAIIAATKPGPLQQFYAALVANGMRPEMARLTLARKIAAIILIVWKKGVCFDAHYLKPQTA

SEQ ID NO: 496988 - protein, 417 aa, unidentified
MGQKAFIPQAYDVFAGLDVDKKSISVTFSNHQQGFIRSLHMPYSVVNLGKHVRQHFTDQKVAFVYEAGPTGYGLYDGLEAQGYNCLVAAPSMIPRAPGQRVKTNRLDSRALSENLRGGQLKSIHVPSPIYRELRHLTQLRDTLVSEVAGMKQRIQSLLLFEGIAFPSAPAGSRWSLKVKAQLRKLECSKSVRFKLDQLLDNEEFSEKQVVKVTKEIRQLCQNDPELAQCIKYMMSVCGIGWIVASQLLARIGDWRELKNVRQLAGFLGVVPSENSTGEKTDRGSITRTGHGRLRSKLIQAAWSAIRQDGELREFYSSVCRRHPRQVGPRVAIVAVARKLSARIAAVLMEQRPYVVRQKVHSAPLTQEETSPRERLDDWENQEKKTPDGSIHETEIPGLCALEGRILSQCDGRVPCHT

SEQ ID NO: 496989 - protein, 353 aa, unidentified
MTTLAHDEPRAVIGGVDTHKDDHVAAVIDDLGRILGVQSFPATRRGYRRLLGWLQAHGEIHAVGVEGCGSWGAGLARFLSANGVRVVEVNRPNRQKRRLRGKSDPVDAEAAARAVLSGEASVTPKTGTGPVEALRQLRVARGGAIKARIAASNQLHSLCDTAPDALRAQLHGLTLRRKVATCERWRPGTTHTPETAAKRAMVSVARRWRALDEEIRELDAHLRAILDEIAEPLLGRFGIGYETAGQLLVTAGDNPERMKHEASYAALCGSSPVKASSGRTKRHRLNRGGDRNANSALWTIVIGRMANHPPTRAYVERRTTEGLSKLEIIRCLKRYVARELYAASHQKRLLDNT

SEQ ID NO: 496990 - protein, 352 aa, unidentified
MSRPKHQVTSGEDLFVGIDLHKHRWHVTIRTVDLELFSASIPGTWETLQRLLARYAGHQLQAVYEAGYFGFRLHDRLVAHGIPCIVTPPSLVPQEYGNRVKTDRRDSSKLAHLLAKGMLKRVWVPSEEELYHRQVIRRRRQLVRDRVRTQSRIKAELRFYGIQLEEPRGRWTQTYFETVRRLRFNNRWMQESFNRLLEQYEFLSAQIDKQTQLLRELSETELYRERVEILQSIPGIGLISAMELLLELQDVSRFRRAEQLAAYVGLTPSQYSSADKVRMGRITGIGKNTLRSLLVEASWTLIRKDPAMQEKYDRIKIRSGGKRAIVAIARTLLLRMRRMLIDGQAYILQQAA

SEQ ID NO: 496991 - protein, 433 aa, unidentified
MNSAPPYDLIIGLDRSDRKADLHLIAPHDGHRTALTLDTAPEAMWEWLAALRQQHPTARVALCLEQPAAHLLAFLETYAWLTLYPINPITLQKYRETFVPSRAKDDAKDARYLAELLHDHHAKLKPWAPEDSQTRAVQQLVAHRRAVVEERTALTNRLQALLKQYFPQALLLCGEELWRPLATRFLLKWSSLQAVQKTKPEKLKAFYYLNGSRSAKLIAQRLALLAKAVPVTDELPVIQSFSLRVQLICRQLQAVVQTIQTFDEQIAQTFQAHADHAIFASLPGAGPVLAPRLLAGMGAQRERYPKAANLQYYSGIAPVTKQSGGKRHIHRRYLCPKFQRQSFHEYAKESIRWSRWAAAYYLQQRTKGAPHHTAVRALAFKWQRIIWRCWMDRKPYAEQTYEAALRKSRSPLVALLDQIELGKSPFKNNGKKN

SEQ ID NO: 496992 - protein, 360 aa, unidentified
MKKVSKPMRNMEVPAKPEMTMGLDIGDRYSHYCLLNATGDVEEEGRIQSTEAALRRHLEGEPRMRIALECGTHSPWVSRLLTALGHQVIVANARKIPAITGSESKNDRNDAEKLARFAAYDPKLLSPLKHRSEQRQVDLNLIHARATLVRARTMIVNALRGLIKSAGGRLPACSTESLPTRAAGAIPPALIEVATPLVEQIALLNAQIGGMDKQEEKLAVKYPEIVLLRTAPGVGPIVAAAYVLTLDRPDVASNRAAGAFLGLRPGQSQSGDSDPQQRISKTGDRCLRSLLVQSAQYVLGRFGPDSALRRWGLKLAATGGKRGKKRAIVAVARKLAVILHAMWRSGQRFQAFPQASTVAA

SEQ ID NO: 496993 - protein, 292 aa, unidentified
MSRKTSPQVAVVNLAYIGIDVAKATLAIAQDGQVCQIQNTRCALKAWLKRVPPNSRIALEATSTHHLLVADLAYAAGHVVYVVNPKDARHYRLATGGRAKTDPADAQLLARYLEREHTELRPYVPHTPQQRRPWGLLKRRAKLVQAKGRIRQYLSGLSGFAAQAKAIFERIDALVDTIEQQMATLLQACPSQQQAWQRLQGVVGIGPLTATALVAALERGTFKDSDAFVAYCGLDPGANDSGQKSGKRKISKRGDALLRRLLYTAAMSDPARLCGSHSISATRAGAYLRCKC

SEQ ID NO: 496994 - protein, 352 aa, unidentified
MSEKYVAMDVHKASVVVGVRDAAGKVIGQAVVETKAQTIRDYVRGLSGTIHLTFEEGTQSAWLYDLLRPLVAECIVCDPRRNKLLADGNKSDEIDVAKLSELLYLGRLRPVYHGGQGTRTLKELAHNYEALVKDHTRVKNRLKAIFRGRGIGYEGDEIYDCQQQGKWLEKLAERGVRERARQLYEQLDQLEGWVAAARRQMLAESRWQPAKKNLQLIPTLGEISVAQLIATVDTPHRFRSKRQFWTYCGLAVVRHTSADYRFEQGELRRRVKPGPTRGLNRNYNRRLKRIFKSAALTGSIKGPFKPYYERLLARGLSSELAQVTLARKIAAITLTLWKKGERFDPEKMVKPA

SEQ ID NO: 496995 - protein, 406 aa, unidentified
MFYLGIDVANKSHKFLLVSDLGEKVAPAFSLDNSSDGFNLLLERFQKLQIAAPNLLCGLEATGNFWENIYEFLSSNGFKVVLLNPFYTNKFREALRKKAKTDDIDALVIAQLLRTGEYGNCLVPDELVLTIRELVKLRYEFIKDLLNYKRQALALLNLVFPEFHKTAVKNPFAVASLNILQQFPTAKHLANVKVKHLEKLVRHIQGNNFNCDELQHLVDTAKNSCYSGKAHSARGENLRMILSLIDSLSNNIQKLDAQIQDILSPNGPNDSFPGENLLSIDGVGKKTLAAILAAIGRDGKSFANAKAIIGLIGFFPKIYQSGESQRDNLMSNRGPKYLRWHLYMAAVASLKHNPEMRTLYHKKVSQGKSHKQALICVAKKLAQMMLAMLKSGQPYNPARVFVNATS

SEQ ID NO: 496996 - protein, 324 aa, unidentified
MQGKVMPEQGGAMAAVYAGIDVCKERLDIHLHPIGEHFAVANDAGGWRRLKRELGRHRVVRVVMEATSKYHRRAHRSLDAGGLAVAVVNPLRARLFAEAIGALAKTDAIDARILALMAERLDPAATPPVREIVEAVQELTRARTAAIAERVAIGHRRTTAVVAFLRAELARRIRTIDTHVDRLEAEIASLIAEDPALARRYTILLSIPGIGPVAATAIIANLDEIGQLTDKQATALAGLAPFARDSGPVQGMRRIRGGRPSLRSPLYMAALSAARCNPDLKTFYQRLIANGKAKKIALIAVARKLLVLANALVSSDRSWSPVRP

SEQ ID NO: 496997 - protein, 344 aa, unidentified
MNTTMIGLDVAKNVFQVHGIDAAGEVTIRRKLRRSQVEGFFAGLGPCVVGLEACGGAHHWARLLQRQGHEVRLMPAHYVKPYVKRNKTDSRDAEAICEAMGRPTMRFVPVKSEEQQAVLALHRTRGLLTRQRTMAANALRSGLAEFGIVAAQGNTGLRTLMQELTADDCPIPELARAALSMLAVQWKSLDGAVRDLERRIARIARQQERARRLMDIPGVGPIGASAAVAKVPDASVFRTARDFVAWVGLTPRQNGTGGKQRAGAISKQGDRMLRQLLILGARGQLAHARKHGVKDPWLRALLARRPFKVAVVALAARMARIIWAMLKTGERYRSKDQQLVPAAV

SEQ ID NO: 496998 - protein, 358 aa, unidentified
MMLTREYFGKRIEGNRIYVGIDVHKETWAVCLVDGFGGKIKSFSQSASPVQLLRTLEPALRDGLDVICTYEAGYFGFEPCRILIEGGCKCTVTAPSLIPVQIGNRVKTDSKDCHKLAICLAAGMLTPVWVPSRRLEYHRSLIRFRTQIQADRVRIMTRIRARLSQHGLVAPAGKSWSAKFMHQLVAVSSKIYELDLIQKTDLETLENFNKHIKKITGEIIALLKLPDYCAAANGLLTIPGVGPLTTMKILLEIGDFSRFSKKGRIEAYCGLTPSQFSSGEKVRMGHITRCGRSSVRTTLVEAAWLLVRSDPAYHQFYSNLKAKRGGKRAIVAVARRLVGIMRRIVLDGQNFKPRELTA

SEQ ID NO: 496999 - protein, 348 aa, unidentified
MLYVGLDLSRKRLDWLALARDGEFAANGAVTPDRDRLAKLGRRLGDAPVLAVIESMSGARFVHDQLELAGWDVRIADAQKARGLAPLACKTDRIDCWVLAELARRQLVPEVWLPDPAVRAERERARFRLHLVKHRSALKNRVHAILFQHGIASPHRDLFGAGGRCLLARLELPEPWSSTVDASLVLIDELDDQISDCERELRRLGARHRYVPLLTTIPGIAWVLGYTIAAEIGDINRFPGPRKLIGYTGLTPAVDQSGERDRRGPLRKNGPNYLRWALIEAAHTAGRTPHYRPIVERMRARHGRTRGSKIAAIEIARRLTEAIWHMLTNDQPFAPAGAPTPVAASTAH

SEQ ID NO: 497000 - protein, 345 aa, unidentified
MQTIYIGVDFHARQQTICYLTTETGELVTCELKHQDKEAVRAFYGAFRGPVIVGLEASGYSPWFERLLEGLGHEVWLGHATEIRRRARWRQKNDRRDAELILDLMLHNEFPRLHRPALQSREVMRMLRYRQKLIKIRTMSKNSLQALALQAGVAKRSSLFTREGKQALEATLMSPAMQWQREHWWQLLQPLDQQVLEAMVWLKAQSKDDVFIARLRTHPGIGLLTSLCLVHTLQPVARFRNSRKVAAYAGFDPVERSSAEHKRFLGISKAGSRLLRHLMVEAANVAVRKDEDLKRFYQRLADRAAVQRPRWQSPGNFSSVPTSCCVMRSTMRNFAVEPSQLGLPV

SEQ ID NO: 497001 - protein, 362 aa, unidentified
MKQDNKAKQNRGNQISAEAPQGTFDLGRRRWRVQREGLTVGLDVGDKISHYCVLDEEAEVVQRGKLKTTPAGLQPWMEALPASTRVVLETGTHSSWISRLIEQAGPETLVAQPRKIPQIYACKRKNDRRDAEKLARTGRLDPNSMGPIRHRSAEQQADLAVIQARDALVRARTQLINTVRGLVKSTGERLTGCSARSFARQAEEQIPQRLRAALLPLLSQIAALSEQIERYDVHVEQLAQRKYPETELLRQVSGVGPVTSLAFVLTVADRWRFRHSRDVGPFLGLVPGQDESGESSPQLGISKAGNGYLRRLLIGSANYILGPFGPDCELRRWGDEAERAGWKERATAGQSGGGAAAGGVAA

SEQ ID NO: 497002 - protein, 323 aa, unidentified
MSPVVGIDVAKRSFDLAIDLANGKYRTKAKLPNDPKGFEVLQTWLQTHAQADSWIVMEATGTYHEALAEFVHALGYRVCVLNPAQMALYARSQLTRVKTDRSDAKLIASYGLRHASQLRPWQPDPPALKHLKALVRRRDDLLQMLQMERNRLDVAASVVRDSLLEHIAQLQARIAQIERAIDDQIDQDPTLRGQRELLVSIDGIAETSAALLLAELGNVERFSHASAVTAFAGLNPRLQESGKRQGQVCISRTGSPRLRAGLFLPALVAMTHNPVVRALKQRLRERGKANKQIICAAMRKLLHIAYGVLKSRTPFDPQKALAW

SEQ ID NO: 497003 - protein, 347 aa, unidentified
MEQITRIGMDTSKNVFQLHGVDAAEKPVLRKKLTRREMVRFFEKLPPTLVAIEACGSSHHWARLLGSLGHDVRLIAPQLAKPYVKRGKNDAADAEALCEAVSRPTMRFVPVKTAEQQAALMLVGVRERLIQKRTQLVNAIRGYGAEFGITAATGACRVGPLLERIAADEAIPELARELFALQGKEYAQLQCEIERIDAKLMEWHRNDECSQRLAKIPGVGPIGATLLMMKTPDPHLFKSGRDFAAWMGLTPKDHSTAGKTRHGVITRAGDELLRSTLVVGATAVVQHARNGRGRNLTPWLIALIGRKSPKLVAVAVANKAARVAWKLMVSGERYQCVAPPALTAVAA

SEQ ID NO: 497004 - protein, 399 aa, unidentified
MFVGWDWASTGHDVTVIDSAGERVHRMAIPHTEDGIARAVATLAGHGDPGELPVAIETTRGLVVDRLLAAGHPVIPVHPNAFHAARPRWGAARAKNDPGDSFKLADYARTDIHRLPVLVPTLPETLELQALTRQRDDQLGLRIAAVNQLAALLDQYWPGGKTIFAQLHSPIALDFLDRYPTPRAAASLTPARIEAFCRRRAYSGRRTGAELLDRLCSAPVSASRLDEGVVAQMIHAQVAVVRALQAGIDTLDTVIAEKTRAHPYAGLLADLPRIGTLNLAQIIGEVGPILERATSFDQLAAETGLAPVTRASGKTHTVAFRYATNRRARQALHTWLDNSRRSSDWAQQRYAAARARGQRHPHALRTIGRAWLRIIWACWRTKTAYDPARHEPAKQPTAA

SEQ ID NO: 497005 - protein, 429 aa, unidentified
MNQVPVAGIDVGKRFSEMAILSPQNEVYARIRINHDSYTNFERAFELLKKTEKEFAAKPVVVMESTGHYHKILFHSLTKVGYEVSIINPIQSDSIKNIGVRKVKNDKVDARKIALLYRFDQLKTTNIPDEDIDCLRSLCRHYYKLSDQLTSYKNRLLGIVDQLFLSFTDVFKDVASVTALAILEKYPTPEDILKADSEELISLIRQTSRKNLKWATNKYELLCSKAHKFNPLSINSIANTAMLTANISMIKTLTQSLEGALDAIHKLLEQDSAKNMPALSLTIELLCSIPGIGLLTAATIVAEVGDFSAFLKPGKLAAYFGIDPSVKQSGQFEGTENKMSKRGSRLLRRVIFTTALANVRKKRNGKEHNPVLYEYYRKKCASKPKKVALGAVMHKLIAIIFAVLRDRKPFVLRKPEEHAKMLVAKNLAA

SEQ ID NO: 497006 - protein, 344 aa, unidentified
MSEVTTIGLDIAKHVFHAHGADAAGRAVFSRRLTRSKLLDFFSVHPRCLVALEACGGAHHWARELRAMGHEVRLIPPAYVKPFVKRHKNDAVDAEAICEAAQRPSMRFVAVKSEEQQAAALVFRTRDLAVKQRTQLGNALRGHLAEYGWVAPQGSAHLAMLADLLEGGEIGQTLPEAARPMFAMMADMLAELDKRIAALDKEIARRARDDEVARRLMTIPGIGPITATAIAAIAPPAETFAKGRDFAAWLGLVPRQASTGGKQKLGAISKMGERTLRRLLIIGSSAVVLQASKRGAPAGSWLEGMLARKPRMLVTVALANKMARIVWALLIKQEDYRAPVAVTA

SEQ ID NO: 497007 - protein, 365 aa, unidentified
MQKISTMQTSEENIFKGQLTIGLDLGDRCSAYCVLNEVGEIVFEHKLATTPEAMKQVFSSMPRCRIAMETGTHSPWVSRLLAALGHEVIVGHAQKVRLITKSRRKDDRLDARTLARLARIDPELLSPVKHRSAQAQLHLTEIRARAVLVSARTALVNAARGLVKSYGERLRKCGTQQFRRETTSGLSGGLREALEPLLREVESLNERIKEYDRRIEKMAKQTYPETALLKQVKGVGDLIATAYVLTLEDPHRFRKSRDAGCFVGLQPGRRNSGESEPQMRISKEGDEYLRTLLVQGAHYILGPFGEDSDLRRWGLKLSARGGKNAKKRAVVAVARKLAVLLHRLWVSGEVYEPLRNSQKAMSAAA

SEQ ID NO: 497008 - protein, 360 aa, unidentified
MIVQGTSVGLDVHALSVVAHAVDEETGKLARARLCPDHGEVLGWLRQLRAPVRVTYEAGPTGFGLARAITEAGMECVVAAPSKLQRPAGDRVKTDARDAAHLARLLRLGEITAVRVPERDIEAVRDLVRAREDARADLMRVRHRLSKLLLRQGIVYYGGTPWTCSHEEWLRRHRFADIHLKAAFDHSFDAVLAATAARDRLDEQITAVAASRRFADPVNRLGCLRGISALTGLALTVEIGDWSRFTGSAIGAYVGLVPSEHSSGSSRIQGSITKAGNTHVRRLLIESAWHHRKSYSTSGPSLRARWAKVDPALRARGHAGNRRLNKRWRTFTERGKNPRVANVAVARELAGWCWSLATMQ

SEQ ID NO: 497009 - protein, 313 aa, unidentified
MQPHPLVGIDVSKERLDIALDGEPRSWSVNNDEEGIRSAAERLGELEPSLAVVESTGGLELAVVSELCARHIPLALVNPGRVREFAKSLGLLAKTDRLDAQLLAHFGKAAELQPTTLPDPQVQHLSALMSRRRQLLQMQTMEKNHALSLPLELRPALQEHLTWLARQVQQLTEQIQQTIHSTPLFHEKEQILRSAKGVGPITASILLSDLPELGQLDRKKIAALVGVAPFNHDSGRRRGPRRIQGGRASVRTVLYMAALVGSRCNPVLKAFYQRLLASGKKKKVALVACMRKLLTILNAMLRDMAPWKAPLAA

SEQ ID NO: 497010 - protein, 399 aa, unidentified
MAEGVVAGIDWASELHVACVLGADGAVAGRFSFTHDAAAIRTMVRRLHAADVARVAIERGDGPVVEELLAAGLAVFVVPSRQIKGLRTRYGSAGNKDDRFDAYVLADTLRTDGHRWKPLRPDTEPTRALRALCRSRKDLVETRVQVIGQLRANLELAFPGAIGLFTKPASGISLAFLRRFPTAAKAAWLSPGRLTVWLRSAGYTGGISAAVLHARLAAAAPGLAGSEGEARGQITLAFVTLLGALNGQIAVLDAQIARAFAAHPDRHIFDSLPRSGIIRAATLLAEIGDCRQRFPTDDALAALAGACPSTRQSGKRSQAVFRWSCSKKLRAAVMDFANGSRMSDPWAAAIYAAATARGCRHPHAIRILARAWLRIIWRCWQDGTAFDPALHRGRHAAAA

SEQ ID NO: 497011 - protein, 341 aa, unidentified
MKEHVASFSRMYADLRVEYVSTLTIPNGPGGFVKLSKWIRKLMDPSMPCQFVLEATGVYHETLACFLTEKGWPVSVVLPNRAKYFSKTLTVKTVNDKVSSQTLAAMGLEKKLDVWSPPDPIYNQLRQLTRERDQLKAESTQIKCQLHAEESGAWPNKSSIKRMNQRLSLIERQVEEVETSIREVVAESPEIDQAVRRMTSIVGVGMLTAVTVLAETNGFNLVRNKKQLVSYAGLDVVERTSGISVRGRSRISHRGNRYLRKCLYFPAMTAARHSNDHKALYNRLISKHGIAMKAAVAVQRKLLVMMYAIWKNGTIYDPNYESKKQQNELGQTRRPALTELA

SEQ ID NO: 497012 - protein, 360 aa, unidentified
MKKVSKQMRKMEAVDKPEMTLGLDLGDRFSHYCLLNADGDVVEEGRMQSTEAALKRHFEGELPMRIALECGTHSPWVSRLLTALGHQVIVANARKIPAITASESKNDKNDAEKLARFAAYDPRLLSPIEHRSSERQLDLNLIHARSTLVRARTMIVNALRGLVKSAGGRLPACSTEALPTRASAAIPPALVTVATPLVEQIALLNAQIGGMDKQVEKLAVKYPEISLLRTAPGVGPIVAATYVLTLDRPDVASNRSAGAFLGLRPGQSQSGDSDPQRRITKTGDRCLRSLLVQSAQYILGRFGPDSELRRWGLKLAATGGKRGKKRAVVAVARKLAVVLHAMWRNGECFQAFPQPVTIAA

SEQ ID NO: 497013 - protein, 388 aa, unidentified
MEARLVDTTSTTHNDALARCLIAIELSKASWVVGVQTPLSNKTSQYRLTAGDWESLLKLIERIRRQVSRELGRPVEMISCYEAGYDGFWLHRLLEAHGVRNYVLDPASLLVNRRARRAKTDRIDVERMLRALNRYLRGEPDACSVVRVPSVEQEDARRLHRERHRLIQERVAHVNRIKGLCATQGIYDYEPLRSDRKAQLEGLRSGDGRALPARLKAEIIRELQRLELVLKMIAQIEAERDAIVKEAAPQHLNAGKIKALANLKSIGPEFATTLVGEVFYRSFDNRRQVGGYIGLAPSPFSSGATDRDQGISKAGNPKARSTAIELTWMWLRYQPDSALSIWFRERVGDRKGRVRRIAIVALARKLMVALWRYLETGLVPAGAVFKTR

SEQ ID NO: 497014 - protein, 310 aa, unidentified
MKVVGIDISKYHFDLHLLPEGKAARYANTAAGIRQCCQFLLPVQPERIVLEATGGYELALTLELQTAALPVLVVNPRRVRDYARSQGRLAKTDQIDAQVIAEFAQSSRVQPRELPTREARQRLALLARKRQLVEMHVAEANRLEHAVEPLVVQSLRQSLRGLEKQIAKIDKKIAALIAADPQLQRQAEIVDSVPGVGTATAALLVTELPELGRANRQEIAALVGVAPLNRDSGQQRGKRMTGGGRVRVRSALYMPMLTVIRCNPVLRRFYQRLLDHGKAKMTALVAAMRKLLTILNTMLKNNELWDPKTA

SEQ ID NO: 497015 - protein, 457 aa, unidentified
MYRELHSLRQVLQQELKDTLPPLPGVEPEQLLETYLNQLTGYVGVDVADRTVTLLAINANQDELAHLLDVPNAPAGFARIGEWLERLRVDHHLRVLVVACEATGVFYWGLWDALAQCPNVARVLYNPRTTEHMGEVLSKRVRDDLIDALLLAEQVRLGSTPEVVLTEDADLLSARLCSRAARDEAQVINRKKNQLRSLLRGYNPVLSRVFPGEKLHHPAVYALLQQEVFPEEFVAAGVEALTWILTQHSRSAFGAEQAQQLVDQCRGLLSRPMRREVVHQRVTDLIAEIQLAHQHQKALLKAGYALIQDRSEAKLLKAATGAGVSNTLALVSEVSDVQRFPDGEHVASFLGLTTSKHISGATIYQSKHITKQGSPNARYAAVNMALHLSLRVPKYQTMYHNIKTRKPPRKGHRLALVAIARDFVTNVLYDMWREQRPFFIKVEDYRLYRKDHPRPKV

SEQ ID NO: 497016 - protein, 420 aa, unidentified
MTASNERTIVSLVNPICCGLDVHKESITACILFNDSEGKERTIIQEFSTFTDDLLSFRDWLLIHNCPILAMESTGVYWHPVHNILEGYIEVILVNARDIKNVPGRKTDIKDSEWLAGLLRHGLLRSSFIPPKDIREWRDLTRTRRKYVNTLSDHKKRVQKLFEKANIKIDSVVSDLFGVTGRNLMNLLISGHTDITMKDIENCVRGKLKGKKQELYLSIKGFFTEHHRFLLELLLSTITSLENTIAELDQRIDRCMSNHKELLERLKEVPGIADISARDIIAEIGTTLDAFPNEAALASWCGLCPGNNESANKRKSSKNHTWKNQLKPVMTEVAHAASRTNNTYYKEKFHRLKARRGPKKAIIAIAHRIIKAIFHIIKYGVSYKELGMDYLDKKTKTAKLYRLQKQAESLGFKLIPVTVE

SEQ ID NO: 497017 - protein, 362 aa, unidentified
MKQALEAATICSPQTQPRQVIGIDLGDRWSRFCVLDEAGTVIEEDRVRTTGEALAAKFGSVPPTRIVMEVGAHSPWVSRLLQAQGHEVIVANPRKVRLIYESDRKNDRVDARMLARLGRVDVTLLSPVQHRSSEIQADLAVVRSRNALVAARTQLINTVRGMVKSMGGHLPRSTTAAFAGKVGILIPAELKAALEPLVRSIRSLSEQICCYDERVERLADKKYPETRLLRQVKGVGPLIALTYVLTIGDPVRFPRSRQVGSFLGLRPRQFESGDIAPQLGISKCGNNHLRWLLVQAAQYTLSRLAPDSRLRRWGLALANRGGKNAKRRAVVAVARKLAVLLHRLWVTGEVYEPLYGITTQAV

SEQ ID NO: 497018 - protein, 344 aa, unidentified
MSDLTLVGIDTSKAVFTVHGIDAAGRPVLRTSVRRGQMITFFRKLPLTTVALEACGSSYYWARELTALGHTVRLVPTQYVKPYVKRGKNDRNDAEAICEAARRPGMHFVPLKTLAQQADGMVLKVRDTLVGQRTALINTARGHAAEFGVIAAKGAAKVAELFSAVEQQPDIPLVAGEMFVLLRQQIDDINARIAELDAKLHATHKAHPVSQRLATIPGVGPITALTLAIEIDAAQFESGRHLAAWTGLTPTEHSTGGKQRMGGISRAGNERLRRLLVAGATSVIRVATRPGNQQMTEWLRALLARKPRKLAAVALANKMARIAWALMKSGETYRRGATTGVAKA

SEQ ID NO: 497019 - protein, 464 aa, unidentified
MTRKARRKESKAKQPNVDWKALDIVHPDAAGIDIGGSEHWVAISPERDEQPVRCFDCFTQDIEHMADWLLERGVRSVAMPSTGVYWIGVFEILQQRGLEVFLVNARHTKNLPGRKSDIQECQWWLKLHTFGLLNNSFQPSDEIRIARNLWRHRGGLIAQASSAIQRMQKALTEMNLQLSNVLSDLSGVSGMKIVQAILNGERDPQVLAAMADPQVKAPPEGIAKSLEGNWRPELLFVLQQQLDQYRMLQSQIAECDRMLQPHLHTMAPKIDLATQPLGPRPKGKRAQGNAPHLFDLRTELYRITGVDWTQIDGIDVQVAQTVIAEVGVNLKPSFPTENHFASWLGLCPRNDSSSGKVLNRRTPKVKNRARTAFRQAASTLLRSQSYLGAQYRRLRTRLGAPKAITAMARKLACLFYRLLMSGKSYVDKGVEYCEQRYRDQQIRSLMKRAKQLGVQVLIPTTVTT

SEQ ID NO: 497020 - protein, 452 aa, unidentified
MQKKSVKMEVINPSAAGIDIGSRSHFVAVGQADEDVREFGVYNEDLKSIAHWLKEKGIETVAMESTGTYWQSLFAVLQSEGFQVILCNGKFTKNIKGKKSDVQDCQWIQKLHTLGLLSGSFLPDEATEQLRTYCRHRSNLLEQAADTARKMQKYLRLLNLRLDIVVNDICGLTGLKIIHAICNGETNPETLASLRNGNCKKSEEEIAKAMQTNGRNDYLFTLKHEHQMYQNLQSKITECDAEIEKMLNKQINEDENKKQHYIEKKVHKRINKNTPKNMDINLLSYQYFEGVDLMAIEGVSYSTVLTLMSEVGTGIHKFETAKQFASWLRLSPNNKISGGKVLSNKIPKGSNRLKIALRNAANAIGNLKDTALSNFFSRISHRKGRVSAISATARKLAVIIWNMVVKNKPYVPLTEYQFVDQKRKKITAMKRLITKFEITTDDLNLQLKFNEL

SEQ ID NO: 497021 - protein, 372 aa, unidentified
MNYNTVYVGMDVHKESFTLCSCKYEDEKASHYQRTPASYKNVLRYLAFLRTIYGEDTRFVCGYEAGCLGYSLYHQLENFNVECVILAPTTMLEQRSKRRIKTDKRDAEIIAKSLAQHNYSPVHIPTETDNQTKEFIRMRDDHKAELKKIKQQILAFCLRQGYQYDGSGNWTAKHVKWLRSLKTEGLYKEILDEYLLTYTILTDKLNRLDQRIEELASKEEYKESVSKLTCFLGIKTHTALSVIVEVGDFQRFVSARKFAGYLGLVPGQHSSGDDRNGLGITKAGNTHVRRLLVESAQSYTRGKIGYKSRVLRSRQAGNSPQVINYADRANERLRRRYYKMVLKDGKKYNIAKTAIARELACFIWGMMTDNIY

SEQ ID NO: 497022 - protein, 412 aa, unidentified
MLFIGDDWAEGHHDVVVQDEAGKTLARRRLPEGVDGLARFHEVVAFCLGEDGEPDAAQVMVVIETDRGPWVNALAAAGYRVFPVNPKQAARHKETVAVSGKKDDFFDAAGLADMGRTRRHQIRELAADSDVAEAVKIAARAHQKLIWERTRHLLRMRSALREYFPAALEAYADLTLAGADALELLGKAPEPASAARLTVTQITAALRRARRRGDLAQRARDIQAALRVPHLGQPAVIAEAYGASVQAGAAMITALNEQIKIMEARVSELFHRHPDAGIYLSQPGIGDITGARMLGEFGDAPGRYASAKARKNYAGTSPLTIQSGKKKTVHARYIRNRHLIDALHAQAFAALTASPGARAYYDELRAREIGHEAALRRVAGRLTGVLHGCVTTGREYDEATAWSHRDTPAQAA

SEQ ID NO: 497023 - protein, 369 aa, unidentified
MKNTIVHHEGAASLEAAVGKVKLSGSIIKIGLDVHARVYVAVAQYDHLLPKPARRLAPGEFVPWVEQLLGAGHNVHVVYEACGFGFGLYRKLKTIGAHCYVIAPRKLDEQYTRVKTDPRDATTLCQRLSRYLDGNTRELAIIRVPTESEEKARHVSRQREQLVHLRQKLEFQGRSLLVNHGLLSPAHWWKNQTWSRLSKLLPGWIIIRLEVHRPALLILQQQIDALSAQLEAAAPADVPAGIGKLTTVVMTREICSWERFRNRRAISSYTGLCPGEHTSGSKRVAGSVTKHGNPRLRAALVECAWRMVRFQPNYPPVKKRLPILAKRAPATGAQRKKAIVAVARHLAVDLWRLHTGRCTAQQVGLKIRK

SEQ ID NO: 497024 - protein, 435 aa, unidentified
MRREQVSVFRERGLRAGVSRRAEPQCLVGNANTERKTDTMKSYILLKPQTVQSQISRISAGAKPPVLFIGLDVHNDSIAVSLASSDTSEVRRYGIIGGEHDDVLQLVKKLQAAHPGATLRFCYEAGPRGFALCRCLRSHGLDCIMVCPSKVPRKPGERVKTDRRDADQLARLYRAGELTGLYVPEPVDEAMRDLIRARYQVGKAQHRARQQLKMYLLRHNLRYGGQTSWSPAHLRYLAQIKMPFPVQQIVFQEMLEVISEATARLERYDQEIERAVPGWRWEPAVRALMSLRGMARLHAATLVAELGDFHRFEHPGQLMNYLGLVPSEHTTGKDRQQGGITKMGNGPARRALVEAAWQYRAPARLSPHLKKRQAGLPKAITDISWEAQRRLHHRYCHLTRVGKKKSQVAVTAVARELAGFVWAIGCLVQPSPAKP

SEQ ID NO: 497025 - protein, 408 aa, unidentified
MQVTFGIDVSKSTSTVCELIGESKNELTITNNRPGFIQLLHELTAFSKHPQIIFEATGVYSRRLQAFLEDYGYEYVVLNPLKAKKEMDMGLRHNKTDKTDAYHLALIQRLYRHPINQLQSQTYKQLNSLSRFYDQLTADLVMAKNRLHQALQSTFPEIENLFSSAKGKNYWQIVVRYPHCDLVRREDKKQLINWLMSLKGIAFKHALRTADKLIELAYQAYPVVSCSSIEVEQVQYYAHRSLNLSDQRENLIARMVKLAKSLPNHDLENLESIPGFAQTTAVRVLAELGDLRRFSNPNKINAFIGIDPGRYQSGEMDSNLSITKHGNAVARKLLYRAIGQIDNAAKTNPCHIADYYESKKLSSQTKGFKKIAIASIHKLIRTIYALIINDQPYDYNVATHNQKDFSRN

SEQ ID NO: 497026 - protein, 336 aa, unidentified
MIGGVDTHADTHVAAALDGIGGLLGVQEFAATPAGYARLLGWLQGFGVVGLVGVEGTGSYGAGVARHIAAAGIRVVEVDRADRQDRRRKGKSDPLDAVSAARAALSGRASGMPRGRDGQVEAIRALMVAKRTARAQRTQTINQARALIITGPDDIRTRFTGQTPAGLVTGLATLRPRPGSMVRYHTLLALRELGRRAQYLDGQLTRLDELITPLVTARAPGLPSLFGVGPDTAAMLLIAAGDHPGRLRSEAAWAHLCAAAPIPASSGKVARHRLNRGGDRQANHALWRIVITRMGSHPPTRAYVARRSKEGLSKPEIIRCLKRYAARETYRHLRPR

SEQ ID NO: 497027 - protein, 482 aa, unidentified
MKAKTQEKTSKDSCGPEPGHWHEMNRKQRRETMRKIQSDDLSLEVVHPDAAGIDIGNESHYVAVPPTRDSQPVRRFGCTTAELKEMAQWLKQCGIRTVAMQSTGVYWIAVYDILEAAGFEVYLVNARETKNLPGRKSDVQESQWLMKLHTYGLLRNSFRPSQEIRTMRTYWRQRNDLVQAAGRHIQRIQKALTQMNIQLANVLSDVSGMTGQAIIHSILAGERDPDKLAEFRDPRVKASKHEIARSLEGNWEEDLLFVLRQEQDGYEFCQKQMVECDRQVEQYLQQREDRSKGTPLPEEKRKGRLKKKKGNAPQFDLRGELFRMTGTDLTQIDSIDVMTATTILSEVGWDMGKWETEDHFVSWLRLCPDNRISGDKIVGKGRLPTKNRVSIALKMAASTLRRSNTYLGAQFRRFRTKLGSPIAIKAMAAKLARLVYRMLRYGMTYVDQGAKFYETQHRILQIKQLKWKAAKLGFQVVQAPAA

SEQ ID NO: 497028 - protein, 373 aa, unidentified
MGDNSEVFVGIDTSKLRHAVAVAEGGRGGEVRFLGEIEATDAAVTKLVRQLAAKHGKLFFCYEAGPTGYGLYRLIKELGCDCMVVAPSMTPKKPGDRVKTNRRDAVSLARLLRAGELTSVWAPDERHEAMRDLVRARSTAVMDLRCKRQQLSAFLLRLGRHFTGKKTWGRAHMNWLMGQKLAHREQRLAFEEMMLAIREAQARVARLGQAIGAAVPDWSLAEVVTALMAMRGIDLIAATTILAEIGDLSRFSTPRELMAWLGLVPSEASTGDRVRRGSITKAGNSRARRMLVECAQSYRYPARVGLAKQARVEAAPRVAREIAWKAQVRLTARYRALIREGKLRNVVVTAVARELAGFIWAIHRALVESRTAA

SEQ ID NO: 497029 - protein, 378 aa, unidentified
MKAARFTADEIERVAYLTSKGYLPVAVDVASRVFQVCYYDLGAKHIKNYQLSRVKFFEFIDDTQTPRKLIGIEACGSCNYLCRYIEEHNHKCHILLAQKVKAFLHLDKTDRIDDLGILKALITPSMQHIPARTQENQYLLNLITVREQLNKQFVQTVNAAHAFLYESGVVAGTASVASATKVTEALKALCNAETKKEHSEDDCSYSHLNCISESLLSNIESLQTKIKEINSHLLSYASNNEICSNLQTVPGIGKLSAVALYAAMGEPERFSSSRAFAAFIGVAPVTTGTGGKTTVLGIRKSGIQSIKKMLYMCAMVYLRQAMKNGTESSWLKLRLNQNRSKKIIICAIMNRLARIAYAIAKSGQPFDENKCNMIKKLR

SEQ ID NO: 497030 - protein, 310 aa, unidentified
MDIIAVGIDVSKDRLDVAVDPDGEAFVVERNGTGLQQLVARLKQLAPTIVVLEATGGFETVAAAAVGGAGLPIAIVNPAQVRAFAKALGRRAKTDPIDAAVIARFTAATRPEPRPLPDEATQLLSDLVTRRRQIVEMIGAERQREKRAASRHLKKSIARLIKALEKELVSVDTDIDDAVRSSPAWRETEDLLASVPGVGPIIARTLMADLPELGRLNRKQIAALAGLAPYTRQSGQWRGKSFIAGGRQAIRTALFMGAMTARRHNPVLKAFFDRLVAAGKPKLVALIAVARKLLTILNAMLRTKTPWQPA

SEQ ID NO: 497031 - protein, 304 aa, unidentified
MFVYCGIDVAKGQLDGALLGKRWQVPNTKAGIRRLIKMLRQRNTCPQVICEASGGYEQDLVELLHQAAVPVTLVQPQRVHQFARASGILAKTDKIDAQVLVRFGQALAPAPNAAPGAQTLLLRELDRQRAHLSGLLVAEQNRRAQLRDPSLRQLSAQLIKQIQGHIVRIDARTQAIIAADQELKAKAKMLTSFSGVGLRTATMLLAQMPELGQLNRREAAALAGLAPFNRDSGTWRGQRRVCGGRSLVRRGLYMAALTAARRNHILAPFYQRLRAAGKPPKVALTAVMRKLLIALNSALSPTPA

SEQ ID NO: 497032 - protein, 286 aa, unidentified
MAMLSFAGIDVSKDRLDVMVLPEEQCSSVSNDPTGWAKLVEQLRGSSIAAIGLEASGGYERGVMRSLLAAGMSVRQVNPFKLRQFARASGVLAKNDPLDARMIASFVAVMPTRPAQRQTLAAERLVEMLAADIDMLDERLVEIVVANAALAHRYRLLTSMPGVGPVLACTLIALLPELGRMSRKQVAALVGVAPYAFESGKLKGKRCVWGGRAPIRHVLFMAAMSASNWNPLLKRFHDRLAATGKLPKVVIVAVMRKMITTLNAMVRDDVVWADRHRGRHTVPTTR

SEQ ID NO: 497033 - protein, 345 aa, unidentified
MLMVSGVVGGVDTHADVHVAAAIDGNGGVLGIESFPAVAAGYEALVGWLVGFGPVSRVGVEGTGSYGVGLSRFLHDQDVVVVEVDRPNRQARRREGKSDPVDAVAAARAALSGSAKTTPKRRNGRVEQMRVLLIARRSARRQRIATLNQLRQVVICAPDQVRVRFKDRYKTGLVTEAARMRPRKGSDPIVYTTNVVIRGLARRIQGLNNEMRDIDDTLVGLIEQTAPSLLALYGVGVDTAASLLVAAGDNPDRLHTERSWAHLCGVTPIPAGSGKTNGRVRLNRGGDRQANAALYRIVLTRMSSDDETRSYVRRRRAQGLNTGEIMRCLKRYVARQTFKYLPRAA

SEQ ID NO: 497034 - protein, 375 aa, unidentified
MGEITRGGVVRVGVDLAKRVIQVHAVDAAGRRVVGRALKREQFMAWCAQLPAGCLVAMEACSSAHHWARKLRSLGLDARLIAAHFVSPYRMEGKSGKNDMTDAAAICEAASRPSMRFVAVKSCEQQGVMSLHRVREGLKEERTGCINQIRGVLAEFGLVFAQSPKVLRTALADVIEDASNELSAMARRVLQRAFDHWRELDEHMRWCDRQVGQHVRSSPATRRAAKITGIGEFGASALTAGVGDFHQFKAGHQLAAWVGLVPRQNSTGGKTSLGRITKRGDDYLRTLLIQGAKAAVMSAGKRDDPISRWLVQLTARVGWQKACVAMANKNARILWAVMTRDAGFDPRHVSDKPQAKSSAKERLAASTPNMTPCPA

SEQ ID NO: 497035 - protein, 337 aa, unidentified
MKRYLGVDLHRTQFVVCTRWENGEQEIRQWRIAELTKFVEQLQAEDQIAVEAMGTTMRFHDAVVGRVGRVVVVNPHQFKVISESVKKTDRKDAAALALYLEKDLLPEVRVKPKQNRELMHLAETRDLLVKQRSALKGKINNLLAMQGIELKREALSSKIALERVLAQPVSGMVQLELRILVEQIRSLSESIAELDERLEEEGQQLPGYENLTSIKGIGALSATVLLTVIGKISDFADENKLAAYLGLVPKIANSNESERSGRITKQGNKLARTCLVQCGLVAKRYSPYLNRFYERIKQRRGGGKAKIALARKLVKIVYDTLKNQWVFEDFPSFTLAA

SEQ ID NO: 497036 - protein, 398 aa, unidentified
MKTTDVEIFLGLDVEKTEHWACALAADGTKIWNKTLPNDEAKLTSIYQELATRGAVLVVVDQPATIGALAVAVAQDIGISVAYLPGLTMRRIADMYPGTAKTDEKDAFIIADAARNMPHTLRGITVSDENEATLGMLTGFDLDLARQITQTSNRIRGLFTQIHPALERVIGPWLEHDPVLEVLASWPTPAALKKAGQARVDAKLKKHGARRHTAWTAILFEALATQHVLVAGTDAAGLVIPHLARQLIALHAQRADVAGHLENLVEAHPLFPVLTSMPGVAVRTSTIVIAEISGKGFTSAAALASYAGLAPITRQSGTSIKSERVSRAGNKRLKRALFLSAFASIRFDPVSRAYYARKRAQGKRHNQALIALAHRRLVVLFVMLRDGTFYDVPVPANA

SEQ ID NO: 497037 - protein, 420 aa, unidentified
MELIVERPAALDVHNASVTACVRSPAVGGRREQFVEEFQTTARGLLALRDWLASQRVTQVAMEATGTYWKPVWAVLEDDFRCVLVNARDVKQVPGRKTDVSDAEWLCRLLEAGLLKACLVPPKPIRTLRNLTRYRKSLVRDRQREANRLHKVMQETGIKLDTVASKLLGKSGRSMLDALVSGTTDPEVLAELAEGRLRKKLPALREALAGRFDAEHALVVGQILAHLDFLDESIAQLSAEIEERIRPFASAVELLQTIPGVAQRTAEVIIAETGGDMTAFASAKHLVSWAGVCPGNDRSAGKRRSGKTTKGSKWLRGTLIEAAKSAARTKDTYLSAQYNRLRARRGANRASVAVASSILTAAWHMLATGEIYHDLGADYFARRDPERTTRRLIAQLEKLGHVVTLQPATSTTTTTDVVAA

SEQ ID NO: 497038 - protein, 343 aa, unidentified
MQTISTIGLDIAKSVFQVHGVDAAGQVAVRRQLKRRHVLAFFQKLPPCLVGIEACASSHYWSRELQALGHTVRLMPPAYVKPYVKRQKNDSADAEAICEAVTRPNMRFVPTKTVEQQSCLVLHRTRHLFIRQQTSVINSIRAHLAEFGIVAPVGRRGVEQLLEIVADANDVRVPEVARACIAALGVQLRALKAQILELDRRILAWHRSSEVSRRLDHIPGIGPALATALVASIADPKVFRSGRDFSAWIGLVPKQNSSGGKDKLGNISKQGDRYLRSLFTTGALAVIRYAKIHGTKHRPWLAALLARRPTKVAAIALANKIARIAWALMTRGERYKQPAALKV

SEQ ID NO: 497039 - protein, 315 aa, unidentified
MEHYIGVDVSKHMLDVWIEGEKTGFQLPNTPRGIGQFVRRVAALEGRWIIVCEPTGGYERLLVDRLGRCKLVMRMAHATRVRDFAKASGIFAKTDRIDARVLTQYARAMGVSEACERRSAEIDTLRAITQRRRQLQQQLVAERNRTDKTIPALMARSIARHAAWLEKEIAALEADLKSHLAAHPSLNAQTSLLQSIPGVGHITAATVLAELPELTSLPPEKLVALAGLAPFNRDSGGKTGKRFIHGGRASLRQALYMAALSASKHHPDLQIFYQRLRAKGKPAKLALIAIARKLLHLLHVIAKRQSPWKVKPIPA

SEQ ID NO: 497040 - protein, 438 aa, unidentified
MMLNSTPYLSVGLDVGADFTWMSIMLPNGTLTGKPFKILHSDPHSRELAVTKIKEAQEMYSLRSRCFLESTGIYHIPLLYFLRDKGFDCSVINPIITKNSTNMNIRKLHNDKFDSKKAAKVGLDASLKTSIVPDDDVVDLRNLVRDYYYFKDLQSAVILKLNAELKVSFPAYLKVFSKVTTQCSLKLLEAYPLAADMLAAPKEEIVKMIRSTARFGEKYALSKYDAIRTAAGDAAVFGRALKSNAVRIRLYISIYKEYQKHLDDLLAALHESVNKLHGTAVYERICLLQSLRGVGFLSAVVLIAEMGDFDLFSSPKKLYAYFGLDPAVKQSGKFNGDKVHMSKRGSSLARRILHMVALNNLKVGKGTKEPVNPVIYSYYTDKCRSKKKNVAVGAVMHKICNIIFAMLRDNKPFEVITPQEHCERYAAKHPDKTGINAA

SEQ ID NO: 497041 - protein, 415 aa, unidentified
MATVNIVYSVCCGIDVHKGFLIACIATTDEHNHTTHQTRRYSTFTGDLRRLAQWLLSNNCKDVCIESTGKYWIPVFNILEKTCNVCLTHPKYVKAIKGKKTDKKDAKWITELFKCDLVRSSFIPPEDVRQLRDLCRYNAKLTCANSSEKNRAQNCLTVCNFKLDDVFSDVFGKSASLVLDKLLEIRNSNFDVEPLLDRHCRATPAEVKSALDGELTLAQAEKIKLIRQHMESLNSLKSANEALIMRLAQKYQSQIDLLMTVPGISTPLTAIRILAEIGVDMSVFQTAKHLVSWAGLSPQNNESAGKKKTNRISRAGAYLKPLLVQIALSIGKSDKCPELKDKYQALKKRRGSKKAVIAIARKLLTIIWHILSKNTPYNAKLYQKSDKPPVNRVLTPEQAFAFLRSKGFQISEPVA

SEQ ID NO: 497042 - protein, 426 aa, unidentified
MAYRIAGIDIHKKMVAVVIADVDVAGTWQFDRRQLGTSPTQLRDLADWLVEREVVEVVMESTAQYWRPVWETLERRWQPPMRQTNASPRAGALHLAQAQSNQGPRGRKRDFPDAERLVKRLVAQELTLSFVPDVTQRLWRTVARRKYQSTCNRVQLQNRLECLLEEMHIKLSSLVTDLLGPSARRMLRAIASGGTDPAAVAGLGSRRLHATPDQLRDALGACTDLHPVYRRLLTWTLDELEGIERHIQQLDQELAQLLRDHQDAVERLAAVPGLGVDSAHQIITEVGPTAATFPTAKHLASWVGACPGHDESAGINRSHRAPNGNRQMRRLLNQAANAAVKAKGSIFELVYRRLVLRLGHAQAIGAIAHRMCRLIWKILHDRVTYEERGPAVTKHRAQRRAAKMIRELRSLGYRVEPAPAPATASA

SEQ ID NO: 497043 - protein, 315 aa, unidentified
MNQVPPSVGIDVSQGTLDVAVCPGGEQWQLTNDDAGIGQLVERLRTLQPVRIVLEATGGYELAAVAALGIGGLPVVVVNPRQVRDFARSTGQLAKTDALDAQVLALFAARIQPQLRPLPDATTRELSAVLARRRQLIDMRTAETNRLKLALEAVRGDIREHLRYLDKRIQDFDRELHDRLRNSPLWREKDNLLRSIPGVGPILTTTLLADVPELGTTDHKQIVALVGLAPLNRDSGRWRGKRSIWGGRGHVRAVLYMATLSAVRRNLVLKALYQRLLQAGKPRMVAIVACMHKLLRICNAILMHGIPWRYQPLDN

SEQ ID NO: 497044 - protein, 428 aa, unidentified
MNKDELYRIEQFNQFKNGIRGSNKHLIIGIDVAKDKHHAFMGSATGNSLLRRLVFENSISGFGKVLTQAEAIRVQNALQCSVFGFEPTGNYHKPLAEYLIRCMHNVVLVSGLATKRNRELLDGRWDKHDTKCAANIADLISQGKCLFYETPSPQIRQLRELMSLRRRLKKEQHSLKMRIRNNLLAKYFPELDRFYNQCESQCLDIIRECLNPSEIAGMEFDQFYKALPVRKGKIVQLRRLIKIHHLACESVGCEMGEAGEFEARMLVDKLRAVCKRIEETKDLIEDISLDFTEYSWLLTIPGFGPYISALVLATISNPYRFTNRKQVLKMAGYDLNAVRSGKKSDMVVPKISKRGNAALRYALYQAAFVASTRNLAFVQYYTRLLQGREREQGIKTKMRVKIAAKMLVIAWTLMKKKIPFNPDCLKYE

SEQ ID NO: 497045 - protein, 404 aa, unidentified
MKGPIVSIDVSKGKSDYQAFKDLNVKYTGSRSIKHNKEGFDEIVNLVREMEKKLETEVCVVYEATGVYHRVLKKVLEDNNIKQFIINPLLSAKTRKNDSLRSPKTDKLDPKSIAKTYYSHSLHNSHKPETIYHELRELSRYYEDILVHIRKDKVAFRAQLDVVFPGYDALFDDLYGPVALAVIEKYPHPEMLQKKKINTVSKVIQNKTCHRQAVSDTMADKAIEYSKTIYSGCDKDDIEVLILQRLIKKLNEDMAEAERTIGEMIKLAQELPDFSIIKSIPGIGDNLAARIIAELGDMTRFKKKNELVAFAGLDPRISKSGKNDGDHMHITKKGNKRLRCLLYLAVTCSIRLKRDDNSIKDFYIKKKQQSNPMCSKAAKTACASKLVRIIYSMCKTGELYQYNK

SEQ ID NO: 497046 - protein, 321 aa, unidentified
MIVSDSTSPVVGIDVSKARLDIACLPVSTTALSHVDNDPKGHAALIAWLRGIAPRLIVLEATGGYQRAVVAALATAGLPVVVVNPRQVRDFARALGILAKTDAIDAAVLARFGASMNPILRPLPDAQATALADLLTRRRQLIELHTAESNRLGQTFAPKVKASIRAVLTVLKKQLGAIDDELNGLIQQCPCWQEKETLLTSVPGIGTLTARTLLACLPELGRLSRQAVAALVGVAPINRDSGTMRGKRTTWGGRKVVRSSLYMAALVASRHNPVICAHYHKLLNTGKAKKLALVACMRKLLVMLNAILRNRTPWRSAYVTP

SEQ ID NO: 497047 - protein, 387 aa, unidentified
MPQPNDLSRSLVALDQDSTIIAVVEMSQSSWLVGGVLPGIERQPRKKQEPSPERLLALLHRWRDESVRAGRTITRIAVAFEAGRDGFWLARWLEARGVEAHVIHPSSVAVSREHRRAKTDRLDTELLKRGFLGWLRGERGHCSMVRVPTIAEEDAKRPNRERECLVKERTRLVNRMKGTLARLGIRNFRPTLRNAAEHLAALSTPEGSPLPPNVAAELERDIERLRLVISQIKQLEEVRRQRLEEQPERGPHAMVRLLARVVGIGIETADMLVNEVLSRPLRDRRAVARYAGLTGAPDESGARRREQGLAKAGNARVRRGMIQLAWRFLRFQKNSALAQWYQARTADHRGATRKTMIVALARKLLIALWRFVTIGEPLDGVTLRPAS

SEQ ID NO: 497048 - protein, 412 aa, unidentified
MEVLYACCCGLDVHKKSITACVLWAEGKGKTRKEKRRFGTFTRELLQLADWLRACGVTHVAMESTGVYWKPVWNILEGQFEVLLVNAQHIKAVPGRKSDQKDCEWIADLLQHGLLHGSFVPPKEMRELRDLTRYRVSLAQEENRIANRVQKVLEDANLKLASVASDPLGVSGRAILKAILAGEEDTERLAEMSKGILRKKIPDLRLALEGRVTEHHRFLLQELLDHQEFLEKKMAEVEAEIGKRMRPFEAEVERLDTIPGVDRVTAWSLVAEVGVRMEQFPSAGHLASWAGLCPGSFESAGKRLSGRTRKGSASLRRCLCQVGSVVSHMRDNYLSAQYRRLAARRGGKRAVLAVAHTVLVMAYHILKRKQNYQELGADYFDRLNADAIRRSLVRRLERLGHRVTLEPLPQFA

SEQ ID NO: 497049 - protein, 379 aa, unidentified
MPETTRQTECNAGRTLYVAFELSGKTWRLAVTTDRGERPRHYSVASGDLGAVYERLVRARTSWDLPTATPVVSCYEAGREGFWLHRALTAQGIRNVVVDATSIERDRRAKAVKTDRVDAERLLELLVAWTEGRKRLRTVRVPSAADEDARHADRELATLKGVRTTLVNRITGLLGAQGIPLRLTPARRVDVAALRDWAGARLGPGLSGRLTRELEELAAVRARMAGLEQARQTAIATAATPATRQMAQLVQLRAIGANGASRVVVEFFAWRAFRNGREVGALAGLTPTPYQSGAVAREQGISKAGNARVRTMMIELAWCWLRFQPQSALAQWYQRRFGAGGRRQRRIGIVALARKLLIALWRYLDAGVIPDGAIVTAAA

SEQ ID NO: 497050 - protein, 411 aa, unidentified
MEILYPRCAGLDVHKETVVACARLATGSGEVAREVRTFGATTASLLELAAWLTAQGCTHVAMEATGVYWKPVWHILAADGFALVLANAAHVKNMPGRKTDVGDAAWLAELLAHGLVRASFVPEAQTQVLRTLLRTRKQLVRERVAHTQRLQKTLEDANIKLDAVLANLLGASGRAMLEALAEGESDPATLAALAHPRLTATPERLEEALRGRVAPHHRFLLRLHLDQVDALDAAIARIDREVDAGLAPFQAAVELLTSIPGVGGLAAQVIVAEIGLDMGRFPTAGHLLSWAGMCPRNDESAGKRRSTRLRKGAPWLKTTLVQCAWAASRKKASYLQAQFHRLRGRRGPKKAICAVAASILTAAYHMLKDGTAYQDLGPAHFERRSKQTQAQRLVRRLADLGHAVEIIPVAA

SEQ ID NO: 497051 - protein, 337 aa, unidentified
MGKRAVKAEKAWVGIDVSAATVEVALEDDQGGRRELAAPNTAAGHRALCRVLAMAAREVFVCVEATGIYHFDLALALQGAKRVHVMVANPRATKDFARATMQRAKTDRVDARMLREFAKRMPFQGWAPPPPRVLALRALARRIEALTEARGQEVNRLHAAGVSAHLGPTLQKASRAHIRFLDASMEALGAEAKALIAAEPILARRFAQLVSVRGIGERSAVRLLAELAVLPADMTVRQWVAHCGLDPRPWDSGRSIHRPARISRTGNARLRAALYMPALVAIRCDAHVRRFHDALLARNKKPMQAIVAVMRKMLHAIYGMFANDETYDPGKCYRVAA

SEQ ID NO: 497052 - protein, 341 aa, unidentified
MDTMIGVDLAKNVFQLHGASLTGEVKFRKELSRLQFRKFMEDQPASIVVFEACGGAHFWTREMQQLGHQAKLIAPQYVKPFVKRQKNDVADAEAIVIAAQRPEMRFVEPKSNAQIARGVVFRSRDRLVRQRTEQINALRSILYEQGQVFPTGVRQMKKIAEFLERADNGLIALVLEECEELLASIYDLTTRIDAKTLKLKKLSQQSEMSRRLQTIPGVGPLTAMAIEAFAPTMDIFRCGRDFAAWIGLVPKQHSSGGKARLGKISKEGQVDIRRLLIIGAMTRIAWVGRKPIQAGSWLDRMLKRKPKMLVAIALANKMARIIWAVLTKQEDYRDPVKIAAA

SEQ ID NO: 497053 - protein, 351 aa, unidentified
MRHYIGFDVHKKSISYCVKTAEGTIIEEGKLRATRQALRAWAQKRTEPWYGAMEATLFSAWIYDTLKPFAATLQMGNPSMMKAIGAAKKKNDKLDARKIADLVRCNLLPVCYVAPPEMRDLRRLLRYRNLVVGQAVQMKNRMSGMLMEVGAEYSKRRLHGKEYFSELLDQLEEVPESVKDLLRVSRGALEMFAATQRQLLDRLQKDPLLVKRVQRLRSIGGVGEVTSLTWALEVCDPRRFPSIADAVSYCGLTSALDSSADKPKRGPISKQRNAHLQTVLIEAAKLAPRWNQQLAAVHERELQRGDRNRNRATLAVARKLVAYLLAVDKSGKPFEVRNPPVKETEEVGQMA

SEQ ID NO: 497054 - protein, 412 aa, unidentified
MTEESFTWFAGVDWGSEKHHACIIDTRGTVVGERQFPHSGVGLAELGDWLLSIAGTTATVAVAIEVPHGPVVDSLIDRGFVVYAINPKQLDRLRDRFSVAGAKDDRRDAYVLGDGIRTDRRLFRRLHVADPRIVELRAWSRLTEELQEERVRLGNRVQQQLWRYYPQMQKITNDLAAPWFLALWAMAPTPGKARQLRRSTVEQILKKHRIRRIDADTVLRMLREPAIKVAEGVAEAASIHLRSLIARLHVVNRELRQAEQKLDQLCAGIGETEGAPGECLQRQDIMILKSVPGIGRINLAALVCEASGPLRSRDYPALRTLCGAAPVTKRSGKSQIVVMRYAAHARLRETVYHWARTATQHDAKSRCRYAALRQRGHSHGRALRGVADRLLGLTCVLLQRQTMFDPHFGQAG

SEQ ID NO: 497055 - protein, 335 aa, unidentified
MFMIKINLGADISKETIDFFCDANSELFQLKNNAKGLDKLLMWADQHQYPLNQIAIAFEHTGHYGNVLVDFCVQHEITFYHVPALEIKKSLGITRGKNDQIDAKRICAYLKEKGYKLTPTKPVNDAIERLKHLQAQRALFVRNSASIKNVLKDQLEVLVISKEDFLVRTNMQMIQQFEKSIKEIDDEIQKMVEADKEIKKNYNHIISITGIGKVIAIDTIIATHNFTKFNNWRQYASYCGCAPFEYSSGKFIGKPRISKLANKELKAHLNSGALSAIKFDNECKMYFERKLKEGKTKKCITNVIRCKLIARMYAVVKQNRPFEKNYAHSLEGKVS

SEQ ID NO: 497056 - protein, 342 aa, unidentified
MAHLIAIDLAKNVFQLHGVDDRGTALFRKKLRREQVVPFFTTIEPTRIAMEACATAHYWARELSGLGHTVKLIAPQYVKPFVKRQKNDMADAEAIAEAAQRPSMRFVEPKSIEKQSRAALFRTRDLLVRQRTQLVNSLRGTLAEFGAISAKGIPQLSRLKSALEEADSHGLPEGVAELGKMYLGKIEDVSKEIDTLTLKIKAEGTSRPELRRLQTMPGVGPIIALAIDSFVPDMKSFRRGRDFSAWLGLVPKQHSSGGKDRLGKTSKMGQRDIRRLLISGAMAVLQWTQRSKKNIDPWLARMLEKKPRLMVAVALANRMARGLWAMTVKNEEFRPSHKKAIA

SEQ ID NO: 497057 - protein, 343 aa, unidentified
MDHFAGLDVSVKDTSVCIVDDAGRIRLEVKVASEPDALLTVLRNPAYRFKRIGLEAGPLSQWLFSALAEADLPVICVETRHMRAVLKAQINKTDRNDARGIAQMMRVGLYRPVHVKTLRSQKLRMLLTHRKLLQAKVIAVDNDLRATLRNFGLKVGMVGTIKFEARVKELVENFPDLMASVEPLLVVRRVLREQISILHRRVLAAARNDEVCHRLMTVPGVGPVVALTYRATVDVPARFRKSKSVGAVFGLTPARDQSGERDRPGAISRCGDEMMRTALYEAAQVMLLRSAKWSWLKAWAMKIARHRGMKKAIVALARRLAVIMHRIWTDGTEFRWTREAAAV

SEQ ID NO: 497058 - protein, 354 aa, unidentified
MIIIGCDYHPGFQEIAFVDTETGDCGEQQLKHCEGAQEFYRALVAQGKKVRVGMEASGHARWFERLLAELNIELWRGDAAVIRAKRGRKKKTDREDARHILNLLLTGDFPKIWVPSWENRDLRQLLWHRHRMVQARTRVMNQLQAVALNEGLRCKKKLWRTHGREQLEAFRLAPWASRRRKDLLEILDRLNPTIAELTQAIEQEAEKCPQALCLITHPGVGALTALAFVLIIGEAERFQCGKQVGGYLGLVPLEDSSGEKRRLGHITKQGNSLLRFLLVEAAQVSSGTIPEWHSKYIHLTMRRGRKIAKVAMARKLAMRLFWMMRKGWNYQQVIKFGSHVEQPGNRHGVQSNTE

SEQ ID NO: 497059 - protein, 392 aa, unidentified
MSQHCHFDASRSLTALEQDSTIIAVIEMSQTKWLVAALIPGVERQPLKKFDAHEETLLKLLHRWRREAGQAGRNIKRIVVAFEAGRDGFWLARWLRARDIEVYVIHPTSIAVSREHRRAKTDRLDTELLMRVFLGWLRGERRHCSMVAIPTIEEEDARRPNRERQTLVTEQTRIINQMKAIFARFGIRTLRPTMRKVAEKLEDLRTAEGTPLPQNTLAELRRHLARLRIVRDQIRAVEQERLRKLAVASAAEKKSPHAMVRLIARVLGVGVETADMLVNEIFSRHWRDRKAVARYTGLTGSPDESGSRRRERGLARAGNVRVRSGMIQLAWRFVRFQKNSALAQWFAARTADGRASTRKTMIVALARKLLIALWRLVTRGEVPQGVALRPAS

SEQ ID NO: 497060 - protein, 339 aa, unidentified
MKITTIGLDIAKTVFHLYAVNEMGRYVKKKQLKRQQLLPYLAQLSNCVIAMEACGGANYWAREMKVLGHEVKLIAPQYVKPYVKGNKNDYNDAQAIAEAAQRPTMRFVPIKSVEQQDIQNLHRQRERIKKARTALVNQIRGLLAEYGIVINKGVAAVRKSLPELLEDAENGLTMRSRELFAELFDELRLLDERFKQSEKQIEASNRGNDVCQRLDEILGVGPITASAAYAAAGDGKDFVNGRHFSAWIGLVPGQHSTGGKPTLLGISKRGNGYLRTLFIHGARAVLRHSASKTDRFSRWAQALLERRGHNKACVAVANKMARMAWVIMAKGETYRPTMS

SEQ ID NO: 497061 - protein, 385 aa, unidentified
MHQIEHQHSALDGAVVFVAMELGRSARLLASRGSPSGRASSHRLRSGGGAGPLAPLRRLQARERRVCGGGDPRVIVGHEAGYDGFRLQRRLTAEGITCWVMDPGSLQVNRRARRAKTDRLDAAMLLRALIAWCRGDRAACHMVQVPSVEREDARRTHRERQRLVTERVQHVNRITGLLATQGIDGYQPLRRDRWAGLGGLRTADGRELPPRLRREIERELKRLELVLDQLEAVEAERDAAVAAPAAEDADAAKVAQLAKLGGIGTELATVLVREGLFRSFTNRKEVAAYAGLTPMPFASGERCREQGISKAGNPLLRKAMVELAWLWLRYQPDSALARWFAERVGATRGRVRKIAAVALARKLLVALWRYLTAGLVPEGARLKGA

SEQ ID NO: 497062 - protein, 345 aa, unidentified
MEYIGIDVHKRQSQICIRHEDGRFTERRIRTERGRFAAVLGGRPRARILIEASTESEWVAQCLEELGHEVIVGDPNYAPMYGHRRRRVKTDRRDARALAEACWVGAYRPAHRSSVAARQLRRQLAVRDVLVGTRVRAINVIRAVLRREGLRVRSGSSENFRRRLEEVAVSRPVGADIRPLVKLLGEIEEQLAAADKRLTTYAQRDRVARRLCGVVGVGPVTAAAYVSVIDDPRRFSDARQVASYLGLVPGERSSGEQQHRGRITKVGNSRVRRLLVEAGWTVLRGRSPATAQLRAWGERIAVRRGKRIAAVAVARRLARILYALWRDGVEYQPVVLARGVQSSAA

SEQ ID NO: 497063 - protein, 372 aa, unidentified
MEERSKIHVGLDVHKDSISVAAAEPGRAPARLIGKLAHDLSKLLKVLIKVGPAEQLHVVYEAGPTGFGLQRTLAEKGYVCEVIAPSQIPRRPGDRVKTDGRDCRQLAECSRAGQLSAVWIPDPSDEAIRDLARAREDAVNSRVQARHQLKGFLLRHGVRYTGKTSWSIAYYRWLSTLNFGVGATQTAFTEYWKAVEAADERVERLTKALEGSITDWRFEPVVRALQALRGVAAITAISLTAEIGDLARFSHPRKLMGYLGLVPSERSSGERTSRGSITKTGNAHARRLLTEAAWNYRFKARIGREALARQEGLPAGIRNAAWKAQIRLTQRFAALQSRGVQLNKACVAVARELAGFVWAIGLQAQREKAPTA

SEQ ID NO: 497064 - protein, 433 aa, unidentified
MQVTRRPDPLVSPDGHPEPEQRRDLIGARLCVTHHSIVRPLLLIGWKLMATAKGAADVTMIGAERSDTEVETILGVDTHLDFHVAVAIDHLGRRLGEASVPTTVKGHERLLRWAERFGPVRCVGVEGTSSYGAGLARHLGAKGIDVLEVERPERRRRGSRRNLKKSDPCDAEAAARAVLAGESSGVPKSGDGTVEMIRTLRAARCSAIKARTQAANQLQGLRVTAPEQLRQRLRELSTKEFISVAARFRLGDDPRDVPTATKFALRSVARRYEALSAEIADLDAHLDRLVAQAAPELVSLPGIGTDSAATLLVVAGDNPQRLGSEASFASLCGVAPIEASSGKIVRHRLNRGGNREANRALYMICLARMRRDRRTKEYVARRTQEGKSKREIIRCLKRYVAREVYRLLISCDARSSPTGPQAEVHIASGSSAA

SEQ ID NO: 497065 - protein, 342 aa, unidentified
MKITTVGIDLAKNVFQVHGVDRRGRPVIEKCLKRKQMLVFFAQLTPCLVGMEACGGAHYWARKLQAQGHTVKLMAPQFVKPYVKSNKTDAADAEAICEAVTRPNMRFVPIKNADQQSVLSLHRARQGFVRARTAQANQIRGLLAEYGITLPQGISHVTKQLPGIVENAENDLPGVFRELLIRLGAHLRELDRQVQELEAQIHAWHRTNEESQKLARMPGVGPLTASALIASIGDARHFKNGRELAAWLGLVPRQHSSGGKVLLQGISKRGDAYLRTLMIHGARSVIRVAQGKTTSTDRWSTAMLGRRHKNIAAVARANKNARVAWALLAHGRDYNAGYEPEV

SEQ ID NO: 497066 - protein, 415 aa, unidentified
MKSYSELTHFAGLDWAKDHHDAHIMDRQGQVVAQFRFSHTGAGWQQWREKIQAYPAVGVAIETSKGAAVEQLLGSGVTVYPVHPKAAKAYRQRLAPSGNKDDVLDAWALADALRLDGAQWRALSPQDAIVEELRLLCRDEEELIGQRTALVNQLQQALQEYYPAALEAFEDWTQPYTWAFVKAFSTPQQLVQATPQRRRAFLHTHKLWRPGTAEDRLAIFARADQFCGGAAVTRAKSRLALALCHSLDTLQRQLDDYRAAIEKLFAEHPDQDVFGSLPGVGPKLGPRLLSAMGADRKEHPDAQGLQCLAGTAPVSYQSGQIRRVKIRWHCDRHLRHAVHLWANCSLKTCTWAAAYYAAKREAGKSHACALRCLAQRWLKILWKMWQTHTPYDPEYHARNQQRHGSWVLQLNPNKA

SEQ ID NO: 497067 - protein, 376 aa, unidentified
MVMSIVMGVDQHRAQVIAEWIDLDSGEISRARVSPADRTGVRRFLARFAGQQLEGALEATTGWRFFVEELRAVGAVVHLAEPAETAARRGNKQRAKTDRADARHHRELLLAGRLPESWIPADHILDLRARVRLRHTLIGQHTEWQQRIQAVLYHHGCPARRQLMVGDGRDWLDAQPLPETAREQITVALAMIDALERQIAPLDKLLRPYAHRQAGCKALIDAYYGIGDLVAVTILAELGDCQRFSNSRDAVRYAGLDITVYQSDRHRAPGHLSRQGPPALRWALYEAAQAARRPTSPDRESYQQAAERLGGNRACLALARKLLKRCYHTLRELGEDALAPPPDERPGSAAARRASSGSPLKTDRPATRKRADVLAA

SEQ ID NO: 497068 - protein, 336 aa, unidentified
MSDASVLGIDLAKNVFELCGQDQAGRVIYRKRLRRAQLLHTLALMPACRIGMEACAGAHHWARRLREHGHTVRLIPAQYVKPYLKGNKTDRNDAEAICEATTRAHVPEVAIKSEAQQAIAAYHRARSLLVKQRSALGNALRALLAEFGRVGPRGALALRSLVLAALADEALPALLREAIQTQWSQWLHLDESIGQMDRQLDRLAQSEPMCRSMLEVPGIGAKTATALLAAVADARVFASGRAMAAWLGLVPRQHSSGERVQLGGISKRGDAYLRGLLIHGARSALVRSQRDDPQLAWARALEARRGRNKAVVALASKRARLLWAMMSRNEPYRHAA

SEQ ID NO: 497069 - protein, 358 aa, unidentified
MLKLNYMSTLFVGIDVSSKTNAVYAMDFEENKYISSSFGNNQPGADQLVTMIAQCMHKHKNLDTLLIVLESTSVYSVHISNFLSASEVLMPYKPYVFCVNPKATSNYRKSYIGMEKTDPTDAYLIADFGRVGRTKKLEPWRGGQFISLKRLTRHRMHLSECITREKTYMVSNLYLKFSELQLLEGDDKPFGSLYGATSSAVLTEFLSPQEIIDMPEEELLTFLAGKSRNRISDLSKTSELLRKAARDSYRLDKCMYEPLSISLASSFNCIHAYQKEIKLIEQAIEKCINGMNPNALLILQSIPGIGPIWASGILSEIGDITVFHSSDALAKYAGLYWPKGDSGDFTSEDNKMSKAGSP

SEQ ID NO: 497070 - protein, 318 aa, unidentified
MKSNMNQNINVGVDTGKFQLDIYIRPLDIYFTVTNDDKGIKEAVNIIRKHKPERIVIEATGRLEMAFILACAKAGLPFTIANPVHVKRFAGAIGQRAKTDKLDAQLIAHYSEAIKPKLSQLKPETMQAMSDLVTRRNQLLTMQTMEKNRLQIMPKALAMTIKPILTLFKNQIIKIEEKIAKLIESCPEYKAKNEILQSMTGIGKIAAASIISNLPELGYINSKQASALIGVAPINRESGRFKGHRKIQGGRPQVRTVLYMAMMSAMQSNPVFKATYQRLLAAGKPKKVAIIACIRKMIVILNSMLRDGVSWVAPKVIN

SEQ ID NO: 497071 - protein, 314 aa, unidentified
MAGEAGIFVGIDVSKAWLDIAVYEQERSWRAGNNDQGIADLVVELRKLSPALVLLEATGGFEMLLVAELANAGLPVVVTNPRRVRAFARSTGRLAKTDKLDAKLLAHFAAAVRPPVRTLPSDEEEQLTGLLTRRRQIVDMLTVEKNRLHTVRPALRSDIEEHITWLQKKLSKLDEDVDQFVQATPLWKEKDAILRSVPGVGRVTSSTLLAMLPELGKLNRQQIAALVGVAPVNKDSGRKQGKRRVYGGRADVRCVLYMAALSAKKFNPVIRKFYERLIKQGKEKKVALTACMRKLLVILNAMMRTNQPWRITTE

SEQ ID NO: 497072 - protein, 346 aa, unidentified
MLEYVGLDVSKEETSFCVKDCAGKVLAAGKVASDPQALFEGLREHCLCPERIVMETGSLSNWLARGLLKLGLKVDVIDARQAHAVLRLQHNKTDANDAEVLADLARTGFCRQIHVKSDEASRMRVLLKARAHMVGQHGSRQNTIRGLLASLGHRLPKGAGKFARRVKAVLKDHRDLAVIFDPMLGEMAALQTSIKQLDREVDTAAKSSAACRLLMSAPGVGAVGAVAFASTMDDPARFAKSRSVGAYVGLTSRRLQSGEMDYNGRISRHGDKMLRALLYGAANSFLSVVRRAHPLKDWARRVKRRSSHKKAVVALARKMAIVLHRMLITGEAFKWPQDNQKEAASA

SEQ ID NO: 497073 - protein, 315 aa, unidentified
MHIQQSFMVGIDVSKAHLDVAVEGKRAVVRFDNDAPGCAALTTAVTGAELVVVEATGGYEMAIVRTLMAAGIAVAVVNPRQVRDFARASGRLAKTDQVDARVTLHFARAMRPAQIPHIDDGRIALAALVTRRRQLIDMAVAEKNRLEHAPEAVAALIGETLAALKAQLARVDAAIALAIEAEPDMAARRNLLLTVPGIGEVSAAVLIAELPELGTIDDKKLAALVGVAPMAHDSGTWRGQRHIAGGRATVRCALYMATLSAIRCNPAIKTFHKRLRDAGKPPKVAIVAAMRKLIIMINTILKRQTPWNQPQQHGC

SEQ ID NO: 497074 - protein, 326 aa, unidentified
MEHELHYIGIDTAKEKLDVDVLRPDGRHRTKKFANTTKGRDELVSWLKGHKIDHAHICIEATGTYMEPVAECLYDAGYIVSVINPALGKAFAQSEGLRNKTDTVDARMLAEFCRQKRPAAWEAPHPLERALRALVVRHQALTDMHTQELNRTETAREVQRPSIDAHLLWLEAELKRLEKQIKDLTDDDPDMKHRRKLLESIPGIGEKTSAVLLAYIGLKDRFAHARQFAAFAGLTPRRYESGSSVRGASRMSKAGHVSLRRALYMPAMVATSKTEWGRAFRDRLAANGKKGKVILGAMMRKLAQVAYGVLKSGVPFDASRHNPVAA

SEQ ID NO: 497075 - protein, 376 aa, unidentified
MKKIRFVGLDVHAETIAVAVAEANREVRSLGTIPNREEAVRKLVKKLGPPEDLRVCYEAGPTGYALYWQLTALGVSCEVVAPTLIPVKAGDRVKTDRRDATKLARLYRNGDLTAVWVPDAAHEALRDLVRAREAAKQDQLRARHRLSKLLLRHGKRFPEGGKAWTLKYMAWVKQVHFTQPAQQFAMLDYLHEVEHVNERVLRLEQAIEEAVKLAPAWMQEVVRALQALRGVAKITAATLVSELGAISRFQNARQLMAYSGAVPSEDSSGERVRRGAITKTGNAHLRRVVMEAAWAYRLFPGIGPALRQRQKGASEAVKEIAWKAQHRLHKRYQRLTAAGKDRRKIVTAIGRELLGFIWAIGIKTEALHRPQQAVTA

SEQ ID NO: 497076 - protein, 323 aa, unidentified
MNKDIKYFGIDISHLVFDVTDSDGNYYQFKNTISGFKKFTKLLDLDSHCVMEATGYYHYQLAYYLLELGIKVSVENPLAVKRFIQMKLSKIKTDKSDSKLVCEYAKQVDLKPWEGQSKHQTECLQMTRLLTVYTKQSTMLKNKIHGEAVLGNPSKAVVSSIKRSLKHVLKEIKTLEDKLMVLVKEVHQDVLTRLKSIPGIGNKTALMLVVLTDGFERFTSGSELCSYAGLTPVVRKSGSSVNGRSRISKIGNQKLRNLLFMCSFNACKYNKACRDIYERIVAKGKSKKLALIAVCNKLLKQAFAIAKSGLIYDDSYRSTLVKS

SEQ ID NO: 497077 - protein, 392 aa, unidentified
MIYVGIDVAKDKHDCFAMNSDGEILIEKLTITNNLDGFETLYNSLMNFSDSLDNIKVGLEATGHYSNNILNFLTEKGFNIYLINPLQTNLYVKGQSLRKTKTDKLDAHVIATMLVSDNLKPYIPVSYHISELKSLTRHRFRLVKENSKFKTSLVRLVDIVFPELPKIVSSVAQKSCLALLYELPSAKDIAECNLTHLTHLLSDNSYKHFGRDKAIQIRDLARNSIGLNSNSVSFELKQTISIIQFIQEQLDDVEKRIKQILKEINSPILTIPGISFKTAGSILAEIGDISRFDSPAKLLAFAGLDPSMYQSGKFFSTHSVMVKRGSKYLRFALMTAARMVCLNDATFCTFKDRKMAEGKHYMVTMGHVAKKLVRVIYYLLKTNNIYQADKVA

SEQ ID NO: 497078 - protein, 343 aa, unidentified
MYYIGLDVHKRTISYCVKDAAGHVHQEGKIGSTRRELDAWIKTLPQPRMIAMEATIFTGWIYDHLLPHAEKVKVAHPLMLRAIAAAKKKNDRIDAAKIADCLRCDFLPECHMASTEIRDRRRTLRYRNLVIKQMVQMKNRVSGLLLETGVSYNKRRLHKVGYFADLMSANEEVYESIRPLLRLSREHIVRSQRLDYALVSSLERDPLLAERLKRLRTVPGVGPITALTWALEIGDFTRFRSIKQAISYCGLCGDEHSSADKVMRMPLSKQRNKHIQRVLVEAAKLAPRQCHELAVVRDREMQRGNPNRATLAVARKMVCYLLAVERRKQDFVPAEEFKSTAAA

SEQ ID NO: 497079 - protein, 313 aa, unidentified
MDKSIIVGVDVSKGWLDLAAAGGGQVERLDNTSEAITPWLRRVRPALVAFEPTGGYERALQDALREQGIPFVRVHPKVLAFRKSRGIKAKTDKIDAQLIAAFAAGELVRRGSGGTILGDDELRDLVARRRQLVDALQAEHCRLASARSGAVEDSLVAVISALRTSLDAIQDELLEKIKAKPELDRLFHLLQSLHGVGPVTAMVLIADLPELGQLSGKQIAALVGLAPQTQESGKRKRGSNPTGHGRANVRRCLFNAARSAIRHPSPIRDIYDRLVNTNRRPGKVALVAVMRKMLVILNAIARDNKPWKLAPAP

SEQ ID NO: 497080 - protein, 358 aa, unidentified
MYKFMKKFFIGVDVSKDTVDVSFFDDDRMKSPEYLAQYSNSPKGFREMVKDLRMCCHGVSSGQWLFCCETTGRYDHPLCHWLVDHGMVVWRESALQIKWSSGIQRGKNDRVDSLRIAEYAWRHQDKMQKFVKPSESLSNLKAAFTHRRRLVEKRTATRCQLKSMSSEKGLSASLARMIVRDLSREIERLSASIATMDESIQKIIRSDSELDRNYRHIISVKGVGPITAVALIVCSGNFKAITSAKKMECYCGVASFRSQSGTSINRKASVSNLSNRQIKSLLSMAARSASRSNPVFAEYFNRTLSRGKPVALVYNNLRNKIITVVYKLIERDCDFDVDYMRMHSTGQRANEPAIRETV

SEQ ID NO: 497081 - protein, 387 aa, unidentified
MYFVGIDISKFKHDCAIVDELGDVITPSWSFQNDREGFSLLKELLDALDGEKKIGLEATGHYGQNLKLFLENNDFSFMEFNPLLINRFVHSKSLRKTKTDSIDALMIAQYLMTVEYKPYPPSFYTFEKLKSLTRFRDSLIRQRSRQLVELTNILDKVFPEFKPFFKGRFSATALYILSHYASPEKISNMNSKSYEPLRRLSRGRFSMVDFVELKTLARNTVGSTSDYLLQEMEITIDIYNQLQSKVEEIELQIHDCVLALAPPILTIPGIGAASAAVILSEFGDLSKFNSPSKLLSFAGMEPGYFQSGTSESTGKMVKHGSSHLRYAMMNCAQTVINNEPTFAAYYAKKRAEGKEHRVALTHVAKKLLRVIYTLQTKELSYNPDLVR

SEQ ID NO: 497082 - protein, 358 aa, unidentified
MKKIVIGIDISKEKIDASAIDVRNTQQGVLKLGYQTFENRPMGFRRMLVWARHLIKGINLEEVLFCCETTGGYDRCLCDYLYAKDLDIWRESALQIKRSMGVRKGKDDKADSLMIAEYAMRHMDKAVIYEPPSDNIRELKALLQYRHKLVQEKTEKKVRMSHLADTAARSKSMGFILRDARKSVRALEKSIKQCEQQILEIIRGDEELERNYSHIVSVSGIGIVNATALIAYSNNFRGISTANRMASYYGIASFRDTSGTSVDKKAYVKCYSNSLLKAYLTQSAEWTIREKGIYHGYYLRLKEKGKPYGIIINNARNKLIHLVFSLVENDTDYELNHEYIRRQRRENDNFATELKIIN

SEQ ID NO: 497083 - protein, 360 aa, unidentified
MYYDGIDLHKDNAFISTVNERGETVLQKRVPNRPEAIRLYFASLPGPHRAVVECTGGWYWLDDLLSELGIELILAHAKYLKAISYAKVKTDKVDSLTLARLLWMDAIPQAHKISRELRPLRDVIRARLRLVQRRTSCLISIHNVGQKLNCSDALDIVARTVPENLSSAHALWIRMLYRQIDLLNAQIQELENFLHPLLLPNEDMQRMLWVPGMGAVTALSVYLEIDGIERFPSDKRFVSYCRVVPGAKNSNRTKHHKSGCKDGNKYLKIAFTEMAVHAIRHYPEYRRLYDKMRRRANEAIARTVVAKELARIVYHILSNKSEYRGLKGQPISHVKQSTWAHRYGAPVAAPGKPEHITDPA

SEQ ID NO: 497084 - protein, 344 aa, unidentified
MSKHAVAAGNIAGLLGWLAQLQEKAHVLTGRDYQIITIQEAGLDGFWIHRVLQSERIESHVVDPASILTSRRRRRAKTDKIDGEMLVRTLLAYKRGEPRVCAMVKVPTPEEEDRRRLCRERKTLVAERVEHVNRIKGLLFTQGIYDYEPLKRNRRAQLEGLQTGDGRPLPAHLKAQIWRELERLEMILTQLKTIEEERDALLSPVSDKALTTPAAMLLQLKGIGTEFAAVLWSEGLFRHFDNRRQLAAYAGLAPTPWQSGSIAREQGVSKAGNPRLRTTMIQLAWLWLRNQPDSALSHWFQDRVKRNGGRLKKTTIVALARKLLIALWKYASHGVVIEGAVMKA

SEQ ID NO: 497085 - protein, 359 aa, unidentified
MLGVLTSNATKEAPVSEQYAGKQIVGMDLHRRRSVLVRMTETGEHLETVRISNDPEYLRQVMERAGEAPEVVLEATYGWYWAADTLAELGAHVHLAHPLGVKMFAYRRVKNDQRDAADLADLLRMGRLPEAWIAPPACRELRGWVRHRAKLVGLRSSLKCQIHAVLAAAGVQVPMSDLFGAGGRQLLTNARLAPESRARVDSLLRLIEALDFEIELFATLVARRLREHPGYRAILQIPGVGPVLAAIFVAEIGDVGRFARPQQLASWAGLTPKHHESDITVHRGRITKQGSRLVRWAAVEAVQRMPAHTRLGQIRDQVGERRGRNIGVVAAARELTELVFFGLRDGDVRRLSTPPQPAA

SEQ ID NO: 497086 - protein, 355 aa, unidentified
MVMLAENYEFVIGGDPDRDTIDLAVLDTCAGRVQAHLADSADGPGYDRMLTWAGEQAPGRRIWALEGTGSFAAGLVVVLLDAGETVVEVGALKRARGAKNDRIDAIRAARQALARDEQGAPRAGGLREALRMVFACREGVLASRTKAINELKSLIVVAPEQVRAELRGRSLAVQLTRIEALQAPTAAPVELRLSVFSLQSITARIRFLSAQLAELDPQLLSLIKQHPAGPVLLAEAGVGPVVAAQLLISWSHHGRVRDEAAFASLAGVSPIETSSGQRSRHRLNRGGDRALNRALHTVAITRLRCHPESIAYEIKRTAQGKTHRDIRRSVKRALARRLYRRIEAAIRLENPRVAA

SEQ ID NO: 497087 - protein, 341 aa, unidentified
MTLVMGMDQHRAQISAEWIDTLTGEISRARIAPADRMTVRKFLTQFKGSGLEVALEATTGWRFLVEEVQRVGAEAHLAESAETSGMKGKKQRAKTDWADARHLRELLLIGRLPESWIAPAHLLDLRARVRCRHMLVHQRTEWQQRMHAVLYHHGVPHARKLLTLANRERVAALKLPAVAREQLTIALEMIDAIELQIGPVDLSLRAYARKQPGCRTLTDQIYGIGPLTSVTILAELGDTRRFQNSRDAVRYSGLDVTVYQSDQRRAAGHLSRQGPPALRWALYEAAQAARRPSSPDRPYYEQLAERIGGNRACVAIARKLLKRSYHVLRGLGDQALEPVTA

SEQ ID NO: 497088 - protein, 351 aa, unidentified
MSEKFNSEIAVIGIDIGKNSFHLVGQDRRGSIVFRQKWPRGQVDARLANLPPCLIGMEACTGAHHLSRKLQALGHDARLMPAKYVRPYSKGEKNDYRDAEAIAEAAQRPTMKFVATKSADQLDLQALHRVRERLVGQRTGIINQIRAFLLERSIAVRQGLHFLRAELPGILAKRTDVLSPRMLRVIEDLAGDWRRLDERIDALSDEIMMLARQDKGCERLMTVPGIGPIISSAMVAAIGSGDAFSKGRDFAAWLGLVPRQISTGDRTILGKISKRGNRYLRVLFVQAAWVVLVKVKPTRWEGHGLKHWIEAAKKRLHHNVLAIALANKLARIAWSVLARCRTFEAIKIQVA

SEQ ID NO: 497089 - protein, 428 aa, unidentified
MMTHHDRLQSFHELRKTVRSSDSMLVVGVDVAKNKHHAFFGTPTGKTLWKKLLFDNSIHGFKSLRAMSDNLMAQHGLQDCVYGVEPTATFHKPLAEYLIRQGQQVVYVSNVAVKNNRKTRDGRWDKNDTKDAANVADLVSRGRCQFYDLADGDVLELRSLIAYRTKLKKLEHALRMRLRNQLVAQYFPELDQLIPQGGQDALILDLIRRNFAPARIAETPFETFRVQHRVQQRHISQERRSRTIYELSKESVGCTLPAAAAWEGQMLVAQLEQTRKIKKELEDRLKTTGQHFPAYSHLLTLPGFGPIVTTMVLAAIGDAHRFTNRKQVLRLAGLDLSASRSGTKSDSAIPVISKQGKAGLRYALFQAATIASYKDETVRNHFTRLLEGREQERGIKMKMRVKLAAKLLVVAWTLMKHNEDYDPDHFTS

SEQ ID NO: 497090 - protein, 386 aa, unidentified
MQSVTSATAVATTVRANDITLFASLELSKSKWVVTISPGREKFSKHEIEGGDGACLLDLLSRARAKAEQRYGVQIKSIVIQEAGLDGFWIHCLLLANGIESHVVDAGSIAVAGRHRRAKTDAIDGETLLRTLMAWARGERRVCSMVRAPSPEDEDRRRLTRERGTLLKERIQHTNRIRGLLGGQGVRDYNPLRRDRFERLEALRTGDDRELPAMLKAEIRRELDRIALVTTQLAAVERARDALIRTDAEQRNNPAALLLKLKGLGPEFASLLWLESLFRNFGNRRQVAAYGGLAPCPWQSGGVERDQGISKSGNRRLRKTMIELAWFWLRHQPDSALSRWFQARVGAAKGRIRRIAIVALARKLLVALWRYATQGVVPEGAAFKAA

SEQ ID NO: 497091 - protein, 411 aa, unidentified
MEVIYKRCCGLDVHKETVVACLLIRDGGKVVKEIHTFLTMTVDLVVLHDWLKAHQVTHVAMESTGIYWRPVFNLLEEDFTVLLVNAAHIKTVPGRKTDVKDCEWIADLLSHGLLRGSFIPPEPIRDLRDLTRYRKTLTDERVREVNRLQKFLEAANIKLSSVATDVMGVSGRAMLEALVFGGTDPQALSELAKGRLRKKLPELKKALEGRFRPHHRFMVAEILTHLDFLDESIERVSQEVSSRIVPFSTKVDLLDLIPGINQRVAEGVLAEIGVDMSCFPTDGHAASWAGLCPGNNESAGKRKSGKARKGDQWLRRYLMEAAWAAIRKKGSYLSALYHRLVVRRGKKKAIVAVAHRLLVIIYHMLKDQGTYRELGSDHFNKLNVAYVQRHHVKRLESLGFKVILEPLSKAA

SEQ ID NO: 497092 - protein, 460 aa, unidentified
MSHGSGVSRGDRNRNARLSRLRAAVPTGNAIVGIDLADRKQMLVVTDHDSRVLARRTFRCKAWDLGAALDWAADRATRAGFAGVTVACEPTGHRWMVLAQLAAERSMSFVCVQPAASSWARKSEDLTTDKTDDKDAVLIARLTAQLRCYLPEPVDEANTTWTRLRHLGTRREELIEQHVAAVQTIRDLLECVWPAALETAKHPFRSTTFVAALTVVVGQGRGRDGGDLDRTRRLGLARFERAVRAEVSRRGGVRPCLRIVRRVFAALTDTAGVVAHRPAVFERLEWTLTDWDDARGKRADIEARMVSVLHELGLTTLVTSIDGLSPVGAAAILAQTGDLTRFTSARAVVKHAGLAPRERKSGTFTGRARVTGAGRPQLRAAAWRAVWGCLQTNRVYAARYRHLTGRETNRLTATQAQTAVAAAILRQLYAVVVHQQVWDPVVATHGTTTWKGESTSTAAA

SEQ ID NO: 497093 - protein, 407 aa, unidentified
MQLLCARCAGLDVHARQVVACARTVVNQTVTYHQLTVPTTTRGLLELADWLMGHEVTHVAMEATGVYWKPVWHLLEGQFERLLANAQHVRNVPGRKSDVKDAQGLADLVAVGLIRGSFVPPLAIQELRDLTRTRKQLVREIGRHTQRLQKILEDANIKLAETISDLRGQSGRAILHALIAGETDPERLVALTRGLKASHGQLVDALRGRVTAHHRFMLKLHLEQIEAIEAGLTALEARLQEALAPFRAACDLLTTVPGISGTVAAVVLAEIGDDVRPFPTAGHLLSWAGFAPRLDESAGKRRSTRTRPSAPWLKTTMVQAAWAAARTKDSYFHAQFVRLKARRGPKKAILAVGASMLTAVYHMLRDGVDFHDLGSQHFTHHDKQQITNRLLRRLRALGVEVEVKKAA

SEQ ID NO: 497094 - protein, 469 aa, unidentified
MDLLKLPIYTFYCEFLDMEERFMKKVFIGIDVGKFKNSISIIDSEGNPIIKKGISIENDYYGFAKLEEKIDLIMNNYGFTYEDCIAGVESTGHYWFNLRDYLKDIGIETVMIKTDSVKHRRALEEGQKGKNDTLDARVIASCLRNGNYVYIRENERELRALQKLTRMRNDISDELVALKNKIHRCIDICNPVFFKIFENLNSKTGVALIKLYPSPQDIINVELDNIKKELGEIVDKPNMRMVSLYKEECEIWSRLIKEPSHAEKVEMTAYIDKFLLQNKSKEHLDKQIKEIAKNIIPLYSEFQKIKGIPLIQLISVLSEIGDIRNFKNTRAILAFLGLSLKGNASGKYIGERKINKAGSRIVRKHLFNIMDTLIKHNEYFRIAYCYYKSYNHKNPTKKRSMQIAVMCKFVRVMYGMLKYNTSFDYKEMLKGYYFGDCNMKVFKEEFEGEKGTKKIENYKLAYSIFINYS

SEQ ID NO: 497095 - protein, 341 aa, unidentified
MRQYVGLDVSQRETAVCVVNETGQAIFEGKAKSDPGDLSKLLRKHAPLAERIGFETGAMASWLWHELRRVELPVVCIDARHAHAALSVRMNKSDQNDARGLAELVRVGWYREVKVKSEESQKVRAILVARFRLVSMRRDIENQVRSLIKECGLLFPRAIGQQFRNQVGELLGEDHQLLNVIGPLLSIHEHICQQQSKFDDEVRRLAKSDETTRRLMTVPGVGVVTALTFRHTIDDPSRFRSASTVGAYLGLTPRRNQSGETDTSGKISRWGDRLLRTYLFEAATVLLYRTKKWSSLKAWGMKLAKRVGMKKAKVAIARKIAVILHCIWVDGTSFDWGHAPA

SEQ ID NO: 497096 - protein, 426 aa, unidentified
MNKDRLKIFRSMRSSVRGSDRHLLVGIDVAKNSHHAFFGTANGRTLRKNLVFDNSIKGFESLLRLARDLQNQYGLLETVYGVEPTASYHKPLAEYLIRQNEQVVYVSNVAVKRNRELLDGRWDKNDKKDAANVADLVGQGRCLFYDLPEESLQKLRSLITFRLRVKKQEHALQVRLRNNIFAQYFPELDKVGIHADQNDLVLSIAEHCLDPKEIARMEFTDFLKLVVSRKLGISREKSLREVWEAAGYSVGCLVHDEARWETKTMVHELKAIREIAKESELRMEKIAQQFPEYQCLLSIPGFGPVISAMVLGTIGDPSRFENQGQVLRLAGLDLCASRSGKKSDSAKPVISKQGKSALRYALVQAATSSSISNPGVRSYYSGLIKGRELERGIRLKMKVKLAAKLLVTAWTLMKRRETYNPSCFPG

SEQ ID NO: 497097 - protein, 346 aa, unidentified
MPETEVDTFAGIDVSARELSVALRREKGEDKPAMAKFSNHPSGHKALIAHLLGGGRRVRVCLEASGNYSLDLALTLQAHRQVEISVINPRRARRFAESLGQRSKTDPVDARVLCEYAARMPWVAWQPPSSVALHLRAVARAIADLGVIHTQQNNRAHASAASQALPVLVVKEMQRHQKYLEQRMTRLRREAQRIIAGDSKLDRLFRLMLTTTGIAETSALQILGELAVLPDMLDARQWVAFSGLDPRLFKSGKSVEKRPRISRGGSRHLRRALYMPALVALRRDPYLRCFYQNLLARGKARLQAVVAVMRKLLHALFAMFRTNQPYDGSKLCCALEMAGNAIAACA

SEQ ID NO: 497098 - protein, 348 aa, unidentified
MNITTVGVDLAKQVFAVHGVDRHGKVMIKKTLRREQMIAFFAKLSSCVVAMEACGSSHYWARRLAGLGHTTKLIAPQFVKPYVKGNKHDAADAAAICEAASRPSMRFVAVKSPESQAVLGLHRVRDGFIKARTAQANQLRGLLAEFGLVVPLGLARLFKEVKGMIADDSNEMPPLMRHLAQRLLSHLLELDRQVQEIDNQVRDLSRQSSVCRRLEQIPGIGPITATALVATIGEQIREFKNGRQLAAFLGLVPKQHSSGGKERLQGISKRGDGYLRRLLVHGARAVLHHTTSKVERAGSWLAQLAARRNPNVACVAQANKTARIVWALMFHEREFRADFSAGREISTA

SEQ ID NO: 497099 - protein, 317 aa, unidentified
MRASAAFFVGIDVSKQQLDIAVRPSGESWTVAHEEAGLSALVARLRDLAPTLIVLEATGGWEVPVTGALAAAALPVAVVNPRQVRDFARSTGLLAKTDRLDAQLLAQFAEVLRPAPRPLPDAQAQELTALLQRRRQLVEMLTAEKNRLPLAARRIRPQLQAHIAWLHQQIAQFDEDLRQLIRSSPLWREKDDLLRSTPGVGPVLATTLVAALPELGTLSRRQIAALVGVAPLNRDSGTLRGRRTVWGGRAQVRAVLYMSTVVAVRHNPVLIAFYQRLRAAGKAPKLALTACMRKLLTMLNAMLKHHRRWAPVRAQHA

SEQ ID NO: 497100 - protein, 353 aa, unidentified
MRIIGCDFHPGFQQISMLEVESQRRERRRLEHASGEAERFYRSLQGEGVKVGMEACGNTRWFERLLEELGHELVIGDAGKIRASAKRRQKTDRRDADHLLELLETNRFPAIWVPSAEERDLRQLLQHRHKLVQMRTRIKNQLQHVAMNQGLQKKRQLWSERGQQWLKELVLPPWTERRREDLLLLLQGLNPAIEELSRAVEAQAEQDERVRLLRTHPGVGPITGLAFVLVIGDVRRFSRSRELASYLGLIPREDSSGSRRRLGAISKQGNTLLRTLLVEAGQSAARLDPELRRAYQRLCHKKQHTGIGKVMVARKLAVRLYWMLKTQQPYVSARMQGSPSHPVSPRGLGDSTL

SEQ ID NO: 497101 - protein, 357 aa, unidentified
MNKSNASQPALKVFAVDLAKVKFQVHGYQGPGQRVFAKTLSRRAFLDFFRQLPGPAKIYMEACGSAHHWARQLRALGHDPELVPPHLTKKYRVGNKHDASDTDAIEAATHHARYRPVPVKEVEQQDMMLTALERRRLSEERKALANQLRSLLAERGVVFGKGLKALREGVREVLAHGPGGELTAYHLRWLQRQLEDWQRLDERLKTCDAQMASDYRESPRAQQLGEADGIGLQTALAFLALVGDGAQFPAGRALAAWLGLTPGEYSTGQRRILGAITKRGNTYLRWLFINGARSLVSSALRKAKNGLALNARDTWLLGLVQRTGFNKACVAMANKNARILWAMLRTGEAFRPPALAA

SEQ ID NO: 497102 - protein, 423 aa, unidentified
MKSLRTHNFTAYVGLDWADTKHDICLQEAGSEQREFACVAHQVECIDEWAKSLQQRFGGPIAIALELAKGPIVYALQKYDFLVLFPINPLTLAKYREAFRPSRAKDDPSDAELALDLLVRHPERFAPLQPQSVGMRTLISLTERRRELINDKTRVTNRLTNTLKQYYPQALEWFDQHDTVMFCDFLSRWPTPLQAKRAHQASIKAFHHAHNAHRPKLITERLAAIKAAVPLTQDPGVVLPCRLHARVLVEQLRLALQAIEQFDRHIAELAPTLPDYRLFEGLPGAGPHLAPRLLVAFGEDRERFQRAEELQKYSGIAPVTERSGKKNWVHWRWQCPTFLRQTFVEWAGQTINKSFWAGAYYYQQRAKGSTYQAAVRALAFKWIRILYRCWKSRIPYDESKYLKALKKRRSSLLTNLVPDPLNA

SEQ ID NO: 497103 - protein, 348 aa, unidentified
MTLVGCDLHARDQQVAVLDTATGEIQERRLVHDGDSVEQFYTALPGPVTVGIESTGYALWFHALLRRLGHEVIVGDAAKIRAMVVRKTKTDRRDAAHLLDLLRHDRFPTVWLPEPAVRDQRPLLAHRMRLVRMRTMVKNGVHAIALNYRLALGPSLFTRAGVAQLQALSLPPHTACRRSESLELLSWLNTRIKGLDDQIGEAAHAHPEAQRLMTHPGVGPLSALATVLVLGAVTRFPTSKHVVSYVGLAPAIESSAGKHRLGRITKQGNALLRYVLGQAGQAAIKRAPDLNRLYYAVLHRRGRSRAKIAVARKLLVRLYVMLRDQIDYPTFLHRAPAAARRKEMTPTS

SEQ ID NO: 497104 - protein, 355 aa, unidentified
MSQEKYIGMDVHQATVSAAVMDVHGKLLMECLLETRASTIVEFIEGLQGPLALTFEEGTSAAWLHGLLQPHVSRLVVCDPRKAALLKEGNKSDRIDARKLAELLRTNQLKPVYHGEHGMRRLKELGRSHLTITKDVTRVMNRIKALYRSWAIPCSGTTVYAPRHRGEWLAKIVDPGVRVRAEHLYQQLDSLQPIRLEARRELLRESHKHTAVKLLRQIPSIGPIRAALLVALLQTPHRFRTKRQLWAYSGFAVETHDSGEYRYVRGKVQRNRERITVRGLNDNHNKDLKSLFKSAAISASTRPGPLRDFYTARVESGMRPTMARLTLARKIASITLTMWKKGASFDPKQLQRQAA

SEQ ID NO: 497105 - protein, 390 aa, unidentified
MERPMQKLNDLSRSLTPLAPDGTLIAVIEMSQSSWLVAGIVPGVERQPLKKLAVDESALLKLLHRWRDEAEKAGRRIERIAVAFEAGRDGFWLARWLRARSIEAHVIHASSVAVSREHRRAKTDRLDAELLKRAFLGWLRGERDHCKMVAIPTTKDEDAKRPNRERESLVGEQTRIVNRMKAALIRLGIRGFNPKLKKAAGRLEDLRTPEDEPIPPNTLAELRRDMERRRLVSDQIRQIEEARLDRLKQAPGEGPHAMVRLLARVIGVGIETADMLVQEVLSRNMRDRRAIARYAGLTGSPDESGTKRREKGLARSGNARVRRGMIQLAWRFLMFQKNSALAQWFRARTENARGTRKLMIVALARKLLIALWRLVREGVVPDGVVLRPAQ

SEQ ID NO: 497106 - protein, 410 aa, unidentified
MEQQVKFDQVIHCGCGMDVHKKTVVATIRRSDTDFETREFNTYTRSLKSLREWCKSEGVTHVAMESTGIYWKPVYNIMEEDFEVILVNARHIKNVPGHKTDKKDSRWISKLLLSGLLKGSFIPPREIRELRDLVRYKRKVIAEISSEKNRIIKMLEDCNLKLSSVFSDVSGASSSKMINDIIEGNEEVEGLMKHIHGKVQAPRAEIRQALEGTLTDHHRTMLRVIKMSIEGKERIVEELDKQIDACVIQYAIEIEQLQTIPGVGKESAIRIISEIGVDMSRFPNENHLSSWAGMSPGSNESAGKKKSSRVIHGNKHLQTTLVECGWGATRKKDCVLKRKYESLVGRRGKKKALMAVGHKIIIAAYFIIKTKEAYKEPLLYDNPKRKNKQVKNYLARLKELGVEVEVKEVA

SEQ ID NO: 497107 - protein, 426 aa, unidentified
MFAESTDEEQIIERVAALDIGKAELVCCVRVPASGGSSRRVQEVTTHTTMTRSLAELANRLVDLRVERVVMEATSDYWKPVFYLLEAHGLNPWLVNARDVKHLPGRPKTDVLDAVWLCKVAERQMLRPSFVPPRPIRVLRDLTRYRIDLVAARTAEKNRVEKLLEDACIKLSVVASDIFGVSGRAMMAALIAGERDPKVLADLARARLRAKIATLEEAFAGLPAGGFDDHHRFLLERMLGRVDAIDADIAVLDAQIEAHLAPFDQAVQRLDEIPGIGPVSAAIVIAEVGLDMTQFPTAGHLCSWAKFSPGIKSSAGKSKGNGSTGHGNRYLARVLGEAAVMAGRSDTFLGERYRRIARRRGKKKAIVAVGRSMLVIIWHLLSDPDARFRDLGADHFTRSVNADARKRNHIRQLEALGYRVTLESVA

SEQ ID NO: 497108 - protein, 346 aa, unidentified
MTRHYVGLDVALKETQICVIDEETNIIAESKVDTNPEAISNFLRDLGLIYHRIGLETGSLAHWLYIGLARSGLPAFVLDARKVKGFLRLETINKNDRNDARGLARMMCFGTPHVVHVKSEHSQKMRALLAARKTVQIKMIDLELFVRGIIRQFGLKLGSVSRTKWEARVRELIAGDSFLRDVTEPVLTCWRALRAQFAELTKQVSRITRLDPVCRLLMTCPGVGPVIALSFKSAVDIPERFQKSRSIGAALGLTPRQTQSGEVDHRGKISKAGDQALRALLVEAAFILLRMPRSSALKAWGLQVAKRRGIQRAVIAVARKLAVIMHRMWMDNTEFRWQDSELMKAT

SEQ ID NO: 497109 - protein, 344 aa, unidentified
MDNHTQYSGFAGVDLAKKVMQIHFVTEDGEITDKSTKRAEFLDFFRNRGKCLIGMEACGSSQDWARKLEAMGHGVHLMSPKAVKPFVSGQKNDHNDAIGIYKAMFNGVRRVPVKSTEIRDLQTLRRIRSQVTKDKVKEINHVRGLLAEYGIVMGKSLKAFNKDISSALESLKERGDVSPLVAEELRTTVEAIKTKIKRQKKLDQEIEQLARGCKSYENFLKTPGVGPVTAAMLCVLLCDPSIFANGRQFAAYIGLAPRSRGSGGKNYVIGIPSKFNCDCESRAVFVECAQAIARCKNKSPWVEGILRRKPKKVALIAIATKLARQVWAMANKGESFKQMAILTA

SEQ ID NO: 497110 - protein, 346 aa, unidentified
MEEYIGLDVSMKETAVSIRREGERIWRGKCASDPNIIAELVRKRAPAVKRVVFETGPLSVWFYHALRAKGLPAICIDARHAKAALDMAANKTDANDADGLARLAEAGFFREVRVKGFDSMLTRTLVAARTRLVRITVELSNQIRGIMKTFGLLVPAGKGTTFEKNVRSLLIDQSELAPVVLPMLEAWRGIRIRAAELGRQLVADARQSQACRILMSIPGIGAITATSFATAIEDPGNFKKSRSVAAWIGLTTRRYQSGEVDYDGHISRRGDRHLRGLLYEAAAVILTRSSIDSSLRTWGLKLRERVGFKRAAVAVARKLAVIMHSMLKTGEFFDRNAGATAMKSCE

SEQ ID NO: 497111 - protein, 342 aa, unidentified
MTCFVGLDVSQKMTAICVVDNAGRRLWRGQCPTIPEQISILVRRHAGDDVRIGVETGAMTPWLVHELRLGLEVVCLDARHARAALKMQINKTDQNDAEGLAQIVRTGWYRSVHVKSLDSHRARAILGARTQLVGMRTRLSNHIRGVLKTFGLLPAGMRGLPFDRKVEALLLDRSDVALIVRPMLVAWRQLREQITVFDKSVRMLVKSNSACRLLMSVPGIGVLSALAYVSTVEDPARFVRSRSVGAHLGLTPRQYQSGEVDRSGRISKCGDTLARTLMYEAAGVVLTRLKRASSLKDWAQAIAKRSGAGKARVALARKLSVILHSIWRSGQPFRWSEHASAT

SEQ ID NO: 497112 - protein, 347 aa, unidentified
MLADELDYVIGVDPHRDTHALAVVDVRSGAVVFEATAVADGEGYASVLRLADQHAPGRRAFAVEGTGSFGAGLARFLVSHEQRVLEVGRLRRERLSGKSDALDAIRAARSVLGQTRPAGPRAGGEREALRALSAAREGAVTARRAGLCQLRGLLVSAPEPLRAELRSLTRAQLLRRLAAVRPEGRQDPELRGTLLALRALARRVTALTVEERELAREIETLTRKLAPQLLEQPGVGPLAAAQLLISWSHRGRITSEAAFARLAGCAPIPASSGQTVRYRLDRGGDRRLNRALHMILVTRRRTHAPTIAYIERRIHEGKSRREAIRCLKRYLARNLYRLLENGSPLPT

SEQ ID NO: 497113 - protein, 466 aa, unidentified
MAQKKKSTSIRKSKRNRPAQLKSPEWTLGLSVVHPKAAGIDIGNEEHWVAVPPSLDPVPVRRFSCFTGDLMALADWLQSLGIETVVMQSTGVYWIPLYDILEQRGMRVFLVNAQDTKNMPGRKSDLQECQWLLKLHVYGLLRNSFRPEDQVRVMRTFWRQRQQHIGDSSCCIQRMQKALTQMNLQLANVISDISGTTGQAIIGAILAGERDPQVLAKLRDPHIKASEEVVAKSLHGNWRPELLFVLKQESESYHALQKKIGECDRELHQHYQSMEAKADPRVLPEVPRDKRARGRHIPESFNLRDEMYRVTAVDLTAIHGVNVLTAQTVMAEVGWDMDKFPTEANFVSFLDLSPKNKISGGKIVGREKRKTKNRTGLALRLAAGTLLDSQTYLGAQYRRFRTQLGAPKARKAMGAKLARIIYRMLKYGQEYVDKGNQFYEEKYRQLQIRRLTKKAAELGFEIVKAA

SEQ ID NO: 497114 - protein, 422 aa, unidentified
MQVIYERCAAVDVGKDVIAVAVRKPGDGPGGRVTVRRTYKTFYGVLREAARWLMAEGVTHVAMEATGIYSMPVYHALIEHGDFEKVLVCNAGHVKNVPGRKTDMADAEWLAQLLECGLLAGSFIPPAEVKAARDVIRYRAKIAQQRVSEISRLGNVLQDAGIKLDSVAWSVSTKSGRLMIEALIDGERRGAVLADLAIGRMRSKIADLSMALEGRFGNHHAMLCRLHLDHLDHLDGMLAKLDAQIEAMMQPFRAARDLLTTIPGIGQLSAAAVISEIGTDVRGYFPDAAHLASWAGLCPGNHESAGKHRPGKRRKGNQHLQPVLVECAWAAVRHEGYLKSLYHRHVMKWGGYRSSVAKTKAIIVVAHAILVIIWHVLATGKPYDELGSDYFTRRLDPERETRRLIAKLEALGHRVTLEDAAA

SEQ ID NO: 497115 - protein, 342 aa, unidentified
MKITTVGIDLAKNVIQVHGVDERCKAMLRKQLRRNQVTAFFANLPACLVGMEACGSAHHWARTLESCGHTVKLMAPQFVKPYVKTNKNDTADAEAICEAVGRPNMRFVPMKNIEQQAVLSLHRARQGFVKARTAQANQIRGLLAEYGLVIPQGIGHITKRLPEIMEDGENDLPGAFRLLLQRLGDHLKELDRHVGELEMQIQTWHRESDASRKLARIPGIGPITASALVASIGDAKSFDNGRQLAAWLGLVARQRSTGGKPTLLGISKRGDTYLRTLLIHGARAVIRVAERKPSYEGSWLARLMDRRNKNVAAVALANKNARTVWALLAYDRNYEADYGTAK

SEQ ID NO: 497116 - protein, 316 aa, unidentified
MEVTPIFVGIDVSKARLDVAMRPTGERESVANDKAGIKALIKRLANIPSTLIVLEATGGFERQVMHALVSADLPVVVVNPRQVRDFAKATGQLAKTDSIDADVLAHFAQAVRPALRPLPDTVTLELRALTARRRQLTEMIVAERNRLAMASKTVSKRIHAHIRWLQSELEQVDKDLDRSIRHSPIWKHNEDLLLSVPSIGPLTTRVLLAELPELGQLNGKQISALVGVAPFNRDSGTLKGRRSIWGGRAPVRSALYMATWVATRRNSAIRKFYTRLLAAGKQRMVAMVACMRKLLTILNSMIKHNSRWSESLLQTT

SEQ ID NO: 497117 - protein, 404 aa, unidentified
MIFTGVDWAEAHHDVCVMAEDGTVLERRRVSYTVAGIGELHALIAAHAGEGEPVAVGIETDRGLVVTALLAAGYQVYAVNPLASARYRDRHATSGAKSDRGDAKVLADLVRTDRHNHRQVAGDSELAEAVKVLARAHQSAIWSRQRQVNALRSALREYYPAALAAFGTDLAASDAVAVLAMAPTPDAGRALPRAKIAAALRRAGRRRNTEQRTREIQAALRADHLQAPAAVAGAYGAAARSAIRLISAYTAEIAELEAALAEHFEQHPDAKIVRSLPGLGTVLGARVLGEFGDDRTRFAGPQSRKNYAGTSPITKASGRSHVVLARYARNRRLADALQQWAFCSLTNSPGARTYYDQLRARGKTHRHALRQLANRWVGILHVCLQRGQLYDETAAWQHLQTAAA

SEQ ID NO: 497118 - protein, 328 aa, unidentified
MKLQHIIGADLSKNSIDLASHQLQTHLMIENSVNGFRQLLKWCRQQKINYAHVMIVMEHTGLYSHLMEKFLRRYGIGFVKVPALAIKRSLGLTRGKNDKIDAQRIARYGFEKRDMLVPTAKPNEAIERLRMLHSTRDRLVKDRASLKCAVKEYQNVINQSDVIIQSQLSLIESFTQQIKKIEAEIAQVIRKQQAVNKNYQLLKTIKGVGEVVALATIIKTGNFTKFANARKFACYCGIAPFEHSSGKSIRRKARVSHLADKEMKTLLDQSAKSAIQYDKELKSFYQRRIAIGKSKKSTINIVRNKILYRMFAVLKRQTPFIENYLQIA

SEQ ID NO: 497119 - protein, 450 aa, unidentified
MAGRRQAGVVADEPRERVFERVAAVDVAKKDGVVCARLPGASGQRLSRFWTVTATAGAVSELAGQLAELGVQKVTLESTSDYWRIWFYLFEAAGLDVQLVSASQAKQLSGRPKTDKLDAIWLARLTEMGMLRPSFVPPAGIRALRQYARTRTHLVQDKTRAWARIEKILEDALIKLSSVASKMTTASVRDMLGSLVAGERDPQVLAGLARTRMKAKHAALAAALDGKFEEHHAEIIRVLLAQVDLLQEQVTRLDMLIAEQLASLPGAWGADPDGVTGPDAGAGDLAAALPADARLDEVPGISPELARSIISETGLDMTRFPTPGHLVSWAGLCPRTLQSGTRSKTGKKPGNAYLRGYLGQAAAGAAGTSTFLGERHARIARRRGNAKAQVATARTILVIIWHLLSDRDARYHELGPDHYQQRTDKHKKTRQHVRQLEALGYTVTLTQAAA

SEQ ID NO: 497120 - protein, 348 aa, unidentified
MSKHSVPAGDIAGLLRRFAQLKEKARARTGRDFPIIVIQETGLDGFWIHRMLQSEGIESHVVDAASILTSRRGRRAKTDRIDGETLVRTLMAFKRGEPRVCSMARAPTPQEEDRRRVCRERRTLVGERVTHVNRIKGLLFAQGVFGYQPLRKARREQLEELRTGDGRPLPVHLMAQIVRELDRLEVVLEQLKTVEAERNALLKPATGAAASPPAMLLELKGIGPETAAVLWSEGLFRQFDNRRQVAAYAGLAPTPWQSGSIDHEQGVSKAGNPRLRTTMVELAWLWLQNQPASALSLWFHERVRRLGGRMRKTTVVALARKLLIALWRYTTAGVVIEGAVMKAAPATI

SEQ ID NO: 497121 - protein, 356 aa, unidentified
MPSKVKNFTYNGQNVYVGIDTHLKNWKVSIMLDHLEMNTFSQNPNARDLARYLIRNFPGCNYYSAYEAGFCGFSVHNSLIKNGINNIVSNPADIPTTDKERKQKNDSRDSRKIARALRNGELKAIHVPQGSTLEFRGLVRYRRTLVKEITRNKNRIKSILYFYGIPIPAELDTASKYWSGRFTQWIRSIELETQYGKPVLDNILDTVELLRKKLLDVNRILRNARKEGEYAQTLQNLCTIPGIGLITAATFVSEIENISRFNNLNRLCSYVGLIPTTHSSGEKDINGKITPRSNKPLRSVIIEAAWMAIRSDTHLALTFNDLKKRMKGNDAIIRIAKKLLNRIRFVMKNETAYANS

SEQ ID NO: 497122 - protein, 303 aa, unidentified
MTITTIGIDLAKNVFAVHGVDQNGKTVLVKSRVIRAALPGLIAGLPLCVIGMEACSGAHYWARLFRQYGNEPRLMAAKFVSPYRMAGKSGKNDAADAQAICEAVRRPHMRFVPVKDESRQAMQCLHRPRQGFIEEKIATYNRLRGLISEFGVIAPQGTDALRHIVSAQKNSLPLQVQQCVDDLLEHVDRIEANITEYDQILPRIAKTDHRSQRLMKLKGVGPTTTCALVACIGNAHDFKNGRQLAAWLGLIPSQYSSGRKSKPGRITKAGDSYLRTLLVQGARSVLIGAEKRTDSFSRWGFVH

SEQ ID NO: 497123 - protein, 380 aa, unidentified
MKNVRFIGLDVHAETIAVAVAEPGGEVRSLGTIPNRPEPVARLIRKLGKPEQLRVCYEAGPTGYVLYWQLSELGVKCEVIAPTLVPVKAGDRVKTDRRDAEKLARCYRAGDLTPVWVPDAAHEALRDLVRARLAAKRDQLRARNRLGKFLLRHGRRAPEGTTAWTLKYLGWVKQQSFEQAAQQATLVDYLHEVEHEAERIVRLERSIDTAIETLPQKMRAVIEALQSLRGIAKISAVSIMAEVGEMSRFEHARQLMGYSGAVSWENSSGPRVHRGGISKAGNAHLRRIVVEAAWAYRHRPGLGATLLARQREQNEDIKAIAWKAQHRLHSRYAKLLAKGKPKQKVITAVARELLGFIWAIGVAAERSQAAAPRRTLKRAA

SEQ ID NO: 497124 - protein, 371 aa, unidentified
MSSILYVGMDVHKDNYTLCCYSFEEDELKYKQTIAPDYKMVMKSLERIRKSNPDEIEFICGYEAGCLGYTLYHQLTDHGVKCVILAPTTMAITNKNRVKTDRRDAGNIARCLAFRTYSEVHIPTAEDEAVKDYIRMRDDQKKALKIIKQQILAYVLRHGCRFEGGRNYWTMKHVAWLKSLDLGGVLQESLQEYLVTYDYLTAKIERLDQRIEELASDERYREKVKKLICLLGVKTLTALSIIVEIGDFVRFSKAEKLAAFIGLVPGEDSSGDRQSRGSITKAGNTHVRRLLVESAQSYTRGAIGFKSKDLKRRQSGNTPQVIAYADKANERLRRKFYRMTLKNGSKKNVAATAIARELACFMWGLMTDNIA

SEQ ID NO: 497125 - protein, 351 aa, unidentified
MGLQARMERSAVNHVAIDLGSLNSQICMRSAEGTILLEKKVKTEELPRLVTTWPPSRVVCETSSEAFLIADHAKAAGHQVRVVRSTLSKELGVGDRGIKTDRRDARKLSEVSTRIDLPAVHVPSMRGRLWRSILRSRELLIETRTKAVSHVRGWLRTQLMKLRRGATETFPARVRELWTEENPLPAHIASVLIAIDTLNEQVSASMKQIRELAKNDDVCLRLMTIPGVGPISSMAFVAAIDDVTRFPNVHRVQSYLGLTPGEDSSSKRERRTGITKAGPSSVRRVLIQAAWVAKRFRSNDPMVKWATRIEERRGKHIAVVALARKISGVMFAIWRDQTRYSPLEAAMTTRS

SEQ ID NO: 497126 - protein, 312 aa, unidentified
MAKVVVGIDVSKARLDVVVSSKGKHFAVANDTAGLTELVRALQGYDIEMCVLEATGGLEQECVIHLQSQGIAVAIANPRQARDFAKAAGRLSKTDKIDAKMLAAYGERMQPRIAAHVSERQVELAAVSARRDQLGQMRTAELNRLHACRSGDMRTSITKHIKSLDEMIAEVEAHRDRLISQDKGLKAQAKLLQTIPGVGPVTSTTMLADLPELATLGRKELASLVGVAPHCRDSGKSHGVRMIWGGRKEVRSKLYMAALTASRYNSAIRTFYERLLEKGKPKKVALVACMHKLLGMMRAVLVTNTPWKEATP

SEQ ID NO: 497127 - protein, 426 aa, unidentified
MWDAQRRVLKIKSLKHGIIQDKRGNVMRAVFGIDVSKTSSEVAILVNGEKVHGYTILNDAFGFNRLLGDLKTVHNPEIIFEATGVYSRCLQAFLEECGYAYTRLNPLEAKKQLDSLRVRKTDKIDAEKLAKSQLVHNRKPTYVQEEVYQHLRDLSRFYQNMTEDLVRAKNRLHKVLQVTFPELENLLSTPTGEQYWNLVMAFPCKEFVLSLSQSDLYEIIRQSTSKRISEKRIAYLTDKLIKLAKQSFCAVKKTSPMLEEVRYYAQELLRLSERRQVVLNDMVALAQPLPEYDILRSIPGIAETTATSIIGKLGDIRRFHSANQINAFIGIDLRHYESGNFLAKEHITKRGNPYARKILFKCIHNIASASHTNPCHIADFYEKRKRQSTIASTKPHTIASIHRLIRTMYYLITHNKLYDYTSTQNR

SEQ ID NO: 497128 - protein, 411 aa, unidentified
MDVVHERAAGIDISKRDAKVAVRVPGKRPGSYTTTVKTFGATTAQVLALVDYLLGQRVTTVVMEATSDYWKPFYYVMEDTLPVMLVNARHARNIPGRKTDVSDAAWLAQLGAHGLLRASFIPPEPVRHLRDLTRARSMAARDRARIVQRLEKFPESSGIKLSAVATDLTGVSARAMLEALVTGERDPQVLAGLARRTLRRKIPALIEALEGRFTEHHAFMVSQYLAQLDTQQATIDALTARIEAVIAPFAAARQALVTIPGISRTVADVIIAETGADMTVFPTAAHLASWAGVCPGLNESAGRVKSAHTRHGNAHLKAALGVAAMSASRTKDTYLAARYRRIAARRGPVRAVVAIERTILTAVWNMLTYHAAYTDLGGDYYTRRDPVRAKHRAICQLESLGYQVTIQPAVA

SEQ ID NO: 497129 - protein, 409 aa, unidentified
MGSVGRAIGLDVHRDFCEVAIVEGGALRSAGRIATTPDALELFAQSLAPTDRVALEVTGSAWEIARILEGHVARVVVVSPADTGIRQARAKTDRLDARTLARLLAAGELDAVWSPDQWTRVLRRRLARRAQLVRARPRAKNEIHAVLVRRLVGRPPVSDLFGVKGRVWLAGLELPLEESETVAACLRHVEFLDSEIAAVEREIARQALESPELRRLLTVPGVNVICAATFLAAVGDIRRFPTSRKLVGYLGLDPRVFQSGSSPAKGGRISKQGSPAARWALVEAAWSAVQQPGPLRAFYERIRGRRGGKIAVVAVARKLTALFWSLLSRGEDYAHAQPSLTAKKLRLLEIRAGAPTLKGKPTGTWATRQQMRTAERELAQQAETSYRRIVADWQAAAKKAGASVTAERA

SEQ ID NO: 497130 - protein, 411 aa, unidentified
MSVVQFTQVLLRGCGMDIHKKVVVATVQGEGICKETRSFDTFTRSLTQLREWLVSLGITHVAMESTGVYWKPIYNVFEGFIPHIWIVNARHIKNVPGHKTDKNDSEWICQLLMAGLLKPSFIPPKAQRELRDLTRYRRKLIQFVSANKNRIIRILEDGNIKLSSVLRDTSGATAVKLIDMLCDGKQITLSDIESVCHGRCQHTKEEMLEACTGCLDEHKVYMLGKIRECNASLKEYILDFDKRIKDVSSSYHDAIERMCEIPGIQNCVCEDLVAEIGLDMSNFPTSAHLCSWAGMCPGNNESAGKKKSGRTNHGDKQVKETLVEAAWAASRAKGTFFMERFNRLAPRKGSKKALIVGHSLLKCIHYVLSTGGRYKELGDNYVPNKKEQKRKEYLKKELQKLGYSVKLSKED

SEQ ID NO: 497131 - protein, 444 aa, unidentified
MKALPVLDPKAAAIDVGSERLHVSIAGEEPKVFGTFTGDLEALRDWFKQEEVRTVAMEATGVYWLYLYEVLEAAALKTVVVNGRHVQNVPGRKTDMADCQWLATLHAHGLLRGGFVPPADIRQLQDYQRLRADHIIGAASQVQKMQQALERMNIKFHDVISDLTGVSGLKVVRAILKGERRPGELLALCDEQIQKKKSAAVKESLRGCWKKEQLFALRQALELWETYQQKIADCDREIESLLQQLAGPQGPQGGNAIVGPVKLAPAKMPGKNAPVIERCQELLARICGGRDATQIPGLGEYLVAQLISEVGVDMTRWQTEKHFTSWLGLAGGRKQSGKRKGAVKAHRNRAGRMFCAAARSLAQTVDKALGGFYRRLRGRVGGLAANVALARKLAQLFYRLLRYGADYVEKGLKVYEAKVLETEARLLRKLAKKQGFTLVPSSLN

SEQ ID NO: 497132 - protein, 340 aa, unidentified
MESFAGADLHKRVTQLAILRDGQSPSQFRFPNDPKTVHGVLKKLPRGTKIAVEATGSWWWFVEKARELGHEVCLSHPKQTKAIAHARLKSDKVDAVMLARLLKADFLPTVWIPGEKERYVRELLAHRMRLVRNRTAVINELHALYAKRNVEAPGMIWHRLRPMPWRAEELSGYAPRIVSENVELLKVINRQIQDLDKEVGKAGQEDPQAKRLMTIPGVGATTAVAVSSWVGDIGRFPNGKKLVSYFGIAPRVRQSAEKQRHGHIAKEGSRMARWLLLQAALVSIRMAKQPARSHYLGVSKRRGKQIARVAATRKLVGVMYHLMREQIDYEEFLRRGGNAQ

SEQ ID NO: 497133 - protein, 480 aa, unidentified
MNVKARRTKKQVNVENQAINLLSKEELNKKIEVVEKELRSYTWRELEANGKFAKNDKLSFITDDMLIVGCDIGSETHYIRAIDVRGRELSRGAFEFSNTSEGFENAKAWVLALAAKHDKKQIVLGLEPTGHYWFALAAWMISNGISVVQVNPYAVKQSKEIEDNSQLKDDRKDPKLIANLVKDGNYGMPYLPEKVYADMRRLSMFRDQFTEDRIRNINRLHRELKIYFPEYMDAFGKIDGAFTLEVLKVSAIPTDITALGAEGMKNIWHNAKLRGRGYSRANEIVNYAEKSVGLTDGTDAGREAVKWYAEQILRLDEQLAEIESALHEKCREIPYAENILAINGVGENVLAGILAEMGDISRFDDVKEIQKLSGIGLVACSSGKHKGQTKISHRGRKRLRYWLFQAAKSAVSHADEFKQLHEYYTTRSNNPLKKMQSLVVIACKILRVIYTILKTGTTYDPQKLLKDIKHPAASQAPMAA

SEQ ID NO: 497134 - protein, 400 aa, unidentified
MTAVWAGIDSGKRAHHCVVIDSAGRLLLSRRVVNDESALLELIAAVLSLGGGDPVVWATDLNAGGAALLIALLAERGQRVLYIPGWIVHHAAATYRGDGKTDAKDARIIADQARMRTDLQPVRSVDQVSGDLRLLTARRTDLVYDRVRAINRLRALMLEYIPALEAAFDYSKKAPLILVSGYQTPEAIRRIGAARLAAWLKKRRCRGPANVARKAVDAANAQRTVLQTESVAARLVAQLAEQITTIDTEIARLDEQISERFEQHRDAPILLSMPGFGPVLAATFLANTGGDLNACETVDRLASVAGLAPAPRDSGRINGNHHRPKRFNRRLMRTCYLAALSSLKNSPASRAFYERKRAQGKSHKQALIALARRRITTIWAMLRDRTTYQEPLPPALATAT

SEQ ID NO: 497135 - protein, 368 aa, unidentified
MGGKSSKLYIGMDVHKASIDIAVAEEGGEVRHQGQIPGDMNALWRAVRKLESSGRELIFVYEAGPCGFGIYRGLIARGHGCWVVAPSNIPRRVRDRIKTDRRDSVKLAGLARAGELTPIYVPETADEAMRDLVRAREDAVVMQRQARQRLMALLLRNDVRYSGKTPWTVAHRRWIADVRLPQPAQRLAFEAYVQAVEEATQRVAMLGHCIEQEITHWRWLPVVNALQACRGIQLIHAVRIVAEVGDLSRFGHPRQLMSYLGLIPSENSSGERRRQGSITKAGNSSARRALVEAAWAYQFTAKVSGLIARRQAKVPKAVLDIAWKAQVRLCSRFRSLAARGVSRNKIVVAIARELAGFVWAIAQRVGPT

SEQ ID NO: 497136 - protein, 409 aa, unidentified
MEVIFSRCAGLDVHQETVVACVRIQSGSKADQEVRTFSTTTEGLLALSDWLVGQDVTHAALESTGVYWKPVWHVLEASVELVLANARQVRNLPGRKTDVADAVWLADLLAHGLIRGSFVPPVAIQELRDLTRTRTQFVREASRHTQRIQKALEDANIKLTSILSDILGVSGRAILRGIVTGTTDPAALAALRCARGLKATEEQFVQALTGKVRDHHRFLLKLHIDQVDSIEASVGLVERRIGELLQPFRIEVALLTTIPGVSDTVARTIIAEIGLDMSRFPSAAHLVSWAGLCPRNDESAGKRRSTKLRKGDTWLKTVLVQSAWAATRKKDSYLRGLFLRLKARRGPKKAIVAVAASILTSAYFILKRREPWKDLGINYFDTRDRTKLANRLVKRLENLGLRVQLSEAA

SEQ ID NO: 497137 - protein, 370 aa, unidentified
MGEYSGAFVGFDTSKTKHAVAIAEGGRGGEVRFLGEIASSPVRVERLVGKLASRYDKLHFCYEAGPTGYGLYRQIRELGHDCAVVAPSLIPKRPGERIKTNRRDAVTLARLLRAGELTAVWVPDAVHEAVRDLVRARAAAAQDLRGKRQQLLSFLLRHGRIFSGRQHWTLAHRRWLAEQSFAHPAQQVVFQDAVEAIAEALARLQRLEQQLVAIVPSWSMAPVVEAYQAMRGASFLVAVTFAAEIGDVRRFDNPRQLMAFLGLVPGERSTGETIRRAGLTLAGNRHARRVLVEAAWSYRHPARVSPTLRARLEGLPKPVRDTAWKAQVRLCARYRRLSAAGKKLPVVIAAIAREMAAFLWAIARHVAPAV

SEQ ID NO: 497138 - protein, 362 aa, unidentified
MRIIGCDLHARQQTLAMLDTTTGEVVEVTLKHEGDNVREFYSSLPRPVRVGIEATGSMQWFLNLMEELGIECLVGHPAQIRAAAPRKQNNDRRDAELILKMLVEGRFPAIWLPSKELQDLRALLRHRHQWVRMRTRIQNALQSIALANGLRRGTALWSHDGQSRIASLPLAPHTAYRRSELQAMYEKFEAEIEKLNQRVEEQACKRPGARLLMSHPGVGPITALATEVFLGDPTRFADSKALASYVGMIPREYSSGGRQRLGGLSKQGNPLLRFLWGEAGAHAARKDPELQRFYRRKLVQKGLGKASVAVARKLGIRLWIMLRDQIEYNEFCRRGQKQQKSSDACVGMPETRYGAKSHRPID

SEQ ID NO: 497139 - protein, 364 aa, unidentified
MQYVSNNTELSSHEETRCQFNGSTGVIKLGIDVHQQFYTVVVQEGGSNPKPPQRFRKEAFLHWAARLKQQGAAVHAVYEACGFGFGLQRQLAALGIACHVVCPQKLDEHNRRVKTDSLDAKALCLKLDRFVQGNQDALALVRVPTEQEEQLRAIHRQREQLVKARKQLEAQGRSLIVNHGIEPVQSWWKLRTFAALPVPAWLKELLANSQPILIALQEKIRVLSLQLQSAAGPDQPRGLGAMSSVVIDREIGNWHRFRNRRQVGSYTGLCPGEHSSGNTRLQSCVTKHGNPRLRAALVELAWRLVRFQPNYRPVLKWRSTLCKGALATGAARKKAIVAVARQLAVDLWRIRTGRVRAETLGLIN

SEQ ID NO: 497140 - protein, 346 aa, unidentified
MEHYVGLDVSLKLTAICIVDRTGKIVREGVVTSDPETIAAFIRSHAPHVARVGLEAGATSTWLWTELNKMGLPVICIDARHAKAALKMQINKSDRNDAVGIARIMQCGWYKEVRVKDLDSHATKALLVSRALLVKIKRDIENQIRGLLKNLGLVIGRAKMNVFATRAAELAEARPELAAAVGPLLKAREAVGRQIADLDRKVMRLARNDAQVRRFMTAPGVGPITALCFLATIDDPTRFKRSRSVGAYVGLTTRRYASGEIDWTGRISKCGDAMLRSYLYEAANVLLTRVAKWSTLKAWGIRIAKRSGLRKAKVAVARKLALILHRMWIEGTEFKWSSKEAANQPA

SEQ ID NO: 497141 - protein, 364 aa, unidentified
MAKIPGAVIGGVDTHKHTHYAAVIDRHGHLLGDKEFAACDDGYRELLTWMRSHGSVQAIGIEGTGHYGTTLTRFLTGAGEHVLEVNRPNRAARRLEGKSDRLDAEQAARSVLSGAASADPKAKSGAIEVIRILRVTRANAIKARTMAFNLLHGLVVTAPSPLRDDLVHLTKRTLVNRCYRLRPETEDLVSLTGYPDRLLVAGTKLALRDLARRFKTLDDEVKALSAQIVGLVEQAAPDLMKVFGVGAELAGQFLVTVGDNPGRIRSEAALAKICGVAPKPTGSGKTSGRHRLNRSGDRAANSALYIITIVRMRHHAPTRAYFERRTAEGLSKREIIRCLKRYIVREIYAALPKVDASQVPEIAA

SEQ ID NO: 497142 - protein, 388 aa, unidentified
MNYVGIDISKYKHDCFILSDFGEVVNAGFSFANNAKGFQALKQELDSCGEGNVRIGLEATGNYGINLKLFLERIGFNFMEINPMLIKQYLKSSTLRRTKTDKLDAKAIAEYMLAREYRPNPESFYDLFALKQLTRLRSRLVGIRSSYLVRMTNVLDCIFPEFKPLFGNKFSVTALYILAHYQTPEAIANMNIRSYDILRRKSRGAFSMDKFVTLKALAKNTVGVYHKCYGVELESLMDLHSQIDCKIEELEAEIAQMVEALNPPTLSIRGIGTVSAAVIISEFGDISRFDNPNQMLSFAGLEPGFFQSGTSEHQGHMVKRGSPHLRNVLLNCCRSMRLHNEVFAAYYRKKVAEGKSEGVALSHMAKKLIRVIYTLETTGVAFDAEKLR

SEQ ID NO: 497143 - protein, 456 aa, unidentified
MGHARARKIPAQLVEDEDYQLRYEKVAGIDIAKAKADVCTRLPAARAGGRRASRLEEVPATAREILALAGRLLADGVELVVMEATSDYWRIWYYLLEGAGLHVQLVNPAHARQLAGRPKTDRLDAQWIARLAEMGLLRPSFVPPPEIRALRDLTRTRVQLVRDRTREWQRLEKLLEGALVKLSSVVSRLSRVKTARDILEAIADGRRDPKSLAALAAGQIKGGRAAVERALEGMLLGDHHPMLIRVHLDHITFLDRAVAAIEDEIDAALDAIEGAWGISADGVPSPDPGPGAAALPAVQRLAEIPGVSPMLAMAIIAETGLDMTRFPTAGHLVSWAGLAPVAQQSGPRNRKPKKGHGDAYLKGYCTQAANGAARTETFLGERLRRLSRRLGGNRAKCAVARSILTIIWHLLASPETRFTDLGPDWHDRKADRDRKIRAHLRQLQALGLEVTITPAA

SEQ ID NO: 497144 - protein, 349 aa, unidentified
MSMVGGLDLHRRQITYDVVDVDSGEIWRGRLWQPDRSRFRYWLEHEVSARAQGGSVALAVEGCTGWRYVVEEISAVGFAPFLAEPADTQAARGRKHRAKTDRTDAQLLRELLQAGELPESWIPPDDVLEWRERVRLYKSLVDQRTLWCQRIHAVLYHHGVTIPEGAIRTEKTRSMLADGNLRISPAGRERIDVGYKMIDAADREALPLKHALQHFGTRQPACRALVDAQYGIGGLLAVVLWTELGDCRRFSRSEQVVRHSGLDVTVDSSDRRRAGGHLSRQGPETLRWALYEAAKNSSHGRSPDHGYYAKVKERHDGKIAAISVARQFARRSYHVLRAVDPDEVYAIPA

SEQ ID NO: 497145 - protein, 309 aa, unidentified
MAMKTYKFEFGVDVAKDWLDISDGTQVSRIDNHRSAIKAFLKQFSETTCIAVESTSTYHELFIELAMADEHTIYLVDAYRLSRYRDAVGVRAKTDVGDAHLLHRYMYAEKHQLTPFKPIPTAVKRLNRLLKARAKLAKERASIGLALKEIAELTQTRLAIMNRIKQAMMLIDKRVKECIKLAGYTDDYQRCLAIPGVGPQNAAALVATYHRGTFRKADSFIAFIGLDVRVCESGYFKGRRKLTKKGNPEIRRLLFNAARSGSKTSKWNAYYMSMKARGHSTTASAVALSRKIARLAFALLRDQSNYHAI

SEQ ID NO: 497146 - protein, 402 aa, unidentified
MKRLSGGGIDVGSESHHITILDEEDHILYNQKVAHKLNEFTESIKQFKKIEKKEKGVISFALEGKNGYSAPFDQLLINQGFTLYNVDNFKLKRFRQAFAGEWRDDQRDALMLSKMLKLKDHIDSEREKIFIKIEKPSPLTESLKLLSRHQQTLIDEKVRLVNRLSKKLLEVCPEILKLAKPKNKKLIAILARYPDFSKHKRITLKSLLKIKGIGKRPAPFLLKRLNHIEYMPGLTDIYKTIIFSYAKRISELQEEIKDIDKSLDEIGEKNKEVNHLKTIPGVATKLASRLIGEIGDINRFPSEKQLAIYCGVACVNNNSGKVTKAKAVYKANKICKQTLITMAGGSIRLSLQCKAYYQKKRAEGKSHNHALRCLARQLIKVIYKMLTEDRDYIIKKELKKVA

SEQ ID NO: 497147 - protein, 324 aa, unidentified
MDKDTEPHRYVGIDVGKDQIEVYIRPDGIAFSCGTDPGDLAALVTRVTPFRSTLKVIVLEATGGYEAVIAGALSAAALPVAIVNPRQTRQFAAALGQLAKTDKIDAPVIAHFAEAVKLEPQPPADAQITELRALLSRRSQLIEMRTAEKQRVAKAVSKLARRSCEKILRQLEAEILLIEKAIGKLIDASPVFQGKAALLKTIPGIGDIVARMFIAELPELGQVDRHSIAALVGVAPINRDSGRSRGHRHIKGGRPQIRAVLFMPCLAIVKHNQPLREFYNRLIKAGKPKKLALIAVMRKLVVIANAMIKSGKPWSGASIDAAPV

SEQ ID NO: 497148 - protein, 429 aa, unidentified
MRRNYNKQIEKQQQVTPETLVVGIDIGNEFNAVALVDKLGKVYGKYPKIYNSRAGFNYFKEIIKNQQKINGFTKVLIGLEPTGHYWRKIAYFAQEQGFDVKFVRTTAVKHQRELDESSSAKSDMRDAVTIANIVREGKYLDTPIKDGNYRQLRTLCKFRESLQKYNTAMKNILGTVLDDYFPELKKIFWSIEANGLRAILEECGFPKDVLSKGIFKIQEILRKSMRRKAQADKKAIQIYKAAEESVGLKEVYEADRYKLKTSLEEVNRLKVQLKSIEKQIKEILEKIPEAEYLLSIPGIGALSTGIFLGELGDFKNFRDYRGIVKYAGYDPIENDSGQNIGKKHISKKGRYLLRKILYYMSMSVRQRSEYFKNYYLNKLKNRNRFGQELRKKEALCAVTIKLIKVIFSMLRNGRCFKENYSSFKLKLAV

SEQ ID NO: 497149 - protein, 354 aa, unidentified
MTVYIGVDFHPYEQSVAYCDNGDGEIRYKRFLHSDKQTIKAFYRKCGADAVVGVEATGCLWWFEKLLADVGIILKIGDPRMIRRVALSRHKNDFRDAETILDLLMRGDFPAIMPRSEESREVLDLLNYRQSLVRKRTSIANQLQAFARTKGLSRFSLPAVKGRKKLLEAPGTEAEELLLGSRLRLYDELTAQIAAVEAKLEEEADKKDTVHLLRTHPGVGPITSLALVHTLGDVRRFRRKEEVVAFVGLDPLEKSSGEKKRMGQISKRGSRLARHLLGQAAQTCRDKKIRQFYSQLAARRGRPKAKVAAARKLLINCYVMLRDGIGYEEFVRRGEVGLCEGSGKLSQKLQSLEA

SEQ ID NO: 497150 - protein, 392 aa, unidentified
MLKYSVGIDISSKDFYACISVIDEAQMVKVKASRKFANTPKGFEQFEHWMDKNHKQKEVPLFISMEATGIYHEECALYLFQKGFKVSIILPNKAKKYLQAVGLKSKNDSIDAQGLSRMGAEQVLDLWQPMGSYFYRLRALTRQHQSLQEFKTQLNNQLHASTHGMYEDDLVINQLQRSLRHLDTQIVDIEKAIKIHIEQDEIVNRKVENICKITGVGTLTVAVVLAETNGFALFKNKRQLVSYCGYDVIENQSGQHVGKTRISKKGNSRIRRILHLPAFNVVRHRQRPFVQLFERTLAKHGKKMKSYVAVQKKLLVIMFALWKKDEAYDPAYTPEDSKKNNTGEQEQEPSSLLSFAEADGSDKKIAPALAGATQGRHTVEQSQFASSLLSQR

SEQ ID NO: 497151 - protein, 345 aa, unidentified
MQLTTVSVDLAKTVFQLHAIDQQGKTALRKQLKREQVVPFFANLEPCLVGMEACGGAHYWARKLQALGHTVKLMAPQFVKPYVKSNKNDVADAEAICEAVTRPNMRFVPIKTVEQQAILAVHCARQGFVKARTAQANSIRGLLGEFGVVLPQGIRHIVERLPNILEDHENALPGSLRQLMQRLMEHFKELDRQVVELEREIQQWHRSNEGSCRLAEIPGVGPLTATALVASVGDAKNFSNGRQMAAWLGLVPRQHSSGGKPTLLGISKRGDGYLRTLLIHGARSMVRVVESKTDPSADWLKGLLARRHTNVAVVAQANKTARIAWALLAHGTKFRPDYTPDVTVA

SEQ ID NO: 497152 - protein, 279 aa, unidentified
MTSTKYIGMEVHKESISIAVMKAAGKMVMECVIETKANMILQFFDGLRGDLQVTFEEGTSTAWLYDLRKPHVTKLLVCDPRKNTSLKEGNKSDQIDARRLAELLRLNHLNPVYHGEHGLRSLKELVRSYLTITKDLGRVMTRVKAIYRSWAIPCSGKQVYAPRHRVEWLGKISEAGVRRRAEFYYQQLDALRTVRQQVRRDLLAEGKKQQAWKRLCQIPSIGPIRAAVLLGILQTPHRFRSKRQLWSYSGLGIETHSSADHRSVDGSCNEPRNRSPFAD

SEQ ID NO: 497153 - protein, 410 aa, unidentified
MLFLGDDWAEAHHDVELVDESGWLLARRRLPEGLAGVTTLHELIAEHLDPAAEPNQVQVGIESDRGPWVQALLASGYVVFAINPMQVARYRERHSASGAKSDAADAHLLAEIVRLDRAHHRPIAGDTEIAEHVKVATRAHQTMIWSRVRQVNALRSLLREYYPAALAAFGTDLASRDALAVLSTAPRPDLGRRLSQARIETLLRKAGRQRNVSTTAAKIRAALNSEQLSARPGVIPAYAASASALLAVLGTMVTQTEVLARQVEQGFGQHPDAEIYLSQPGLGVILGARVLAEFGDDPDRYVDAKARKNYSGMSPITKASGTKRVVLARFARNRRLGDALFLQAFAALNNSPGARALYDRQRSRGATHYQALRTLANRLVGILHGCLRSHTRYDEHLAWHSEPDKLSPAA

SEQ ID NO: 497154 - protein, 389 aa, unidentified
MKIYVGIDIAKLNHFAAAISSDGEIILEPFKFTNDADGFQLLVSKLESFDKNSIIIGLESTAHYGDNLVRYLVAEFYQVCVLNPIKTCQMRKNNVRKTKTDKVDTFVIAKTLMMQDDIRFVSFYDLDMMDFKALGRFRQKTIKQRTRLKIQLTTYVDQVFPEIQYFFKSGLHQNAVYALLKEAPSPKEIASMHMTHLANLLKVNSHGHFTKEQAKELRVLAQKSVGANDSAISIQITQTIQQIELLDSQLEKIEAEMTDIMQLNDSVIMTIHGIGYINGGMILGEIGDIHRFSNPNKLLAFAGLDPSVYQSGNFQAKTTRMSKRGSRVLRYALVNAAWNVVRNNATFKAYYDAKRAEGRSHYNALGHCAGKLVRVIWKMLTDEVEFNLE

SEQ ID NO: 497155 - protein, 352 aa, unidentified
MKPVPNAKEGAETLESLLVDVLSAHHEFNHVIIGLESTRFYGVHIANYLSASDLLAPFGTEVYCLNPKEIAKYKESFNALDKNDGIDSFVIADFARVGRISIKPWRGAQYLALQRLTRHRLHIAECIAREKTYVLNNIFLKFSEFAMLKKEDHPFSNKYGATAEAILEQYVTNDDIIEASIEELVELIESKSRGRITEPEETAKILKAAASGSYRLDRVVAEPITLSISSSFNCIRAFEKELKAIEKAIEHTVQGLNSVEYQILKSIPGIGHVYAAGILAEIGTIKAFTSNGALAKYCGIVWKENQSGNFRAEDTKMSKAGNRYLRYYVIEATGSVINNCPEYKDFYDKKFA

SEQ ID NO: 497156 - protein, 449 aa, unidentified
MAVVMIGIDPHKASHTAVAISAAEEPLGELRVRACAAQAERLLAWAAAWPQRIWAVEGAGGLGHLLARQLPGAGERVLDVQPKPSARVWLLTAGDSNKSDPDDARSVAIAALRSAGVREARPDDHAAVLKIWSKRYRDLGRTRTQVACRLHAVLCELIPGGLSKEITAGHATRVLEAITPAGAVEAARCELAAAFAEDLRGIDARIRQTRAKPATSIQATGTSLTGLFGVGPVIAAAVIGDVRDVSRFPGRDHFAACNGTAPVEVSSGPRKVCRLSRRGNRRHGHAIHMAAVTQIRHRHSQGRAYYDKKLAEGKTGKEALRSLKRQVSNAIFACLQAGARRAAARAGGPGGQQGNDSVASAAGSHPRHRLFGQATPGPGDHPTATFSSPAPGSAHGRGTAGHSPVAATPPPATRRSRWSARSATRTNDLGARQDDGRTRPRRRPRPKDR

SEQ ID NO: 497157 - protein, 351 aa, unidentified
METQQITTPKLYIGIDIHKRSWKVHCATDISSGKTFSMSPDPAKLKSYIERHYNGHEVSTAYEAGCCGYYAHRSFEGYGWCSLVVNPADIHRRGKEKHTKTDRIDAQLIARELKDGRLQGIHVPHIEREQLRSLFRRRNDLVKNYRRIKSLIKGLLLNQGIITPLEFDNSHWSHDFRNWLDNLEFAYSPARMTLDSHMRYFRFVDKELRDVSTALRRYCKVHYKKDYILLRSIPGIGGIVACGIICELGDLRRFNNLKQLAGYVGLAPGIYQSGNKLRSTGLTRRAHRLIRSYFIEAAWQAIRTDPVMQDYYRKHLGKNVKTIIVKIARKLLSRTLAVIKTGIPYQIGVVS

SEQ ID NO: 497158 - protein, 334 aa, unidentified
MSSVTVFVGLDYHQAFVQVCVMDAKGSVLSNRRCDNSARLIVNSVKAYGERVVAAIEACCGAAALADELLAAGWQVSLAHAAYVNKVKQSPDKTDWSAARLLADLLRVGYLPRVWLPPAKLRQLRHVVRYRQQLAEARRNAKLRVTALLRTHRVEYGVRRWTKRWIAAVRSCEALGTEGNWVVGELLDEVERLQQQLNAVEARLAALTADDPFVQKLLSYVGIGLVTAVLLRAELGDMSRFRSGKQLSRFVGLSPRNTSSGLKQADAGLIRAGNPQLRAVLIEAAHRLQRLDPRWATLGRQLRRRGKPGSLVAAAVANRWVRWVYHQLRDVQVS

SEQ ID NO: 497159 - protein, 386 aa, unidentified
MQTVADRPEAPIAIRTNLGAIFISLETSRSKWLITSLAPAGGEKMSKHLVRGGDVAGLLERFVQLREKTRATTGKVFPFVVIQEAGLDGFWIDRALQNEGIESHVVDPASIATSRRRRRAKTDKIDGDALVRALLAYKRGEPRVCAMVKAPTPEEEDRRRLCRERKVLIAERVRHVNRVKGLLFSQGISGYEPLRRDRRERLDTLQTGDGRLLPDHLKAQVRRELDRLELLLKQIKAVEAERDLLLAAQQVAAPPTMLLDIKGIGPEFAAILWSEGLFRHFDNRRQVASYAGLAPTPWQSGSVDREQGVSKAGNPRLRTTLIQLAWLWLRHQPQSALTLWFEERVRRNGGRLKKTTIVALARKLLVALWKYVTAGVVIEGAVMKAA

SEQ ID NO: 497160 - protein, 375 aa, unidentified
MKEKVRFLGLDVHAETIVVAVAERDGEVRSLGTIANRAESIRKLVKKLGPVEQLKACYEAGPTGYVLYWQLAELGVACEVIAPTLVPMKAGDRVKTDRRDAERLARSHRSGDLTAVWVPDEGSEALRDLVRAREAAKADQLRARHRLSKFLLRTGRRPETKIKLWTGVHMTWVRQLRFEHPAQESTRLDYLHEVEHMAERVLRLEQAITDAIKLATPEMQEVIRGLQALRGIAEISAVTIVSELGTLSRFENARQLMGYSGAVPSENSSGKRVQRGSITKAGNAHLRRIAVEAAWSYRLRPGIGPRLRKRQENVPEEIKEIAWKAQIRLTKRYARLAAAGKDQRKIVTAVGRELLGFIWAIGIKAESAAMQKMAA

SEQ ID NO: 497161 - protein, 417 aa, unidentified
MESIGVAGIDVHKQMLAVVVGRQGMDEKQWERRKFGTTTRELLHVMAWLQQKQVKEVAMESTAQYWKPVWIALESHFTLHLAQARSTKGPSGRKSDFRDAVRIVKRLLSDDLTLSYVPDAEQRQWRLLTRCRHQLTRDRIRLRNQIEGLLEEGQIKLSSIVSDLLGVSGYRMLKALAAGESDPKKLAAMGEKRLRATEEELAEALTGRLEPMHRKLLALFLKRLDLVEEQIEDLSKQISKAMAAHQPVMMRLCGLPGIGAEAPAQIIAELGPEAAAFPSAAQVTSWVGSCPGREESAGESHNNRSPKGNRPMRRLLNQLAWAAVKTKDSYFQGLFRRLVPKLGIKKAIWAVANRLLKVIWKMLHQKVDYIEFGPLATNEQARKKRKQRLVRELRRLGYTVQISLLPPPLIPTPEPRP

SEQ ID NO: 497162 - protein, 338 aa, unidentified
MIHVGVDLHQRFCYMTALEARGKILQAGTVTNEKLALRRDFRQFRGKEVQVAVEACGFWPAFREVVEPEVKRLVLVHPQRVKAIASAKLKNDRVDSATLAHLLRCDLLPESWKADRGTQARRQQVRLRATLVRHRTRLKNQVHAVLHQQGLRSPVTDLFGKRGRLWLAEVKLPVQARESVNVCLRLLDGYSEEIQKQNLQLSEKAKQDKRAEWLMTIPGIGECSAMMLLAEIGDIGRFQDKEALCSYAGLVPRVRESAGKAARGGITRQGSPWMRWILVEAAQVATRCSPAAKRYYERLARKKHKHVARVALARKLLIAVYALLRDGVVFDEQKFATV

SEQ ID NO: 497163 - protein, 345 aa, unidentified
MEQYVGLDVSLKLTAICIVDGTGKIAREGTVPSDPEAIATFVKTHAPHVARIGLETGATATWLWTELTKLGLPVICIDARHAKAALRMQINKSDRNDAVGIARIMQCGWYKEVRVKDLDSHAVRALLVSRALLVKIKRDLENQVRGLLKNLGLVIGRAKMNVFAGRSAELVQGRPELAASVGPLLKARAAIEQQIADLDRKVLLLARDNGQARRLMTAPGVGPITALCFVSTIDDPARFKRSRSVGAYLGLTTRRYASGEIDWTGRISKWGDKMLRSYLYEAANVILTRVVRWSALKAWGVKIAKRTGLRKAKVAVARKLAVILHRMWMDGTEFKWSKEAANQPA

SEQ ID NO: 497164 - protein, 418 aa, unidentified
MSDSKRWYAGVDWGSQSHCVFLADDQGRKIGQKFFKHSGEGLAEMAAWLLKTSGADGPGQVFVAIEVPHGPVVESLIERGFVVHAINPKQMDRFRDRFSMAGAKDDSRDAEVMASALRTDLRCFRKLSSADPVLVELREWSRIAEELGVERNRLANRLREQLWRYFPALLELEEDCSAEWLLEFIVLAPTPAKAARLREAKIAELLKQRRIRRFDAATILKAVRAPPPKLAPGAVEAASAHVATTIPRLRLVNRQIREAEGKIGALIDSLTAARDSQETEPGQEKQHDAAILASLPGVGRTVLATLLAEAWEPLQRRDYAALRSLAGVAPVTKRSGKSCIVVRRQACHDRLANALYHWARVAVQHDLRSRAKYAELRKRGCTHGRALRSVADRNLSVACAMLKSGTTFNSSLATQKTA

SEQ ID NO: 497165 - protein, 340 aa, unidentified
MRKLYGAFDLHSSNNYLGISDEKDRRVYKQRLPNQPDVILAELEPYREQLVGIVVESTFNWYWLVDLLMDNDYQVHLANPAGIQKYKGLKHSDDKHDAFWLAHLLRLKILPEGYIYPKEERPVRDLLRKRGHLVKLRTSLINSLQAIIHRNCGVKLNARKIKAIREDNVAPLLSGQEDLALSGMVSKEAIDYLGRQIRKVENVVLGKIKLKEEYLYLLTIPGIGKILALTIMLEVGPVSRFQKAGNLASYCRKVPTTWTSNNKKKGKGNKKNGNKYLAWAFSEAAEFARRYDDQARAFYNRKTAKKNFMVAHSALAHKLARAAYYVMRDQVAFDSQKLFA

SEQ ID NO: 497166 - protein, 435 aa, unidentified
MQLNTTTVPRVSIGIDAAVVAPHQIAVRGEETEDFKVSPTLAGLATLTERLKRYAGAMVVAEPTAGTWLPLVHAVTNAGCEIGFVANRDSARLRKAIVGASKTDVIDADMLAHCESVLGVVPAPVPPPGQIALRRAMRRRHVTTVDAHRVECRLWALAAWAFPDLWRATSGHTLAQPLLGQWPHLEQLAKARLSSISRVVAAHNRDKDPDRRAGRIHDSATGWVQFWTGHVDLDAMAWEVAAMLEDITVADKRHADTTQHALALWTQHWPEDPLVSIPGLGPICASAIRGWWGDASQFKTAKAAVAHTGLNPSVWSSGLSEAPSRRITKQGPAELRLALYQAANVARRRDPQLAEHYRRLMVERGHNHISANTAVARKLACRAWAIATSAKPYEPRDLDGNPVSLSVAAEQAVELAVPKQTRDRRRGHTKRGRLN

SEQ ID NO: 497167 - protein, 389 aa, unidentified
MYLIGIDISKYKHDCFIATETGEIIKDVFTFTNNQQGFTEFLDVLQDLDLNQTKRIGLEATGHYGRNLKVFLDKHDYTYMEFNPFLVKKFSSGLTLRKTKTDKVDSRLLSLILLSVEYKVYPVKSYHIEEIKSLTRYYKTLVKKRSKEITNLTNILDYIFPEFKPFFNNKFSKTALFILEFYQTPEKISNMNSKSHEKLHNVSRGKFSYARFIKLKILAKETIGSSSIVLNTLLQSSLRVYKSIDQEISITFDNLLELSKTIDSPVFTIRGVGPISALSIISEYKNFTSFNSAAAMLSYAGLEPSVIQSGTIEKKGKMVKRGSGYLRETIMNISPYFIMYNPKIYDYYHKKRNEGKPHRVALTHVAKKLIRIIFYLVKNNEPFDEDKLK

SEQ ID NO: 497168 - protein, 342 aa, unidentified
MDEYDGRQFVGIDLHRQRSVIVRQSESGEQLSAVRIVNDPVALRLELERAGTDPEVVLEATYGWYWAVDVLRDCGAQVHLAHPLGVKGFRYRRVKNDVRDAGDLADLLRMGRLPEAWIAPPQTRELRELVRYRAKLVAIRSGLKAQVHAVLAKAGVVIAASDLFGVGGRQRLAKVPLGAAYAERVRSLLELIDVLDGHEARFAGLIAKRLCNHRGYQALQQVPGIGPVLAAVFVAEIGDVHRFTDAAHLCSWAGLTPTHRESDTIVRRGHITKQGSKLVRWAAVEAIQRQPDTTKIARDRQRIEARRGRNIAKIAAARKLLTLVYYGLRDGHIRALAPRRAA

SEQ ID NO: 497169 - protein, 284 aa, unidentified
MTEITIGVDVSKEALDAYRFPDGESRHFDNNAKGHKALMRWIGSEVTRIVYEPTGAYHRGFECRLAEAGLALVKVNPRQARRFAEATGKLAKTDRCDAAMLARMGAVLALTARPLRGALLNELKDLHMARAALIKDRTAARNRAKTLTLALLKRQNGERLKQIQRHLGDLDQTILALIKTDPDLAQRLDILTSIPSVSHATACALIIDMPELGALQPSEAASLAGLAPVARQSGTWTGRAFIRGGRANVRQALYMPALVAMRFNPDLKAKYQALKAAKRSPSPP

SEQ ID NO: 497170 - protein, 343 aa, unidentified
MQGVTTIGLDIAKSVFQVHGVDAIGKVVIRRQLKRRYVLAFFQKLAACLVGIEACASSHHWSRELKALGYTVRLMPPAYVKPYVKRQKNDAADAEAICEAVSRANMRFVAVKTPEQQSCLMLHRTRHLFIRQQTAVINAIRAHLAEFGVVAPVGRRGVEELLEVVAGPGDERVPALARACVGALGVQLRMLKAQILAFDRQIMAWHRSNETSKRLDEIPGVGPALATALVASVADPRAFRSGRNFSAWVGLVPKQHSSGGKDRLGSISKQGDRYLRSLFTAGALAVIRYAKIHGTKHRPWLTALLARRPTKVAAIALANKIARMAWAMMTKGERYKEPAALAA

SEQ ID NO: 497171 - protein, 313 aa, unidentified
MSEYYVGVDVSKEYLDVASSDGRSLRVSNDEAGHQELVTRFSAAPPVLVLMEATGGLERALAVQLSAAGVALRIVNARHVRHFAKATGLLAKTDRLDAQALLHFAQTLKPEPRAIQPEQTLALQALIVRRRQLVEMLTMERNRLRTAHRGVRKDLQSSIRWLEKRLAGVDDDIDRSLHECGVWREKVELLESVPGIARVISVSLLASLPELGQLNRHQISALAGVAPFNRDSGRWQGRRSIYGGRPLVRSALYMAALVGARHNPVLRNFYQRLRGAGKPAKVALTACMRKLLVILNTMLKNGQRWGDHVQLQA

SEQ ID NO: 497172 - protein, 363 aa, unidentified
MFTERTSVGLDVHARSVAAAAIDGVTGELVQAKLTPSHEHIRSWVAKLPGPVAAAYEAGPTGFGLARSLNAAGIRCEVVAPSKLQRPTGDRVKTDAKDAVHLARLLRLDEFTAVAVPTVEQEAARDLVRAREDARGDLMRARHRLSKLLLRQGIVYSGGQAWTGKHDTWLRQVGHEQLSAPATKLTFESDYDAVLSVKARRDRLDVAIAEMAADCEFTPIVRRLGCLRGVGTLTGFALAVEVGDWDRFTGKTIGSFIGLVPSEHSSGQSRVQGSITKTGNTHLRRLLVESAWHHRPAYRVGKTMRDRWELAGPAARARGDEGNRRLHHRWNTMRARHKKHTVANIAIARELAGWCWSLAVLEE

SEQ ID NO: 497173 - protein, 414 aa, unidentified
MAGEINKSCGLDIHKRFLIATILSKSGEKQQHRFDRDEDGILSLRNWVTSEKCDVVACESTSDFWVPIHDSLIKHLPFIVGNARDMKAFTHKKTDKIDSEVIAKLALNDMVQPSRVFPKTHREYRSYIRLRHKLVQKRTDIKNEAHAILAPEMFNLKDVLTDIFGKNGREILSGISSGKNVDQIIQNLSPNVRKKNAQIRELLDREISQSAAIRLQICLKLIKNFDDSIELLGKEIFNYAYGNHKREMEILMSVPGIGELGAATLIAEIGNFKDFASGDKLASWLGLVPNVYQSADKYHNGRITKRGSKVARWILTQIAQAAARTKNSKLKEFFNRKKKSIGHAKAIIALARKIATIIWHLITNDEMYEDETGYVKGEVQRRKIVETEIFSVDERISIISEIFAIVEKKEPDIK

SEQ ID NO: 497174 - protein, 508 aa, unidentified
MAGSLSFSPWEPAFRLVIPLRKSVNPFGGDLCFGWLGSLRLYLYKPLGCVSTFGKWIPVGKDITMHDQKVFKMLESIPYLSVGLDVGADFSWMSIMLPNGILTGKPFKIFHSDPQSRELAVSKIKEAQETYSLKSRCFLESTGIYHIPLLRFLRDKGFDCSVINPIITKNSTNLNVRKLHNDKFDSKKAAKVGLDASLKTSIIPDDAVIDLRNLVRDYYYFKDLQSAIVLKLNAELKVSFPAYLDVFSKVTTQTSLKLLEAFPLAADMLAASKDELVNIIRSTARFGEKYALAKYDAIYAAAKDAAIFGRALPSNALRIRLYISAYREYQKHLDSILTELHRAVEKLQGQPVYERIYLLQSLHGVGFLSAVVLMAEMGAFDLFPSPKKLFAYFGMDPGVNDSGKFKGDRVHMSKRGSNLARRILHMIAINNLKMDRGTKAPVNPVIYDYYIHKCASKKKIVAVGAVMHKICNIIFAMLRDNKPFELITPEEHCKRYAAEHTGSANSAA

SEQ ID NO: 497175 - protein, 343 aa, unidentified
MKQQQYVGLDVSLEQTSICVVDDAGATIWRGKCRSTPESIQTVIAKHAPEAVRIGLESGQLSTWLFHELKARRLPVICIDARHAKAALSLQINKTDANDAHGIAQIVRVGWYREVAVKSMDSHAIRAVLVARAQLVTQKVKLTNCIRGLLKTFGIVLGEGKGRRFETMVRERIVENPMLTTIIEPMLVVLLMTREQLAVFDRLVRRRARADHDVRRLMTVPGVGAVIALAYTTTIEDPTRFKRSSTVAAYLGLTPRRYQSGEMDRAGHISRCGDAMLRTYLYEAANVMLRRSTRPSQVSIWGRALSERIGARKALVAVARKLALVLHSMWRHRMEFRFEQTAA

SEQ ID NO: 497176 - protein, 376 aa, unidentified
MNSVYHTELSSHEGTRCQFNGSKADIKSAEGRIRRYVGLGIDVHQDFYVVVMQEGASNPKPPQRFQKTAFVHWAAKLKSRVAEVHAVYEACGFGFSLQRQLTALGIECHVVCPQKLDERNKRVKTDGLDAKALCLRLDRFVQGNSDALALVRVPTEEEEQSRALHRQREQLVKVRKQLEAQGRSLLVNHGLEPVQNWWKPRNFAALALPAWIKELLQNSQPILTALQQKINALTLQLQGAAAPDQPRGLGKMTSVLIDREIGDWRRFNNRRQIASYTGLCPGEYSSGNTRLQSCVTKHGNPRLRAALVELAWRLVRFQPNYKPVLKWKQILQRGALSTGAARKKAIVAVARQLAVDLWRIRTGRLSAQQLGLKLLK

SEQ ID NO: 497177 - protein, 334 aa, unidentified
MVIAAIDIGKTVLQAAALQRDSGDVSESRVSADRESLAAWVGGFQGRLERVAIEATTGWKWIANQLFALGVSEVVLVDPGEAAARKGKKRRAKTDRLDARFLLSLLATGTAPEAWLPPQEIQELRALTRTRKALVDQRTAAAERLQALLFHEGWPCQRGRLLTGSGRRWVAALELEPPIRLLLDVLLGVIDDLDRRLEPLERQLRLRAREDRRLQTLERIYGVGPILACHLLAEIGDAQRFRRARQVVRLSGLDPVVLESGETKRRGRLAKAGPPLLRWALVEAAKHASRSQSPDHERWQRIRARRGSQVADITVARTIAGRAYRLLRELDEAA

SEQ ID NO: 497178 - protein, 346 aa, unidentified
MMIIGCDFHPSWQQVSWLDTETGECGDRKLVHASGDAKVFYQQLATPALIGMEATGNSQWFIELVQDVGHEIWIGDAAQIRASYVRKQKTDKRDAAHILKLVVEGRFPRLWTPDREQRDLRQLVLHRHKLVEIRSRVKNELQHLSLNKGMQRKRKLWSEAGQKLLRELPLKPWASCRREDLLGLFGMLNEQIGKLDQAVQQEAEEHPQARLLMTQPGVGPNTALAYVLTIGDVTRFPRGKQVASYLGLIPREERSGGRQKLGGITKQGNRLLRSLLVEAAQIAVRYDPGFRKQYVHRCHQKPKGVAKVAAARKLAVRLYWMLRTQKPYPEIVRIESSSRVPLVGAS

SEQ ID NO: 497179 - protein, 338 aa, unidentified
MKLYGGIDLHSNNSVVALLDEQDEVVYHKRLGNDAQGILAALAPFEEAIEGLVVESTYNWYWLVDALMDAGYQVHLANTAAIVQYSGLKYSDDDSDARWLAKLLRLGLLAEGFIYPKAERAVRDLLRRRSRLVQQHTANLVAVQNLMARNRGRSLSANAVRRLTPEAVERLLPEPNLALAVQSTLLAMRGQEAAIDLLEHQACAQVRLRPAYRHLLTVNGIGKVLGLIIMLETGPVQRFAKVGNYSSYARCVGSERFSNGKRKGRGNTKNGNKYLAWAYIEAANFAVRFNPTIKRYYQRKSAKTNGIVAIKTVAHKLARACYYILRDGTDFEVTRAFT

SEQ ID NO: 497180 - protein, 435 aa, unidentified
MDEVTDEPLYRDRVCGIDIGKAQMAATIRVPSDKDPARRMAETRTFGTTKKEVLALADWCRSWQVPAVVMEATLVIWKGPFYRLEAEGSECVLADAKQVRNLPGRPKRDPADSRWLAACFERGAVTSCFAATPEFRIIRLHARYRRDLIEERTRDRQRTEKLLEGAAIKLSSVLSDLHGVTGRDILEHLIAGERNPRVLAQLARAAARRKISQLEEALEGAEFFTDAHAALLKTMLERIDRVTADIGGLSEVIEQLLAPYEEQLAQAESMPGWARRAAQDAIAETGVDMSRFATAGHLVSWGGRAPLDHQSGARKGRAKTKKGNRYLAGTLGETAIAASRTQTREGARYRRIARRRGKAKAQVAVGNTQLKVLHKLLSNPGMRYEDLGADYYERRADLRRQVAHHVGKLGAPGFEVTLCRIPDPGPDGPGQPQAA

SEQ ID NO: 497181 - protein, 378 aa, unidentified
MASLKVSVIILMAQKLTERRLAMNKRSKLNFSGQAIYLGLDVHQKSWSVSIFTKHGEYKTFSQPPEAEALIQYLQRHFPGARYHSVYEAGYCGFWIHDQLRERGIDNIVANPADIPTQDKERRNKRDRIDCRKLARGLRGGDIKGIYTPPRWRLEDRSLIRTRLSMGRKQARCKNQIKSMLLFYGVTIPEQREMGHWSRRFIQWIEEIRMERSSGDVALKLHVEELCHLRQIIAKLNRSIVALARTQEYRTWISLLKTIPGISTLTAMIVLTELHEITRFRSLDQLCSYVGLIPDTRCSGEKEHVGGITQRHHSSLRWLLIEASWIAVRKDPAMMEAFNEYCKRMQKTKAIIKIARKLLNRIRYVLKNQAEYVAGVIE

SEQ ID NO: 497182 - protein, 373 aa, unidentified
MTSIIRIGVDTSKSVFVLHGVDASEQPVLRKKLRRRQVLEFFAKSEPTEIGMEACGGAHYWARELRALGHEVFLLPPQYVKPYVKRNKNDSADAEAICEAMSRPTMRFVPVKTADQQAALMLVGTRDALVRRRTQLTNMIRGYAAEFGLTAAKGLAKIEPLLTRIAEDAKLPELAKQLFALHAQEYASLKRAIEKLEAELMAWHKHNEISRRLVEIPGIGPIGAILAAMKVPNPQAFSCGRDFSAWLGLTPKDHSTAGKTRLGVITCAGDEALRSVLVAGATAVIQHVRRGQGRPSPWLLALLRRKPPKLAAIALANKNARVAWKLMVSGERYNPARASTESEGRGAALRDGSAPRPSLTSPGRSRKTVAMNA

SEQ ID NO: 497183 - protein, 410 aa, unidentified
MTDTTIAQAEPVLVAIDIAKARHEVLIAVPGRKRRRRLTMSNQLEDFTRLIATLSDYNRPVRAAFEATGNYHRALAYQLGAAGFEVKLVSSVALARTREALNNSWDKNDPKDAQVILHMMQIGNEQFYHDPLLCGTNDLQELSKTHDIVSRSKTELWHRILTHYLPLYFPEADRFHRSSRSDWFFAFLERYPSPHFISAMDQEAFISDAWEVVGRKVSKERLLADIYQTAKTSVGLPITPDSDAARMFRLVLGEGRSLIAQRNEIESRAVELLKDNIDYQLLTSIPGIGPVNALTILAEAGDLRRFQHHRQFLKFCGMDLATIQSGTFRGQTKLSKYGNARLRRTLWMAGQVAINQRTNSFRDKFERYVSKDRHNTHLRRKAYTAIAAKMARTVLGIIKRGEPYRPFFEG

SEQ ID NO: 497184 - protein, 418 aa, unidentified
MTTKAKKVKRINEKTMIAALDIGKSFHYGYFRAPNGQDIKAFRFYNTKNSFNKFWTKICRFKRAHQLEQVVIGFESTGPYAEPLFHFLRKKDVKLVQVNPVHTKRVKELTGNSPNKTDKKDPRVIADVISLGHALTLVVPQGAAAHLRRLSHARQRSLKQRTAMINQLQDLVFITFPEFLSIMKDIKTKTATYLITRHPSADSIGAIGVEGLAAIMKKISRGRLGHERAQQLVAAAKNSVGICEGKESILWEIEHLNNKIEYENRFIDNLENQMADYLQQIAYSDSILSIKGIGPVTVAGLIGEVADFKKFNTISEVMKLAGLDLFEISSGSHRGQRRISKRGRPLMRKLLFFAAINAVKSKGIMHDKYQQMLARGMLKMKALVAIARKLLGLIFAVVRDNSKYVENYTGNYHYKLAA

SEQ ID NO: 497185 - protein, 440 aa, unidentified
MSKRAYRATRVNDVNWDQLAQGKEGLDITLGVDVGKYSLWAVCRWADGRFERPWRVQNPGEIPTLLTLLKGVSAGRRLVVAMESSGTYGDALRQALADNQIELQRVGGKAAHDYAEVFDGVPSQHDGKDAAVVAELAALGKAMPWEYQPADPWEQELAYWVEWMVAHRQMLTIWQGRLEGLLARHWPEATQVLKLSSATLLRVLKRYGTPQALAADGEAAKLLARWGGAFLAPEKIEQLLTGAGASVGVRLGEWQQRQIQNYAQQALAARQEANRAERRLRSLAEGHAVLQAQGKVVGVPTACVLWASTGDPRKYHAAGAYRKAMGLNLVERSSGTYQGKLRISKRGSSRTRQWLYFAVLRLVQKCGVRSWYEAKKAHDEADARRALVAVMRKLAVALYYVGVHNEEFQPRRLFGRIRRHRGSPGEQKSRTKRRSRAEQI

SEQ ID NO: 497186 - protein, 375 aa, unidentified
MSKIRFLGLDVHADTIAASVAEPDGEVRPLGIIPNRLESVRKMVAKLGPANQLRACYEAGPTGYVLYWQLTALGVRCEVVAPSLVPVKAGDKVKTDRRDAVKLARSYRSGDLTPVWVPDAAHEALRDLVRAREDAKQDQHRARHRLSKFLLRHGRRPPEDVKKSWTQKYLTWIKEQVHFDQPALEATLSDYVHEVDHMAERIERLEKAIDVAIEKAPAEMRAVIEALQALRGVAKITAVSIVAEVGSLSRFEKPRQLMGYSGLVSSEFSSGNRIQRGHITKTGNAHLRRVIMEAAWAYQHRPWVGGALLKRQQGLEPDIKEIAWKAQWRLHTRYKKLSARGKNKNQIVTAVGRELLGFIWAIAVRTEASAAARTA

SEQ ID NO: 497187 - protein, 443 aa, unidentified
MRLMYERVAGLDVHKKTVVACRMWVTPEKGLEWETKTFGTTTPELLNLHDWLSAGECTHVALESTADYWKPVYNLLEGDFEVFLVNAQHVKKVPGRKTDATDAEWLAELMLHGLLKASFIPAKPQRVLRELTRYRGTLVRERARVVNRVEKLLESANIKLSSVVSDVMGVSSRAILSELAGGQSEAALLAELAKGRLRTKKKELEAALTGLVGEHHRFILAQQLAHIDFLDEQIETMSAEIGQHLERMSQATRDDQSVAEEHPTGSESASRATLPPLSWVEAVTLLDTMPGVDERVAEVMLAEMGLNMGQFPTAKDLTSWAGLAPGNHESGGKRYSSHITKGNNTLRGMMTQAAWAASRTKGTFLNACYHRLAARRGKKRAIVALARTMLESAWYMLTRRQPYHELGGDYYDQRKKETKVAYLTKQLTKLGFAVTLDPLPIAA

SEQ ID NO: 497188 - protein, 405 aa, unidentified
MDLIPICRSAVGMDVHLNMIEVCAIVEDASGEAQVHRRRFGGFRRDRLEMAQWIAGFAPETVVMESTGIFWKSPYAYLERLGIRALVVNAQHVKTVPGRKTDVGDAEWLAMLARAGLLRGSFIPPEPLRNLRQLSRHHQRVTAMLAAEKNRLVRVLGDAGIRLTAVVSDPHGVAARAMIDCLLDGGTPQQALAHAGRLRAPREELAAALEGEPSEEHLFVARMIRRHIDALEADLAEIERALIARLEPYQAALDILLTLPGVDLLAAAKLLVEIGEDMSAFGSAEKLAKWAGICPGNRESAGKRKSGKTAKGNRYLRALLCEIAWSAARTASQFKSRYQALAIRRGAKRAIVAIAHKLLKIVYVLLARRVPYRDSTVDYEALAVKRKAPRWIRQLKKFGLLPQTA

SEQ ID NO: 497189 - protein, 409 aa, unidentified
MDITPIYKRVIGLDVHQAQITGCAITEHSDGSVTYERREFGGFKRDRKALAEWARAIAPDAVVMESTGIYWKSPYAALEAVGITAWIVNARHVKAVPGRKTDVADAQWLASLARAGLLRASFIAKADLRSLRHIARQRQKLGGVLASEKNRLHKLLTDAGIRLGVVVSDLHGQSARAMVKALIAGKSVTDVLSLASNRLRASREDIFEALQAEEITSAHRFVLAEIMAHIEELEARMVRFDAELLRSLHSAGYGVPLQLLQTLPGIDLMGAAMLLVEIGADMSVFGNAQRLASWVGMCPGNNESAGKRKSGRIRKGNAWVRRLLCEFAQAAGRSRCALKDKFQALNVRKGHKRSIVALGHKMLRTIYAMLSKNKPYVDKTVDYEALMVARNAPRWIQMLVKHGFVPTPA

SEQ ID NO: 497190 - protein, 413 aa, unidentified
MHVTCGIDWAEDHHDVAVVDRDARLLGKLRINDDAPGFQDLLRLLAEHGDNPDDPIPIAIETSRGLLVACLRASGRRVYAINPMAVARYRDRHVVSGKKSDHQDAVVLANILRTDAELHRPLPDDSDLARAIAVLARAQQDAVWDRTRAHNRLRSHLREYYPAILEAFADKRERLLAREARAILAIAPTPDQAARLTRSRLRAAVTRAGRQRRIEAETDRLLEVLHRTRLRQPALVEKAMGHQTRALLAQLETACRACDELAHETEELFLQHPDAEIITSFPGLAVLTGARILAEIGDDRTRFDTARDLKAYAGSAPVTRESGKSRRVSHRRIKNSRLAAAGRHWSFAALTASLGAHSHYNRRREAGDRYHAALRNLFNRLIGQLHHCLTTRQKFDEAIAFARPAPQSLATAA

SEQ ID NO: 497191 - protein, 386 aa, unidentified
MQKAITYVGLDVHKDSIVVSLAEAGLRGTPREVREYGKVLNTPAALKAMATKLAAGGNELRFCYEAGPCGYGVQRQLSAMGHHCAVVAPSLVPRKPGERIKTDRRDAAKLAKLHRASELTPVWVPDPAHEAMRDLVRARLAAVRNIREARQQLSGFLLRNGYHYHRHPWTLMHRRWMADLKFDQPLHYIVLQDCIAAVEASEQRRDRLEAGIIAALPEWSLAPLVETLQALRGIALVSATTLVAELGDIARFSNPRQLMAYLGLVPSEHSSGRSRRQGGITKAGNAAARRMLIEAAWSYRFPARISRYQLSQQKRLPKLIRDIAWKAQERLCRRHRKLMRAGKPKTVVCAAIARELTGFVWAIATETSPANGKKGTGKPATMGAVS

SEQ ID NO: 497192 - protein, 401 aa, unidentified
MSASRRVVIGADTHLDTNHLAVLTDTGKPLADAEFPTSPAGYDDAVRWAQSLGTICIAGVEGTSSYGAGLTRVLQAAGIEVAEVSRPDRAARGRRGKSDPLDAYAAARAALAGDRLAVPKDEHTTALRALLSARRSAVKAHTAATNQLHALLVTAPAELRERYRRHHITALVAALAQCRPATQGDPTSAAVLTAAKALAQRVKFLEQQRQDLTAQLDGLVGQINPALRAAYGVGPHTAAQLLVTAGTNPHRLRSEASFAALCGAAPVPASSGTITRHRLSRGGDRAANNALYRIALVRMSSHSQTRDYVERQVTKGRTKKEILRLLKRAIAREVFRLLTRPGPVDDYRDLRAARQAKNLTLAAVARHFGVPIITVSRLERGHHATTPWPTTTVNGSPPLDL

SEQ ID NO: 497193 - protein, 367 aa, unidentified
MSVLSAADRLHEATRHGTYSGSAPMTHPPQLVLGVDTHKDVHVAVLLDQLGRHLATASFGTTDAANRDLMAWTLRHGQVTTAGVEGTGSYGYRLAQHLADQGISVVEVNRPDRARRRRKGKNDPVDAEAAARAVLAGDAHAVPKDRNGAVGQLRALMVARRSAIKARTQATNQLRALLVDGDDELRRRLQPLRKAHLAHACTQLAPAVGLQLALASLGRRWLALNDEITSLDAAITSRVRRTAPRLLERHSVGVQTAAQLLITAGDNPGRLHSEAAFAAVCGASPVEASSGKTIRHRLNRGGDRAANSALWTIANNRLMHDPRSRAYAAKRTALGSSRKEILRCVKRALARELYPLILDTLALPRLP

SEQ ID NO: 497194 - protein, 326 aa, unidentified
MQGKEASEQETRNKSSVGIDVSKCWLDAYIAPSGGRLRVANNGVGIRRLKRWLSAFDIALVVVEATGKWHRPVQRSLAASAIAVAAVDPYRVRMFAKAQGVLAKTDRLDARVLAAFAAVMQPAVRAPAAPLMAELAELVTARANAVAMQTAVKNQLAAAQSKFLKRQLKQRIERAAKDVAALNGEILKRIEADQVLARRYAILTSIPSFGFAVAATLIACLAEIGSLNAKQAGMLAGLAPVADQSGEREGVRVIWGGRAAVRRILYLAAVSAVRANADMKAFYARLRASGKAPKQALIAGARKLVVLANTLLNENRFWQSSAPKHA

SEQ ID NO: 497195 - protein, 345 aa, unidentified
MNKSLDFDPCGIEVSARSLVVRRRRPGEADAVREFANTAAGHQALLRWLESAGRAVRVCLEATGLYGLDLALTLEAAGVALMVANPRAVRHFAQAMMRRSKTDHLDAEVLTEYAARLPFQPWRPPSPSTLKLLAVARRLEDLTEMHAAEKNRLHAASISAALPPILRRDVQRSLQTLERAVERLTRAAQEFIAADLSLAERYQLLLSIPGIGPTSALHVLAELMLLAPDLNVRQWVAYAGLDPRHYSSGSSVHKQARISKAGNKHLRRALYMPALVASQHDPHLGAFYQRLLERGKTKMQALVASMRKLLHAIFGMFKHDQLFDGAKVYATPPLQLPAPQEVACA

SEQ ID NO: 497196 - protein, 418 aa, unidentified
MSREKRKVCGIDVHKRFLVATILDREGTSETRRIQQNAESLLEFRRWILSENCDSAAFESTADYWRSLYLVLEGHVPVTVANAYHIKHVPGRKTDITDSRWIAQLELNSLIGPSRIFSGDLYDLRSLTRSRELLVQNRTELKNKIHHLLDSASIHLSSVLSDLFGKSGTIILNGLVQNKPFEEIIKSLPKKMRGSADAIAATVPASIPQVTLVLLQSYLKLVDDLDNEIKLLEGRIRESLAGKSREIQILTSIPGIGLIGASTLIAEIGNIHDFEDADKLTKWAGLTPSVYQSANVTRTGSITKQGSRHIRWILVELAHVAIRSPGRLKSFFERLMPKKGYKKAIVAVARKMLRIVWHLLVHDEVFADEVPRSKQVKFPKMPKKIQAFGITRIIDLLSKASEVIIRDQDREIFRIGPD

SEQ ID NO: 497197 - protein, 426 aa, unidentified
MDVKYPICCGVDVHKSFLVAVIVKDAQPKPQYIKKRFSTFNNDLLEFKKWLIGNDCLFMCMESTGKYWVPVFNVLEDEINVTVANPKWVKAIKGEKDDNKDAKWIADLFRLGLVRGSYIPSKEIRVLREFTRYKYKLTCLRSGEMNRYHNCLTVGNLAVDHVFSDIFGKSSQAIIDYILNTDFADFNDDDCLSLLNKRGKRKSTNEEILNAVKNSSFTDAQKTRISIVKEHLDYITNSISRLESEIDSLVAPYEMYIDLLSTIPGMDRNSAIITLSEISCDMSHFDSARRLCSWAGLVPANNQSAGKKKSVKISRAGVYLKPCLVQVAHAAVKDTTNPYYANKFNRISKRRGKKRAIIAIARMILTAIHHMISTGEYWKPSDLESAEMPAEVKIKLAKSDLQRSLKTLLSNGYTIEDITNGFLSIT

SEQ ID NO: 497198 - protein, 415 aa, unidentified
MEPMHQRVAGIDVHRMKHVVTILIGREDGAVSSETREFGGFKRDMRALVAWLQTHRIQQVVMESTGIYWKSVFGHLEAAGIPALVVNAFHVKNVPGRKTDVGDSEWLAQLARFGLLRGSFIPPKDLRELRIVSRYRRKLTGMLAGEKNRLHKLLDDAGIKLGGVVADIDGVCASKMVEGLIAGGKPGELAALGRGKVRATTDILEAAMDGELSARHRLVLDMAYDHLRYLEGKLAALDRYLLAAMQPYAWAWRLLQTIPGIDAVSAAMILIEIGDDPHRFGSPARLASWSALCPGNNESAGKRKSGKTRHGNPIVRYLLCEAANAARRTKTVFRAKYESLVIRRGHKKTIIALAHKLVRTIYFVLVRRKPFRDSTVDYEAASVAKNAPRWIRALKKYGYWPQVAAPNPLTAATAS

SEQ ID NO: 497199 - protein, 388 aa, unidentified
MIYVGIDIAKLNHFASAISSDGEELIKPFKFTNDNDGFQLLISKLDPLDKDSLIIGLESTAHYGDNLVRYLVAKNYKVCVLNPIKTSTMRKNNIRKTKTDKVDTYIICKTLMMQESLRFVTFYDLDLMDLKALGRFRQKTIKQRTRLKIQLTSYVDEIFPELQYFFKSGLHQKSVYALLKEAPTPEAVASMHMTHLAHLLKVNSHGRFDKEMAQQLRVLAQKSVGASDSSLSIQVTHTIQQIELLDSQLERVEAEMTGIMKFNDSVIMTIPGIGYINGGMILGEIGDIHRFSSPNKLLAYAGLDPSVYQSGNFQAKKTRMSKRGSKVLRYALVNAAHNVVKNNATFKAYYEAKMAEGRTHYNALGHCAGKLVRIIWKMMTDNVEFNLD

SEQ ID NO: 497200 - protein, 393 aa, unidentified
MVCVGIDVAKDKHDCFILSSEGEVLADVFTISNNAEGFDTLLQTIHRCARPEDKIKVGLEATGHYSYNILGFLLDKGLHTFVINPLHTNLYRKSLSLRKTKTDRVDARTIAAMLMSDVDLKSYTDTAYHNEELKSLTRYRFDKVKERAKLKQSVSRLVTILFPELEKLVPTLHMASVYALLSEFPGAKQIARAHLTHLKALLNDASKGRYGRDMATELRDAARCSVGSVMPAKSLELQHTIRLIRELNTEIEDIESAIQTIMEEMQSPITTIPGIGFRMGAMILAEIGDFSRFDSPDKILAYAGMSPSTYQSGQLSLSGTYSHMEKRGSKYLRYALYNATKYVCLWDSTFEAYLAKKRAEGKHYNVALSHAAKKLVRLIYAMEKSRQPYNSVA

SEQ ID NO: 497201 - protein, 338 aa, unidentified
MTVTTIGLDIAKQVFQVHGVDKQGKVVLRRRLRREQVAPFFANLSPCLVGLEACGGAHYWVRRLSAFGHTVRLMAPQFVKPYVKSNKNDRNDAEAICEAVSRPQMRFVPGKSVEQQDIQALHRVRSRLVSLRTQLANQVRGLLMEYGIVLPLHVGQVRRGLPEILEDGNNELAAFSRRLFASLYAELVELDGKIETIEEQVKAVYQASEPCQRVAAVEGIGPVTATALVAAMSDGKTFRNGRQFAAWLGLVPRQHSSGSKLRLFGISKRGDPYLRTLLIHGARSVVYRAGRKTDSRSRWIADKQRRLGTTKACVALANKNARIVWSLIAHQEDYRRAV

SEQ ID NO: 497202 - protein, 343 aa, unidentified
MQTITTIGLDIAKSVFQVHGVDAGGQVIIRRQLKRRYVLSFFQKLTPCLVGIEACASAHHWSRELQALGHTVRLMPPAYVKPYVKRQKNDATDAEAICEAVTRANMRFVPTKTPEQQSGLVLHRTRHLFIRQQTAVINAIRAHLAEFGIVAPVGRHGVEELLNVVADPNDKRVPEIARACLSALGAQLRRIKEQILEFDRLIRAWHRSNEMSMRLDEAPGVGPVLATALVAAVADPKSFRSGRNFSAWIGIVPKQHSSGGKNRLGNISKQGDRYLRGLFVAGALAVIRYAKIHGTKHRPWLTALLARRPTKVAAIALANKIARMVWAMMAKGERYKEPVALAR

SEQ ID NO: 497203 - protein, 367 aa, unidentified
MKKNNTSQQSRKGAKGGITIGMDLGDKTSRYCVLDGKGEVVEEGSVATTKKELAQVLGAMGRWRIAMEVGTHSPWVSRLLKSLGHEVIVANARQVKLISASSRKDDRLDAQTLARLARVDPELLRPIRHRREKAQQHLMKIRVRARLVDARTSLVNAARGMTKAVGERLPACDAGSMGTAQMVDLPTGLQETLKPLLEQVESLTQKIKECEKEIEQIAGTEYAETYVRRQVSGVGNLIALTFVLTVEDRERFQKSRDVGCYVGLRPRRSDSGQSQPQLRITKEGDNYLRKMLVQGAHYILGWRGPDTDLRRWGLKLAERGGKNAKKRAIVAVARKLAVLLHALWVSGEVYEPLRNSHARQRLKQRTA

SEQ ID NO: 497204 - protein, 316 aa, unidentified
MSKLVSQITLGIDVCKDELVICDWDTEAISTLENQAGTIKAWLQSLYGPIRIAIEPTSHYHLEVVEQAHALGIEVYLINPRQLVHYRVAVNVRNKTDPQDAWLLARYLAHEGGSLRPFKPQCAKAQRLWALLKRRATVVRARTQLDQSFRESKLSIKALSREIRHLLKRIDKHIQALVRALGWWADYQRCLSIPGIGPLNAAALVTAFHRGAFAGSDAFVAFIGIDVRLRESGKYKGKRKLTKCGESEIRRLLFCAAQPARSYRLFDNYYQKQLEKGLSNIAAKVVLARKLARIAFTLLTNQQSFKKQDIAYSQVP

SEQ ID NO: 497205 - protein, 447 aa, unidentified
MEKFVAVRKRELTVMFPNAAGIDVGSAAHYVAVAPDRCEEPVREFGSFTEDLMALADWLASCGVDTVVLESTGVYWIALYELLEARGFVVYLVHAKHVKSVPGKKSDVLDCQWLQQLMSFGLLTRAFRPDEKVCALRAVVRQRETLIESQAREIQRMQKSLAQMNVQLANVITDIMGQSGQAIIRAIVAGERDPYRLAALRNYRIRASEETIAKSLRGNWREEHLFCLAQALKLFDTYQALIDEADAQIEGMLSRMQRHEGELLPDKNKGRNKNAPGFDARSALYAWAGVDLTRIGGIDVSSALKILAEIGTDFSKFKSVKHFASWLGLCPGTRITGGKRISGVTKRIANRVARALKLAAQGLHRSQCALGAYYRRMAARLGAGKAITATAHKLARLVYAILTKGEEFVQRSQDHYEEQVRTRTVRYLQKKAASLGFNLQPVSTVCP

SEQ ID NO: 497206 - protein, 343 aa, unidentified
MDHFAGLDVSVKDTSICIVDDTGRITREVKVASEPGALLAVLMNASHRFKRIGLEAGPLSQWLFRALAEAGLPAICVETRHMRAVLKAQINKTDRNDARGIAQMMRVGLYRPVHVKTLRSQKLRMLLTHRKLLQSKAIAVENDLRATLRNFGLKVGMVGTARFEARIRELVENVADLVVLVEPLLVVRRVVREQIGILHRRLLAIVRDDEVCRRLMTVPGVGPVVALTYRATVDVPARFRKSKSVGAVFGLTCSRDQSGERDRPGAISRCGDEMMRAMLYEAAQAMLLRSAKWSWLKAWAMQIVRRRGMKRAIVALARRLAVIMHRIWVDGTEFRWTRETALA

SEQ ID NO: 497207 - protein, 289 aa, unidentified
MLIIGCDYHPSIQQIAWVDTETGECGERRLTHSGGEAEQFYRELKKKGISVRVGMEATGHSRWFERLLAELNYELWMGDPAQIRAKRVRKQKNDRRDAEHLLKLMLENNFPRIWVPTPENRDVRQLVLHRHRLVGMRTRVMNQLQAIAMNEGVRRKRGLWTGKGRAQLEALRLPPWTTRRRQELLELLDRFDPSIDQLSQAIEEEAARVPEVQRLQTHPGVGPITALAFVLVLGTPARFGCGKQVASYLGLIPCEDSSADSWRLGHISKQGNALLRFLLGQVGAKRGSF

SEQ ID NO: 497208 - protein, 399 aa, unidentified
MFYCGIDIAKYKHEASVIDMSGKALSNSITFANDRQGCEKVLAIFEKSKITPDNIVIGMEATGHYWLSVYTFFLELGYTVKVINPIQSEAFRKMYIRQTKNDSKDSYIIAQIMRFGEYSATSLSEENIIALRQLSRYRLALVDACGDCKRRVIALLDQVFPEYDKLFSDTFGKTSSELLLNCPTPEDMLAVSTRKLTNILNKASRGRFGKEKAEELKEAAKNTFGIAFAKDAFSFQIKQLMQQIIFTENQLSELEEQIANLLHETNQYITTITGIGDVLGAIIVSEIGDINRFERPNQLVTFAGLDVTVKQSGEFSGTKNKISKRGSPYLRRAIWLAAQRAAFCDPVLSDYYQSLKARGKHHLTAVGAVVRKLCNIIFVILKENRPYFPTPPKKSQNLS

SEQ ID NO: 497209 - protein, 345 aa, unidentified
MQTITTVGLDIAKSVFQVHVVDAQGKVIVRRQLKRRYVLAFFQKLPPCLIGIEACASSHYWSRELQALGHTVRLMPPAYVKPYLKRQKNDPADAEAICEAVTRANMRFVPTKTTEQQSCLMLHRTRHLFIRQQTAVINAIRAHFAEFGIVAPVGRTGVEELLKIASDGNDKRLPDVARVCIAALGAQLQMLKARILEFDRRIMAWHRSNQVSKRLDELPGVGPALATALVASVADPKVFRSGRDFSAWIGLVPKQHSSGGRERLGGISKQGDRYLRSLFVAGALAVIRYAKKRGSKHRPWLAALLARKPTKVAAIALANKIARMAWAMMAKGERYKQPVALAAAW

SEQ ID NO: 497210 - protein, 457 aa, unidentified
MPARGKQPRSGAGSPAHTIDPNAAGVDIGATEIYIAVPTDRDPHPVRKFSTFTEDLLAAADWLKQCGIKTVAMESTGVYWIPLFQILEAGGMKVCLVNARHVKNVPGRKSDVCDCQWLQHLHSAGLLRASFRPEQQICAVRSLVRYRDSLVQLSAMHLQHMQKALDQMNLQLHHVISDLGGKTGMAIVEAIVAGERDPHQLATLRDPRTRASKETIAKSLVGDYRREHLFTLRQSLTGFRQNGQLIADCDVEIESLLKEFSSGDGPGAEAVPEPQAELKRKPRRNEMNFDLRTQLHRIFAVDLTEIPGIDTLTAHTLFTEVGRDLSKFANVAAFTSWMGLCPDNRVSGGKILHAQTRRVNNRVAKALRMAAQALSRSHGWMGQYYRRMRAKLGGPKAITATAHKLARIIYHLLTTGQAYDETVFAQQETQNNQRNEKRLRHQARKLGFELTLIPTEV

SEQ ID NO: 497211 - protein, 318 aa, unidentified
MTSVSVEVGIDVAKDWLDVSVSGGKVFRVPNTADGIRGLIAGLSKGSVVHLEASGGYERVPRRLLQGAGLEVRTHDPLRVRRRAQSDSHRGKTDALDARHLSNTGASLKATAPKSPTREALCDLSRSIQTLKRFVSQTKVRAGVPGLEPYVKQALRDTAALVEVRIRKMEKEFAQRVKKTALRTRYELAMSVPGVGPILSRVVTSELPDDLSPFSISQLTSYASVAPIDDSSGKQTKPARIQRGNLHLKAALYMPALGCIQRQKWARELYARLMARGRKHEQAIVAVMRRLLIRILEVLKRGTPWVVKPDEEASVATP

SEQ ID NO: 497212 - protein, 348 aa, unidentified
MLADQLDYVVGVDPHRDSHALAVVQVVSGAVLFEAAVSASSDGYANALKLVDQHAKGRRAFAVEGTGSFGAGLTSFLTGNGERVLEVGRLRRERRSGGKTDALDAIRAARSVLTQNRPATPRASGEREALRALMAAREGAVNAKRAGLCQLRDLLVTTPEPLRSELRPLTRARLLQRLAATRPERRHDPELRGALLALRSVARRVLQLTAEERELAREIETLTRKLAPQLLEQPGVGPLAAAQLLLSWSHRGRISSEAAFARLAGCAPIPASSGQTVRYRLDRSGDRRLNRALHMILVTRRRTHAPTIAYISRRTQEGKTKREATRCLKRYLARNLYRLLEQGAPPAT

SEQ ID NO: 497213 - protein, 355 aa, unidentified
MNQDKYIGMDVHQATISVAVMDSSGKLIMECILETKAATILEFIAGLRGTLSVTFEEGTSAAWLHDLLKPHVSHLVVCDPRRNALLKDGSKSDRIDARKLAELLHANKLHAVYHGEHGVRTLKELGRSYLTITKDLTRVMSRIKALYRSWAISCSGATVYAPRHRAEWLAKIPHPGVRLRAERLYQQLDVLQPVRQEARRELLVESQKHHAVKLLRQIPSIGPIRGALLVALLQTPHRFRTKRQLWAYSGFAVEIHDSGEYRFVRGKLQRNRERITVRGLNHNHNHDLKNLFKGAAQSASTRPGPLCDFYVALVEKGMRPTMARLTLARKMAAITLITWKKGVNFDAKQLNRQAA

SEQ ID NO: 497214 - protein, 368 aa, unidentified
MGQKSSKLYVGMDVHKESIDIAVAEEGGEVRHHGQIAGDMNALWRAVRKLESSGRELVFVYEAGPCGFGIYRGLTGRGHTCWVVAPSNTPRRVRDRIKTDRRDSLKLAGLARAGELTPIYVPDVRDEAMRDLVRTREDAVMMQRQARQRLAALLLRNDVRYAGKTAWTAAHRRWIADLKLPQSAQRLAFEEYVQAVEEASARVQRLSQCIEQELAHWHWLPVVGALQACRGIQLIHAVRLVAELGDLSRFSHPRQLMGYLGLIPGEDSSGEHRHQGAITKAGNSSARRALVEAAWAYQYSAKVSALIARRQAEVPKAALDIAWKAQVRLCARFRRLAARGVNRNKIVVAIARELAGFVWAIAQHVKPV

SEQ ID NO: 497215 - protein, 388 aa, unidentified
MTQTPVPQPTYSPADFDRTLILALEVSDKSWVVAAHVPGLPGSKPRRTLLPTTGALLETVESYRARAARAGKSVDRVVLVYEAGYSGFWLARWLARHGVETFVIQPSSVPVDRRARRAKSDGIDAELLLRTLLAWLRGEPRVCSMVPIPTEADEDARRCVRERQELMAERVAIANGIASILATLGVRGYDALRRDRRQRLEGLRTALGDPLPPQARARIGRMLDRLELVLTQIAALERQRDAVLEEAAPGEAEGMIQQLVRLRGIGVQSATLLVREAFVRPFANGKALGAYAGLSPTPYSSGGTEREQGIGRAGNARLRTALVELAWIWQRHQPDSAVVGWFRDRLGGAARRLRKVMVVALARRLLIALWRFATQGVLPEGAALTPAA

SEQ ID NO: 497216 - protein, 353 aa, unidentified
MNNEKFIGMDVHQASISITVSDAAGKVLMECIIETKAATVLEFIQGLRGSLWVTFEEGTSAAWLYDLLKPRVTKVVVCDPRKNALLKAGNKNDRVDARKLSDLLRAGLLTPVYHGESGVRTLRELSRSYLAASKDLTRVMNRLKAIYRSWAIPCAGQQVYSPRHRAAWLEKLREAGVRRRAEQTYQQLDFLMDIRKETRKELLAESRKHPARKLLEQIPRLGPIRVALLIALIQTPHRFRTKRQLWNYCGLGLRTRSSGEYRYTGGQLQHARKPPALRGLNVNHNHDLKHLFKSAATQAGNDPLGAFYQNLLAGGMEPAMARLTLARKIAAIALKIWKKGERFDPAKLKQQAA

SEQ ID NO: 497217 - protein, 432 aa, unidentified
MDKIYDICCGIDVHKKLIVACLNHKRKKELREFGATTRELMELAEWLQKNECEIVAMESTGSYWKPLYNIMESYGLHAIVVNPAHMKAVPERKTDVKDAEWIAELLQHGLLQPSYIPSKDQRELRELVQYRKSLVGERTRELNRLQKMLEGANIKLSGTVTNINGKSARKILEYILSGNEIDEKKYDEMYEEKLIAHNLKASKEQILDDLKGFMSPLQRRMLKELLQHLDELNVHIENLNDEIDNFMKPEEKQASQVIQDVTGIGNTSAQTIIAVIGTDMERFPSDRHISSWAGLCPGDNVSAKKRKSGKIRKGNALLKSTLVLCAHAAVRHKSSYFHAQFKRISTHRGKKRAYVAVAHSILIAIYHILKDGVKYQDLGAEYYNQFNAERKIHAYLKKLKALGWEPPKEAVPAGSGQSCLQEQGAVQTRRAY

SEQ ID NO: 497218 - protein, 341 aa, unidentified
MEEYIGLDVSMKETAVAIRRAGERIWRGKCASDPSIIAELIRKRAPSVKRVVFETGPLSVWFYHSLRTEGLPAICIDARHAKAALDMATNKTDANDADGLAQLAEVGFFREVRVKGFDSMLTRTLVAARTRLVRITTELSNQIRGVMKTFGLLVPAGKGGTFEKNVRSLLADQDRLASIVLPMLEAWRGIRVRAAELGRQLVRDARQSRACRILMSIPGIGAITATSFTTAIEEPDNFRKSRSVGAWIGLTTRRYQSGEVDYDGHISRRGDRPLRGLLYEAAAVILTRSSTHSTLRSWGLQLRERIGFKRAAVAVARKLAVIMHAMLKTGELFNPNAGAAA

SEQ ID NO: 497219 - protein, 348 aa, unidentified
MSLALQSLLPYPNSCEGASPHQQGRDTKMLSFCGIDVSKDRLDVMVLPDEYSSSVPNDPAGWAILVEQLRGFSIAAIGIEASGGYERGAVRSLQAAGMPVRQVNPFKLRQFAKASGVLAKNDPLDARMIASFVGIMPTRPAQPTTPAAEQLVEMLAVRRQLSAEKTAAENASRLLEDLMLQRLSRRRIARLAADIELLDKRLVEIVATDATLAHRYRLLTSMPGVGPVLACTLIALLPELGGMSRKQVAALVGVAPYAFESGTLKGRRCIWGGRANVRQVLYMAAMSASNWNPALKLFHDRLKRAGKLPKVVIVAVMRKMITTLNAMVRDDIAWADRLSGRHSVTTAR

SEQ ID NO: 497220 - protein, 358 aa, unidentified
MNVSHYIGFDVHKKTVSYCIKTADGQIVEEGRLPALRAKLTEWAAARKHAWQGAMEATLFSAWIYDTLKPYAEQLQMGHPARMKAITAGKKKCDHLDARTIADLLRCNLLPACYVLSPEMRDLRRLLRYRNLAVQQSVRMQNKIAGLLMETGTSFVKEKLHGKKYFASLIQTLEEVPESVKDLLRMSRGAMEMFQNTQKRLIQRLLADPKLGPRVERLASIPGVGPITALTWALEIADPHRFSSNSDAMSYCGLTSALHSSAGKEQRGPISKQRNSWLQTALIEAAKLAPRWNPQLAAVHARELERGHRNRATLQVARKLVAYLMAVDKSAQPFQLRPPTAAQDQLAHQETATAQLSA

SEQ ID NO: 497221 - protein, 335 aa, unidentified
MIYKKVIGVDVSKLTLDIALQLSPSKFIMRKCGNTKKHISTCFKTLFKEYDLSKEDVLIVAENTGLYTNPLIWSLVEEGYNLWIECPNQFHLSKGFTKGKNDQIDAQRLADYGYRNSDKAKLCELSSTSLSTLKYLNSERDLIVSEQQKFKAQITDHKDYVEESEYKDRVKRYNKILKALKENLDAIDKRIDQIVKNDKVLKHQLNLLKTIPGVGPKIALDVIIATLGFKKFDNARQFASYVGVAPFRYVSGTSIRSKNKVSKRSKLSLKSNIHMGVVSAIQIEGEFQTYYQRKISEGKNKMTAINNLRAKMIKRMFAVIKNNKAYQSNYIACWT

SEQ ID NO: 497222 - protein, 409 aa, unidentified
MQVMYEVCCGLDVHKKGVTACVLWASGRRRQIRDFGTFTRELLELTDWLRACGVTHVAMESTGVYWKPVWNLLQGQCEVLLVNAQHIKAVPGRKTDQKDSEWIAELLQHGLLRPSFVPPTPIRELRDLTRYRASLAQECNRIANRVQKVLEDANIKLSSVATDALGASGRAMLEAIVGGEESSKRLAEMAQGRLRNKIPELEGALEGRVTTHHRFLLRELLDHLYFVESKMRRIEQEIEVRLGPFPSEVARLCTIPGVDRVTAWGVLAEVGLNMSQFPDAQNLASWAGLCPGSHESAGKRKSGKTRKGSLWLRRCLCQAAWAVSTKKNNYLSALYRRLAARRGNKRATIAVAHNLLVIAYYILRDGTCYQDLGADYFDRLNPEGLRRRLTKRLEGLGFKVTLEPLPQVA

SEQ ID NO: 497223 - protein, 418 aa, unidentified
MDLDEVVYRVACGLDVHFTFLTACLLTTGPMGKPKVEEHRFPTNQKGLNSLREWLTENGCEAVGMEATGVYWMPVYAALEGACTLVVGNPQHMKNARGHKTDRMDARWIAGQVRHGRIRSSFVPPPEFREARRLARCRRQLVEARTSIRNEIQRLLAEVGITLAGVVSDVFGTSGTSILNALSEGKCVRDELSIHLYSSLRKKDKMASIAAALEAPLPEVSRQLLAIHLRRIEALDGNIDEVETLLFRQLAPHAGKLDLLQRIPGISKLSAHIILAEIGVDMTVWPTAKKFSAWAGVAPGCNQTGGRSKRAAVRKGNPYLCTMLMECAGGAVQKLDSHLRAKHRKLCAQLGSKKKARMAIAHKLALIIYKVLGENVEYKDPEPKQPSEKAKRRILQTRVKDLERLGYRVVLEPIEAVS

SEQ ID NO: 497224 - protein, 442 aa, unidentified
MSDAVQAVAPEPEFAALVGLDWGDEKHSWKLREAGSQQSQEGELPNTPEALQIWAAELAVRYQGRPIAVCLEQSRGAVVYQLSQYAHLVIYPVHPTMAARFREACYPSGAKSDPADGAVLLDLLCHHRDRLRRLDPDTPETRLLQVLVEQRRGWVDERTRYSNRLTGWLKIYFPQVLDWIDDIDSPMGCDLLERWPTLEELQRAHPGTLHKFFVEHNSRSEQRIQERIQAIYGATTAIRDSAMMEAGPTIVKEMIALIRALSANIAELEKRIAELTEMHPEKPLFAGLPGVGPALLPRLIVAFGTKRERYPSADQLEAYSGIAPVTEQSGQSCWVHFRWACPKFLRQTFHEFAAHSIAKSVWARAYYDTQIAKGKGHHAAVRALAFKWIRVLHACWRSGKPYDEEIYLRALQRHNSLLAQALTTQVEWKTVGGFQKLSLKNS

SEQ ID NO: 497225 - protein, 349 aa, unidentified
MSMLAEVVDVVIGVDTHKHTHTAAVIDANTGAVLDTITIDTDSDGYAELVAMADRHSMLRAWSIEGTGGYGAGLTRHLHERDELVIELDRPNRPARRNGAKSDPLDAVRAGREALAREHLAQPRSGGERAALAVRLAARRSAIDASTVAQRQLLALIVAAPEPIRARLRGLSTVVAVSTATKLRITPSWDLETRTYAEVLRCLARRVQALHAEAAAHEKAILAIVTAWRPDLLDQLGVGPIVAATVLAAWSHPGRCRNEAAFASLAGVAPIPASSGLTTRHRLNRCGDRQLNRAIHVIVLSRLRYDPETRAYVERRRAEGKTAPEIRRCLKRYIARQLYRQLENPPSTT

SEQ ID NO: 497226 - protein, 424 aa, unidentified
MGGHVVHLLEVDFMEVLYERCCGIDVHKRIVVACLKCGKQQEIREFGTTTDELRTLTKWLQDSDCQMIAMESTGSYWKPLYNIFELSALDAMVVNARDMKNVPGRKTDVKDAEWIADLLQHGLLRASYIPTREQRELRELSRYRKSLIEERARELNRLQKMLEGGNIKLASVVSDINGRSARNLLTHMLKHDNPLTKEEIAGMIHGSLRHKMDAIMKALDGFLTPLQKQLMLKVVDHIDDMTKRIGEMDNLMNQYLTEYHEAINKLDEMPGVGRQSAETILAEIGLNMSRFPTERHFASWAGLAPGNNESAKKRRHGRTTKGNITLKTTLIQCAKAAVKKADSFLAAQYQRLVVRRGANRATVAVAHTMLIAIYHMLKDNVPFIDLGAAYYNKFNTQSKIDHYLKKLKQLGWEPNDATTLVAAV

SEQ ID NO: 497227 - protein, 373 aa, unidentified
MWKFNLIGKGKCVDKTTRVVVQPEGRQIVRVGVDLAKRVIQVHAVDAQGRVVTSRALARDKFVAWCAQLPAGCLVVMEVSSSAHHWSRKLCELGLDARIVAAQLASPYRAEGATGKNDANDAAAICEAASRPHMRFVPVKSIEQQSMLSVHRLREGIKEDRNACVNRIRGLLLEFGVAIPVGTRALKAQLDDVLEDATNEMNGLARMALRRAQMQWQQLDEHLAWCDERVADHGRNNADVKRAGELMGIGPVGASAAIATVGDFKQFKSGSQFGAWIGLTPKQRSSGGKSNLGTITKRGDPYLRTLLVQGAKSVVNTAHTRSDPISKWVLALKLRAGWQKAVVALANKNARILWAIMTKEQRFDRQHLGVKPA

SEQ ID NO: 497228 - protein, 324 aa, unidentified
MIRRFQMYYIAFDVSKKVLCGFDGEKELAFDNKKGLKALKSYLKKKYKDLNDLVIVFEATGVYSNYLKAFCADNNLKVYIINPKRSSNFSKAIGNRSKTDKIDTKQTIYEYRKIIGPKDIKVPKIDQVAQTLSAYLTSYKFTVKKRVSISNHLEALERNTSSLELVALLKGELKQTKKTEEKIKAKIEEYIKKDSQLNEDYKRQMTIPGVGKVSAICLLTLFNQYKDTNQAQITALVGLDPTKRESGTSVKGKMKISKNGDRMIRGTLYFPLLSAIRFNKKIKALYDRLLANHKPKQVALIAAMRKLILISHAIYKNKTVYSAV

SEQ ID NO: 497229 - protein, 355 aa, unidentified
MDDRKYIGLDVHQATISVAVLDASGKLVMECVIATQAATILEFLGGLRGSLCVTLEEGTWAAWLYDLLRPRVAQVVVCNPRKNALLKEGNKSDRVDARKLAELLRAGLLSPVYHGENGVRRLRELARSYLALSKDLTRVMNRLKALYRSWAIPCRGQTVYAPRQRAAWLAKLPESGLRRRTETLYQQLDLVRTLRQQARQELVAESRKHGAVKWLRQVPYIGPLRAALLIALLQTPQRFRTKRQLWAYCGLALRTRSSADYRLTAGQLQRLPKPPALRGLNENHNHELKNLFKAMATVAVGGRGPFHDFYAALIATGKKPSMARLTLARKIAAITLSVWKKGARFDPGQLNRQAA

SEQ ID NO: 497230 - protein, 365 aa, unidentified
MAKCIKSVSKDRGAKHASVGLDVSDHKSCWVALDGEGGIADRGKVATRAPELESWAMSFAPTVIAMEAGPHSPWMSRLLTRCGHEVIVGNPAKMPSISRSRSKSDWRDAEQLARLARFDRSMLHEIRHRSEETQKNLQSIRSRDAAVGARSKLISHVRSTVKAHGQLVSRCSTDVFVKRARTVIHQELREIVEPILEAIDKLSGTIRVYDQRIERFVATRYPETKWLMQIKGVGALTALAFILVLEDASRFRSSRMVGPYLGLTPGRDQSGQSDPQKGISKEGDRLMRRLLVQSGHYILGPFGIDSDLRRHGEAIASRGGKNAKKRAAVAVARKLAVLLHHLWVSHDTYVPLFNSSNDAVHQTAA

SEQ ID NO: 497231 - protein, 429 aa, unidentified
MNLRPIAGIDVGKFFSEMAILSPSNEVIARMKIHHDSTSDVEKAIELLKKTEKDFASRPFIVMESTGHYHKILFHSLCKAGFEVSIINPIQTDSIKNIGIRKVKNDKVDARKIALLYRFQELKTTNIPDEDIECLRSLCRQYYKLNDELTAYKNRLTAIVDQIMLNFKDVFPNIFSKAALAVLEKYPTPAHILKADRNKLISLIRNNSRRSLKWATAKYELLVSKAREFAPLSINNSSNITMLGVYISMIKTLEENIEKILKAIRSLIAEDMAKDTPVLALILELLQSIPGIGLLSAATILAEIGDFSAFSKPSKLVAYFGIDPSVMQSGEFTGTRNRMSKRGSKLLRRVLFTIALANIRTKRDKTACNPVLFEFYKQKCQNKPKKVALGAVMRKIVCIIFAVLRDRKPYELRSPQEHAQRLAAKHGMA

SEQ ID NO: 497232 - protein, 405 aa, unidentified
MNAVGIDASKGKSMVTILRPFGEIVSSPHEVRHTSDQIDDLIHEIRSLEGDTRIVMEYTGRYHEPMARWLSDAGLFVSLVNPKLIKDFDNDSLRKVKTDKADSVKIARYTLDKWNKLKQYGFMDELRNQLKTMNRQFGYYTKLKTAMKNNLISLLDQTFPGANTFFDSPARDDGSQKWVDFVDTYWHVDRIRSMSLSAFTDHYQKWCSRKGYNFQPNKPAEIYEAIRNIIPVLPKDAMTKFIIRQAVNQVNTASAAVEELRTRMNDIASRLPEYPVVLAMKGVGTSLGPQLIAEIGDVTRFNHKGALTAFAGVDPGKNESGSYAQKSVRTSKRGSAPLRKTLFQVMDCLIKTAPQGDPVYEFMNKKRSQGKPYYVYMTAGANKFLRVYYGRVKEYLAEHPETAEN

SEQ ID NO: 497233 - protein, 319 aa, unidentified
MAQNGCVVVGIDVAKDKVDGCIRWLSQRQTFPSSAEGRRKLIAWLRKHKVDKAVMEASGGYEREWAKALREARFEVRIVDPKRVRNFARSAGRLAKNDVIDAEMIAWFAETFDDAPSQPHDAAREELATLVKARKHLIDVRTRLQSQNEHAVPGAVLKAHARVLKGLDTEITKLEDAIVAAVKATPAFAERAEIIESVPGLAETSSAIIIAGLPELGTVREEIASALLGAAPYDDDSGKRRGERHIKGGRRWVRNALYMPCVGAATQSNPVLKAFYDRLIAKGKEPNVAIIACMRKLIVILNTMIARGEKWDPSRYALR

SEQ ID NO: 497234 - protein, 341 aa, unidentified
MSEASTIGLDLAKRVFQAHGADASGRVVFRKRLRRDQVLTFFAGLPACVVAMEACSSAHYWARAIGELGHTVRLIPPAYVKPFVKRQKNDTTDAEAICEAAQRPTMRFVSVKSEAAQANAVVFRARDLLVRQRTQTINALRGHLGEYGLVVAKGPSHVAQLIVHVEDPVADLPEAARTVLRVLTASLQFLAERVALLDREIARRAREDKEVRRLTTIPGVGPVIATALAALAPPAGAFRRGRDFAAWVGLTPSQRSSGGKQKLGATSKMGERTLRRLLIIGASSVVRKAIKYGTPSGSWLARMLARKPRMLVIVALANKTARIVWALRATGEIYRAPVVVS

SEQ ID NO: 497235 - protein, 357 aa, unidentified
MKIVAGKSKKSVVGKDVYVGIDVHKESWQVTVRTGGEEIFNGRIPGQYQSLKKLFERYQGCRMKVAYEAGPFGFWLSDKLVADGIEALVVPPSLIPTESGNRVKTDKRDSRKLARLLESNMLKRVYVLTPEEREHRDLLRTRRQLVDHRNDVARQIKSKLLFYGITSPFTASTRWSLKYIEWLKVLRCDTEYLRESFNLLIDLYEYLTRQIVRINKKVALLCRDKKYRDRITLLCTAPGIGRLTAIEILVELQDITRFESAEELAAYIGLTPSEYSTGERTRQGRITRCGNKRVRTYLVESTWMLITKDPAIRLKYLKLKSLRGGKRATIAIARKLLIRIRRMLLDNVPYRMTATAA

SEQ ID NO: 497236 - protein, 397 aa, unidentified
MIAVGIDVSKSKSTVAILNGDGSIRAKPFDVHHVADELQALVDYIKRTSEPPTILMEPTSHYHYPLLKAFQEAELPVCLINPYQMKKYGDTELRKAKTDKRDSLRIAQYALEKSYSLIPYTPQDQKYEDLRFLSRQYSQRISTLTVAKVQLLSLLDETMPGITTILPLKSRDPDNCVLLRFIKRFKSFDVIRKMGKTRFLDSYQVLVKKTKDHFAGSKGLAIYEFVLNSVTTRGENPLSAMTQDQCVDLVSTSQKAADEINLQMRIIAETMPEYKVLRSMAGVGDRLGPIILGEIGDIRRFHSGKALNAYVGNDAPPYQSGQFESRNRHISKRGNPALRKACFEVMQALKLTKPQDDPVYLFLLKKEQEGKPYNVAKMAAVNKFLRIYYARAMELYK

SEQ ID NO: 497237 - protein, 331 aa, unidentified
MDEVRRFVGIDVAKVALDVFIGSVGAAFSVANDEVGIRELLRQLEPADFVILEATGGLETPVASALAAAGIAVAIVNPRQVRDFARATGRLAKTDRLDAEVLARFGEAVRPEARPLADEQGQALEALVNRRRQLVEMLTAEKNRRARAPKVLHRSLDEHIRWLQRRLSGFDDELGELIRNTPLWRERDELLRSVPGVGKVLSSTLLAQLPELGMLNRKQIAALAGLAPFNRDSGSLRGSRCIWGGRAQVRRVLYMATVAGVRSNPTIRTFYLRLRANGKHAKPALVACMRKFLVILNAMLHHKTHWQTPALTSPTSTLSPLLGAVSEHGCC

SEQ ID NO: 497238 - protein, 356 aa, unidentified
MTGNIKYIGLDVHKESISIAVMNSAGKVVMESVIETKASMILQFIDGLRGDLRIVFEEGTSSAWLYDLLKPRVTKLVVCDPRKNKSMREGNQNDKIDARRLAKLLRLDHLNPVYHGEHGLRTLKELVRSYLTITKDLARVKSRVKAIYRSWAIPCTGKEVYARCHREEWLGKITEPGVRRRAEFYFQQLDALRGLRRDARRELLAESKKHKAWKRLCGIPSIGPIRAAVLLGILQTPHRFRSKRPLWNYSGLAIEMHSSADHRSVDGQLQRSRKNVLVRGLNRNCNHDLKNLFKGAAAVASSKPGPFQEFYTALVAKGMRPEMARLTLARKIATIVLIVWKKGVSFDANHLKPQTV

SEQ ID NO: 497239 - protein, 388 aa, unidentified
MPQSNDLSRSLVALKQDSTVISVIELSLSSWLVAGFVPGIERHPLKKLRADEQALLRLLHRWRDEATKVGRNINRIAVAYEAGRDGFWLARWLQAHGVEAYVIHASSIAVSREHRRAKTDRLDTDHLKRAFIGWLRGEPDHCHMAAIPTLEQEDAKRPTRERENLVGEQTRLINRIKSCLVRFGIRGFKSKLRKAAERLEALRTPDGVALPPNTLAELRRDLARLRFVRDQIKTIEVARLQRLKNKAPKEGSHAMVCLLVRVIGIGVETADMLVHEVLSRNLRDRRAVARYAGLTGSPDESGKRRREKGLARAGNARVRRGMIQLAWRFLKFQKDSTLAQWYRAQTADARGGTRKTMIVALARKLLIALWRLVTSGEIPNGVILRPAV

SEQ ID NO: 497240 - protein, 373 aa, unidentified
MSIVRISATTSEKHTVWSGCDVAKATFDAGLWLPLPEGQSRDLRDIPVHTFPRTREGVREFLAWADGLIAPTDLLDGSTWTFHAILEHTGRYSEELVVWLLAERPATRWTLLNPQQAAHFARSLAPRAKTDKTDARALTLYGLERRPACDERISPQRAELRDLSRYRTALVEMRTAEKNRAGESNASPLVRQMQQKHIAQLDREIERIEAKMHQLIRKLPDLQCDAELIDSIYGVGFVTAIAVVAELGDLRRFHRARQIAAFVGLCPRTIRSGSSVHPKTRMSKAGEPRLRALLYMCATSALVHNPHMKQVYDRLTAAGKTHMSALGAVMRKLLVLMRALVISGQRYQPDYQPCAIPQKNLGKTTTTTGEKCA

SEQ ID NO: 497241 - protein, 341 aa, unidentified
MQPYFVGLDVHKQVIAYCVKQGDGQLVSEGKIKATRAALAEWVGSLPRPWVGGMEATMFSHWIYAALQPHAAELFMGHAARMKAISAGKKKSDKLDSRTIADLLRCNVFPKCFVISPELGRLRQQLRFRHLVVKQQVAFMNKTAGLLMETGVEYERRRLHGKQYFSELMATTHWVNQELKPLLKFSRQQIESLAGMDKRLIRMLEKHPQLKARVAALRTIDGVGPILALSWALETGTPDRFPSIKDAQSYCGLTSAFWESAGQQKRRPLSKQRNKHLQTVLIEVANLAPMYNEKLKALYQKEKAAGADSNQATLEVARKLVAYLLAVDRAFCKSAQSKRAA

SEQ ID NO: 497242 - protein, 454 aa, unidentified
MENKTDSVIKTIRHNVAGIDLAGHSDHYVCGPRKEDGSYEIVAFGTTTPELHRMLGWLQERNVVSVAMESTSVYWIPLYDLFESNGIEAILIDPREFSMVPGRKSDVKDCQWIQKLHSCGLLRGAFRPSDEVVAVRSILREKENVVAMRTQSIQQMQKSLDQMNIRVHHAVSDIDGVTGLAIIGAIVNGERNPAILASLRDKRCKKSKAEIAEYLTGTWRDEHLFNLKQAYETLLFLNIKITEYDSKVSEMFARIAKDRDQSGNNPASPLLLERKLTAKERKNTVEKAILQRFIKFDMTIIPGIDYNTAAIIISEIGNKFDRFPDEHHFASYIGLAPSLGKSAGKNIRQKRKCKNTSRVGRALRMAAASLWRSKSALGAYFRSVASRSDKKTAIKATARRLAHMIYRGVRYGVEYIDCGAEAYKAYLRKKGLKTVEKLIKIHNINAIELKNVLT

SEQ ID NO: 497243 - protein, 351 aa, unidentified
MSHKTAATVAATIGIDTGKNTLHLIGLDDNGAIVLREKIARGRIAARFANVPRCLIGIEAGMATHYVARELIALGHDVRQVPPAYAKPFRQGHKNDFRDAHAIAEAVQRPSTRCVPVKTDDQLDLQALHRVRSRLVGQRTAVINQTRGFLLEHGIAVRQGLRFLRQQLPDILAKRGDVLSPRMIRIMEDLSGDWRRLDERIKHITEEIEVLAHGSESCRQLMTAPGIGPLIASAMVAAIGNGTAFAKGRDFAAWLGLVPKQMSTGDRTILGRISKRGNRYLRTLIMQGARVILLRPANWAKHSFGLWLTAAAQRLHHNVLATALANKLARIAWTVLAQGRSYEARVVPKVA

SEQ ID NO: 497244 - protein, 333 aa, unidentified
MYYLAFDVSKGKLDGVLTNLRTKNKYFQINNDYQSIIDWLNNVKLPKKMFCGCESTGGYHLLVLRVFVERGFAFKLINPLLVKQFTRTTIRKKKTDTTDSLIIAKLLAQGEGYQINSQELDLTAKTLERGLEKLIEERHKFSLMGQGLGFQKQNEDLISLNNKFKGIENKIGETIKEHVSSLKERYSKEPVIELLESIPGIGFKLAFTIWTEIGDVKKFDSYKKIVAFVGLDPRIRQSGHCLNNQGKLTKRGSPHLRRALFVAASVARRYDPELKLYYEKKRSEGKRYTVAICAVARKLVSRIYAVWERGTPYLKKEIPSLNILKAVTTMATA

SEQ ID NO: 497245 - protein, 345 aa, unidentified
MNYYAAIDVSLELSSVCIVEATGKVVKEVKVETRPEALVKFFKNFGLPLTRIGLEAGPLSQWLHAGLTEAGFETVLMETRHVKAALSAMTVKTDRRDARGMAQLIRMGWFRPVHVKSPESQEVRALLVARKQLQHKLTDIELSIRGILRGFGLKVGKVTDKGFEARIRKLASGHAMLEQIAEAMLAARATLLEQFNKLHKAVLDIVRHDEVCRRFMTTPSVGAIVAITYKSALDDPNRIKKSRNAGPLFGLTPKRYQSGETDVTGGISRVGDAMVRTALYEAANVLLSRVTRFSALKRWGLQVAKRRGLKRAKVAVARKLAVILHRMWLDGTTFRWTKTKVVAHA

SEQ ID NO: 497246 - protein, 414 aa, unidentified
MNRQQWYAGIDWATESHHVFLTDGSGRKIGEKIFKHSGAGLAEMAAWLMAASQAKEPGHIQIAIEVTHGPVVETLIERGFTVHAINPKQMDRFRDRFTLAGAKDDSRDAEVMASALRTDPRCFRLLAAPDPVIAELREWSRIAEDLSAERNRLTNRFRQQLWRYFPAMLELESDLGAEWFLDLWEAAPTPCKAARIRETAAAKILKRHRIRRFAAGHVVAVLRTAPVQVAAGTVKAACAHTETLIARIRLVNTQIKEAQRHLDALTARLIPTEDSEAGQQKQHDVEILASLPGVGRIVLATLLAEAWDALLRRDYAALRSLTGVAPVTKRSGKSCIVIRRQACHDRLANAMYHWARIAVQYDAKSKAKYTALRGRGHSHGRALRSVADRLLNVACAMLKAGTLFDPSLKTQNAS

SEQ ID NO: 497247 - protein, 348 aa, unidentified
MRIIGCDYHPSWQQISWVDTLTGETEEKKLDHASGEAEKFYRQLPEPALIGMESTGNCQWFVEMATTAGHEVWIGDAAKIRASEVRQQKHDRRDAALLLKLLLEGRFPRIWTPSGEEKDLRQLLIHRHKLVRIRVQVKNELQHLAMNQGVTKAGKLWSKSGEKVLRELPLKPWASRRREDLFKVREMLNGQIELLDQAVVEVAQKNAKARLLMTQPGVGPITSMAFVLTMGDVSRFPRGKQVASYLGLIPREYSSGGKQRLGAISKQGNGFMRMLLVEAAQVAVRCDPQMRSEYLHRCHRKAKGVAKVAAARKLAIRLYWMLRTNRGYPEVVRVESSSRVPLVVRHGG

SEQ ID NO: 497248 - protein, 357 aa, unidentified
MAALSIARVPANVTVGVDTHKHSHVARAKDGLGRHLGQLEIGTDPRGYAGLLAWAQGFGPVVTFGIEGTSSYGAGLTRFLRAQGQAVIEVLRPVRRDRRFGSKSDPIDADAAAGAVLSGKATAVPKAGDAGVEMVRALKIAKQTAIKARTQAVNAVKGLIVMAPDPIREQLRNLKTPALVRTCSAYRVAGASDPTSAIKLSLRSMCRRYVVLDQEVRSLEKELDALTIRLVPQLRQLFGVGQDVAAALMLAAGNSGDRLRSEASFSMLCGASPIPASSGMVQRHRLNRGGDRQANAALHQIVVVRLRYHEATKAYFSKRKADGKSKKEIFRCLKRYVAREVYRTLVDPREEAVRSAA

SEQ ID NO: 497249 - protein, 349 aa, unidentified
MNILAMDLGKSKTVFCMYNSENSKHRFGKVVTRPQQVHDLLVESSADRIVFEICSPAGWIYDIAKSLNFEVEVANPSTEGWRWKNVKRKNDREDALKLAKLSAMNQLPTVHMPKPEVRQKRSFIQYRQRLVKRVVQIKNSIRSILDKEGYSMSRGKKGWTKRSVEQLEKMALPLEKCDFNNLWRGQLGVELEMLKATEKCLLKVTSKLDTQANSDEQNQRLQTIPGVGPRLAEAVVAFIDEPKRFNSSKQVGNYAGLTPKQYQSGSMDRQGRISGRGNKLLRALLVEVSWVGLRYNSWMRETYERILRGSPSRKKIAITAVARKLLVRCWAMLRDEQPWRNKVSSSEAA

SEQ ID NO: 497250 - protein, 348 aa, unidentified
MTTVTDQFEHVVGIDTHARTHTYCLVETRTGGIIDTATFPTTSAGTNRALSWIARRSQGTTTHAAIEGTSSYGAGIAAALAASGFEVTEIRPIARPSRARTGKSDPIDAEAAARSVIREDLDKLAQPRRTGDRTALRVLLAARALVDQQRTANRNALTALVCSIDLSVDARKPLTDAQIATVAAWRTNRDDATARVFREEARRLARAVLEQTEVLRENHLQLGQLTEALAPGLQAVPGVGAVTGAILVAAYSHHGRVRSEAAFAALGGIAPLPASSGNTTRHRLSRSGDRQLNRAVDVVVRTRLSYDPTTREYASRRRAEGLSNREIRRCLKRYVCRALYRELRTRMT

SEQ ID NO: 497251 - protein, 357 aa, unidentified
MSEGSWVGLDVHARSVVAGVLDARSGELRAMRVPVARGETVGWLRSLPGPVRVAYEAGPTGYGLARACTDAGIACTVAAPSRIRRASADRVKTDGRDAELLARLLRMGELVAVRVPERHEEAARDLVRAREDARGDLMRSRHRLSKLLLRHGLVYDGTAWTVAHDRWLRQQRFDSRPLALAFDECYATVLHTKTRRDCLDEAIAELAATAPFAEIAARLCCLRGVSTLTAFGLIVEIGDWSRFQPRSLGPFLGLTPSEDSTGEKRRLGAITKTGNSHARRLLVEAAWHQRRPLRPSVALERRRQGQPAAVRAKADRSARRLHQRWHALESRGKRRTIVAVAVAREPAAHRWALATME

SEQ ID NO: 497252 - protein, 409 aa, unidentified
METKIYCGIDIASENHHAVAIDENEQVILNKKVKQDIKEINQFLDELQEKAGTKEVVIGIEGKNGYCKPMDTLIIDRNILLYNINNLNLKRFKEIYPGECKNDEIDARMIAKMLKINEAVMVKENKMYMEIINVRPEVEKIKKYSRFQQKLINDKVKEQLQLEKLLLEICPEILKIAKVDTIKLLTLLNKYPDFTKYKNLKEYKLMKIKNIGKKWVEINYKKLVNIKCMEIEAKASSRIIKIYTKRIIELKEEIKNFDKMLEEIGKDVKEVQLLKTIPGVSNKLASRFVGEIGSIERFETSAKLAAYTGVACINKDSGKVTTTHSAYKSNKICKNVMTQMANSMVVHSAESKEYYKRKKREGKKHNHALRCLSRQLIKIIFQMLKSERPYININKETKKNQEEIGKICA

SEQ ID NO: 497253 - protein, 428 aa, unidentified
MNEEDRTRLEEFRQFRREIRKSAEYLIVGIDVAKDKHHAFFGTATGKTLFKRLVFENDLEGFRKLLVQAEAMKVQEGLKKVVFGLEPTGNYHKPLGEHLMRCGQEVVLVSGVAAHENRKTLDGRWDSNDTRDAANVADLISQGKCLFYEFPVGGLQDLRNLLSLKRRLKRQEHGYRVRIRNHLVAKYFPELDRYFEQSEKTSLAVVRWCLDPSVIAGLEYPKFVEMVSSGQRRLSQENRLQAIWKMAVDSVGCEVGPAVAFEVQVMVEGLKQIRERIRDIEEKIYEICSQFPEYEFLLSIPGFGPDISAKVLGAVGDPFRFQSGKQVLKMAGLDLSAERSGKTSQSAIPVISKKGKADLRYALYQAAFIASTKNQAFIVYYTHKLRGREREPGIKTKMRVKLSAKLLIIAWTLMKKKEPFNPDYLNIE

SEQ ID NO: 497254 - protein, 320 aa, unidentified
MTLHQNILGVDVAKDWIDVCDLSSGEVRRIETTPRALKALAANLSARPGTLVVFEASGGYERPLMEALEAPGIKDRGVAYARVNPRQAREFARACGKLAKTDKVDARILAQMGRALDLRPAAPADPARRRLAELVARREDILAAITAETNRLAQAREAFVRRDISSLIAILKRRKLGLDAEIEAHKQAHEDLAARDRRLRTAPGVGPTVASVLLACMPELGGTDRRAIACLGGLAPQACDSGRRSGKRQVWGGRPEVRRALYLAAFIASRCDPELRAMRQRLIAAGKPFKVALIAIARKLLTILNAMIRDGHDYERRLPT

SEQ ID NO: 497255 - protein, 347 aa, unidentified
MLADEVDFVIGVDTHRDFHTVAALQAGSGGLVAQAVLRASAGGYVEALDFAAKYAPGPRAWAIEGTGSYGAGLARLLAQRGERVLEVGRPKREGRSRAKSDAIDALQAGRTLLGRSKLAQPRAGGRREALRALVRTRQGALTAKRAGLCQLRALVVCLPEPLRGELRGLTRARLLGRCARLRPERSRDVEVRGSLLALRSVARRVQALSEEERALAREIETLVRKLAPTLLAEPGVGPITAAQLLVSWSHKGRFRSEAAFARLAASAPIEASSGEVVRHRLDPSGDRQLNRALHTIVVARRKTHADTIAYVQRRRSEGKSVREAIRCLKRYVARHLFRLLEASATMA

SEQ ID NO: 497256 - protein, 411 aa, unidentified
MEPLYRWVAGIDVHKKMLAVVVRAPQGEYVQRKFGTTKTEIGHLAAWLQDHQVNEVVMESTAQYWRPVWYGLEAHFKLHLTHPLKTRAPRGRKADFRDARRLADRWHSGDLEDSFIPGAEQRSWRWLTRSRVHLKRMLGVIRNQVEGLLEQGGIKLSAVASDIFGVSGWAILERIAAGESDADKLVDEARGVLKRKKSKLREALQGKLDPIYRLLLKQHLAQAQLLCQQVEELNQALAEALKEHVAVLCRLTKVPGINLYAAQELVAEIGPGAVAFPSAEQFASWVGVCPGSQETAGVNYSRRSAKGNRYLRRLLCQNAWGAIHTKNTFFAGLFARLKPKIKAKGAAWAVAHRIAKLVWLMLHEGVEYVEKGTAPLNPRTLVRKFRRLLREFDRHGIDAKSLLEQELVATS

SEQ ID NO: 497257 - protein, 381 aa, unidentified
MRKSIRFVGLDVHAETVAVAVAERGGEVRFLGVIPNRPEAIRRLIGKLDPGRGLRACYEAGPCGYGLYWQLTELGVECDVVAPTLIPVRPGDRVKTDRRDAEKLARGLRGGDLTAVWVPDAAHEALRDLVRARLAAKRDQLRHRHRLSKFLLRHACRPPAGTKAWTQRYLEWVRKEVRFDDRAREAVLLDHLHEVERAAERIVRLEQAIDQAVEAAPEGMREVIAALQALRGIAKVSAVTIVAELGQISRFGRASKLMGYGGLVSREHSSGDKVRRGAITKTGNAHLRRIMVEAAWSYRHRPARGPTLQKRQEGLSEEVKAIAWRAQHRLHGRYRTLLGKGKNKQQVITAIGRELLGFVWSIAMTVERDQDHRAHRRQRAA

SEQ ID NO: 497258 - protein, 359 aa, unidentified
MQQATGSAVERTVGLDLGDRTSRYCILSQDGTLLEEGQVATTEAALRRHFSPMDRARVALEVGTHSPWISRLVADCGHEVIVANPRQLRLIYENQRKSDRTDAEYLARLARVDPKLLAPITHRGEQAQADLALLRSRDMLVRARADLVNHVRGAVKSVGCRIPKCSTPAFARRAKAHVPELLEATLRPVLSTITQLSEQIHQMDRQIEEVAQSSYPETEVLRQVPGVGGLTALCYVLTLEDPARFPTSRSVGAYVGLVPKRSSSGQRDPELGITRAGDEMLRRLLVQAAHYTLGPFGPDTDLRRFGEKLAARGGKNAKKRAIVAVARKLAVLLHSLWSTGEVYEPLRHHPQAAQEQEAA

SEQ ID NO: 497259 - protein, 429 aa, unidentified
MPYRIAGIDVHKKMLAVVVSNVEVESEFQFERRMFGGNPEQLRSLAAWLLEQEVEEVVMESTAQYWKPVWETLERYWKPVREKREDARRRSGTLHLAQALSNRGRRGRKKDFLDAERLVKRLVARELTLSFVPDAEQRLWRTVTRRKYQLTRDRARLQNQVESLLEEAHIKLSSLVSDLLGASARRMLKALADGETNPAALAALADKQLRATPEQLCDALGACTELNPVYRRLLKMALEQLQFLEQQIGDLDQETASLLRQHQDAVERLAEVPGLGVDSATQIIAEVGPTAATFPSGKHLSSWVGACPGDEESAGVNYSHRSPQGNRHMRRLLNQAANAAVKVKGSIFEIVYRRSVPRLGHNQVIGAIAHRQCRLIWLILHQGVRYEEHGPAVTKHSRQARTARMIRQLRKLGYQVELPNSQPANSAGR

SEQ ID NO: 497260 - protein, 388 aa, unidentified
MSQEAEHVIIGVDPHKLSATIEVVDEREQMLGQGRFTTDRAGYAAMRTYAKKWPRRVWAVEGSNGAGRPLAQRLLEDGEQVVDVPAKLAARVRLFDTGHNRKTDAHDAHAVAAVAVRTKTLRVLQVDGELEALRMLADRREALTRRRVQTVDRLQALLAELLPGQAKRDLTTGQAKAMLAGVRPRDIAGKTRRRIAAEELAELVAVEAKIKKATAELKTIVLARGSRLMDLHGVGPVVAARILADVGDVSRFADRNRFASWTGTAPLDASSGEQNRHRLSRAGNRRMNHMIHIAAISQIRLDTEGRVYYRRKLAEGKRPLEAIRCLKRKISDAIYRQLLADATRDESADPGGHCGASLNSSAVDSHPPYRHFGSATPGPAEKTLRRTG

SEQ ID NO: 497261 - protein, 387 aa, unidentified
MERSNQRVVGLDVHPDSFAGAILEGSDPWRARVVRSSTRVALGELEGWAARQTGPGDVLVLEASGNAFCVAERLRSLKRTVVILDSHRAGKVGKAYCATDRVDAIKIARIYLSALSPVVWQPDAKTRERREVFSAYQGVVKETVRLKQQLKSMLNEHCVRLEKGFRLSHPTALGRLRKRREWSGAQAMLLGQLHAGLVGACQRRQQLRHYMAQEILAETELLRLTRLCGISLITLYGLISSIGQITRFANARKLSAYFGLNPSVCQSGNYEGATALKRHGRGAMRALLVQSAKKLLQVENPLRKWGLAVAARRGRNKAAVAVARKLCVAVWHVLQGHTIGALERLDTLHTKLHKFATELGVPAIKAMGYETKEAFVQKKLYLLKSYP

SEQ ID NO: 497262 - protein, 431 aa, unidentified
MPFAALDLHKKVVEAIVVDDLGHTLLRERFPATRAALLQFAHAHLGPDTILALEATTNTWAVVSLLQPLVAQIVPSNPLRTRAIAEARIKTDKVDAEVLVHLLRTDFLPRVWIPDPLTQALRHRTTERANLVADRTRLKNRIHAVLHQRLIEAPTGDLFSRANLRWLAALDLDPDGQATLQRHFRQLAHIEAELDLLTTQMAVESHSNPHIKLLMSIPGVDFTVAETLLATLGDFTRFPSGEKAAAYLGLVPSTHQSGEHSYHGPITKQGRGHARWMMVQAAQHIGQNPGPLGVFFRRLARKKNRNVAVVATARKLVVIAWHLLKNNEPYRYAQPRATQAKYSRLRVRATATRKKGGNAKGQPRPQSYGSGQPTRAIPSLDQIYASEQIPPLGPQAPGELKMLEAYGLVDYAGKLRKAHRIPKKSTKPNPE

SEQ ID NO: 497263 - protein, 345 aa, unidentified
MNYYAAIDVSLELSSVCIVEATGKVVKEVKVETRPEALVKFFNNFGLPLTRIGLEAGPLSQWLHAGLTEAGFETVLMETRHVKAALSAMTVKTDRRDARGMAQLIRMGWFRPVHVKSPESQEVRALLVARKQLQHKLTDIELSIRGILRGFGLKVGKVTDKGFEARIRKLASGHAMLEQIAEAMLAARATLLEQFNKLHKAVLDIVRHDEVCRRFMTTPSVGAIVAITYKSALDDPNRIKKSRNAGPLFGLTPKRYQSGETDVTGGISRVGDAMVRTALYEAANVLLSRVTRFSALKRWGLQVAKRRGLKRAKVAVARKLAVILHRMWLDGTTFRWTKTKVVAHA

SEQ ID NO: 497264 - protein, 330 aa, unidentified
MTNVSELTTEALFVGIDVSKDTLEVALSENDKTQTFGNDQAGVAALLGQLKPVAHRIAVVLLEATGGLEHAAAAALCAHGFAVIVVNPRQAHAFAKALGHLTKTDSIDAKALAQFARTLHNSDKRERLLYRLPTPAQELLLAMVTRRAQLISMRVAESNRLASAHVSQRKSIERHIKILDKQIGQIDDDAQRHLRSHFQDKLALLKGLKGVGVGTQTMLMAALPELGSLKQREISKLVGVAPLNCDSGKFKGKRITWGGRSHVRAALYMAALTASRHDPVIKAFYERLTLAGKPKKVALVACMHKLLTIMNAVIKSAQPWQASYPQPNNV

SEQ ID NO: 497265 - protein, 339 aa, unidentified
MMIIGCDFHPSWQQVSWLDTETGDCGERKLVHANGDAKMFYEQLAAPVLIGMEATGNSQWFVELVEDVGHEIWIGDAAQIRASYVRKQKTDKRDAAHILKLVTQGRFPRLWTPDREQRDLRQLVLHRHKLVEIRSRVKNELQHLSMNKGVQRKHKLWSQAGQKMLRELALKPWASCRREDLLGLLSMLNQQIGQLDHAVQQAAEENPQARLLMTQPGVGPNTALAYVLTIGEVSRFPRGKQVASYLGLIPREDSSGGKQRLGHISKQGNAPLRGLLVEAAHVAVRHEAHWKRDYRRLAMRKNRSIAAVAVARKLAVRLWWMWRRGVDYAQLSASGSHAG

SEQ ID NO: 497266 - protein, 362 aa, unidentified
MHYVGLDVHARRSSLCILDSCGKVVNRLEVRGTWPKLIEQVAERVPRPFAVCFEASCGYGYLHERLSALAGRVAVAHPGKLRLIFRAKRKNDRVDAEKQAKLLYLDQVPQVHVPGGDVRAWRGLVELRRRLVGRRTAVKAQLRALLRSAGACDDAPAGKALWSTKGRAWAAAVALREDGDALRRDLLLEELAQADERVARVTRELDRRADAHPGVALLRTVPGVGPRTAEAFVAYVDDVRRFARAKQVGCYLGLVPCQDSSAGRDRLGHITGEGPATVRMLLCEAAWQAVRRSPAVKAFFERVTRGDPGRRKIALVAVAHKLARSMAAMLRTGEAWREPEPEPEPEPEAKAKAKAKAERAPA

SEQ ID NO: 497267 - protein, 366 aa, unidentified
MEARRFVGIDLGKRHYEACVLHAEEKIVRWSGTTDAPGREELAGKLEAGDVVALEAGALSFTLARRLAQVDGVTVKVLHSAKLAVIYSSMRKTDKEDALKLARVLQGTAEECLPVVSLPSQEEEDARRLANHQIFLNRERTGVINRFHAACVEHGMTEVSKKDLATEKGRMAILERMTGIYRMLAEHYCVILAAIESQRALAKEQVRQALRTQEREAEILLSIPGVGPTAALAYLGFVGSEERFENPAQVSYYVGMVPRVELSGSSIHHMGHITKQGSPALRRALVQAAWAAVRSPMGAHFRLVYDRISERRGKRIAIVAVARHMLELMYTLLSKHELYRFCSEEERSRKLKFYKLGSLGTEETLT

SEQ ID NO: 497268 - protein, 337 aa, unidentified
MNLKRIGLDTSKAVFTVHGVGHDERAALRCSLKRAGLEDFFARLPPTVVALEACGGSHHWGRRLRALGHEVRLIPPQYVKPFVKRGKNDRNDAEAISEAAARPEMTVVAVKSAEQQAGAMILSVRELLVGQRTQLVNAIRGHAAEFGVIAAKGVSNIVRLLEKIATDTEIPQAAREMLALLGARVSELDTRINQVELQMMQQHKANPVSRMLDEVPSIGPIVALACALTVDPSQYKSARHFAASLGVTPKERSTAGKQRLGGISKQGNERLRRLLVTGAMAVIKYARPGSKTASPWLLKLLERKPRKLAAVALANKTARIIWAMMSSGEAYRRQPAG

SEQ ID NO: 497269 - protein, 406 aa, unidentified
MVNVGIDLHKTQFTTCVRGNGGNEYEQYPTTEAGYMAFLTKVAKWQGDREEVRVGVESTGNTRYFKSRMEEAGIGVTVINTLKFKVVNESVNKTDKHDAATIAEFLELGILPEAHLCNRKCEQMRRLLKVRTTLVRAQVVIKNQIHALFTAEGLEDVTGGELQSKKGRQRVLDALNQWENGLVVQPLIETIGRLEENVKGIEKELRILAEGDRVVELLMTIPGCGEIGAWTISAYTGDIKRFASAKKYAAYAGLVPWVQNSNETIHHGKITKRGPRELRTALVQLVMGLRRMKAKTNTWRIMQRYEFMKKSKSHPGIKIVAAARKISTIIWHMLNEDAVFEVEKMVDRKLAMISEGMRMEVFLVKESMEETNEEREEKIEDPKTTYAVKKGVRKTGVAGEKLRKVG

SEQ ID NO: 497270 - protein, 448 aa, unidentified
MPKRNRIASLPVIEPNAAGVDIGATEIFVAVPCDRDPEPVRCFPTFTVDLERVADWLQRCHIKTVAMESTGVYWIPLFQILENRKFDVRLVNAHHVKNVPGRKTDVEDCQWIQHLHSVGLLRGSFRPANEICAIRSLWRHRDNLIELATIHLQHMQKALDQMNVQLHHVISDLAGATGLAIVDAILAGERDPRKLAQLRDWRIRASEETIMKSLVGDYREEHLFTLRQSLESYRHYQVQIQNVDTQVKSMMPIVSSKLAEGEKPPKEKNPRKTPWRNEPPQLRDDLYRAFGVDLTQIPGVNTLTAQMIFTEIGPDFSRFATAAAFCSWLRLCPDPKISGGQVLSSRTRPTKNRAALALRMGAQGLHRSQSYLGDYFRRMRARMGTPKAMTAAAHKLARIIYHMVTTQQEYDATVFQEQERRTQDRRRTRLHAQAKELGLRLVPAEIVP

SEQ ID NO: 497271 - protein, 416 aa, unidentified
MDTMYERCCGLDIHKKTIEACFRSGKKKTHMSFGTTSAELRKLTMWLVENDCQSVAMESTGSYWKPIFNILELSGTDMKIIVVNARHMKNVPGRKTDVNDAEWIAELLQYGLLRPSFIPDREQRELRELSRYRKSLVGERAREINRLQKMLEGGNIKLTSVVSEVTGYSSRRLLDRLLRNDEPMTEDVISGLVHTSLAGKSKELETALDGLLSELQKELLIKVLDHIDDMSRRIADLDDFCRKQMEKYEDALDKLDEIPGIARRTAETILIETGLDMSRFPTAKHFARWAGLAPGNNESAGKRSSGRTTKGNPTLKSTLIQSAKVAARKKNSFFKARYQKIAAKRGANRASVAVAHSMLIAIYHILKSGERFKDLGEDYYNQFNREKKKNYYLKKLTKLGVNLKEATLSISIQTAT

SEQ ID NO: 497272 - protein, 422 aa, unidentified
MAKKRVKGKTLDGFAEINHDAAGLDVGNAQHWVAVPAGRDTVSLRMFGCFTADLHALANWLMRCGIKTVAMESTGVYWIALHEVLESRGFRVCVVNARQAKNLPGRKTDVKDCQWLQQLHTYGLLTASFRPQAEIIVLRRYLRHRETLVQEAATCIQRIQKALTEMNLQLANVISDISGTTGLRILHAIVEGERDPQRLATLRDWRIKATPEEVANSLLGNWRDELIFVVEENLALYGVYQTKIERCDQRIEQHLKSMPAQIEGDNNPIPKPRKGKRPHGNAPAFDLRSELYRVTGTDLTQIDGIDVVTAQAILADTGTDMSAWRTEKHFVSWLGLCPDHRISGGKVLQRGTRRVVSRAATAFRLAASSLRRSQSALGAKYRRLQSRLGPPKTITAMAHHLARLFYRMVKYGSQYIDHGMAA

SEQ ID NO: 497273 - protein, 337 aa, unidentified
MFQLGIDVSKKTLDLCLLREGVKGRVKNRKLKNDFNAVGIVVSWLRKQHCEPGDVHIIMEATGVYHESLAYGLHDAGAKVSLANPHRSREFARGMDILTKNDKVDAYMLACYGALKEPEPWEPPPENVRYLRALLRRHDALVTDSSREKNRLEKCRATDTPAAVAESIENVLRNLSAELQRLETLIQGHLDQHPELKKDFDLLTSIKSVGFQLGLNMLVILRSHRFDTAEQAAAFLGVVPVEKSSGTSVRGQSRLSKIGPPEIRAKLYLASLCGMRFNPAMKAMYERLCQRGKAKMCAIGALMRKLVHWCYGVLHTQQPFDAEYWSSDAHSVCKSAC

SEQ ID NO: 497274 - protein, 392 aa, unidentified
MIYVGIDVAKRKHDCCILDPQGKPYPVFSFSNSHDGFQSFFQKLFSICSDKGQIKIGLEATGPYSENLFNALVDRSLPVLRINPLLVKNFKSSMSLRRTKTDKVDAQAIAQMVKEKGDSLQTYSTSLYHMEELKSLTRYRLKLVGEQSKLRVSVSRLVTILFPELESLVSSLHLASIQALLIEWPGHQQLANCSLKRLTNLLKKHSRGQFGKPKAIAIQQAARQSIGKVSPSKSLELRQTLKKVAYVQQDLDEVEAQIKEMVDSLHSPILDIPGIGYTTGAMILAEVGDFSRFANADKLLAFSGMSPSKYESGEFKGTTGKMEKRGSSYLRYALYTAAKLVSQFAPQFKSYYQKKRAEQKPYNVALSHVAKKLTRVLYKLGTTGEAYQPQVA

SEQ ID NO: 497275 - protein, 314 aa, unidentified
MTKKSSAVYVGLDIAKATLQLHLQGRQYVLPNSAAGHRKLVMLLRAVPGAHVVCEATGGYERAVVAALHAADVAVSVLNPAHVRHFALAQGRRAKNDPLDAAVLTACGQALRPKPTPVPKAVLAELRALVQWRNHLKDQLCAAGNQGEHATLPYVQKQQAKLVKHLTTQMKKVEAELTNALERAPETQKQVQRLTELDGVRMLTAVSVLSQMPELGQLNRGAAAALAGLAPWTRQSGPWEGQGHIGGGRAEVRRSLYMSAVVLARQTKTLLGKFYQRLRAAGKPAKVALTAVMRKLLLQMNQALKPTRDEPQPA

SEQ ID NO: 497276 - protein, 321 aa, unidentified
MNKDKEIYGIDISKDVFDVYSQESGHCQFKNDVKGFKNLLKTFPRTALVVMEATGYYHYRLAQFLHKNGVLVSVVNPLSVKRFIQMKLAKVKTDKSDAKAICEYGEMNDVPLYNALTEVQSECLQLFSLLDNYVKHRTSTKNKLKGEEELGKPSKTVYHSLRRVLKHLDKEIAMLETRLLELVKQDQQAQLTLLQSIPGIGMKTALFLIVVTDGFKKFETASQLCSYVGITPTIRISGSSVRGRSRISKVGNKKLRNLVFLAAFSACRYNAACKALFDRIVAKGKSKKLALIAVANKLLKQAFAIAKSGLPYDENYVSRLA

SEQ ID NO: 497277 - protein, 410 aa, unidentified
MKVLHRRCAGLDVHKAEVVACARVFAGRKVVHEVRRFGTTTRELMALAAWLKSLEVTHVAMEATGVYWKPVWHILEADFTLILANAQHVRNVPGRKSDVNDATWIADLLAHGLIASSFVPPQPIRELRDLTRTRRQAVSEAVRHQHRIEKILQDANIKLSSVLSDPMGVSGRRMLAAMAAGETDAGKIAELGSPRLECGRGALIEALSGPVSEHHRYLIGWHLRLLDEIEAKIAELDQRIEAQIAPFRAAIERLTGIPGIKQVAASAIIAEIGADMSIFPTAGHLLSWARIVPRLDESAGKKRSRRVKKGGAWLKPVLVQCARAAARKRDSYYGAQYRRLKARIGDQKAIIAVAASILTAIYHMLRDGTEHADLGAAYLSRREGDSKAIAHQLARRIRALGYQVDLREAA

SEQ ID NO: 497278 - protein, 317 aa, unidentified
MAVLGVDVSKADFHCFLLDGEACAPAKFDNKPAGYRGLLKWLKGHRVADVHVCMEATGPYWRPLANALYAANLRVSVVNPSRTVYFSRSQLQRTKTDAVDAKMLAAFCLSQKPDLWKPPAPEILELRAFVTYRSQLIAQRTAQQLLIAQVEANSKLRRIHAAQLSAISKAIEAVEREMRSHVMQHRGLQESVTRVQTIPGVGFLSAATIVAQLPVERLRDKKAVAAYAGLSPSDRQSGTSVHGKPRICKTGNADLRKSLYMPALVAIRFNATMKTFADRQKAMGKPAKVIIVAVMRKLLVLAYTLLRNKTDFDPAKA

SEQ ID NO: 497279 - protein, 418 aa, unidentified
MQTELSQFTAIIGIDWADKKHDVCIQAATSGQRQIYQVPHKVDKLDEWARSLYRQYGGPIAVALELSKGPIVSALQKYDFFVIFPVDPTTLANHRKTFTLSGAKDDPTDAEYILDLLLKHTEHFKALKPQSVEMRALMSLVEQRRRLMNDRVRLTNRLRNALKQYYPQALEWFDRIDTPLFCDFIKRWPSLSQARRARKATLEKFFREHNMNRRALLERRMTAIKSAVPLTTDEAIIMPFRLQAMTLVAQLEVALVSIRRYDDEIAALAPQHPDYGLFSTLPGAGPSLAPRLLVAFGEQRERFANAAALQKYAGIAPVTERSGQKHWIHWRWQCPTFLRQTFVEWAAQTINKSYWAGLYYYQQRAKGCSYQAAVRALAFKWIRILYRCWVTRTPYDEARYLKTLQERGSPLLKMAEVA

SEQ ID NO: 497280 - protein, 390 aa, unidentified
MIYVGIDVAKDKHDCCILGSDGEVLFSPFTIQNTLQGFDELYEKIWSLTYDLTEIKVGLEATGHYHLNLLRSLLDNGLPSFVINPLHTNLYRKGQSLRKTKTDKVDAASIAMMLLTDKTLKSYSDSSYHNEELKSLTRYRFDKVQERARLKTSVSRLVNILFPELEKLVPSLHMASVYTLLSELPGASFISAAHLTRLKHLLHDASKGRYGRDMAVSIRDAASSSIGSVLPAKSLELKHTLHLIEVLTEEIDEIEDAINSIMDTIASPITTIPGLKNRMGAMILAEIGDFSRFDSPDQILAYAGLSPTTYQSGQLTSSYAHMEKRGSRYLRYALFNATRYACIWDPTFKAYLAKKRAEGKHYYVAISHACKKLVRVIYRMQLTGESYRTA

SEQ ID NO: 497281 - protein, 420 aa, unidentified
MKVVYQTCCGVDVHKSFLVAIIIKTTSGVQPSYQKKRFSTFNNSILQFKKWLLENACRDVCMESTGKYWVPVFNLLEDDINVTIADPKWVKAVKRNKDDTKDSKWIGDLFRLGLVPRSYIPCKPIRILREFTRYRYKLTSCRSSEKNRYQNALTVCNIALDSLVSDIFGKSATSVIDYLIEQSDNSINYEEITSRLLRSLKKKSDSVIESIEGYQMTDSQKYRMRLIRAHLDYITSTINDIDTMLNSLIAPYENAVQLLCTIPGVDRNSAITVISEIGTDMTPFSNSKRLCCWAGLTPDNNESAGKKKSVRITRAGVYLKPALVQVAHAAVKSDKSPYYKQKYERIMKRRGKKRAIIAIARMILTAIYQMLSTGEAWNPTDLFKIDMPEPMKEKQKEKAIKQAMKLLIREGKISESQLAS

SEQ ID NO: 497282 - protein, 413 aa, unidentified
MKQIQTHFAAQIGLDWADTKHDYCLKSFDCDNFEFGVFEHTPEAIEAWALALQERFHNKPVAICLELKAGPVVYALLKYHFIVLFPIAPKALCKYREAFTQHGAKDDPTDAFLQLDYLIKHPEVLKPLIPDNVATRILTRLVEDRRSLVGDKVRLTNRITAAIKSYYPQALQWFEDIDTNLFCDFIEQWPTLKQAQSAPKKTLTTFFKTHRCVRDDVINKRISAIKQAMPLTDDLGVIIPFERFIKVLIIQLRQVLIAIKEYDREIAKQFCAHSDFVIFDSLPGAGPVFGPRLLTAFGANRDRFKLADEMQCLSGVAPVVNRSGTYCWIHWRYSCPTFLRQTFVEWARQTIRYSFWAREFYDKKRAQGKSHQATLRALAFKWIRIIFRCWKNKTPYDESAYLFALKKRKTITN

SEQ ID NO: 497283 - protein, 288 aa, unidentified
MPIVGGLDIHRKQITFDYPGTVTGQVQRGQVSPADREHLRAWLARFAGCEDAAFAVEGCTGWRYVAEELAAAGITAHLAGPADTAFARGRKRHAKTDKTDCRHLRMLLAEGRLPECWIPPGRILECRALLETYHDLRAEHTAWVQRIHAVLFHQGAPALGEGALRTGQGLAELRAAAAVRLSPAGQLQVATALDVIEALEARMHELRHQLTDAARHLTGAKVLAARLYGVGPVTALALTCWLGGAGRFSSSRQAVRFAGLDVTVWSSDRKGPPGRLSRQGPPVLRWAV

SEQ ID NO: 497284 - protein, 410 aa, unidentified
MNGNGKRYIGLDVHKHYLIALGVDKDLNVVLPIRRVELSRLESWMKKTLTEQDEVVLEMTTNTWQLYDELCEYAGSVMVVHPPHVALITRSQVMNDKIAASILARLLAKGLLVGIWVPPVEVREMRGLVAQRSKMTNLGTQAKNRLHAVLQRHHLVPPEGNPFGASNKEWWRSLSIGKLEKLNLQSDLETLQFAERQVERMTEIMEGMAAEQEPIGHLLHLAGFGVVTAVTVWAAIGDIRRFAEPRYLVGYAGLGARVHDSGMTMRTGKITKAGRRDLRTVLIEAANVAANSHPHWKAELARLEPRLGRNKAVVAIARKLLVSVWYVLSQNEADRFGEPETIAQKMLRFAYQVGKEHRPQGQTAAQFARIRLDRLGLGSELTSISWGSKKPIPLPPSSLKKERSDVPDTN

SEQ ID NO: 497285 - protein, 374 aa, unidentified
MEKTIKYIGLDVHKDTIQVAIAEEGRKKPVMSYGNILNTSLSIDKLIRKLKSSGHELSVVYEAGPTGYGIYRQLKAQNIECAVVAPSLIPQKSGDRVKTDRRDAINLARLHRSGDLTKIHVPDEEDEAIRDLTRAREDARICAKKAKQRLNSFLLRNNRTYSGKGRWNKTHLAWLSELSMPHPAQQIALQEYIDTLQESLQRIDRLTNQIKNIVEHWRLKPVVKAIQSLRGVSMIVAVTTLAELGDINRFENPKQLMAYLGLVPSEHSSGLKTKKGSITKTGNGHVRRVLTEAAWAYRFNPKKSLHILRRQQDIPKSVCDIAWKAQLRLCNKYRALVNRKVTQVAVTAVARELIGFIWAICREMDSIEDNRLAA

SEQ ID NO: 497286 - protein, 489 aa, unidentified
MSTARKQRQGEKGSDAQRSASKRKARGSHRQQGEDNRRRSKLTITHPDAAGIDVGARVHYVAVPEGRTGKPVRSFGSYTAQLEELVHWLKDCGIKTVAMESTGVYWIPLFQKLEEAGLEVLLVDARQAKHVPGRKSDVQDCQWLQQLHSYGLLRAAFRPEDSICRLRTLQRHRKNLVECAAMWIQHMQKALNQMNLHLHHVLSDISGRSGLAILDAILAGERDPKKLASLADRRVEKSQAQIGAALTGDYRPELLFVLSQSLYNYRQMQQLMAQCDLSIEKQLAKIADCTNPSQDSELTRQSQDSVACKPRKRKPKDGLEVSLAAHLKRIVGVDLTAIPGLNLLAVLNLLSEIGANMTKWRNEKAFVSWLGLSPNNKISGQRVLSARTPKVVNRAATTLRLAVLILGKTNTPLGSFYRRKRAQLGAPKAITATARKLGCLIYRLIKNGQGYKEPDLLTYELKYKGQILNSLRKRANSFGFDLVEVPRPA

SEQ ID NO: 497287 - protein, 415 aa, unidentified
MKKHSNSPKKNEPTSKRAKSRGPVQRNPKEVLAELLGKLREKLDSKVVAASAGEEDQRRELRPNLDRLTVGVDLGDQWSHYCILGLEGGTLAEGQLRTTQQDIADFFEGLNAARVVVEVGTHSAWVREVICSYGHEVVVANPRLMEGSKRRKRKNDRIDANKLARLGRVDPQSLHPMQHRSSEVRQDLVILRARDALVAARTELINATRGLVKSMGARLPKCSSPSFAQKVEEAVPAEIQEALLPLVRMTAALSDSIQGYDEKIEKLGREKYGHTALLRQVKGVGPITALAYVLTLENPERFAKSRDVGPYLGLVPKQEDSGESQPQLGISKAGDTMVRRLLVGSAQYILGPFGPDTDLRRYGLRLCERGGKNAKKRAAVAVARKLAVLLHRLWVTGEVYEPLRHAMSVPIAAAA

SEQ ID NO: 497288 - protein, 408 aa, unidentified
MTTAEYELYVGIDWATQEHRVVVLDAARRPLHDRVVRQDGAALEAFATWLVALGAGRGDAIAVALEVPRGALIDTLLARGCHVFAINPKQLDRFRDRFTVAGAKDDRRDAHVLAAALVTDRLAFRPLAPEDARIIELRELSRLDEDLGQEERRLTNRLREQLSRFYIQILQLAPAADEPWIWALLQRAPTPAAARSVPRAVIQRLLTRHRIRRVSADEVRATLRAPALPVAAGTVPAAQIQVGMLVARLQLVHEQRATCGARLEALLEALAESQEHRDVPILRSLPGVGSRVSATMLAEASRLLAERDYHALRAHSGLAPVTKQSGKRAVVMMRYACNRRLRDAAHYWGQSAVRHDPHSAAHYQGLRARGHSHGRALRGVVDRLLRVLIAMLKTQTLYDATRRPALSA

SEQ ID NO: 497289 - protein, 534 aa, unidentified
MGRRRRGASRDGGVHPQRRSRALEERVRRVGPDHFGVLAVDSAKHRFAVLLADFYGGTLMDMLEVDNTAFALEALVTEVKAQAQRHGLKDMVVAIEQTGRYHVPIRQVLRKHWDVQMVHPFATKQLRQPADPGNKTDPTDLQAIVRALIVGYGRSEAELPARWADWRLVSREREALVRQRAWARVRIEMRTEALMPGYSAQFGCLWKSPLPLLLARDFGSAQALLAAGQQGILARAREEGHHPQHKTVARVLQWALQASAPDPSASVGHRLLCDQIDFLRFIEARIGQYECSLADYLVDTPGVLLLGIQGINVVSAGSYGAELGPIEHYLHPTKITGRAGIYPSRYQSDETDLADGPLVGQHNARLRDAIFEIAHNLIAYNPHFKAWAELRGKRHWAKKKVHVAIACKFVRISYWMLAGRTVFQHPCMAGRESILRKLFHFAKSHHIPAQDTLSLLQRAAQQLPAEVREEEARALLDDLPKGARPRHRNGPERLGEILPRVIAWLAPHLSTETERRQPSLSSPAEDPVLSGLDR

SEQ ID NO: 497290 - protein, 350 aa, unidentified
MGKLYHIGVDLHKKNLQVAVLDNAGEILDMRRLGNNDKEGLKEYFSSFPEETPVVVEATTGWEWLSDLLEEEELAVKLANPHKVKLIAEATIKTDKIDARTLAQLERANFLPLSYLAPREVRERRELLRHRMILVKLRTSLKSRIHSILNKKGIIVEERTDLFGKKGREILKEVELPEIYREETDTYLDLIDRLDDHIKEKEKQISKIVSEEELARLLMSIPGISYFSGLLILSEIGDIKRFNSAKKLCSYAGLAPTTSQSDEAVYHGHLKKDSNKYIKWVLIEAVEHIIKKDPQLAYKYEKVLSKKGKNKARVAVAQKLCISIYCMLKNRQPYKTRERKRNRILFRVSP

SEQ ID NO: 497291 - protein, 414 aa, unidentified
MDEASEIRVKVGLDWGDEKHVYRLRMVGSSTVEKGEIEQKPEALQEWLNRLRERAGGGRVAIALEHSRGALLYALLEYEFVVIYPINPKALSRYREAFYPSGGKDDPRDADLALDYLEKHPERIRVWKPESSEVRSLRLLTQQRRQLVDLRTELTNRLTCNLKNYFPQALGWAGPLKEDTACEFLERWPSLSELQKTGTGKIRRFFRGRGAHAEKLEAKLIEIPKAVPLTRDTAILSAGSLLTRSLVKQVRPLNQSILEYERRIAEVFEDHGDHDIFDSLPGCGPALGPRLLCLLGEDRDRYSSAEEVQTVSGIAPLIVASGKVRVVHWRWACPKFQRQAVHEFAAHSRHWCSWAQAFYKMQISRGKDHHMAVRALAFKWLRIIFVCWRDHAPYDDERYMESLKANNSPLLAYL

SEQ ID NO: 497292 - protein, 323 aa, unidentified
MQGKVQLEARSAAPVYVGIDVCKDHLDIHLHPLGQGFRFTNSKDGIQRLKRLLAGHAVALVVMEATGKHHRLTHRSLSQSGIAVAIVNPLRSRLFAEAIGTRAKTDRVDAKMLAILGDALGPQAMPPASETLEALQELVHARNAATAERTALTNRRAASSTTFLRAEINRRLKSLDRHIERLAAEIEKRIAAEPPLARRQQILLSIPGVGPGVAANLLVDLAELGSLDRHAAACLAGVAPFADDSGELSGQRRIKGGRANPRRALYWAALSAARHNPDLCAFYKRLVENGKKPKVALTAVMRKLVVLANTLIKEDRLWVNHAS

SEQ ID NO: 497293 - protein, 457 aa, unidentified
MAKKRSPQGASKKQAVQEVIHPNAAGIDIGAEGSYVAVPADRDESPVRSFGCFTEDLHKLAHWLQECGTDTVAMESTGVYWVPMFQILEDYGFSVYLVNARHVQNVPGRKSDVLDCQWLQQLHTFGLLAASFRPEDEICVLRSYWRHRDSLVRYGAAQVQHMQKALEQMNVQLHKVISDITGVTGLRIMEAILEGERDRMKLAALKDPRIRSSQDRIAKALEGDYRQEHLFVLAQALETYRFYKQQIAACDQQVERYLSRIDDRVDVTQTPLPPQKSGKKKSGSSQPDFDLRTHLYRIAGVDFTTVEGLNVLTVQTILSEVGLDPSKFPTSKNFTSWMGICPDNRITGGKVKSSRTRKVKNRAADAFRIAAQAVANSSGPIGAFYRRMRARLGPAEANTATAHKLARIFYRLWTDPEAYDPSLLEHYEQQHTQRSINYLRKKARTLGFELIPQLVAT

SEQ ID NO: 497294 - protein, 359 aa, unidentified
MTLLTGKDPTVLVTVGVDTHLDEHVAVALDHLGRHLGALSVPTTEAGYVKFLRWAKDIGELERVGIEGSGSFGAGLSRFLNKHGVEVLEVGRPKRRDQHRSGKSDPIDAEIAARAVLSGTDIGETKGTEGRVEMIRVLRAARRSAVKARAQAANQLKAMLITAPEGLRAELRKLSTAKLVRKAASFRPGALPDDVAAATKFALRSVARRYLDLSEEIRELDGQLRRLVTETAPHLVAVHGIGVDTAAALLVAVGEDPKRLRSESAFAHMCGVAPIPASSGKVVRYRLNRRGNRDANRALHVVAAERMSRDERTREYVVKRTSEGKSKREIMRCLKRYIAREVYRILTQIVAPMGSFSSP

SEQ ID NO: 497295 - protein, 343 aa, unidentified
MESIYYIGLDVHKKSIAYCIKTVTGKVVCKGMVRAERRALHQWLVDLPGSWVGAMEATMFTGWIYDFLKPYAVELKVAHPAMLKAITAAKKKNDRADAEKLADLLRVNLLPECTMMSEELRELRRVLRYRNMVVRTASRMKNKISGLLMEVGAVYDKRKLHGKKYFGQLLERVEDVPESVKDLLKLSRSSMELFEAVQKKLLKTLREDSLISKRVELLRSISGVGEVTALTWVLEIGDPKRFSNSRQAISYCGLCSAQHESAGKEHRGPISKKRNKYLQSMLIEAANLAPYWNPQLGILYEKELTRGNRNRATLAVARKLVIYMLAVDRRGEPFITEKESLVA

SEQ ID NO: 497296 - protein, 387 aa, unidentified
MVYCGIDVGKHDHHVCLLDEHGQRLQPDFAIANDRPGFDRLLQVLTPYAEQVHLGLEATGHYWLALYDMLTRAAYAVVVFNPLQVRAYRKVDLRKRKTDRVDAYWIADFLRFSHTAVRAAEVPLLVQLRELSRFRFRLVQQIGDAKRKIISILDRVFPEYERLFSDVFLQSSRRLLAEAVTAEEFAALDLSELVAQLQRVSRGHFGPAKAAEIQRVARHSVGVSFLTDAVHVEMQCLLAQMTLLEEQVQAVEGHLEILMAQLEQHLTTIPGIGLVSGAMLLAEIGDVQRFESLEKLVAYAGLDATVYRSGQFEGDRRHMSKRGSPYLRYALWQAAAAALLHNAELKAFYDKKRAEGKPHGVALGAVCRKLLGRVYVILRERRPYVVR

SEQ ID NO: 497297 - protein, 371 aa, unidentified
MNSIVYVGMDVHKEQYTLCCYSYDTDKVEYKQTIPSDYKLVLKYMEQIRSRYEGEVSFVCGYEAGCLGYSLYHQLKDHAVDCKILAPSTMAITNTHHVKTDKRDAANIARCLAFHTYSEVYVPNNDDNDVKEYIRMRDDQKLYLKKVKQQILAFVLRQGKRFEGGKTYWTIAHLKWLKTLELSDLQREALDEYLLTYEYLTEKISRFDERIEELASVERYEEKVKHMSCLLGIKTHTALSMIVEVGDFERFEKAPKFASFLGLVPSEDSSDTRVNRYSITKAGNSHLRRLLVEAAQSYTRGNVGHKSVALKQRQKGNPPEVIAYADKANERLRRRFYKMTLNKGVNRNVAATAIARELACFIWGMMTEHVS

SEQ ID NO: 497298 - protein, 341 aa, unidentified
MGQVSTIGLDLAKSIFQVHGADASGAVVVRNRLRRSQVRPFLAAQPPCTVAMEACGSAHYWAREIGMLGHAVRLIPPAYVKPFVKRQKNNATDAEAICEAAQRPTMRFVAPKSEQTQAAALVFRARDLLVRQRTQVINALRGHLFEFGIVVAKGPAHVPQLVQAVANPDEPLPEIARPVLQILIDTLHRLDEQIADLDREIVQRAKADETAHRLMTIPGIGPVTAVALTALAPPAQTFRRGRDFAAWMGLTPLQHSTGSKQKLGATSKMGERTLRRLLIIGASAVLRWAARHGAPAGSWIARMLACKPPMLVRVALANKMARMVWALMAKGGTYQAPAARA

SEQ ID NO: 497299 - protein, 434 aa, unidentified
MSHTLPSVSASSAPSASRIVIGIDPGLDQHGVVALHAGSCRPLDRRMVDNTIAGMQELVRRLHAWQSQSGEALTIALEEASSYGEALESFLSQEGFTPVVVSELKVARFKEAISADANDLIDAEAIARFVIVQPDLSRSAARQAIQGDVHGSQHQQLRQLSRRHTRWTNDRTAVCNELHAVLRRAWLADYQRFFSEIHGVAALAVWQRYPTPAEAAQADLREIAELIREGSHGRIPKEARERKAQDIQATARLMVIALGRKDPHRWTAWAEDIRMLARHLVHLNTAIQQTDRRMEEILKAIDSPLLSFKGMGPVTAGAIHGETLSLDRFAAADHFARYNGTAPREDSSGRQPRFVKNRRCNKRLRQAFLQLALNALKHQPASKAYHQSLAVRGITGQAARVRLARRLSDIVFAMLRDHRSYDLEYYMTRKQQVA

SEQ ID NO: 497300 - protein, 400 aa, unidentified
MRAVFGIDVSKASSEVVILVNSEKVHDYSMPNDAIGFSRLLKDLNTVSNPEIIFEATGVYSRRLQAFLEENGYAYTRLNPLEAKKQLDSLRVRKTDKIDAEKLAESQFILNRKPTYGQEEVYQNLRDLSRFYQNLTEDMVRTKNRLHKTLQVTFPELEQLLAAPTGEQYWNLVSSFPSKDFVLDLSPSELAEVIRQSTSKRISEKRVTLLSDKLTELAKQSYCAVKKTSPMIEEVKYYAQELLRLTKRRQVILDEMVNLAQPLPEYNILLSIPGIAETTATSIIGELGDVRRFQSANQINAFIGIDLRHYESGNFLAQEHITKRGNPYARKILFKCIHNIAAASHTNPCHIADFYEKRKRQSQTTSTKPHTIAAVHRLVRTMYYLITHNKLYDYNLTQSH

SEQ ID NO: 497301 - protein, 412 aa, unidentified
MTHPLLVGVDVHRKTNTISAMDASGREVAPRFTVENNRPGTAALAQKLNALAIAGGYDAILLAAEATGWYWWHFFRTLAEDPDLQHTPLTLYPFNARLTAHFKKTYADLDKTDAIDAFVVADRLRLGRDLPQPFAYDEPGLLLRFLTRHRFHLVHQLVREKAYFLAHLYLKASEYTHLKPFGDVFGATSRALIQGYPSIEELAAIPFDDLVEIIDQQGKRRFADPADNARQMQAVARNSYPLPQALQVPVNLILRQSLQQIAALKLQVQRTESAITEALQPWPHTLETVPGLGPVFSAGIIAEIGHLARFDYDQAKVAKFAGLRWHHSQSADFQAEETPLTHSGNRYLRYYFCEAANSVRMRDAEYRAYYERKFQEVRLHQHKRAIVLTARKLVRLVVRLLTTNQPYRPRRV

SEQ ID NO: 497302 - protein, 385 aa, unidentified
MTIRVQVSKFIPRDYDVFAGLDVDKKSMSVVFTDHADWQRALRMANSATPLLNYVRKHFAGQRVAFAYEAGPTGFGLHDELVRQAYTCVVVATSKVPRAPGERVKTNRLDSRKLAENLRGGQLQSIQVPTPVYRDLRHLVQLRDTHVRQLTASKLRIKSLLLFEGLPFPDPQEKWTARAMRELQTLPCSETVRFKLNDLLDTLHFHFQAAARTTKQIRQHCLDDPELQQSIELLLSLPGIGWIVASHLAARLGDPQQIKNGKQIAGFLGIVSSEHSTGEKDNRGEITRSGDSRLRNKLIQSAWTAIKKDPELRDFYRRIYQRHPKKVAARKAIVAVARKLTTRIYVVLKEQRPYVVRPDSSIAPLTAAETVGPRDRLDSAQNHQP

SEQ ID NO: 497303 - protein, 438 aa, unidentified
MSTLADVGLDVSQDDASVCFLLADGAEPVPRWTVPNTQPGADTLSITLAQLAQMHQIDQLRIGMEATGLLWWHLACHLKDTPVLAPFAPRIYALNPHLIKTFRANYGALPKTDRADAFLIAERIRFGRQLPSPFQLDARYAPLQRLTRFRCHLAQNLAREKSYFLSFLFLTFSTYGQIAPFGDPFGATSSAVLDEFTTEELAQQALEELAAYLQSKGRGHFASPATLAATLQRAARDSYRLDKVLQEPLRLVLGTTLATIRSLQTQLKTLDKTIAQELAAIPQTLASVPGLGPVWTAGLIAELGDITRFDDEAAIAQYAGLTWETRESGRFQAEDTDLTKHGNCYLRYYLVEAANSLRQHCPEYGRYYAAKYAETPKHPHQRALVLTARKLVRLIDVLLREGKRYMTPEERQLREDARPPHHARPARQRRSSLAPAVD

SEQ ID NO: 497304 - protein, 346 aa, unidentified
MKKVAYLAMDLHAKNFTLGQMDNDGYFRGNIEFPTSENNIIHVLKSIKAKEKYLTIEAGTLTYWAAQVANPFVNQVIVCDPRENALIYKNPYKKDKVDTRNLCRLLRLGELHHVYQPENDDRAIFKTSAQHYIDLRNQLIRFKLKIKAMYRLWGVINIFTDAVYSNSGRDKYLKQVKHLPIRSQLSRLYYLMDQTETMRKSALKSMKQLGRKYAEIRQFMKIPGIADISAHVFDAFIQTPHRFAKKNQLWKYCRLSVTDRSSDGKPLGFQRIDPSGIGELKALSYRAFMASMKSDNEVKRFYLNSLKRTHNQKHARLNTQRKILAVMYSIWRKRAVYQPELFAGSA

SEQ ID NO: 497305 - protein, 326 aa, unidentified
MLNEAGNRVWRGRCATDPTAIAAAVRRYAPMAARIGLETGPLTTWLWTALTAEGLPMVCLDARHAKKALDMKVNKTDANDAEGLAHLVRAGWYREVRVKGRSAMLAKALLGARSQLLNMSLALENQIRGILKTFGRIVPKGAGGLFDKNVRALITDDGEIAAVIMPLLQARQMARSKCAALDRRLIGSVQGDGTCRMLMTMPGIGPLTAVAYVAALEKPDNFKQSRAVGAWLGLTPRRFQSGEVDYEGHISRRGDCQLRALLYEAASVLLTRVRRDSVLRRWGLMLWKRLGFKRAATALARRMAVVLHAMWKSGTAFNPTLGAATP

SEQ ID NO: 497306 - protein, 403 aa, unidentified
MAGLACGLDVHFTFVTACLVTTGPKGKPKVEERRFPTNRKGLSDLREWLTDAGCEAVGMEATGVYWMPVYAALEGACTIVVGNPQHMKNARGHKTDRLDARWIAGQVRHGRIRSSFVPPPEFREARRLARCRRQLVEARTSIRNEIQRLLTEVGITLAGVVSDVFGTSGTSILKALSEGKCVRDELSSHLYSSLRKKDKMASIDAALEAPLPEVSRQLLAIHLRRIEALDGNIDEVEGLLFRHLAPHAAKLDLLQKIPGVSNLSAHLILAEIGVDMTVWPTDKKFSAWAGVAPGCNQTGGRSKRAAVRKGNPYLCTILMECAGGAVQKLDSHLRTKHRKLCARREPRIRGSQAQPALREGQTTNPPFPGQGTGTPWLQGRFGANRGCLLIGFIFSSYNLFSWQ

SEQ ID NO: 497307 - protein, 362 aa, unidentified
MAIVNSIVKNYTKIIAIDTAKNSFQVCVGRTDGEGKVKQYKFSRSKFHDGIVKLGVDGSAIVMEACATSHNWGRLFQKVGFTVLLVAPQHAKKYLKNTRMKNDANDAEAIYVCSLQHNTRFIKVKTLEDSAIASLHTNRHACVKNMVEAGNRMRGCAAEFGIVVAKGHSHIKDLLAIIDSPEKMATLNIPDIAQWNLTKLAETYRHAQKMLDEVTEMIVGYGETSALIQCAMSCPGIGPITASALVAKISDGSAFDNGRQLAAFLGLVPSQNSTGGKSTLGKISKTGDRYLRALLCQCAHSIIRFSEHRTKKCKNTQLDRFVMRLKANHKAGCNIAIALANKMARIVWALLKRGVKFETKVA

SEQ ID NO: 497308 - protein, 412 aa, unidentified
MDVIHPRCAGLDISKKDAKVCVRINGAGRRKTSETVTTFGATTRQIMSLRDHLAAQQVTCVVMEATSDYWKPFYYLLEDLPGVEVMLVNARHVKNLPGRKTDVADATWLAQLGAHGLVRGSFVPPEPVRQLRDLTRTRTAVTRERTREIQRLEKLLEDAGIKLSSVASDLTGVSGRAMLEALIAGQSDPAAMADLAKKRMRVKIPQLTEALHGRFTSHHAFLTRMHLNLIDQHTAAIEQLTDRIEVVIEPFRSFRDLICTIPGIGGRTADIIVAETGADMTRFPTAQHLASWAGTTPGNNESAGKVKSRRTRPGNPYLQGALGTAAMSISHTHGTYLAAKYRRIATRRGPLKANVAVQRALLVAIWNTAMTNTTYHDPGGDYFTRLNPQRARNNAVRQLEAMGYHVTLDKAS

SEQ ID NO: 497309 - protein, 422 aa, unidentified
MVLKGVPMALKIVYQICCGIDVHKTFVVACIASTNKQGVTTYKRHRFSTFTQGLKELLQWLLDNHCKDVCMESTGKYWIPIYNVLEKDCNIVLAHPKYVKAIRGKKTDKKDAKWIADLFKHDLVAGSFMPPADIRQLRDLMRYRFKLTCFMSSEKNRLQNCLTVSNIQLASVVSDTFGKSSQRILDKILENPDDTSFDIEPLIHGSMKKKLPELELAIDGFITPEQAGKLKVIKKHFEDLESRKAELEKLILALASPYQQELDLILTAPSFKNRFTAIGIISEIGVNMEAFPSAKHLCSWAGLTPTNNESAGKKKSVRVSKAGCYIKPLLVQCANSVVKSEKHPEIRNRYLRLRKRRGHKKAIIAIARMLLTALYNMLKNKEPYNAELYRKSDVLPVNREITIEQAILMAQFQGYKIKSAAE

SEQ ID NO: 497310 - protein, 419 aa, unidentified
MSFKILKNNCCGLDVHKTWIYACIGITDSLKRTEYKEARFSSFTKGLNELCDWLSKYNCTDVCMESTSKYWIPVFNVLEKNNIWVTLSHPKYTKPQKGNKTDRKDAKWICDLYMCGMVKPSFIPPADIRELRDLVRYRFKLTCMITGEKNRAHNCLTVSNLKLDDVFSDIFGKSSRSITEQILQHPGETFDVAPFVDGRCKTPVEEIQAAVDGAISKEQAVKLRQCLNHIDELEMHKAEIEREIFRLSDKYESVLSLIRTVPGFDKTPMTAIQVLSEIGGDMSVFPTAKNLVSWAGCCPRNDQSNHKIKSTRISRAGSYFKPVLVQVANALIKSKKHPEFTTRYRRIKARRGHKKAIIAICRMILTAIWHILTDLKPYTPEGFLESRPVNESKILTTSQALNLMKQRGYIIKDDVVPVT

SEQ ID NO: 497311 - protein, 353 aa, unidentified
MRIVVALDVHRRQITYKTLNRESGEVRRGRIVPATRGAVREWLEQFAGCEAEFALEGTTGWRFVVEEIERAGQRAHLADPAETAGKRGRKRRAKTDNADCDLQLKLLLAGELPESWIPPAYLLELRTRVRMRKVLIDQRTAWQQRLQAQLFHQGVAAGLKPRTRAGREALAQAELSPAGRELVALALRMLETIDRELAPLDRALRAFARRQPGCRALIANLYGVGAITATAILAELGDCRRFTSSDDAVRHSGLDVTVHQSDSKRAAGHLSHQGPELLRWALFEAAHQSARRSSPDHDYYLQVAGRIDHNRACLSVARKLCRRAHHILRELGDQALAPVESEPQAEEAIQAAA

SEQ ID NO: 497312 - protein, 459 aa, unidentified
MTGTRKSSGAGRIKLQPSRHAVAGIDVGSTEHWVCGPEQDDGEREVQRFGATTPELNRMLMWLQERGVESVAMESTYVYWIPAYELLEAAGIEAVLVNARTLKNVPGRKTDMADCQWLQLLHACGLLRGSFRPSGPLGRLRALTRERVSYVENQTRCVHHMQKALDQMNVLVHRAVTDMTGTTGMAIIRAIVAGERDPLRLAAMRDGRCGHSEEQIAQFLTGTWHEEHLFNLAMALRMYDHVSAIIVEYDTQLDVELKLLQPEERASEPCPSHPKLAKARKLKANGELALRETLWRATGVDLTSIDGIGPESARTILTEIGFDIAKFPTEKHFVSWLRLCPRVAVSGGKPLKKRANGMGASRLAAVFRSAAVAVRRSSTALGAAYRHQAARHSGSRAAFVIARKLATLVYRMLRFGAEYVDDGQAAYEARHQQRRLAGLTRNAAELGLALVPQQSMQPT

SEQ ID NO: 497313 - protein, 428 aa, unidentified
MNYNTQNAKIASITEKTLIVGIDVGSETHYARAFDWRNYEYSKKPLEFSNTESGFLTLKAWMEDIAEKHGKTAVIPGMEPTGHYWFALGKFLQDSGMKPVHVNPHHVKKSKELDDNNPNKNDRKDPKTIAALVNEGRFSYPYIPTGIYAEIRSLSNLRFQTQEELTRIKNRIARWFSIYFPEYKDVYVDLKAVSGRMVLKAAPLPEDIVKLGAEGVNQIWRNAKLRGAGMKRAKTLVSVAEHSIGSKEAPEAARIELKNLLNDMDVYAARLEELLRSIEEKLKEIPYIDKLMAIKGIGLVTVSGFIAEVGDIGRFDNPKQLQKLAGYAIVANDSGKHNGESRISYRGRKRLRYVLYEAAISLIGKNAEFREIHEYYRGRKENPLKKMQSVVAKACKVIRVFYAILTKGVDYDAEKLIGDIRRPQMQAA

SEQ ID NO: 497314 - protein, 367 aa, unidentified
MKKVSTAARKQSRNFSQQKLTIGLDLGDRSSCYCVLDETGSIVLEQRVATTPKALPAAFGAMPRSRIALETGMHSPWVSRLLSGLGHEVIVAHARNVRLIGESRRKDDRLDAQTLARLARIDPELLSPVKHRSAKAQADLTVIRARAGLVRARTALVNTARGLAKSYGERLRGCNVRNMNPEKAEGLSPELRAALQPLLAGLESLSEQIREYNERIENLAQESYPQVAVLKQIKGVGTLIALTFLLTLEDPHRFRKSRDVGCYLGLQPGRRNSGQSEPQMHISKEGDPYLRTLLVQGAQHILGPFGPDCDLRRWGLKLAERGGKSGKKRAIIATARKLAVLLHHLWVSGEVYDPLHNSSRVAIAAAA

SEQ ID NO: 497315 - protein, 381 aa, unidentified
MKKSIRYVGLDVHADTIAVAVAETTGEVRSMGTIPNSPEAVRKLVKRLGPEKTLHVCYEAGPTGYVLYWQLTQLGVACEVVAPTLVPVKAGDRVKTDRRDAEKLARCYRAGDLTAVWVPDAAHEALRDLVRGREAAKKDQTRARHRLSKMLLRQGRRHPERITPWTVTHMDWARRQKFEQPAQQAAFLDYVNEVDHAVERLERLDTALDTAVEAAPASMRAVIEALQALRGVAKVTATTVVAEVGRLSRFDHPTQLMGYSGAVPSEYTTGSKERKGAVTKTGNAHLRRVIVEASWAYRRGPQLSGPLRKRQEGLAPEIKEIAWKAQVRLCSRYRRLCAKGKPEPQAVTAVARELLGFIWAIGSRVEREYEAKHPQPSQKAA

SEQ ID NO: 497316 - protein, 335 aa, unidentified
MNQARMHIGVDVGKGSLDICYPNGNKEHIKNTKRCRAKLIKEAKRLGAIISFEATGPYEESLEVDCLSAGVPAVRLDAWKTRKYAESQGILEKTDAIDCEMIRDYAASLRLEKLHFVREMSEGYRRLKRASGVRRNLIKAKVLIANQLESVMDADIKASIVRLVDSIDRQIEKMDDACSAAIASDEKMNALSKRFEQVVGIGPVLINTVFATCPDIGSFTAKGIAKFAGVAPLENKSCTIKKKPKPRRGRRDLRNALYMAAVSACHSNHLLQSMYKGLLARGVPKRVALVALARHIIILMNYIAKYPDFNPAIDPKKAAILASPKRKPGRPRKNP

SEQ ID NO: 497317 - protein, 364 aa, unidentified
METVRFVGLDVHKDSVAIAVADSTGGEPGQLAVVPNDTAALIKRLCKLAPKRQLRCCYEAGPTGYGLCRDLRAAKIRCTVVAPSLVPRAPGERIKTDRRDAVKLARFLRSDDLTEVVLPDSSTEAMRDLERAREDAKNAERVVRHQLQKFLLRHGRRYPEKTSWTQAHLRWIESQHFEHEAQKRVLTDALRAVHLATARIEQLDKDIAELVESWSMKPLVDGLQALRGIQLLTAVTIAAEVGNLRRFERAPRFMAYVGAVPGERSSGERRHRTGITKTGNAHLRRVLVEAAWCNRFKPSSSRRLGRRQQGVSAEVRDIAWRAQNRLHSRYRRMLGRGACTQKTVVAMARELAGFVWAIGQVIEA

SEQ ID NO: 497318 - protein, 343 aa, unidentified
MDKIATIGLDIAKQVFQVHGPDAQGVTLFNRKLRRSEVRPFFEKLPPCIVAMEACGSAHYWGREISALGHEVRILPGQYVKPFVTRGKTDAGDALAISQAMRRPDIRSVRLKTATEQAAAMVLRTRVLFVRQRANAINALRGHLTEFGLVAGRGIPNVSKLAAAIPEKGDARIPPAARSVLDEILAEIEVLTSRIERIDRQIASEAKRDEDIRRLTAIPGVGALTASTIKAYVPDPAAFKSARHFSAWLGLTPKLNSSGGRLRSGRISKMGNPELRSLLYLGAVSVLIAARRRGTAWTWLRRLMDGRPLKVAAIAVANKTARIVWALLTKGGSYEAPGERAGA

SEQ ID NO: 497319 - protein, 350 aa, unidentified
MTQRNKPRDAAVFGIDIGKNTVHVVGLDGTGAPIQRATFRRDTLLQFFERAARTVIGMEACPGSQWLARKLKAFGHTVRIVPAKFVKPYVKSNKNDIIDAEAIAEAVTRPTMRFVEIRSPEQVDLQALHRVRDRLVAQRTRVICQMRAFCLEYGIAMHQGAGKFKADLPRVVADKENDLSPAMRRLLTELFDDVKNLEGRIKEVTGEIEDVAAADDTARRLMTVPGIGPLAATALLAAAGRGLQFRKARDMAAWIGLVPREYSTGGKTTLLGISKRGSSYLRRLLIHGARSCLLHLDRSRDRLGSWIDGLQSRMHNNKATVALAAKMARFAWVVITKPGATYERRGPVAA

SEQ ID NO: 497320 - protein, 353 aa, unidentified
MTIVVALDVHRRQITYKTLDRESGEVRRGRIVPATRGAVREWLEQFAGCEAEFALEGTTGWRFVVEEIERAGHRAHLADPAETAAKRGRKRRAKTDNADCDLQLKLLLAGELPESWIPPAHILELRTRVRMRKVLIDQRTAWQQRLQAQLFHQGVATGLKPRTRAGRETLALVELSPAGRELVALALRMLETIDRELVPLDRALRAFARRQRGCRALIANLYGVGAISATAILAELGDCRRFASSDAAVRHSGLDVTVHQSDTRRAAGHLSHEGPELLRWALFEAAHQSARRSSPDHDYYLQVAGRIDHNRACLSVARKLCRRAHHILRELGDQALAPVESEPQAEEAIPAAA

SEQ ID NO: 497321 - protein, 452 aa, unidentified
MAKRSKKRCEQLPILHPDAAGIDVSASELFVAVSADRDFQPVRSFPTFTRDLNALADWLQQCGIRSVAMESTSVYWIPVYQILESRGLDVCLVNAQHVKNVPGRKTDVSDCQWLQYLHSVGLLRDSFRPAGFICAIRSLWRHRSSLIQMAAEHVLHMQKALDQMNLQIHRVLNDITGMSGLRILNAILGGERDPVTLARLCHGGVKSSEDTIAKSLEGDYRPEHLFALRQSLAAFRYYQQLVVEVDQEIQRQLGTLKTATTAEPTVPKRTKASAYQRRRYEPKTFDLRGELYRIFGVDLTNVPGISAITAQTILCEIGTDVSRFRNASAFASWLGLCPENKISGGKVLYTKSRRVRSRVATALRMAANSLHHAKDYLGEFFRRITRKLGKPQAITATAHKLARIVYHLLGTREAYDESVFHRCDEEALKRAQFRLRRQAAQLGFQVIPLQNG

SEQ ID NO: 497322 - protein, 419 aa, unidentified
MFKIFRKNCCGLDVHKTWIYACIGITDARGLTEYKQARFSSFSKGLRDLAAWLVQHSCKEVCMESAGKFWIPVFNILEKTCWVTLAHPKYTKPQKGNKTDRKDAKWICDLFMCDMIKPSFIPPLDIRELRDLLRYRSKLINCMTGEKNRAQNCLTMSNLKLDDVFSDVFGKSASSITGYILDHPGEMFDVAPFIDRRCKTPIEEIQAAVDGSISREQAAKLRECLKHIEEMQAHIQRMEAEILRLSEKYTVALELIRTVPGFLSNPMTAISVIAEIGVDMSVFPTAKNLSSWAGCCPRNDQSGGKVKSTRISRAGAYLKPLLVQVANAIVKSDKHPEFKERYRRIKARRGHKKAVIAICRMFLTAIWNILSKLEPYDPKGFLAQLPPDKTRTLSKTQALNLLRSRGYLIEDDLPALVPI

SEQ ID NO: 497323 - protein, 344 aa, unidentified
MAEVTTIGLDIAKHVFHAHGADATGRAVFSKRITRGKLLDFFAAHPRCLVALEACGGAHHWGRELRAMGHEVRLIPPAYVKPFVKRHKNDAVDAEAICEAAQRPSMRFVAVKSEEQQAAALVFRTRDLAVKQRTQLANAIRGHLSEYGWVAPKGAAHLAMLADLLEDGEIGETLPEAARPMFAMMVDMLADLDKRIAALDKEITRRAREDEVARRLMTIPGIGPITATAIAAIVPPAETFAKGRDFAAWLGLVPKQASTGGKQKLGAISRMGERTLRRLLIIGASAVVLQVSKRGAPAGSWLEGMLARKPRMLVTVALANKMARTVWALLVKQEDYRAPVAAAA

SEQ ID NO: 497324 - protein, 432 aa, unidentified
MKITTHTRRVNPQHELLASFDVSKRSLNLFCHFPQGDTSVRLEDAMPNATAAIEETLRRLQALAQREGFQAVRVLCESTGGYERALLQSAHRLGCRTALVNPEHVCRLKKVESNDTGKTDHKDPRVIDLVARLGKTQRHRQLPETYQVLRRLTSFYDQEEKTLAAIRTRIEGLLVEVFPDYDKSATFTFDTTGRALFEAYGFNPYRIHRAGYRRFQTTIKRRVRFVRFATLEHLFACATESVRHGLPEPLVAVIEARLRALFTDLLRHEARRAAYKQEIETLGEHLKEQGALPKLDEVISGITLFNLARLLGQTGPLEDFPSKRALLRYAGLNLRERTSGQYRGQTRLSKKGRPLLRKVLGQTVFPVLRRDRLYGAYYHEKRQHGMKAHKAQVAVMRKFLGVLWAMARREAAFDLERFHRSESQYLRYLQAA

SEQ ID NO: 497325 - protein, 339 aa, unidentified
MREVSTIGLDLAKNVFQVHGVDAAGETVVRRVLRRARVLAYFAQLPPCLIGMEACATAHYWARELGKLGHRVKLIPPAYAKAYVRRNKNDAADAAAICEAVTRPSMRFVELKSEAQQAAAGIHKVREMLMKQRTMLINALRGLMAEFGIVVGAGTRHVGELTAILADPEEHRIPALLKDGLRRMAETLRGLERQLEGIDKQIVDWGRGNATCRHLITAPGYGPILSSAMAAIVVNPAVFRSGRDFSASLGLVPRQDSTGGKVKLGPISKRGNGYLRRLLVNGAMSVLNSKRAKQDPWLVKLLANKERKVAAVALANKMARIGWALMMRQEDFRATSAAA

SEQ ID NO: 497326 - protein, 558 aa, unidentified
MCLYTLVVSGGARRTRLITRETWRRLSYDVRRIRKARPTQRWCLMSPLVSVAPGVAASSLVTRVRHVIPFRRMFPNTASLFPDAPGSMEERSMKDNGRRRRHTPRKSPSVLERINPDVAGIDCGASEHFVAVPPDRDPHPVRSFRTFTPDLQQLADWLCACRVRTVVMEATGVYWIPVYELLEARGLDVQLVNAHHVKHVPGRKSDVSDCEWVRDLGSVGLLRRSFRPTDAIVALRGYVRHRQTLVESAATYVQRMQKALDQMNLQLTRVVTDITGQTGLRIVRAIVAGQRAPAQLAQHRDRRCHASAAEIAAALTGNYRPEHVFVLQQNLTLFDACQSHIAACDHAIETQLHEMLAMIPAPATPLPRPRVTRKAQHHDVSFDVRASLHHLTGGVDLTQIDGIAPVTALKLLAEIGTDMQRWPTEKHFTSWLTLAPKNNISGGRLLSARTQSSANRAAAMFRMAAMSLGRTQTALGAFYRRLAARIGKPQAITATARKLAILVYRVLKGDLVYRDPGADQYTAAQRRRVLRHLRRRAEAFGFTLIDRTTGEVLEPIVS

SEQ ID NO: 497327 - protein, 340 aa, unidentified
MTAHVCGIDIGKTVFHLICLSKEGQIVTKKRFTRKQLITHTVNMPACLIGMEACPGAHFLARVLRAQGHEVKLMPAEYVRPFVKSNKNDYVDAEAIAEAVQRPTMRFVPIKSEAQLDLQALHRVRDRWMGRRTAVINQIRGFLLEHGISIAVGPAHLKRHIPSILEDADNLLSSRMRALLVELRDEWEKLETQIEEIDREFAQAAKKEENCRRLLTIPGIGPLTATALTAAIGNGTAFHKSRDLAAWLGLVPRQHSTGGKSRLLGISKRGNPYLRRLFIHGGRAVVARVRRENHTFGSWLDHLEARSPRNVVVVAMANKLARIAWAVLTRGQVYCATACP

SEQ ID NO: 497328 - protein, 428 aa, unidentified
MHQRKNRPMKPWKEITHYAGFDWAKDHHSVIVVDATGQIVADFEFAHSQAGWEEFSKCLAPWPNLAVAIETCRGAAVDQLLQRQYTIYPVHPVAAKSYRERKAPSGTKTDHLDAWGLADALRTDGHGWNVLKPMDPMTEQLRLLCRDEIALIEQRTSLVNQLQQALTEYYPAALEAFEDWTDDFTWDFIIEFPTPELLVKAGRRRWEKFLHTHKLWRSQTVDKRLKLFSEADQFKASRAVIVAKSQLAISLCKLLRTLAQQLEDYRKQIEQLFEQHPDHNLFGSLPGAKKFLAPRLLAAIGSDPARYGDQSVLQCIAGTAPVQYQSGKVSLVRVRWACDKFLRYTVHLWADSFRKVSAWGQTYYAQKRKEGMSHACALRCLGQRLLKIVFRMISDKKPYDSELHGRNQQKHGSWVLKLNHQEAAATGA

SEQ ID NO: 497329 - protein, 394 aa, unidentified
MDHYIGIDNSSLDHKVQVIDENGNLNMSFTIPNTLEGFEDLNKKLGGLTNSKIGFELPHGPLVDYLHLKECHLYSLNPLKIKRFKESLKVSGNKNDEIDAHAIAEYLRSNSTHTRELAYNSSAIERLKNLSIIHTRLTQDRARHVNKLHFAVRQYFPLQDRLFGDFGCTVQLKMILKYPSFSSLRAAPDEEINEFLKEHKYRRQVYINKVVDKIRNHNQLISPEVEYAYQFEAACLCKMILILNEDLKRIEKEMNIIADSHSLGKCFKSLPGAGNILTCKLLALFGDNKDRFDNYNAVQCLFGTAPKNYQSGMYHKVIMRKACNKSARAVLYNYAFSSLRYSKWAREYYDKQRSKRKTHSVAVRALSNKWVKILFRIWKDEVLYQEDKIISSAA

SEQ ID NO: 497330 - protein, 345 aa, unidentified
MTMLADQVEFVIGVDTHKQAHTAAVVDRLGGVSETFEFPADPTGYHSVLARVEACGGSRVWGVEGTGSYGAGLTVFLQNAGEQVLEVERPGRSLRRNGAKSDAIDAIRAARQVLTSKHQIEPRRGGEREAVRVLLATRNSAVVARTKALNGLHALVVTAPQRLRTRLDGLTTTELARQASRLRLSADRPIEDQATVRAMRACARRALACDAEADELEAELGRILADQVPHLLAEPGVGPISAAAIYLAWSHRGRIRNDAAFAALAGVAPIPASSGQTTRHRLNRGGDRQLNRALHTITLSRLSCHPETRAYATRRLAEGKTSREIRRCLKRHLARRVYKLLENTP

SEQ ID NO: 497331 - protein, 414 aa, unidentified
MPETAYALYVGIDWGTVTHQVAVLDAQRVLLGERAIVHEAVALHALTEWLTQLAGGAPARVAVALEVPRGAVVDTLLERGFHVFALNPKQLDRFRDRYTVAGAKDDRRDAFVLATALATDRPAFRALAPEDPLIIELREWSRVEDELREEWGRLASRLREQLHRFYPQALALCPAADEGWFWALVGLAPTPAAALRLRRAAVMTLLRTHRIRRLTADQVLAALQNPPLRVAPGTVQAASAHVALLIPRLELVDRQRRDCARRLERLLDALATTGEHQGHRDVTILRSLPGVGRVVAATMLAEASRLLAARDYHGLRTQAGVAPVTRQSGKRLLVGMRYACNPRLRNALYYWGFISVRYDAHSRQHYQLLRGRGHSHGRALRGVVDRLLTVLMAMLAAQTTYDPARRSAMLALAP

SEQ ID NO: 497332 - protein, 334 aa, unidentified
MSATSQSHAAQNAHKDHNETYVGIDVSQDSLAVHVLPTNESFTAANSADGIKELVKRFQKIAPKLILFEATGGLERQLLTSLIAEGMAVVVLNPRQASALAKGLGQGAKTDHADAKMLAKIASLDEFPPRPVPSEDTMKMNDLVTRKQQLIDMQTMEKNRLHAAKQKKLAKKIIQSIEKIIDVFRKQIDEIDAEIQAMIAANDDWSEKDKTLRTVPGVGKKTAQVVISAVPELGDLTRKQIARLSGTAPMKRQSGKWTGESHIQGGRAHVRCALYMAAMNSIKKPNVFKSLYDRIRAQNKPYKVAIVAVMRKLITVLNAMIKTKTSWNEHGVRS

SEQ ID NO: 497333 - protein, 338 aa, unidentified
MGNVTTCGIDLAKNVFSVHAVDGAGAVVLRKTVTRTRLMALIAQLPPCLIGLEACSGAHDWARRFAQFGHQVRLMAPKFVAPYRRSGKNDSNDAEAICEAVGRPSMRFVPVKSVEQQAVLTLHRVRLGFVEERTATINRIRGLLAEFGVVMAQRAIEVRRHAASSLEGLPCQAARAVRDLLEHLQVLDSRVAEYERELAQHARRDEDAKRIQQLSGIGPISASALVASVADAHEFKNGRQFAAWLGLTPKQYSTGGKTRLGRITAHGDPYLRTLLIMGARSMLQTAMRRTDRLARWALSVRARRGYHRACVAIAAKHARIIWAMLAKNEPLRLARVEG

SEQ ID NO: 497334 - protein, 416 aa, unidentified
MDVVVARVAGLDVHKDTVMAAVRVPGANGKRTELLKEFSTFTGDLLRLREWLTECAVTEVTMEATGVYWRPVWHVLEDEGAFELRLVNARHVKNLPGRKTDVSDACWIAQLAECGLLRGSFVPPRVIAELRDLTRYRKKLVEEHTREVQRLQKVLEDACVKLDSVVTDVTGKAARNMIEALIAGERDPVLLAEMALTRMRPKIPELRRALVGRFNEHHAFLARMHLDRMDSLDEAVAKLDAEVDRVIAPFSDAVVRLQTIPGVGLRTAEVVVAECGIDMSRFPTAAHLASWAGLCPGNDESAGKRRSGRARKGNAALRSALCEAAWVGVRTRDTYINAQFRRFRRRFGAKSEGKALFAVAHTLVVIIWNVLATDQATYVDLGPDWFQQRDDTQAHVRRLVRQLERLGLSVDVKPAA

SEQ ID NO: 497335 - protein, 383 aa, unidentified
MRIVCGLDVHKDSIYLCILSSTGEILEQVFGVLTTQLEEMRDLMLKYNVQEVGMESTSVYWIPVWRVLESHFELKLINPYFIKQLPGRKSDVKDAQWIAECMMKELVRGSFVPPERIQQLRLYDRRIYDLNDEIIRKLAKLDAVIQRCNIRLSNYVSNTDSVSYKSVIDKICEGVTSPEELVKEIHGRIINRHGKETIIASLKGCITEVDIDIMTQLKAEIDLAELHKQKCLEKMQDICEKEYSEQLSNLQTIPGVKMRAVTSLIAEIGTDMSHFETANHLSSWAGLRPRNNQSNKTIKSRRITHGNRYLRRTIIQCAWGASRAKDYFFSRFSYYQTQVRKKNRMKVIVAISRKMLVCAWHILKENVAYKDFDNKILTSDTKG

SEQ ID NO: 497336 - protein, 371 aa, unidentified
MKSIIYIGMDVHKKTYSLCALLKETGEIIGETKIPADVSLIIKFIENAKKSVDSDDVQIKTGYEAGCLGYSLYWQLAEKGIECDILAPSTMHRSAKNKVVKNDRRDAKNIATNLANGTYKSVYVPTDEDVEIKEYIRMMHDFKIELKKVKQHINAFLLRFGHQYPAKSKWVPAHIKWLKELELSDMHREILDEYLSQLEILSEKIERFKHRLEELSQKETYNEKIGQLRCIKGIDTTAAMTMHAETSDFDRFPTANAFASYCGLTPGEDSSGESYHRLSITKQGNSMIRTTLIEAAQVLVRGTIGKKGKKVKSKQKDQDVKVIDYADKAVVRLQKKYHRMIFRGVKRNIAITAVARELACFVWGIETGHIS

SEQ ID NO: 497337 - protein, 341 aa, unidentified
MDITIVGLDLAKNVFQVHGINSAGDIIVRRRLRRARVCGFFAGLAPCLVGMEACGTAHFWARELVALGHEVKIIPPSYVKAYVRRGKNDAADAAAICEAVARPNMRFVPIKTEDQQAALMLHKARALLIRQQTMLVNALRAHMAELGMTAPQGRGKVENIIAVIEDDEDESIPTLARAALKPLVAQLRANEDATAALDAEIKAWHKGNAASQRLATIPGIGFLTASAIAATVPDPSFFRSGREFSAWLGLVPRQNSSGGKDRLGRISKQGNPYIRRLLVIGATSMLRYARAKTAPGADWVNGLLERRPARLVTVAMANKTARIAWALLSKGETYRAPIAAV

SEQ ID NO: 497338 - protein, 348 aa, unidentified
MTIVGGFDVHRAQITFDYLDTETGEVTRGEIQPATRSVLRTWFGRFAGHADVAFAVEGCTGWPFVVEEMVAAGIRPHLAEPADTATQRGRKKRAKTDRADARLQRELLCQGRLPESWIAPPHVLEVRTLVRLYVALMDERRTWQQRIQAQLFHQGVPALRGLLTEEGRARLSSAALSPAGRQLVDTALAMIDELGERVRPLRAQLQAIGRRQAGARSLTAHYGIGALCAAIIWAELGDPRRFRNSDQAVRFAGLDVTVWSSDGKRAAGHLARQGSAVLRWALFEAAQSAARASSPDHDYYLATADRLGGKRPALSVARKLIRRCYHTLRELGDEAWSTVGGSIEKQVA

SEQ ID NO: 497339 - protein, 343 aa, unidentified
MEHYVGLDVSLKLTSICVVNQTGSILQEGVVDSDPEAIALFVRSRAPGTVRIGIETGPTTTWLWSELKRLGLPVICIDARHAKAVLKMQINKSDRNDAAGIARIMQTGWFKEVHVKDLDSHAVRALLASRALLVKIKRDLENQVRGLLKNLGLVIGRAKFNVFATRAEELIEDRPELVAAIRPLLEARKAIEKQVADLDRKVHRLARHDVQVRRFMTVPGVGPITALCFKATINDPTRFKRSRSVGAYVGLTTRRHASGEIDWSGRISKCGDAMLRMYLFEAAGVLLTRVPKWSGLKAWGAKLTKRNGLRKAKVAVARKIAVILHRMWIDGTEFNWSTNKAPA

SEQ ID NO: 497340 - protein, 356 aa, unidentified
MPVAPTYPNGSYGVVIAIDPHKASWTAVVVGSGLTPVAALRVEVNRAGYRQLLRFAAKWPQARWAIEGAAGLGAPLTERLRAEGIAVIDVPAKLARRVRLLSTGHGRKNDQADALSVGIAAWSAPALRTVEVDEAIAALRALTEHRDDLVRTRTQLVNRLHAMLVKLVPSGLPRGLTAESAAETLRRIRPRDPLGRTLRRLAVELVGELRRIDRRIAEATQALSDAVAASGTTLTRLLGVGDVVAAKLLARTGPISRFPSAAAFASFCGVAPIEVSSGDVVRHRLSRAGDRQLNYALHVMAMTQIRHDSPGRAYYQRKRAAGKSHKEALRCLKRRLADVVYRTMIKDAVPSLPPAA

SEQ ID NO: 497341 - protein, 338 aa, unidentified
MKTHIGVDLHQRFCYLTAVDANGKVYKQAQVINEGAALRAWLRELPQPRQVVVEACGFWPAFERAVRPEAERVVMVHPLRVKAIASARLKNDRVDSKMLAHLSRADLLPEAWMADEQTQQLRKLTRLRIALTRQRATAKNQLQAVLHQEGFISPVTDVFGKQGRLWLGKLELSVAGRMVVDTWLQVVNHLDELIAQQTRALEQMAEQDARARWLQTVPGIGAYSAMVILAEVGNITRFDNKRALASYAGLTPSLRESAGKRKRGGIGHHGSATLRWIMLQVAQVAARHSSSARAWIAELRKRKPAQVAKIALARKLLTAVWAMLRHGVCFEESVFAGS

SEQ ID NO: 497342 - protein, 428 aa, unidentified
MKYYTSTTEYNCGIDLHARQMYVCVMNRQGKKLVHTNVLHNDFDYFLKLVEPYKHDLTVCCECMFGWYWLADACQQAGLTFVLAHALYVKAIHGGKNKNDRIDSEKLTHLLRSNLIPPAYVYPADKRPLRALLRQRLFYVWRRSELLARIYSHQLAHNRTPARQTRRVRDSWEQALLKAEEHPLRQIALQNDLAMIKHFDHQIFQLEEELQRQTKKAAGRDYELLKGVPGIGESLGLTILYEIGDVQRFPTVKDFLSYCRLVKGTVASAGKIKGLRGAKLGNPYLRWAFGEAAVIAKRDHYVVGPLSQRLEAQMGGNKFKSNTVVAIKLARAVYFMLKNKTVFDPERLVASMQKCLKPTRKVAAPLSQPDGDLRRLAAAVEKQLSPGRKQPARLTGCAKQARPLPAADQTCCAWSTPVCVGSASNPAL

SEQ ID NO: 497343 - protein, 417 aa, unidentified
MNTMTVNPYVAFVGIDWADTKHDVCIQAVDSIKREFAVVPHKIEEIDEWAQSLHKRFPGNIAVAIELSKGPIVYALQKYDYFVIFPIHPLTLAKYREAFQPSRAKDDPTDAELAVDLIIRHPERFKPLRPQGVEMRKLAALVEQRRGFVDDRVRITNRLRSTLKQYYPQALEWFGRIDTMLFCHFIERWPTLTQVKRARTTTLTDFFKAGKTRNPALLETRIASIRSSQHLTLDEAVIEPNKLQALMLIDMLRVILTGIKTYDKEIAELAPKHDDYDLFSSLPGAGPTLAPRLLVAFGEQRDRFKNAAEMQKYSGVAPVTQRSGNKHWVHWRWRCPTFVRQTFVEWAAQTINKSYWAGEYYRQQREKGSAHQSALRALAFKWIRILYRCWQSRTQYDEATYLKALARRGSPLIAKAA

SEQ ID NO: 497344 - protein, 401 aa, unidentified
MKRLSGGIDVGSESHHITILDEEDKVLYNEKVAHKLHEFAESIKLFKQIEKKEGGKISFALEGKNGYSAPFDRILLAQGFTLYNVDNLKLKRFREAFAGEWRDDQRDALMLSKMLKLKDHINSPREKVFIKIEKPSPVTESLKLLSRHQQTLIEEKVRLTNRLRKKLLEVCPEILKFAKLKNKKLIAILAKYPDFSKYKRMTLKSLLKIKGIGKRQAPFLLKRLNHIEYMPDLTDIYQTIILSYAQRILQLQKEIKDIDKKLDGIGNQSKEVKHLKTIPGVATKLASRFIGEIGNIDRFPPEKQLAIYGGIACVNNDSGKVTKAKAVYKANKICKQTLIAMAGCSIRFIPQCKFYYLKKRTEGKGHNHTLRCLARQLIKVIYKMLTEDRDYIIRKELKKVA

SEQ ID NO: 497345 - protein, 487 aa, unidentified
MEYIALGCDISKGRCDVAIINQSGTLLQGSGGYDDIRRDHERLRTVITELRESHPDAQILVGLEATGGLERNWLSFFRVEKRWEKFVLVHRLNPLMVKRYLESDLHRAVNDQSAARGIARFLLERMQKKVPTATTIDGNVTLHRWVRTQISRQVEAIQRLQTLLPVVHPDLVRYCRSGIPAWVLMLVEQYPTAIKLARARVDVVERIPHIDAARAGQVIAAAQTSVASLSDPGAEAAMRCLVEEIHGLDRSIEQGKATLTRLLAGDPRIGWLESIPGIGTWSAITLALEIGDVSRFPTARSLIAWAGLDPREDISGDGTVRHGISHRGNAQVRALLFMNALSAIVHNPTIASFFQRLTTGESAKPKKLALVACAAKILRIAYALLCSQRTFDPDHERNRAAQAAAARQDDRSASSGATASTTVVEAAPLNVDAPITAKEAKRRRKRSENAAAPCPKKCEVRPHAGSGAAAPPVSAPQAAAKRRVQIS

SEQ ID NO: 497346 - protein, 398 aa, unidentified
MRFAGIDIGGECHAVAVVNDNGVLLVRSTLFGEEAVGYQRLRELLGDPNDCLVAMEATGHYWRNLFAFLVGHGFKVALLNPLRTRRFAEEELERTKTDSVDALGIARFAAQKRPAPTPVSDEVTGELRELVRLRTRYVDQLSDRMRQLHRAVDLGFPEFTGHLRLNTLLATAILARYPTARSFARVSTRKLARLAYDGRHHVGEALARALIEGARVSVGSHHSEPYQLQVKYTCADIELLRGRVKQLEQDIERKLQDHEVGKLLTTIDGIGARTAACLIAELGDPSRFRDAAALACYVGVVPRLRQSGKCAFSGARGLPLGNARLRHRLWMPTLVAVRRNPWLRAHYDRLLAASKRPKVALVACMRKLLGAIYSVARNRRPFVLHLATAGHEQPVTAG

SEQ ID NO: 497347 - protein, 319 aa, unidentified
MSNNQSSVYVGIDVSKSQLDIAIGKDGEYWKANNDQLGIQRTIERLKTIQPELVIVESTGGLEIALITELFATGLPFALVQPKRVRDFARSIGLLAKTDKLDAHLLAQFGEAVKPPLSRLPGEAEQYLNALMVRRRQLLDMLVIENNHLATTRLSMRSEVEEHIAWMEKELKELDKKIDDQIQQTPHFKEKEKILRSAKGVGPVLCAKLLSGLPELGTINRKKIAALVGVAPFNDESGHRRGKRRTKGGREDVRNVLYMATISAARSNPVIKVFYKHLLNEGKLKKVALVACMRKFLTILNAMIRDMQPWKTNSVTIYP

SEQ ID NO: 497348 - protein, 428 aa, unidentified
MNDNEIIRHQQFCQLKEMIRGSDQHLIIGIDVAKEKHHAFMGTATGKSLLRRLIFENNLEGFCKLLTHAEAVKVQHGLSESVFGVEPTGNYHKPLGSYLVNANHQVVLVSGQAVKNNRILLDGRWDKHDTKCAANVADLISQGKCLFYDSPPEAIVELRSLLSLRKRLKKEEHSLRMRIRNSLLAKHFPEMDRYFGQCLSENLSIVYWCLDPKKIAQMDFGRFFQLVTTRECGLAQQRRLKAIWQVAAASIGVVVDRSSQFEAQVLVEKILQVQKEIKDTQQLIETISQQFSEYHLLLTIPGFGPYVASLVLAVIGDAWRFGSAKQVLKMAGFDLSAERSGKKSKEAVPVISKKGNAALRYGVYQAAFIASTRNIDFVEYYTNTLRGRERERGIKTKMRVKLAAKMLVMAWTLMKKKEEFNPDYLKQD

SEQ ID NO: 497349 - protein, 356 aa, unidentified
MYGLKHQKEKRSMDHFAGLDVSVKETSVCIVDDTGRIVREAKVASEPEALLSVLKNPAYHFKRIGLEAGPLSQWLFSALAEAGLPVICVETRHMRAVLKAQINKTDRNDARGMAQMMRAGLYRPVHVKTLCSQKLRMLLTHRKLLQSKAIAIDNDLRGTLRNFGLKVGMVGKVRFEARIKELVENLPDLAAMVEPLLIVRRTLREQFCVLHRRLLAIVRDDEVCRRLMTTPGVGPVVSLTYRATVDVPARFRKSKSVGAVFGLTCSKYQSGEVEWSGRISRCGDEMMRVMLYEAAQSMLRSNKWSWLKAWAMQIARRRGMKKAIVALARRLAVIMHRIWVDGTEFRWTREQASAAV

SEQ ID NO: 497350 - protein, 371 aa, unidentified
MKSIIYIGMDVHKKTYSLCALLKETGEIIGETKIPADVSLIIKFIENAKKSVDSDDVQIKTGYEAGCLGYSLYWQLAEKGIECDILAPSTMHRSAKNKVVKNDRRDAKNIATNLANGTYKSVYVPTDEDVEIKEYIRMMHDFKIELKKVKQHINAFLLRFGHHYPGKSKWIPAHIKWLKELELSDMYREILDEYLSQLEILTEKIERFKYRLEELSQKETYNEKIGQLRCIKGIDTTAAMTMHAETSDFDRFPTANAFASYCGLTPGEDSSGESYHRLGITKQGNSMIRTTLVEAAQVLVRGTIGKKGKKVKSKQKDQDVKVIDYADKAVIRLQKKYHRMIFRGVKRNIAITAVARELACFVWGIETGHIS

SEQ ID NO: 497351 - protein, 475 aa, unidentified
MISKRKTSNGKQTQLQRRRQKRTHPRQVTPQSMPVMEANAAGIDVGAREMYVAIPPDRDAERVRVFPTFTNDLEALADWLVEQGITTAAMESTGVYWIPLYQILEDHGIRVCLVNARHMKNVPGRRTDWHECQWLQYLHTVGLLRAAFRPESVVVAIRSVMRHRRRLVEAAGVHIRHVHKALTQMNLQIHHVINDITGVTGTAIIEAILAGQRDAAELAKLRQPEIHADEETMRKSLEGDWRREHLFALRQSWELYGTYVRSIEACDQEICEMLGEREPKVNPAKKPLPSETKRRTKRKHQRTGDFRFDVRTEAYKQFGVDVTRIPGLEGIALVLYSELGNDMSRWSSASQFASWTALCPDNDKSGGQVLWTGVRQVKNRAGQLFRQAANSLHHSQTRMGAYLRRMKAKLGAEAGITAAAHKIARVFYAVVKNQVEYDETTWHRQDLVRQQRFEAKIRRQARGLGFELVPIQPVD

SEQ ID NO: 497352 - protein, 414 aa, unidentified
MGLKIVYPICCGIDVHKTFVVACIASTDKGVTTYKRHRFSTYTKGLKELSQWLCEHNCKDVCMESTGKYWIPVFNVLEHSCTITLAHPKYVRAIQGKKTDKKDAKWIADLFKHDLVPGSFMPPLAIRQLRDLMRYRFKLTNFTSSEKNRFQNSLTVSNIQLGNVVSDTFGKSSMNIIDKLLEDPTDTNFDIEPLIHGSMDHKIPELKLAIDGFITPEQSGKLAVIKRHYENLNVRKSDLEKLILSLAEPYTEEINLILTVPSFKNTFSAIAVVSEIGVNMDVFPTAKHLCSWAGLTPTNNESAGKKKSVRVSRAGVYIKPLLVQCATAVVKSDKHPEIRNRYLRLKKRRGHKRAIIAIARMLLTAIYHILKKKEPYNPDLYQKADVLPVSREITVEQALSLAKSQGFRIKETVT

SEQ ID NO: 497353 - protein, 376 aa, unidentified
MEVGPRPMMHYRYIGLDVHRASISVATADADQPPTSYGTIPNEAGAVRKLMQRLGGAEVQLHVAYEAGPTGYVLYRQLHSLGIPCVVVAPSLVPVRSGDKVKTDRRDALKLARLLRTGDLTPVWVPDQEHEALRNLVRARADAKVDELRAKHRLSKFLLPQGAQPPPGVRNWTRRYFQWLPQLEFEHLADRLVCADYLAEVSAARERVKRLQAALKQCAQTTRQKTLIDALQAFRGIGFLSAVSIVAEAGDLRRFPTAAQFMAYTGAVPREASSGTRQHRGRITKTGNRALRHMLGEAAHHARHAPSLSDELKRRQKHVPRAVIDLTWRAQLRLHARYRHLCARLGPPKAIMAVARELAGFVWAVGQVVPEVASAA

SEQ ID NO: 497354 - protein, 364 aa, unidentified
MKKLTTAATNWIGKQERLTIGLDLGDRSSHYCVLDESGRIVTESKTATSPKAMEAVFGGMTRSRIALETGMHSPWVSRLLSQHGHEVIVAHARNVRLIGESRKKDDRLDAQTLARLARIDPELLCPVKHRSAKAQADLSLIRARAGLVRARTALVNTARGLAKSYGQWLRGCNVRNMNPEKAEALSPELQVALQPLLAGIEAVSEQIGEYNERIEKLAQESYPEVKLLKQVKGVGTLIALTFLLTLEDQHRFSKSRDVGCYLGLQPGRRNSGQSEPQMHISKEGDPYLRTLLVQGAQHILGPFGPDCDLRRWGLKLAERGGRNGKKRAIIATARKLAVLLHRLWVSGEVYEPLHNNRSATAVAA

SEQ ID NO: 497355 - protein, 338 aa, unidentified
MKLYGGIDLHSNNCVVVLVNEESGVVLRKRIDNDLSKMIALLEPFRNDITGLVVESTYNWYWLVDGLMESGFKVHLANTAAIQQYSGVKYTDDNSDARWLADMLRLNILPEGYIYPKTQRTARDLMRKRMQLVQQSTLNLQSIQGLYARHLNKKISANKVKQLTEQQVNLDFPASNVALAVTSNLVVMNCLQEQIKVLEKALNKELRLEPAFEQLTSIDGIGLILALTIMLETGDISRFSEVGDYASYCRCIGGAKYSNGKKKGYTNSKNGNKFLSWAFTEAANFSIRYNETIKRYYQRKMAKTNSIVAIKTVAHKLARACFYVLRDQTAFDVQKAFM

SEQ ID NO: 497356 - protein, 404 aa, unidentified
MIFIGIDWARSKHDFTAIDTEGNVLTRGTVPHDAQGFMKLGATIASLESTPQEVHVGVELHNGALLSWLLDQNYIVYAINPKSANRARDRHRPSGAKDDKLDAFVLADMARTDRNRLRPIRKDSAATRELRAWTRLRGRLVQQKTATSQRLRALLAEWAPRLSTLCDDFNRKWQRDLLELTPLHDHLKGLHGNRINAFCHAHRLRSKTVSRIRDTRMHPALVIPAGLHDAICAEILGLVESLNSLIARIDQAETEIDSCIQNHPDAEIFQSLPVKGTATVGTLLAAFGESREDAPHWRDLAACWGVAPVTVQSGKSRHVKRRRACDHTVNQALLFFSFKTAFTKGCWAQGYYQKKRDQGCDHYGTLRCLAQRWIKIIHRLWKDRILYSEQLHQRNLKLRGAVAA

SEQ ID NO: 497357 - protein, 424 aa, unidentified
MKLTYQTCCGVDVHKSFLVATIVKTTGGIEPSYQKKRFSTFNSSILEFKQWLLDNDCHDVCMESTGKYWVPVFNLLEDDINVVIANPKWVKAVKGNKDDTKDSKWIGDLFRLGLVKGSYIPCKIVRILREYTRYRYKLVSCRSSEKNRYQNTLTVCNVALDSVVSDIFGKSSMSIIDYLLEQSGTSINHEEIASKLLRSLKSKEDAVIESVEGYQMTDAQKYRVRLVRAHMDYITAEINDVDKMIENMIFSNPDFENAVQFLCTIPSVKRDSAITIISEIGTDMSQFGGSKRLCCWAGLTPGSNESAGKKKSVRITRAGVYLKPALVQCAHAAVKSDKSPYYKKKYESLVKRRGKKRAIIAIARMILTAIYQMLSTGEQWNPSDLYKIDMPVALVEKQKAKAIKQAKKLLQREGILPPDEPLAS

SEQ ID NO: 497358 - protein, 388 aa, unidentified
MTPTSGSLSHPITLDYENTLVLAIELSKASWVLAAQVPGLPRIKAKQTVEPRTEALLAAIDGYRARSRAAGRTIERVVAIYEAGWSGFWLARWLVRHGVETHVVQPSSVPVDRRARRAKSDGIDAELLLRTLLAWFRGEPRVCSMVPIPDEADEDERRRVREREDLVAERVSLVNRIGAVLATLGVRDYNPLRRDRRARLEALRTALGDSLPPHARARILRMLDRLELVCAQIAELERMRDAVLEEEAPDKAEGMIQQLAGLRGIGVQSATVLVREAFVREFANGKTLGSYAGLTPTPFSSGTTEREQGIGKAGNRRLRTVMIELAWLWQRYQPGSAQASWFRERVGGTGRRMRKVMVVAMARRLLIALWRFATQGVVPEGAVLNPAP

SEQ ID NO: 497359 - protein, 337 aa, unidentified
MEQVQHYVGIDLHRKRSVIVRRNDAGETLETVRIDNDPVALATELAKAGEHPEVILEATYGWYWAADVIEACGGNVHLAHPLGNNWGNRRVKNDERDATDLVDLLRMGRLAEGWVAPPPVRELRELIRYRGKLVHLRSNAKAQVHAVLAKEGVAVPMTDLFGVGGQRLLDEVELGKAYRIRVESLRDLIELADREIAMLEHELAPFFAGDLGFLAVQAIPGVGPVLAAIFVAEIGDISRFNSARHLCSWAGLTPTHRESDETVRRGHITKQGSRIVRWAAVEAVAHQRSDTPIRLHHRRVGERRGKQIGRVAAARKLLMLVYYGLRDGEIRCLAGTG

SEQ ID NO: 497360 - protein, 348 aa, unidentified
MKLHVLGIDLGKTVFHLVGLDSTGKAVIRKRCSRRQLLAFTANLQVQLIGMESCSGSHFLGRALRDQGHEVRLMPAQYVKPYVQTNKSDYIDAEAIAEAVQRPRMRFVPIKSEEQLDLQTLHRVRERWVMRRTAVVNQIRSLLLERGLTLPKGRRYVEEALPRILEDAELPLSGSFRLLLAQLKLELEQLSARIDQLDVVILERAKEDEACQRLTTIPGIGPVTATALIAAVGNGSAFGRGRDLAAWIGMVPGEHSSGGKQTLLGISKRGNSYLRRLFVQGARSVLQQRHRQAPALSSWLAQLLARKHQNVVIVALANKVVRMAWAVLCKGECYRAPVFAMSTLKIPV

SEQ ID NO: 497361 - protein, 320 aa, unidentified
MLYVGIDVAKNKHDVTVIYDTGRTVLKPITITNRKQGFELLHNTLKQLNQNCLIAMEDTGHYALNLLTFLHQKNYQIYTYNPLLIKEFTKSLSLRKTKTDKKDARTIALKLLSDPNRALFMHDNKQEELRIMTRHMNRLKKHQSDWKVQYTKCLDIIFPELHQVVSKHSDYIYELLKCFPSPEKMITAGFDKLIEIKRLTAKHALDILKLASNSIGTTSFAREFELVEIIENIQHYEKLIKQAEKKIDELMAEINSVITTIPGIGNRLGSVILAEIRNINTFTNPAQLQAFAGLEPSIYQSGQLDTWLLTSTLGAHTSCY

SEQ ID NO: 497362 - protein, 387 aa, unidentified
MIAVGIDVAKRTHEACFMGQDGQQVAKSRRFRNTQPGVRALLDDVQRLPEPVTIGLEATGHYWLALHDALIRAGHSVQVLNPLQTHAYRKTTVRKVKSDRKDAWLIADVVRIGRGRAAYVPDETILQLRELTRFRWGLVDQIGDAKRRALSILDRVFPEYEELFSDVFIKSSRALLQQAATAADFAEADLSELTAVLKKTSRGRLGLVKAEAVQAAARDSLGLAKLGGVAGFELRALLDQIAFVEHQVAAVEQQIEVLLGTIEQHVTDIKGIGPVLSASLVAEIGDVSRFPRLESLVAYTGIDPAVFSSGEFTATETHMSKRGSPYLRRALWLAAVSASRSNPDLAAYLQRRLDQGKPWGTAMGAVARKLLSRIYVILKHNRSYEVR

SEQ ID NO: 497363 - protein, 383 aa, unidentified
MRKIQETLQAQSTTDQDVMYIAFELSNSTWRLAFSDGNKKRHVTIKARDLKQLEREIEKAKRRFGLKDNVQIKSCYEAGRDGFWIHRYLLSKGIDNLVVDSSSIEVNRRKRRAKSDRLDAENLLRLLMRYHGNERQVWKVVTAPTVEEEDARHLHREIETLLRERIRYRNRIKALLVQHGLDVKNPSRKNFLKVLNTLRTWDGQALPESMKARVVREHERLKMIEDHIKLLKKEREQKVKSKETASLRQVAQLRGLCGIGVNSSWVFVMEFFGWRKFRNRREVAALAGLTPTPYDSGGSQREQGISKAGNKRIRTMAVEIAWCWLRFQPHSKLSRWFNERFASGGSRMRRIGIVALARKLLIVLWRYLEHGVIPEGAIIKNAS

SEQ ID NO: 497364 - protein, 400 aa, unidentified
MNLDTSRTPVGIDLAKDSIAVAISDGDSEVVRAFPLSREGLADLIRFLEPYGPFPDAFVFGLEASGPYTEPLLSWLIQRHARVLQLNPLLISRFRRAQSLRRTKTDAIDARTILHFIEQLPPAVQPYEPGDDLQALAAEYEQITQQVARLKTQIRQQVHALFPELAGSSSLFSQRILGLLLAFPSAHAIAKATPAQLEAACTDLPSGRRSRITAQSLYDSACASIGFSTRQREAVLQSKIRQLQHLVQESSIMRTALIRAVRAAHPTTWRLLLSIPGVGPISAALFLAQVRSLSRFPSHRQLSAFIGIDPTTYESGQFKGQGHISKRGSPHLRRTLYLMAQSVARYSNTFRLYMAQLRDRGKAYRVAVIACANKLLRVIMALNRSQNLFVDSPVQEVSHS

SEQ ID NO: 497365 - protein, 343 aa, unidentified
MRLYIAFDVHASSSVLGVVDEEGRRVFSKKVRNDPASVVQLVKRLEGEVAGVVVESTYNWYWIVDVLNAAGHQMHLANPSKVKKYEGLKHSDDRHDAFWLAEMLRLGVLPEGYIYPKEERPIRDLLRKRGHMVRLRTSLILGLESIITRNYGIRPRAKDLQATSEDRVSPLLEGDEYILFAGMRSKDAIDNLTKNIKEIERAVRDRIQLREEYKKLLTMMGVGEILAATIMLETGPISRFPRVGNYVSYCRKVPTMWLSDGKKKGKGNRKNGNRYLSWAWSEAGNAARRHYLCARRYFDRKAQKTNIMVAHNALDHKMARAGYYVIRDGVDFDAERVFGRLGR

SEQ ID NO: 497366 - protein, 410 aa, unidentified
MEAIVECCAGLDVHQATVVACLNRGPAGKRSSKEIRTYGTTCQELREMRDWLKESGCSLVAMESTGVYWKPVHAELEGHFELIVGNAHHIKNVPGRKTDVKNCDWISDLARHGLISNSFVPPRPIRELRDLTRYRRKLVEAQAAERNRLIKLLESASIKLSGVVSDVFGVSGRAMLRALIEGEQSPVDMAQLARGRMRRKQPELARALDGHVNEHHRFMLRLQLQRITAAEADLAQLDERLSEKLAPYDEELGRLMQIPGVDWVTAGALIAEIGVDMGVFHGAAHLAAWAGLCPGNHESAGRQRSGKTRKGNVWLKTAMVTAAIAAGKTRHSYFAAKYRRLTARRGKMRAAVAIAHKILVAAYHMLAQRSDYRELGADYLDQLHHHRTAINLTNRLRAMGYDVQIAPKAA

SEQ ID NO: 497367 - protein, 413 aa, unidentified
MEPLDDVFKTPCAGIDVHKKEMSVCVDWWGADGKLKREVRSYDTKRKSVRAMGVWFKERGVTHAALESTANYWRPVFDQLETICVVVLLNPYFVKQMPGRKTDVADCIWIATLLRKGLLRASFIPPREIRDLRDLTRLRTVRIEHAVKVGNELRQCLEKAHIKLDSVVSDLLGVSGRAMIRAMIEGETNPEVLANLAQRRMRGKIPELRAALDGRLNDHYRFLMRQHWDLLETLEKQVGKLEQQIEQRVIPFDWAVRLLMTAPGIKKIAAATILAEIGDNMDCFETARHLTSWAGVCPGNNRSAGRSRSGHNPRGNRYIKGILVQVALAASRTKQAYAHALYQRIARHRGKKRALLALANSLLQAIWYMLKHRQEYKELGVNYYKEQNREQLTKALVKRLEQLGHQVSLRQVA

SEQ ID NO: 497368 - protein, 415 aa, unidentified
MTEQQWYAGVDWASESHHVFLTDGTGRKIGEKIFKHSGEGLAEMAAWLLTASGAASSSQIYVAIETPHGPVVETLIERGFTIHAINPKQMDRFRDRFTLAGAKDDSRDAEVMASALRTDPYCFRLLAALDPTVIELREWSRIASDLGTERNRLTNRLREQLWRYFPAMLELESDLGAPWLLDLWELAPTPGKAARIREGTVAKLLKRHRIRRFDAAHVLNVLRKPAVQVAGGTVEAASAHIKTLVARIRLVNGQVKEAHGRLDALTARLIPVEDAGAGQQKQHDVEILASLPGVGRIVLATLLAEAWDGLKRRDYAALRSLTGVAPVTKKSGKSCIVIRRQACSNRLANVMYHWARVAIQFDTASKAKYATLRGRGHSHGRALRSVADRLLNVACAMLKNGTLFNPSLKAQMTPC

SEQ ID NO: 497369 - protein, 347 aa, unidentified
MTIVEAPPGITGGVDTHLDTHVAAALDPLGRLVGTESFDADAAGYKALLVWLEDFGEVTKVGVEGTGSYGVGLTRFLRRKGIEVVEVNRPNRQSRRNQGKSDTLDAVEAARAAISGRASGVGKTKDGPVEAIRVLVVAKRSARQARVKAIVQMRHLGFTAPDQLHSRLKGLSVTALVTEGARLRATTSADTVTAATKASLSSLAHRIQALDSEIAELNEEIESLLLATAPDLMARFGVGPDTAASLLVAAGDNPERLHSEAAWAHLCGVSPVPADSGKNAGHLRRHSGGDRQANSALWRIAMVRIAHDPETTQYFERRVREGRTKRDVIRILQRYIAREVYRYLPRG

SEQ ID NO: 497370 - protein, 354 aa, unidentified
MTSLTGLRDLVDIVVGVDTHTSTHTAAVIDAKTGGVLDDVTVPATATGYQELVEFVDSHSDARAWAIEGTSSHGCGLTRMLAERHELVVELDRPERASRRNGVKSDKTDAIRAAREALSRDRLGTPRATGDRQALAVLLAARRSAVQAAGDAARQLIAIVIAAPEPLRAQFAGATTAAKLSVAAQLHAEAGDDTETVSTIAALHALAARHRALTAEAAAHQQAIKAIVARWRPDLLEQHGVGPINAAVVLCAWSHPGRIHDEAAFAMLAGVAPIPASSGVTNRHRLNRYGDRRLNSALHMIATVRSRNHQPTLDYITRRTAAGKTKKEIRRCLKRYIARQLYRLLEHPTPATTT

SEQ ID NO: 497371 - protein, 358 aa, unidentified
MKYVGIDVHKKMCQAAVLDDDGKLLDELRFPNDAKGIEEFAGKLTSFSNEVRAVVESTGNLWIPIHDRLEERGIDVALSNPSKTKIISEAKVKTDRRDAKILASLLRADMLCTCYVPGEELRSRRELLRHRMNLVKTRTAVKNRIHGLLDKHGLRMPEATPFSTGNVEWLRGLSLGFMDDAILASDLALLEVLEAQVDAMEDKIAAVAAEDRSVRLLMTMTGIGYFTALLVLSEVGEVFRFRGDKEFASWMGLTPSVHQSGERAWMGSVCGPGNKRLRWAMVEAAQTAVRHDARLGAMYERLSRRRGNSCAIVAVAHEMARIMYFMLVRGEPYRESDVALTERKLKCLGKRAFDGLRN

SEQ ID NO: 497372 - protein, 369 aa, unidentified
MRVVVLELSARSWLVGARVPGIGRMSRYALAPSAEALAAWLGTAKARAGAAGRTVVRVVLAYEAGRDGFWLARYLEARGVEVYVIQPSSVLVDRRARRAKTDALDVEMLMRTLLAWLRGEPGVCSMVPIPDVAEEDGRRPVRERQGLIGERLALLNEIDGLLATFGITGYRPLRQDRRAQLAALRTPEGNPLATNAAARIGRILARLELVMQQIAELEQARDAVLAKEAASGEAETMIRGLARLKGIGAELATVLVWEAYVRSFPNRKALGAYAGLTGTPFASGSTTREQGISKAGNRRLRSSLVELAWLWLRYQPDSKLAAWFRSRTGSVGSRMRKVMIVALARKLLVALWRFCRDGVLPEGAALKAM

SEQ ID NO: 497373 - protein, 347 aa, unidentified
MRFYTNQHKFYCGIDLHTRSMYVCILDSAGEVLVHRNLPATPAHFLSVLRPYRDDVVVAVECIFTWYWLADICAAERIPFVLGHALYMKAIHGGKAKNDKIDAHKIAVLLRGGMIPMAYVYPAAMRATRDLLRRRTHLVRKRGELLAHIQNTNSQYNLPAFEKKIAYKGNREGLAERFVDPSVRLSVATDLTLIGHYDQLLRELELHILRHAKAHDVQAYMRLRTVPGIGEILALIILYEAHDIGRFPTVGDFVSYCRLVKCARESAGKRYGFSGKKIGNAHLKWAFSEAAVLFLRQHAEGQHFFRRLERKYGKPKALTVLAHKIARAVYFMLARQEAFDMHRFAQT

SEQ ID NO: 497374 - protein, 338 aa, unidentified
MYYTGIDLHKLTSYLTTVDSSGIIIKEADIKNVNHNFVQYFADLGNENITTVESTMTWYWLNDLLSSLNIPLVLAHAKYVKAIAYAKVKTDKVDSHTLAQLLRMDYIPVAHKISNDNRLLRDALRARLKIVQRHTSVTNSMHLLLAKYNLDSPDELDTIPRFQFDQLTEVEALLKEQMLDLEKQLYPFLIPNDEIQRLLWIPGIGKMNAFTILLEVDDINRFEDVKHFFSYCRLTPAARNSGGKSKQRSSKDGNRYLKVAFSDAAIHAVQYYPIIRNYNNSLIRRKNKNIARTIIAKEIAEIVYYVLKYKSDFNNKFKGKDLVTRKSFQWPRVVSPYA

SEQ ID NO: 497375 - protein, 369 aa, unidentified
MTVYIGVDLHKTQFTVHERTEETVESIEQIKQYPTTEVGYAAFLARITEYKIGGFTVKIGVESTGNTRFFKAQVEKVGAHVTVINTLKFKVINESTKKTDKHDASTISEFLSKDMLPESYLCSKETENLRRLLKSRGRLVHSIVGQKNEIHALLVSMGLQDESRSLQSKKGRQEVLDALSSRSDLVLEAQSVKLMIEIIEQMSQSVKLIEKQLSELTKDDEMVSRLMTIRGCGKITAWIIRSYTEDIGRFASAKKYAAFCGLVPWVQDSNETVRHGRITKRGPQELRTAYVQLVLGIRRCKDTSGWRIMQRLDYMKKNKGSGKSIVAAARKMAEIVWALLTGKQDFDSIKMMGRYKPMSLAEQALVAMN

SEQ ID NO: 497376 - protein, 342 aa, unidentified
MLEVSIIGLDIAKHVFQVHGADASGGAVLRRKIGRAKVLDFFKSQPQCVVALEACGSAHHWAREIAKLGHEVKLIPPAYVKPFVKRQKNDAADAEAICEAAQRPTMRFVAVKSEEQQASAILFRARDLLVRQRTQLINAVRGHMAEFGWIAPKGSWHRVALADLIQKDDTGLPEAARQVLALMLASLASLDGQIAELDQEIARRAREDEVARRLMTIPGIGPITATAIAALAPPAETFARGRDFSAWLGITPLQKSTGGKQRLGKISKMGERTIRRLLIIGSSAVVRQASRHGAPKGSWLEQMLARKPRMLVTVALANKMARIVWALLTRREDYRAPVAATA

SEQ ID NO: 497377 - protein, 432 aa, unidentified
MTRYVGIDLHKHLIVGHVVDPTGKKVDAFRFERVDPVTLEYIGRTRLKPEDQVVLEATTNCWAVVRALEPFAARVTVSNPMATKAIAKAKVKTDKIDAAVLAHLLRLGYLPEVWQPDQTTQVLREWTARRSRIIGQRTAVINRLRSTLAQRLLHCPHDMTSQAARDWIAGQTVDDDTRWLLESDLRLMDSLQAELDAMDKLLAKRGYVDPRVKLLMTLPGVSRQTAQALLAAIGDVSRFPDADSLASYLGLVPSTRQSASHCYHGHITKQGRCHTRCMLIQSAHAVRNHPGPLGYFFRRLSKRKPYNVAAVAVAHKLVLLAWHVLTKGEPYRYAVPQATEKKLRKLRIQATGERRRSGLAPGTKRPVNVPKGSQKIKSLPEVYASEQVPPARPAPAGELRHLRAVKLNDFAAGLQQPQIVARGRKQEEGDIE

SEQ ID NO: 497378 - protein, 391 aa, unidentified
MTFIVGIDIAKHKHECLVIDESGNSIVESFPFDNSVQGFDFFLLKMKSLPSPNKIKIGFESTGHYADNLKNFLIKSDYDFMEIHPVLINRYTKATTLRKTKTDKVDVKIICSYLNSVEYKSYSTKSYHTKNFKSLTRSRDSLVKERSLQLQRMTNVLDVMFPEFKPFFKGSLSSATARYILHNYGSPQKISNMNQSSYKKMCSELRRTISYAKFMSLKDLAKHTIGSSCELLEFQLQNYYVLYEHLNMMIKETDALILVEFEKETTYLDSIPGIGPITAATIISEIGSVDNFSNPAQLVAFAGLDPAFYQSGESEFTGRMVKRGSSFLRQAIMNSAQSSLVHNPQMYEYYLKKRSEGKAHRVALSHVAKKLIRIIFALETKRQTFNTEQMK

SEQ ID NO: 497379 - protein, 418 aa, unidentified
MGKINEYCAGIDVGKRFLLCCALTGAAHEEPQSQTQRFDATVPDLVHMRDWLTLKRITHVVMESTGSYWVPIFNILEGHFTILLANPEEVKNRKGHKTDRKDAEHLADLLRHDHIRASYIPPKPVRDLRDLTRRRLQLTQDASRERNRIEKLLEHVNVKIGNVLSDVFGVSGNSMLLALLDGELGVEQIAQLARGQAKQKITQLTEALEGHCMRDHERFLIRSSLRHLACLEEETEEMDGEILRRMQTPQFQEAFLLLQTIPGIGQLAAASILAETGTDLSPFPSAEKMASWAGLCPGNRESAGIRKGSQTTKGNPYLRSALVQSAWAATRKRGSIFQLRFRELAPRRGQKRAIVAIAHQMLTVLYFMLSNNAPFRGADTVPQKHRRLRRAHHHLKCLRRLGLTVEVSGSLEDAPTTG

SEQ ID NO: 497380 - protein, 411 aa, unidentified
MEVIYRRCAGLDIHKRSISGCVLIFVPGEEQPEIQKRTFGTFTAELVDLKEWLQSCGVTHVVMESTGVYWIPLWSLLEDSFALMLVNPRHFRAVPGRKTDQKDCEWLAQLLQYGLVRGSFVPPQDIRELRELTRYRVKLLGQRNQMHNRIEKLLQQANIKLSSVMTDILGVTGRSILMALLGGNQDPATLAECAKGTLRRKKAELARALQAHLTDHQRFMLREFLEDVEFVEGKIAHIEETIGARIAPHEEVLSRLNTIPGINQLTASTLVAELGVKMRQFPDANHLASWAGLCPGDCESAGKRKNTRTRQGNPHVRRVLCQAAWAAAHTKHTYLAALFYRIASKGGRKKALIAVARHLIVIAYHLIRAPLVYRDLGPNYFDTLHAERTKRRLVRRLEDLGHEVILNPKRP

SEQ ID NO: 497381 - protein, 410 aa, unidentified
MDVLYPNCTGLDIHKDTVVACSRRLIDGKVIRELRTFKTTTGELLALSEWLATLGATHIAMEATGVYWKPVWNILSDGDFELTLANAAHVKNVPGRKTDVNDATWLADLLAHGLIRASFVPDTQTQEQRGLLRTRKQLTRERTSHVQRLQKTLEEANIKIDSAISDVTGTSGRAMIEALIAGETDPLRLASLASSRIKASPETLGEALRGRVTRHHRFLLRLHLQQIDALDGAIAQIDKEVEANLAPFRELIPVLTTIPGIGELAARVLLAEIGADMSRFPTSGHLISWAGLCPKNDESAGKRRSTRMRKGAPWLKTTLIQCAWAAARKKGSYLQAQFHRLRARRGAKKAVGAVAASILTAAYHMIANGAFYKDLGAGHFERRAKPTQIKRLVAKIQSLGYQVEIKPLAA

SEQ ID NO: 497382 - protein, 433 aa, unidentified
MPTTHPYDLVIGLDRSDRKADLHLIDTRTGTVEKQTVATSPEALHDWLAQLRQDHPQDRVALCLEQPAANLIVFLETYSWINLYPINPISLQKFRETFVTSRAKDDGKDAQYLAELLLSHHDKLKPWQPDDSQTRQLQQLVLHRRAVVDQRTGLTNRLKALLKQYFPQALELCGEDLWRPLATAFLLKWPTLQSLKKARKPSLKQFYYLQGSRSQTLIDQRLERIDKAVPLTDEIALLQSYTLRVQLLCKELQLLLKTLEQFDQQIAKVFQQHPDRPIFEALPGAGPVLAPRLLASMGSERERFPQPGNLQCLSGVAPVTKQSGGKCCIHRRYLCPKFLKQSFHEYAKESILHSRWAAAYYGQQRNKGCGHHTAVRALAYKWQRIIWKCWQSRTLYKEAIYEAALKKNKSPLVSLLDQIELGKSPVKNGAKKS

SEQ ID NO: 497383 - protein, 360 aa, unidentified
MRKQSNTLNFEGQNIYVGIDVHLKSWTVSILSDHLHHKTFVQPPSPEALSSYLHAHFPNGNYLSAYEAGFSGFWAHYKLVEMGIQNIVVNPADVSTSQKERLQKTDAVDSRKIARSLRSNELTAIHVPCRETLEVRTLLRSRDALVRDLARMKQRIKAFLYYYGIDYPKEFQHSGTHWSRAFMNWLRNGIRMDTEEGGAGLSLLLDSVESQRRLLLEATRKLRALSRSDGYATDYELLRSVPGIGMITALSLLAELEDIRRFANSDRLAGYIGLVPTSHSTGEKDNKGEMTFRGQMQLRSKLIECAWFAARIDPALNMAFSKLTRRMEPNKAIVRIARKLLNRIFYVLKYKRRYKNETVE

SEQ ID NO: 497384 - protein, 371 aa, unidentified
MLESTAFVGLDTDKSGIDIAVAEGEIGGEVRYLGRIAATAAELSKAIHKVQERHPRLVVAYEAGPCGYGIHRRLNAMPGVTCHVVAPSLIPRRSGVRVKTNRRDAIALAKLHRAGELTAIWVPDAAHEAMRDLVRARGQAMADLTRQRQRIGGFLLRQEIGYAGKPWTKAHRLYLTGLVFAFPAQQRMWAELLTALDQAKARRDRLDQLIGEQIPDWSLAWLVEALIVLRGFQRLSAAIVVAEIGDVRRFSSPTQLMGFLGLTVSEDSTGEKRRQGGLTKTGNNRARKTLIEAAWTYARAAKPTDRQADGPTALVAIADKARHRLSLRYRTLRIAGKRQTVAIAAVARELAGFVWAIAHAAGSTTADQTAA

SEQ ID NO: 497385 - protein, 337 aa, unidentified
MAVASIAHAHVPVRIIVGVDTHKDSHVGHAKDGLGRDLGHLEVPTTARGYAALLAWAQGFGEVAAFGVEGTSSYGIGLARYLQGQGQLVLEVIRPGRQDRRFRGKSDPIDAEVAAAAVLSGKARHLPRASAAKVEMIRALRIARTSATKARTQAINAIKALVVMAPEAVREPLRELPTARLVATCARFRVGPIDDSTTAIKAGLRSLATRYQMLDAEAGLLERQIDQLTSATDPLLRSRFGVGPDTAAALLLAAGDNPARLRSDASFSMLCGSSPLPASSGQTKRHLLNRGGDRQAYAALYRIVMTRLRWHGQTKAYMRRRLNEGKSKTEVIRCLKR

SEQ ID NO: 497386 - protein, 353 aa, unidentified
MSQIPNTAIAVIGIDIGKNSFHVVGHDARGAIVLRQKWSRGQVEARLANIPPCLIGMEACVGAHHLSRKLASLGHDARLMPAKYVRPYSKGQKNDFNDAEAIAEAVQRPTMKFVATKTAEQLDLQALHRVRERLVSQRTGIINQIRAFMLERGIAVRQGIGFLRTELPTILATRTDTLSLRMLRVIEELAGDWRRLDQRIDGLSGEIEALARQDQACSRLMTVPGIGPIISSAMVAAIGTGDVFSSRDFGAWLGLVPKQISTGDRTILGKISRRGNRYLRVLFVQAAWVVLVRIKDWERYGLKSWIEAAKRRLHHNVLAIALANKLARIAWAVLAKGRAFELTRTDDAGVRPA

SEQ ID NO: 497387 - protein, 419 aa, unidentified
MQSQAPAAFAAFVGLDWADAKHEVCLQAAGTAQREFLSLEYSPEEINAWVQTLRTRFNGQPVAVCLELTKGPIVSALRTYDFLVLFPVNPLTVAKYREAFTPSRAKDDPTDAELQVEILLKHRDKLTPLRPQSPTMRALAQLVEHRRRLVGDKVRLTNRLTSALKNYFPQVLHWFPEKDTAIFCDFLSRWPTLKAAQLARRTTLEGFFRAHHVRSTDLIATRIEAIKSARALTTDDGVIAPNVLLVHALVAQLRVTLQAIADFDQAIAQRAQDHPDFPLFDALPGAGAVFAPRLLVAFGEQRERFTSADALQKYAGIAPVTERSGKKSWVHWRLQCPKFLRQTFVEWAAESTRHSFWAQVYYQQQREKGKAHQAAVRALAFKWIRILYRCWQNRTPYDESIYLQALNRRSAPLLHNLAK

SEQ ID NO: 497388 - protein, 350 aa, unidentified
MLIIGCDFHTRYQQIAMMDTETGELVERRLEHENGEARAFYASLPKPVVVGMEATGYAQWFERMLAEFGHELWIGHASEIRAGVVRKQKTDARDALHLLHLLLEKRFPRIWIPSPAERDTRQLLRHRHKLVCFRVSVKNQLHALAMSQGVCRKKKLFTARGREVLEKLSLGPWARRRCQELLGMLDQLNTVIDELDRAVQQQAESHAEAARLMRHPGVGPVTALAFVLTLGPVTRFRRSKHVVSYLGLNPKERSSGGKQRTSTISKQGNTMMRWLLVEAAQTAARYDPELLRLYQRLKFRRGANVAKVAIARKLAVKLYWMLRATASCAQRAPMQGSSRGTLVPQAGSSF

SEQ ID NO: 497389 - protein, 411 aa, unidentified
MEVMNKRCCGLDVHKESVVACLMVREGGKVHKEVRTFLTMTLDLVVLHDWLKAHQVTHVAMESTGIYWRPVFNLLEEDFTVLLVNAAHIKTVPGRKTDVKDCEWIADLLSHGLLRGSFIPPEPIRDLRDLTRYRKSLTDERVREVNRLQKFLEAANIKLSSVANDVMGASGRAMLEALTAGSTDPQVLSELAKGRLRKKLPELRKALEGRFRPHHRFMVGEILTHIDFLDEAIERISQEVSCRIVPFSKTVEVMDLVPGINQRAAEGIVSEIGVEMNCFPTDGHAASWAGLCPGNNESAGKRKSGKTRKGDRWLRRYLIEAAWAASRKKGSYLSALYHRLVVRRGKKKAIVAVAHRLLVIIYHLLKDQGSYRELGPDHFNKVNAAHVQRHHVKRLESLGFKVILEPVAKAA

SEQ ID NO: 497390 - protein, 323 aa, unidentified
MSELALVGIDLGKHTFHFPLSTFHFPLSTFHLHGQDVSGREMFRKKLSGVQMMRFFGNCPTCTVVMEACAGSHFVARELATMGHVTKLISPQFVRPFVKSNKNDFVDAEAICEAASRPSMRFVSPKTEAQQTLSVLHRMRESLVRDRTKTINQLHGFLLEFGISLPLGRTVIKRLPSVLAEHELPIRLRTLLQRLHAHFGYLDEQITQIDIQMAGQLADDDLGSRLLSMPVGPITASLLAVEMGDGKQFGCSRDFAASIGLVPRQYSTGGRSNLKGISTRGDKSLRCLLVQCARVYMQRLDSQKGACLIQTPDRFKQANHFTC

SEQ ID NO: 497391 - protein, 358 aa, unidentified
MAVNEGTRRIVGGVDTHKDLHVAAVVDEQDRVIETRSFATTRQGYRQMLAWMRAFGDLQHIGVESTGSYGAGLLRFMQQAGIAVLEVTTPDKQDRRRRGKNDDLDAQNAAHAAFAGQRTVTPRSRDGMIESLRVLMTCRKTAVSARRVALQMIHNTIVCAPDGLRDQLRSLTRMQLVRTLASWRPDLTAYRDLDSAYRIGLKSLARRYLELHDEIADLDVMIAAIVDELAPNLVARNSIGHIGAAQLLLTAGDNPERLRSEASFASLCGVSPVPASSGKTVRHRLNRGGDRAANSALHIIAIGRLRTDQRTKDYVTRRIAEGHSKLDAIRALKRYLAREVFTLITQRRREINATRIAA

SEQ ID NO: 497392 - protein, 345 aa, unidentified
MKKSTTIAIDLAKHSFQVCKLHGSSDEFNKAFTRDKLKAWLIQQPPTIVVMEACSTAHYWGRFCCNHGHSVRLIAQKYVTAYRTGQKTDKNDATAIAVASQQANARFVALKSIDEQALQSIDRIRQHLTDSMTATSNMVRSLLSEFGFIIPKGHSAFKRHIIEILEDGQNSLPDILREHVANAFHLHETLAKKRADLETSLTQHLKHHDACKKLEALEGVGPVNALGLYLSLGANGGNFKNGREASACIGLTPKQHSTGGRVTLLGISKKVGQKKLRSSLIQGALAVAKVVDKREPRNVKETWLKSLIQRAGLMKAAVALANKTTRTAWALLHYGSEYQAPLTYE

SEQ ID NO: 497393 - protein, 345 aa, unidentified
MELHTIGIDLGKTVFHLVGLDLRGEVVVCKKFSRTQLLRFTANIHVELIGMEACGGAHFLGRALREQRHQVRLIPAQYVKPYVKTNKSDYIDAEAIAEAVARPTMRFVPIKTDDQLDLQSLHRVRERWVMRRTAVINQIRGLLLERVITLRKGRRYVDAALPGILEDADAKLSGALRMLLAQLMLELDQLALRIDEADAVIQKTARENEACQRLVAIPGIGPVTATALIAAIGNGAAFHKGREFAAWMGVVPREHSTGGQQKLLGISKRGNSYLRRLFVQGARAVMQQRTKQSSGLSAWLAQLTSRTHRNVAAVALANKLARMAWAVLAKNEQYRPPVLADVAAA

SEQ ID NO: 497394 - protein, 408 aa, unidentified
MGQHGGEGRETALRHVWAGVDIGKGHHYAVVIDPDGVRLLSRRVINDEAALLELIGQVTGLADRVDWAVDVSTGGSALLLALLVAHGQRVFYISGNQVNRAADGYRGEGRTDAKDAAIIADQARMRRDLTPMRVDDELVVELRMLVARCCDLAGDRVRLVNRLHDQLLAISPALERVLDLANRGPLVLLTRVQAPAAIRQLGTSELAEWLRSQKVRSATELATKAARAVNSQHTTLPGDGLAAELVADMAKGVMSLDEQLKHTDKLIEGRFRRHRCAEVLLSMPGIGVLLGAEFLAATGGDMTAFASADHLAGYAGRVPTPHDSGQISGNPHRPRRYHRGLQRALYTSALVSIRCNSQSRTFYDRKRSEGKRHTQAVLALARRRVNVLWALLRDQRCFETTPPEAVAA

SEQ ID NO: 497395 - protein, 423 aa, unidentified
MMKLKYSICCGLDVHKNVIVATIVITNRDGVSEYRQKSFSTINSDIQKFHNWLIENNCYHVCMESTGKYWIPIFNYLEKDIEVCLTHPKYVKAIKGKKTDKKDSKWIADLYKFDLVRCSFIPPKDFRQLRELARYRFKLVCMKSSEKNRIQNCMTVSNVGIASVLSDPFGKTATEIMSYLLEHTADSIDEKAVRKLIKKGAKAKSDEIIEAIRGYNIETDQAKKLELARGHLEYLDNMITQTEVELYVRIKPYYEFVEFVSTMPGMTELSSTIVLAETGVDMNIFDDAKHLCSWCGLSPANNESAGKKKSVRIAKAGDYLKPMMVQCALAAVQNKKQPYFAIKYGRIKKRRGHKKAIIAIARMMMVCIYHMVSEKKPFTPTDYEDLMAPQNHVERVVLNENNVFAYLESLGYDSSKLVKRNDN

SEQ ID NO: 497396 - protein, 385 aa, unidentified
MIHVGMDVHIRNSVLNAKDADGQPLARGRSGNTVFDLGEFFTPLMRRAKETGESIRVVMESTSNSRAIQRLLTRLGKEAGIDLTADVLHARKLRVIAESVNKCDRVDADILTELSRSNFKLPTCYMPDDDEFALREHLRARADLVRIRTMVKNRVHAILHRRGILTPAGDLFGPRGDTFLDQLDLDQAGRITLDRFRTLIDQLDESIKQSTTCLRTVMREPRWSKPAALLQTMPGIGLITALTILAELGDISRFRSRAAVANYAGLVPRHRDSNDKRWSGHITRQGSAHLRGVLIEAAWMAAPRVPVYRALFDRVAQKKNKKTAIVAVARRMLEDAWMLLIKDEAFRYVPAFLGNAREVGTRMPASPEHRERRSRVSQAASSVAG

SEQ ID NO: 497397 - protein, 344 aa, unidentified
MKITRIGLDLAKNVFEVHGVDKRDQAVLRKRLTRAKLRSFFAQLPPCLVAMEACGSAHFWARELRALGHEVRLIDARFVIPYRKGGKNDGNDAEAICEAAGRPSMRFVPVKSCEQQAVLTMHRARSLLVGERTALCNHVRGLLAEFGIVAAQGRATLRRELPSVLEDAENALPDLAREVFAELYERLADLDQRVAEYDRRVAALAKSTPVAQRLMLVPGIGPLTATAILATVGHGRDFHNGRQFAAWLGLTPRQHSSAGKTRLGRITKRGDRYLRTLLVHGARSALIRSRSCEHGHLRWANAVRERRGFNKAVVALAAKHARIVWAMLARDEDFRALPLHSTAG

SEQ ID NO: 497398 - protein, 452 aa, unidentified
MGQGNNGLSRGDANRNARLAALRAVLPSDHAILGIDLAQSRQAAVLTNHDSRVLARWRPRCSPWQLDDLLERALRAALAAGFSGMTVACEPTGHRWMIVQQLAAGRGIPLVCVQPLVVARARESEDYTRGKNDDRDAVLIARQAAQLHCYLPERAGAVWARLRHLGVRRTQLIEESSACMQQVRDLLEVVWPAALSAAGEPLKSATWLACLAAALAGGDGDLAAVHAAGQHAFIDATRAGLGVWGTSRVCRRIAHAVYAVLLDRGGVLAQRPGALERVQAALRDWAIIRSELATVNTAMLSVLDQIGILDVADSVPGVSAISVAAILAETGDPARFSTARAMVKHAGLAPADNSSGNRGGEAKISRRGRPTLRLAAWRAVWGALRHNHVYAARHAQLTSRAIGKLTVQQANAAIAAALIRQIHAIVTRRVPWDADIAAGRRRPRQEVTAKAA

SEQ ID NO: 497399 - protein, 347 aa, unidentified
MLADQVDFVVGVDPHRDSHALAVVQVVGGAVVFETTVVANSDGYAQALALVEAHAAGRRAFAIEGTGSYGAGLTRFLAGRGEWVLEVGRLRRERRSGGKTDALDAVRAARSVLTQQRPATPRAGGERQGLQALVAAREGAVNAKRAGLCQLRDLLITTPEPLRGELRPLTRARLLQRLAATRPGGGRDPELRGSMLALRSVARRVLQLTAEERELAREIEALTRKLAPQLLDQPGVGPHAAAQLVLSWSHRGRIESEAAFARLAGAAPIPASSGQTVRYRLDRSGDRKLNRALHMILVTRKRSHPATIAYIERRVQEGKTRREANRCLKRYLARHLYRLLEHPPMTA

SEQ ID NO: 497400 - protein, 339 aa, unidentified
MQVTTIGLDLAKNIFQVHGIDGHGEVAFNRALRRAQVLAFFERLEPCLVGIEACGTSHHWARELIKLGHNVKLIPPAYVKPYVKRGKSDAVDAAAICEAVTRPTMRFVEVKTPEQQAILAVHRTRDLVVRQRTQTINMLRAQLAEFGIILPQGVYHPLRFARGCANGEQTDLPNDAREVVVDLCDQLLFLHAKILRLTRQMTQIAKREERVALLRTIPGVGPITASAIIATVGSGEQFNNGREFAAWLGLTPINRSSGGKERLGHISKMGDQYIRRLLVLGMTSRIRSIRSEPERFDPWFADILSRKPSRVAAVAMANKTARMIWAVLIRNEPYKVRTV

SEQ ID NO: 497401 - protein, 406 aa, unidentified
MNYLGIDVSKSTSRYVLLDNDGEKSTKPFTLENNQQAFTQLLDRLKELNLQPDNLLIGIEATGIWWENIYCFMTEQKFKVIVLNPHQTNKFREALRLKAKTDDIDAYVIAGLLRSGEYAASYIPEETIQILREIVKLRHQLVTNRQSFERQAQALLGLLFPEYEKTAIKNPFSVASLAILKAYPTAKHLAETKSKNIEKIVRHIKGNNFNIAEIQALIETAQNSIYSGRAKDARGMNLNILLTHVETLHHSIAQLDKRMDDILSPQSSDDAMSFPGANLLSIPGVGPKTLAAILSVVGADGSAYPDGKSFIGYIGFFPQIYESGETRHDNIISRRGPNYIRRALYISAVACLKHNAEFKALYDRKVSQGKTAKQALICIAKKLTHLCLSMLKSGESYNPSRVFMPA

SEQ ID NO: 497402 - protein, 273 aa, unidentified
MAVAVAGDDPHVIGAVRNTPGDIRRVLGRLQAKGRLEVVYEAGPCGYGIYRLCEQLGIECMVAAPTLIPHAAGERRRKTDKRDALKLCRLLRSGDLTPVWVPDPSSEALRDLVRAREDALEDRQRIRHRIKKLLLRQGHRLPVKMGSWSRQYRRWLSEVSFEDVNQKAVWEEYLGSLDEVEARLKRYAATMHEAAQTHPQMALIAALQMLKGVAELSAVTVVAEVGDLTRFAKPSQLFSYAGLVSSEYSSGAQHHPKRIDHQGRQCSSARGAR

SEQ ID NO: 497403 - protein, 324 aa, unidentified
MEVEAVYVGIDVSKARLDVAVWPGAERFSVGNDPRGIAELVEKVVALTPQAVVLEATGGLETLAASELHAAELTVAVVNPRQVREFARSLGRMGKTDRLDALVLAQFAQSAHSNERLPKLRLRDEAEAELKALVTRRRQLVAMLTAESNRRERAPKVIRRSIVASIRALKRSIAEIEQQVREVMSDSPVQQAKAVLLAAVPGVGPQLTATLLAELPELGNLGRRKIASLVGVAPHPHESGKFYGRRRCWGGRATVRTTLYMAALSGVRFNPALRACYQGLLGRGKSRKLALVACMRKLLLILNAILRDSASWNPHHQLDFQHSR

SEQ ID NO: 497404 - protein, 354 aa, unidentified
MTSTKYIGMDVHKESISIAVMNAAGKIVMECVIETKANMILQCIDGLRGDLHVTFEEGTSAAWLYDLLKPHVTELIVCDPRKNASMREDNQNDKIDARRLAELLRIDHLSPVYHGEHGLRTLKELVRSYLTVTKDLVRVKTRVKAIYRSWAIPCNGKEVYAACHRAEWLEKIKELGVRRRAEFYYQQLDALRVLRQGVRRELLAESKKQKAWKRLCQIPAIGPIRAAVLLGILQTPHRFRTKRPLWKYSGLAIETCSSADHRSIHGQLQRSKKNSVRGLNQNCNHDLKNLFKGAAVIASSKPGPFQKFYAALLAKGMRPEMARLTLARKIATIVLIVWKKGVCFDAQHLKPQTA

SEQ ID NO: 497405 - protein, 370 aa, unidentified
MLDTTTFVGLDVHARSIKAVSLDVMTGEVRCATFGYDAGAVAEWVRSMDPRARCVYESGVTGFDLQKRLSGLGVDCVVGAVSKMIKPSADRRRKNDRNDAEFLARMLSVGNVVEVWVPDDECEAARDLTRALEDARDDLSRSKQRLSKFLLRHGLIFDERTPTGRRKGNWTRAHWSWIESIRFAEGADNDVLAYYVDAVRRAAEEKARLEGLVEAEARKPRWRKRVDSLRCLKGVDTASAADLVFEAGEFSRFRNARSFAAWVGLTPSEHSSGESDRRGAITKAGNKHLRKALVEAAWHYLTCSGRPKDLAKGQAPDRVARRHAAKGVRRLVERREALLARGVHGNKANVATARELACWVWAVGLMAEEA

SEQ ID NO: 497406 - protein, 339 aa, unidentified
MELYGAFDLHSNNNYLGIIDSNDNRIYKKKLPNDPQTILTALEPYKEDLTGIVVESTFNWYWLVDLLMDHDYSVHLANPSAVKKYEGLKYSDDNHDAFWLSHLLRLGILPEGYIYPKNERPIRDLLRKRSHLVKLRTSLILSLQGIISRNCGLKINAKQIKAVKENNISPLLVGDEDLELSGSVSKEVIDFLSLKIRKIENSIKKKVKLKKSFKYLQTISGVGDILSLTIMLETGSISRFPEVGDYVSYCRKVPTGWTSNGKSKGKGNKKNGNRYLAWAFSEAAEFARRFDENARAWYNRKSAKKNFMVAHSALSSKLARAAYYIMKNNVPFDPGKLFA

SEQ ID NO: 497407 - protein, 355 aa, unidentified
MTTQPHRVTGGVDTHTETHHAAALDHVGRLLGTREFRAGPAGYAELLEWLQSFGSIDQIGVEGTGCYGAGLTRFLRGHDHSVIEVNRPDRGSRRTRGKSDPLDAESAARRALAAEDHIIPKDTTTIVEAIRALRIARTGAVKSRTAAYNQLRNLTLTAPESLRETLRTKTLHRVALESARLRPDKSRLADPIQATKLAMRTTGHRVASLNTEIKALDRQLGQLVKRAAPRTLELVGVGTENAAQLLITAGGNPERLRSEASSAALCAASPIPASSGKTTRYRLNPAGDRDANRALYIITLVPMRYCPQTRAYIERRQAEGLSKREAIRCMKRYVARQTYHAIRADLATARALDDL

SEQ ID NO: 497408 - protein, 351 aa, unidentified
MMIIGCDFHPRFQQISFLSEETGECGQRRLMHTAEAEQYYRSLSGPRVRVGIEATGSYGWFRRLLSELGHELLVGDATQIRASNPRRQKTDKRDAEHILGLLVQDRFPAIWQPPAENEQLRQLLLHRSRLVRLRTRVTNQLDGMAKNEGFLVPGGWSGKRRKAIEALPLPGWYGERRKDLLGLLDRLEERIAPLDRAVSQAAANNAEACLLMTHPGVGPVVSLAYVLTIGNWQRFPRGKQVGSYLGLIPAEDSSSDKRRLGHISKQGNTLVRWLLVEAASTAQRYDPSWHRQYLRLSMTKHHGVAKVAIAHKLAVRLYWMLRSGEDYQHARERGSAARQSECPGGRETTAD

SEQ ID NO: 497409 - protein, 379 aa, unidentified
MTSENTVHIAIELSVSSWLVAARLPRGKKLQLHRVQGGDGAALLALITELRSRAGAKPGQSVEIACCFEAGRDGFWLQRLLAAHGFAAYVLEPTSVLVNRRARRAKTDRLDAEGMLRVLAAWLGGDRQVCSMVRVPTPEEEDAKRPHREREHLVQERQRIENRIEALLFCQGVRGRPSLRSWEDDIAALRTGDGRALPPLLRAELGRLRRRLVLVLELIREVEAERTLALAAAAAEDATSRKVTTLQRIRGVGPNFATVLVREVLYRPFANRRQLASYVGIAPMPYQSGNTDRDRRIGRAGNPRARTTLIQLAWLWLRYQPGSALATWFRARVGKLTGRTRRIAIVAMARRLLITLWRFVETGVLPEGIEIKAEAMLTA

SEQ ID NO: 497410 - protein, 345 aa, unidentified
MIIVGCDFHPSWEQVAWLDTETGETGEQKLVHSEGEAERFYRQLPAPALIGLEATGNCHWLQDRLAEMGHEVWIGDAAQIRASYVRKQKTDKRDAAHILQLLVEGRFPRLWVPDCEQRDLRQLLIHRQKLVEIRTRVKNGLQHLALNQGVQKKSRLWSRTGLEVLRALPLAPWASRRREDLLGLLWSLQEQITPLDRAVAEAAQHNPNARLLMTQPGVGPITALAFVLTIGDVGRFPRGKQVASYLGLIPRERSSAGRQKLGAITKQGNRMMRMLLVEAAHQAVRYDPEFRKQYWHRCHSMPKNVAQVAAARRLAVRLYWMLRTQKPHPEIVRIESSSRVPLVGE

SEQ ID NO: 497411 - protein, 371 aa, unidentified
MEYGAIDLHKKESQIRIVTESGQIIDQRIATTRDRFTHVFWGHPRMRILIEASTESEWVAQHLEQLGHEVIVADPNYGPMYGRRSRRIKTDRRDVAALTEACQHGTYRVAHRRSARQHTVQCQLNVRQELTQTRTRAISLARAITRGAGLRIRSGRTETFLARLAALELPDSMKGTLTPLRSVIEILDDELTTADEQFEAMVAADPIVKRLTTLPGIGPITASAFVAALDTVSRFEGAGQVTSYLGLVPREYSSGEKQRRGRIVRSAHPHLQSLLVQAAWRMSRSASAETAGLRAWAQAIAQRRGKKIAMVALARRLARILFAMWRDDTEYQANRIRTGGEASAKRALAPRESRPTESAASPSVSLTMVGT

SEQ ID NO: 497412 - protein, 448 aa, unidentified
MSQAPIDPEICSIHPDAAGIDIGAESHWVSVPPERDSEPVREFSCFTGDLHAMATWLKECGVTTVAMESTGVYWIPVFQILETSGLEVYLVNARRVKMVPGRKSDVLDCQWLRQLHSYGLLAASFRPKDEICALRSYIRHRERLTQNASTHIQRMQKALTEMNLHLKRVLSDVTGVTGMAIIRAIVAGERDPQQLAALKDPRAKRSKTEIAAALAGDYRTEQLFILTQELQLYDTYRQQIQRCDQQIEKVLSDLDSDDRAAPPLPPRPKGRKPSRNAPDFDLRAHLYRISGVDFTQIDGLESLTVQTILSEVGLDPTRFPTVKHFASWLGLSPGSRISGGKVLSAKTRKVINRAAKAFRMAAQSLTNSKTALGAFYRRLRSRIGPPKAITATAHKLARIFYRLWTTGDDYVDMGVDAYEQKYQQRTLKNLKRKARLIGFALVPQSEAS

SEQ ID NO: 497413 - protein, 466 aa, unidentified
MKKSEDTSKTRRRGVPMALQAIRPLVAGIDIGSRQHWACGPAREDGKPNVRMFGTTTAELHELVEWLASQDTESVAMESTSVYWIPLFELLQARGIEAVLVNARQMHNVPGRKTDFHDCQWIQLLHSCGLLRGSFRPGVEITAMRAIHRQLTNLVEERSRCVQWMQKALDQMNVQVHKAVTDLTGVTGMAILRAIVAGERDPVRLSAHRQPNCQKSPEEIARYLTGTWRDEHLFNLNFALQLYDAVEKMIASYEARLLETLAALQPEERKDALVPEHPNRTKQKAIKAHGQQPTQTGLFRLLGVDLTRIDGINVGAAKIILTEVGPDLSAFPSEDNFASWLKLCPYGPVTGGKPIKKKSKGFGANRVAEALRMAAVSLRYMKTALGAAYRRYARHHGADVAVFIMARRLAHLVYRMLRYGQDYIDIGEAAYESRFKAKRLAGLKEAARSMGYTLAHEPTAATAPAG

SEQ ID NO: 497414 - protein, 323 aa, unidentified
MQTNSTVAGWAGIDVSKEWVDVAVWRGERRIDVGRFARDKKGLGKMAKQLVQYAPEAVALEATGGYEVAVMAALTEACIAVVRLNPRRVRDFARAQGLLAKTDKIDAYVLALFGVRMRPAIRALPEPERVQLANWETRRQQVVEMRATERTRLQQVKHPELRKSLERTIAFLGKELARLDAQIDKCLQESQQLVEQAALLDTAPGVGPRTACVLTARVPELGAANRREIAALAGLAPIAQDSGKYQGKRRIQGGRAPVRAALYIAAWSATRVAGKLRDYYHHLIAQGKPRQLALIAVARKLLISLNEMMRKRQPWTENAVFSA

SEQ ID NO: 497415 - protein, 419 aa, unidentified
MIHPDAAGIDVGAKAHVVAVPCDRDERPVRTFQAFTPELHDLAAWLKRCAVRSVALESTGIYWISLYEVLEQHGFEIRVVNARHVKNVPGRTKTDVLDCQWIQKLHSFGLLNGSFRPDQQIRKLRTYMRLRDNLVVNSTQAVHHMQKALFEMNVQLSNVISDIVGETGLRIIEAIIAGERDPEQLAALCGTRIKASRQTVAKSLHGNWDEALLFCLQSALETYRFSQVKIQDCDGHIERHLAEFESRAQLPNSPKGLQAHLHRICGVDLTKIPGIKEQSAQIIISEVGLDMTKWNTEKQFSSFLGLCPNNSISGGKVLRRTTRKVYNRAADNLRLCAQSLTHSKSALGAKYRRLRARLGAPKAIVAMAHHLARLVYRMLRYGDKYVEKGIEHYEKKFRQQRIKWLKKEASSLNLQLVVV

SEQ ID NO: 497416 - protein, 342 aa, unidentified
MQITTIGLDIAKNVFQVHGIDAKEKIVARKQLRRSQVIAFFKTLPPCLIGMEACATAHYWARELVKLGHEVRLMPAKDVKAYVKRNKNDAADAEAICEAVRRPRMRFVQIKSPEQQGQLMQHRTRDLLIRQRTQIINALRAHLAEFGIVAAQGNAGVNELRVIVADERDTRLPIDARASVIVLAAQLEALECVIGAIEKRIKMQHRSNEASQRVETIPGIGVIGATAIVATVADPTIFRSGRDFAAWIGLVPRQDSTGGKQKLGPISKQGDRYLRRILVVGAIAVLRRAQENPGKYPWLTQLLARRPFKVVAVALANKMARTAWALLAHGGTYRAPELAEAA

SEQ ID NO: 497417 - protein, 385 aa, unidentified
MFYVGIDIAKNKHDMACIDKNGRVILRKFTFPNSHQGFIDLKTQLRQLSPVIDNVHIALESTGHYNYNLGRFLRQLGYTVFAYNPLIIKEFAKSQSLRKTKTDVKDALLIAHRLRSDVVSERYHVDDKIEALKELTRYQNRLIQARSRNKNLYVRLLDLVFPELHGIVGNLHNNFVYELLSKYPSPDKISRAHFKSLLKIKRLTADKALLIKEVAKQTIGKASSVHSLELIQLIGTIRHYDKQIEDVQKDIDKLMVELDSPITSITGISNRLGAIILAEIKTIHNFKTPAQLQAFAGLEPAIYQSGQMDSKGKMVKRGSTYLRYALIQAARILSIYSPHFKAYLRLKISQGKHYNVALSHVAKKLIRVIFHLLKTNQSFDETKLR

SEQ ID NO: 497418 - protein, 341 aa, unidentified
MKNKSFIGIDISKNVIDVSIFCEETPIKDFSHDVFNNSRKGFGEMCTWLKKNHVVLSDCLFGMEFTGSYSMELEKFLNARNYQFCMLSTHVVKHYPMGPKDKSDKIDSAKIADFLYRYNGTECVKPYKMPDKTMQRLKALMNERKFLVEQRTCFMNRRQLCTTKEDAQLYDGYIKKFSRDIDNIELEEQKLPATDDSLLATYKNLLTIPGVGFVNAINVIVITRNFTAFETARQYASYVGVAPHSHTSGTSVRWRPRPSARCDGQAKADLSMAATVAVQYDAELQSFYNRKLGGKQDSDTKRKALNAVKFKLVLRMFAIGKQNRKWEPLDSKSSNEKLAIS

SEQ ID NO: 497419 - protein, 339 aa, unidentified
MVLIGIDPHKGSHTAVAIDGHEERLGELRVRSSNQQCDQLREWASVFPERRWAIESAGGLGYLLAQQLVAAGEDVVDVPPTLSARVRVLGSGKAQKNDPNDALSTAIAALRGRRLRSVTLDDQVAIVRLLATRHHDLVAHHTQALCRLHAQLANLSAGGVSGRLSPKRAEVMLATITSSDGVVAARKEHCRALLDDVLRLRAAIAESKARIGVAVLASKTSVTDVYGVGPIVAAIIVGHTGNVTRFASRDHYASYNATAPIEASSGPTKRHRLNSRGNRQLNHAMHLAAVTQISRDTPGRVYYQRKIASGKSTKEAMRALKRQISDAVFRQLVADADRL

SEQ ID NO: 497420 - protein, 405 aa, unidentified
MKQSTGKALKGVEGVSGLAGVRRALETAERYGAYIGLDVHKETIAVGVAECGRDAPEYYGEILNRPKAVAKLIAKLSRRFGGERLLWVYEAGPCGYGLYRQLMASAHACEVVAPSLIPRKAGERVKTDRRDALSLARQSRSGELTAVWVPGEEQESIRDLTRGREDMKAIETQARQRLGAFLLRHGHVYESGKSKWTKRHFRWLETVKFDAPVQQLVFQEYIEAVKEAQRRVAGLEEQMRLALQGWSLRPVVEGLMALRGVSLVTAMTVLAELGDITRFDSPRQLMAYLGLVPSEHSSGNSRRQGGITKTGNGHVRRVLVEAGWNYRFPARKTRVIEQRAKQVSVPVQAIAWEAQKRLCARYRQLMEAGKLTKQVTTAVARELAGFIWAIACEVMGKSHGSRATA

SEQ ID NO: 497421 - protein, 433 aa, unidentified
MPTNHPYDLVIGLDRSDRKADLHLIDTRTANAQKMTVATSPEALHDWLARLRQDNPQERVAICLEQPAANLIVFLETYSWITLYPINPISLQKFREAFVTSRAKDDGKDAEYLAKLLLSHHDKLKAWQPDDSQTRQLQQLVSHRRALVDERTGLTNRLKALLKQYFPQALDLCGEDLWRPLATAFLLKWPTLQSLKRTRKESLKQFYYLQGSRSQKLIEQRLERIDKALPLSDEIALLQSYTLRVQLICKELQLLLKTIEQFEQQIAKIYQEHPDREIFEALPGAGPVLAPRLLASIGSERERFARPENLQSFSGVAPVTKQSGGKCYIHRRYMCPKFLRQSFHEYAKESILHSRWAAAYYGQQRNKGCGHHTAVRALAYKWQRIIWKCWQSHSVYKEEIYETALKKNRSPLVGLLDQVELGKYPVKTRAKKS

SEQ ID NO: 497422 - protein, 412 aa, unidentified
MDVFCGIDWAEDHHDIALANRDGKLLARRRISDDAAGLTALLDLLTEHGDTPDDPIAVAIETPRGLLVACLRATGRKVYHINPMSVARYRDRHTVTGGKSDPGDSFVLASVLRTDMDMHRPLPADSELAQAIAVLARAQQDAVWNRTQAHNKLRSHLREYYPGFLAAFADARSGIVRPEARTILAAAPTPAIAAQLTLTQLRALLKKAGRSRSIDAEATRLREAFRLPQMRHLSLVEQAMGKQALALLGQLNAACTAADDLERAVTESFNQHPDAGIITSFPGLGVLTGARVLAEIGDDRSRFQDARGLKAYAGAAPITRASGKSRSVTARRVKNNRLSAVGYIWAFTALTASPGARAHYDHRKDAGDRHAAAERNLFGRLLGCLHHCLATGHDYDETIAFPSTTKKLPQAA

SEQ ID NO: 497423 - protein, 342 aa, unidentified
MSEVTIIGIDLAKRVFHLHGARVDGSVVFRKKVSRAQLLAFFTQHPRCIVAMEACATAHGWGREFEKLGHDVRLIAPIYVKPFVKRQKNDAADAEAIVEAALRPTMRFVAVKTEDQQARAMLFRTRQIFVGQRTQMINALRGHLAEHGLVAARGPAHVKRLADALADEDTALPDGVRDLGQIYLDQIDGLTARIADLDAKMKRAAKDADLARRAQTMPGVGPVTALAIETFAPDMASFRRGRDFAAWLGLVPKQHSTGGKARLGKTSKMGQRDIRTLLVSGAMAVLQAVERFDTPNNGWLKRLLTRKPRMVAAIALANKMARGLWAMMTKQEDYRNPVAAMV

SEQ ID NO: 497424 - protein, 324 aa, unidentified
MEINLQVVGIDVSKATLAVCYPVQTRLQHAEVSNSKAGFEQLVRSCGAECLYVMEATGSYYLSLAYHLVEQGAQVAVVNPLVVRRFIQMHLGKGKSDRKDAQWLLRYGQQQTPKPWQPDDAVLVECRQLEQVSEQLIRQKTMTRNSLEALAQHPVVSPLAEQHLRQALNRLAEQIQVLEKELVGLLEQHYAREMPLLCSIPGIGRKTAAMLLLFAKGFTQVENYRQLTAKAGLCPREYSSGTSVRGKSRITRMGGGLIRSKLFMCSFSAKKANAACKALYDRLVAKGKNGKLALIAVCNKLLKQACAIVKSGIPYQPDFARISA

SEQ ID NO: 497425 - protein, 330 aa, unidentified
MSTTPLSWDGHLGIDIAAQTFDVALAVGGREVEAHFANDPDGFAALSRWLAGRGARRVRATMEATGRYGEALADYLHQAGHGVAVVNPARIAAYGQSRLRRAKTDRLDAKLILHFGQREQPALWTPPAPEMRELREVLRRLADLQAQQQQERNRLAAGNHSALVLADIRDNLAGLQARSERLKTAIAAHVRAHPALSDQERLLCSITGIGPLTAERLMAELPDIRHFTSPKQLVAYAGLAPNVHESGRSVRRRPGVSRQGHAQLRAWIFMPALVAIRHNPVMAAYYHRLCAAGKPKMVAVVAVMRKLLHIVFGVLKSKRPFDPAFGLLSA

SEQ ID NO: 497426 - protein, 428 aa, unidentified
MKFKQSHGQNQRIERITTSHLVVGIDIAKEAHAAQATNFRGIVVSKRHLTFSNAQDGFEKLQRWIHELQQKHCLEGLIIGMEPTGHYWFNLANWLVDKGIEVVLVNPVATKRNKENRDNCPSKSDPKDALVIADLVSRGYYYAYSPQAETFQRVRTLMANREFWVEESIRFQNRILRWLDIHFPEYTLVFPDWTCPRSLATLQEFPAPSDLQDLTADEVIERWRKHMKRAGGSRGIQKARQLIAQARRSVGSMTALSEAKQDLQRLLEDYQRIVDTLAQIEQEVQVLLDEIPMAKQLQTIKGLGPILIAAILAGAGDLRQYVHGRQLLRKAGLNLAESTSGKRKGQIVLSKRGDAMLRKYLYLAVLGLVGNNPVFQKWHEHNVTVKHMKKNRSIVKLIGKLTRILIGMVQNGETFCSEKASMALATAA

SEQ ID NO: 497427 - protein, 406 aa, unidentified
MELNPIYKSAIGLDVHQNQITATVIIEQNDGTIFTEVKTFGGFKKDRRALAEWAKSWSPDVVVMESTGIYWKSPYAALERVGIFALVVNARHIKKVPGRKTDVSDSQWLAILARCGLLSGSFIPPEVFRNLRLVARHRQNLVSMLAREKNRLHKILADGGVRLSAVVSDLHGQSARQMTECLLEGGTPEQALEFASSRLKASREELLDALEGELTDVHRFVLNEILTHIRDIEAQISRFDAELLMRLEPYHWAVNLIQTMPGIDQVGAAMLIVEIGVEMEAFGKADRLASWAGVCPGNNESAGKRKSSRTRKGNRYIRRLLCEMANAARRSECMFKSKYAGLVIRRGHKRSIIAVGHKLLKIIFILLSRKVPYCDSTVDYEALAVKRNAPRWIKALQRFGYVQITT

SEQ ID NO: 497428 - protein, 363 aa, unidentified
MSSTYFHILGQRGKEVNMEVTIGVDPHKGTNAVAVLNDREELLEYAVFATNRAGLRSLTRWAKRFGERRWAVEGASGLGRPVAQHLVAAGETVVDVPAKLSSRIRLLSVGNERKNDRVDAICVAVAALRGERLTEVGEEEGQATVLRMLSERRKDLIKERTRTLNRLHGLLRDLVPGGAPKNLSARKAALLLRGVRPRVDPALTRRRLAADLIGDVRRLDRGLSDLERRIREAIERASTNLIGLFGVGPVLAARIIGEVGTIARFPTKAHFASYTGTAPIEASSAEVVRHRLSRAGNRQLNHALHLVAICQVRHDTEGRTYYRRKLAEGKSEKEALRCLKRRISDAVFKHLYADLEGEISTAA

SEQ ID NO: 497429 - protein, 369 aa, unidentified
MNNGSTVVGLDVHKATVVAAVLPPGADRTRETVTIENSPKAVERLVTRLAARGPVAFVYEAGPCGYEVQRQLTGLGQPCAVVAPALTPVRPGDRVKTDRRDAEKLARLYRAGELTPIRIPTRAEEAARDVVRVREDVLADRLRARHRLGKFLLRQGRVYRETKAWGVAHRAWLRSQRFEWPALQQTFAAYLRALEDVEAHLAVLDQQVVDLAQQAPYRLLVQALRCLKGIDTLSAVTLAVEAQEFRRFPRARAFMSYTGAVSMERSSGGTVRRGSITKAGNAHLRRILVEAAWSARHGTGVSPALTARRKGCPAEVVRIAKKAQARLHRTFWRLTSRTKPAQVAVVAVARELAGFVWAIAHQVPEGGSA

SEQ ID NO: 497430 - protein, 371 aa, unidentified
MNSIVYVGMDVHKESYTLCCYTYERDKAEYIQKIPSDYRLILKYVNNMRSKYGEDAEFICGYEAGFLGYSLYHELMAHELKCIILAPTTMAITNKNKVKTDKRDAANIARCLAFRTYSQVYVPDQIDNEIKDYIRMRDDKKIMLKKVKQQILAYVLRTGKRFDEGKSYWTLIHLKWLKNLDLKGLAKETLEEYLITYEYLVDKIERLDERIEELSQAERYNEKVSKMQCLLGIKTHTALSIIVEVGDFERFEKASKFSAFLGLVPSESSSGDTINRFSITKAGNSHLRRLLVESAQAYTRGRIGHKSKALKARQRGNPSEIIAYADKANERLRRKFYKMTLSKGIKRNIATTAVARELSCFIWGMMTNNIA

SEQ ID NO: 497431 - protein, 460 aa, unidentified
MNPKRSKSRNGGKMPMVHPNAAAIDVGATMHMAAVRADRAPEPVRSFGTFTADLHRLVDWFTECGVETVVMESTSVYWIPIFELLDARGFTVFLVNARDAKHVPGRKTDVSDAQWLQRLHSFGLLRASFRPKGQIAELRAYVRQRERLLEYAASHIQHMQKALTEMNLQLHHVVADITGATGLRIIRAILAGERDPEALACLRHYSCHSSAEMIAKALTGSYRAEHLFALEQALALYDAYHEKASACDARIEAVLKELSIHRGHGHGPAPRASRRRNRTDQANALAFDVREALFALLGKDITTIDGLGPYLSLKLIAECGDDLSSWPSAKHFTSWLGLAPSNKVSGGKMLSSRTRRSGGRAAALLRLAAVTVGRTDTALGAFYRRLSARIGNAKAVTATARKIAVLFYNAVRYGMDYVDPGASSYETRYRTRVVNNLHRRAKAFGFVLQPLEPKVGAAVS

SEQ ID NO: 497432 - protein, 320 aa, unidentified
MSATSVVVGIDVAKAHVDVAVLGAVFETHRFANDVDGHLALAAALAPLGAVLVVMEATGGYEAALACALQAAGLVVAVVNPRQARDFAKSMGNLAKTDRIDARMLAEFAAVVARRDDLAHFIRPLANAEQQALAALVTRRRQLLTMLLGERQRLQLAMALVRPSIEAMIDAIRAQLDDVEAQMVAHVREHFAELDQLLQSASGIGPVASATMIAELPELGRLNRRQIAALVGVAPIANDSGNSRGRRRVQGGRFEIRRVLYMATLSAARHNPSIKAFYDRLLVAGKFPKVALVACMRKLLTTLNAMVRTHTPWDKSLHRA

SEQ ID NO: 497433 - protein, 355 aa, unidentified
MASRIWAGLDVGVETTSVCVINDVGDVLQQATCDSTLRCVNQEIRWLKRRRTARIGLEATAASLARGLRSLGYSVDMYETRQLSKFLRVRRNKTDAGDALGIAEAGRLGGSVVSKVYLKTLECQALQSRLIIRRHLIRQRLATVNLICRQVELFGGRVRRSATFWRMREQIEAELKRLFSKAADPLRSELRGLLDHCERLITDQSDLDRELKLIAMQNETCAKFMQIPGVGPICALMFCAVIGDPQRFGRSADVGSYLGLAPKIRQSGLTLRQGRISKMGNKALRSLLVHSSTLFMIHSEADCSLRDWATRVEQRRGRGKARVALARKLATIMLAMWKSGDIYRPTHIDRSTAND

SEQ ID NO: 497434 - protein, 428 aa, unidentified
MAEGVCAGVDWAKDAHEVFVADGDGQRLWAESVSHDEAGITKLCRTLVTLKVDRVAVERPDGLLVERLLDAGLTVIVMHPNQVAAARPRFRPAGGKTDRFDAFVLCELARTDSHRFRTLVPDSDQTKALRALTRGREVLVEQRVALCNQLRAELERFWPGATMIFADLDSPISLAFLARYPSPVDARGLAEKRLGQFLARHHYCGRRSASELLERLRDAPTSRAGDTEAEARRGIALALVAALRPIVEQIRLLTSEIAHTVRTHPDGEIFLSVFRDPKSVITAATLLAEIGDCRARYPTPEHLAADAGMSPVAVESGRKKVACFRRGCDHRLRDAPSTLADATRHWHPWAQDRYADARGRGHDHPRAIRTLGRAWCRVLWRCWQDSIPYDPARHHGLQQHCTITTPTPSGPQPDPTAAQPILENTLRG

SEQ ID NO: 497435 - protein, 314 aa, unidentified
MNPQPVFAGIDISKDRLDAFIRPQGESFSQPYTEQGVRLLIEWLVTFHLEVVLLEATGGYETQIAAALAHARLPVVVINPRQVRDFAKATGRLAKTDRIDAQVLAHFAEAIHPKPRLLADEEQRELGALMSRHCQLVEMSTMEKNRMHTTTRNVREQIQAHIEWLRGEIEKVDSQLDDFISQSPVFQRKVEIVKSVPGVGPTLSKALVSYLPELGVITRKEIAALAGVAPFSSDSGKHKGKRVIWGGRKHIRSLLYMGALVATRFNQTIRDFYQRLLAVGKCKKIALTACMRKLLTILNAMIRNDSLWSKNLQH

SEQ ID NO: 497436 - protein, 352 aa, unidentified
MQLYFVGLDVHKQVIAFCVKTAEGAIVKEGSIPATRSALEEWVKTLPGPWHGAMEATLFSHWIYRHLERHAVKLEMGHAARMKAICAGKKKSDKIDARTIADLLRTNLFPACFVIAPELGALRQQLRFRRLVVQETVMYKNKTAGLLMSAGVEYERRRLHGQRYFDSLVKDNEWIGQQLRPLLEFNRAQMTTLQAMDRRLKGMLARHPALESRIKALCQIDGVGPVTALSWALEAATPERFASIKHAMSYCGLTSALRESAGQQKRGPLSKQRNAHLQSALIETAKLAPMYNEKLKQVHRKATEKGGHRNRATLAVARKLVAYLMAADRAFFASQREDAADGATDRDVLTAA

SEQ ID NO: 497437 - protein, 372 aa, unidentified
MNSIVYVGMDVHASNYTLSCYTLTSDECFATVQMEPDVKNILTYLKKVQRNLGAPCEFRCGYEAGALGFSLYYQLQKHGIPCTVLAPSTMPTFHRNEIKTDRRDAMKIARCLAFGAFRPVHIPTKEDAAVKDFIRMRDDHKIALKKIKQQIQAFCMRYDLHFTEGRSYWTQKHLAWLKGLPLDDLLREVLDEYLVTLHQLADKIEHFDARIEELAQGERYAENVKKLSCLIGVRTHTALALVAETGDFRRFAKAEQYAAFLGLVPGERSSGDKQSRTGITKAGNTHLRRLLIEASQCYGRGKPGYKSRLLKERQQGNTSEDIAYADKANERLRRKFYRMVLRHNKKHNVAVTAVARELSCFIWGMMTGHTAI

SEQ ID NO: 497438 - protein, 414 aa, unidentified
MDVLHARCVGLDVHKKTVVATVIISPKESGKPLKATRTFGTMTGDLLALSDWLMSYDVTHAAMESTGEYWKPIYNILEDNFEVWLVNAQHIKAVPGRKTDVKDSEWIAELLRYGLIRASFVPPKGQRELRELTRMRSTFVKERANLVNRLHKVLESANIKLASVASDVNGVSGKAILQAMIAGGSTPEQMAELAQGRLRGKRDLLSRSLQGYVKPHHRFVLSELLLQIDGLDETIAKFDEEIREYCRPFEEAVELLDTIPGVARRTAEVIVSEIGVDMSRFPTADHLASWAGVAPGNNESTGKHLSGKTTKGNQALVSALTQAAHAASRVKNSYLHAQFHRLAGRRGKKKAIIAVAHSILIIAYHLIKDKEPYTDLGNDFFEKRNVQTTTRRMVRRLEHLGYKVNLEVLIPVTT

SEQ ID NO: 497439 - protein, 420 aa, unidentified
MKVVYQTCCGVDVHKSFLVATIIKTTSGVQPSYQKKRFSTFNNSILEFKKWLLDNSCRDVCMESTGKYWIPVFNLLEDELNVTIANPKWVKAVKGNKDDTKDSKWIGDLFRLGLVPGSYIPCKPIRILREFTRYRYKLTSCRSSEKNRFQNALTVCNVALDSVVSDIFGKSATSVINYLLEQSDNSINHEEISSRLLRSLKKKSESVIESIEGYQMTDAQKYRMRLVHAHMDYITSTISDIDSMIDSLVEPYENAVQLLCTIPGVDRSSAITIISEIGTDMTQFSNSKRLCCWAGLTPGNNESAGKKKSVRITRAGVYLKPALVQVAHAAVKSNKSPYYKAKYERIMKRRGKKRAIIAVARMILTAIYHMLSTGEAWNPTDLYQIDMPEPLKNKQKEKAVKQAMKLLIAEGLIKESQLVS

SEQ ID NO: 497440 - protein, 341 aa, unidentified
MRTLYVGMDIHKNFIQAAAMDQAGNIITEQQFKSNAKDIKRFVKSLKTQKIQAAIEATCTWYHVYETLDALGVKTTLVNMRRTKTIAESKIKTDKLDAKTIAQCLRTGFIATAYTPPKTIMEQRNILRHRMSLRKEITRYKNKIQAILLRNGIQHSDYSDLFGPGGMRFLRSITLPDSEQYSLTSYLNIIETLIHEKTQIAEKIETLCKNNHQAMLLTSIPGISYYSAMIILTEIGEIHRFPHPKKLCSYAGLVPRTIQSGDHVYHGRILKECNQNLKWILDQCTHIHIRHCPNSSITRLYYRVENKKGRNKAIVAASRKLLTCIWYMLMKDETFKYSNDD

SEQ ID NO: 497441 - protein, 422 aa, unidentified
MHNPLIVGVDVHRKANTACFMDSQGQELIPRFAFDNNRPGTETLVQHLINVVSTGNFDAIRIAVEATNWFWFLFLHSLSQHPALQEWPLSLYAFNPRLTANFKKTYSDLDHTDLNDAFVAADRLRLGRDLPTPFHCDDIYLPIRFLTRYRYHVVRNLAREKAYCQSTLYLKASEYTRKDGKKPYQDKRPFSNSFGATSRAVIQSFSSIEEIAALPFDDLVEFIDHHGKRRFADPSETARKLLQVAHNSYPLPESLQEPIQIILNLSLQHIAALERQLKRVATAIEQLIAPIPHTLNTIPGFGPVFSAGIISEIGDLSRFDGCVEAQVAKLAGFKWPRRQSADFEAEDRRITRHRNPYLRYYFCEAVNSVRMRDAEYAAFYKRKYNEVRKHQHKRAIVLTARKLVRLVVRLLTTNQTYRPRRL

SEQ ID NO: 497442 - protein, 391 aa, unidentified
MIYVGIDVAKDKHDCFITNSDGEVLFKAFTITNNLDGFNDLYQKIETVMKDITKVKVGLEATGHYSYNLLGYLIDKGLPTYVINPLHTNLYRKSLSLRQTKTDKVDARTIASILMSYVNLKSYSDISYHNEELKSLTRYRFDKVKERAKLKSSVSRLICILFPELEKLVPTLHMASVYALLSEFPGAKQVANAHLTRLTNLLSEASKGRYSKDTAITFRDAARTSIGSNMPAKSLELKHTIKLIKELDSEIDEIENEIKIIMDEINSPILSIPGINYRMGAMIIAEIGDFSRFDSPDKILAYAGFSPSTYQSGHLYGAYAHMEKRGSRYLRYALYNAAKYVCHWDPTFTAYLAKKRAEGKHYNVAISHAVKKLIRVIYHLEKTNQQYIKAS

SEQ ID NO: 497443 - protein, 367 aa, unidentified
MSIVYVGMDVHKNSFTLCGLYRNGETTRFLKNKQTNPSVDAVVRYVNEARKEFGEDVKVLCCYEAGCLGYYLERQLQVRNIPCVIVATDTSMNKGKKNDRRDAHSLAHNLDSAEYKSVHIPTPEDEAVREYIRMRYSYKQELKRTKNEILALCLRHGFKYDGKTNWTTHHIAWMKKIDWKLPILAETFKEYLARYDWLKMRINDQDAMIESLAQKTEYREAVKKLCCFMGIKVHTALSLLVEIGDFRRFNTAYAFCMYLGLTPSEDSSGSKGHYGAITKKGNSYIRRLLVEAAQCFSRTRKGFKSAALKQRQAGMPADIIRYADKANERFKAKYLRVNMRSHRNVAVVAVAREMACFIWGMMTDRIA

SEQ ID NO: 497444 - protein, 418 aa, unidentified
MEVVYERCAGLDVHKKTVVGCAIVPGAAGHPRRAIRRFETMLDELAALAWWLAEQGVTHVALESTGVYWQPVWNVLEAHGGFALLLVNARHIKAVPGRKTDVRDSEWLAELLRHGLLRHGLVRGSFVPDRAQRELREVTRYRTALIEERSAHVNRLQKTLEAANIKLGSVASDVTGVSARAMLAGLVAGPAAPATLAALAVGRLRDKLPAVERALAGRFGDHQRYLVPRILAAIDFLEAEIADLDARVAELERPFGAAVDRLDAIPGVGRRVAESLVAEVGPTVDRFPTAQHLASWAGLCPGNHESGGKRLSGKTRKGNRALRRVLVQAAHAAARAPQTYLSAPYRRLAARRGKKRAAVAVAHSILVITYHLLLDPTVPFHELGPDYFDRRTSDATRRRLVERLEHLGFDVTLTRRVA

SEQ ID NO: 497445 - protein, 334 aa, unidentified
METHYFLGVDLSKKKFDVALTMDGKNFHEAQIENNPTAIQLFFRDLKKQLSSLNQVMVCLEHTGIYGFPLLDFLVKNQIKVIVEPAMQIKQSQGMVRGKNDRIDAKRIAIYAYKNRESLRFWHPQRHCIQQLKALLLLRERMVKVKVQLEVPINEGEEFIASSILKQTVANCQKTLRALQSDIERIEREIEALMSSDEQLTQQCKLVTSVPGIGKITALNIIISTQEFSKIQDAKKFACYAGVAPFEFSSGSSIRGKTRVSKMANITLKKLLHLAAMAAIRYSDEMNTFYKRKVDAGKNKMSVLNAVRNKLISRIFACIKNNRLYQKNYKHTLA

SEQ ID NO: 497446 - protein, 347 aa, unidentified
MNSIHFVGLDVHKKTISYCVKRAAGEVIMEGKIPATREAVEEWMAMLPQPWSAAMEATIFSGWIYDLLLPHAQEVKVAHPLMLRAITAAKKKNDRVDAAKITDLLRCNLLPECYMAPTRTRDLRRVMRYRNLLVRQAVRMKNRMSGLLMETGIEYNKEKLHRKRYFHQLLAGLKNEREDSLPQLLGLSRATVDTLLSMERTLVRQLLKDQDLHQRVERLMTIPAVGPITALSWALEIGEVSRFHSVRQIISYAGLCSDECNSADKQQRLPLSKQCNQHLKTVLIEAAHMAPYWSPELNQVYQQERERGHRNRAALAVARKLAAYLFVIDREQRNFDANRRKAEKPAA

SEQ ID NO: 497447 - protein, 402 aa, unidentified
MNCVGIDVSKGKSMIAVMRPFGEVVVSPFEVLHTDGELSELARLLKSLDGDTRVVMESTGNYHAPVAWLLHDAGLYVSVVNAMLVHDYGNNSLRRAKTDKKDAVKLANYGLDHWLTLPRYLPEEDTRLMLKTCYRQYQQYAKIQTMLKNNLISLLDTAFPDANRLFSSPPRADGSEKWVDFVAAFWHCECVCGLSEKAFTAKYRKWCKKHGYKFSENKALDIYASACGHFGVMPKTDTAKLLVEQAVSQLRATSAALAALKQEMLSLAVSLPEYPVVMGMFGVGPTLGPQLMAEIGDVRRFHSKKALVAFAGIDSPPYQSGQMDVHSRSISKRGSASLRRTLFLVMGVLLQCAPMDEPVYQFMNKKRSEGKPYRVYMMASANKFLRIYYASVKTYLDSLEHD

SEQ ID NO: 497448 - protein, 339 aa, unidentified
MNTLTIGVDVSLKTLDVAVALDSERATTLGRFANSEAGFKELAAKLEREAQGATIHLIMEPTGGYELPLAQFASERQWLVSLPNPRKVKDWASSQGRRAKTDRQDAQKLACYGKAHALPIWQPLPPAVAELEALLARRKDLEDILQQERNRQQALQAQAAFKGPVATSLEQSIGWLQQAIDAVEAAIQQHVDEHPDLRDQARRLRTVPGIGRRNVLPILVLLHRWGTLTKNQGTTRGLTAFVGLDPQPFESGSSIRKPAMISRQGNPAMRSLLYFSALGGTRGNNPLRHFYHRLVAAGKPKKLALIASARKMLSWAWVIFRDQTVFDPSRTGFLAPTVS

SEQ ID NO: 497449 - protein, 426 aa, unidentified
MARYVGLDVHKRTIAACMLDSEGRPVRRASFDCTRTAISKFAQEQLEHSDVVALEATTNSWAVAEILEPYVARVVVSNPLKTKAIAESTVKTDKVDSQTLAQLLRVGFLPEVWHPSGPFQLLRQLTVFYASLINDRTRVKNRLQSLFHRRLIHCPVSTLFSQAGVRWMDSLELSEHDRLILELAKQQVFDLNAKIAEVEQRIARLAQNDHSIKLLMTLPGVSLMTAACLVGAIGEVARFRDGDHLAAYFGLVPRVKQSADHCYYGSITKVGNNQVRKMLVLAARNLRTHPGPLGAYFRRMAKHKHINVAATATARKMVTVAYLILKNGEPYRYAQPATTSQKFGQLHMLATQSKRAAVRVEAQPGEPVPPAGYRLERKPSLDQVLVRDGLSPIRWQAVPKGEQVVIEKFRDYIEAISKPSATVRKG

SEQ ID NO: 497450 - protein, 404 aa, unidentified
MRIIYERCCGVDVHKRKIVCCMRNGSKNEIREFGTMTDELKEMVEWLHENGCEMVAMESTGSYWKPLYNILELLGMPAMVVNASHMKAVPGRKTDTKDSEWIADLLQHGLLKASFIPEREQRELREIARYRKSLTEERSREINRMQKMLEGANIKLGNVVSEITGKSAGNVLRGIAQNKIDREYLEQAVDHSMHWKMDEIIRSINGVISPVQRKLLQSMLNHIEDMTRRIQEMDGLIEEEMKSYQQSIERLSEVPGISKRTAEIILAEIGMNMERFPTAAHIASWAGICPGNHESAGKKKSGRINPGNKTLKTTLVQCAHAAVRNKRTYFHAQYERLTVRRGKNKAIVAVAHSMLIAIYHMLKTGEPFRDLGSNYYQQFDAEKRIQYYLNKIKNLGGNYVPSAT

SEQ ID NO: 497451 - protein, 320 aa, unidentified
MMAQSDLVVVGIDVAKDKVDAYIRAFKLRQTCQSTAQGRRKMVGWLRKHQVAKAVLEASGGYERDWARVLRQAGIEVRIVDPKRVRSFALSAGRLAKNDTIDAEMIAWFAETFKEAPGQTHDAAHEELLALVKARIALVDLKTRLQAQNEHAAPGLVQKAHARILKNLVGEIAKLEAEIAAKIKATPHLAERAEIIESVPGFAETTSANLIAGMPELGQVSDDIAAALVGVAPYDDDSGKRRGERHIKGGRRWVRNAIYMPCLGAVTQNNPVLKAFYQRLIAKGKKSKVALVACMRKLIVILNTLIARRQKWDPGRYVLT

SEQ ID NO: 497452 - protein, 420 aa, unidentified
MSPPNDLDAPSAADLKALVLALLGEVSALKQVVVEQRAEIVRLKGLKGPPSFVRDGVDAPPTASCARIAVSCIAMKEASMGEVSIVGIDLAKHVFQLHGADAAGAVVFRRKLSRAKLLTFLSSLPKCTVAMEACAGAHHWGRAVQAIGHEARLIAPAYVKPFVKRQKNDMADAEAIAEAGARPTMRFVAVKSAEKQASSMVFKTRDLLVRQRTQTINALRGHLTEYGVIAPQGAFHVGQFAAELENPLSGLPRAVIELSTMLLGHIAALDQQIAGLDRKIRARARADETVRRLMTIPGIGPICGSALEALAPPAELFSKGRDFAAWLGLTPRQNSSGGKARLGRVTKMGQRDLRRLLIIGAMAVVRWAARKGAPAGSWLERMMARKPRMVLAVALANRMARIAWALMANGGVYEVPAVAA

SEQ ID NO: 497453 - protein, 348 aa, unidentified
MTHYAGLDVSMNTTFICIVNEKGKVVKELEAASTPESIDSFLSGTGLKIEAVGLESGCLTHYLKKGLQKLRYKVIGMESRRMAAILATIINKTDKNDARGIAEALRVGHYKECIHRSDEAVEIRTILHGRRTAVEGRTHTITSIKGHLKVYGIKLGKGSGKSFREKVEGAIANLNPRVQKVIKSLLNILDTHEKEIKELDQIVKEIGKEDERVKLLQTIDGVGPVTALAFVAEVDDPKRFEDSKDVAAYIGLTPTQYSSGETQRQGGISKKGSKHTRCLLVEAATSLLTRCQTWSKLKAWGLKLMKKIGKKKAIIAVARKMAVMMHKMLITGKPFERSSKKKEVVQAA

SEQ ID NO: 497454 - protein, 352 aa, unidentified
MSNQTAPECIITTIGVDLGKNTFHLIGMDARGRIALRRKVSRGQLLPCLANVPACLIGMEACAGAHHVGRQLATLGHDVRLLPAQYVKPFLKGHKNDYRDAEAIAEAVQRPTMRPVPLKSAEQLDLQALHRVRSRLVGQRTAVINQIRGFLLECGIPVRQGPAGLREALPTLLAQRTDVLSPRMIHLIEDLAGDWRRLDERIDAITRDITALAHQDVGCRRLMGIPGVGVITASAMVAAVGTGAAFTKGRDFAAWLGLVPKQISTGDRTILGGLSKRGNRYLRTLFVGGAQVLLQRPHHWDGHGFGRWLQAAGARLHRNVLAAALANKLARIAWGVLSHESGYDPEFAARAA

SEQ ID NO: 497455 - protein, 341 aa, unidentified
MDYFAGLDVSVKETSVCIVDDAGKIVREARVASEPEALLQVLTLYRFKRVGLEAGPLSQWLYSVLAEAGLPVICVETRHMRAVLTAQINKTDRNDARGIAQMMRAGLYRPVHVKTLRSQKLRMLLTHRKLLQSKAIAIENDLRATLRNFGLKVGMVGTVKFEARIKELVENLPDLAILVEPLLTVRRVLREQITVLHRRLLAIVRDDDVCRRLMTVPGVGPVVALTFRVTVDVPARFRNSKAVGAVFGLTPSKYQSGESDRTGGISRCGDEMMRAMLYEAAQILLVRSTKWSWLKAWAMKIARHRGMKKAIVALARRLAVIMHRMWVDGTEFRWTREVAAA

SEQ ID NO: 497456 - protein, 427 aa, unidentified
MSYRIAGVDVHKRMLAVVIADVAVGGVYQFTRRQVGTSPSDLRELAAWLVAQQVEEVVMESTAQYWRPVWETLERFWQPHRPASVAPPPRGRTLHLAQAQSNRGRRGRKRDFPDAERLVKRLVSDELTLSFVPEPEQRLWRTVTRRKNQLTRSRVQLQNRLEALLEEAHLKLSSLVSDLLGLSARRMLRAVADGETAPAALAALADRRLRATPDQLTDALGACTTLHPVYRRLLAMALDELRVIEEQIDALDRELARLLGPHQPAVERLAEVPGLGVDSAQQIIAEVGPTAATFPSAKQLSSWVGASPGNEESAGVNHSHRTPQGNRQMRRLLNQAANAAVKTKGGLFQLVYRRLVPRLGHAQAIGAIAHRLSRLIWKILHQAVRYEERGPAVSAQRRQARAATMIRELRRLGYHVEPFLAQPGSPA

SEQ ID NO: 497457 - protein, 372 aa, unidentified
MNYNTVYVGMDVHKESFTLCSCKYEDEKASHYQRTPASYKNVLRYLAFLRTIYGEDTRFVCGYEAGCLGYSLYHQLENFNVECVILAPTTMLEQRSKRRIKTDKRDAEIIARSLAQHNYSPVHIPTETDNQTKEFIRMRDDHKAELKKIKQQILSFCLRQGYQYDGSGNWTAKHVKWLRSLKPAGLYKEILDEYLLTYTILTDKLNRLDQRIEELASKEEYKESVSKLTCFLGIKTHTALSVIVEFGDFQRFVSARKFAGYLGLVPGQHSSGDDRNGLGITKAGNTHVRRLLVESAQSYTRGKIGYKSRVLRSRQAGNSPQIINYADRANERLRRRYYQMVLKDGKKYNIAKIAVARELACFIWGMMTDNIY

SEQ ID NO: 497458 - protein, 420 aa, unidentified
MLNKKLIERGKFVNRGVLVVGIDIGKGKHAAVGTSLEYSFTKPFYIRDHRRSFELFEEKIEEWKKRLNCEEVVIGFESTGHYWKPLGYYLKEKKCHLVEVSTSHTKKAKELMDNSPLKCDPKDARVIGDLVRQGKILTPVFPEGRILNLREIMHTRENLVKEMTSILNRLHKIVDVTFPERREVIKEIKGKASIFLLKETPFPEDIIKKGLEWLEEKIWKKSRGRYNHTVAELLYRLARDTIGVKEGREGSLWELKILLPRLERLNREIKEIELKVKEILGEIHEAKYLMTIPGIGEITAAAVIAESGGLGRYEKMESVLKVAGLNLYEISSGKHEGEKHITKRGRSLMRQKLYFAALQQTRKGMPLYSFYRKLTEENGVKKTKALIAVARKLLRLMFSLAKNRRKFVWDYEHKEFKKVA

SEQ ID NO: 497459 - protein, 379 aa, unidentified
MKAIKLYLGLDVHKDSITIAIAPAGRASEIRVFGTITNDLHALEKALARIRQAHPGAKLHVAYEAGPCGFGIARRLKQRDVPCLVAAPSLIPKPPGAPFKTDKRDARTIARLLRAGELVAVYIPEPTDEAIRDLCRARTDAIDDLRRCRQRLKSFLLRHGYRYQGKANWSQPHLRYLRELVLPHPAMKAILEEYLQGIDAAHDRVQRLEASMQTLLESWRLAPAVAALMAFRGFQLVAAMITISELGDIHRFAHPRQLMTYLGLVSVEDSSGPRQRLGRISRCGNGHARWLLTECAEHYALPPKVSKELARRQEGQPAHIRALSWKAQNRLHLRFNRLLARRLARNKAKVAVARELCGFVWALLRTQDCYRQPTGGAAS

SEQ ID NO: 497460 - protein, 460 aa, unidentified
MNTKRSKSRNDGKMPMVHPNAAAIDVGATMHMAAVRTDRAPEPVRSFGTFTADLHRLVDWFTECGVETVVMESTSIYWIPIFELLDARGFTVFLVNARDAKHVPGRKTDVSDAQWLQRLHSFGLLRASFRPKGQIAELRAYVRQRERLLEFAASHIQHMQKALMEMNLQLHHVVADITGTTGLRIIRAILAGERDPEALACLRHYSCHSSAETIAKALTGSYRAEHLFALEQALALYDAYHEKASACDARIEAVLKELSLHRGHGHGPAPRVSRRRNRTDQANALAFDVREALFTLLGKDITTIDGLGPYLSLKLIAECGDDLSSWPSAKHFTSWLGLAPSNKISGGKMLSSRTRRSGGRAAALLRLAAVTVGRTDTALGAFYRRLSARIGKAKAVTATARKIAVLFYNAVRHGMDYVDPGASSYETRYRTRVVNNLHRRAKAFGFVLQPLEPKVVAAVS

SEQ ID NO: 497461 - protein, 480 aa, unidentified
MAAGSRMNRKQRKELTRQLRSEAPGLDVVHPRAAGIDVGNGAHYVAVRPDQDPEPVRRFECFTADLHRLADWLQACGVETVAMQSTGVYWIPLYEILEERGFEVYLVNARHTKNLPGRKSDVQESQWLLKLHTYGLLNNSFQPTAEIRRVRTYWRQRAEHVRAASTCIQRMQKVLTQMNVQLANVISDLSGLTGQTIVRTILAGERDPRKLAELSDPRIRASQEEIAKSLEGNWRPELLFVLKQEVEMYDIYQQRIGECDRELEAHLKRFADNVPQKTAENGPVSEEQKGKKVPTKLPRSGKRAQGNAPCFDLRSELHRISGVDLTRIDSINVLVAQTVISEVGLDMSRWSTEAHFASWLGLCPDNRISGDKVLSKGTRHVINRAATALRMAATTLIRSRSYLGAQYRRLRTRLGAPKAITAMAHKLARLVYRMLKYGQDYVDKGMQYYEDRHRRQQIELLQKSAAKLGLQIVEIQAVGG

SEQ ID NO: 497462 - protein, 367 aa, unidentified
MDEVSTIGIDIAKHVFQLHGVDGAGEVVLCRRLRRGQVMRFFAALPPCIVGIEACGTAYFWAREIARCGHDVRLMPPSYVKPYVKRNKHDAADAEAVCEAVRRPSMRFVPIRTAEQQAALVASTVRDLLVRQRTMLVNALRGHLAEFGIVAPRGLHKADELAAVVADENDGRIPASARKALRILVAEFAALDLRITRLETEIVAQAKTDAVARRLATIPGIGPIIASRLSAMVPDPAIFRSGRDFAAWIGLVPRQSSTGGKPRLGGISKRGNGSLRRLLVGGAMAAMFRAKALQNDPWLCQLRARKPVMVAAVALANKIARTIWAVMRRNAVWRPAALRSSSRPHQSGAVLAAVKTMPPAAVAFGQS

SEQ ID NO: 497463 - protein, 353 aa, unidentified
MKYVGIDWAYRKAQWCALSPGGQIASEGQIPADRDGLARLVLELGDEVKACLEMMSGALWVRDQLVDCGWQVEVADARKVKTVAPLAAKTDKVDARLLAELSRRELVPALWLPSLDERALRERLRRRMHLVRLRTSAKARIAGLQTQWGVRVSLQRLRRADGMALLERAGVPEVWRRSVSECLSVIEFLDARIAPLDAELRPLAHADPRAVLLDTIPGVAELLALTIAVEIGEVSRFSSPARLVSYGRLAPRVHQSGQARPHSGPLSKSGSRLLAWAAVEAAQQAWRETNPWHDLYADVARRSGNKNSAKAAVACKILIAAWYMLSRNQPFKPAPRCTRGTSVPASSRLALAA

SEQ ID NO: 497464 - protein, 409 aa, unidentified
MRYYLGVDWADQTHAVWVVDERGTKVALRTVPHTAEGLSEWGRELDEWRAQGIELWAAIERPEGRVVDFLLDHGVVVYPVNPKALDRARDRFRQSEAKSDPFDARVLAEFLRTDHAHLRALRPSSEAAQELKLLTDDYQRQIRQQTRLVNQLTTTLKAYYPRGLEVAELTTALAREFLQAYPTPATLTALTERQWQRWARAHRLSETRTQELWAVLQRPQLPVPPHVVRAKARLMQSLVAQLTVVMEGVSAYREAIEDFFARLPAAQWIRTLPIGDHGITAPTLWARLGDAPGRWESFRHLQAQAGTVPVTIRSGKQQVVRFRFACDKSLRYVIDHVAFLSLRWSEWARAYYDEQRARGHSYRQALRALSAKWLKIIFVMWERQVPYDEQYHLATMTRQQLRLRQKKVA

SEQ ID NO: 497465 - protein, 523 aa, unidentified
MATRSHSKKRRSARSHLIHKPHGVIHPRVQAVGPEHFGIVSVDCAKARSKWMLADFYGKVLVPPTPVEHTRKGLEEMVLSVHKAIAQFDLRDVIVAIERTGRYHLPVKRAFVKALLETRLVHPLTSKQFRQPANPGNKTDDTDLSAIHRAAVNGFGLIEQPADPVTVRLQLLARHRRDWVEKKSALHCQIHEHLQMIMPGYARCFDDIYKCHIPLLIARRFGSADTILRAGLPGLTEQVRQAGIGPHRPTLEKILAWARTAPPAAVEASIHHRIMIELDDDRVSKLRAVKAVEGELAEQLVQTPYVLLLAVPGIGVVSAGEFAGEMGPIQYYTKGRSITGRAGLFPSRYQSDEVDRPDGRLVRCANHRLRQAIMMIADNLIECNDHFRVLATQWQQEGKDPRAIRVRVAGRFCRIAYQMVAGRATYRHPSCQQRDYVLRKLIRFYNVHSIDIIRIMRELDAAVAQLPGAEHREEGAALAAELDQLQKKRGSGPRSLAEILPAVLAKLGVQLVTSTKSGEADLT

SEQ ID NO: 497466 - protein, 376 aa, unidentified
MCGHPVIAASSRISHICRDEGAVARVFFHGGFLMTHFVGLDISQKMTAICVVDNTGRRLWRGQCASDPEQIEKVVRRQAGEDARIGLETGPMTPWLVHELRGRLLDITCLDARHARAALKMQINKTDQNDAEGLAQIMRTGWYRSVHVKSFDAHRARALLGARAQLVGMTTRLSNNIRGVLKIFGMLPGAMRGLPFDRRVEAMLVDRQDMAPIIRPMLVAWRDLRVQIAAFDKAVRQITKSSPTCRLLMSVPGIGVLSVLAYVSSVEDPARFSRSRSVAAHFGLTPKQYQSGEMDRSGRISKYGDKLTRTLMYEAATVLLRRVKRQSSLQDWAQAVARRSGEGKARVALARKLSVILHSIWRSGEPFRWSEQQSAG

SEQ ID NO: 497467 - protein, 423 aa, unidentified
MKKRTYRGVEVKKANQERLAEALAGGDLVVGVDVGKEVCFGSLVSAEQGVLVTVKWKSPWEDRTFVQWLGGLGCRKIEVAMEPSGSYGDPLRSLLWEAGMGVYRVSPKRSHDAAEVYDGVPSWHDAKSAAIVAKLHKDGASEPWPFRSDEERDLCAVVRTMAVFDEQFHQNVNRLEGHMARHWPEVGAWLDFSCVTFLELILRFGGPAQIAQRAQEARETMRSVGGRFLKAEKIDAVIACSGQTIGVSMTAQEAEELSNLAEHTLDLYRRLKEAKRKVDRLSCQHPSIEALSRAVGKGTAAVLVVEGGDPRQYGSSSEWLKTFGLNLKERSSGKHIGRVKITKRGSGKARKWLYLAALRLIQKDLVVRTWYERKVARDGGTKRKKAIIAVMRKLVRALWYVGRGEPLDTSKMFDVKRLGLACG

SEQ ID NO: 497468 - protein, 414 aa, unidentified
MEKVYDICCGIDVHKKLTVSCLRNGRKQEIRQTGATTRELLELADWLKSEGCQMVAMESTGSYWKPLYNIMETSGLPVMVVNAKHMKAVPGRKTDASDAEWIADLTQHGLLRASYIPDKAQRELRELVQYRKSLVEDKARELNRLQKMLEGGNIKLSGTVRDINGMSARNILNCIVTGEHLDETKFDEMRREGKIAHNLKAPKSQILDDLNGVLSPLQRRVMKELLAHLDELNEHIRNLNEEIDRFMKPEEREAAEKIQDVPGIAQTSAQAVIAVIGTDMSRFPTDKHISSWAGLCPGNNESAGKRRSGKTRKGNSLLRSTLLVCAHSAVKVKSSYFSAQYARICAHRGKKRAYLAVAHSILIAIYHILKDNVPFHDLGADYYNQFNKESKIRACLKKLHSLGWSEPTATTSPV

SEQ ID NO: 497469 - protein, 318 aa, unidentified
MSPAAAVFVGIDVAKAELVMAIRPSGERWTATNDEAGIQQLLTRLREDAPALVVLEATGGYERAAVAALATARLPLVVANPRQVRDFARATGQLAKTDQIDADTLALFAERVRPDPRALPDDSAQALDALLTRRRQILGMVGAERNRLEHAVPAVRRGIVQHIRWLERQLRDVDDDLDRTIQVSPVWRAKENLLRSVPGVGPVVSRTLIGDLPELGTLPRKQIAALVGVAPLARDSGTLRGKRLVWGGRAPVRAALYMAALVATRRNPVIREFYQRLLTAGKPKKVALTACMRKLLTILNAMLRANTVWRHTAHATIA

SEQ ID NO: 497470 - protein, 343 aa, unidentified
MDCYVGLDASLKKTSVCVVDGTGKVLCEGVVDSQPSAIAKFLKSRAPDAVRIGIETGPTSIWLTTELRTHGLPVICIDARHARAVLKMQINKSDRNDAAGIARIMQTGWFKEVRLKGFDSHAVRALLTSRATLVKMKRDLENQIRGLLKIAGLLVGTARGNAFSQRVLELAEQSPELAVSVIPLLTTREAIGKQLYDLDRKVLRLARGDRQAQSFMTAPGVGPVTALCFRATIDDPARFSRSRSVGAYVGLTTRRYSSGEVDWAGRISKCGDPMLRSYLYEAAGVLLTRVQKWSALKAWGMRLAKRIGMRKARVAVARKLAVILHRMWVDGTDFRWSAKEATA

SEQ ID NO: 497471 - protein, 413 aa, unidentified
MDVVHPRCCGLDVHKSSICACILLRESGRVQKYQRRFGAMTQDLEQLAEWLRQFRVTEVAMESSGVYWKPVWNILEGQFTIVLANAQHIKNVPGRKTDQKDAEWIAQLLQHGLLRPSYVPCEIIRDLRDLTRMRASLSQEASRISSRIQKVLEDANVKLASVATNTLGKSGRAMLEEIIRGEDDPEQLASLALGHLRVKIPQLRLALAGKIRSHHRFLLRRLLDQMQFLEHEITLLEDRLEDIGRQRPELSQAVARWDTIPGVDRVAAWALLAEVGDNMAQFPTAEQLASWASLCPGNHESAGKRLRGSTRTGSPWLRRMVCQCAWAAARTKNTYLSSQFRRLAARRGQKRAIIAVAHTLIVIGYYLQKKQSNYNELGGNYFDRLHSDGLKRYLVKRLQQLGHKVTLEPMEAA

SEQ ID NO: 497472 - protein, 418 aa, unidentified
MNMNAVGIDVSKRKSTVAVLRPGGQVVVKPFDVPHLSADFQSLIKMIRGLEGETRVVLECTGRYYEPVAHELAQAGLFVSSVNPQIIRCFQGQDNPLRRVKTDKADSVKIARYTLDSWDKLKQYTLMDELRSQLKIMNRQFDFYMKHKTAMKNNLISLIDQTYPGANTYFDSPARDDGSQKWVDFLDTYWHVDCVRKMSLEAFTDHYQKWCGRKKYNFSKSKAEEIYGKAKGLIPVLPKDNFTKRVIKQAVEQVNSVSQTVEQLRCLMNETASKLPEYPVVMAMKGIGPSLGPQLMAEIGDVTRFTHKGAITAFAGVDPGVNDSGDYSQKSVHASKHGSPVLRKTLFQVMDILIKTKPDDPVYLFMDKKRTQGKPYYVYMTAGANKFLRVYYGRVKEYLASQQTRQQGAAAAGSQPCV

SEQ ID NO: 497473 - protein, 321 aa, unidentified
MTKETVYVGVDVAKNSLDVAVSSSKEVCQFANDPEGVTNAVQYIAGLKPAGIIIEATGNLEMPLAAALQVGRLPVAVINPRQVRDFARAIGALAKTDSIDARMLALFGIRVQPEIRPLPDQKARDMRSLLTRRRQLIEMLTAEHNRLFHSSNDIRPSIKTHIKWLEEALSDINNDLDRRIRLSPSWLKKDNLLKSVPGIGKVVSSSLLIELPELGMLNRRKIAALVGVAPFNRDSGTMRGRRTVWGGRAKLRAVLYMAALVASRCNPIIAAFYQRLLEAGKAKKVALVACMRKLITILNAMIRTMTAWQPEIILNHISVEV

SEQ ID NO: 497474 - protein, 323 aa, unidentified
MSKHSTVCAGIDTGKRQLEVALSGCSERLPVDNTAAGHAALSAWLRRHRVKRVGIEASGGYEQDVVAQLRRDGFVVIVLQPAQVRAYARFLLQRAKNDKIDAALIAACTAAIKTIHAPPDPRLAPFAERMTLIDQITDQIAGCKNYRESSRPPQIRQFWKEEITRCNKLLRAELQALAAAIRQHGDLAERLALIESVDGVGLKTAVAILVRMPEIGRLSRGQAAALAGLAPYDDDSGARFGMRHIAGGRERLRGSLYNAALAATFHWNPQLMALYRRLTAAGKPHKVALIACARKLLIFVNTVVERGTPWVRTVSPLAHVKAA

SEQ ID NO: 497475 - protein, 347 aa, unidentified
MDKELYIGVDVSKQTLDLAYYDGESIDWKKAHIKVSNNNAGFKKIGSWVAKVSKGFDIVLFCMEYTGLYTQNFRLWLEEKHYIYRMVEPRKMHRFEPDLDDGLRSLDRIKTDELDSFRIAIYCEQNHRKILRNPSKLPSPVYFKLKRLLAERKQTVKQSVLYKQQLHDICAYDTDLSVERKNGQLKTLNDALKGIDNEIDMYIKEDADISKNFSLLTSIPGIGRVVALETIVLTENFMAIDNPRKYACYIGVAPFKKESGTSVRKGSSVSKKGFKQAKADLSIACLVCMQHIPNIRDYWERKRKEKCSGIVFNAIKFKMILRMFAVIKRGTPYVETDNYRNGKNKQP

SEQ ID NO: 497476 - protein, 342 aa, unidentified
MQVTTIGLDIAKNVFQVHGINAAEKVIVRKQLRRSQVLAFFKALPPCLIGMEACATAHYWARELTKLGHRVRLMPAKDVKAYVKRNKNDVADAEAICEAVRRPTMRFVQTKSAEQQGRLMLHRVRDLLMRQRTQVINALRAHLAELGITAAQGTAGLKELLKIIASDADERLPVDAHASLVVLAAELQAMQTLVGSLEKRIMAQHRGNEASKRLETIPGIGFIGATAIAATVTDPTAFRSGRDFAAWIGLVPRQDSTGGKQKLGPISKQGDRYLRRILVVGAHAVLRYAKQNPEKYPWLTQLLARRPFKVVAVALANKMARMAWALLAHGGTYRAPALAAAA

SEQ ID NO: 497477 - protein, 448 aa, unidentified
MFIMHYKRLLTFIDGVSSYLSVGLDVGADFTWMSIALPNGSFVGKPFKIIHSDSRSRDLAVTKIKEAQETYSLKSRCFLESTGIYHIPLLCFLRDKGFDCSVINPIITKNSTNINIRKLHNDKFDSKKAALVGLNVSLKTSILPDDSVVDLRNLVRDYYYFKDLQSAVALKLTAELKVSFPAYAKVFSKVTTQSSLKLLSSYPLPADMLAASKEDIVDIIRSTARFGEAYALRKYDAIIAAAQDAAVFGRALPSNAVRIRLYIDTYQEYQKHLDALLKTLHETVEKLQDTLIYDQICLLQSLRGIGFLSAVVLIAEMGNFKLFSSPKKLYAYFGLDPAVKQSGKLNGDKVHMSKRGSSLARRVLHMAALNNVKVDKGSGTPVNPVVYDYYTRKCSGKKKPVAMGAVMHKICNIIFAMLRDNKPFEIITPEEHCRRFATEHPDKIRKAA

SEQ ID NO: 497478 - protein, 324 aa, unidentified
MHTINSSLQHFFGVDVAKAELVIHCFGERAVHALPNDAKDIERWLDTLPEHSAVAVESTGSFYLGVARACVARGIPVYVLNAQRVRHYAKGVGRGAKTDRLDAQVISRYLAHEHAKLHPWTPLPEPLAKLSTLLTLRDTVVRSVQSTRQSCKALGLVPTDVQLFLRSGEALARGFEREATKIARAHAPWRELLRRLRTVPGIGPLNALALLLALHRHPLTRVDAFIALTGLDPRPCDSGQRRGRRALSKCGDALLRKLLHTAAMAAVGNPLFAPDYQRLQSRGLSKTAALVVIARKLARIAWGIFRSGKDFDPQILRARAGIAT

SEQ ID NO: 497479 - protein, 332 aa, unidentified
MEHELHYIGIDTAKEKLDVDVLRPDGRHRTKKFANTTKGHDELVSWLKGHKIDHAHICIEATGTYMEPVAECLYDAGYIVSVINPALGKAFAQSEGLRNKTDTVDARMLAEFCRQKRPAAWEAPHPLERALRALVVRHQALTDMHTQELNRTETAREVQRPSIDAHLLWLEAELKRLEKQIKDLTDDDPDMKHRRKLLESIPGIGEKTSAVLLAYIGLKDRFAHARQFAAFAGLTPRRYESGSSVRGASRMSKAGHVSLRRALYMPAMVATSKTEWGRAFRDRLAANGKKGKVILGAMMRKLAQVAYGVLKSGVPFDASRHKPVAAQKSRKG

SEQ ID NO: 497480 - protein, 344 aa, unidentified
MEHFAGLDVSVKDTSVCIVDDTGKIVREVKVASEPEALLAVLENPAYHFKRIGLEAGPLSQWLFSALVEAGLPVICVETRHMRAVLKAQINKTDRNDARGMAQMMRVGLYRPVHVKTLRSQKLRMLLTHRKLLQSKAIAIDNDLRGTLRNFGLKVGMAGKARFEARIRELVESLPDLAALVEPLLIVRRTLREQFCILHRRLLAIVRDDEVCQRLMTTPGVGPVVSLTYRATVDVPARFRKSKSVGAVFGLTCAKYQSGEVDWDGRISRCGDEMMRTMLYEAAQAMMRSKKWSWLKAWAMQIARRRGMKKAIVALARRLAVIMHRIWVDGTEFRWTREQAAAAV

SEQ ID NO: 497481 - protein, 319 aa, unidentified
MDKLSHGRVVGIDVSRDWLDLHCLPDGHRCRLPNAPAGHAAVADLARNRDAVVCFESTGGQEWQLWALLEAEGVAARQVPPAQVKAFAQSRGTRAKTDRIDAELIARFFAFRPEAGRSLPAEKLRLLRALTSKRAQLVEMRKRLLAQVRAQQKLGTAAMFEDVDTELKQRIDGLINDMEDRITRAIASDGHLSEMANLLRSIPGIGPVASTMLIAEMPEIGTLTGEEAAALTGLAPVAHDSGTLRGKRAIAGGRRALRHVMFQAALVAAHHNPSLRSFADRLRQAGKPHKVIITAVARKLITIANALCKNRQKWALTTT

SEQ ID NO: 497482 - protein, 344 aa, unidentified
MLYVGLDLSRKRLDWLALDGSGVEVDTGAVPPDRGGLVQLPDRLGDVPVTAVIESMTGARFVHDQLELAGWDVRIADAVKARGIAPLACKTDKIDCRVLAELARLELVPEIWLPAPAIRAERERARFRLHLVKHRSSLKNRIHAVLFQHGVPNAHSDLFGVGGRRLLDRVTLPEPWASTVAASLVVIDTLDQQISECERELRQLGADHAYVPRLRTCPGVGWVLAFTIASEIGDITRFPSPRKLIGYTGLCPRVDQSGQRDRRGPLRKNGPNYLRWALVEAAHTAARHHRYAPIRHRMRARHGHTRGTKIAAIDIARRLTEAIWYMLTNDQPFAPAGAPASLAA

SEQ ID NO: 497483 - protein, 377 aa, unidentified
MKKELYLGLDVHKDCILRAVAEEGRKGEVRDTGAISNDLHAVEKSIGRLRKVHGRDVLLRACYEAGPCGFGLARRLRQLGVECEVVAPSMTPKRTGDRVKTDRRDARKLARLLRAGELTPVYIPEATDEAIRDLCRARTDAVDDRRRSRHRLKGFLLRHGYHYQGKTSWSAAHERYLRELVLPHPAMKVILEEYLISIKAATERIERCEAAMRALLDKWRLAPAVRALMAMKGFQTVAAMILVSELGAIERFTHPRQVMAYLGLVPTENTSNDKRRQGRITKCGNAHARWLLVECAQHYATPPKVSKELSRRQEGQPAQVRAISWRAQNRLHSRYTRLLGRRLQRNKAMVAIARELCGFIWELLRTQSCYHVPATSV

SEQ ID NO: 497484 - protein, 428 aa, unidentified
MNEDTTRTQQEQRCWVGLDWGGEEHAVSVVNNAREVVGKFKTGTSLAELEQLAKRLRGFGAVAGIAIEATRNPVVNSLFSAGFTIYPINPKLSKNWRDCNSVAGVKNDERDGLVLAMELAGRHASLRTLKRDDPSAAELAGLCEKVRDLIDERTALVQRLKATLGQYYPGIRGFFSDWTSPVAWRFVKRFPRPEKLARARKQTLIAFLKTNRVGLKPIWFKRIDARGEVARWPRPADSAALEVMALATVAQLQALQPHIDKCDRLIAQCARDLPHIHLLDSLPGAGKRLAPALAAITAAAAVEPERFEGIRCMSGVAPVEDQSGKRRRVRVRRRCNKHWRNIMHLFAQCSTVSCAWAKAFYDMRREQGDRHASALRKLADKWLKIIFRMLKTGEPYDDARYVKALCNNRSPVYRKLCERTCGYSRENT

SEQ ID NO: 497485 - protein, 387 aa, unidentified
MNRSKSRIVGLDVHPDSFAGAILQGMDPWKARVVSTSTRVALPLLEKWALRHTREEDILVMEASGNAFCVAERLRALKRKVVILESHRAGKVGKTYCATDRVDAIKIARIYLSALSPVVWQPDAKTRERREVFSAYQAVVKEAMRLKQQIKSMLNEHCVRLEKGFRLSHPSALGRLLLRRKWSEAQKMLLSQLHAGLVGARVRRQRLRHYMAQEILAEKELLRLTRLCGINLITLYGLIAAIGEIKRFASARKLSAYFGLNPTVEQSGNYEGSGALKRHGRGAIRALLVQSAKKLLQVDNPLQKWGLAVAARRGRNKAAVAVARKLCVAVWHVMQGHVIGAIERMDTLHTKLHKLATELGVPTIKQLGFETKEAFVQKKLYVLRSYP

SEQ ID NO: 497486 - protein, 338 aa, unidentified
MEFKRISIDTSKHVFTIHGVDDQERPLLRREIRRAQVEPFFVKLAPTEVVLEACAGSHHWGRVLGGMGHRVRLIPPQYVKPFVKRSKNDRNDAEAISEAASRPTMRTVPVKSVDEQAAAIIVKHRELLVNQRTQAINALRGHAAEFGIVAAKGCANVSALLVLLSAEEAIPAIAKAMFEQMGQHVTDLDAKIDALERQLLEQHKANAVSKLLAAIPGVGAITAITMALNVNPANFETGRHFAAWLGLTPREHSTGGKHRMGKISKAGNERLRQLLVVGAMAVIRFAKPGSKSATAWLLQLLERKPRKVAAIALANKMARIIWAMMARGEAYRRQPVAA

SEQ ID NO: 497487 - protein, 402 aa, unidentified
MDPQGRIAHQARYDHDVAGLAGLTAQLGRHGPVTGIAIERGEGLLVEMLQDQGHRLFCVSPKMSARARERYRVAPGKSDAFDAFVLADSLRHEHRHWRPLAVPSPLLAELRALTRDRERLVCNQRDTENQVRAVVLAYHPAVLGLFSSLDRDISLAFLRDYPTPAQARRIGAARMAAFCSRHGYSGRTRPEVLTATLRAHLLAASPGTTAGKAFAMLLFIDQLELLNGQVRAITRRIGELLAGHPDAAVFLSVPGMGQITAATMLAKMGEDRARFPTPDTLLAETGTAPVTRASGRSRTVRFRYAANKRMRHAIDWWAFVSVRENDWARDAYDQARARGQQHNRALRGIGARWVRILWRCWTDSTPYDPARHLKGLTARRTATRKLTATPGRELRHHARRQH

SEQ ID NO: 497488 - protein, 481 aa, unidentified
MKPKPPEKIQKATNPSTRGHWNEMNRKQRREMMRQIQSEDLSLEVVHPHAAGIDIGNESHYVAVPPTRDSQPVRHFGCTTVELKAMAEWLKQCGIRTVAMQSTGVYWIAVYDILEATGLDVYLVNARDTKNLPGRKSDVQESQWLMKLHTYGLLRNSFRPSQEIRTMRTYWRQRNDLIRAAVSHIQRIQKALTQMNIQLANVLSDVSGVTGQAILKAILAGERDPHKLAALRDPRVKASEEQIARYLEGNWQEDLLFVLKQEQEGYEFCQQQMAECDRQLEQYLQQREDRSQGASLPQEMRKGRLLRKKGNKPAFALRAELFRITGTDLTQVDGMDVVTAATILSEAGWDMSKWEDEDHFVSWLRLCPDNRVSGNKVLGKGRLPTNNRASIALRMAASTLRLSNTYLGAQFRRFRTKLGAPIAIKAMAAKLARLVYRMLRYGIKYVDQGAKIYEAQHRQRQIGQLKWNAAKLGFRVVEAAA

SEQ ID NO: 497489 - protein, 397 aa, unidentified
MSMLFVGIDVSKDYSSGQGLDPEGKKLFYLEFGMNGEGFSRLLNTLKTHCKDLSEVTVGMESTGCYHTNLFAFLCSEGIACVVINPLLISNFARLSLRKTKTDKKDALTIAQFLLAHRSKLSQVSYCQNSQDLKDLARERESLAVMIAGLKNDVRRLLQMSFPELEHRCKLFTETMLRFLMKFPSARVIRTAKATEISKALIHAEGKRKRVFISAEEIINLAKVSVASDSVAKELILSEKIETLLYLEGKQKRITEALVEACRSMRVDELDIITSVDGISAITGSTFLAEVGDIELFSSSKHLIAFAGLDPSIHQSGQYEGISRISKRGNRHLRRVVFLMTLCAVRSQNAFREYFLRRKEEGLPPKKAILATAHKLLRVLFAMLSSKSCFRKEVGEV

SEQ ID NO: 497490 - protein, 425 aa, unidentified
MNSKENTKINQVTEQTLVIGIDIAKHNHYATFVDERGRVLKKAFLVKQTRKGFEQFYQEILEGMKEFDKSHVIVGVEPTGHYWLNLAYFLEDYGIPLVVINPMHVKKVKELDDNLQTKNDKKDALTIARLMKDGRFSYPKLLRDQAANIRSCFTLEQTLIDDRTILKNRIHRWVDKYFPELFEVFSDFGAMVLGVLETTPLPAELVNMTTADLADQCAKASQMKQRRPKIAAKVIEVAQTSIGITVAPWGAKREIQCLIRQYRLLEEELAMIEEEIQSLIVQTADYEYLASFPGISRRTISGLLAEIGSFTDFESPRQLIKLAGLTLHENSSGKHKGMKKISKRGRRRLRAILFRAMHPILRNNPAFMKLHQYYTQRPQNPLRKKESMVVLCSKLLKVLHAMCTKKRKFDGEQMLADLHCLQLVA

SEQ ID NO: 497491 - protein, 414 aa, unidentified
MDVVYTQCAGLDVHKKTVVAAIIVPDGQGGLHKETRTFGTMTVDLLALSDWLMGHGVTHAAMESTGEYWKPPFNILESNFEVLLVNAQHVKAVPGRKTDINDAEWLADLLRHGLLRASFIPPVGQREMREMTRHRSNFVRERATLVNRVQKVLESANIKLASVASDVMGVSGRAMLAALIEGHASPAEMADLAKGKLREKREQLVKALEGRVKPHHRFILTELLCQIDNLEEAVSHFDEQIQLLCVPFEAAIALLDTIPGVARQTAEIIVSEIGIDMSRFPSAAHLAAWAGVAPGNNESAGKRRSGKTRKGNQALGVALNQAAHGAAHTKGTYLSAQYHRLAGRRGKKKAIMAVAHSILVIAYHLIKRQEPYRELGGDYFDQRRPEATAKRLVKRLQQLGYEVVIQSQPANVAA

SEQ ID NO: 497492 - protein, 453 aa, unidentified
MGHRARKLIFVKTLLVFCASGQSLLVSSHSFARRFNMALKIVYPVCCGIDVHKSFVVACIAATDDKGVTTYKRRRFSTFSGDLRLLAQWLADNGCRDVCMESTGKYWIPVYNMLESSCKVVLAHPKYVKALRGKKTDARDAKWIADVFKHDLVSGSFIPPFAIRQLRDLMRYRVKLTSFSVGEKNRALNCLTVSNIKLDDVFSDVFGKSASAITEQLLLHPDGSFDVAPLMDPRCKASPAHVQAAIDGLMCPEQAQKLKIIRSHMDSLELCKTNLESVIISLAEQFLPQIELVMTVPGIQLFSAIFIIAEIGVDMSVFPTAKHLCSWAGLVPQNNESAGKKKSTRIARAGAYIKPLLVQCALTVCNSDKHPEIKSRYLALKKRRGHKKAIIAICRMLLTAIYAILKKSEAYNPNLYRKVASLPANRTLTIEQAVAFVQRHGFMIVDSDGVIAS

SEQ ID NO: 497493 - protein, 472 aa, unidentified
MKHKSKSTPKRPRAGRPSRSLFERIQPDAAGIDCGARSHFVAVPAERELKPVREFSTVTSELYRLADWLQQCGIKTVAMESTGVYWIPVYEILEARGFEVLLVNARDVHNVRGRKSDVQDCEWLQQLHSVGLLRASFRPSAAIVPLRSYLRQRETLVQEAATRIHRMLKALTEMNLKLDTVLSDVAGTTGLKIVRSILAGERDPERLALHRDYRCHASHAELVAALTGNYRAEHLFALRQNFAAYEFLLQQLAECDAVIEALLKQLAEQQPEAAPLPPARAKGVQRHGRRHGQPQFEIRAPLHRLIGGHDLTQIDGIGPHVALQLIAELGTDMTRWKSAKHFTSWLTLAPNNKVSGGRRLSSKTPPSGNRGAAILRRCAMSLTRTPTALGAFYRRLVPRIGKAKAITAAARKLAVLIYRMLSGTLRYRTITAADYYSLNRTRELKHLRKRARLLGFHLLDQSTGEVLLSPVS

SEQ ID NO: 497494 - protein, 315 aa, unidentified
MPKSTTAVVTIGIDPGKNTLHLVGLDTRGAIVLREKVARARIVSRLANVPPCLIGIEAGMGTHYVTRDLLALGHDVRQVPPVYAKPFRQTHKNDFRDAQAIAEAVQRPTTRCVPPKTVEQLDLQALHRVRYRLVGQRTAIINQIRCFLLEHGITVRQRLHWLRHALPDILAQRADVLSPRMVRILEDLAQDWRHLDDRIEIVSGEIEALSKNTEPCRHLMTIPGIGPIISSAVVAAIGDGTAFTRGRDFAAWLGLVPKQISTGDRTILGRITKRGNRYLRMLFLQAARGRSAVAKELDETQLWPLACRGGSTAAP

SEQ ID NO: 497495 - protein, 363 aa, unidentified
MMKQNIIFGIDVSSKSSTVCVVIDRIKQGETFKITNDSFGYQDLLDRLNQYLITPLVVFEATGVYSLSLQAFLEDYHIKYLKLNPLKAKKLMDNNLRHNKTDKVDAYRLALIQFNAPQKLRAPQPKEYHELQNASRYYEELTQALIINKNQLHRNLQSTFPQIESILSTSSGRVYWTIVSLFPHAQYVLNHNENQVFQSLLAISGIGRQRAHYLTTRLYALARQAYPYDNESSITIRAIQRNIANLLSLSAERDNVINYMEKLAMQANARSLTIYESIPGIAKTTAVRLVAELGDLSRFDTSAQIDAFVGIDPGRYQSGEKDSHLGITKHGNHLARKILYRTITQMETVKATQPCHITVSVQN

SEQ ID NO: 497496 - protein, 473 aa, unidentified
MSKGSGMTRGDRRRNARRERLRAVLPRDGAVIGIDLAEDKQAIAVVDHDVRVLARKTVRVKAFRLGAALDWAVGQARAKGFTHVTVACEPTGPRWLQVQRLCAERGLPLVCIQPLMSHIAREQQDYTTHKTGEADCVLIGRLAVELHCYLPGELDETWAHLRHLGRRRAQLITSATASAQRIRDFLSVAWPAVTETCAQPLESVTWLAALQVVTSRCGADPGRLAAMGEEAFTALVRGAVPGWGGKKGWGTICGRIFAALTGTEGVVVSSRRGLPRRCADEPGDLQRTRAQRRAVEADMVAVLEELGLSRLADIPALTAVGAAAILAEAGDPRRYDSSSSVARHAGLSPSDNASGAFYGEAHISRRGRPGLRLAVWRAVWPMLRFNPVMAAKYQAMTSAADDAAHAAAGQADAGSRQVSAAAAAARARRARARVACAASLLRWIYSMVAHDTSWDPGVASGPASSQHTPAEAA

SEQ ID NO: 497497 - protein, 420 aa, unidentified
MGYIGGGLHRAFVERIRGVEPERLLAVPIDVGKHTAAALVCDFWGEVVVAPFMFSLDERGFEMFARAVASAGAERGASWTRVGLEQAGHYHQVLLARLIDHGLDVVLLNPAQVRANRAQDLLRSLKSDVRDLGAMAELLIRGKGHPAGTVDEAMAAQAALAAHRARRVKARTALKNQVHKGLDLVFPGLSGCFRTILDTKLGRLLLTEGMDPVRIRRLGPERLRAFCLRRGVRVTRAKADQVVQVARVALGLPDGIARVHAAVLASDAALLGRLDSEIERIEEGLTEVLPRTPAAILRTIPRVGVVRASMYGAGVGDPKRFRTSAQVYRLSGLVPKLYESAGRRRAGTRISREGKVELREAIIELGRAMRQGHPDFARYAGALEARGKRPGVVACALGHRANRVAFAMMRDQVPFDSDRW

SEQ ID NO: 497498 - protein, 342 aa, unidentified
MEVTALPAPVFCGVDWAEDHHDIALVDAGGKPLAKQRINNDAEGFAQLIALLGEHGDRADAMIPVAIETSRGLLVACLRATGRPVYAINPLAVARYRDRHSVARRKSDAIDAAVLANILRTDMAAHRALPADSELVQAIAVLARAQQDAVWERGQASNKLRSQLHQFYPAILDAFAAHKHGLCAREARTILAAAPTPTIAATLTRRRLQSLLMKAGRVRGIEAEADRLHEVFQRDYLHQLPQVEAAFGQQTTALLRQLNTACLNADQLEESTAAAFGEHPDAPVIRSFPGLGSLTGARVLAEIGDDRTRFASADSLKAYAGSAPVTRASGKSRTVMSRRIKN

SEQ ID NO: 497499 - protein, 245 aa, unidentified
MAQLLWIGIDVSGKWLDAATWPATTNKRFAYTDEGLAALLAWLASRPVAEIAMEATGGIERRLAYMLADAGLTTRVLNPKRVRDFASSITAAKNDRIDAMMIARSAAVVPGAPLQRDAGREALAELVGLRQLFSGHVTALRNHGRLLRGPAQRAQIASQVRALRAQMQQISREIDATITASAPLAAQCALLRSMPGVGPVVSAGLIARLPELGRLSAAKVAALVGVAPYDDDSGERSGKRRISEL

SEQ ID NO: 497500 - protein, 341 aa, unidentified
MGQLNTIGVDLAKNVIQVSVVSPSNKELLNRALTRTKFKEFLAKQQPALVAFEACASCHYWARTAQRHGHEVRILPALSVAPFRQGHKTDQNDALAVAEAAVRPNLKVAPIKSLDQQGLQSIQRSRELLVQERTALSNHIRGLLFEFGIVMPKGFATLHARIPEILEDGENEVPHIFRSTLQLMYRRLLALKEDLDVLTRQIEQLVQANDACKRLLDIEGVGPISAVLLYATLGTGEAFHSGKEFSAYIGLTPKQYSSGGKTKLIGLSRHVANKRLRAVLIQGARSYIHRVKEPKTTKDQWLLAMVARSGYGKASVALANKNVRTAWAMLTRGTEYERVAA

SEQ ID NO: 497501 - protein, 392 aa, unidentified
MSQQHCHFEASRSLTALEQDSTIIAVIEMSQSKWLVAALVPGVKRHPLKKLDAHEEGLLRLLHRWRNEAAQAGREIKRIVVAYEAGRDGFWLARWLRARDVEAYVIHPTSIAVSREHRRAKTDRLDTELLMRAFVGWLRGEKRHCSMVGIPTIEEEDARRPNRERQNLVTEQTRIVNQMKAIFARFGIRAFRPTLRKAEEKLKGLPTAEGMPLPGNTRAELCRHLARLRVVREQIRAIEQERVRKLAAAAATENGSPAMVRLIARVIGVGIETADMLVNEVLSRHWRDHKALARYAGLTGSPDESGKRRRERGLARAGSARVRCGMIQFAWRFLRFQKDSGLAQWFAARTADGRGSTRKTMIVALARKLLIALWRLVEKGAVPQGVALRPAQ

SEQ ID NO: 497502 - protein, 369 aa, unidentified
MPHVTSIGLDVHARSVAAAAFNPFTGEVVHRDFGTDAAEIAEWALGFEEPRACYESGPTGFHMARELRALGLDCAVAAVSKMQRPAADARRKNDRRDAEFIARMLATHNIVEVPLPDAAVEAARDLDRALDDATAEYRRARQRLNMFLIRLGHVWDERNADGTRKGSWTRAHWRWISGIGLEGPQRDVLEYYVTAARCAESDRRQLEKKVLALARTDRWRPAVEALSCIKGIDALTAFRLAAEAGSFTRFRTAPAFASWCGLVPSERSSGETERRGGITKTGNRLARTALVESAWHYLTCTPRPKAPAPGADVPAAIRARADDCTARLCRRREALAAAGKSSCKANAAVARELACWVWEIGRRAEGTLG

SEQ ID NO: 497503 - protein, 366 aa, unidentified
MPSWYAGGGNLNLKGGDPMRFYTTTHQYYCGIDLHARVMYLCIISSDGEIVLHRNMKADPESILKAIEPYRPDIIVGVECIFTWYWIADVCAEEGIPFTLGHALYMKAIHGGKAKNDRIDSGKIAAMLKGGMFPMAYVYPAKMRATRDLLRRRNYLVRKRADLIAHVQNTNSQYNQPAFGISNITHKCRREEILGHFTDPDVYMSMRVNFDLIDQFAVQIRAMEKHVLDNAKSHDPQSLYLLRTIYGIGKVLSMTILYEIGDIDRFPRVQDFASYSRLVKCARESAGKRYGTSGSKIGNVHLKWAFSEAAVMFLKGNPEGMKYKKRLERKHGKAKSLSILAHKLGRATYYMLKREKAFDMNKFLRA

SEQ ID NO: 497504 - protein, 381 aa, unidentified
MKRYYMGVDWGDRLHQVYVGDEEGKKVREVKVPETVEGLAEMGRWLDEKRAEEIELWAAIEKPAGRIVDFLLDHGVVVYPVNPKAVDRVRDRYRMSGSKSDPFDAYVLAEFLRTDQVHLRALQPNSEKAQELKLLSRDQRRVGRQKTRLLNQLTITLKEYYPRVLEAFNDLETQIVLDFIKQYPTPAHLSVLKRKEFNRFATKQHHLGKARCEELWEELKKPQLAVPEHVVRAKAQLVEVLIEQLQASIKAVKIYHERVESFFASTPAAEIAKTLPGGKSGVVVAGIWAELGDARGRWKSSRHLQAEAGAVPVTKASGKSRVVQFRFACNKHLRHTMYWFSFGSLKHCEWARHYYRGQRLKAEPIPRRCGPWPPSGSRLFL

SEQ ID NO: 497505 - protein, 317 aa, unidentified
MERRQSNTRIAGIDVGKRWLDVTVHGLEDELRMENGPAGFSELIAWLKAREVGRVGLEATGGYERGVRAALDEASFEVVVHQPLEVRRFAQLRRWRAKNDRLDARLIAAATAQVEAVKAAQDPRLVELAERLTAYEQITDQIVELKTFLESVTLKDLASLLRTQIRGLERAKARLSLDVLRRIKAEADLLARFRLLTSLPGIGAIVAASLVIRMPELGQMRRGQAASLIGVAPFDRDSGQWRGLRFIAGGRARPRRMLYLAAVTAKRFDPGLKAFAEGLLARGKAKKLVTVAVMRKLIEAANLVLARGQPWAIRPAT

SEQ ID NO: 497506 - protein, 423 aa, unidentified
MMKLKYSICCGLDVHKNVIVATIVTTNKDGISEYLQKSFSTINSDIQRFHNWLIENNCYHVCMESTGKYWIPIFNYLENDIDVCLTHPKYVKAIKGKKTDKKDSKWIADLYKFDLVRCSFIPPKDFRQLRELSRYRFKLVCMKSSEKNRIQNCMTISNVGIASVLSDPFGKTATEIISYLLEHTADSMDEKAVRKLIKKGAKSKSDEIIEAIKGYTIETDQAKKLELARGHLEYLDDMITQTEVELYVRIKPYYEFVEFVSTMPGMTELSSTIVLAETGVDMDIFDDAKHLCSWCGLSPANNESAGKKKSVRIAKAGDYLKPMMVQCALAAIKSKKQPYFAIKYGRIKKRRGHKKAIIAIARMMMVCIYHMVSEKKPFTPTDYEELMAPQNHVESVVLNENNVFAYLESLGYDSSKLVKRNDN

SEQ ID NO: 497507 - protein, 431 aa, unidentified
MHMAAVRADRAPEPVRSFGTFTADMHRLVDWFTECGVETVVMESTSIYWIPIFELLDARGFTVFLVNARDAKHVPGRKTDVSDAQWLQRLHSFGLLRASFRPKGQIAELRAYVRQRERLLEYAASHIQHMQKALTEMNLQLHHVVADITGATGLRIIRAILAGERDPEALACLRHYSCHSSAETIAKALTGSYRAEHLFALEQALALYDAYHEKASACDARIEAVLKELSIHRGHSHGSPPQASRRRNRTDQANALTFDVREALFALLGKDITTIDGLGPYLSLKLIAECGDDLSSWPSAKHFTSWLGLAPSNKISGGKMLSSRTRRSGGRAAALLRLAAVTVGRTDTALGAFYRRLSARTGKAKAVTATARKIAVLFYNAVRYGMDYVDPGASSYETRYRTRVVNNLQRRAKAFGFVLQPLEPKVGAAVS

SEQ ID NO: 497508 - protein, 429 aa, unidentified
MVPYKHGIGSPVVFVAIDISKAQHEVLIEPPDGKRKRLRVANTKPDFDELVTVLQRYRIPCHIAFEATVDYHRPLASVLGQQGFQLHLVSSIATNRTREALYNSWDKNDPKDAQVILHLLKTGGTQIYHDPIVSGYNDLQELANTYQQLSLRKVRLYHSILTHFLPLYFPEAERYMGTSRAEWFIHLLLLTPCPAAVLAHSKARFIKAASRVRGRKVDKVRWLGDFYETAKHSVGLPVPASSEAIRMFRLVLEEYAALCERRYQLEEHIESKLGGHPDFRRLQTIPGIGPVLAMLILAEAGDLRRFNHYRKFLKYCGLDLCTDQSGKFRGTTRLSKRGNARLRYAFWMAGTGAIRVRQNSFREKFDNYVRSDPQSADLKRKAYTAVAAKVARVAFGLIKTGTDYRRFPEATIPSGRIPSLGAVEALSTS

SEQ ID NO: 497509 - protein, 352 aa, unidentified
MTTLASQRQPAIIVGVDTHKHSHHAVIITSIGRRVAGREFPATTKGYADLVSWARGQGLIQAVGVESTGSYGAGLTRFLTHQGITTREVNTPHSHTRARVGKDDAIDAEAAARKVLAGAATAVPKRTDSVVESIRFLMIARDSALKARTAALVQLQDVLVTAPDTIRQRVPSSGLMAARHCQKFRPDASRMDDPVNGVKFALRTLARRIMHLDEEIADLERSLRPLVHVLAPTLISKLGIGTIHAGQLLITAGENLDRLHSEAAFARLCGVAPVPVSSGKSHRMRLHRGGDRQANRALHMIAVVRLRYDPRTINYMQRRLAEGLSKKDVLRCLKRFIAREVFHDLKADLLAT

SEQ ID NO: 497510 - protein, 346 aa, unidentified
MMIIGCDFHPSWQQVSWLDTETGECGERKLVHASGDGKVFYQQLAAPVLIGMEATGNSQWFIELVQDLGHEIWIGDAAQIRASYVRKQKTDKRDAAHILKLVVEGRFPKLWTPDREQRDLRQLVLHRHKLVEIRSRVKNELQHLSLNKGMQKKRTLWSAAGQKLLRELPLKPWAACRREDLLGLLGMLNEQIGKLDQAVQQAADQHPQAKLLMTQPGVGPNTALAFVLTIGDVSRFPRGKQVASYLGLIPREESSGGRQKLGAITKQGNRLVRSLLVEAAQIAVRFDPQFRREYLHRCHQKPKGVAKVAAARKLAVRLYWVLRTNVAFPEIVRIESSPRVALVGAS

SEQ ID NO: 497511 - protein, 352 aa, unidentified
MSKQVTAMSPKLFIGLDIHKKSWKLHFTTDLVEGTGHTFPPDAQKVKSYVQRNYTNYEVSIAYEVGCCGYVPARAFISFDWDTYVVNPADIPRPAKNNFVKTDRIDAKNIAKQLRSGNLRKLTIPEKSREALRCLTRQRTALVRDYRRIKSRIKSLLLYHQIHIPPDMETPKWPIKFLDWLKRLNFENDNTKFTLESMLNQYGFIDKEIKSVSNTIRAYCKKHYKLDYNLLRSIPGIAGLTAAYILSELGDLRRFTSFKKFASYVGFVPGVQQSGDNFYNTGASPRANRHVRNMIVEAAWIAIRVDPVMQNYYRSHPGKNSKAVIFKVGRKLLSKLLSVIKTEIPYSVGVIS

SEQ ID NO: 497512 - protein, 368 aa, unidentified
MNRVEDLSRSILPFDQEKAVVAVIELSSTSWLVAGTLPGITRRPLKKLEPDPAALGRLLDRWREEATSKGMQIDRVIVAYEAGRDGFWLARWLQARGMETHVIHPTSVAVSREHRRSKTDRLDTAMLMRVFLGWLRGERGHCGMVAIPTMAEEDARRPSREREKLVGEKTRIINTIKAAMQRLGIRGFNPALKRAAKQLDSLTTPDGDPLPPNLRSELQRYLERLSLVREQIATIERERLARLEAAPDMKTNAMVLLLTRIIGVGVETADMLVQELLSRKLRDRRAVARYAGLTGAPDESGARRREKGLSKSGNARVRRGLIQLAWRFLMFQKESGLAQWYRHRTVGDAPTPRPKGIVAIGLSRPTEK

SEQ ID NO: 497513 - protein, 412 aa, unidentified
MDVIVECCAGLDVGKDEVVGCVRTPGPGGKGRRSELRVFPTFTSGLEALADWMAENKVAEVVMEATGQYWKPIWYLLEERGFDLKLVNARHVKMVPGRKTDLADAAWLAQLLEHGLLRSSFVPPPAIRELRDLTRYRKRLIQTHTAEHQRIQKALEDAGIKLDSVASDVLGVSGRAMLHALVDGQRDPEVLADMSKASLRKKIPQLKEAMRGRFDSHHALMIRIALEHLEHLEASIAALDDAVDQVMVPFAEARDRLDTITGVGQRAAECIIAEIGVDMTRFPTAAHLASWAGLCPGNNITGGKRHSGKTNQGNRWLGEILNQCAQSASQTRNTYLAAQYWRLAKRIGKKKATVAVSHSILVICWHLLTDNCDYDDLGGDWFVRRTDTTKRRDHLIRQLQDLGYGVTLTDVA

SEQ ID NO: 497514 - protein, 334 aa, unidentified
MENIALIGIDLGKNSFHIHCQDRHGKALFRKKFTRSKLFEFLATCQATTVVMEACGGAHFMVRKLLELGHTPKLISPQFVRPFVKSNKNDFVDAEAICEAASRPSMRFVQPRTESQQAMHALLRVRESLVRDKVKTTNQMHAFLLEFGVSAPKGPTLIRRFAEILDTNPLPPYLIRLLQKLREHYEYLLEQIKDLESQLKRSLDEDTTGQQLLTIPCVGPLTASLLSTQLGDGKQYGSSRDFAASTGLVPRQHSTGGRTTLLGISKRGNKKLRALLVQCARVYLRTLEHRSGQLADWVRELLLRKNNFIVTCALANKLARIAWALTIRDKPFAA

SEQ ID NO: 497515 - protein, 381 aa, unidentified
MSIVALDIASKAATFCVLGTQGITGQGSLTFDHDGFSSFMSSEQISDASLFVMESTGGYHLPLYHFLLNHGRKVRIINPLLIKHFHDGQTLRRTKTDALDAVAIARYAQSHMSALEEERMQLDSESKMLARRRARNAEDLAKAKTILKSDLSVAFPELLRFNVFIKTLLEFLSVYGCAKDVLAATEEQLQQALDVQKGRKSDVVTVQKIQELARISIGVSYRAAMVRDSAKAVLACQQRDEELTKALVELENALHKRQMEILTSIPGIGEVTASHFLSEIPDITQFATYQKLIAFAGTDPGIYESGNTSKALKISKRGNPLLRKYLYLMADSCMRHNIVFHAYYHKKREEGFPHRKAMVATMNKLIRTLHALLTKDETYSI

SEQ ID NO: 497516 - protein, 347 aa, unidentified
MSEHTPTTMGIDISDQWSTVCVLDTDGEVMEESRFRSTRAGLGRYLEHRAPMRVVLEVGTHSPWMSRQIEELGHEVFVANPRQLRLIYQSDRKCDAVDAEALARLGRVDPKLLRPIRHRAADTQLARAQLRVRDMLVAARTRFILSVRGMAKSMGEVIPRASAESFHVGVPGAVSAPVWQVVEPLVEAVGGLTAKIKGCDAALEELSLTRYPETAALRQISGVGPITALAFVTTVEDPHRFARNRSVGAYLGLCPRRDQSGASDPSLRITKAGDPYLRRLLVGCAHYILGPFGPDSDLRRWGLAYAGRGTNSKKRAVVAVARKLAVLLLSLWKTGETYEPTRHGAAA

SEQ ID NO: 497517 - protein, 363 aa, unidentified
MSHNEFKKIREPIEPQEVSPMKQEMTVLGIDLAKHVFHAVGMDNTGKIVFRKRLSRHDLMPFIAKLPMVLIGLEACGGAHDWARRFRASGHEVKLMAPQFVKPYVKSNKNDSRDAEAIAEAVTRPTMRFVPAKDVDQQDIQALHRVRERLISERTALVNEVHGLMHEYGIVMPKGVSKFRQAVVGKLESEKDKLTPLSQEMFWKLVEEFAALEEQLAYYQKKLEALATTHPECQRLMTIPGIGPLSATALVAAVSDASAFKNGRQFAAWLGLVPRQHSTGGKERLLGISKRGDSYLRKLLVHGARTTIRWVGRKTDRRSQWIRQLVERRGKNRTAVAVANKNARIVWALLTSHQDYQLATGEG

SEQ ID NO: 497518 - protein, 359 aa, unidentified
MDDPKQTREQVTLGVDTHAELHVAAALDERGRLLGTCTIPTTATGFAELIRWTREYGDIARVGMEGTGSYGAGLARWLRARRIDVIEVDRPDRRTRRRRGKSDSVDAEAAARAVQAGTATAQPKAGDGAMEMVRALRVARQSAIKARTQAANELHALVVTAPDIMRDHLRRMKVPQLVATAAAFRRSAELTTPTAATKLALKSIAVRYQQLSGEVNALDKHLDVLVAAAAPALVAIKGVGTDIASTLLTIAGDNPERLTSEGAFAHLIGVAPIEASSGKITRYRLNRGGDRQGNRALYLLAVGRMGWDPATKAYVARRTAEGRTKPEIIRCLKRYIARELYPVLLGATSALVSSPPEGA

SEQ ID NO: 497519 - protein, 357 aa, unidentified
MPSSDVKYIGLDVHKEAIAIAVLNGVGKLVMESIIQTKASTLLDFLHGLHGELHATLEEGTWAAWLYDVLKPHVLEVVVCNPRRNALLKEGSKSDKVDARKLAELLRSGMLRAVYHGENGLRALRELARSYEVVSKDLKRVMNRLKALYRAWGIPCAGTQVYSRRHREQWLKKIREAGVRRRAELFYQQLDGLQVLRRTARGELLAESRKHQAVKVLRQIPFIGPLRAAQLVALMQTPYRFRSKRQLWTYSGLAVETHDSAQYRYVDGQLQRSKKPQQVRGLNQNHNHAMKEIFKSAAMSATGRAGVFQDCYAGLLAKGVEPELARITLARKIAAITLTLWEKGECFDAGYVKRQAA

SEQ ID NO: 497520 - protein, 449 aa, unidentified
MHRTVREAQAVNACVETRGSEYSNKGVLPARDTSTPAMKVEHECCAGLDVHKRTVVACVLKGAPGKEPITETKSFGTTTPELMEMVEWLKSHATTHIAMEATGSYWMPVYNLLEGHFELIVTNAAHMKAVPGRKTDVADAHWIADLLRHGLLRASFIPSREQRDLRELTRHRSSLAAKRGQVVNELQKSLESANIKLQSVVTDITGVSATEMLAEMLAGKKDPKELAQLARRKLRAKIPELEKALSGELRAHHRLILEQLLADMAFFLAQIAEIDAHIEALLQKDNDDIDRLDGIPGINRRTAEVIIAEAGTDMSRFPSARHFASWIGLCPGQNQSGGKRRSGKTRKGNRSLRSALVESAHGAIRKKGSYFGAQYRRLAARRGAKKAFVAVAHSISVVIYNILKDKTCYREAGSDFFDKLNPERVLTRLTKRIQNLGFQVQISPAPMAA

SEQ ID NO: 497521 - protein, 448 aa, unidentified
MSKIKTKNGTLKRISQLTVINPTVAGVDVSDKEMMVAFPISSEQLEVRSFGCYTRDLHDIAKTMRQYSITSIAMESTGVYWIPLFLLLQEYGFEVYLVNAKHVKNVTGRKDDESDAEWIQKLHSCGLLTASFQPDSMTRTLRSIVRHRQNLERTCSAYINRIQKALELMNIKLHTIISDIDGKTGLQIIEAILAGERNPEILADLRDKRIKASREDIIKSLEGYYTTEHLFELKQCHQLYCMHRKLIGECDREIEKQLIEQIASKNGGVITDIPEMERKASQKHKLPYNATAYLKAIFGVDVTAIFGISELCALTILSEVGTDMSKWKNERHFKSWLGLAPNTKISGGKVISSKIKKKKHYAGQAFRMGANGLHNSKSSMGDYSRRLKAKAGPGKAIVATAGKLATTFYKMVDTQQAFNPKALEDYQQIYKQKKINQLKRKLELLEAA

SEQ ID NO: 497522 - protein, 387 aa, unidentified
MYYIGIDISKFKHDCAVIDDSGEIVTPSWSFTNDAEGFSQLKLLLNSLDTETRIGLESTGHYGMNLKLFLESNNFSFMEFNPLLINRFVKSKSLRKTKSDSIDCMMIAHYLMTVEYKPYPSSFYHTEKLKSLTRFRDSLIRLRSRQLVELTNILDKVFPEFKPFFGSRFSVTALYILSNYSSPEKIANMNSKSYEALRKLSRGRFSTVDFAKLKQLAKNTIGTTEDYLLLQMQIVLDIYRQLDSKVDETEVSIKECVSDMNPPMLSVPGIGIESAAVILAEFGDFSKFKNASQMLSFAGLEPGYFQSGTSETTGKMVKHGSSYLRYALMNCAQTVVNYEPTFAMFYSKKCAEGKPHRVALSHVVKKLLRVIYTLQTKNIAYDADFVR

SEQ ID NO: 497523 - protein, 467 aa, unidentified
MRKASKKVKSPAAVGKKRLTLLEQINFNAAGLDVGSREHWVAVPVDRDPQPVRCFGTFTSDLHALADWLLQCGVKSVAMESTGVYWIPVFQILEGRGLEVLLVNARHVKNVSGRKSDVSDCQWLQQLHSYGLLAGSFRPEDQVCVLRSYLRHREHLVEQASTQIQRMQKALTQMNVQLHHVLSDVTGVTGMAILDAIADGERDPLKLAQLKDPRVRSSVETIAKALTGDYRTEHLFVLKQARESYRFLQAQIAECDVEVDTVLSGWEAKVDLQQQPLPPTRKKNRSKSKHKPLPFNLRQQLYRVTGVDLTEIDGLDVLSVQALISEIGLNMHRWPSQKHFASWLGLCPDHRISGGQVLKHKTRAVTNRAADVLRMAAQSLKDSRSALGAFFRRLKARLGPAKAITATAHKLARIVYLLLKHGHHYIDPGAQYYEQRYRDNVVKHLRKRAAALGFTLVENSALNLQVS

SEQ ID NO: 497524 - protein, 343 aa, unidentified
MKLTRVGVDLAKNIFQLHGVDRAERPVWCKRLKRNRWIEEIEQNVEPGVEIGMEACGGAHHWARLLQSKGYRVRLIAPQFVKPYVKSNKTDANDAQAVCEAMSRPSMRYVAVKTIEQQDIQAVHRVRASLISERCAKANRLRGIAYEYGLVAPQEIAALRVAVPAWLEDASNGLTVRLRALLSGLYADLRALDERVRELDKEIRAIGRENEAVGRVQQIRGIGPLIASALVAMIGDARQFKNGRHVAVALGLTPRQHSSGSKERVLGISKRGDSYVRTLLIHGARSALRTAAGKNDRMSRWALALAKRSHVNVAVTALANKMARVAWAMLKHGTSYEPNGLAA

SEQ ID NO: 497525 - protein, 355 aa, unidentified
MNDAKYIGLDVHQATISVAVLDSAGKLVMEAILETKAEAILQFIHGLRGSLHVTFEEGTCAAWLRDLLKPHVTQVLVCDPRKNALIKAGNKSDRIDARKLADLLYLNKLNPVYHGETGIRALKEVARSYLALTRDTTRVMNRLKALYRSWAIPCAGQRVYAPRDRSEWLAKINEAGVRRRAEIYYQQLDALRSLREQVRRDLLAEGRKHSAMKWLRQIPSIGPIRAVLLIALMQTPHRFRTKRQLWAYCGLALKTSTSGEYRIVEGQLKRSKKFLAIRGLNANHNHDLKNIFKGAATRAAAVPGPFQEFHAGLVARGMKPTMARLTLARKIAAITLIVWKKGVSFDAEHLKQQAA

SEQ ID NO: 497526 - protein, 452 aa, unidentified
MAKKGKRRCDTLPVLHPDAAGIDVGASELFVAVSADRDPHPVRSFPTFTRDLYALADWLEQCGIHSVAMESTSVYWIPIYQILEARGLEVYLVNAQHVKNVPGRKTDVSDCQWLQYLHSVGLLRASFRPPGFICAIRSLWRHRASLIQMAAEHVLHMQKALDQMNLQIHRVLNDITGVSGLRILDAILAGERGPLTLARLCHGGVKSSEDIIAKSLEGDYRPEHLFALRQSLAAFRYYQQLVLEADREIQLQLAELKTAATAQPTTPPPTKVTAHYARHYEPRTFDLRGELYRVFGVDLTNVPGISALTAQTILCEVGTDVSRFRNASAFASWLGLCPEKKISGGKVLFTKSRRVRSRGATALRMGAQSLHHAKDYLGEFFRRITRKLGRPQAITATAHKLARIVFHLLSTREAYNQSVFHKSEEETLLRAQYRLRRQAAQLGFQVIRVENG

SEQ ID NO: 497527 - protein, 399 aa, unidentified
MQEATQHDAVDVFVDVGRGQHHAVALDRNGKRLYNKALPNDEVKLRALIAELKTHRRLLFVVDQPSTIGALPVAVARAEGVLVAYLPGLAMRRIADLHAGEAKTDARDAAIIAEAARSMPHTLRSLRLADEQLAELTMLRGFDDDLAAQVTQTSNRIRGLLTQIHPALERVLGPRLDHPAVLDLLERYPSPSALAAANEKTLANRLTKLAPRLGKNLAAEIVQVLNEQAVIVPGTQAAAIVMPRLAQQLAALRKQRDEIAAEVERLVLAHPLWPVLTSMPGVGVRTAARRLTEAAPKAFATAAHLAAYAGLAPVTRRSGSSIRGEHPSRRGNKVLKRALFLSAFAALRDPVSRAYYSCKIQQGKRHNQALIALARRRCDVLFAMLRDGTIYPPKSAPDA

SEQ ID NO: 497528 - protein, 359 aa, unidentified
MDSMTRPTIVVGVDTHKDEHVAVALSELGQRLGECSVPANTVGYATLLEWSRQLGTPRVFGIEGCGSYGSGLFRFLRRNGAAVTEVSRPARRGERRLLGKSDVIDAEHAAKEVLSGRPMSTPKAATGSIESIRLVRIARKAAVKVQVTAIITLKATLITASDELRGALEPMTDHQLIVACAELNTDGDLVNPVVAMNYTLRSLANRWLEIHEEVKIHSKHLKRLTEQTAPALVAAFGIGPDTAGELLVAAGDNFDRIRSESAFAKLCGVAPIPASSGKTSGRYRINRGGNRQANAALYRAVIVRMRWHEPTIAYVKKRTADGLSKKDIIRCLKRYLVREVYRLLPSPTAPNLTSASGIN

SEQ ID NO: 497529 - protein, 346 aa, unidentified
MGKIITDYSSVTTVGLDLAKHTFQVHGVDAAGRVVVAKSIKRSNLLEFFASLPRCLVGLEACGSAHHWARELIKLGHDARMMPPAYVKPYVRRQKNDASDAAAICEAVTRPSMRFVGVRSLENQAALMSHKTREMLVSQRTQLINGLRGHLTEVGVIAAQGPRSARELADRIEAGDETIPLAVCEALAPLVVQWRNLDEAIARLDRAIAKMAQKDETARRLMSIPGVGPITASAIAASVQDASSFSGPREFAAFLGLTPKQNSSGGKQRLGRISKMGNRYLRKLLVVGAHAVLFHRKPHTDALRTWAKKLIEKKPFNLVAVALANKMARIAFAILRGKTSYREIPA

SEQ ID NO: 497530 - protein, 389 aa, unidentified
MKIYVGIDIAKLNHFAAAISSDGEIIIEPFKFTNDADGFQLLVSKLESFDKNSIIIGLESTAHYGDNLVRYLVAEFYQVCVLNPIKTCQMRKNNVRKTKTDKVDTFVIVKTLMMQDDLRFITFFDLDMMDLKALGRFRQKTIKQRTRLKIQLTTYVDQVFPEIQYFFKSGLHQHAVYALLKEAPSPKEIASMHMTHLANLLKVNSHGHFTKELAKELRVLAQKSVGANDSAISIQITQTIQQIELLDSQLEKIEAEMTDIMKFNDSVIMTIPGIGYINGGMILGEIGDIHRFSNPNKLLAFAGLDPSVYQSGNFQAKTTRMSKRGSRVLRYALVNAAWNVVRNNATFKAYYDAKRAEGRSHYNALGHCAGKLVRVIWKMLTDEVEFNLE

SEQ ID NO: 497531 - protein, 338 aa, unidentified
MQTGQTVPTYTLFVGVDIAAKTAMVATQRSGAKASRSLTIDQTPAGYTSLVHQLQATGSVPSQVLVVMEATGSYWISLATRLVHEGFAVSVINPAQAHHFAKALLKRAKTDAIDAQTLAQLAMILQPEPWTPPPQIYYALQQRLAQRDDLLNLRQQVRNQLHALVQHPEVIAEVHARMERLLATLEAQLTEVDSEITAALSQDSTWAAAATRLQSIKGVGWVTAAWTLVTTLNFTSCDTVDALTAYAGLAPMPRQSGSSVWHRPSIGHTGNGRLRTAFYMATLSAAQHNPVIKTFYTRFREAGKPEKVARCAAARKLLHIAWAVVKKDQPFDPNYALG

SEQ ID NO: 497532 - protein, 415 aa, unidentified
MNTTKQWYAGVDWGSEKHLVRLIDEHGRDVGERVFEHSGEALAAMADWLMAKSGADDPGQIHVAIEVPHGPVVEALMERKFNVWAINPKQLDRFRDRYSPAGAKDDSRDGLVMASGLRTDPHCFRQLSDTDPLIIELREWSRIAEQLAAERVSLTNRMRQQLWRYFPAFLELDSDLSSSWLLELWQTLPTPDKAKRVRQGTVSTILKRNRIRRFEAAQVLDILRRKPIAVADGTTTAACAHIRTLIDRIRLLNRQISDANRQLDRLTATLGSAEEMPPGQPTQRDADVLASLPGIGRIVLATLLAEAWDALQRRDYHALRCLTGVAPVTKRSGKSRLVLRRYACHRRLANAVFHWAHVAIQHDPTSRAKYASLRARGHGHARALRSVADRLLNVACSMLRTGTTFSPSLATQNAA

SEQ ID NO: 497533 - protein, 379 aa, unidentified
MKNVRFVGLDVHAQTIAVAVAEAGAEVRSVGVIPNSAESVSRLVKKLGKPEQLRVCYEAGPTGYVLYWQLTKLGVRCEVVAPTLIPVKPGDRVKTDRRDAEKLARCYRAGDLTAVWVPDAAHEALRDLVRAREAAKQDQLRARNRLGKFLLRQGRRAPEGTKAWTGKYLKWVKEQVHFEQPAQEATLLDYLHEVEHAGERIQRLEKSIDTAIETVPEKMRAVIQGLQSLRGIAKVSAVSIVAELGEISRFAKPRQLMGYSGAVSSEDSSGEDVRRGPISKAGNAHLRRIVVEAAWSYRHRPSIGAGLAARQQNSSAAVKEIAWKAQHRPHARYSKLLAKGKTKQKVVTAVGRELLGFIWAIGVHVEQTVSASAPKRRAA

SEQ ID NO: 497534 - protein, 363 aa, unidentified
MEQFIGCDAHKKYSVFVAVNERGEASPAIRVGHDREQYRQFLERLPAGSQIALEAGGHYYWMVDEMEAAGHQPRLVHPLEAKKRMGKTGKKTDKVDANGLGILLRNGTLPEVWIPPSGLRDQRESLRLRMFLVQQRTRLKNRIQGALARYNIQIAGVSDLFGGEGRLRLGQRLGELPEHTRQSVELELVTLDFLEVQLGDIEKRLEELMKVTAEADLLKTLPYVGRILSMVMTLEIGKVERFPSAAHLASYAGLVPRVHSSGGHTRLGQICGDVNQYLKWAFIEAGNLVVIHQKHLVGQHVVRLYQRVKRKKNHQKAVVAVARHLAEAAYWILKKQEVYRDPQPKPKAPAQAQAAHALSSTHG

SEQ ID NO: 497535 - protein, 343 aa, unidentified
MKKHMTIAVDLAKTVFEIAGSKEPGRICLRRRVGRGQMVQFFSREPASTVLLEACGSSHHWARQLESLGHRVLLLPPHHVRRYVLRDKTDKADAAALLEAHRNEQISPVPVKTIHQQTLASVHRLRSGWMATRTARINTLRGLLRELGLTIPRGPHHLLPGLQGALASGAIPEPLHPVLLCAAEEIRQLEARIHQAERELKTLSYSLPPTKRLLTVPGIGLLTATALVAFVGDPFRFKSGRRFSSYLGLVPREHSSGERRHLLSITKRGDTYLRTLLIHGARSLLLAAKRNSHPDRLRRWAISLEIRRGHNRATVAIANKLARIAWATWTRDVPYHGTVQDAT

SEQ ID NO: 497536 - protein, 337 aa, unidentified
MTNIYILAIDLAKRSFQVCATDRDGAVLYNRMISRTKLEKLLEAQTSCIVAMEACATSHHWGRVAEGFGHEVRLIPPIYVKPFVKRQKNDAADASAIAEAAKRPNIHWVAVKSAEHQARAVAFRTHQCLVGQRTQLINALRGHLAEFGVVVAQGRTNIKTITSMLEDQAIDLPAGVEDIVRLYLDQVELLSTRIDELTCRLREAVKVNDDMRRLCTVPGVGPVTAGAIMAFAPDLHSFSSGRNFAAWLGLVPRQRSTGGKTRLGRVSKMGQSDVRRLLIVGAMSRIRWIVRKGELPDNWLGRILGRKPRMVAAVALANKMARNIWAMMTRNEDYRLA

SEQ ID NO: 497537 - protein, 340 aa, unidentified
MVYGAIDLHSRFRQIRIVTADGAVVRERRVVTSRSPLRNAFAAVGAVRIRVEASTESEWVAQVLEAAGYEVIVADPNSASMDGTRHRRIKTDTRDVAALSDACRLGVFRRAHRVAAAQRTLRQELAVRRQLVRRRTGLIAHLRARLRQDGFRLGSGSRTTVHERVAWLERPASLRGSLTPLLETLAALTPIIATTTRRLTTTANADPVAVRLHTVPGVGPLVALTDRATVDVVTRFPSAGHVSSALGLVPREDSSGERRQRGHITKVGPSEARTMLIQAAWPCWRSRTARTTPLRQWADRLAARRGARIAVVALARRLSRILYAVWRDDTVFRVTPARAA

SEQ ID NO: 497538 - protein, 348 aa, unidentified
MQHIGIDLGGMESQVCVRAPDGELLFEHKVSTHSLPRFFKRQPRSRVIMETCSEAFTLAEDAAASGHDVRVVPATLVRTLGVGQRGIKTDKRDARVLSEVSTRVDLPGVHVRSRSARNWSSLLKMRQRLVEARTQMINSVRGWLRTQLISVRTTGTTRTFPARVRTKLLDQPIGMPAFVERQLSVVDELNNQIKAADAEVKSHAEEDPRCRRLMTVPGVGPMVASTFVAAVDDVGRFRSAHLLESYLGLTPGERSSSTRLRKTGITKAGPANLRRVLGQAAWYILSRRPTDPLAAWGRQIAERRGRQIAAIAICRKLVGILYAIWRDDTTYDPEKVSRLAAGTWDTSR

SEQ ID NO: 497539 - protein, 346 aa, unidentified
MEHYVGLDVSLKLTAICIVNELGKIVREGAVASNPEAIAAFVKSHAPHVARIGLETGATSTWLWTELSVMGLPVICIDARHAKAALRMQINKSDRNDAVGIARIMQCGWYKEVRVKDLDSHAIKGLLVSRALLVKIKRDLENQIRGLLKNLGLVIGRAKMNVFAVRAAELVEDRPQLAAAVEPLLKTREAVELQIADLDRKALRLARNDVQVRRFMTVPGVGAITALCFLATIDDPTRFKRSRSVGAYLGLTTRRYASGEIDWTGRISRCGDKMLRSYLYEAANVLLTRVAKWSVLKAWGIRVTKRSGLRKAKVAVARKLSVILHRMWVDGTEFNWSAKEVAAQSA

SEQ ID NO: 497540 - protein, 395 aa, unidentified
MTGPGGVGPGAGPKRGSVASSAVTKANRRSSSRRREPSVRDTLGVSQPTRRRRKETPLELQQQYVGIDLHRRRSVIGRMTAGGEVLEVVRIVNDPVALSLELAKAGPDPEVVLEATCGWYWAADLLEADGAHVHLVHPLGLHWDVRRVKNDERDATELAHRLRRGDLPESWIAPPEVRELRELIRYRAKLTALRTSAKAQIHAVMAKLGILPPMSEMFGPTGQGLLDAMAFEGAYATRVASLRGLLEGYERELAMVERELHARLADHKGYSAIQALNGVGRITAAIMVAEIGDVGRFPDARHLCSWAGLTPSHRESDTKVYRGHITKQGSTLVRWAAIEAVARYHGGPPIAPAFMRIAKRRGVMIARVAAARKLLSLIFYGLRDGEIRCLAREAG

SEQ ID NO: 497541 - protein, 339 aa, unidentified
MKYTPVGVDIAKHVIQVHFINEHTGEVVDKQVRRQDFLAYFSNREPCLIGMEACGGSQHWARELTKQGHKVRLLQARFVKAFVMGNKNDVMDARAIWMAVQQPGKEIAVKTEEQQSILVLHRSRRQLVKFRTAQINALHGTLLEFGETIHKGRAAMEREFPEALERMKERLPLYLITVLENQYNRLNELDSLIDDIEKQLTSVARQNETCRRLLEIPGVGPLIATAALAIMGKASVFKSGREFAAYVGLVPRQTGSGGKIRLLGISKRGDKYLRTLFIHGARAAALLTKEPGPWITELKKRRPASVAIVAMANKLARTVWAIAAHGRKYDKNHVSIRPY

SEQ ID NO: 497542 - protein, 423 aa, unidentified
MTTIAKKLAQIKPGTLLAGLDLGLDSIAAVVVDGNGQRVDRFLATQSRQGYEYLRERLQSVTRRQGACGVLVGMEPTNYYWKQVGAFLSQERLPFRLVNPFTVNRHREGDQLDRAKDDWRDAFMIADLLRTGKFTETELRTGAYAELQIGHATYWRLRHDRGRQVTLLTNALRQVFPELQQVFRDLTGQTAQALLRSVPAAAHIRQMSCADFIGRVRQETGARRLAVGRLRKAYALAQQSIGLTEGLEALCFDLQNSLKSALLLDQQARQLLSILMRAFWILPEAPYLCSIQGLWETSAMGLLAETGDLSCYHKLKSLTKLAGTQPTPKESGRYHRSLTPFSKQGRSRLRVVLFWATMHLLRHNDAIGYHYHRLQTRSQRPLEKMEAIGACMNKLLAYVWITGRNRVWYAPDIWQSLAAGPVR

SEQ ID NO: 497543 - protein, 329 aa, unidentified
MNVHQQGRETTAASRINAGIDVCKQWLDACWGDRSQRFNHDAEGIRELAAALLEARTDLVVMEATGGYEVAAAAALQAEGLAVAVLNPRQTRDFAKSLGVLAKTDRVDARVLRDFAQVIAAHPQRERYLRPAPDEQRVQLAALVMRRRQLVDMRVAEANRLTLAHKAARKSVEAILAALDEQLAHVDSDIDQHMREHYKETMAFLRTLKGVGRVTLTTLLAMLPELGHLRGRSIAALVGVAPLARDSGQRHGQRHTWGGRHEVRAALYMAALSAVRHNPILREFHQRLIAAGKPPKVALVACMRKMVVILNAMARDHAPWDPGRATPQP

SEQ ID NO: 497544 - protein, 371 aa, unidentified
MADIDGVAGIDAHKHTFTVAVLDGRGGRCAIESFPTSPDGLAEVLALLDSFGFAIGRIGVEGSAGLGRHVAGFLVAAGYDVREVQANRTAERRRRRRRHKTDREDAEAIARETLADPDLPPAGKQRRPDPCWDELVAVRNRRKSLIGQRVRLLNEAEAVLTGLPLGLRAALPQTSRVRPRLRALDRGAASSVQVAAADRVNLAWLVEAAGDIARLDARVTELDKKIPALLGRLGCTLAEEYGIAAVGAMDLLVEVGDPTRFATEAQFARWCGAAPVAVSSGEGDQAPTHHRLDLAGNRQVNSTLHVMHVTQVRSYPPARDYIAKKRAEHKTKREARRAHKRHLANVVIRRMWADHAQRFETPANLATPAAA

SEQ ID NO: 497545 - protein, 407 aa, unidentified
MLFVGDDWAEAHHDVEIQDETGRALARRRLPEGIGGIAALHALLADQLPGDAEPDQVVVGIETDRGPWVQALLAAGYQVYAINPLSASRYRERHVTSRAKSDPGDAKVLADLVRTDRRHHRPIAGDSELAEAVKALARTHQNLIWTRQRQTNALRSTLREFYPAALVAFDDLASRDALAVLAKAPTPTAGAALRVTQVEAVLRAAGRQRNLHTRAEEISAALRTEQLSAPPLVAEAFGAAVAALVAVTAELVRQTAAVEAKLAAAFEQHPSAEILRSLPGLGPVLGARVLAEFGDDPHRYADAKARKNYAGTAPITRASGKSRVVLARVARNRRLADALYQWAFSALSSSPGARAYYDAHRARGATHHAALRALGNRLVGILHGCLRRHQPYDEARGWQHAAVPRAA

SEQ ID NO: 497546 - protein, 450 aa, unidentified
MGNASGVSRGDRNRNARLARLRALVPTQNAIVGIDLADHKQMVVVCDHDSKVLARRTFRCRAWDLGAALDWAADRAAAKGFAGVTVACEPTGHRWRVLGQLAAQRSMPFVCVQPMQTSWARRSEDLTFDKTDDKDAVLIARLTAQLRCYVPEPVDETWGRLRHLGARREQQVTDMVSHIQQIRALLECVWPAALDTARQPFRSKTWAAAMTVICDRDGGQLARTRRLGLARFERAVRREITRRGGQKPSLRILGALFAALADPAGVIAHRTGALERVQLLLEDWQHAGQRLADTEARMLTVLDQLELTALATSISGLSPIGAAAILAETADPRRFLTARALVKHAGLAPRENLSGGFTGRTRLTGQGRPGLRLTAWRTVWGAKKANPVYAARYRHLTSREHNKLTPTQAQTVIAAAILRHLHAVITTGTAWDPNIATHGVGHRHTAPIAA

SEQ ID NO: 497547 - protein, 327 aa, unidentified
MDGTGRRCIGLDVHRDFAQVAIWQAGLVRQAGTFATTPEGVREFAAGLGPADEVALEATGNTWAIATLLASRAGRVVVSNPAKTRAIAEAKVKTDKVDAAILAQLLAADFLPPVWMPDAATSALRRQVLRRAHIVRQRTRLKNQVHAILARNLVPRCPAADLFGIKGRQWLGAQALPADEQAAAAALLRQLDFHAQELALIDKDLGQAALARPEVLRLMTIPGVDATVALSIVAAVGDFTRFRTPDKLVSYFGLNPKVRQSGGQPASHGRITKPAGRTPAACWSRPPGPPPRHPARCAPSTSVCGPAAACRWLRSLPPASSPCCAGT

SEQ ID NO: 497548 - protein, 342 aa, unidentified
MVEVITVGLDIAKSVFQVHGVDAAGEPVVRRQLRRGEVLKFFDRLPRCLVGMEACGSAHHWARQLIAMGHEVRLLAPADVKPYVKRGRKNDAADAAAICEAVTRPHMRFVPVKSVEAQGVLVLHRSRDLLVRQRTTLICSLRSQLAEFGVVAGRGKGGFAKLRGLLEAGEAGALPAQALWALGLLATQIDDANAKIAALDKEIVAQHRANQESRRLATIPGVGPIIASAIAAAVPHAAAFKSGRQFAAWLGLVPGQSSTGGKERLGRITKTGDRYIRRLLVIGATGLIRYRRAVIPGGPDWVAGLLARKPVRLVTVALANKMARIAWAILRHGGVYRHADAV

SEQ ID NO: 497549 - protein, 404 aa, unidentified
MEVASCLRGDKALGKDQSLPFDLFPSRVPRGGLAMHHCINVGVDLHDRTMVLRWAVDRHEPQAGTFDNDPKGRKRMIEAFRHMRSTLSHARVLFAYEASSEGFGLYDYLWEAGFECAVLAPTKMTRSVQERKVKDDGRDALRILNLLRAHVLAGCGLPSVWVPDQRTRDDRELVRARLDLSDKLSVLKNQVRTLLKRNQLRAPRGIGGAWTKAYRAWLRGLDGKVSPLGPGARAALRTLLVQMETVEGQIKELDGAMVDLSEKERHAEPARQLVKLKGVGLLTAMVFLTELGEMARFGNRRQIGSYLGLVPSRFDSGQATGRTGHITRHGPSRVRRVLCQATWSRVRTDGPERDVYKRICEKNPKRKKKGIVAIMRRLAVRMWHVAHEAQGRKHCHADPALAAV

SEQ ID NO: 497550 - protein, 355 aa, unidentified
MTASYDYHIGVDYHKSYSHLVVQDSSGKTLRSGRVKNNRQSLGGFLAGYRENSHAVIEATRNWMVMYDWLDDICDDVVLAHPLKVKAIADAKIKTDKIDATVLAHLLRADLVPEAWAPSEKSRELRVALRERMFYVRLRTMTKNRIVTVFDRYPEQTAQLKKLGDLFGKAGRIQLAQVNVAEIDRIQIDRGLDFIGDIDVRIKQSESTIRAMTKANANVKLLKTIPGIGEFFARLIDAEIDDISRFRNPKKLAAYAGLVPSTYSSGGKTFHGKIIKQGNKWLRWAFVEAVTPAIASDAQLRSQYEHLKIRGVNKARVAIARKLLTIAFQILRDQRAYERRGERIMEGTSTISRLS

SEQ ID NO: 497551 - protein, 433 aa, unidentified
MNTPHPHDLIIGLDRSDKKADLHLITPATGQRRSQTIDTAPEALWEWLLELRQQHPQARVGLCLEQPAVHLIAFLESYEWITLYPINPITLQKFREAFVTSRAKDDAKDAQYQAELLLTHHDQLQSWAPEDSATRAVQQLVFHRRAVVDERTALTNRLIALLKQYFPQALGLCGEDLWRPLATRFLLKWSSLQAVQKAKPATLKAFYHLNGSRSAKLMEQRLALVAKAVPVTDETALIESFGLRVQLICRQLQLVQQTLRSYEQQIASAYAAHPDHEIFASLPGAGPVLGPRLLASMGSQRERFGAAADLQQYTGIAPVTKRSGGSCYIHRRYLCPKFHKQSFHEYSKESILWSRWAAAYYLQQRVKGCPHHTAVRALAFKWQRVIFRCWQNRTPYQEAVYEAALRKSSSPLVALFDKVELGKSPFKNPAKKS

SEQ ID NO: 497552 - protein, 367 aa, unidentified
MGKTIKYIGLDVHKNSIAIAVADYKRNSEVRYYGQIENNMDQLNKVLRKLVSDGSELSCVYEAGPCGYYLYRYLTDNGIDCSVIAPSQIPRKSGDRIKTDRRDAMTLARLHRARELTPVYVPSLEDEALRDLVRGREDAQKALRKSKQQLGAFLLRHFLIYTGKTLWSSAFFNWLADISMEHRAQQVILQEYIDTVKDNAERVDRLTTQIRDLSEQSKLSPLIKALQAMRGISFIVAVTVVAELGDLRRFANPAQMMAYLGLVPSEHSSGEKTRRGSITKTGNGHVRKALIEAAQAYRLPARKSRVILKRQENLSKDVCQIAWKAQLRLCGRYWQLTAKGKKTNVVKTAIAREIAGFAWAIAQEVTL

SEQ ID NO: 497553 - protein, 402 aa, unidentified
MTLVVGIDVAKEIHWATVVVAGSGHQVISRRVANTPDAIVGFLDELAAAVDVHGPATVGIDVLGGIAGLITAMVLDTGHRLVHVPGIAVNRARQATRGGEHKSDPRDARVIADQLRLRDDWRPVTGHADLDIELNLLIARRRELVCDQTRRINRARDMLTGIFPGLERAMDLTNLSGLHLLARYATPDQIRRAGRARIIAHLRRNGARADRADRLASAAMAAANQQHLAVPGQSRIAQFVREHAADLLAIRNRINVVDTEIAEVLQHHPDAALVQSMPGMGATLTAEFLATVADMQRFPTADTLAAASGLAPVLQQSGKVHYLRRATGGAKILKRVFYHSAFCAISTDPASKAFYTRKRTEGKRHQQALIALARRRVNVLHAILRTRRPYNPNNVRTPQTAA

SEQ ID NO: 497554 - protein, 343 aa, unidentified
MKLSRIGVDLAKNVYQLHGVDRHGKMVWKRRLRRGQWLQALLDKTEPSCEIGMEACTGAHHWARELQSRGYTVRLIAPQFVKPYVKSNKNDANDAEAICEAMSRPNMRFVTVKSVEQQDIQATHRVRSEIKDQRNAKANQIRGLVAEYGLVAPTTLLALRRAIPCWLEDADNGLTDYFRSLLHGLWGDLVALDDRMTELDKQIKTLADSNEVTQRLQQLRGVGPLVATALVATVGTGEQFKKGKQMAAALGLTPRQCSSGDKQRLLGISKRGDVYLRTILIHGARAVVSQAKHREDPLSRWVTSISKRSHPNVAAVALANKTARMAWAMLRNDANYDPDFAVS

SEQ ID NO: 497555 - protein, 342 aa, unidentified
MRPQASEGEAQHGLFSVCIVDDAGKIVREARVASEPEALLQVLTLYRFKRVGLEAGPLSQWLYSVLAEAGLPVICVETRHMRAVLTAQINKTDRNDARGIAQMMRAGLYRPVHVKTLRSQKLRMLLTHRKLLQSKAIAIENDLRATLRNFGLKVGMVGTVKFEARIKELVENLPDLAILVEPLLTVRRVLREQITVLHRRLLAIVRDDDVCRRLMTVPGVGPVVALTFRVTVDVPARFRNSKAVGAVFGLTPSKYQSGESDRTGGISRCGDEMMRAMLYEAAQILLVRSAKWSWLKAWAMKIARHRGMKKAIVALARRLAVIMHRMWVDGTEFRWTREVAAA

SEQ ID NO: 497556 - protein, 346 aa, unidentified
MDESYVGQQVVGLDLHRRRTVMVRMTPAGERLEAVRFASDPAVLAEQIAKAGPSPEVVVEATYNWYWVADVLDEAGARLHLAHPLGVKGFAYRRVKSDFRDAADLADLLRMGRLPEAWIAPKHVRCQRELVRHRHKLRQLCSGLKAGAHAVLAKNALLIPRSDMFGVDGRHRLRRLALPQAYRVRLDSQLHLIDAFETEIEDLDGRIRGLFDADAGYRALLRIPGIGPVFAAILRAEIGEIGRFPSPRQLTSWAGLTPRHRESDTTVHRGAITKQGSRLVRWAAVEAVQRTRAGTPMRARYEQVVTRRGASAKHVAKVAAARELLDCVFYALRDGRVRRLGHTGAA

SEQ ID NO: 497557 - protein, 372 aa, unidentified
MNYNTVYVGMDVHKESFTFCAYTIDAEKGSHFQRTEADYKNVLKYLEFLRTVYGNDANFICGYEAGCLGYTLYHQLTEHDVNCVILAPTTMLEQRSKRRIKTDRRDAEIIGKCLAQHNYSPVHIPTATDEETKEFLRMRDDHKLALKKVKQQILAFCLRHNYRYDGNSHWTAAHIKWLKSLKPEALYKEILAAYLLTYTTLSDKLERLDKRIEELASKDEYRESVKKLCCFIGIKTHTALSVLIEVGDFQRFASAQKFASYLGLVPGEDSSGDEQTRLGITKAGNRHVRMLLTEASQCYARGQIGFKSKELKSRQAGNSPQVIAYADKANERLRRRYYKMVLGKSKKHNVAKTAIARELACFMWGMMTDHIT

SEQ ID NO: 497558 - protein, 473 aa, unidentified
MSKGSGISRTDRRRNARKAFLRGLVPRDGVVLGIDLGEDKQALALVDHDVRVLWRKSARVKAHELGPLIDAAVAAAQKAGPGPVTVACEPTGPRWLQVQRLCRERGLALVCIQPLMSHASRRQQDLTGHKRDESDAVMIARLASELHCYVPEELDEGWALLRDLGRRREQLARAETASVLRIRDFLSVAWPSALSAAAGPFRSRTWLAAVEVVTRECGSDPARLAGMGEDELTGLVRGALPGWGVQRPSLRIIRSLLAVLDDPDAVAWARRGRFRRIREELADLRRCRALLAAVEDEMEALVAGDLGLARLAEVPGLTLKGAAVILAEAGDPRRYDTSKSLVKHAGLSPADHASGASEGESHISRRGRPGLRLAAWRAVTALLKHNPVMAAKYQALVADAEQAARAAQARAKPGSAQAAQAARALRGTRAKARVACAASLLRWIYCMTVHDAGWDPVAASGGRLAPAALAQAA

SEQ ID NO: 497559 - protein, 401 aa, unidentified
MKEFNAEEVLIETASALETVRLAQAERRYPAYIGLDVHKETLAVAVARSGREVPESWREIANKPKAVAKLVERLNREFEGEVLLFCYEAGPCGYGLYRQLLALGHDCQVVAPSLIPKKPGERIKTDRRDARKLAQALRSGDLTGVWVPDEEQEAMRDLTRARDDLKAQERKARQQLNAYVLRHGHAWPSNKTRWTQTHYNWLESLKFPHDWQQVVLQEYIDAGKAASQRVADITVQMERVLPQWSLAPVVDSLIALRGIDQLAAMVLLAELGDISRFDSPKQLMAYLGLVPSEHSSGGRRRQGAITKTGNSHARRMLVESAWSYRFPARQTMHLKRKAKNASEVAKVIAWRAQKRLCGRYRTLLQAGKNTKQTTVAIARELAGFIWDIACHEMPKVQQTTR

SEQ ID NO: 497560 - protein, 358 aa, unidentified
MKSQDSNYVGIDCGKKSLEVVRIHSENSLKERRQFSTTETGINNLLKWLTQNDIVGLEAGTQSFRIAKSILNKGIQVIVLNPGDLATIYQSLKKTDKEDSLKIARLIQRYPMEELPVVPVPTDEEEDNRRLCTEQENWTRQLTQGKNRLHSLFTQAGLTEITKKHLRTKSSRETSVTLLPSRYQKEAERILQVLDLVEQNLKLIEEETKDALKKNPAYVQTIMSMPGIGMVTSLAIMSYMGDCKRFSSAKQAAYYAGLVPRVDISGDSAYYGRIVNRGCHSIRRVIVQAAWSLVRCQHGGKLKEFYERLYSKKGAKKSIIAVSRKMIEVLYSMIRTGALFDSMPENVLYRKLAQYGLM

SEQ ID NO: 497561 - protein, 339 aa, unidentified
MKVTTLGIDLAKSTFRLHGVDGRGTVALRRQVTRKQLLPLLANLPACLVGMEACAGAHYWAREIEKLGHTVRLMSPHFVAPYRKSQKNDGNDADAICEAVGRPSMRFVPVKSAAQQDVQALHRIRFQLIKWRTALANEIRGLLGEYGIVITQGIRALRRQLPLILDDHENQLSGFFHEMLGEMAERFNLIDQRIRQYDLKVEHVFGQDERCQRLARVEGVGPLVATALLAAVGNAHQFKNGRELSAWLGLVPRQHSSGGRNVLLGISKRGDRYLRTLLIHGARAAVRVVERRRDHRSIAITRLKLRHGPNVAAVALANHNARVMWALLTRGEEYRPRCA

SEQ ID NO: 497562 - protein, 343 aa, unidentified
MEYGAIDLHTKESEIRIIEAGGGVVLERRIATTRERLTAVFGSRPPMRVLLESGTGSEWVAQHLEGFGHEVVVADPNYTPMYGSRTRRIKTDRRDVAALAEANRRGVYRRAHRVSAAQRDIRRRLRVRDQLVHVRRQAINLLRAQLRAEGVRVATGAAETFVERFERSAVSPATRAAMAPLRELLAAVAPLITRAEQWTRSAAGADVVTRRLMTAPGVGPVIALAYRATIDDVGRFTAPGAVASYLGLVPREDSSGERQRKGAITKAGPSRMRVLLIQSAWHVWRSPRGSAALHAWARRLADRRGRRIAVVAVARRLARILWAMWRDAADFDAGRLGRCRVAA

SEQ ID NO: 497563 - protein, 399 aa, unidentified
MNVSELNYLNLRVCGIDPHKRFFKAVIVDVSTLNTIYESNFPNNKSGVTELETKLREYRCNLVVIENTNNFSSALYYYLKRHNFDVKSVSPKSVPQKPKKSDRIDAKWVAIVYVKGLVEEDYVPPEDIQHLRDLVRARKRLVDMRTALKNRVHTLLTRGALHLNKLYSDIFGKKGREAINAIVSSNLDEVDERVSQVIGDAFLELINKRVVDLFMGLIEILDERIKELDEVIAAYVDTHSSIKAMVERIMTVPGISLVTAAIIVAEVGDFTRFPDKKQISGWAGIVPRTKESAGVQRGYGITKRGSPYLRYALHEVANVIILRKEPKELYAFYWRVRRRSGKYKATTALAHKVLIVLWGMMTTGSNFEMDSNARRLYHRKLRRFSNMAESGKRVLLEVT

SEQ ID NO: 497564 - protein, 414 aa, unidentified
MDTMYERCCGLDIHKKTIEACFRSGKKKTHMSFGTTSAELRKLTMWLVENDCQSVAMESTGSYWKPIFNILELSGTDMKIIVVNARHMKNVPGRKTDVNDAEWIAELLQYGLLRPSFIPDREQRELRELSRYRKSLVGERAREINRLQKMLEGGNIKLTSVVSEVTGYSSRRLLDRLLRNDEPMTEDVISGLVHTSLAGKSKELETALDGLLSELQKELLIKVLDHIDDMSRRIADLDDFCRKQMKKYEDALDKLDEIPGIARRTAETILIETGLDMSRFPTAKHFARWAGLAPGNNESAGKRSSGRTTKGNPTLKSTLIQSAKVAARKKDSFFKARYQKIAARRGANRASVAVAHSMLIAIYHILKSGERFKDLGEDYYNQFNREKKKNYYLKKLTKLGVNLKEATLSIQTAT

SEQ ID NO: 497565 - protein, 349 aa, unidentified
MIIIGVDFHPEFQQIAAVDMQTGELQERRLKHPEEAETFYRELAASDVPVRVGIEASGHARWFERLLGELQIELWIGDAAQIQTKRVRKQKTDRQDAQLILKLMLKDDFPRIWVPSWENRDVRQLLWHRHRMVQARSRIMNQLQAVALNEGLRCKKRLWRSKRPQLESFQLAPWASRRRHDLLELLDRLTPTIAELSQAVEQEVEKCPEAQRLATHPGVGPLTALAFVLIIGKAERFQCGKQVASYLGLVPLEDSSGNQRRLGHITKQGSSMLRFLLVEAAQATVRSLPEWRRRYFHLMMRRGRKIAKVAMARRLAVHLYWMMRHGWDYQEWVEFGSHAGQPGNRHGVQ

SEQ ID NO: 497566 - protein, 404 aa, unidentified
MNAVGIDVSKGKSMVAIIRPFGEIVASPFEVTHSGSELSKLAGKLKSLNGETKVIVECTGSYHLPVADSLFEAGLTVCAVHAQLIHDFGNNTIRKVKTDKADALKIASYGLTHWLELPEYTPENEIRHMLKAYSRQYNKYIKLKTILKNNLISLSDQTFPGVNALFASPPRKSDGHEKWVDFLSRFWHCGCVCLLSQKAFTERYRKWCKKNGYNFSESKAGSVYVQSNGHFSTMPMNENTEFLITQSISQLNAIMESCSIVALKMKRLAAKLPEYPVVMGFHGVGDILGPQIMAEVGNVHRFPRKQSLVCYAGFDAPPHQSGSFEASSSRISKKGSPHLRKTLFQIMGGLLKTSPVDDPVYQFLDRKRAEGKHYYNYMTAGSAKFLRIYYARVKEYLGKPDEAV

SEQ ID NO: 497567 - protein, 310 aa, unidentified
MDAVVVGIDVSKDRLDVHVLPIGAAFFVSNDTAGIEDLISRLAELAPALVALEATGGFETLAAVQLGAAGLPAAIVNPAQVRSFADGLGRRAKTDAIDAAVIARFAVATGIEAKPLPGEQTRFLADLVARRRQIMTMIVAEEARLKRALNRPLKKSIARLLAALRRELASIDADLDAQIRNSPAWRIKEDLLSSVPGVGKAISRTLIAELPELGSLDRRQIAALVGLAPFTRQSGKWRGNSFIAGGRASVRTALFMGALVASRHNPVLKAFRDKLVANGKPKMVAIIATARKLRVILNAIIRDQKPWQTA

SEQ ID NO: 497568 - protein, 345 aa, unidentified
MAIVEVTRPVIGGVDTHLDTHVAAVLDGTGGVLGVESFPTTPAGFTELHDWMIRFGDIERVGVEGTGAYGAGLARFLRGCGLEVIEVDRPNRQARRQAGKSDPADAVEAARAVLSGRATGIAKTGDGAVEAMRALLIAKRSGREARISCLNQLRHLGFCGPDDLREAFRGVPRTALGARAAALRPRVGGDDVAHATKIALRTLGRRVLALDADNDELDALLAGLVHTTAPDLLGVYGVGVDTAAILLVAAGDNADRIRSEAAWAHLCGVAPLPASSGKITRHRLNRGGNRQANHALWRIVFTRLRSEPRTRDYLERRLAEGLSKREIIRILKRYVAREVYRHLPR

SEQ ID NO: 497569 - protein, 355 aa, unidentified
MNDLKYIGLDVHQTTTSIVVLDAAGRQLSSTVVQTHAQELLAFVQAQRGTLHVTFEEGTYAAWLYDLLAPQVARLVVCDPRHNALLQAGCKNDPIDAHKLAELLRLNALRPVYHGQQSLRSLKELSRSYLSLVQDSTRVMNRIKALYRSRGIACGGKEVYSPHHRASWVGRLPEAGVHLRAQLLYQELDTLRQLRRQAKRALLAESRKQAASRSLRSVPGLGTVRTALLLALVQTPFRFRSKRFFWAYLGLGLMTRVSAEFCLVNGQLQRSGKTPAIRGLNPNHQRQLKEIFKSAASTAVQRPGPWRQFYQQRVALGRKPALVRLTVARKLAALTLSLWKKGGRYDVERMKSAAA

SEQ ID NO: 497570 - protein, 324 aa, unidentified
MKTNTVLGIDIALRSFDVALWFDSTHCAKAQFPNNARGFRQLTRWLKAHGGSAVPAAMESTNTYAEALARYLHTAGHRVHLLNPERVACFARTLGQRNKTDPADALTIARFLVGRDDLTVWQPPPPEQQALRNLTRVRQQLTEQTLLLRNQLRTATGLARHHLQAVLRTIANQLAAIMREIRAHLKTYPALGKQARRLMTCKGIGLVTAAVALAELPPIDRHTDPRAISAWAGLTPHRWQSGGTEFPTTLSRKGNAYLRQALYMPALVAKRHNPLLRAFAQRLAANGKRPGAILGAVSHKLLRLIVGMLRSQTNFDPNRSPQHS

SEQ ID NO: 497571 - protein, 423 aa, unidentified
METTDEPVELVERVAALDLGKATLMACVRVPHEDRPGRRRQEIREYATLSRSLLELADWLRCERVELVAMEATSDYWKPVFYLLEAEGFTCWLLNAKHVKNVPGRPKTDKIDSVWLAKVLERGMCSPSLVHPKPIRQLRDLTRYRRSLIRERTREKQRVEKLLEDAQIKLSSVISDVFGVSGREMLAAMIAGQRSPKVLAQMARGTMRSKTALLEEALTGHFEDHHGFLLQAMLDHVDALTAQIDAVSARIEAVITPFSHDVERLDEITGVGITAAQELIAEIGVDATRFPSAAHLVSWAKFAPIDRNSAGKKRGGSTGKGNPWLAGTLGEIVASLSRTDTFLGERYRRLARRIGKNRAIVAVGNSVLTIIWHLLDDPDAHYQDLGSDFYQTKVNTHRRERDLIRQLEHLTGKKVTLEAVAAA

SEQ ID NO: 497572 - protein, 357 aa, unidentified
MTHPNVTRRKPLYFGLDVGDGLTHLCCVDDERVVVERLRFPTTPEGVRRVFANRPPTRIVLEVGSQSPWMSALLRSLGHAVTVADARRVAELTRAGRKTDRRDAETLARLLQGMPELLGAIHHRGCQAQADLAVIRARDLLVRMRTSLVQHVRGTLKAFGLRAQACSAQAFHAKARASVPKELEPALVPLLDQLADLEQRIRHFDRELERIAKERHPAAARLRQVCGVGSLTSLAFVLSVDDPGRFSKSRTLGSWVGLCPKVQASGDRDPQLSISKAGSTYLRRLLVQSAHYILGPFGKDGDLRRFGLRLCERGGKAAKRRAAVAVARKLAVLLHRLWISNQAYEPLRNSLRAAAAT

SEQ ID NO: 497573 - protein, 399 aa, unidentified
MRYCLGVDVAAVDSMYCLVAETGEIIFMPAKSPHTKSGFQWILEKLNGIEQKDIAVIMESTSTYHLKVERFFRENTDCEVIILNPMISKNHKRNLRKTKTDKEDCLNLVDIFFKGEYNCQVRHEEIYAEMQFLSRQIQHLQEGATRTRNRLRQLLSMLNPAYSDAFRNDFMYSETGLRFIAAWPHCDLLNAATAEDIAISLASTHQRSPGYYRRKAERLKTFAANCYPAVSKESVMTDCLAETALRLLAQQQEIEVLKSRLVALGSSTELYDLFISVPGIGPYLASSLIAELKDIRRFENHKKLIAYCGFDPTIIQSGKSIHYNGPISKRGNSTARKILFYTVSIILVVARKTNRQMPLLLYYEKKRGEGKHHHACLVACCTKLLRILLAMSKQNTPYS

SEQ ID NO: 497574 - protein, 344 aa, unidentified
MIWVGLDVHKRFSRMGIFDPATGDLQDLGEVSNDREELRVRLEQVGSPKTVVLEAGRSSYHMAGLLEPLADEVWIVNPTELRRLQHRVAKTDRRDAAALAWWAAKGALKPLWRPDRPVLELRELTRGRTTLTRLGTQLRNLIRSLLARHGYECPHRDLLCARGRAWLDTVRLEGYAGEMLATFRELLSLIQEKADGFEQEVEAAAADCPAAQRLRTIPGIGPVLGLSLAVEIGDISRFPSPGHLRGYSGLTPAVFQSGEKEARGPITKRGNKWLRHTAVLAAQRMSQMHHPDPSIKRTFLSVAFRHGRNPGKVAAARRLLDLSYHLLKKEVDYQAPRARTASAR

SEQ ID NO: 497575 - protein, 349 aa, unidentified
MIHVGLDMHKHFSKIETMDGSGRVLQKVTLFHDNKDEIHRFFHSLDKPATVAMEATRSWYWLYELMVEEEMEVKLAHPLKTKLIGEAKIKTDSIDAHVLAQLERTGFLPEAYVPSKSLREQRELLRYRLLLVLTRVRFKNRIHDIIDKLGIVHPYSDLFGTRGIAFLQSLSLPGLYQEELHRCLELLHFLDQKILEAEKDMKSILKEDPRAKLLMTIPGVSHLTAYLLLCEIGDINRFPSSEKLCAYGGLIPSTHQSGEKAYHGSITKEGNRYIRWALAEAAQKASRKDPALFVFYEKLKRNKGSGVALVAVARKLLTAVYHILMKGEPYRYRPIDKHYSGKPVGLSDH

SEQ ID NO: 497576 - protein, 351 aa, unidentified
MKTVIVGGVDTHAATHCAAAIDTAGRLLGVAEFAATDAGYKQLSRWLRSHGHIHAVGVEGTGAYGAGLARHLRVEQITVIEAPRPDRRLRRTHGKSDSIDAEAAARAVLAGTATVIPKRADGPVESIRALRIARLGAIKAKTAATNTLRGILISAPEQLRAQLPTASLPNKLIDACARLRPDSDHLDDPTQATKLALRSIAQRARSLRTEIAALESQILTLVAATAPATLAVFAMGPDTAAALLVTVGDNPDRLRSERAFAHLCGVAPIPASSGKTNRHRLHRGGDRSANRALHIAVIVRMRYCPKTRAYVARRTAQGLTKPEIIRCLKRYLAREIYRTLRDDYSALSTPT

SEQ ID NO: 497577 - protein, 368 aa, unidentified
MKIIYPRVCGIDVHKKFIVAVICISESVEPIYLKKRFSTFHNDLIRFRDWLIQNDCQNVCMESTGKYYIPVYNVLESHISNIVVANPKWVRAVKGEKDDDKDAKWIADLFKLGIVKSSFIPQKDFRILRELTRYEYKLVNMRSSEKNRYQNALTSGNCKLDMVFTDVFGKSASNIIDLILSDNPYTDEDILSKVHKNCKASPDMILNSINGTDLTSVQKSRIELVNDHIKQLSSNIQRLDKLIDLMIEPYEDYISFLCQIPGVSRNSAIIILSEIGVDMNQFTSTRRLTSWAGLTPSSNQSAGKKKSVRISRAGVYLKPCLVEVAHAAVKDKNHPYYANKFNKISKRRGKKRAYIAIARKMQLPEKYL

SEQ ID NO: 497578 - protein, 423 aa, unidentified
MPYRIAGIDVHKRKLAVVVADVEVEEEYQFERRWYGSNPEQLQLLSDWLLEQAVEEVVMESTSQYWKPLWGVLERYWKPICEKREDAGHMSGSLHLAQALSNRGRRGRKKDFRDAERLVKRLVSQELILSFVPDAEQRLWRTLTRTKYQRTRDKVRLQNQLEALLEESHSKLSSLVSDLLGARARRMLKALAEGETDPAALAALADRHLRATPAQLRDALGACTELSPVYRRLVRLALDDLQLIEQQIARLDQEIASLLREHQDAVQRLAEVPGLGVDSAQQIIAEVGAKAATFASAKNLVSWVGACPGEDESAGVNRSKRSPKGNRQMRRILNQAANAAVKHKGSIFEIVYRRFVPRLGHNKTIGAIAHRLCQLIWIILHRSVRYEERGPAVSEKSKRQRTSRMIRTLRNLGYRVEPLGNPA

SEQ ID NO: 497579 - protein, 393 aa, unidentified
MICVGIDVAKDKYDCFILSSEGEVLADVFTIPNNAEGFDTLLQTIRRCARPEDKIKVGLEATGHYSYNILGFLLNEGLDTYVINPLHTNLYRKSLSLRKTKTDRVDARTIAAMLMSDVDLKSYTDTAYHNEELKSLTRYRFDKVRERAKLKQSVSRLVTILFPELEKLVPSLHLASVYALLIEFPGAKQVAGAHLTHLKATLSDASKGRYGRDMAVTLRDAARCSVGSVMPAKSLELQHTIRLIRELDAEIEDIETAIQSMMDEMQSPITTIPGIGVRMGAMILAEIGDFSRFNSPDKILAYAGMSPSTYQSGQLSLSGPYSHMEKRGSRYLRYALYNATKYVCLWDPAFAAYLAKKRGEGKHYNVALSHAAKKLVRLICALEKSQQSYRNAA

SEQ ID NO: 497580 - protein, 324 aa, unidentified
MNPIVGIDIAKHTFDVALPLDKPGKYRTKAKLPNTPKGFEELRVWLADHAPGAAICLEATGIYHEALATFIHAQGVRVYVVNPAQVAFFAKSELLRIKTDRSDAKLIARFATQQQQLPSMRPWTPPTPVQRKLRALFFRLEDLQAMAQMELNRRDVADPSVIASIDEHLETLREQIETLKKQIDDHIDSDPDLRRDRTLLKTIPGLGDKVSATFLACVGDLRRFERPNQLDAFAGLNPAIRESGKSQGHAHISKWGNAMLRSKLYMAAIVAKKHNPVIRRFVQRLSHRGKSPMIALIAAMRKLLHIAWGVVRSGKPFDPDFALA

SEQ ID NO: 497581 - protein, 340 aa, unidentified
MKEYIRIGVDLAKNCFQIHALESEGGRVTTRKLSRSAMRTFFAGIKPCLVGMEACGSAHYWARELRAMGHDVRLMPPAYVKPYVQRGKNDPVDAAACCEAVSRPMMRFVPVKNEEQQAMLMAHKTRDLLIKQRTMGVNALRGHLAEFGIIAAKGIGHVEELIEKAADAGLPEMARAALSVLVGQLAALDGAIADVTRQIARVHARDPISRLVASVPGVGALAASAITASAPDPSAFRSGRDFAAWLGLTPKQHSTGGKEKLGAITKQGNRSLRRLLVLGAVSLLRVAAKRKGSVRDWLVALRARKPGKVAAVALVNKLARIVWAVMSTGEAFRTHTFGRA

SEQ ID NO: 497582 - protein, 341 aa, unidentified
MSLEVTNVCPVDGDGRVVCEAKLETNPGAIELFLAEWAILLKRVGLEAFSYSASLFTALAEKGLPVTCIETWYAKAALNALLNKIDRNDAKDIAQIMRIGWFRAVHVESAGAQTLRALLVGRKAMLGEVLDMDNMICVLVRPFCLNVGEISVGRFAARVREIMAGKRELGAIVTPLLDARSAMRMQLARLHGFALTAARGDSAVRRLMTLPDAVALVALTLHAIIDDSARFRKSTNVGAHFGLTPRRSQSGQTDRIGSISKCGDELTPAMLYEAAIAILTRIPKNFKLRLWGLRLARKKGLKRAATAVARALAVLLHKIWIDGTTFRFGAGGKRGRVAAAM

SEQ ID NO: 497583 - protein, 310 aa, unidentified
MESIIVGIDVSKDRLDVAVRPSGEVFAVERNAAGLEQLTIRLRELEPRVIALEATGGFETIAAAALAAARLPVVVVNPAQIRAFAKAIGQRAKTDPIDAATIAHFAEATKPEPRSLPDEATRLLGDLVARRRQIIEMIGAERQREQRVTVPHLRRSITRLLRALEKELASLTTDIDDAVRGSPAWREKENLLSSVPGIGPVISSTLIAELPELGQLGRREIAALAGLAPFTRQSGRWRGKSFVGGGRTAVRTALFMGALVAKRHNPVLKAFFDRLLAAGKPKMVALIAVARKLLTILNAIIRDSRPWQTA

SEQ ID NO: 497584 - protein, 376 aa, unidentified
MSNLRFIGLDVHGETIAVAVAEPGGEVRSLGVIPNRSEAIRKLVKKVGPAAQLRVCYEAGPTGYVVYWQLSELGVKCEVVAPTLVPVKAGDRVKTDRRDALKLARSYRAGDLTAVWVPDAAHEALRDLVRAREAAKKDQLRARHRLGKFLLRQGRRPATKMNAWTQKHLTWVKTVHFEHAAQEATLLDYLNEVEHVADRLERLERAIDDAVKSAPERMRTVIDALQALRGIAQVSAVTIVAEVGELSRFAKPRQLMGYSGAVASEDTSGKRTRRGGITKTGNAHLRRIVIEAAWAYQHRPGIGPALRKRQATVSPEVRQIAWKAQHRLNARYRHLTAKGKCRQEVVTAVGRELLGFIWAIGVKVEAQGRRQQSAAA

SEQ ID NO: 497585 - protein, 315 aa, unidentified
MMNEQTYCGIDVAKRHFVIGLSTQKRTKTETNNPKGIAHTIEYLRRFSVDLIVLESTGRLELPLAKALHRTGFRVVIANPRQTNQFAMSQSLAKTDNKDAKMLAFYAQMLAMRDNVAQQLYIPPTPEQEQLEALVSRRNQLVEMRFAEKNRLEQVHSTQVFSVEQHIDYLSLRIDELDREIEQHLKHFDDTIKKFKDIKGLGTQTIAVLMSMLPELGQYTHKQIASLVGVAPHPKESGNTKWKSRGSGGRKAVRNALYMATFVCVRFEPKLKQFYERLRANGKAFKVAINACMRKLLTILNAIVRDDSQWDAHAL

SEQ ID NO: 497586 - protein, 349 aa, unidentified
MIIIGVDFHPGFQQIAFVDSESGEFQEKRLAHREEAESFYRGLASAGEKIRVGMKSSGYARWFERLLSELQIELWIGDATEIERKRARKQKTDREDAQHILQLILKDDFPKIWVASWENRDLRQQLWHRHRLVQMRTRIMNQLQAVALNEGLSYKKRLWRGSGRQQLEGFQLGLWATRRRRDLLELLDRLNPTIAELSQAAEQEAEKCPEANRLMTHPGVGALTALAFVLILGNAERFECGKRVASYLGLVALEKSSGKRLRLGHITKQGNSILRFLLVEAAQATVRKNPEWRSKYFHLALRRGRSIAKVAMARRLAIRLYWMWREKKEYQQTRSFGSHAGQPGNLYGA

SEQ ID NO: 497587 - protein, 349 aa, unidentified
MELDTIGIDLGKTVFHLVGVNRAGEAVVRRKFSRLQLLRFTANLRVRLIGMEACGGSHFLGRSLREQGHEVRLMPAQYVKPYVKTNKNDYIDAEAIAEAVGRANMRFVPIKSGDQLDMQSLHRVRDRWVAHRTSVINQMRGLLLERGITFRKGRRHAEASLPAILEDADNRLSGLLRMLLAQLQGELRQLQIQIDEADALIAKRASEHEPCRRLMAIPGVGPLTATAVVASIGNGAEFRKGRSFAAWLGLVPKQESTGGRQKLLSISKRGNHYLRRLLVSGARAVLQCRDKQSSGLSAWLGQLASRVHTNVAAVALANKMARVAWAVLAKSEPYRPPPTMISTEELVCN

SEQ ID NO: 497588 - protein, 423 aa, unidentified
MDLMYNRAAGLDVHKESIVACVRTVSGRKTTRECRTFDTTTDGLLALLEWLTSCRCEIVAMEATGVFWMPVWKILSDGTFPSIVANAAHIKAVPGRKTDMKDAEWLADLVAFGLIKASFVPDEEQHELRALMRTRKQLVREQTRHVQRIQKTLTEANIHLDSVISDIMGLNGRRMIEAMIKGTRDPGKLAALADKRLKAKPKELYDALHGRLTEHHRFLLKLHLGQWDTLDTTIREVDREVKIRVSTMDAEVTADKAKFSDLIALLATIPGVSQLSALTILSEIGTDMSRFPTAGHLVAWAGMCPGQNESAGKRKRTRLRKGAPWLKTMLVQCAWAAKKTKNSYYKAQFFRLQSKRGPQKAICAVAASILTAIYHMLKNGTVHQDLGSGHFDQRSPDIKVKRLVSQITKLGFEVALQPIAKAS

SEQ ID NO: 497589 - protein, 386 aa, unidentified
MDQATPSTASANTLHCALELSKKSWLLAIQFPDREQPSLYPIAGGDAEGLMAKLTAARDRWAKTSGALPTITLCYEVGYDAFWLARFLKTRGIECLVIDPGSLQVSRRGRRVKTDRVDVKMLLRTLIAWCRGERHVWSLVRIPNIDEEDLRRSHRERSRLVRERTAHINRIKGLLFAQGIRGINVKSRYKTLAVDKLVTGDDHRLPPRLAGEITREIQRLAMVQEQIAEIERERDAAPTTCEATERKRDLLSQLKSVGPTISAFLSREVYYRQFANQRQVGSFLGLTPSPYDSGEEERCQGISRAGSGHARAIMIEAAWLWIKHQPKSALTRWFVERTAGQSKRVRKIMIVAVARKLAIALWRYVELGLVPQGAIINPPMTRKARS

SEQ ID NO: 497590 - protein, 342 aa, unidentified
MTEVTIIGVDLAKRVFQVHGAAADGSVVFRKKLSRAQFLRFLARQPACTVAMEACATSHYWGREIEKLGHTVRLIPPIYVKPFVKRQKNDAADAEAIAEAASRPTMRFVAVKTEGQQARALIFRTRDLLVRQRTQLINALRGHLAEYGVVVAQGVVHVKRLQDAIEAPEVKLPTMVCDIGRMYLNQISMCSDKIGVLEKSIRTEAARGETTARLQTMPGIGPVCAMAIEAFAPPMESFRRGRNFSAWLGLVPRQKSTGGKQILGKTSKMGQRDIRRLLIIGAMSMVRWAVRKGAPEGSWLARMLARKPRMVVAIALANKMARSVWAMLTKQEDYRDPVVAAA

SEQ ID NO: 497591 - protein, 369 aa, unidentified
MPHVTSIGLDVHARSVAAAAFNPFTGEVVHRDFGTDAAEIAEWALGFEEPRACYESGPTGFHMARELRALGLDCAVAAVSKMQRPAADARRKNDRRDAEFIARMLATHNIVEVPLPDAAVEAARDLDRALDDATAEYRRARQRLNMFLIRLGHVWDERNADGARKGSWTRAHWRWISGIRLEGPQRDVLEYYVTAARCAESDRRQLEKKVLALARTDRWRPAVEALSCIKGIDTLTAFRLAAEAGSFTRFRTAPAFASWCGLVPSERSSGETERRGGITKTGNRLARTALVESAWHYLTCTPRPKAPAPGADVPAAIRARADDCTARLCRRREALAAAGKSSCKANAAVARELARWVWEIGRRAEGTLG

SEQ ID NO: 497592 - protein, 343 aa, unidentified
MGFDSIIALDLGKFKSVACVLEVKTRQHRFETIDTTPQRLHELFVANVSDEPSRTLVVIECCDAAGWVHDLATSLGLAVMVANCRHEAWRWNKVKRKTDRDDALKLAKMALNDELPTVHMPSPYKRQKRRLILHRRSLVARRTQCKNSIRSIFSQQGLTHLLPRTTKAWTKAGIEQLAAHAKPLDACDLDHLWRGRLHLELALLEVLHEQILTTERKLDELARDDAQVKLLETMPGVGTRLAETVANCLDDPHRFKSAGQVASYAGLVPKQMERDDETHRPDHASWVDAAARHAGGGGVDGLASQRLGQVLRGADQPRDEAAQEDCHRRAGAKGPGDPVGDAA

SEQ ID NO: 497593 - protein, 362 aa, unidentified
MQIIGCDLHARQQTLAMLDTGTGEVVNRTLTHEGNNVREFYSTLPAPVRVGIEATGSMKWFLQLMEELGIDCQVGHPATIRAAEPRRQKHDQRDAELLLKLLVENRFPSIWQPSQELLDLRGLLLHRHQWVRLRTRIQNALQAIALANGLRRGSSLWSASGQRAIASLPLATHTAQRRSELQAMYARFEAEIEQLNQRVLEQAGRRPTAGLLMTHPGVGPITALATDVFLGDAKRFRDGKALASYIGIIPREHSSGGRQRLGGLSKQGNPLLRFLWCEAAAHAVRRDPELRRFYRRKLVQKGLGKARVAAARKLGIRLWIMLRDQIDYQEFCRRGQRQQRSGGACAGMPGERYGAKSHRLID

SEQ ID NO: 497594 - protein, 395 aa, unidentified
MNKVIHYIGLDVHKESIAVSIAPAHSTEIRRYGIISGTLAAVDKLIKKLSLEGVELRLVYEAGPCGFVLCRHLRAKGLHCEVVAPSLIPKKASDRIKTDRRDADQLARLHRAGELTTIHVPDQEDEAVRDLIRARFSAMTDQRQARNRLKGFLLRLGFRYTGKSSWNDAHQRYLSGLVMPQAPQQIAFQEYIHAINDATDRLARLTRAVEDALAGWKWEPVVRALMSLRGVQVLTAMTLVAEVGDFSRFDDPRSLMHFFGLTPSEHSSSDKRVQGGITRCGNAHCRRVLTEAAWHYRLAPKVSAAIQIRQQAQSKEVRLIAWEAQQRLHKRFKQLSAKKKSVIAATAVARELAGFVWAIACQVKPAEQPAVPEIVRTCRGKVYRLDPNTKLQKNK

SEQ ID NO: 497595 - protein, 348 aa, unidentified
MREHSENQAVKVMGIDLAKNSFHVHGEDSDGRQAVGKKFSRQKLKEYLVNLPPCTIAMEACGSAHYWARLLQSYGHEVRLIAPQFVKPYVKSNKNDAADAEAICEAAQRPNMRFVAVKEIGQQDIQAIHRMRSLMVERRTAQINQTRGLLLEYGIEIAAGRSNLLKQLPEILEDAENGLTDLFREELFGLYGELRHLDGRIAHYDEKIDQIAQSDERMQRLQTIPGIGPKIAIALLATIGDIHAFKNGRELAAWLGLVPRQHTTGGKSTLLGISKRGDVYLRQLIIHGARSIMLTVDRKNDRTSQWAAALKVRRHKNIAVVVMANKMVRIAFALLKRGETYRAMPIAA

SEQ ID NO: 497596 - protein, 425 aa, unidentified
MGKKQKSSPAGLAALYGRACGLDVHKKVIVACVRILETKNGTVQSTLRKFGTMTADLMELGGWLAELGVTHVAMESTGIYWQPVFNVLESQFHTWVVNAQHIKKVPGRKTDMKDAEWIAQLLQCGLLKPSFVPNREQRELRDLTRQQTKLVQQRNAVSNRIEKVLESANIKLGAVASDILGASGRKMIEALIEGEKDVTVLADLAQRQLRGKIPELQRALTGELTEHHRFLLRQLLGQYDFLQKEIARVSERLGAVAPPSFRAAVEQLDAVAGVGERGARALLAETGTDMSRFPTHKHFTSWAGQCPGNHESAGKRKSGKTPSANRHIDAVLTEMAHAAVRTKNSYFKAQYHRLAGRRGKKRAIGAVKHSLLVIVYYMLRDDKPYKDLGVDYFDKLNPQQRIRYHVRKLKELGQGVQLSALNDAA

SEQ ID NO: 497597 - protein, 343 aa, unidentified
MSIQHPAAVGVDPHADTLSAAAVDPAGAVIWELTVANSPDGIEQLLTRSNMTRPRWAVEGTGTFGRALTDRLLQADGSVWEVPTRLTSRLRRRAGFGRNDRADAITIARAALSEPLAAVTHHPHTEALRVLIRQREALVKAQVQAVNRIRARLRETDPAAARSLGRLRSQTTLNSLSQHTTASDNPHHQALSLTIRLDATATLTRHQQIHSLQTRIRQLLPPGGHALMNIPGIGIIGAATLIAHTGDIRRFPNDAHYAAYCGTAPVDASSGRQQRHRLNRWGNRALNRVIHTAIITQLQQHGPATSYITRRTQEGKTKPEAIRAAKRHLTRRIYHTLKQHPLT

SEQ ID NO: 497598 - protein, 408 aa, unidentified
MNTLYVGIDVSSKSNVVYLMLPNGDKHSNFSVANSHEGSTQLVKRILSALTSHSLDTVLIGLEATSVYGDNLVYFLREDATLAPFNRKIHVLNPKQVKKFHDAYNDLPKNDYVDSFVIADCLRFGRINKEVYMGDYRYKALQNLTRARFFAVQNLVKEKQRFMNVLFKKYSTMTQEKVFSDTFSTTALAVYDEFESAEALANMDLHELTAFIMEKGKNRFPNPNAVAKAIQKAARSSYRLPKTVNDSVNQVLSISITSIKALEAQIKEFDKAIATQMELLPNVLISIPGIGPVFSAGIMAEIGDINRFHNQAQLAKYAGLAWKQHQSGDFEAQTTRLINSGNRFLKYYLCEAAFSLVRCDKEYSDFYHLKYKEVNRYQHKRALALTARKFVRLVFRLLKDNRLYTSAE

SEQ ID NO: 497599 - protein, 321 aa, unidentified
MTVFCGIDWAERHHDIALVDGTGTLLAKARISDDAAGYGKLLDILAEHGDSPSDPISVAIETSHGLLVAALRTGSRKVFAINPLAAARYRDRHSVSRKKSDPGDALVLANILRTDMQYARQLPAVEDAFGHQLLALLKQLDAACQAANDLAAAVDEAFRQHADSEILLSFPGLGPLLGARVLAEIGDDRNRFSDARALKSYAGSAPITRASGKKRYVGRRFVKNNRLMNAGFLWSFSALQASPGANAHYRRRREHGDWPNAAQRHLLNRFLGQLHHCLQSGQHFDELRAFAPFLSVAVPAGCRPDPAPVSMEAASNGEGEP

SEQ ID NO: 497600 - protein, 422 aa, unidentified
MLEEDQQVEQIVERVAACDIGKAELVCCVRIPHPSRPGRRLQEVVSYPTMTRSLLVLADRLAELRVTRVVMEATSDYWKPVFYLLEARGLDPWLVNAGDVKHLPGRPKTDRLDAVWLAKVAERGMIGPSFVPPPQIRRLRDVTRYRADLVVERTAEKQRVEKLLEDAQIKLSVVASDIFGVSGRAMMAALLAGQRDPKALAALARGQLRGKTGALEEAFTGYFTDHHAALLSKMLARIDGLSSDIADLDAMIEELIAPFAHAVARLDEIPGIARTAAAAILAEIGTDMTRFPTAAHLASWARFAPGVSESAGKPKGKGSTGHGNRYLAKILGEAAVAAGKTHTFLGERYRRIARRRGGKKAVVAVGRSILVIIWHLLSDPDARYTDLGPDFFDRRHDPERRKRAHIHQLEALGYRVTLQPVA

SEQ ID NO: 497601 - protein, 347 aa, unidentified
MDITTIGIDLAKLVFQVHAVNAHGKVVLKKQLKRNQMAEYFVNLKPCLIGMEACGSAHHWARKLQSYGHTVKLMPPQYVKPYVKTNKNDAADAEAICEAVARPNMHFVPIKTLEQQGILTIHRIRQGYVKARTAQANQIRGLLAEFGIEIPLGIGYITKRVPELIEDASNDLPGIVRIEIQELLEHFKHLEERVNDCEKKIVCWHRKDGTSKKLEAIPGIGPITASALVASIGDSKHFKNGRQVAAWIGLVPKQHSSGGKQTLLGISKRGDTYLRTLLIHGARAVIRHSVGKIKPTGTQSWVNQLAARKNKNIAAVALANKNARIVWALLNHDRDYQDNHKTLRVAA

SEQ ID NO: 497602 - protein, 447 aa, unidentified
MTKIRISLLLIVLQLPMKGGDNMKNKILSTLFVGIDVSSKTNVLCALDFQGNKLLNLKASNNNPGAESMSKSIVECLSSNKLKYAVIALESTSIYSVHVANFLSSHEELASFEPNVYCLNPKTIVNYRKSFVDMDKTDPLDAYVIADFARCGRITSSPWRGSQFLALQRLTRHRLHLVECITREKTYMVSNIYLKFSQLAVLDKDDKPFSNTYGATSAAVLTEFLSLDDITYSSIEDLVAFVKEKGKNRFSNPDETAKLLQKAARDSYRLDKVLYEPLNVSIASSFNLIKAFETEVKTIDKAIEKNIKGINTTEYQSLRSIPGIGPVLASGILAEIGSISVFDSHNALAKYAGLTWRVNQSGNHTSDNTNMTKTGNKYLRYYLIEAANSIKNNSPEYKEYYNKKFGEVTTHQHKRALALTSRKLVRLIFGLLTKNQIYSSDKVGETQ

SEQ ID NO: 497603 - protein, 356 aa, unidentified
MTSNIKYIGMDVHKESISVAVRNAAGKIVMECVIETKANTILQFFDGLRGEVQVTFEEGTWAAWLHDLLKPHVGKLVVCDPRRNALLLDGNQNDRVDARKLSDLLYMNKLNAVYHGDHGLRTLKELVRSYLTITRDLGRVMTRVKAIYRSWAIPCSGKQVYGSRHRAEWLGKINEPGVRRRAEFYYQQLDTLRSLRQTVRRELLGESKKHKAWKQLCQIPSIGPIRAAVLLGILQTPHRFRTKRQLWTYSGLGIEVHSSADHETVKGQLQRKKKHVEIRGLNENCNHDLKNLFKGAAVVASTKPGPFESFYAALVAKGIRPEMARLTLARKIATIVLLVWKKGVCFDANHLKPQTA

SEQ ID NO: 497604 - protein, 340 aa, unidentified
MQITTKFYLGIDVSKHWFDLSLLTVINHQKQIMVTERFDNNETGIKQMEQWLKKQNVSFNDNTLLVIENTGIYHRLIWEFCSTHKLPIHIGNAAHIKWSFGIARGKNDVIDSQRLCNYAHKHADELKATPELNPVFIELKDMMTSRSKLVSQLGSIRSHLKELKLSNNKATQKLIEQAHKPVLDGLKKSIALIEKQILNIIHKDDTIKTNYDLLITVPGIGHLTAVYILCCTNNFIDKISGKQLACYAGVVPFQDKSGSSIKGRNKVHKMANKELKKMLHLCALSAVKCYPEFKQYYERKKKEGKHVMSVLNAIRNKIVLRAVAVVNNQKPYVENYKKAF

SEQ ID NO: 497605 - protein, 385 aa, unidentified
MLYVGIDIAKNKHDLACIDETGETIIINYRFANSYQGFHQLKLKLKQLSPITKDVQIALESTGHYSYNIIAFLRELGYTVFAYNPLIIKEFAKSQSLRKTKTDRKDALLIARKLRSDITPEYYQTDKLMDELKELTRYQNRLIQSRSKCKNLYIRLLDIIFPELHGIVSNLHNQFIYNLLTNYPSPQKLARAHFSSLLKIKRLTADKAHQIQEAAKQTIGNASPALSLELVQLIETIKHYDKQINQVQEEMNLLMAELESPITSIPGIGSRLGAMILAEIKTINNFKNPNQLQAFAGLDPAIYQSGQMDNTGHMVKRGSSYLRYALIQAAKLISIYSPHFKAYLRLKISQGKHYNVAVTHVAKKLTRIIYHLLKTKQTFDEAKLR

SEQ ID NO: 497606 - protein, 341 aa, unidentified
MQHIAIDLGSKESQICIRAEQGEILHEGKVLTGSLDRYLKRQPQSRVILESCAEAFRIADFALSYEHQVRVVPATLVRSLGVGARGIKTDRRDAQVLSEASCRIDLPSVHIPTDLARQRRSMCGAREMLVSSRTALICCVRGWARTQLLKVRSGDTETIAKRVLDAAVSMPDGIPDYIERLLVVINTLNEQIAAADKDLEELTEQDPICQRLMSVPGVGPVTSMRFVAAIDDVSRFPNAHAVQAFLGLTPGENSSSTRQQRTGITKAGPAPVRRTLMQAAWNIRRLRPTDPISQWAMEIEKRRGKFVATVAVARKLAGVLFALWRDGSQYEPNHQLRKTTQ

SEQ ID NO: 497607 - protein, 461 aa, unidentified
MKKEKYYLGIDVSKGYADFTLLDGKKNPLEKVFQLDDNRKGHDALKLIIQDKLKEHEIECLYCGLESTGGFENNWFASLSGWSKTMPVKVARLNPSGVKNNIAAGLNRNVTDALSSRYIGEYLIDHESKVNYDVEDNEYSNYRSLYTYILLQNKQKTQLINELKMLLYSGFPEMVRFCKEGVPVWVLELLVKYPTAEKVAKLKSATLSKIRNITPEKAETIIAKAKETVGSRLSSTQGFLIQSLAEQIMDKQAIIEKAKKFLTENCKGTEVELVTSVIGIGKYSASCIMVEIENIYRFASPKKLVSYFGIHPELKDSGDKIKIYHISKKGRSSMRGVLYMCAQSAVLHDPHFKQIYHHHRSKGMNHRQAIVVIMHKLLRVIWGILMNKKPYEAATDRANQNKKVTAIKDENKLKEVKAKRRYQEADLEAPISNRQTKIRKVQSDSQVDIVEQVRDVPITRL

SEQ ID NO: 497608 - protein, 343 aa, unidentified
MKHIGLDVHSTTTVVNVLNDRGRSILRRQVPTRESDLVDFMKSIPGPKRVALEESQMADFVARVIAPHVKEVIRCQPQHNRLISEAEDKCDKKDAEKIAELLFLNKLKSVHHPSWMYRQLREGVRCYWISSRDLTTAKNRLKAFYLFNGIHCVGEKAYCKQQQEIYRAKLKRCSGNQNLLDLKYRLLETCRESKAAHVRELRNLSAQLKDDVARLASIPGIGLIGACTLLAYLENGWRIPNKRKLWQYCGIGIRRHESNNKGYQGASKKGNRYLKNVLMTAASSIAARRQADNALTKAWHAGRTEGMETSRLRRNMARTIVVLAHHLLRFKEMYNDDRVMTRH

SEQ ID NO: 497609 - protein, 400 aa, unidentified
MYKYFLGIDISKDSFDFCFTDETEKVLYKEHYQMDMTDFTKLSEYLSSFSKDEILIVMEATGIYHLNLLSFFLEQGLNVSVVNPLFIHAFTKSMTIRKTKTDAKDAHIISLFAKRNGTTLKLSSPDDLESIKPIVREKEKLINQMSAIKTDMKSIVNQLFPEMLKNTNIFSKSSLNLLLQAPSKRIIRNLKEKKIAKLLSSDTTRGAKPKVGASEILSLAKNSIGINNQSLEKILISKIKQLEFLQIQLDEFNAIIEQFVDKHHNDDIELLTSISGTGKSSASSFLIELGNINNFATHKQLTAFIGTDPTIYQSGTSVNVKGSISKRGNSHLRRAIWHMARAATVWNETLKAYYDKKRSEGKTFKQSVIAVANKLIRIIFSMLKNNTKFEINYHSKGVAA

SEQ ID NO: 497610 - protein, 373 aa, unidentified
MPKYSTAFGMDVHLRSTTVCALDADTGEAVTRRFPGNPWGEIAGWMDGFPGPSLAAYESGYLGFAPQRELAGLGVECVVAAVSKIPRSAADSASKNDRNDAARMAKAILAHDISPVWIPSPEVEGIRDLAGAYGGATARLATAKQRLLAFLAKRGFVYGGTTPAGNPRKYWTYDFLRWLDKVRPEDDGGVRTLAALRNEVEAAAEARADLLSEYRAAVDASPIAAEVAALQSIKGCAFALAAAFSAEVGDFTRFRSGRQVTAYFGLAPSQRSSGDSVRLGGISGAGNALVRKLAVEGSWCYAAARHQPKLMPRDTGVPLEIRMHGRKGSERLLRRREEMLARGVPAAKANADTAAELVRWLWALGMMCREGAE

SEQ ID NO: 497611 - protein, 341 aa, unidentified
MDTHKDLHVARAKDELGRGLGEITIPASAKGYRALLSWSRGLGEVRAFGVEGTGCYGVGLARHLRAHGQVVIEVIRPNRQARRLRGKSDPADAEAAALAVLSGEASGIPKASDAAVEMIRALRVARSTANRARTQAINALHALVVTAPEELRRDLRGLPGPRLQRVCAGLRPGELTGPVDATKMALRSLARRHQALSAEVRELDKDLRNLTAQACPALVGIFGAGSDTAGALLLAAGDNPGRLRSEAAFAKLTGVSPVQASSGKTTRHRLNRGGDRHANAALHRIVLVRLRWRHPPTIDYVERRTAEGKSKREIIRCLKRYVAREVYRALIDVPADASSPA

SEQ ID NO: 497612 - protein, 319 aa, unidentified
MANIAVWVGIDVSKTTLDVYIRPIGKAWKIANTQVEIAGLVEQLKTYDLNLIVLEATGGLETEVVIQLQAALLPVAVINPRQGRDFAKATGKLAKTDAIDAQILAHFGEALKPQLLAIESEQARQLGELISRRRQLVEMQTAEKNRQTRARGRALADIEAHLEYLAKRLDSLNQEIDELTQNNTQWIAQVNLLKTTPGIGTVISTTLVSDLPELGKLTAKQISRLVGVAPINHDSGLHKGKRMISGGRAHVRATLYMGAVVAMRHNPVIKSFYQRLVERGKSKKLALTACVRKMLVILNAMVRDNLPWHIPPSGQPISP

SEQ ID NO: 497613 - protein, 374 aa, unidentified
MKSVNYSAYIGLDVHKDTIAVAVANPERQGEVRFYGNISSAKDAVIRLMKKIIKLHGTILVCYEAGPTGYGLYRLLLSMNIDCTVVAPSRIPKISTNKIKNDHRDAVALARLLRAGELVEVWVPDMTHEAMRDLIRARSCAKKDTKVAKQRIQSILLRTGKRYEKKMWTVRHRIWLANQSFPIASQQIAYEHYRQSLEQIENRIEQLDQEIDRLLPNWSLYNLVNQLQALKGVGRTIAISVVAELGDFSRFTNPKQIMAFLGLIPGEHSSGSTTRKSGITKAGNVELRRLLYEAAWAYRNNAKVGNWLVTYRPDSVCQEAKDISWKAQQRLCFRYRSLVAKGKKSQVAITAVARELLGFMWDIAVTTQSLNKRA

SEQ ID NO: 497614 - protein, 436 aa, unidentified
MFVGHRFRTDPDELDTLWARLPKDAERIEVVMEPTRNAWVALAAWFRRHGATVVMVPPEQSADLRDYYNKHTKTDRLDSKVLARLPLLHPEWLHRADSLGPGDELKRAVKIRSGLVHRRTACMARLDALLEILGPAWIAALGSDMTLTALRFLARYANPVQVKRLGKARLAAFFRRSSRQAWADERADAVIEAAATTLRLWGADGGELDFDALAADIAAEARLALTLTDEINGFDKRIGALYDKADPAGIVRSVPGAGRVCAPQILGRLGDPTRFANLAAVRSFAGLVPAADSSGQADGHRGPTKAGDSCLREALFIAADHARKVDPTLAVRYQRLMLAGKHHDSAVCTLAAVLLTRIAACLRAGTHYLVRDTDGRVITEAQGRAIVAERYTVPPEVRAARRKVTPHRHPRRNERNERAKTGVATRSKASPVPQPA

SEQ ID NO: 497615 - protein, 356 aa, unidentified
MGGSVKHVAAVDTHKDTHSIAVIDRVGAVVAELTIAATVEGYAQAITRVTEFEGLVWGIEGTGSYGRGFVDELLRRGASVFDVPGSLTKRHRRNASRRGKSDVQDARAIAEVVLRESGRLGRCERSDEQEAVRVLYDRRDRLVHARTEAINRIRAAALRLDVRELPAKLSNGVGLRKVHEAIDFLRGSSYTADALIAEIEEAVSDVERISDRIRTLEKQIRPFLERLAANLLTLNGASLVVAAGLIGHSGSLSNIRNAAAFAMRAGVAPVPCSSGKSKAVRVNTGGNRQLNRCLHVMALVQVRTAGHAGRVYYDRKRGEGKTHRAAMRALKRQLATVVYYRLAESRRLMERPTAAA

SEQ ID NO: 497616 - protein, 414 aa, unidentified
MDKPLTTRWVGLDWADKAHQLVVVDDAGSVLASWSTPHTPAGLAELVRRLRRHEPVAGIAIERKHHLVVHALVQAGFVVYPINPALSSRWGREVSVAGSKSEFADARNLADGLRLRHGRLRRLIPDDPLTRELALSCRHECQLIAEQTRHVNHLQALLKDYYPAAWGWFSDWTCPTAWDFVLTYPTPQALADATTQKLVGFLKVHHIGLRPVWQERIERHTEALAWPCDPATIAADADMAQALASLLRTLRAQLRRVRRRIDELFAQHPDAALFLSLPGAADKLAPRLLSHIGARRDRYESARELLMLSGCVPVPRESGEGHRARFRWACQKDFRNTLHHFAFASLNRSIWARAFYDRCRAKGHSDAQARRNLGEKRLKIIFRMWQTRTPYDEATYLASLIRRGSPLIEDIRST

SEQ ID NO: 497617 - protein, 447 aa, unidentified
MATSKARVARVGRSKLEVMHPDAAGIDVGGSMHYVAVPNHAADETVRQFGCYTVELNALADWLSECGVKIVAMESTGVYWIPLYELLERRGFEVMLVDARHVKGVHGRKSDVLDCQWLQQLLSYGLLRAAFRPHDQFCALRELNRIRGRTLRDQGRSVQHMQKAMTLMNIQLGQAISDVAGVTGQKIVRAIVAGERDPQELAAYRDRRIKASEEEIAASLEGTWRAEHLFALKQALATFDFCAAQLQDCEGEIEQVMQQLHKYSGEPAKGKRRGRAKNAPKFDVREQLFKMCGVDVTQVDGIDVSTALSIISETGTDMSRFASDKHFTSWLGLCPGTRISGGKVLGSGTKHSVNRATQAFKQAAAALRTSQSALGAYFRRLCARMDKAKAVTAAAHKLARLFYALLTKGQEYVDQGQLYYEERYRQRVIHNLQRKASKLGMSLVPSA

SEQ ID NO: 497618 - protein, 341 aa, unidentified
MDHYAGIDVSLESASVCVVDGNGRIVREAKVASEPEALIAWFRKLGIPLSRIGLEAGPLSQWLYAGMREAGLAVELLETRHVRDAFKSMPVKTDRNDARGIAQLMRLGWFRPVHCKSLPAQEMRALLTARKLVQGKRHDLEMSLRGILRGFGLKVGPTTPRSFEGRVRELVDGHATLLAVADALLLARATLGEQLGKLQKRLVSLARDDARARLLMSTPGVGVLVALTYVAAIDDPGRFRSSKAVGAHFGLTPKKYQSGETDVTGRISKTGDASVRTALYEAASVILTRPVKGSLLKSWAMRVAKRAGMRKAKVALARKLAVVLHRMLTDGTRFAADKAAA

SEQ ID NO: 497619 - protein, 344 aa, unidentified
MTYYAGIDVSLRSVNICVVDDDGECVAESKLSSEVQEIIAYLDELECEMDVVGLEAGTLAQYLTYGLQAADFNVVCMEAQQVKAALSAMRNKTDKHDARGIAQLLRSGWYRQVHIKSMESHHIRMLLTSRRTVLDKCIDIENEIRGLFKIFGIKLPPKLWHGSFDAAVRAIIEADEKLSHALLPMLDARLVLYKTFRVLENRTHRLAREDSVCELLMTAPGVGPITALTYKAGVDDPSRFKRSRTVAAHFGLTPRRQQSGETDIEGRISKAGDAEVRRTLYVAANSVLTRSSRWSSLKVWGMKIKKNRGHKKAVVAVARKLAVILHRLWIEETQFQWGMKGVRS

SEQ ID NO: 497620 - protein, 385 aa, unidentified
MQTPNDLSQSRIVLKQDSTLIAVIEMSLSSWLVAGMVPSVERQPLKKLAIDENALLKLLHRWREEAEKAGRKIERIAVAFEAGRDGFWLARWLRARGIEAHVIHASSVAVSREHRRAKTDRLDTELLKRAFLGWLRGERDHCKMVAIPTIEDEDAKRPNREREGLVGEQTRIINRMKAALSRLGIRGFNPKMKKAAQRLEDLRTPEDEPIPPNTLAELRRDMERRRLISEQIRQIENARLERIEHAPRHGPHAMVRVLARVIGVGIETADMLVQEALSRNMRDRRAVARYAGLTGSPDESGTRRREKGLARSGNARVRRGMIQLAWRFLMFQKDSALARWFRARTENARGARKTMIVALARKLLIALWRLVREGVVPDGVVLRPV

SEQ ID NO: 497621 - protein, 367 aa, unidentified
MKKVSTVAAKQSRKTAEQKLTVGLDVGDRSSWYCVLDECGAVVLEQRLSTTPKAIDKVFGGMPRSRIALETGMHSPWVSRRLSELGHEVIVAHARNVRLIGESRRKDDRLDAQTLARLARIDPQLLCPVKHRSARAQADLTVIRARASLVRARTALVNTARGLAKSYGERLRGCNVGNMNPEKAEGLSPELQAALQPLLAGVEALSEQIRESNERIERLAQESYPEVTLLKQVKGVGTLIALTFLLTLEDPHRFAKSRDVGCYLGLQPGRRNSGQSEPQMHISKEGDPYLRTLLVQGAHHILGPFGVDCDLRRWGLKLAERGGRNGKKRAIVATARKLAVLLHHLWVSGEVYEPLHNSQRRAMATAA

SEQ ID NO: 497622 - protein, 348 aa, unidentified
MTMLADTADGVIGVDTHTDTHTACLLDHLGRQIATITVPANPRGCAMLLAWARGQAPGPRLVWAMEGTRSHGLGLLRVLQASGQSVTEAGRPARASKRPGGKSDPADALRAARDALAAEKLAQPRSDGEREGLRILLAARAQASMARTAAVNTLKALLLGAPDNLRQGLRELSTPRQASKCRRLRTCTSQPVAEQILRTELRRLATHIGAWDRELRANKAQLCQLVTQVMPALLDQPGIGPMSAAQLLVSWSHPGRFRSEAAFAALAGVSPLPASSGKITRHRLNPFGDRQLNRALHVIINWRILHHSPTQAYLARRAGHKTEREIRRCLKRYAARSLYRLMETAART

SEQ ID NO: 497623 - protein, 310 aa, unidentified
MEPKVFVGVDVSKDSLDVAIGSQKNIITFANDQKGADVLVKKLSRIGPELTVFESTGGYELLATSSLAEAGLPVVIVNPRQVRNFAKATGILAKTDAIDARVIAHFAEAVKPNVRPLKDRETSELTALVTRRRQIIEMIVAEGNRFKLASKRNKKDIKDHIRWLKKRMDKIESDIGKMIQRSPIWRCKDDILQSVPGIGPITSASLICDLPELGVLSPKKIAMLAGLAPLNCDSGKFKGRRRIWGGRASVRSGLYMATLAATRCNPAIKEFYQRLTAAGKCHKVAITACMRKLLIIVNAMLRDQTLWQQN

SEQ ID NO: 497624 - protein, 340 aa, unidentified
MKKTVKFYLGMDVSKLWVDIAVMCVVDHNKQPLVRERFDNNAAGMKALDKWLKKHKVCFNENSLLVIENTGVYHRLVWEYCSTHNLPLYIGNATHIKYSFGIARGKNDKIDSERLCAYAFKNADELKATPVLNPVFLKLKDMMTSRSRLLAQLNSIKVYLREMKLSNSKETQAIIEEAHKAAVEGIKESLKTVEKQIHQMVQQDAAIKNNYDLLLSVPGIGHLTAVYIICCTNNFICKITGKQLASYAGVAPFGNSSGTSIKGRDKVHHMANKELKKLLHMGALSAIQHYEEFRAYNERKVKEGKHQLLVLNAIRSKIVLRAVAVINNQHKYVDNYKKAA

SEQ ID NO: 497625 - protein, 407 aa, unidentified
MDSLKTVFGIDVSSRKSNVCIMVNGRKVNDYAISNDMVGFNQLLDDLKQVTNPQIIFEATGVYSRRLQAFLDMHDLRYVMMNPLEAKRKTKDDLHQNKTDKLDAMYLAKMQSEHPQRLAYVQSEEYQELMANNRIYEQASHDLITNKNRLHKAIQLTFPEIEHLLANPRGKNYWSIVLKFPHPNIVLETKEADIIDFLKSLSGIGEKRANDLAQRLIRLAKLACPAVKKSSAHIRGLEMAINNILSAEETCQTALKEMAKLAPKRDLEILKSIPGIAENTALRIISELGDIRRFNNPNQLNAFIGVDPQVYESGNLTAHLSISKRGTAIVRKVLYLAINQIQSAKKAGNPCHIADYYEKRKRSSETASHKKAAIASIHKLLRTIFALITNDQLYSYDIAKHNQRLLS

SEQ ID NO: 497626 - protein, 347 aa, unidentified
MSVFVGFDVSQAKTHISVVDEHGKELWHGSVATSPDALTLAVREHAPDAIRIGMESGPLSPWLFHALKEKGLPIICIDARAAKAGLQLQGPNKTDRKDAKGIARIMQTGWYREVTVKEIEGHKRQTALTVRKQLVNMRTECINQIRGILKMYGKVLPSGKLPALKELMLADDLLARSIGAVYNTLQTLAVEIKRVDKEIEILAEEDEYCKLLQTIPGVGKITSFAFVASIGDPGRFRKSRSVGAYLGMTCRRDQSGERDINGHISKCGNIMLRSYLFEAAGIVLARTKSFSALKAWGLRIKKRSGWKKACIAVARKLAVIMHRMMVTGECFRFSELSKDLNALPATA

SEQ ID NO: 497627 - protein, 337 aa, unidentified
MIVIGVDVHKHSLSAVAVDERGRQLDARETNDALELLAWAKGLGRRRLWALEDCRHVTRGLERTLQRQRQRLVRVPPRLTAPERRRGRTRGKSDLIDGLAIARAALREPRLDWPRPQEGRLRELKLLVDHRDDLVDERRRCQQRLRWHLHELDPTLRVPLGALDRGIWLDRLGRHLARSHQTTQIRIARELVSRCRTLTRTIAKLDRDLHARASTIAPRLLELPGCGPLTAAKLLCEIGPIDRFPSDAQLARHAGVAPLDASSGKHQRHRLDRGGNRQLNCALHRIAITQGRVHPPARAYLERKQNEGKTRREAIRCLKRQLARTIYTALKAESALT

SEQ ID NO: 497628 - protein, 314 aa, unidentified
MLYAGLDLSRKRLDFHLLDSEGATVEVGAAPPDADGLLGLTRRLDRHREPIRAAIESMNGARFVHDRLELAGWQVEIADAQKVKGLAPLACKTDRIDAWVLAELTRRDLVPAIWLPDPMVRAERERARWRLHLVRHRSSLKQRVHAVLLTHGKPCPVSDLFGVRGRQLLVRLGLPEPWQGTIEASLRLIDELEREITDSERELRRLGADHRYVPLLLTVPGIGWVLAYTIAAEIGDIGRFPSPRKLAGYTGLCPRVYQSGERDLRGPLAKQGPKYLRWALVEAATHACTAAVYRDRYQHTKARIGKQRGATRPS

SEQ ID NO: 497629 - protein, 325 aa, unidentified
MKKIFIGIDISSKTLDICLKTEGKVQYFNIQNEPKAIRSFLKKHTVAGTMVAMENTGRYNWHLLEALEGLELSVYVLAPAHLKRSLGLARGKNDKVDALRICSFIERNGQDCRQWKPSPASIKRLRVLLAERESRIKMKGQLARQQHDYKLMKSLGVDRELLKLNKKLIEAIDMQIRKIESDIERSIMEDDELREKTELIRSVPGVGKVVSWMMIAKTDGFTSISDPRKMACHCGVVPFDHQSGTSMRFRPRVSVFADKKMKSLLHLAAMSAIRLNNELRIYYQRKVGDGKNKMSVLNAVRNKIIHRIFAVVKNQTTYKNDLVLS

SEQ ID NO: 497630 - protein, 403 aa, unidentified
MNSVGIDISKGRSTVAVMRPFGEVVISPFEVRHTDSELSELARQLKSLDGETRVVMEATGNYHTPVAKLLHDAGLYVSVVNAKLVHDYGNNDLRRVKTDKKDAVKLANYGLDRWLTLPRYIPEEDTRLLLKNCYRQYRQYSKVQTVLKNNLISLLDTVFPNANRLFSSPIRGDGSEKWVDFVAEFWHCRCVSEKSERAFTSKYLRWCRNHGYNFSEAKAHTIYAEASGHIGVMPKSETTKLLVEQAVAQLGATSTALAALKHKMQALASQLPEYPAVMDLFGVGPTLGPQLIAEIGDVRRFYSKKALVAYAGLDAPLNDSGDVTGRHKSMSKIGASSLRRTLFLVMSVYLQTAPLDEPVYQFMDRKRAEGKPYRVYMMASANKFLRIYYATVKAYLESLEHTA

SEQ ID NO: 497631 - protein, 357 aa, unidentified
MSHNSTMTPRVPKVTIGLDLGDRTSRTYDVNADGECESEATVSTTVAGMTHCFGNRERCRVVLEVGTHSPWVSRLLEQLGHEAIVANPSAMFAGAPRRRRNDRLDARFLARQGRADVELLYPITHRSAEAQRDLESLRARDQLVAVRTKLINHVRGAVKSSGARLSRCSAEAFAKRAAGEVPPELAPALMALVEVIADLTRRIARAEGQLAAITRERYPIAQRLQQPAGVGPLTALAFVLVIEDPHRFRKSRDVGPYFGLVPRLDDSGDSTPQLRISKAGDEFGRRLLVSAAQYMLGPFGPDCDLRRYGTAIAKRGGKNAKKRAVVAVARKLAVLLHQLWISGATYDADYQLKRRAA

SEQ ID NO: 497632 - protein, 342 aa, unidentified
MDEYDVRQFVGIDLHRQRSVIVRQSESGDQLSAVRIVNDPVALRLELERAGTDPEVVLEATYGWYWAVDVLRDCGAQVHLAHPLGVKGFRYRRVKNDVRDAGDLADLLRMGRLPEAWIAPPQTRELRELVRYRAKLVAIRSGLKAQVHAVLAKAGVLITVSDLFGVGGRQRLAKVPLGAAYAERVRSLLELIDVLDGHEARFAGLIAKRLCNHRGYQALQQVPGIGPVLAAVFVAEIGDVHRFTSPAHLCSWAGLTPKHRESDTVVHRGHITKQGSKLVRWAAVEAIQRYPTTSKIALDRTRIESRRGKNIAKIAAARKLLTLVYYGLRDGHIRALDRPRAA

SEQ ID NO: 497633 - protein, 350 aa, unidentified
MKDITVIGIDIAKNVIQIYGTDHEGRELLKKRLKRERFLAFMAKLSPCLVGIEACGGSNYWAKELIKLGHDVKLMGPKKVKKFAECNKNDDKDAQACSIAVTRKNMQFVAIKSQTQQDIQSLHRLRSFYLKQHVAQMNMLRGLLLEYGIAIPQGISALKRHLNELFETTPADLSEMMLELTRKTYNEIISIEAKVSELTKQVEDLANTDEQCQRLLTIAGIGPITATAFIAKVGNGSEFKRGREVSPYLGLTPRQNSSGNRQQLLGITKHGDRYLRQLLIHGGRSVVKSVMRINKLDGAYIKQDTHSEWVRNLVDRVGVNRASVAVANRNARIAIALLKTGKSYDSNYAS

SEQ ID NO: 497634 - protein, 346 aa, unidentified
MGMDIAVLGVDLGKTVCSVVGLDTSGAVVMRRKVRRETLIALAEKLPPCVVGMEACCGAHHVGRVLTAHGHDVRLMSPEYVRPYVKAQKNDDRDAEGIAEAATRPTMRFVELKSQDQLDMQTLHRSRDRLVGERTALINQLRAILLERGYVAPQGKRKLEQFLSVLMDEQGGADLSPRIALLVADARAQWAELDRRISAFDTEFVHWVKENEEARRLTTIPGIGAIVASALVAAVGRAESFDRGRDLAAWLGLVPRQFTTGGKPKLLGISKRGNKYLRRQLIHGARAALPYVAERDTPLGRWAKGLLSRAHHNVAVVAYANKLARIAWAVLRRGERFAATGTPMAA

SEQ ID NO: 497635 - protein, 298 aa, unidentified
MIHVGVDLDKRSSQIAVLTEEGEISQQRLPNDPVRLEKFFAELPPHTPVAIEASGTWWWLVDLLEHLGHDPILSHPKQTKAIAAARLKNDRVDAERLALLRRGDLLPTVWIPSAALREARELVRHRVQLVWLRGIVRNRRHAMLARRNLQPVSTKTWLTQRGQRELQRLPLADTPSRIREDGSALLPVLDAQIRRLDSELGARWRRDPRVHRLTTIPGIGPFIALVLVLELGDIARFGSAKQVASYVGLTPRIRASAGRIRAGHISQAGNRLLRWVLLLAAPRKRCVGPARGGPGSMR

SEQ ID NO: 497636 - protein, 328 aa, unidentified
MLGIDVSKDKLNYCLLGSDRRPLLEGEVRNNAEGIAELLSKIDPKAPMVLEPTGRYGLAAVKTARANGRLVLQAQTIDAKHVLNGLSRRAKTDKLDSRGLAKYGMADDLIRPYPVKAKDVDELDQLLSVRRCLSGSITRFRLQRQSLDLAGNNIDKILNELKAQLKALDAQILSLVKSNSRFEPALRMLDVPGIGPVTAAAACSRLTHKQFEYPDQFVAYIGLALKVIDSGKRAGRRRLEKRGDAELRRLFYMAAQSNIRIAASPFKAQYLKHREKGLSSTAAICAVARKIAMLCWSLHKHGTKYSSERVGARPAPKHDAPSEEEHAQ

SEQ ID NO: 497637 - protein, 392 aa, unidentified
MYIVGIDIGKNHHEASIVSPEGKQIGRSLRFATTYKGADSLMSFIFKNIGNSPCVFGMEATGHYWYPIYSFLKAKGYTIYIFNPIQSDSLRKMYIRQTKNDSIDSFLIAEVIRFGQFGTTSMADENILAMRQLCRYRDSVISSRTEIKLRIGTIMEQIFPEYEKQFSSLWVSTSMGILEKYLTPENIENAPIDELFEIIKDKSHNKLTMKNAISIREAAADTFGIKIAQDAFSFQLKQLIDRMNFLDKQIEALDCQILEYYEKFDCYLHTIPRIGMIAAATILAEIGDINRFKSSSALVAFAGIDPTVRQSGEFSSTHNHMSKRGSPYLRHAVFLAATTCSFHNSPLNAYYKKKREQGKHHLTATGAVARKLTTVIYAVLRDGKPYEPKSFC

SEQ ID NO: 497638 - protein, 466 aa, unidentified
MSKGSGGMTRGDRRRNARRERLRGLLPRDGAVVGIDLADEKQAIAVVDHDVRVLARKTVRVKAFRLGEALDWALAQARAKGFAQVTVACEPTGPRWLQVQRLCAERAVPLVCIQPLMSHIAREQQDLTMHKTDESDCVLISRLAIELHCYIPEELDETWAHLRHLGRRRSQLITAATASATRIADFLSVAWPTVTETCARPLESLTWLTAMQAVTSRCGADPARLAGTGAEAFIALVRAGVGEWGGKKAHGPIIARIFAALTDTEGVVAPSRRGLLRRCADELGDLQRTRAQLRQVEADMAGALEELGLSRLAGIPGLTAVGAAAILAETGDPRRYDTSSSLVKHSGMSPSDNASGAFYGQARISRRGRPGLRLAVWRAVWPMLQYNPVMAAKYQAMTADTDTAPGAGRDGTGPQQVTAAARARRAKARVACAAALLRWIYYLVVHDAAWDPAAASGTAASPAEAA

SEQ ID NO: 497639 - protein, 442 aa, unidentified
MATNYYLGIDVSKGYADFIILNQEKQVVEDNFQLDDTFEGHNQLFKFLTDFFANYSEAKIFAAVESTGGYENNWFNTLHKSQYKMNVSVARVNPFGVNHSSKASLSRIITDKESAKHIAEYLINYPEKIDYQHEDYFATARRQWSLIKMFTKQRTQLLNQLESLLYIANPEILSYCRDGVRLWTLKMLEKYPTAKTIARAHPDSLSKIPYLSKKRAVLIIENAKRSVASATDETIRETIIALVKQIISLKKIIAKQLNLLETNVNLPDEVKLLKTFNGIGTYSAVGLMIEIISIERFAASKKLASFFGLHPVFKVSGDGKHGFKMSKKGRKEPRVILFNVTRYSIGHNPFIKEIYARHLKKGMPKLAAMGAIMHKILRIVYGMLKNNKPFDANIDRANRDKFKEIKPSSKLSNVRRMQKHDNNAPISGRQNKKRKENELLPK

SEQ ID NO: 497640 - protein, 410 aa, unidentified
MPKIVYPTCCGIDVHKSFVVACVATTDSALVTTYKSKRFSTFTGDLRRLAEWLAQNNCKDVCMESAGKYWIPIWNILETTCNLVLAHPKYVKAIKGKKTDKKDAKWIADIFKHDLINGSFIPPADIRQLRDLVRYRFKLTNYTTGEKNRAQNCLTVSNIKLDDVFSDVFGKAASAITTRLLENNEPFDVKPYLTKGIKASPEEIQAAVNGVMCANQAEKLRIIRSHMKSLEVCKANLESEILSLAEKYLPQMNLVLTVPGIQSFAAAAIIGEIGMDMSVFETSRHLCSWAGLAPQNDQSAGKKKTTRISRAGVYLKPLLVQCALTAIRSKKHPEIANRYNAIKKRRGHKKAIIAIARMLLTAIYNILKKNEPYNAELYRQSDKPPVQREVSLEQAIFILQRQGYLVSPAA

SEQ ID NO: 497641 - protein, 373 aa, unidentified
MNYTTVYVGMDVHKESFSLCCYTNEKEQAEYCQKVKAHYSKVLNYLDAMRFHYGNDAVFICGYEAGCLGFTLYHQLTQHHVKCVILAPTSMAKPTGKKKVKTDKLDAALIARCLAHHDYSPVHIPTDKDEQVKEYIRMRSDHKAALKKIKQQISAFCLRHNYRYEATKSHWTQAHLNWLRALKPEGLYEEILSEYLSTYDQLTDKLERIDKRIEELASGPDYQEKVSKLTCFLGIKTHTALTTMVEVGDFNRFPSAQKFAGYLGLVPGEDSSGDSRNGLSITKAGDSHVRMLLTEAAQSYTRGRSGCKSQALKARQYGNTAQVITYADKANERLRRKYYRMVLTQNKKPNVAKTAIARELSCFIWGMMTENMQ

SEQ ID NO: 497642 - protein, 347 aa, unidentified
MNQIIRIGMDTSKHFFQLHGVDTAEQPVLRRKLRRKEMVGFFAKLPPTEIGMEACGAAHYWGRVLRELGHTVKLIAPQHVKPYIKRNKNDGRDAEGMCEAMSRPTMQFVPVKTEEQQAALMLVGMRERLVARRTQLSNAIRGYAAEFGLTAAKGLDKIEPLLAEIAADEALPVLARELFAMHGREYVQLQAELKKIEARLMAWHRANADSRRLAQIPGIGPVVATTLVMKAPDPRLFPSSRHFAAWIGLTPKDHSTAGKTRLGTITRAGDEMLRSVLVAGATAVIQQAKQGRGHPSPWLLALLARKSSPKLAAIALANKIARIAWKLLVTGESYHAGGKPIASAHAA

SEQ ID NO: 497643 - protein, 355 aa, unidentified
MNQEKYIGMDVHQATISVAIMNSSGQLIMECLLETKASTIVEFIQGLQGTLSLTFEEGTSAAWLHDLLKPHVSRLVVCDARKAALLKEGNKTDRIDARKLAELLRTNQLKPVYHEEHGIRALKELGRSYLTITKDATRGMNRIKALYRSWGIPCSGTTVYAPRHRAEWLAKLVEPGVRVRAEHLYQQLDGLQPLRLEARRELLGESHKHRAVKLLRQIPSIGPIRAALLVALLQTPHRFRTKRQLWAYSGFAVETHDSGEYRNVRGKLQRNRERITVRGLNDNHNKDVKSLFKSAAISASTRPGPLHDFYVARWRRGCDRTMARLTLARKIAAITLAMWKKGVGFDPQNLPRQAA

SEQ ID NO: 497644 - protein, 375 aa, unidentified
MAEITRALIARVGVDLAKNVIQVHAVDGAGRRVVSRALKRDQFVAWCAELPQGCVVAMEACGGAHHWARQLRSMGLDARLIAANFVTPYRMEGKGGKNDMTDAAAICEAASRPMMRFVPVKTPAQQGLMALHRMREGFKEERTACINRIRGALVEAGLVFGKSPKVLRAVLADVIEDAGNELSGEARLVLQTAFAHWRELDEHMRWCDRRIGEHVRGSEAAKRAAKIIGIGELGASAFTAGVGEFKQFKSGHQLSAWLGIVPRQNSSGGKTSLGRITKRGDDYLRTLLIQGAKSAVMSAGKRDDPTSRWLQQLVARVGWQKACVAMANKNARILWAVMTREQGFDAQHVSVKPPAKLPKPASAPTTAPQTQACAA

SEQ ID NO: 497645 - protein, 333 aa, unidentified
MNSVRMHVGVDVGKEWLDVCYPDGRKEHIKNIKSCRTKLIARAAKLGAIVSFEATGPYEEPLADECLAKGVKAVRLDAWKTRRFAESQGRIEKTDAIDCEMIRDYAASLKDEKLHFVKQHSEAQKRLKKAVCARKNYMKARALIYNQLENNPDADMKKAINKLVEKVDAQIAKLEAECDAAIESDPRMKDLSRRFQEVKCVGPCLTRAILAYCPDIGDFNAKSIAKMCGDAPLDHESCTIKNKAKPKRGRSDLRKALYMAAVSGSRTNHILRGIYQRLIANGKPRKVALTAVARHIAILLNYIAKYPDFKPAQDHKVVSTTSRPKRGRPRKAK

SEQ ID NO: 497646 - protein, 410 aa, unidentified
MVKENFIYVGIDLHKETHTVVMIDCYNQKLGEITFPNRPAAFPKLVTKVKKCNTDGKEVVYGLENAYGYGRALAVWLIDKGYLVKDVNTAISHRQAKHRGAMYRKSDSDDAKAIALATLNMLDKLPDACPNDAYWSLGQLVHRRDNIMKQRTRLVNQLHEQLCIAYPSYKQFFNDISRPTALYFWEHYPSRKYLKGKSVEDLRAELVPVSHNKCSTKTCEKILDAVASDKVKNNAYQDARDMVTLSIVSDLQHYDSQLAEVDKMLEQMYKMLGCTLTTIPGVNVITAVKILAEIGDIKRFSNANKLAQFAGIAPLHLSSSGKGKDLATKQGNRRLQATIYFLAIQMVQVSSNGTPRNSVVRAYYEKRKAEGKTSQQALICISRRLISIIYGMLKHGTEYRMPVVESAGEK

SEQ ID NO: 497647 - protein, 443 aa, unidentified
MQVITPHIKGGLTLNHTRNEKLDQVQRDTLVIGIDIAKFKHFACAFDDRGRELEKPFPVLQSIEGFHQFLEKVETFKREHQKTDVIIGFEPTGHYWMNLAEFLRKHEILYVMVNPLHVNRAKEFEDNLQTKNDQKDSRVIARMVSQGYFTYPRVLTGIEAELREGSAHRNHLKKEKARLSNKIIQWLDRYFPELIGQAFKDIGRTVVGILKYVPLPEQWIDLEVDAFLTILKDKEAFRCPSRKKIVEVHSLASQSIGLTEGTIFAKQKIQWLISQYEQVCQSLEETRALMQELARELDAYEHLISIPGISEDMVCELLAEAGPLTAYQHPRQLIKLAGLTLRENSSGQHRGRKKLSKRGRRHLRALLFRATLTLIHNNQAFRDLYSHYISRDENPLKKKEALVVLGSKLLKVFWGLSHHKMAFDAERMRRDSPLLQSSAALAS

SEQ ID NO: 497648 - protein, 378 aa, unidentified
MYRILKIGMDVHTTNYTLCVAEPILGAEESILAQIQIEPDYRLVIQFINCLKERLGVTNKECDILCGYEAGCLGYSLYHQLTNAGVKSVILAPTTMMSEKGKRIKTDKRDARLIAKCLCYGGYHAVYVPTADDNAIKEYIRMRDDHKIALKQKKQQMNTLCIRYGYIYEGNNWTQAHLQWMRKLELPTLIRETLNEYLATYDELTAKVERFDKRIQELANQPQYQEKVKKLECFLGIKPHTALSLIVETGDFARFGKGNIYAAYLGLAPGEHSSSDDCNKLGITKAGNSHLRRLLIEASSGICKGVIGQKSKALKARQMGNPAEVIAYADKANIRLRRKYYKLIHRGKKRNVAVTAVARELACFVWGMMTDDIYGNAA

SEQ ID NO: 497649 - protein, 354 aa, unidentified
MSQKLNSEITVIGIDIGKNSFHIVGQDRRGALLLRQKWSRGQVEARLANLPPCLIGMEACVGAHHLSRKLKALGHNARLMPAKYVRPYSKGEKNDYRDAEAIAEAVQRPTMKFVATKTADQLDLQALHRVRERLVSQRTGIINQIRAFLLERGIAVRQGLHFLRAELPGILAKCPDVLSPRMLHLIEDLATDWRRLDERIEGLSDEIGALARHDKGCERLMTVPGIGPIISSAIVAAIGTGDVFSKGRDFGAWLGLVPKQISTGDRTILGPISRRGNRYLRALFVQAAWVVLVKIKPEGWERYGLRSWIEAAKQRLHHNVLAIALANKLARIAWAVLHKGRAFECVKTNASRAA

SEQ ID NO: 497650 - protein, 322 aa, unidentified
MSVFVLGIDIAKQKFDAALLVDRKTKHKSCKNSAEGFETLMLWLAKQGVQKVHACLEATGSYGDDLAVYLHEAGHIVSIVNPARIKGFAQSELIRTKTDKVDAALIARFCLTMKPDAWTPPPPDIRSLRALVRRVDSLIDMRSQEKNRISTAHESVIFLIKEHIAYLDREIEKIRRQIADLIGRNPHLRERAELLNSIPSLGKATMPRLLAELDELEKFDHVRKMVAFIGLAPKETLSGSSIKGKSRLCKIGNARLRKALYMPALVSIQCNPVMISFYNRLKDKGKNGKVIVCAIMRKLVHVIFGVLKSGKKYDPNFKPICA

SEQ ID NO: 497651 - protein, 324 aa, unidentified
MTDAVLGIDVSKNTFDTNLGAGTKARSKSFANSPAGWHHLIAWLGEHKIGQVHACLEATGRHGLGIALALHEAGHVVSIVNPAQIRDFARTKLGRNKTDQVDAVHIREYAELFKPRPWTPPSPAMRRLCELQTIRAGTVAGLTEWKNRRGSGITDDLARSLAETTIQHFTSQLEAVDQAIAETIDNDVELSAKRDLLVSINGVGKALAGIVLAELPGPDILGSSAAAAAYAGLNPQQHQSGISVNRPVRISKIGNAVLRTALYMPALSAMRYNPAVAALVDRLKAQGRLKGKQIVIAAMRKLLVLCFGVLKTGKKFDPAMAMGK

SEQ ID NO: 497652 - protein, 400 aa, unidentified
MDKDRIVAGLDVHKDTIYLCVMDNTEAVIFAKVYGTLTPDLELMCSEMVSHGVTEAAMESTSTYWVPVWNALCESMSLKLVNPYFIKQLPGRKSDVKDAQWIAECLLKNLIRGSFVPDKTVQDMRKYNRRIFDLNEALTYNSNKQDAALQRCGFRLSNYVSRVNGKSYQKCVRAIITGITDPEELVKLIHGKTLRKYGRNIIKDAVTGDFHQADICLLKQYAELIGVIERQIEECRNALIAMCQEHFPKQFKRLQSIPGVKERAASAIIAETGADMKPFEKATNLVGWCGLKPRNDISNNKVKSNRTTHGNRFLRQILIEISWVASRTRNCFFSNFSYVQCTQRHKNKMKIQVAIARKLLVAVWHMLTKDEDFIDVYLKRLEKQEEWQNDIQALESLLVG

SEQ ID NO: 497653 - protein, 404 aa, unidentified
MYYAGIDWADQKHDALVLDEAGRKLGSIRVAHTTEGLDKLDAWLSNKLGGQDKQQMACIIETNHGLLITFLLDHGWPVYPINPRTVDRKRSASGAKTDAIDAYLLAKTGRADLADLHRLTPDSEKVAELKGLTRDQDSLIHMQTRLVNQLTACLKAYYPIALDLFAKLQQHSALLFLQTYPTVEAAQTASVEQIRQVLKAAGHTTAEKVAPQIFEQLHQPSLRANAVTTRTKSRLAVALIVQLLPLLEQIAAYDKEIEQLFLSHEDNEVFSSLPRAGKRLAPRLLAEIGDDASRYETAASLQALGGTSPVLFQSGNYSKPHRRLGCIKPLRNALHQFAWQSTLQEGWAKAYYERKRAEGKSHSVAVRALSNIWARILFAMLKSHEPYVTATFEAAQGAHAPTAA

SEQ ID NO: 497654 - protein, 407 aa, unidentified
MLFVGDDWAEDHHDIHLMDETGQLLARRRLPEGLAGVGAFHELVADHADEPSGVVIGIETDRGLWVQALVAADYQVYAINPLAVARYRDRHNVAGAKSDTGDAKVLADLVRTDRHNHRPIAGDSPDAGAIKVLARGHQNLIWSRNRQTNALRSELREYYPAALVAFEDLAHNDCLAVLAKAPTPAMGAWLSVGQISAALKRGGRQRNLDRRAHEIRDALRGEQLSAPEPIVDAFAATTIAAVGIIAELNRQITKLERSLADRFEQHPDADIYRSLPGLGVILGARALGEFGDDPDRYANPKSRKNYAGTSPLTVASGKKRAVLARHIRNRRLYNTIDQWAFSAITTSPGCRTFYDQRRAAHDLHHQALRALGNRLVGILHGCLQHHELYNENTAWAHRQTAVTKEAA

SEQ ID NO: 497655 - protein, 372 aa, unidentified
MSQSNILFVGMDVHKDSISVAYISDQQGAELVHYGAIGTQQYAIDKLIRKLQSKAHTLHFVYEAGPCGYWLYRYLTRKGHPCYVVAPSLIPKKSGDRVKTDRRDAAALARLFRSGDLTLVYVPEVKDEAIRDLSRGRDDAMQDLKVAKQRLKSFLLRQAIRYTGRSDWGPKHLRWLADVVCPTPVQQIVFQEYVQTINERQLRVERIERELLDYAQSWRLYPVVLAIQAMRGIRFTVAITVIAELGDLTRFDDPRQLMAYLGVTPSEYSSGSKRRLGSITKTGNTHARRVLVEGAWAYRFPAKVSREIQRRQEGLPQSIQAIAWKAQLRLCKRYQRLVAKGKDKNTVVVAIAREMIAFVWAIAKQTPIAVAG

SEQ ID NO: 497656 - protein, 457 aa, unidentified
MVDEAIFILFVQEKKKSFLATMTLINFVAANQKYYAFNLLSVFIMVFWSVQYLLQHLLVQTQVSHQLLQPLILILQLPQTPQFRHARPGKFFLPVNGMDYFLPLRLTVRNVLTRRITMNIVFLGIDLAKNVFQLCGLNQAGKPVYTKRTGRKELLQTLANIPACLIGIEASTGAFYWQREFEKLGHKVKVISPQYVRPFVRGQKNDGNDAQAIAVALMQPTMQFVPPKSPEQQDIQALHRARQRIVNHRTATVCQIRGLLLDRGIPIGSAVSRARRAIPLILEDAENGLSSRMRRTIAELYDLFNDLGRRIHFFDKEIETVFRQSEACPRIAKVKGIGPKTATAVVAAIGKGTEFKNGRHFAAWLGLVPRQHSSGDRQVLMNMTKKGDKHLRTLFIHGARAVVRVATNNNDGHMNQWVNQLKERRGFNKTTVAVANKNARIIWSMLRNDTGYQVVCN

SEQ ID NO: 497657 - protein, 333 aa, unidentified
MNKFKHFLGIDVSKEYFDAVLILNGAKEKPIHNQFANDSKGVKTLNQWLKKQGATNQQTLVCLEHTGMYGKLIIKYLMGFNYSLWVEMSLKIIRSMGLQRGKNDKIDAERIAVYAMKNQQEAIIYKAPSRTVEKIRNLMSLREKLILTKASLIRNSKEMKSLDPEVSKLSDKFQKQTIKGITSDLKQIEKQLDLFIKEDENLSKIYSQAISVPGVGKVTTLYLICFTNEFTTYSTPRQLACYAGVVPFEHTSGKSIRLRPKVHHMANKKLKKQLHMCALSAVNHDPEMKEYFKRKVQEEKNKMLVINNVRNKIVHRICACIRDNKTFEVRKSA

SEQ ID NO: 497658 - protein, 408 aa, unidentified
MLKIVYPNCCGIDVHKTFVLAVIAITDEHGVTQYFRHRFSTFTKGLGELKQWLEYYSCTDVCMESTGKYWIPVYNVLEDSCSICLAHPKYVKAIRGKKTDKKDAKWIADLFKHDLVAGSFIPPLPIRELRDLVRYHFKLTNFCSSEANRLQNSLTVSNITLSSVLSDVLGVSGSRIIDAILEKPTDEIDLSALIHGRLKSKLSDLELAIDGKITDEQAIKIRIIKSHYDALTLCKSDLEKAIIEVAEEFRAQQELIQTVPGCANQFTTIKIISEIGVDMGQFPTAGHLCSWAGLTPTNDESANKKKSVRISKAGHYLKPLLVQIANGIVKSEKYPEHRNKYLQLKKRRGHKKAIIAIARRILTAIYHVLLQREPYDSSYYSIEIVHPNRVMTINEAISFAKSHGFVVS

SEQ ID NO: 497659 - protein, 321 aa, unidentified
MSRILIGVDVCKDFLDAHARPAGVDKRFDNNPAGIEQLVAWVRPFAAERIVFESTGHYQKAAVGALLAVDLPAVVVNARQVRDFAKGIGQLAKTDRIDAGILAHFGEVVTTVVRPLPPPEILEFRDMCDRRGQLVRMLAVEKNHRHAAQGAAAKVRKNIDKVMAFLKRQIKELEGRLDRIVADSEAFKAKDEILQSIVGIGPQVSRILLVHLPELGHGSRQSIAALVGLAPFADDSGTSSRIRHIRGGRGKVRIALYQAAVAAIRYCPVMKAFYASLKARGKASRVAIIAVARKVLVLANALLRTGTTYQPRPNSVCPKIA

SEQ ID NO: 497660 - protein, 341 aa, unidentified
MTAIGIDTHKDTLAACAIDDLGAVLAEATFGNDPGGHAALGRWASEVAPGARLGFEGSSTFGAAAARSLEQVGFAVREVPPRRSRRERLRTRRAGKSDPGDALAIARVTARETELPPIRRVDATTELGLLLAARDDLLADATRVRNRLHADLVVLVPGYGGRVANLVWERHLVTAGRALRRLPGVHAELARERLAELRRRQARIRALAERIERLVAGHPLLGLSGAGPLTVAALIAESGDLGRFRSADAFAMLAGVAPIPASSGQTQRMRLNRGGNRQLNRALHVVAVVQARVFPLAQQYIARKINGGHTWKDAIRSLKRHLARIVFRLLIEGSHQVGAAA

SEQ ID NO: 497661 - protein, 343 aa, unidentified
MDQYIGLDVSLKETAISIRQEGKRIWRGKCPSDPKLLSEMIRRHAPHAKRVVFETGPLSTWFYHALTAEGVPAICIEARHAQRILDETLNKTDANDADGLAHLAEAGFYKTVRVKAFDSMLTRTLVTARNQLLSISTQLSNQIRGLMKTFGLIVPKGRGRIFDGNVRQFLDGNDALAKIILPLLDAWCDIRRRAAGLDHQLLAAARGSQETKLLMTIPGVGAVTAISYVAAIEDPDNFKKSRSVGAWLGLTTRRYQSGEVDYDGHISRRGDNRLRGLLYEAAMVLLTRTSARTECSLKNWGLKLRDRLGFKRAAVAVARKLAVIMHSMLKTGEMFNALAGAPV

SEQ ID NO: 497662 - protein, 339 aa, unidentified
MNIKRIGIDIAKNVFQLHGVDADEKTVLIKKLSRIQFIPYILLNISQDCIIAMESCGGSHHWARRLTKAGYTVKLIPAQYVKPYVKRNKNDANDAAAICEASSRPGMSFVPIKTVEQQDIQALHRIRSELVRQRTAKVNQIRGLATEYGLVAPQQIGSLRKSIPLWLEDGENELSDLFRGVLQQLSDQLNYLDEQLGTFENKIKTLAKESKAAIRLQTLPGVGPLTATALIAAIGDGKQFKNGRYLAAWLGLTPRQHSSGGRDTLLGISKAGDSYLRTLLVHGARSVISNAKNKSDRISQWVQKLAESRHHNVVTIALANKNARIAWALLTKEQMYQAG

SEQ ID NO: 497663 - protein, 383 aa, unidentified
MRNSAYAADREELVLAVSLELATASWKIACHDGRRDKPAVHTLTNPQAGARLQAALDLIELQKQQWSLPAGVRTVVCYEAGQDAFWICRALQAHGTECYVLDAASIPVARHRRRAKTDRLDAIKLVLNLRAWLHGERDRMHVVHVPSVQDEALRHLTRDRAELQKEVLQHRNRIGKLLRTLGCWDDLKHGFASRLARGEVRCYDGSPLSPEMHDRLLRECERLALARQQLATLEKARHQALPATVRQRSDHLTRLKGVGQIGASRLVLELFWRQFDNRRQVGSCTGLVPQPYDSGDSHTDQGISKQGNRRVRSLLVEMAWYWLRYQPGSALAQWFRHRTEGTGANRCARRIAIVAVARRLVILLWRYLEDGVIPQGAQLKSSA

SEQ ID NO: 497664 - protein, 392 aa, unidentified
MVVFVGIDVSKDKHDCFIVSSEGEVLADAFIIPNTMDGFHYLLQRIRHCTAPQDKIKVGLEATGHYSYNLLGFLLDNGLTTYVLNPLRTNLYRKSLSLRKTKTDRVDARTIASMLLSDAGLKPYTDTAYHNEELKSLTRYRFDKVKERAKLKSSIARLVCILFPELEKLVPSLHIASVYALLEAFPGAKQVANTHLTRLKALLETASNGHYKRDMALKIRNAAKNSIGSQMPAKSLELQHTIRLIRELDREIDEIEEQIQSIMDELHSPITTIPGLGFRMAAMILAEVGDFTRFDSPDKLLAYAGMSPSTYQSGQLKNCYPHMEKRGSRYLRYALYNATKYVCHWDPAFADYLAKKRAEGKHYNIAISHAAKKLVRLIFAMEKSRQPYCSAA

SEQ ID NO: 497665 - protein, 363 aa, unidentified
MFTERTSVGLDVHARSVAAAAIDGVTGELFQTKLTPSLDHIGSWVADLPGPVAVAYEAGPTGFGLYRHLSAAGIRCEVAAPSKLQRPPGDRVKTDAKDAVHLARLLRIDEITPVAIPTVEQEAARDLVRAREDCRGDLMRARHRLSKLLLRYGIVYYDGRAWTSRHDAWLRHQALAQLTSPPTRLTFDAYYEAVLSVRARRDRLDAAIEQMAGESEFTPLVRRLGCLRGISTLTGFALAVEIGDWHRFTGNSIGSFVGLTPSEHSSGASTSRGPITKTGNTHVRRLLVEAAWHHRPRYRVGKIMRDRWDAAPAAARIRGDEGNRRLHHRWVTFIERRKPNTVANTAIARELAGWCWSLAVLQE

SEQ ID NO: 497666 - protein, 433 aa, unidentified
MTKTHHKTGQPVLVAIDIAKHRNEVLIAVPGRRRRKRLTVRNVREDIDRFVETLTAFGVPVQVGFEPTGDYHRPLAWRLHQAGFELKLISSLSLARTREAMHNSWDKNDPKDAQVMLHMMQTGLTQIWHDPLVHGVNDIQELSKTHAVISQTKTEFWLRLRTHYLPLYFPEAERFMGNSRSDWFLAFLEQFPTPGSITCMSEDAFIEAAWGVVGKKASIARLLADIYATAADSIGLPVDPETPAIRMFCLVLGQGRHLIAQRDQIEQQASDLLGTHPDFVRLRTIPGIGPINALTILAEAGDLRRFGHHRQFLKFCGFNLSTQQSGIFRGQTKLSKFGNARLRRTFWMAGQVAIRQQQNGFRDKYERYIARDHSDPHLKRKALTSVAATIARTAHSVIKTETDYRPFFEGRGPRRKDPALQVPLRHASSRPRR

SEQ ID NO: 497667 - protein, 344 aa, unidentified
MGHCVGVDVGLRSSSLCIIDEQGKVCLERDVASEIDEIAAAIRGFAEHVDGVALETGNLTPGLTAGLRAEGFRVVVMEARQVKTTLSSLRNKTDRNDARGIAQILRTGWYREVHVKSFESQRLKTLLAARKALLRRRIDLENEVRGLLKVYGFKLPPQIYHARFDEMARQAVIADPSLAEALGPLLDARGHLYRAFLDIDKRVRALAHDDPICQLLMSAPGVGFVAALTFKAAVDDPSRFRRSKTVAAHFGVTPRRYQSGERDNPGHISKAGDVEVRSALFLAANTILNGRGQTSSLRRFGARLARKKGRKRALVTVARKLAVVLHAMWTDGTMFCNIEKEALA

SEQ ID NO: 497668 - protein, 337 aa, unidentified
MIFINCLGIDISKSESVVAHYKDEVLVKEMVIQNNQNGYRYLKNYIKHLDSLFILFESTGIYSRGMKRFCEIHKIDYLEMNPLEAKFKTSSLRSWKTDKSDAHKLALLAFRMKDSKVQRQSEEIYFELRERARFHLEMEINQNRLKVELVETLHQTFPGLEKLFTNRYSKIALSIAKAFPHPDFVSTLTHDELVEKVLHSTDKGISVNKAHKYVQKLIEIQINSFPNVDKSSFLLQKVQYLCDKLLIGIEEMKEFDQEMIDLAKNTTEFENIISIPGIGELTATLLIGELGNIREFKTNKQLNAFVGIDIKRYQSGTSKVGIRSTKEEIKKQDVYCT

SEQ ID NO: 497669 - protein, 317 aa, unidentified
MNKISILKKRLPNDLAVTLKTLEPYRTELVGVAVESTFNWYWLVDGLVEAGYSVKLVNTSKVRQYEGLKYADDRHDAFWLAQQMRLGILPTGYIYPKEQRAVRDLLRERRRLVRQRTTHVLTTQSAIWRHTAIRVPSKVLLGEVEASWPELPDRNIQLGVRAHRATIKVLTKQIETIEATLMKQVKTIPEYKVLLTVPGIGPVIAWTIVLEAGDLRRFSSVGHFASYCRCVDTERISNEKQKGENNRKNGNPYLAWAFFEAAHFAIQYLPAAKGFYERKAAQRNPILAMKALSHKLARACYYVMRDQVPFDPAKLFG

SEQ ID NO: 497670 - protein, 346 aa, unidentified
MYIVGIDIGKNHHEASIVSPEGKQIGHSLRFATTHKGADSLMSFIFNNIGNSSCIFGMEATGHYWYPIYSFLKARGYTIYVINPIQSDSLRKMYIRQTKNDSIDSFLIAEVIRFGQFTTTSMADENILAMRQLCRYRDSVISSRTEIKLRISTIMEQIFPEYEKQFSSLWLSTSMGILEKYLTPENIENAPIDELFEIIKDKSHNKLTMKKAISIREAAADTFGIKIAQDAFSFQLKQLIDRMNFLDKQIEALDCQILEYYEKFDCYLHTIPGIGMIAAATILAEIGDINRFKSSSALVAFAGIDPTVRQSGEFSSTHNHMSKRGHLTYGMPFFSLQPPVLSITAH

SEQ ID NO: 497671 - protein, 382 aa, unidentified
MGEAIRATVAYLGIDVGKRSHSACGLGEDGEAVFRSDIDRLLERAGAGALVVVDQKRNIGALVLARAFAHGNPCAHLPGYAERQARGMFPGVAKTDAIDAEVIARTARGMPGALRPLAEEPEGAASLRILSSQREFAAAARTRAKNRLRATLLEADPALERAVDPSRGWHVAPLAEFGSAAGCSAAGWRRFSAAARRAGAPAAGARAPWESMLASAGSGRALPAGEDVAVRMLAREIAALDADVAELEGLVADSLAGDEVYECLLTVPGIGPKTAAALVTSVDVSMFRGHDELASYCGVAPADSRSGTSVRSTSPQRGGNKQLKNLLIFSCNSLIGTDNRFGRYYDECRARGMRHNKALKAVARKRLKVIYAVMRDAVPYAA

SEQ ID NO: 497672 - protein, 405 aa, unidentified
MNAVGIDVSKGKSTVTIRRPGDVVLMPPCDIPHTQSAINALIDQIKSLDGETKVCMEHTGRYYEPVANWLSDAGIFVSAVNPILIRDFGDDSLRTPKTDKADSKKIARYALDRWAKLKQYGSMDKTRNQLKTMNRQFGFYMDQKTAMKNNLISLLDQTYPGANDFFDSPARSDGTQKWVDFVYTYWHVDCVRSKSLQAFTEHYQKWCKRNGYNFSASKAEKIYQSSSDLIAVFPKDDSTKTLIRQAVTMLNTASQTVEALRLKMDQTAATLPEYPVVMAMNGVGPSLGPQLMAEIGDVTRFTHREALTAFAGVDPGKNDSGKRNQKSVRTSKKGSPSLRKTLFQIMDGLIKRSPADDPVYAFMDKKRSEGKPYYVYMTAGANKFLRIYYGRVREYLASLEESKES

SEQ ID NO: 497673 - protein, 343 aa, unidentified
MQTVTTIGLDIAKSVFQVHGVDAEGNAVIRRQLKRRYVLAFFQKLPSCLVGIEACASSHHWSRELQALGHTVRLMPPAYVKPYVKRQKNDAADAEAICEAVTRANMRFVATKTPEQQSCLMLHRTRHLFIRQQTAVINSIRAHLAEFGIVAPVGRNGVAELLGVVSDPSDKRVPEVARACLAALGAQLRMLKVQILEFDRMINAWHRSSETSKRLDEIPGVGPALATALIASVADPWIFRSGRDFSAWVGLVPKQRSSGGKDKLGSISKQGDRYLRSLFTAGALAVIRYAKIHGTKHRPWLTALLARRPTKVAAIALANKIARMAWAMMAKGERYKEPVALAA

SEQ ID NO: 497674 - protein, 378 aa, unidentified
MTAILQGKDNVSEQVLYMALELSNKTWKLGFSNGTKIRQKSITAGDWVELHTQMDLAKQKLKLSADCPIVSCYEAGRDGFWIHRDLVAEGITNHVIDSASIEVNRRKRRAKTDRVDVISLLRLLMRYGQGDRQAIRVVRVPTLAQEDQRRLSRERQRLLKERGGHSARIKSLLVAQGVRLEVGVDFLEQLERCKGGSRGYELGEDLKAELRRVYARYQLVHEQITCLEREQQLRAEQAPSEAMGQVNQLRQLKGVGWQSSWSLVMEFFSWRDFQNQRQLGACAGLTPTPYTSGESEREQGISKAGNRQIRSLMVELSWLWLRYQPDSALTRWFQRRFAGGGKRMRRIGIVAMARKLLIALWRYVKEGRVPEGAVFKAI

SEQ ID NO: 497675 - protein, 353 aa, unidentified
MEEKYVGLDVHQSMTVGAVHDGGGRSVMETVVKTEANAVGDFLRGLSGRIHVTFEEGTHAAWLYEVIRPLVAEVIVCDPRRNKLIEDGNKGDKIDAHKLAELLRGGHVKSVYHGASAMRTLKELVHNYDALVDDTTRVMNRIKAVYRGRGISSSGRDVYRKLNRESWLKRLPEGGLRQRTEFLYQELDTLSQIRQDAKRVMLIEARRHAPYRLVKTIPGLGPIRVAQILAAIGLPERFRTKRQLWTYCGFAVVTRSSADYELVGGKVQRRKTRTVTRGLNWNFNRRMKEVFKAAAITGMQREPFQSHYAGLITKGMREELARVTLARKIVAITLKVWKKGEAFDAAKLKPATT

SEQ ID NO: 497676 - protein, 421 aa, unidentified
MLGVGIDWAEEFHVVALGSPSEGVIDVVRIAHRPEAVSALVARIAGLEPDPAEVRVVLETRHGLLVEALVQAGYTVLPVNPELVSRRRGPARKKDDAEDARICCLLALDRHAGLKRLIPHGQIAGELRSIARDDERACRDERRLLNRLRADLIVTFPAALAIAGEDLGATRILRLLERWPTAQALAAATREEIIEFGRAQRTGYLQRFADRIQAALAEDQFTAPEHLVRAKVDTIRLLARQLLLIDAQRRVWEKRMGELLLGASGQPAEDQPGNAFPGGEIYLSFPGLGRRLAARIAGEVGEHIEQFTTPNSLQCYAGRAPVTRRSGKRDLVVAHRLACNRHLADAVHKWAFASLRRSAWARQFYDAQRSRGKNHHAALRALGNRWLEVLWHCLTNGVPYDEAVHVANRNQALAATTASAA

SEQ ID NO: 497677 - protein, 354 aa, unidentified
MALTDTDIVGGVDTHKDTHTVAALNGTGRLLGTAQFPATPDGYQELVAWLRGFGRLVRVGVEGTGSYGAGLHDYLCRAGVEVREVIRPKRQVRRRRGKSDPVDAEAAARAVIAGDDLGTPKRQDGRAEALRVLRLTRRSAIKARTQAANQLHAIIQTAPSPLREQLRSLRLSEVVKRASRFRCAAPTTPIAAARFALRSLAERWRALDSELHRLDEQLAQLVKAVAAPMLAVRGVGVDTAGALLVAAGDNPERLSSEASFASLCGVSPVDASSGRQHRHRLNRGGNREANRALWVIAIVRMASDPSTQAYVQRRTQQGLSKKEILRCLKRYIARQLYRLLLALSVNPIATSNAS

SEQ ID NO: 497678 - protein, 380 aa, unidentified
MTQHSHIAASHQLDYERTLILAVEVSGRSWVVAAQVPGLRQKGVKQQLAPRADALMAAVEGYKRRAAAAGMAVERVIVAYESGGSGFWLARWLQQRGVEVYVMQPSSVPVDRRMRRAKSDRIDADMLLRTLLAWLRGEPRVCSMVPVPDEATEDARRPIREREELIRARVALVNRIEAVLTVLGAGEYNPLRRDCRERLGQLRTALDQPLPPHARAQIERLLDRLDLIRQQVADLEAQRDRAVEGETVGQAERMIQHLARVRGIGVQTATVLVHEAFVRRFRNARALGSYAGLTGTPYSSGGTHREQGISKDGNRRLRATLVELAWMWLRYQPGCALSRWFHDRLGSSRGRLRKVMIVALARKLLITWWTMLLKPPRISC

SEQ ID NO: 497679 - protein, 346 aa, unidentified
MLIIGCDFHAGFQQVAIFDKQTGEIEQKRLKHREEAERFYRSLPPGVRVGMEACGHYPWFERLLASCGHELWLGDASAIRASVVRKQKTDRRDAEHLLQLLLQERFPRIWVPSLEERDARQLLVHRHKQVQARTRVKNQLQAMALSQGVQKKRKLWSEAGRAELEKLELLPYAAQRRQQLLVALDQLEEEIVRLNQQVDEEVKQRAAAQRLMTHPGVGPVTALAMMLTLGPAKRFASGKQVASYFGLIPSEHSSGGGQRLGHISKQGSSFLRFLLVEAGQSAARYDRELGRFYRRLAIRKHRGLAKVAVARKLAVRLYLMLREDWTYAQLCRAVVQVSPSHAVVAG

SEQ ID NO: 497680 - protein, 398 aa, unidentified
MICVGIDIAKGKSTVCFLKPGGEVLKTPYDIEHTAEEITNLIRSIHSYDEEVRVVLEATGHYHLPVVAQLLEANVFVCVVNALRMKKFCSQDIRKAKTDKIDAAKIAAFGLTYWQDLQAAKPTDEVYRELRLLSRQYFQLTSMLVKAKISLGNLLDNVMPGITDLLYDREPHHKLTDFVLRYLHFDKISAMGERKFTTDYCNRAKKQGYRMYERQAEEIFALVQNSIPALPMTASTTIVVKEAIKVVRELENSRASILAQMQTFAKSLPEYSLIREMACVGDTLTPLVIAEIGDVRNFHSKHALIAYAGIDAPPYQSGGFYGTERHISKRGNGYLRHVGFEIMQCKLRLKPEGDAVYDFIQKKRSEGKCGKEAMVAGINKFLRIYYGKVAELYRELEA

SEQ ID NO: 497681 - protein, 340 aa, unidentified
MFHVGLDIHNTRISICVLDEAGQVAHRSQVRTIEEMLRTLRGLPGPFEVGYEASCGYGHDHDLLHPLAARVLVAHPGRLRLIFRSKDKNDRNDAERLAKLLYLGETPAVHVPSPEVRAWRELINCRGQVVAKRTRAKNTVRALLRGAGVVPPKRPGLWTRAGLKRLRGLDLPTASQQLRRDLLLEEIDALTRQVRRIEEELNRQARKTPAVALLRSIPGVGARTAEAVAAFVDDPHRFRNAKAVGRYFGLVPCQDQSGERNRLGHITREGAPVVRQLLAEAAWQAIRRSATVRAFYERTHREDPQRQKVALVATAHYLVRVMWAMLRHGTAWRESTTRAT

SEQ ID NO: 497682 - protein, 357 aa, unidentified
MLKIVYPICCGMDVHKSFLVACIASTDERGVTTYKSRRFSTFTKDLKLCADWLKGNNCRDVCMESTGKYWIPIYNILEPSCKIALAHPKYVKAIRGKKTDKKDAKWIADIFKHDLVSGSFIPPADIRQLRDLVRYRWKLNNFIVGEKNRAQNCLTVSNYKLDDVFSDVFGKAATNITSYLLEHPNEPLPDVSNFCTKGMKATDAEIRAATDGNMCAEQAEKIRIIRSHMHDLNRCMVNLESLIISTAEKYTSHLSLVMSVPGIQAFSAISVIAEIGVDMSVFPSSKHLCSWARLTPQNNESAGILLTAIYSILKKNEPYNAELYHKADVPPAHRSVTMEEAVFILQRQGYLITPCTS

SEQ ID NO: 497683 - protein, 398 aa, unidentified
MFGSNPEQLRSLAAWLLEQEVEEVVMESTAQYWKPVWEALERYWKPIREKREGARRKSGTLHLAQAQSNRGQRGRKRDFPDAERLVKRLVARELTLSFVPDPEQRLWRTVTRRKYQLTRDHTSLQNQLESLLEEAHIKLSSLVSNLLGVSARRMLKALAEGETNPAALAALADERLRATPEQLCDALGACADLKPVYRRLLKMMLEQVQFLEQQITKLDQEMASLLSQHQDAVQRLAEVPGLGVDSAQQIIAEVGPTAATFPSEKCLSSWVGACPGDEESAGVNYSHRSPQGNRHMRRILNQAANAAVKAKGSIFEIVYRRSVPRLGHKQTIGAIAHRQCRLIWLLLHQGVRYEERGPAVTKKSKQRRTWKMIRQLRSLGYRIEPPNPQHPTQAQQAQ

SEQ ID NO: 497684 - protein, 324 aa, unidentified
MSDPDVFVGIDVAKATLCVHIQPEGDAGGHERTFEVANAGKGISSLVADLLKLSRAGRRLAIGFEASGGYERELGQALFDADLPCFLIDPARVRAFARAERQIAKTDPLDAGLIARCLKAVGHSLRPYAPNPLVLLLAENVRTRRHLLDQAVELEAQIETLSAPTLRRMMARQIASLRATAKAIEIEMRAILAGDGGTEQLYRRLRTAPGVGPILAATLVASLPELGRLSSRQIAALVGVAPFDRQSGRTDLRRTCHGGRPAVRSVLYMACISVTRMKRGPLKAFYQRLRENGKPPKVAIIATMRKLLVTLNAMVAKNTDWRAA

SEQ ID NO: 497685 - protein, 391 aa, unidentified
MYYIGIDIAKNNHQSSIIDTNGGMVCESLSFSNTIRGFEKLIKYLESYEVNPENCIIGMEATGHYWLSIYSYLLELGYQCVVINPIQSEAFRRMEIRRSKTDIIDSKCIAEVMRFGKYSSSNISDEATYGLRNLSRYRYSLVDECSDWKRRLISVLDQVFPEYSKLFSDVYGVSSKNILSKYPLPEDMLKVSASELGELLSKCSNGFFGKDKAEEIQQAASTSVGIKFAQKTFSFEIKQIIEKINFLENQIKEIEKEMSSILQEQCPVITSITGIGDTLGAVIYSEIGDIKRFERPNQLVAYAGIDSTVNQSGEYKGNQNKMSKRGSPYLRRALWMAATVASQKDPALSKYYESLRARGKVHGVAIGAVSRKLCNIIYAVLRDNKEYVPNI

SEQ ID NO: 497686 - protein, 323 aa, unidentified
MQGQSNASATQPVYVGIDVSKAQLDIFLLPVNKYFQVANDKNGHRKLKRELAKHDISCIAMEATGKLHRLVHRTLHEGGLPIAVINPYRSRKFADSIGQLAKTDKIDAKVLALLAQMHQLEATPPVCNSLEELNELVYAWRKSKAEKTRLSNRLGAAQSTFLKAELKHPLRSIKGHIKRLQEEIMRRIEADEMLARRYEILLSVPGIGKATAITLIACLDELGSCNSKQIAALAGVAPMNWDSGKMRGQKHIRGGRKEVRNSLYMAAVSAGSRGCNPSMKSLYDRLIKAGKKAKLALTAVMRKLVILANTLISENREWQPIAP

SEQ ID NO: 497687 - protein, 438 aa, unidentified
MWWSSQWLLYLTLKGVLTMKVVYQTCCGVDVHKSFLVATIIKTISGVEPSYQKKRFSTFNNSILQFKNWLIENQCRDVCMESTGKYWVPVFNLLEDDINVTIANPKWVKAVKGNKDDTKDSKWIGDLFRLGLVPGSYIPCKPIRILREFTRYRYKLTSCRTSEKNRYQNALTVCNVALDSVVSDIFGKSATSVIDYLIERSDNSINHEEIASRLLRSLKKKSDSVIESIEGYQMTDSQKYRMRLVRAHLDYITSTINDIDTMLDSLIAPYENAVQLLCTIPGVDRNSAITVISEIGTDMTPFSNSKRLCCWAGLTPGNNESAGKKKSVRITRAGVYLKPALVQVAHAAVKSDKSPYYKQKYERIMKRRGKKRAIIAIARMILTAIYQMLSTGEAWNPTDLYKIDIPEPLKEKQKEKAIKQAKKLLIKEGILSESQLAS

SEQ ID NO: 497688 - protein, 422 aa, unidentified
METIYERCCGLDIHKKTVGACLIVPGPLGRSAKEIRTFGTMTEDLLKLSDWLTANRVTHVAMESTGVYWKPIWNLLEGNFELLLANAQHIKAVPGRKTDVKDCEWIADLLPRGVGGPTYSAHHGLLKGSFVPDLPQRELRELTRYRTSLVRERTSEVNRLQKTLEGANIKLSSVATNTMGKSGRQILEEMLRGSSDAKTLAQLAKGRLREKIGELERALEGCFGAHQRFLVAQQLAHIDFLDDTIEQVSAQVQERMRPFDEALSRLDAVPGVGRRTAEVLVAEIGTQMARFPTPAHLASWAGMCPGNNESAGKRKTARTRKGSPWLRSALVEAAHAAARTKETYLSAQYHRLAARRGKNKAAVAVGHTILVIVYHLLKQGTTYADLGPIYFDQHDRQAVERRLLNRLHRLGYKVTLESLSAA

SEQ ID NO: 497689 - protein, 346 aa, unidentified
MLHAGLDLSRKRLDFHLLDELGETVEVGAAPPDADGLRGLNVRLRRHRQPLRAAIESMTGARFVHDQLELQGWEVEIADAVRVKGLAPLACKTDRIDAWVLAELSRRELVPAIWLPDPQVRAERERARFRLHLVRHRTSLKQRVHATLLTHGKPCPVSDLFGVRGRELLTALELPEPWAGDVEASLRLIDELEREIAACEAELRALGSEHRYVPLLISVPGIAWVLAYTIAAEIGDIARFSSPAKLSGYTGLCPRVYQSGESDRRGPLSKMGPRYLRWALIEATTHASRHPAYCERYERTKRRLGKQRGPRVAQVDLARRLAEAIWHMLTHNRPFAPAGATAPMTA

SEQ ID NO: 497690 - protein, 342 aa, unidentified
MKRYIGVDLHTNSFTVCYLESGEKEGRFKTYKLTKAALSCFKQSLRSCDELAVEATGNTDFFVEAIESSVSRVVVVNPRQFSVIRKSVSKTDKKDARTLAFYLSKDMLPSCRRKSKLHQQVGSLSQTRDKFVKSRTYFMNKIHGLLNGCGFKLRKESLGSKKGLLRIAGYKVDEVTRFELEILVKQIVSLNESIAELDKKLIEVGKNLYGHENLVSIKGIGERSASILLAAIGDVDDFADASKLAAYFGIVPRVSNSNETERSGRITKRGAKLGRTTLVQCTLVAIRYSEYLKSFYNKIKARRGSGKAIIATAKKLLGIIYRALKHNLVYEDFTNFVLVDNK

SEQ ID NO: 497691 - protein, 370 aa, unidentified
MKTKLSDYELATIAYHRDTLGVNPVAVDVASRVMQVCYYDSDKKLLKNFQLTRSKFFEFVEKAPEPLLFGIEACGSCNYLSRYFESKGHQCRIIPASKVKAFLKLDKNDKIDASGIFKAMLSSVESIPAKSLENQLIMNLLTIRDQLIKQHTQCINAAHGILYEHGIVAGGAGVETSAKITLGFTDAQESFEHDPMASAHFSVIKNAVFNILDNLKEQIDTINQYIQKYGSSNKTCLNLTTIPGIGLQTAVALNTALGDPERFHSARAFSAYVGVAPIITGTGGKITVMGIRKSGIRSIKKSLYMGAMVYLTYAVKNGTQSSWVKDRLKTKKKKVIICAIMNRLARIAYAMVKNGEVFDETKCNLIKNLR

SEQ ID NO: 497692 - protein, 387 aa, unidentified
MEVRVENTPSAAVNNDPVQCFVAIELSKSSWVVGFQTPLSKQTSRYQVEACNAKALLELIERVRTRVAREVGLPVAMMSCYEAGYDGFWLHRVLEAHGIHNHVLDPASLQVNRRARRPKTDRIDADRMVRALIRYLRGEPEACSVVRVPSPEQEDARRLHRERGRLIAERVGHVNRIKGLCATQGIYNYEPLRRDRLERLDKLRTGDGRSLSARIKAEIVRGIKRLEVVLEMISTLEAERDAILKDKKSTHLNAEKIKMLAKLKAIGAEFATVLVGEVFYREFANRRQLGSYVGLASSPFCSGSLDRDQGISKAGNSKARATIIELAWTWLRYQPGSALSRWFCERVGNLKGRPRRIAIVAMARKLLVALWRYLQTGVIPAGAELKA

SEQ ID NO: 497693 - protein, 346 aa, unidentified
MSEISIIGLDLAKQVFQVHAADAAGRCVLRRQLKRREVLAFFAELRPCTVAMEACGTAHYWAREIAKLGHETRLIPPAYAKAYVKRGKNDAIDAEAICEAAGRPSMRFVPVKSMACQGLAMLHRSRDLLIKNRTMLVNALRAHLAEFGFVAAKGIGKLPDLVKIVSEAESEALPDTVRTTLSGFLDAIALINSQLDAIGKQLMAWHKADTRSQNLETAPGIGLICAAALCALVPDPKLFRNGRHFAAWIGIVPRLDGTGGKTRLGRISKAGDRYLRRLLVLGATSLLRSLANKTARLALWVQGLLARRSRRAVTVALANKLARIAWAIMAKGEDYKPLALPAGASA

SEQ ID NO: 497694 - protein, 342 aa, unidentified
MQTITTIGLDIAKSVFQVHGVDADGQVLVRRQLKRRYVLAFFQKLPPCLVGIEACASAHHWARELQALGHTAKLMPPAYVKPYVKRHKNDAIDAEAICEAVTRANMRFVATKTPEQQSCLTLHRTRHLLMRQQTSVINAIRSHLAEFGIVAPVGRNGVEQLLGVVADSNDKRLPEIARACVAALGAQLRALKLQILEFDRMITAWHRSSEVSKRLDQVPGVGPVLATALVASVADPKAFRSGRDFSSWIGLVPKQNSSGGKERLGNISKRGDRYLRSLFTTGALAVIRYAKIHGTRHRPWLRSLLTRRPTKVAAIALANKIARMVWAMMAKGERYKEPAALA

SEQ ID NO: 497695 - protein, 428 aa, unidentified
MKITRRAEKINLKNVLDIAVDVHKETLCFYFEVEGIEYSDECRNRTSEIGKKLRSYHEVALEHGRTTLRIICEPTGQYQNCLFRTARRLGFLTCYVNAEAVSKFRVVETNDTGKTDKKDPRVIGTLGRLNKVLRFRLLNEEYLMLRKLHKIYDEIDVSMTRLRCRLSDLLVELFCDYSFKKDFFYSNSGMALVENYGCNPYRIVEDGFDIFCRRMKTAVPRIRTKTLERLWGDAQSSILNEQPSGYVEKLEHHLYWLMEDFLRQEKRKEEIVTEMKGILTRLREKDPNIPPSTPHVVSDKNMARLIAETGPLGDFNHWRKLMRYGGLNIRMRQSGKFEGQNKITKKGRPLLRKVLHEIALPLVRKKSLYGPAYHHKKESEKRPGNVVMTIVARKLLKKIYGWSRSGEAFDEKRFFTCRTQYMKLSQAA

SEQ ID NO: 497696 - protein, 335 aa, unidentified
MKVFYLGVDVSKKKLDLCLRSNGKDILYDVIPNDLSSIKSWLTRTFEKFFLSEDSLVVCAEHTGQYTYPLVYATKSIGVYLCLEDAAKIKYCHGIPRGKNDKIDACRIAMYAERYNDCLQPYTASELIIQKLKNLSTERSMLVADRAKYQSQLKDQVDYMEHSIYIAKCNRVEGIINTFTDYIAQIDLEIKELINQAPVIAHQMDLLMSVDGVGERVALKMIMETDAFTSFTDPRKFCCHAGVVPFVYVSGSSQRSKNRVSNRADKSIKHLLHMAALSVSQVKNSPLKKYYDRKVEEGKNKMSVLNAVRAKLVTIMFAVIRTDAFFSRNYQNSLA

SEQ ID NO: 497697 - protein, 382 aa, unidentified
MQTIDTVNPTILLAIELSASTWLVAARVPGLEKPHLHRIDGGDTAALLALISSLRARVARRLDATIGIVCCFEAGRDGFWLHRLLTAHGVVSHVLEPTSILVNRRARRAKTDRLDAEGMLRVLAAYLRGDHQACSMVRVPTPEEEDAKRTHREREKLVQERLRIENRIEALLFTQGIRKRPSLRSWERDLAVLRTGDGREIPHHLRAELDRLRRRLVMTLELIREVEAERDQAAKTKPQDQACRKIAALSRIRGIGENFAAVLTREVFYRSFDNRRQIASYVGITPMPYQSGGMDRDRRISRAGNPRARTTMIQLAWLWLRYQPGSELAEWFRERVGTLAGRTRRIAIVAMARKLLIALWRYAETGVIPAGAEIRAETTVAA

SEQ ID NO: 497698 - protein, 344 aa, unidentified
MGDVSTIGLDIAKSVFQVHGVDVAGAVVIRKRVSRVKLLEYLGELSPCLVGIEACPSAHHWGRELQALGHAVRLIPPSYVKAYLKRSKNDANDAAAICEAVTRPSMRFVPIKTKEQQTALMLHRTRQLLVRQRTMLSNALRGHLAELGIVSAKGRNGTAELLRIIADDRDSRVSAAVRGILNVLARQYGAIGAEIASIDKSIMALHRGCEASRRLAEIPGIGPVGATALVAEIGDWNTFSSGRSLAAWIGLVPKQHSTGGKERLGSITKQGNRYLRWLLVVGAMAVIRYARKHGTARRPWLGRLIERRPTKVAAVALANKMARMAWAIMVRGERYKEPRLSLAA

SEQ ID NO: 497699 - protein, 343 aa, unidentified
MAHYVGLDVSLKQTSICVVSETGSIVREGVVDSDPEAIAAFVRSKAPDTVRVGLESGPTATWLWTELKRLGVPVICIDARHAKAVLKMQINKSDRNDAVGIARIMQTGWFKEVRVKDLNCHVVKALLTSRALLVKIKRDLENQIRGLLKNLGRIIGRAKFNGFAARAAELIEDRPELVAIVAPLLKAREAIEKQIDDLDRKVLKLARHDAQIRRFMTVPGIGPITALCFKATIDDPARFKRSRSVGAYIGLTSRRHASGEIDWSGRISKCGDAMLRSYLFEAAGVLLTRVPKWSTLKAWGMRLAKRNGLRKAKVAVARKLAVILHRMWIDRTEFTWSNREAAA

SEQ ID NO: 497700 - protein, 361 aa, unidentified
MAQAKTWAAFDVHVSGVLAATLDRDSGELRVRRLPGRSEEVAAFAAGLPGPVRATYEAGPTGFVLARKLEAIGVDCLVCAPGLIPRGPSDRVKTDRRDAERLVRLLAAGELHRVAVPSVEEEALRDLVRAREDLRGDLMRARHRLAKLLLRHEIRFEGTQANWTQAHLGWLAGVTLAQPASERALEDYRGAVSALMIRREQLEAEIARALPASPWAQTARRLMCLRGIDTLTAAGLCAEVGDFRRFGHPAQVMSYLGVVPSEHSSGERRRRGPITKSGSQHARRLLIEAAWHYRRPPRVAGSLARRQRDGEPEILALSWKAQRRLHHLWQRMEQRGKRRTIIAVAAGRELAGFCWAVATTD

SEQ ID NO: 497701 - protein, 416 aa, unidentified
MKKNSKSAMKKEQKGKRAKAQRPVQREPKEVLAEVVEKLQGKLELKATSARPAEASPGTELGPNLDRLTVGVDLGDQRSHFCILGLQGETLSEGQLQTREAEVAEFLQAIAPARVVMEVGTHSAWMQEIIAGEGHEVVVANPRLMEGSKRRKRKNDRIDAKKLARLGGVDPQSLHPIRHRSREVRQDLVVLRAREALVAARTELINATRGLVKSMGTRLPKCSSPSFGQKVKDAIPEKVRDALLPLVQLADALSDCIQSYDQKMEELGSEKYGHTKLLRQVKGVGPITALAYVLTLENPEHFAKSRDVGPYLGLVPKQEDSGESQPQLGISKTGDTMVGKLLVGSAHYILGPFGPDTDLRRYGLRLCERGGKNAKKRAAVAVARKLAVLLHRLWVSGEVYEPLGYASSRAIVQPAA

SEQ ID NO: 497702 - protein, 419 aa, unidentified
MSKQLVDLAAFIGLDWADEQHAVCLQETGTTRREPLKLDQTPEALQAWIQQLRARFGGRPVAIAVEQARGALIYALMHVDFLHLYPVNPQTLAKLRQAFYPSGAKDDPGDAELLLEVLLKHRNHLRVWVPDDVLTRSIQLLTEGRRKLVDERTALTNQLTAALKMYFPQALDWFGDLHTARACAFLQRWPSLQQLQDATTSSVRKFYRKQGYRGEDKLEQLIQNIRHAQPLTEDPAVVLASTMMVHALVKQIPSLTDSIEEYDRQIAALFKKHGDSTLFGSFPGAGPTLAPRLLAAFGSDRNRFEYAAEIQQLSGVAPVTEKSGKACWVHWRWACSKFLRQSFHEFAGQSILKSVWARAYYQQQRQRGNSHHAALRALAYKWIRIIFRCWKDRTPYDEATYFKSLQLRGSALASALKTI

SEQ ID NO: 497703 - protein, 345 aa, unidentified
MEQISRIGMDTSKHIFQLHGVNAAEEPVLRKKLRRKEMFAFFERLAPTVIAIEACGASHHCARRLQSFGHTVKLIAPQLVKPYVKRGKNDAADAEALCEAMSRPTMRFVPVKTAEQQAALMLVGVRDRLIRNRTQLSNSIRSHASEFGLIAAKGKAHLAPLLERIRIDESLPALARELFAALAQEYTQLQAQIDEVDAKLLAWHRADECSQRLAKIPGVGPIGAVLLTMKTPAPEMFRSGRQFAAWIGLTPRDHSTAGRVRPGVITRAGDEGLRSVLVVGATSVIQHVRRGGRISPWLTALLKRKSPKLAAVALANKMARIAWKLMVTGENYAVKSVPVALVGAA

SEQ ID NO: 497704 - protein, 394 aa, unidentified
MITIGIDPHSRTHSAVALDDHGRILAELTVGSNPRELDRLARWIAGMGPERVVAIEGARGFGLALSRRLLVAGETVVDVAPALTVGERRAARRPGKDDRGDAVAVARIAMREQGLPRASAETNSSDLKLVVDARDQLVAEATRTRNRLHALLLVIAPGYHEQVRDLTSSTALMVARRLASRARRTDRVRSTLACAAIGRLRSLSGEIGALERELTAALDREAPANLLAICGVGPLVAAKILGEARDVGRFSSSSAFASYAGTAPIPASSGTVIRHRLDRWRSDTMETPRRDRCGTEGGDASGQTDEETGGVRRGRGDQVSVMISSPIPVKGSGAVHHGGPVLGDPVTHSFLIRLIGIEFRNQGGGQSFDPSFNFGSGLWLWMVIPFGYASNKTT

SEQ ID NO: 497705 - protein, 388 aa, unidentified
MNRIIKIGMDVHSKNYTLCAMEPTIGAEDRIFGEVQVAPDYKEVICFIESLKMKLGFCDDYSIECGYEAGCLGYTLYHQLTGAGVKCVILAPTTMLTQQGKRIKTDKRDARLIAQCLCYGGYHPVYIPTGEDDAVKEYLRMRDDHKLALKKLKQQINAFVLRHGQQYSGTKWTIKHVTWLKKLELDPMYRETLDEYLASCEEQEAKIERYDKRIEEIASEARYQENAKKLGCFLGIRTHTALSLIVETGDFKRFAKGNTYAAFLGLTPGEHSSSDNVNRLGISKAGNTHLRCLLIEAAKGICKGAIGHKSKELRARQSGQPAEIIAYADKANTRLRSRYYKLIRHGKKKNVAVAAVARELACFIWGMMTGNISIRPKGDTSGPAVSQG

SEQ ID NO: 497706 - protein, 371 aa, unidentified
MGESSKTLFVGLDVHKDTIAVAYAAEDRSTEVVSLGMIGTRQCDIDKLIRKLESKGAPFAIAYEAGPCGYWLYRYLTRRGLSCIVVAPSLIPRKPGDRVKTDRRDAVTLARLLRSGDLSSIYVPTVDDEAIRDLSRAREDAVRDLKRSKVRLKAFLLRQDIRYEGRANWNAAHLRWLARVVCPTAAQQIVCQEYVHTVTEQTERVQRLEVELHTAVKTWRLHPIVEAVQALRGVDLTGAVTLIAEVGDLTRFDTPRKLMSYLGLTPSEYSSGERRRQGGITKAGNGHARRALVEGAWAYRYPAKVSRHLQLRLENVPTEVRAIAWKAQLRLCKRYRLLSARGKHVNQVVVAIAREMAAFAWAIARTVPMAS

SEQ ID NO: 497707 - protein, 341 aa, unidentified
MSDYSYFCGIDLAKNHFSLHAVDQNGKVILHKSVTRSNLLTTIANMPLMRIGVEACGGAHYWARTLNKLGHDARIMAVKYVVPYRTKGKNDLNDAVAICEAVQRPSTRFVPIKSPDQQAILSVHRMREHWVRERTALMNRMRALLSEFGLIIPVGRSSLMKHVPLMLEDAENELPHLARTVIAEAYHHLGELNQRIADTEKVFDFFAKVSANVQRVMKVRGIGPQTATAILASIGNGSQFDKSRDFSAWLGLVPKQYSTGGKPRLGRITKHGDKYLRTLLVHGARTVIANLGDKQDKLSQWCRGVLERRGMNRAIVALAAKNARIIWSLLHNQTEYENYAA

SEQ ID NO: 497708 - protein, 311 aa, unidentified
MTKQVVGIDVGKEKLDVGLVDEKRVRVWANDEVGRAELSEWVLEQEASLVVVEASGGYEAALVSELVGRGQAVALVNPTRVRAFAKAEGILAKTDKIDARVIARFGATMKPQARIRREEAQVELNEKVTRRRQLVLMLTAEKNRLQTATPAMQEHIASHIVWLQTEIEALEEQISQAIKANSEWAETAKRVESVPGVGFITAATLVADLPELGQLNRQKIAALVGVAPFNHDSGKQRGKRRIFGGRTSVRAVLYMATLSAIRHNPVIKEFYQRLLDKGKLKKVALTACMRKLLVILNTLIKSGQDWNPAVS

SEQ ID NO: 497709 - protein, 365 aa, unidentified
MKKIANVGVDYHLNSLSIAVLAEGEKEFHQSIHLKNDDRLIAKYLKKLSKSFDLRICYEACSSGYDFQRKLNAWGYHCDVIAPSLIPRKPGDRRKNDFRDARNLAQHYANGMLSVVHPPTEEEESVRSLIRCRLAFKEDARRTKHRINSFLLTLGYSWKKSTWTKQHRWWLSKLEMPYEYLHKVLDEHLGQLEYLESRLKHLDQQIEEVARSEIYAPSVNKLRAFKGIGTLTAMLLIAEITDFRRFPTPRALMAFLGLIPSEDSSGDKTKGGSITKAGNIRCRTSIVEAVQHYVKKPYISAQMKANLAEVDGKSANVALHCMYRLHKRFWALSMKGKIRPVAITAIAREFVGFIWAMMRPELAEA

SEQ ID NO: 497710 - protein, 396 aa, unidentified
MLRTNLQKQNDYTGQDFYIGLDVHKQSWYVTIRSLGIEVGHFTQAPDAAGLHQYLQRNFPGGAYHSAYEAGFCGTGAHEQLCKAGIDNIIVHAADVPATDKQKKNKTDLHDSRAIAGHLERGNLKGIYVLNQEQQELRSLFRLRECKVKDTTRANNRLKSFLMYYGITIPGTVSKRGDLTGRALTWLDIELRSAAGTIVLQQYIAELKYQRKQLFQLTNTLRGQVMAHDKQTYTNLISIPGMGCITAIGLITEIGDFSRFDDPDEYASHLGLCPWEDSSGDCIKTKGMQPRCNRHLRPLLVEASWHAIRKSRKLFAYYSKHAGGKNGKKAIVKVARKLAMIARAVATSGQPYQEDYQKKGAGQEPAKKMKPKRFSSGITEQHINKQPNYGLIPMPG

SEQ ID NO: 497711 - protein, 407 aa, unidentified
MRIIGMDIHRVAAEVVSLLDGEIVKLGRVQMLRDKLEEFARKELTHDDHVVIEATGNAAAVAEVLSPYVDRIVIANPKQVHMIAHAKVKIDTIDATVLAKLYASGFLPEVWVPDPGTLALRRQVTRRTQLVRQRSRLKNLIQSILHAHLIPPCPHGNLVGISGRKWLTRQILPADERAAIERHLGLINQINEALTVVEADIAVHALQDPTIRRLMTLPGIDVTVAASVAAAIGDIRRFSDPQRLVAYLGLNPSVRQSGEGPAYHGRITKQGRGHARGMLVEAAWAAVRSPGPLRAFYKRIASRRGKHIAAVATARKLAMIIWHMLSKDADYIWARPALLARKFRSVELRAGLPTSHARRGTAFDYNIPAKRAEERSRIEKAEAAYAAATSRWRTRPERPKAVEKDAE

SEQ ID NO: 497712 - protein, 406 aa, unidentified
MTSVFCGIDWATDHHDIALLDQAGTLLAKLRIDDTPAGLSQLLDLLAQHGDNPENPVPVAIETSHGLLVACLRATGRPIYVINPLTAARYRDRYALSRKKSDHLDAKVLANILRTDPAEHRPLPADSHLAQAITVLARAHQDAVWDRVQTGNRLRSHLREYFPGFLTVFRHFREGLASPVTRTLLAAAPTPTQAAQLTRPQLRAILKKAGRQREITGEVERLHTLLREPQMHQPALIEQAMGTKTLALLRQFNAACASADDLEAVTTTAFATHQDAEIITSFPGLGALTGARVLAELGDDHTRFTSPRALKAYAGSAPITRSSGRKTTVLARHIKNQRLASAGYIWAFAALTASPGARAHYDRRRSAEDRHVAAQRNLFNRLLGCLHHCLTHRIPYDEQTAFPSTA

SEQ ID NO: 497713 - protein, 344 aa, unidentified
MDTIGLDLHKRESQLCVLTEAGEIVERRIVTSRERFTAVLGGRPAARILVEASTESEWVARHLESLGHEVVVADPNFAPMYATRRRGVKTDRRDARTLAEACRLGAYRPVHRASAPQRHVRAQLAVRDALIRTRTRYVSVVKALARRDGLRLPPGTPAHTEAKLAALPLPAPLAEEVAPLRAVLDPLNREITTADERLAAVAAADPVVARLRTAPGIGPVTAVAFVATLDVVTRFASAHHVAAYLGLTPREYSSGEQQHRGRISKTGSPRMRALLVEAAWRVLRSDDPAATPLRAWAERIALRRGKSVAAVALARRLAGILYALWRDNAVYRTPAPHPDAAAEA

SEQ ID NO: 497714 - protein, 431 aa, unidentified
MKYKLKEKQNQRILDITDQTLVVGADIAKDTHVARAIDFRGIELGKDCVFENSRKGLSKLVSWMKALQRQYAKTDIVFGIEPTGHYWFPLAEFLQDKGIRIVVVNPHHVHKSKELEDNSQTKNDYKDAKVIADLVRNGHYTEPQLPTSVYADLRILMNMREKTMVSLGQVQRRIQNWLDRFFPEFNNVFKRWEGKAALVTLTEFPLPQEIVALGATAILGRWKQDVQRAVGIKRAEKLVEAASESIGLTEGTTAAKLELHTWMQQYALFTQQLEEIMNQVELLLKQIPGTQEMLTIPGVGITTLAGFLAETGDLSRYSHVQQIIRLAGLNLRENSSGKKKGRTTISKRGRSRLRALLFRAVLPMVAKNPEFKAMHQYYTQRQVNPLKKKQSIVALCGKLIRILHTLGTRKIVYNAADVLGPVRRAQLQLAA

SEQ ID NO: 497715 - protein, 340 aa, unidentified
MIIGCDFHPRFQQIAHLDQETGEYGEQRLLHTAEAERFYRSLAGQGVRVGVEATGNYGWFRRLLRELGHEVLLGDATAIRASYPRKQKTDKRDARHILTLLVENRFPAVWQPPEENEELRQLLLHRCRLVEMRTRVKNQLDSLAKNEGWLSRRVWCARRRDEIEALPLRGWRAQRRTDLLSVLGDLNLRIAPLDAAVDKAAEENREAQLLMTHPGVGPIVALAYVLAIGDWRRFPRGKQVGSYLGLIPTEESTGGKQRLGKISKQGNPLVRWLLVEAAAIAQRYDASWHRQYVRLSMTKHHGVAKVAMAHKLAVRLYWMLRSGQSYEQVVERGSHAGQSV

SEQ ID NO: 497716 - protein, 331 aa, unidentified
MRQIYGIDLSKEKFDVNFIDESKNEQHLVVKNDLNNISEFLESIPREALIVAEHTGVYGDLLLFLCNQVGIRISLCSGYSIKHSLGLRKGKTDKIDAARIREFGERFYDKLKETRINSESMSELQELYSLRSHLVKGRKMMLTKLKGTTRLPIMSIYANKAGTRIIDQLTKEIIEIELQILDVIRSKKELERNFDLITSVKGIGPVTACELLIKTVNFKKITTAKKAASYAGICPFPNTSGQMVKKSRVSPMSDKSLKSMLFMCAKSAVAHNKEYRLYYKKKALEGKPHYLIMINVANKLLRTVYKVIETGNPWDPNYICLDPRELKNKVA

SEQ ID NO: 497717 - protein, 312 aa, unidentified
MDATVIGIDVAKDQLDVCVRPSGESFVVARNGAGIEDLTERLKKLAPRVVAIEATGGFETVVAAGLAAAGVPLLIVNPAQVRAFAQALGKRAKTDPIDAAVIAHFVEATKAQSRPLPDETTRLLADLVTRRRQIIDMMIAEGQRDRRLANKRLKSSIARLRRALEKELAEIDSELDDHVRGSPAWAAKEDLLASVPGVGPIIARTLIAELPELGSLDRRKIAALVGLAPWTRQSGQWRGKSFIGGGRKSVRTALFMAAMVAARHNPVLKTFRDKLVAAGKPKLVALIAVARKLLTILNALLRDNQRWQPKTA

SEQ ID NO: 497718 - protein, 344 aa, unidentified
MSREIKYIHKVVIAVLNGSGKPVMESIVETKASSLLQFIHGLRGELHVSWEDGAWAAWLYDLLQPQVTRVLVCDPRRNALLKEGNKSDKIDARKLADLLRSGLLRPVYHVEHGLGTLPELGRCYQTISQDLNRVMNRIKVLYRGWSIPCVGTQVYAPRYREEWLHKIEHAGVRRRAELLYQQLDGLHTLRRTLRPELLAESRKHKASKLLRQIPCIGPIRAARLIALMQTPHRFRSKRQLWTYSGLGIETRDSAQYRFVRGQLQRAKKPQQIRGLNHNHNHEMKAIFKGAATRASWGVGPLRDFYVALLAKGMKPEMAHLTLARKIAAIALTLWKRRNVSTPNN

SEQ ID NO: 497719 - protein, 411 aa, unidentified
MDVYCGIDWAEDHHDIALADRDGKLLARRRIGDDAAGLAQLLELLAGHGDSAGDLIPVAIETPRGLLVACLRATGRKIYPINPMAVARYRDRHSVAGKKSDHGDSVVLANVLRTDIGMHRPLPDDSELAQAIAVLARAQQDAVWDRTTAHNKLRSHLREYFPGFLVAFADARGGITRPEARAVLAAAPTPAAAAALTLTQLRALLKKAGRSRGIDIEATRLRDAFRIPQMRQPRLVEDAMGRQAIALLRQLDAACVAADDLEHAVTESFNLHPDAGIITSFPGLGPLTGARVLAEIGDDRSRFQDARGLKAYADAAPVTRASGKTKSVTYRRVKNNRLNATGYTWAFSALTASPGARAHYDRRRDDGDRHAAAQRNLFGRLLGCLHRCLATGQHYDEATAFPASTKLPAAA

SEQ ID NO: 497720 - protein, 386 aa, unidentified
MQKLNDLSRSLTALEPDGTLIAVIEMSLSSWLVASIVLGIERQPLKKLAVDESALLKLLHRWREEGEKAGRRIERIVVAFEAGRDGFWLARWLKARSIDAHVIHAASVAVSREHRRAKTDRLDSELLKRAFLGWLRGERDHCKMVAIPTAKDEDAKRPNRERESLVGEQNRIINRMKAALIRLGIRGFDPKLKRAAGRLKDLRTPEGDPIPPNTLAELRRDMERRRLVSNQIRQIEKARLERLEQAPSDGPQAMVRLLARVIGVGTETADMLVQEVLLRNMRDRRAVARYAGLTGSPDESGRKCREKGLARSGNARVRRGMIQLAWRLLMFQKNSALAQWFRARTENARGTRKTMIVALARKLLIALWRLVREGIVPDGIVLRPTQ

SEQ ID NO: 497721 - protein, 348 aa, unidentified
MYIGVDTHKQSHTLVALDEQGRSLGARSIANTADGWATGLTWARGWGGPHLWGIENSGSLGKGFAQFLLSQEETTICEVSPQRTAQYRRRGRTQDKTDHTDALAIARLLVAEGDELPRVQRDDQSTELRLLSAHRDNLLAERTRLLNRLHAQMLQLNPAYREQSGPLTKPSGLAYCRAFRSTDPSPVVQTRLLIVAQLTEQVAELEAAIAVLTARLSQLVRASRTPLLAVPGVGVIVAARLIGELGSTPRITSGAALAALAGVAPVAVSSGNRQAHRLNRGGNRQLNRAIHIIALAQRRSDERAQAYFAKKLGEGKTRKAALRCLKRRLIDVLFRVLRHADNALSAAA

SEQ ID NO: 497722 - protein, 475 aa, unidentified
MAITRTSELNRKQRRELTRRMRSADPGLDVVHPNAAGIDVGNSTHYVAVRPDRDPDPVRRFDCFTADLHRLADWLQHCGVTTVARQSTGVYWLPLYDILDARGLEVYLVNAGHTKNLPGRKSDVQESQWLLKLHTYGLLRNSFYPSAEIRVIRTYWRQRAEHVRAISTCIQRMQKVLTQMNIQLANVISDLSGWTGQRIVRAILGGERDPQALATLSHLGIHASRDTIAKSLEGTWRSDLSFVLQQEVTMSDAYQQRIAECDQALERHLKGFADKSTDTADEGPQPSTTARHQLRSGPKRRRKAGSHAPQFDLGRELHRISGVDLTRIDGIDVGVAQTVISEVGLDMVRWADEHHFVSWLGLCPDNRITGGKVLRRGTRHVINRAATALRLAATTLLRSRSYLGAQYRRLRSKLGAPKAITAMAHKLAVLVYRMLRWGHEYVDKGMQYYEERSREQQLRQLRKRAATLGLQVVEI

SEQ ID NO: 497723 - protein, 368 aa, unidentified
MSKPITSFVGLDVHQNTVAVAVAAAGREEPRFIGTVAPQWGALSKALGRLGRREALQVVYEAGPCGYTLARQLLAHGYACEVIAPAKLARRPGDRIKTDRRDALLLARAARAGELVSVVVPDERDEALRDLSRAREDAVRARLKARQQLKAMLLRHGHRYTGRSSWTEAHERYLAEVSFTQPAQDIAFAEYRSAVRDAHERVERLTESMRGQLEHWRMRPAVEALMTLRGIDLVAAMTLVAEIGDFTRFARPRELMGFLGLVPSEYSSGEKRRQGQITKTGNSHARRVLVEAAWNYRFPARISAILQRRQEGQPKALRQIAWKAQLRLARRYRHLSARKLPLNKICVAIARELSAFIWDIARQVKPTA

SEQ ID NO: 497724 - protein, 385 aa, unidentified
MGTQTFIPRDYDVFAGLDVDKKSISVTFTDHQGLLKSLTMPYNVEYLVNHVRKHYGDKKVAFGYEAGPTGYGLYDGLEAQAYTCVIASPSMIPKAPGQRVKTNRLDSRGISENLRGGQLKGIHVPTPLYRELRHLTQLRDTFVSAMVAMKQRIKSLLLMEGLEFPPAPAGSQWSFVVRAKLRKLPCSSTVRFKLDELLDSLEFNEKQIVKTSQQIRRFCRNDPELSQCIEYVVSVSGIGQIVASQLLARIGDWRELRNVRQLGAFLGLVPTEHSTGDRTDRGSITHSGDPRLRSKLIQAAWSAIRKDGELREFFRSVCQTHARPVASRVAIVAVARKLTVMVSVVLMEQRPYVVRNKVHSAPLTQEETVPQGTPRRQAEPGAKNS

SEQ ID NO: 497725 - protein, 315 aa, unidentified
MGVEDFMSEFIGIDVSKATLDVAVHTSGARLQAENSEQGLKRLSEQLLELAPELVVMEASGGYERLCAATLAQAGLPVAVVNARQVRAFAVATGVLAKTDAVDARVLAHFAAAVRPAVRPLPDEQRATLDEIMGRRRQLVGMLVMEKNRLAQARNPGVRRDIKSLIAVLEKRIGGCDGELQRQIQASPVWRTQEDLLRSFNGIGPVSARVLLVELPELGTLDRKKIAALVGLAPIARDSGRHRGRRSIAGGRGQVRSSLYMATVAAIRANAVISAFYQRLREAGKPAKVAIVACMRKILTILNAMVRTQTRWQNA

SEQ ID NO: 497726 - protein, 349 aa, unidentified
MRRPKDKIIAGIDLHGNNLVIGLINQDGNRIKHQKLNCDLQQVIEFLQPYKSQIQSMAVESTFNWYWLVDGLRAQGFSIDLANPAQIEQYSGIKHADDKHDAFHLADLQRLNILPKAHIYDAKLRPVRDLLRRRTSLVHQRTQLILSFKSLYTRTTGQNLPLTQLKSMVPDDGPKLYEHPANQLISKVQLEHIQALGHSIIRIEKAVLACARELPLYPQLLTLPGVGKILGMTITMEVGDIRRFKTDGDFASYCRTVDSRRLSNGKQKGENNQKCGNKYLSWAFVEAANYAKRLDEQCQRWYDRKQAKTSTVIAVKALACKLSKAAWHVMVKQTSYDPQRMFGTSSKQT

SEQ ID NO: 497727 - protein, 343 aa, unidentified
MQVSTIGVDLAKNVFQVHGVDSAGNVVVSRQLRRKQMIEFFSKIPACLVGMEACGTAHHWAREVSKLGHTVRLMPPSYVKGYVKRSKNDAADAAAICEAVTRPSMRFVPIKSADQQALLMLHRTRDLLIRQRTQLINALRAHLAEFGLVAETGREGLAQLAAIITDESNREALPSAMKQALQAIVDQLAALELQTGALDRAIHAHHRANDMSCRLETVPGIGVIGATAIASTVTDPNGFKSGRDFAAWVGLVPRQHSTGGKERLGGISKQGDRYLRRLLVIGATAVVHHARRHPQKHPWIIRLLARKPAKLVAVAVANKMARIAWAIMAKGGYYRAPELAAAA

SEQ ID NO: 497728 - protein, 314 aa, unidentified
MELFVGIDVSKTRLDADCAPESKSYSVENGDQGVAFLVEHLKELDPALIVLEATGGYETAAVAAIAEAGLPVVVVNPRNVRAFARATGRLAKTDALDAQVLAEFAMIIKPKVRDLPDAVSAELKALSTRRRQLIEMLVAERNRLSAAPKPVRPNIEAHINWLKDELKKLDSDISSFIKAHASYQEKDQILKSAPGIGPVISTMLLSELPELGTLNRKQISALVGVAPFNRDSGKFRGKRRVYGGRANVRTALYMGALVATRHNPIIKEFYVRLIEAGKPAKVALVACTRKLLTILNSMVKHQRTWQERSLAICC

SEQ ID NO: 497729 - protein, 381 aa, unidentified
MKYYVGLDVSMKETFVCIENELGKVVHQGHVSTEPKLIAEYIKKFQISVEKVGIESGSISHWLVDELRKMEIPAICIDARKMATILSVQVNKTDKNDARGISQAMRCGLYKEVSQKSHSSIEIATLMGCRRLLVEQRVQTSNAIRGFLKTYGIRLGAVGEASFVQKVNEKISDKHSFARQGLEALLKSYASLVSGIKDLTRRVEELVEDNEDAKRLTSIPGVGTITAMSFLVEIDDPKRFKNSRAVGAYLGMTPIQYSSGETTRQGRVSKCGSTETRSLLTEAAAVLLTRSKKWSKLKAWGLKIQRKHGFKKATVAVGRKLAVIMHKMLIDKTDFIHGEPKEQQKTPKAVTESVGSCEKKLFTAFINSQEVNSAQSVLKNL

SEQ ID NO: 497730 - protein, 356 aa, unidentified
MGTISLGVDLAKCVFAVCEMDGSGRVLRRRDLRREAFAVYLAQLPAGTVVAMEACSGAHHWARRCIEYGLVPRLMAAQFVRPFRKNPLTKNDANDAEAIVTAARQGNMRFVPVKDIDQQARLSWHRVREGYKAEHLAIGNRLRGLMAEFGIAIPKSDVALRRALADLDAYAELPGEFKELLRALAAHWVQVRAAMAACDARIERHAREDVRCTRLRALVGVGPLTADAMVASIGNAREFKNGRQLAAWLGLVPTQHSSGGHARLGAISCRGDGYLRTLLIQGARSSLERAKRASPDKATPEQVWIRSLACRMPFGKVIVAIANKHARQLWAMLANDVDYDPHAYIHHPLQQHAAAT

SEQ ID NO: 497731 - protein, 339 aa, unidentified
MGLYAAIDLHSNNSVLVVLDAKDKVVYEKRHPNDLQTILAQFKPHKKSIQAIAVESTYNWYWLVDGLMGAGYEVKLVNTVAIKTYYGLKYSSDEHDARRLAHQLRLGILPTAYIYPKEERAVRDLLRKRSQLLRNRTMHILSIQNLVTRNSGKAITQAGIRKPDEKALGLYCGGNALRIMEIKSSLEILRCLDGQITVLERKVPEQARLKPEFKQVTTIDGVREMLGMTITYEAGDMERFEEVGQFASYARCVESSRWSNGKKKGEGNRKNGNKYLAWAFIEAAYSAIRYNERIRKFFQRKKARTNSIVARKAVAHKLARACYHVIRDQVPFNEEKAFA

SEQ ID NO: 497732 - protein, 342 aa, unidentified
MEQVTIIGIDLAKRVFQAHGAAADGSVVFRKKLSRSQFLVFLAAQPRCTVAMEACATAHGWGREIGELGHEVRLIPPIYVKPFVKRQKNDAADAEAIAEAASRPTMRFVAVKSEDQQARSMIFRTRDLLVRQRTQLINALRGHLAEHGVVAPLGPVHVKRLADAVENETAALPATVREIGRLYLNQIDVLSGKIDGLEKKLRAEAGQAETTRRLQTMPGVGPITAVAIESFAPPMETFRRGRDFAAWVGLVPRQNSTGGKQRLGRTAKMGQRDIRRLLIIGAMAVVNSAARHGPPQGSWLAHMLARKPKMLVAIALANKMARGIWAMMTRQEDYRNPVAVAA

SEQ ID NO: 497733 - protein, 422 aa, unidentified
MKNNAARKLRQVPEGYLIIGVDPHKKKHAAVAITQDLTIHDRFKVDNTREGLEFLLQRVKTEMVKSGSRGIMFAIETGGHYWRNIAYYLDERGVPFRFINQYTLKRRREGKDLNKRKNDYRDSEVAAQLLCTGEFVESGIPQGVYAELRTAHNAYRRLVKERTRITNLVKGLLDALFPEFVRVFKDPCGLTSLSVLSTCSTPGIIAEITEDQFIALIEAAHHGRRLMRKKLGELRSVAKSSIGIKAGAHSVSVEIAFLIEKQKLIKGQIQTIERTLIKLVDASEEGKYLLSIRGIHYIAVAGLLAELGCFKSYRTAKQMIKMAGSNPTESESGGKRRSRTPMSKQGRPVLRYCAWTSVIPMLRLNPDFRAWAKERRERPAHANPLNGREVVGAALNRLLRLCFAMVKNKTYYRSPHLVQVSS

SEQ ID NO: 497734 - protein, 342 aa, unidentified
MQETEQVKTFVGIDAHSKHCSIKAIGVQGEKILEREVPTQARRLSQALKGLAQPACVLIEASAIAPFVKESIEGVVDRVIVCETRENRWISRSEDKSDEADADRLARLLRMGEYKEVHVPRGLSRDRGEVVRLYSKVQGDVSRTKNRIKSKYREHGIHVKGDGVYSMKHRGEWLKKVKGANVRFLLDVLYKKLDADQAARDALLRRLVSMMKGTREFKLLKTIPGVGNINSATMVAVIDDPFRFEAKRNLWRYSGLGLRSRWSSDPSRAQVKGTSGGNRLMKNAALNAATASLRGKNRFSSHYKKMLRDGVDPAMAKRTVARQILAVALAMLKSGQAFHEAS

SEQ ID NO: 497735 - protein, 346 aa, unidentified
MLYAGLDLSRKRVDVCLLDEHGTRMETTAAPPDADGLRGLAERLAGHGQPIRAAIESMNGARFVHDELEQLGWEVALADAQKVKGLAPLAAKTDRIDAYVLAELARRDLVPVVWLPTPGVRAEPERARFRLHLVRHRAALKNRIHATLITHGLSRPVADLFGMRRRKLLDRLDLPEPWASTTAASLRLIERLDEQIAACEAELRALGADHAYVPLLMTAPGVAWVLAYTIASEIGEIERFATPKKLVGYTGLCPRVYQSGASDRRGPLAKNGPEHLRWALIEAAVHAARHPAYAAHYEATKKRLGRQRGAKVARVEVARKLAEAIWYMLSRSQPFAPAGPALPLVA

SEQ ID NO: 497736 - protein, 345 aa, unidentified
MESMYYIGLDVHKKTISYCVKDGSGRIHAEGKIPTTRFDLDRWMKTLPQPWTVAMEATIFTGWLYDHLRPHAAAVKVAHPLMLRAIAAAKKKNDRIDANKIADGLRCNFLPECYMAPTAIRERRRTLRYRNLLVRQTVQLKNRISGLLMEAGVSYNKAKLHKVGYFRELLKSNPDIDESLRPLLQLCRETLVRLQKTESALIRSLARDRFLVERVEHLMTIPAVGPITALTWALEVGEVSRFSSIKKAISYCGLCGDEQSSGEHVKRTPISKQRNKHLQWVLVEAAHMAPRLSPELSLLYDREKQKGNANRATLAVARKLVAYLVAIDRSQRDFLLVEKENQAAA

SEQ ID NO: 497737 - protein, 346 aa, unidentified
MNVTTIGIDLAKEVFQIHGVDPHGKAVVRKQLKRAQVARFFANLPACLIGMEACGSAHFWARKLQALGHTVKLMAPQFVKPYVKTNKNDASDAEGICEAVSRPSMRFVSPKNADQQALLALHRARAGFVQARTAQGNQIRGLLAEFGFVIPKGQWRIAAALQPILEDAENDLPGTSRALFARLLAHLRYLDAQVTQIEQQIKEWHQNDADSRRLETIPGIGPLTASALVASIADINAFKNARQLAAWLGLVPRQHSSGGKSVLLGISKRGDTYLRTLLIHGGRAVLLAQQRRARSEGTWGAALAQRRHPNIAAVALANKNARIVWALLARGQDYQPHYHASMRPAT

SEQ ID NO: 497738 - protein, 329 aa, unidentified
MFVGLDLHKNYLQTAVMDEQDRLLSQERIPNRDENIEEFASKRLRDSHAEIVIESSSTWYHVYELLSKNENCHVVLSNPVKTKAIASAKVKTDKVDALTLANLLRTGYIPESYIPPRHIMDLREMVRYRTSLVRMRVEAKNKIHAILLQNGTRIKEKPFTIGFVEELRRLGDYRIDGYLNIISSLSQQIQTVSNTIKREAREDELTRLLMTIPGVGYFSALLILSELGDVNRFPDSHHLCSYAGLTPSTHSSGGVTYHGSITRTGSRYLRWILTECAKTHIRTRRDSQLTIFYTRLAKRRGGSKATVAAASKLLRIVYWVLKEKRPYHS

SEQ ID NO: 497739 - protein, 337 aa, unidentified
MEYFAGLDVSMEETHICVLDREGALIREGKTVTSPKAISVFLAGGPVCKGVVFETGRMAPMFFHGLVELGISVQCIESRQAYQALKSLAGHKTDRNDARGLAHLARTGFYKPTHVKSLSAHAVRSLIAARKKLVGQRVTIDNQIRGLVVVFGVRLPRALSPACKDAAWAVSDGVPGRHTALCGLFAAREAILTAVAAIDGDIKKMTRKLKTCQRLMTVPGVGPITALAFAAAIDDPRRFGKSRDVGAYLGLVPQRHQSGEIDYTGSISKRGDVKVRTLLYEAANVMLTRYAAPLKLKSWALAIAARSTMRKARVALARRLAIILHAIMRDQPNFKAT

SEQ ID NO: 497740 - protein, 338 aa, unidentified
MLHVGLDLHKRFSTVTVMDDNGTVLEQDKLYHDDRARLIEFFRRLAGKAVVTVEATRNWYWLYELLEELGVTVKLANARKVRLIAEARLKSDKVDPGSLAQLERTGFLPEAYIPPREIRDNREYLRYRLTLVRLRTGLKNKVHALLDKLGISHQFADLFGPAGRRFLSQLKLRPVYQEELTNYLALVDDIERRIVAATKEIKQQLKPDPRAELLMTIPGIGHLTAYLLLNEIGDVQRFPTPGKLCAYGGLVPIVRQSAEHRWQGHLTPDGNHYIRWALAESACKAPSKDYQFGTFYRRLAARRGPLKARMALARKLLVIVWHVLTNGEPYKVKEIPTV

SEQ ID NO: 497741 - protein, 346 aa, unidentified
MGNRKHAVCAIDAAAKVLWRRDVANTAEALEPFFKENAGATIAMETGLCCRWISALAKSCGCDVLVGNARKLAAIWQSKQKNDENDALMLAKLARADRELFSPVELRDDERHDMVQIIELREVAVSQRTQAVNSVRGLCKAQGVFIPKCDASCFHKVAAAAMPRDAAWKFKPMLRHIKETVAAIKRYDAMLEQYARRHFNDEVELLRTIPGVGAVTACAFVAHVANPRRFGKARDAGAYFGLTPAQDQSGDRDAPKRITKTGSSLVRHLLVLAANYILRESSADTALKRHGERICARGGKVARRKAKTAVARKLAVTMLAMLKSGKAYEDGLAAESPAAWSAKLVA

SEQ ID NO: 497742 - protein, 355 aa, unidentified
MNTPHYIGFDVHKKTISFCVKTAAGEIVEEGVVAAQRPALQEWAGAQRRPWQGALEATLFSGWIYDTLRPYSAQLEMAHPAKMKAISAGKKKSDSIDARTIADLVRCNLLPACYVAAPRIRELRRLLRYRSLVVSEAVRMKNKMAGLLMESGALYVKERLHGKKYFASLLEELEEVPESVIDLLRLSRSALEMFESTQRRLVRELLADPELAQRVERLMTIPAVGEITALTWALEVGDPQRFPSCSDALSYCGLTAALKSSAGKQQRGPISKQRNRWLQSTLIEAAKLAPRWNPQLAALHARELERGHRNRATLAVARKLVTYLLAVDKSGQSFQLRAPWPLQPAEEPEQKIKTA

SEQ ID NO: 497743 - protein, 383 aa, unidentified
MMKNSNMKRTGQTVTPSVLADRSKAKVVPSLLPKSSNSCPGYPSPHVAQGRARLEQVKIIKEDCLLETPIIFVGIDVCKAQLDVAIRPTAQTLSVTNDKAGIKTLIKHLEKLQPNLVVLESTGGLERQVMLALIGAEISVVMANPRQIRDFAKSTGQLAKTDRIDAAVLAHYAQAIRPKPRPLPDELTLELRSLTVRRRQIIDMIVAEKNHLATAPKAIKKRISAHIAYLEQDLDGADQDLDRFIQNNPLWKENQEILCSTPSIGPVSSRTLLAELPELGTIGRKQISALVGLAPFPRDSGTLKGRRTIWGGRASVRRGVLYMAALVATRCNSIIRDFYKRLKAKGKPFKVALVACMRKLLTILNAMIKHKTRWSENFSHQTT

SEQ ID NO: 497744 - protein, 381 aa, unidentified
MSQMTLNINENRKTNIMYIAFDLSHASWQLVFSNGKHFRFCTVKDKSLSSLNEEIKKAKAKFKLDDNCRVYSCFEAGRDGFWLDRYLKSIDINNLVVDSSSIEVSRRKRQVKTDKVDAKKLIMMLFRHHAGERKHWSVVNVPSEEEEDLRRIQREIDRLVKEKGQHTTRIRSLLNLHGIVVGIVGGRGWEKQIEQLRNWEGKLLKPCLKAEILRESKRLQLVKKQLLEQEKEKCRLLEEELETYPVLKQVTQLMLLNGIGKASSWLYVMEFFGWRKFKNRKQVGSLAGLTPTPFSSGNDNREQGISKAGNKRIRYMTIEIAWLWLRYQPKSELSQWYQKRFGHSSPRMKRIGIVALARKLLISLWRYLETGELPIGAEIKV

SEQ ID NO: 497745 - protein, 462 aa, unidentified
MTVPTTKGSRTKATPLPTSLPAIRPLVAGLDVGSSEHWICGPARADGQPNVRGFGTTTDQLQALADWLAEQGVESVAMESTSVYWIPIYELLESRGIEALLVNARQLHNVPGRKTDVTDCQWLQLLHSCGLLRGSFRPSEAITRLRALQRQLANLVAERTRCVQWMQKALDQMNVQVHRAVTDLTGTTGLAIVRAIVGGERDPARLALHRDYRCRKSAAEIARYLTGTWRDEHLFNLTSALRLFDALEAEIAAYDAQLLTAVESLQPPDRQADPVPPHPNPAKEKAIKARGEQQARTTLWRFAGVDLTRIDGISAGAAQVVLTEVGPDLAAFPSEDQFVSWLRLCPRTPISGGKPLKKRRNGLGANRIAGVLRMAATSLQRSKTALGAAFRRIARHKGGAVAVFATARQLAQLIYRMLRYGHDYVDIGEQAYDQRFLVRRFAALTESARSLGYTLVPTAATE

SEQ ID NO: 497746 - protein, 344 aa, unidentified
MSSIDYIGFDIHKKTISFCAKAQDGTILDEGTIPARRDTLLAWAKARPRPWVGAMEATLFTGWIYDLVKPLAQELKVAHPAMLKAITASKKKNDKIDARTIADLLRCNLLPECYMAPCAIRDLRRVLRYRNLVVRQATRMKNRIAGLLMETGTPYNKQRLHGKAYFSELLGSLREVPGSVVELLKLSRGQLEFFAAIQRRLLKGLGEHPDLSERVTRLQSIPGVGEIMALSWALEVGEVDRFPSIAQAASYCGLTSAQHNSAGKEQRGPISKQRNKHLQTMLIETAKLAPRYNPQLAVVHERELQRGDRNQATLAVARKLVAYLMAVDKSGKPFEIRARGEEAA

SEQ ID NO: 497747 - protein, 356 aa, unidentified
MDVHKETNRIANLTSNTKEIVKEQQIKHNEVQIKKFVNKLKSEWNEIHSCYEAGVTGYPLYRYLKSLGVNCILVAPGKIPRQSSDKIKTDKRDAIKLAKLLRSGELESIHVPSEEDEAVRDYLRSRDSLRLDLGRNRQRLMKFLLRKGITYSKTKYWTVSHNKWLNTLQFNNEILQETFNDYYSRVRVQEENLKAMDKRIQEIAESEPYREKVGILRCFRGVDYLTAMFLLCEVCDFKRFKTAGSFMSFLGLVPGEYSSGSKRKQTGITKTGSPRLRRILTEAAWQHRFPGTGSKVVTARRSGQPALVVALAEKASLRLHKKFRNLQQRGKTPQVIITAVSRELSGFLWAAMNLTT

SEQ ID NO: 497748 - protein, 417 aa, unidentified
MSEYAALVAIDWADKKHAISLYDPNTGARQQTIVLHTPTALQEWALGLRQRFTGQPIAVCLEQSRGPLIYFLLQFEFFTLYPINPATLAKYRQAFSTAGGKDDPSDADYLLDLLQHHRDRLRVWRPDDEKTRTLRLLVEHRRRLVNDRTRFSNRLTAALKGYFPQVLSWFEDIPTRLVCDFLARWPQLSALQRARPATINKFLRSHHSTSQVTNQRRLLEIKTAVPLTTDPAVINSSVLQVKVLVDQLRATIEAIAEYDRHLEALCLTHDDYELFAGLPGAGLIHAARLTAALGSDRSRWPSADELLHFSGVAPVIERSGRQFRIRWRYFCPKFFRQTFHEFAAQSIQDSFWARAYYYSQRAKGKEKHAAIRALAFKWIRIIWKCWYTRTPYNEVLYLESLRKKGSPLLKFAADYQP

SEQ ID NO: 497749 - protein, 349 aa, unidentified
MTMVGGFDVHRKQITFDYVDDDGLVHSGEIRPATRTTLRGWLGEHCPSGDAEFAVEGCTGWRYVVEELAMAGVVAHLGDPAEIAGLRGPKKRAKTDRADARLLRTLLVEGRFPESWIPPAHVVEVRTLGRLYCALMEERRAWQQRIHAQLFHQGCPPVTALLSVAGRDALAGAELSRVGRQYVDTALRRIDELGAEIVPLRAQLMNFARHQRGCQALQARHYGIGWLCAAIIWAEIGDARRFSSSDQLVRFAGMDVTVYSSDAKRSPGHLSRQGSPELRWATFEAAKCAARRGSPDYSYYHQLAVKHDGHNGKNPTLAVERKILRRCYHTLRELGDAALSPPQPVREAA

SEQ ID NO: 497750 - protein, 401 aa, unidentified
MVSDFRKGRYNLMKIYVGIDIAKLNHFAAAISSDGEIIIEPFKFTNDADGFQLLVSKLESFDKNSLIIGLESTAHYGDNLVRYLVASFYKVCVLNPIKTSSMRKNNIRKTKTDKVDTYIICKTLMMQDHLRFVTFYDLDLMDLKALGRFRQKTIKQRTRLKIQLTSYLDEVFPELQYFFKSGLHQKSVYALLKEAPTPETIASMHMTHLAHLLKVNSHGRFNKEMAQQLRVLAEKSVGASDSALSIHVTHTISQIELLDSQLERVEAEMTEIMKFNDSVIMTIPGIGYINGGMILGEIGDIHRFSNSNKLLAYAGLDPSVYQSGNFHATKTRMSKRGSKVLRYALINAAHNVVKNNSTFKAYYDAKMAEGRTHYNALGHCAGKLVRVIWKMMTDEVEFNLK

SEQ ID NO: 497751 - protein, 386 aa, unidentified
MVFVGIDVAKDKHELYAVDSDGVVLCDHLTFANSAVGFASLLERVSAWGKIKVGIEATGHYSSNLLSFLEAHGFEVVVFNPLSVSRLRSANSLRRTKTDKNDSRYIARLLMTGDANPYQSQSYNISVLKSLTRARFRLFQEIQPLKNRFRRLLHILFPELQGFFSNLYGNTSLNLLSALPSAKDIAECNILKLTKILSVSSHGKLKRSRAEQLKSLAKSSIAAYNYGDAFELKQTVQRILFLSSQMSEIERKIDSVMSQLNSPITSIPGIGNLLGATILSEIGDIKNFDNPDKLLAFAGCEPSTYQSGKYTATNTPMVKHGSRYLRRALYCAADMAYVNSISFRSYIDRKRAQGKHYYVAMSHGMKKLVRIIFAVLSRNIPFSEPA

SEQ ID NO: 497752 - protein, 394 aa, unidentified
MRFAGIDIASETHALAIVNAEAAVELKPVSFAEDAVGYQRLLSLLGDPAELLVAMEATGHYWKNLFAVLAAAGYSIALLNPLRTHRFAGEDLARTKTDALDALGIARFAAQKRPSPTLLPDAATEELRELVRLRERLLQDFGDRVRQLHRLVDLGFPEFTRHVRTLESELAGAILRHYPTAAAFRGASVRRLAGVRYDGQHQVGLELARSLIDAARCSVGQHHSAAYRIQVRYACDDLAVLRSRLREIDRDIESKLREHEVGRLLTTIDGIGPNTAARIIAAVGDPADFHSAAALAAYVGTIPRLRHSGKRQPARAPLTPIGNASLRAALWMPTLTAVRSNPWLRAHYERLRARGKLPRVALVACMHKLLFAVYSVAKHRQPFVPMLTAPSADV

SEQ ID NO: 497753 - protein, 344 aa, unidentified
MQEKASDKVLYVGIDVAKSWLDLAANVDGKRTVSRKRVDNDNAGFRAAVKWAKTHQRRQGAKDIHFCLESTGVYSEAITEYLQEVDKVVSMINPSLIKSFATSRLLRTRTDKMDAELIAIYCQAMKPAPTQRIPEEMKELKSLVRHLEHLKDQRIEEKTYLEAATDKEVTSSTRKNIAHYEAEIKRIEKKIKKHLDEHPHLKKKIDLLTSIPGIGDTSAQVILCELHRQGLVEHISRRAQTAHAGLAPMEKTSGSSVRKKPRLCKTGNGRLRKSLYFPTVTAIQRNPVVKEFYERLISRGKHRMVALVAAMRKLLVIAIGVLNNESAFDPIWERNKRLRLVEVA

SEQ ID NO: 497754 - protein, 339 aa, unidentified
MSIVMGLDQHRAQITGDWLVTETGEVKRGRVAPADRAGVRRFLERFRGEELEVALEATTGWRFVVEELRRIGAVVHLAEPAETAGLRGPKKRAKNDRADARHLRELLMLGRVPESWIAPDHILDLRARVRLRHELGEQRSEWQQRIQATLYHHGCPQRRQLMVGDGRDWLAAQPLPVTAREQIRVSLAMIDALAVQIAPLEKELRAYARRQAGCKALMAHYGIGELTAVTILAELGDCTRFSSSRQAVRYAGLDITVYQSDQRRAPGHISRQGPPALRWALYEAAQVARARETSPDREYYLQARQRVGGNRACLSVARKLLKRSYHTLRELGEEALAPA

SEQ ID NO: 497755 - protein, 411 aa, unidentified
MHNRQNYLYVGVDLHKEHHTAVIINCWQEKLGEIQFENKPSAFSEFLLEVETYVSNGLSVVFGLEDVGGYGRALAKYLVDHEQVVKEVNPALSFLERKSHVTTQKSDSWDAECVARILINKLNQLPDAKPNDLFWSIQQLVSRRNALVKAQSALKNQLHIQLNHHYPSYKKFFSELDGKTALAFWQQHPSPFCLEGANIKQLTAFLLDVSNNTCSVKKASDILKLVKEDGQTMKEYQETRDFLVRSIVRDIEFKKKEMKYIERELKRLVNLLDYQLETMPGIELVTASALIAEIGDVRRFPNANKLARFAGIAPVYFGSGGKGKTHKSKQGNRALHALFYNLAVQQVQVAKGSKLPRNPVFHAYYQKKLKEGKTKGQALVCIMRRLVNIVYGMMKYKTAYELPVVEEKEVV

SEQ ID NO: 497756 - protein, 416 aa, unidentified
MKKHNNSPKKSEPTSKRAKSRGPVQRDPKEVLAELVGKLREKLDPRVVAASAGEEDSRGVRPNLDRLTVGVDLGDQWSHYCILGLEGETLAEGQLRTTAQDITEFFEALNAARVVVEVGTHSAWVRDVICRYGHEVLVANPRLMEGSKRRKRKNDRIDANKLARLGRVDPQSLHPMQHRSREVRQDLVVLRARDALVAARTELINATRGLVKSMGSRLPKCSSPSFAQKVEETVPVELRDALMPVVRMAAALSDCIQGYDEKIEKLGREKYEHTALLRQVKGVGPITSLAYVLTLENPDRFVKSRDVGPYLGLVPKQEDSGESQPQLGISKAGDTMMRRLLVGSAQYSLGPFGPDTDLRRYGLRLCERGGKNAKKRAAVAVARKLAVLLHCLWVSGEVDEPLRQGMSATMTPAAAA

SEQ ID NO: 497757 - protein, 405 aa, unidentified
MIFVGIDWSEKQHEVELMAAAGQRLRSLRIGHGVEGLAKLQETISEFTSDPSEVVVGVESDHGLLVNALVGSGYQVYPINPLTAARYRDRHSLAGNKSDRRDAQMLANVVRTDRHQLRPLAGDSEPALEIRARARAHLRAIRLQGQLRNQLRSLLLEFYPAVVPLLAEDDIRDALAVLAVAPTPALGRGLSLSKLAATLRRHGRQRNLAPRAQEIQGRLRAPQLDLQRPRLIAAHGDEVASLTRVLLQVRQELAQLEAQMAAAFRGHPDAQILLSFTGLADILGARVLGESGDDPTRYADATARRNYSGPAPVTRASGKKREVTRRVARNRRLADATFCWAESAVRHSPGAREFYRRLRRRGQPHNQAIRVIAYKLVGKLHACLRDRTLYDEHRAWSTDLTQCAA

SEQ ID NO: 497758 - protein, 402 aa, unidentified
MNCVGIDVSKGKSMIAVMRPFGEVVVSPFEVRHTASELSELARLLKNLDGETRVVMESTGYHHTPVAWLLHDAGLYVSVVNAMLVHDYGNNSLKRAKTDKKDAVKLANYGLDHWLTLPRYAPEEDTRLMLKTCYRQYQQYSKVQTMLKNNLISLLDIAFPDANRLFTSPPRADGSEKWVDFVATFWHCECVCGLSKKAFTAKYQKWCRKHGYNFSQDKALDIYASACGRFGVMPKTNTAKLLVEQAISQLQTTSAALAALKQEMQSLAASLPEYPVVMEMFGVGPTLGPQLIAEIGDVRRFHSKKALVAFAGIDAPPYQSGQIDVRSRSISKRGSASLRRTLFLVMGVLLQCAPMDEPVYQFMNKKRSEGKPYRVYMMASANKFLRIYYASVKAYLDSLEHD

SEQ ID NO: 497759 - protein, 315 aa, unidentified
MTTAGRFIGIDVAKRQVDVSERPSGVQWATANTAAGLTGLVERLQAGGAIALIVVEATGGYATAVVAALTAAGLPVVVVNARQVRDFARAVGKLAKTDAIDAGVLAHFAEAVRSEVRALLDELTQTLQSWLARRRQLLEMLQAEEQRLAIALRGLRPQIQQHVEWLRHQLRDIDGELQSLLRASPIWREQENLLRTVPGVGPVLATTLLADLPELGRLNRRQIAALVGVAPLNRDSGQHRGLRHIWGGRAPIRTALYMATVSAVRCNPVLRSFFVRLCGAGKPKKVVLPACMRKLLTILNAMLHTRRPWQPGMVA

SEQ ID NO: 497760 - protein, 400 aa, unidentified
MRAVFGIDVSKASSEVAILVNGEKVHGYTMSNDAIGFARLLGDLRTVHKPEIIFEATGVYSRRLQAFLDEHGYAYTRLNPLEAKKQLDSLRVRKTDKIDAEKLAQSQFVLNRKTTYVQEEVYQELRDLSRFYQNLTEDIVRAKNRLHKVLQVTFPELETILSTPSGQQYWNLVIDFPCKDFVLELSKDELSESIRQSTSKRISDKRVAYLVEKLTALANQSYCAVKKTSPIMEEVRYYAKELLRLSEQRQTVLDQMVELAQPLPEYDILLSIPGIAETTATSIIGELGDIRRFQSANQINAFIGIDLRHYESGNFLAKEHITKRGNPYARKILFKCIHNIASASHTNPCHIADFYEKRKRQSQTTSTKPHTIASIHRLIRTMYYLITHNKLYDYRSTRNQ

SEQ ID NO: 497761 - protein, 428 aa, unidentified
MPYRIAGIDVHKKMLAVVVSDVGAEGIVVQERRKFLSTPQQLGCLAEWLVEWEVDEVVMESTAQYWQPVWGALEETWQPSRQGHPGRGTHAGKIHLAQAQSNRGRRGRKDDFPDAERLIRRLVAGELILSFVPDPPQRLWRVVTRRRNQLGRSKVQLQNQLESLLEQAHIKLSSIVSDLLGVSERRMLQAIAEGERDPAVLAAMADRNLKATPEQLQDALSACRTLDPTFRELIRMTLEHLQLLEKQIEDLEKKASELMREDQDAVERLAKVPGMGVSSALQIIAEVGPHAASFPTPADLCSWVGVIPGQQVSAEKNQSSHSPKGNRPMRRILNEVAHAAVKTKGSIFEVKFARFVRIMKYEPAVWSVAHFMCELVWKILHGGVTYEERGPGVNAKAQQKRTQKMIRRLKKLGFRIEAPPIPPAPNPA

SEQ ID NO: 497762 - protein, 349 aa, unidentified
MKGRERVVTITTLGVDLGKNSCSLAGLDATGAVVLRRRLSRGKLVEFLGRLPPCVVGMEACCGAHHLGRAFGAQGHEVRLMSPEYVQPYVKAQKNDDRDAEAIAEAATRPTMRFVALKSEVQLDQQTLHRARSRLVNGRTRLINQLRAILLERGITVAKGRHVLGRALGALLGDEGSGLSPRMKMLLDEMRREWAELDARIAALDREFVETARVSAPARRLATIPGIGALNATALTAAVGEAEDFATGRDLAAWLGLVPRQMTTGGKARLGSITKRGNVYLRTLLIHGARAALPGLSRSETGLGAWLRGLLDRSHPNVVVVALAAKLARIAWAVLRSGADYKGHAGASA

SEQ ID NO: 497763 - protein, 338 aa, unidentified
MGTYAGIDLHSSNNYIGIMDQDHKRLFGRRLPNSLEKILMVLEPFKSDLKGVVVESTYNWYWLVDGLQEHGHRVHLANPSAIKRYEGIKHTDDKWDSFWLAHMKHLNILPEGYIYPKEQRAVRDLLRRRLFFVRHRTANILSLQSTITRNLGIKISSNEIKKLDMDDACDLLDSSNLVFMAQNNISTIKHLAKIIKGIEKEVKSQVELRKEFVMLTTIAGIGLILGLTIMLEVGDIERFSKVGNYASYCRCVGSKRLSNGKKKGENNKKNGNKYLAWAYVEAAHFAKRHIPKAQRFYQQKMAKANGAVATKALANKLARASYFVMRDQVPFDEDMLFR

SEQ ID NO: 497764 - protein, 347 aa, unidentified
MTEETLPQQIVIGVDTHDLVHVAVALDHLGRRLGDLSIPTSPSGYERFVIWALRLGDISAVAMEGTGSYGRGLCTVLQSRGVRVAEVSRPSRKNRRNRGKADLSDAEAAARAFVAGEVTAKPRGSDASIAMIRSLRIPREALVNQRTQAINQLRALIVAAPAPLRESLAGLAAKQLIQRAAQFRVGSIATATEASRFAMRQLGRHVLHIDIQIEELDRHLDPLVAGRAPELVAVHGVGVEVASSLLVAWDNVHRIRSEAAFASLCGVAPVPASSGKTTRHRLSRGGDRTANRALWRIVLTRMRTDTRTRDYLARRQAEGKSKREVVRCLKRYVAREVYRALQSSSAS

SEQ ID NO: 497765 - protein, 388 aa, unidentified
MEYFAGLDVSMEETHVCVMSREGVIAHEEKTVTTPEAIAASLAKAPACRLVVFETGRMAPMLYHGLIARNVPVVCIESRHAYLALKSLATHKTDRNDARGLAHLSRTGFFKPVHVKSLSAHAIRALIIARKKLVGQRVMLENQIRGLAVVFGIRLPRALTAGFVKQALEASEGVIGLAAAMRGLVEARSTVLSAITAIDREMKRLARASEACRRLMTIPGVGPITALAFCAAVDVPERFKRSREIGAYFGLVPRRHQSGEIDYSGSISKCGDRRVRTLLYEAANVMLTRYKGPLKLKEWALAIGKRSTMRKARIALARRLAIVMHAGPRSDRRQSSAPTHLTKAARELSDSQNADVPHTQKSTRSLARSSANGARNSGPRNSLSLSNY

SEQ ID NO: 497766 - protein, 366 aa, unidentified
MKVLIGVHPHKASVAVAVVDEVGGFVERATFPQNRPGLHSLERFKRSGTPSVALSGRERRRPRPAPGGQVGGGRRVCGGREQPKLSARVRVLSSFAGNARNNDRLDALATALAALRNEQLAAVDHENASEVLRLLSERREDLVAERTRALNRLHGLLRDLLPGGVGGTLSTHRAARILRPIRPQEGASARLRRRLASEVLRDVRSLDRKIADLNGRIEAEVEASGTTLTDIFGIAPILAAKIIGTVGNVGRFPTKAHFASYSGTAPVEVSSGEVVRHRLSLAGNRHLNRAPCTWSRCVRPGRTLGADPTTARRWRRANLARRRCGASRGASQMPSSRASWRICRRLHAVPLDKEEPRMLLAELLGK

SEQ ID NO: 497767 - protein, 341 aa, unidentified
MDHYTGIDVSLECSSLCVVDANGKIVREGKVASEPAALIGWLRSLGYELTRIGLEAGPLSQWLFAAMREAGLAVELLETRHVRKAFEAMPVKSDRNDARGIAQLIRLGWFRPVHCKSMVAQETRSLLTARKLVQSKLRDVENSLRGILRGFGLKVGKTTNRSFGMRIRELVANHASLEMIADALLAVHAVLRKEFMAFEKQVRKMARSDTRTRLLMSTPAVGPIVALTYASAIDDPARFKSSKRVGAHFGLTPKKYQSGETDYTGRISKIGDSSVRTVLYEAAHVMLTKPVKGCSQLKSWAMRIARRAGMSKAKVALARRLAVILHRMLADGTPFNAAAAA

SEQ ID NO: 497768 - protein, 534 aa, unidentified
MRTRNRRRRKRTLPKLKKAPNSLQPRIEEIGAQHFGILAVDCAKARFQVLLGNFCGTVLMEPQEFDNSGPDLEHLVETVQHEVRRHGLKDLLVALERTGRFHHPVRTVLRQHWTVKMIHPLATKRLRQPADPGNKTDATDLVAILRAAIAGYGTDEEELSERWAAWRLVGREREALVRHRACVRIRIQDRMEALLPGYLALFADPWKMSAAFRVALDYGSAAALAQAGPEALLAHLHQAGLSMRRDTLGRILLWAAKAAPGDPSGELLRRLVADERTLLAALEGQIRAYERDLLAHLVDTPFLLLLSLPGIHVVSAASYAAELGPIEHYPHPRKITGRAGLYPSRYQSDETDYADGPLVHRRNARLRDALMEIAHNLVRCNTYFKAWADVRRKAGWPEKALRIAVASTFSRISYAMVAGCRVFEHPAIRGRDAILPKVTAFILDHDIAPEAARDLLRRAAQQIPPEARPAEAEALRPELARRHRRGSIWTRGTGPQLLADILPELLTWLGLPVAPQPERNPSPPTNEESTGTPH

SEQ ID NO: 497769 - protein, 403 aa, unidentified
MTHPIAFVGIDISKDKHDVAMVDAQKNLLAKLFVIAENREGYQQLQAALTSCQQRHQTREFRIGMEATGEYWKNLYHFLKAASPAFVLTVLNPVQTKRFAQSELRRAKTDPVNALDIARFMAEKQPRPSHDRLPIFEGLKELDRHLHGLAKQNAMTLNQLRIELGKVAPEIEQAFGRPDGLQLLAVLKKYSTAEIIARTTTDELCALRYGPKSRRVSQALVTKIKALAEKSCAHKTGLGAEILVQTLVERVQHTQQLRARLKQHLVELYQQARQVPSVLTTIKGITPETAMLLEAYISDVHRFPSAKQIVAFFGMNPTVNRSGKATKRASYLEKKDNGLVRHKLFMITLNLIRHRVEPFYSFYTRLVAAGKPKLVAVLATARKLLVIIYTLLKKQQPFNPNKK

SEQ ID NO: 497770 - protein, 355 aa, unidentified
MDSVKYVGLDVHQETTSAAVLDSEGRLVMQLTMATRASAILDIVRGLRGTVHLTFEEGTYSEWLFALLVGRVDRLVVCNPRKNALLQVGNKNDDNDAHKLARLLRSGELSSVYHGEHGLAALQQLGRSYTTLTEDTTRVMARLKAVFRSQAIATAGQKLYSSRHRGEWLAQLGERGLRRRAERLYEQLDALQLLRRRARQELIVESRSHEAVKWLRTIPFLGPIRAAVLLGRVQTPHRFRSKRQFWTYCGLGLETRSSADYRVRQGQLVRSQKPVWIRGLNRNHNHELKNLFKGAATTASTREGPLRTFYQGLLDQGMVPAMARLTLARKIAAITLRVWKKGVAFDAEHLKPKAA

SEQ ID NO: 497771 - protein, 351 aa, unidentified
MVIIGCDFHPGFQQVAVLDTGSGEIRDLRLGHKEEARQFYAGLRGQEVLVGIEASGYSQWFEQMLEGMGYGYRIGDAAAIRASYVRKQKTDRRDAGHILRLLVEGRFPALWVPSAAERDARQLIVHRHKRVQMRTRVKNQLHALAMNQGLRLRWQLWTAKGLEQLRALPLLPYAAARRADLLRQLEEMDAEIARLDQAVRKEAEARAAAVRLMSHPGVGPVTALGFVLTIGDVRRFAKARQVASYLGLIPSERSSGGKQRLGHISKQGNPLVRFLLVEAGHTAVRGDAELRRCYQRLQHRHSTGVAKVAVARKLALRLYWMLRNEIDYAQLRGPYAGKPVSFCGRKTRPAA

SEQ ID NO: 497772 - protein, 383 aa, unidentified
MKKNISTTVMNTATSVDVTALPQPAHGGAAAVTPPRYQVVVGLDVGDRQSHYCVLDLDGHVVVEGAAKTTEASFRVLFEGKGRMRIALEAGTHSPWINRLLVALGHDVLVANPRKLRLIAESDAKHDRADARLLARLAHVGPALLSPIQSRSAQTQMDLTLIRAREVAVQTRTKIVNAVRGMMKSTGHRLPASPTLTFAQKATTACPEALQPALLPLIRLVQTLTDEIAAYDGLVVEKARAYPETRAIQTIHGVGALSAVAFVLVLNNDRSRFKRSRDVGCYLGLKPKQRDSGLRSPQLGITKTGDPLMRRLATQGAQYILGPFGRDSALRRWGLSVASRGGKNAKKRAVVAVARKLVVLMHRLWITQEAYDPMRGVRVQPAA

SEQ ID NO: 497773 - protein, 383 aa, unidentified
MTKSSNLYVGMDVHKETIDIALADGDGRKEVRHYGSIGGDLVALDQAVRKLQATGKTLHFVYEAGPCGYVIYRHLAGKGLDCVVVAPSMIPKCSGDRVKTDRRDAEMLARLHRAGELSAVYVPHPEDEAVRDLTRAREDAKGAQTRARHQLKAFLLRSGIRYAGKTAWTPAHVRWIASIKLDQAVQQIVFQEYVAAVTAASERVERVEGNLRDAVLEWRRKPLVEALQALRGVQLVVAATLAAEIGQIERFDNARQLMAYLGLVPSEYSSGPSTRRGSITKCGNTHARRVLTEAAWAYRQPARITPIIAKRQDKLAKNIRNIAWKAQVRLCKRYRSLRARGKEHNKVVTAIARELSGFVWAIAREVSAVAPQHGLSTGATLRA

SEQ ID NO: 497774 - protein, 340 aa, unidentified
MEEVSIVGVDLAKQVFQVHGAAADGRVLFRKKLSRPQFAKFMSSLPPCVVAMEACGTAHYWGRELSRSGHDVRLIPPIYVKPFVKRQKNDAADAQAVAEAALRPTMRTVAVKSAEQQARAMLFRTRDLLVGQRTQLVNALRGHLAEHGIIVGQGVGNIARLAARLDETGLPALVRDLGHLYLDRIAQISAEIETLDKRITEAAKENDIARRLQTMPGIGPICAMAIAAFAPDMQEFRRGRDFSAWLGLVPRQHSSGGKQKLGRTSKMGQRDIRRLLIVGAMSVVHWRGRDGGKPGSWLARMLERKPRKLIAIALANKMARMVWAMLVKGEDYRDPTGAIC

SEQ ID NO: 497775 - protein, 361 aa, unidentified
MRIIGVDLHARQQTIAMLDTETGEVVEKTLEHEGEKVREFYAALPGPARVGIEDTGSMHWFLKLMEELGIDCQVGHPAKIRAAEPRKQKHDRRDAALLLKLQVENRFPSIWMPSTELRDLRALLLHRHQWVRMRTRVQNALQAIALSNGLRRGKSLWSQEGQRTIESLPLTPYAAQRRTELQALYRKLDGQIDKLDEQVRDQAWQRPRARLLITHPGVGPTTALATEVFLGDPARFADGKALASYVGMIPSEYSSGGRQQLGGLSKQGNPLLRFLWCEAAMHAVRHDPDLKRFYRRKLMPKGLGKARCAVARKLGIRLWIMLRDKIDYQEFCRRGHIRQKSGARAGMPGNLSGLAVQGPAI

SEQ ID NO: 497776 - protein, 321 aa, unidentified
MGTEVFVGIDVSKDTLEVAIWPQEERMSFAQTDDGLSLMADFIQPFSPCLVVLEATGGLERAAVATLAARSLPVVVVNPRQVRDFAKATGILAKTDKLDALGIAKFAQAIRPELRPLKTMEAQQLEAILSRRRQIVHMLTAEKNRLHSAPGWTREDIRLHITWLEKRLEKIEKELGGMIRKSPVWRVKDELLRTFKGVGPVLSQSLLSDLPELGSLNRKKIAALVGVAPMNRDSGKFRGRRRVLGGRAEIRSVLYMATVAAIRFNPAIGVFHERLINAGKAPKVAITACMRKLLTILNAMMKNQTPWQPLTQNMLDMQHSC

SEQ ID NO: 497777 - protein, 353 aa, unidentified
MAMTRMPDPGREVTGGVDTHKDFHVAAAVDQLGKVLATAAFPARRSGYRQLLDWLSSFGPVSRVGVEGTGAWGAGLCRYLTEAEVEVREVVRPNRQHRRRYGKSDATDAIAAARAVLSGEASGQPRGGTGTVESIRLLKIARRSAIRARTVTANQIHAVIVTAPEQIRSSLHGMSIGKIIKRVLGFRPGDLTDPAQAAKITLKTLAGRYQSLTDEIETLDTHLDHLVAQTAPPQLLAMCGVGTQTAADLLITTGTNPSRIGSEKSFAALCGTSPVDASSGRHQRHRLNRGGDRQANAALYRIVIVRLRYHPPTRRYMQRRLQQGLTKPEIIRCLKRYVARDIYHTLTHPQPAT

SEQ ID NO: 497778 - protein, 407 aa, unidentified
MIERCAGLDVHQETVVACVLFGSLDKKPSKEIQTFPTTTRGLLALSDWLSSYKVTDVVMESTGVYWKPIWNVLENDFQLILANAQHVKNVPGRKTDVKDAEWLAKLLRSGLIESNFVPPEDIRDLRDLTRYRKKLIYSRTAERNRIHKILQDANIKLTTVVSDIFGATGCRILEALINGEKMEVQKLQQMVDPRIKANLEAIVEALNGRIRKHHRDMLRFHWEHIAYIDETIDKVVEQIDQLLIPYQKEWELLETIPGVNKTAAATFIAEMGVDMSVFKTSKNVASWAGVSPGNYESAGKKKTGKTTYGNKALRTIAVECSFATDRQNNRISAHRRRIMKRQGKSKARVASAHLILTIAYTILKTGVAYQELGPDYVQQNQQNKELKMIQYLKKKGYRVEQGDQQTA

SEQ ID NO: 497779 - protein, 315 aa, unidentified
MAMSVSVSRPIVGVDVAKNELVIYQAELDLLETLPNNKSAIKKWLKALPAPVDVAIESTNIYHLEFADLAHDAGCTIYMVGGYELSHYRKGVKVRAKTDALDAKLLARYLKNEYEELHPWTPPSPLYRQLLSLFRRRAALVQARVGLVQSWANEPLLKAAFAEQIASMQRLEVLVEKMINDQLKEAGLLAHLRRCMKVEGIGFLTGARLIAAFQRGEFKNADAFIAFLGMDLRVSQSGQKDGRRSLTKRGDPEARRLLHNAAMSASRTATWKGFYEEQRAKGFSTTQALVILARKLARVVFALLKGQSEYQPKAG

SEQ ID NO: 497780 - protein, 313 aa, unidentified
MNLENQKMVVGIDVSKARLDIAAAGETWSVANDFDGIGKLRARLQALQPSLVVVESTGGLERPVLAELSSVGIPFALVNPRRVREFAKSIGAEAKTDLLDARLLVRFGEAVKPEPTQLPDADEQRLSALMTRRRQVVDMLTMEKNHLFSAHPAAQESISKIMVILQQELDDLNRAIDDFIDHTPDFQRKEDILRSVPGVGKVTTAILLSDLPELGHLDRKKIAALVGVAPFNNDSGRHRGERRIKGGRPSVRKVLYMATLTATKFNPVIRSFYHHLLHQGKKKKVALVACMRKLLVFLNAMIRDSRSWTPFPA

SEQ ID NO: 497781 - protein, 393 aa, unidentified
MNKIIYIGMDVHSSNFTLCSFEPGYGMTEDKIFGQVQFKEDLIKNTEKYINNLKSQRKDIDIVCGYEAGCLGYVPCRELTKAGINCKILAPSTMAVQKGGKRLKNDFRDALDIARCLASGSYKAVNIPDIEDEDVRDYIRMRDDHQTALKQIKQRLNAFCLRHGFQYDKSKWTLAHIQWIKRLECTFKQKEIINEYLATYEALKSKIEAFDVRIEDFASSERYADKVKKLVCIKGIQTNTAMSFISEVGDFKRFRSAEQFAGYIGLVPGEQSSGDKVCRTGITKSGNTHLRRLAVECCNSFRRGLVGQKSVELKKRQQNAPSEVINYADKASARCQRKYYRMVNKGKNPNIAVTAVAREFCCFIWGMMTSNYEYSNNEVRELMPDNCLIRVNL

SEQ ID NO: 497782 - protein, 375 aa, unidentified
MSTATATPAAGKPGERPRLVVGLDVDLNFCVAAVQCGHGPIKPAQKWTRAQLLKWVREQVAAGHEVYTVYEACGFGYTLHEELTAAGATNVVTTPTRLSPERRRKNDRLDARELCVRLARHLDGHAHELHPVRIPTRAERERRELGRQREFWVREIRRLENHGRALRLEHEHATLPGGWAGPRKWKRLAAECSEFVRQLLEPVVQQLRQATAHRDALTARIEAAVATERLPKGLGALTVSLLDGEVCDWHRFRNRRAVGSYTGCCPGEHSSGGVQRCGPIDRHGNAHVRTLLVEAVWRLLRWQPGWHARVKWLPRLTHGASLKKKAVVALARQLAIDLWRWRTGRCTAAELGWLPVEPGESTPEETAGSPAEAVA

SEQ ID NO: 497783 - protein, 470 aa, unidentified
MRIIGLDLAITSAHKAVVMDERGKFLTPVFPVTTWAESLAALLQRAREGAEANCPLVVVMEPTGAAWLPVAIYLIMRAVTVYLVNGQQVADLRRFYKRHAKSDRIDARVLAKLYLVAQEKLHALSLSPAALFSLQRGCKQLDWVISERTKLINQIIALDRMTWLGGWEDLGFGDPFSTAACWCREHYYSPVAVLEAGEECIRQAWYASELAKPGEKEVWIPTLVELAQKVMAVYGNPCPYVDFTALQAEAALKQKWLGELQMDRDHLRKQVIFPLYHQLHPSGNLESLYGVGEESAAVFLSFIGDPLRFPSGRQMRGWSGMIPDSRQSSGSESKGLRISQAGPNLIKKFAFLDADVARRYDPQLAALYYDQMVNRGKHHTQAVCTVATHLLDRVWVVVAKDKPYELRDVDGRPVTPEQARQIIAEKYTVPEEVRKRNNRKARRERIERHAERSFSHEERVRESLPDLVRG

SEQ ID NO: 497784 - protein, 371 aa, unidentified
MRFYQGQHRFYCGIDLHARSMHVCVIDQAGNLVFDKKLASRPEVLLRALEPFRDGLVIGVECMFAWYWVADFCVTHDIAFVLGHALYLKAIHGGKAKNDRIDATKLARLLRGGTFPTAYAYPRGMRETRDLLRRRTYLVRQRAQLLTHLQILNAQYNLAPFPQRLCYAANRAEMQVAERFADASVQRSAAANLAVIDRLDEVIADVERYLRRTAQVDGVQTYHRLQTIPGVGKLLALILLYEMHQVQRFASAGQFLSYARLVRCVHESAGKKLGTGGRKIGNAHLRWAFAEAACLLVQHSERAKRWKQRQGAQRGNGKALAILAARLARAVYHMLRKGEAFDEDRFWAGRPRPSATGSSSLSRPEVEHARA

SEQ ID NO: 497785 - protein, 466 aa, unidentified
MENNYILYVGMDVSKGKADAAILKVSDRRSVKPKFLRKKLSFKFVKSEVASFLETVRSYSDVNCTSICFALEVTGIYSTNVYNFIKDNLNDNESIKFLNTDFVNQWRNAHNIAKSDPLDAQTISTIIGTDSDVQYVNDNVFENKNGYQDLKALVHRHYQIKKIYSQEINRLIAQCDCLFPELQYVFEPKSAAFIAVLSSYPTTHDIINASRVEVFDIVYEATKHRCSMDKVDKLFELCQDTLVPDDISSYGKSIILDLVENIKNIKGQLKSIERYIKDIASLNPAYKLLLTITGCGPITAATVIAETGNIRRFKNADCFVSYSGTSPRNKRSGTSVETMGKISKKGSRYLRHAIYIIAEFARRHNPVLKHQFERIKNGNKKRHKLANIAIANKIARYIYSIMKNESSFVILHEHIMRLPEETQNTFFNSISLDFPKNTRKQIYQYSDINGEVHKFVYTKLEETMII

SEQ ID NO: 497786 - protein, 345 aa, unidentified
MSKFSGIDLHSNNSVVVVSDDADRVVYQRRLPNDPEQIRPALAPHREDLVGVVIEATYNWYWLVDQLMNDGYRVHLANPAAIRQYEGLKYSGDFTDAAHLAQLLRLGLLPEGYIYPAEERPVRDLARKRIQLVQCRTAQILAIENLFSRHTGGQMQGERVKRLDEMQVNGFGFAADVTVAMQANLAVMQTLQEEIGIIEKRLMERVKLRPDYALLNTVPGIGPVLATTIMLETGTISRFTKVGNFSSYCRCVDSRRESNSRKKGEGNTKNGNKYLAWAFVEAANFAIRSCPEARRFYERKKRARNGIVAIKALAHKLARACYHMLREHKPFEALLKFEWVMQRAD

SEQ ID NO: 497787 - protein, 274 aa, unidentified
MEYVGIDVHKKQSQICTCTEAGEILHQRIETQRERFAAVFGARPQVRILIEASTESAWVAQCLEARGHEVIVADPNDAPMYAQRSRRVKTDRRDAEALAHACRLGAYHPAHRTSERQRHVRAVLAVREALVRSRTRWISVVRALLRQHGYRLRSGAAESFLSRVTALALSADLQAAIAPLLRAMHSVNEQLATLEQRTETMAQGDEVVERLRTAPGVGPLTALAFVATLDEVERFDNAHQVESYLGLVPREWSAGEQQQRGKITKQGSGRLRAV

SEQ ID NO: 497788 - protein, 411 aa, unidentified
MYYVGIDIAKSFHVVSIIDDNETKVINKPFRINNDSKGFDKLVTILDSVTLDKDDFLIGLEATGIYGENLLEFIKSKGYNVKLLNPFQTSRYREQITMKKVKNDNIDSLVIALFLKDGKYSSGYVTDDEYQSLRTLYRNRTSIQSDMKEIKKRILTQITVTFPEFESFTNPFTISGLALLDKYPTAHHYKHSSVDRIMKLFSHIHGNNFNKDKALRLLELSRESIYSGKAKDARAIAIRSSIRLLKMYQAELSVIEEEISSLLDKKGINQQTLDELPTKNSLIDNLKTIPGVSEKTIAAVISECGDLTRFPSIPKFIGYLGLFPTENSSGNSKSIGHLSKRGSSLVKHALYMSATSCLIHNKQMKQLYDTKRSQGKSKKEGLIAVSRKLATIIYSIFKYNTPYDPNRVFTN

SEQ ID NO: 497789 - protein, 420 aa, unidentified
MEVVHERCAGLDVHKKTVVACVLRPGPGGSVQRETRTFSTMLGALEALAAWLTEAEVTHIALEATGVYWKPLYNVLEGVGRWTILVVNPEHVKAISGRKTDRADAERLAFLVRHDLLQGSFIPERNQRELRELTRARTALVRERARVVQRLEKVLEGANIKLGAVVSDLLGVSGQRMLEAALQGVSDPDELAALAHPRLQPKRDLLVASLQGRLTRPLRFLAQQHLDHWRELDTRIAAFDDEIAEQLRPFDELLARLDAIPGVGRRTAEVIATEIGTDVSAFPSDRHLAAWAGVSPGNRQSGGRRKTARTRHGNPWLKGALTEAAWAASRCRHGYLPAQYRRLAGRRGRKRALVAVAHSLVTIIYHLIAEGTQYQDLGTHYFDERERANRERRALAILHGLGYDVSLTPHPSTDAALGVA

SEQ ID NO: 497790 - protein, 400 aa, unidentified
MNAVGIDVSKGKSTVAVIQPFGVVIAEPFDVLHTDSDLKKLVSFIKSLSGETKVVMEYTGTYYEPIADALHNAGIFVSVVNPLLIDDYDTNRVRKVKTDRIDALKIASFALDKWVKLCEYTPAETVRKTLKMMNRQCIKLNKILVMQKNSFIALLDCCFPNANTLFTSPRRESDGHEKWVDFVLKFPHADSVAKLPLSAFKTKYQSWCKKERYKYSESRTEEIHAYARTLVCTLPMTEAVKKMITDSAKLLNSTLEALANLHNEMDSLASQLPEYETVMSLYGVGKVICSQLIAEIGDVTKMKSGKSLVAMAGIDPPPNQSGKDDPKSRSISKRGSLALRKTLFLIMTIYLQRQPVDEPVYQFLDQKRIEGKPYKVYMIAAAHKFLRIYYARVKEVMPMQ

SEQ ID NO: 497791 - protein, 416 aa, unidentified
MKKGQDTRGYERYLALDIHREYLLVGAWNEEKDWVLTPRRVSTEKFPEWAKKNIRQGDIVVLETTTNVWATYDIVASLASRVLVANASEVGEIAGARVKTDKEDVKRLLKLLIGGIVPEVWVPPTDVRELRAFSSYRSRLVKTSSMIRNRLQSLLHKHNRMLSEAGLLDQAWWEAQESISTLEKMQIRQELTLLEEVEKHKAAVDEELQRQSTSSTWRKPALQIMQLPGVGFVVAMTVLAAIGDISRFESAKQLVGYAGIGAGVHDSGKTHKEKKITKKGRRELRWAMVEAAWRAVRMSPFWKAEFEKHLQRMRKPNQAIVVIARKLLIAIWHVLSKAETDIHASEEDLAYKMLLLSWSLKEETRRGLTYKQFAKYALMKLGVETDITRFVRKNVPRRLAPREEVLARMTELGLSA

SEQ ID NO: 497792 - protein, 408 aa, unidentified
MNPLFVGIDVSSKNNVAYLMKPDGSKHSSFSVQNNLGGAKLLSERIVSALSSMRLSDVVIGLEATSIYGDSLVYALREDGRLGRFQRKIHVLNPKQVRKFKEAYSDLPKNDWVDAFVIADHLRFGRIAKEVYMDDYRYQALRTLTRARFDVIQNLTREKQRFANYLFLKCSGMAQDKGIQNTSATTIALMERFETVDNLANADLDDLTAFVAETGRGRFADPESTAKAVQAAARGSYRLPKTVNDTVNQAMSVSMASMRALKEQVKVLDKAIEQQFEIIPNTLTSIPGVGKVYSAGIIAEIGDIHRFASQASVAKFAGLVWTQHQSGEFEAEHSRMIKSGNRYLRYYLLEAANSVRRCDSEFRRYYDLKFKEVNKYQHKRALALTARKLVRLVFRLLKDNRLYIPPEG

SEQ ID NO: 497793 - protein, 383 aa, unidentified
MKKNSIAKLQANKSQIRKMAAKQKLTVGLDLGDRTSRYCILDGAGNKVGEDHLPTTKVGLDSLFAKMAPSRIALEVGMHSPWVSRQLAALGHEAIVANPRKVRLITQSVKKNDRMDAEHLARLARVDPQLLAPIRHRGVEAQADLAVIRARAELVEARTKLINAARGLAKPMGERLKSCDADYVKESLADGLGEATQNVIRPLLKSVEDISQQIGVYDKKIREVEKRYAETELLKQVHGVGTLIALTYVLTLEDAERFEHSREVGPYLGLTRKQRDSGDRQPELGISKAGDELLRRLLVQAAHCILRDGAPDSDLKVWGMTKVQTGAKTGNGKKGSKRRKKKAAVAVARKLAVLLHKLWVTGEVYDPQYNRKAVEAGKGKAAA

SEQ ID NO: 497794 - protein, 349 aa, unidentified
MTIVEDRPVITGGVDTHADLHVAAALDPLGGLLGVQEFPATATGYAQLLGWLGGFGGIALVGVEGTGSYGAGLARHLAAAGVRVVEVDRADRQDRHRQGKSDPLDAVSAARAAQSGRASGAPKGRDGAVEAIRALMVAKRSARAGRTQAINQARALIVTGPDELRARFAGHRPAQLVEAIAALRPRPGDVPGYATRVALRELGRRAQFLDAQLDRLDEVIGPLVTGRAPGLLRLHGVGPDTAALLLIAAGDHPERLRSESSWAHLCGVAPIPASSGKVSRNRLNRGGDRQANHALWRIVITRLGSRPGHPATRAYVERRTKEGLSKKEIIRCLKRYVAREVYHQLRGGA

SEQ ID NO: 497795 - protein, 351 aa, unidentified
MSLVVLGVDPHKQSHTATALAAGSHQQLGSLRVPASTTGYEQLLGWARQFPRRRWAIENARGLGCHLTQWLLARGEIVQDVRTTATARVRELSRGRGRKTDALDAAAAAGIAALQGDTEQLQPDDTTVVLAVLEERRSNLVGQRTRSVNQLHAVLRELIAGGAPRKLSADKAAALLRAVRPLTAADRARKQVAWDLVAEIRGLDRQLAVINKRLQDSVTALGSRLPETVGVGPVIAGRLLGRTGRASRFPTAAHFASYTGAAPLEVASGEHTRHRLSRAGDRQLNHALHLIALVQVRSPSCPGYHYFRRKLTEGKSTREAMRCLKRRIADHVWRVMLADEQARDRHQLQAS

SEQ ID NO: 497796 - protein, 317 aa, unidentified
MEQRQTNTRIAGIDVGKSKLDGAVHGLEDAVEVGNAPAGFSELIGWLTAREVGRVGLEATGGYERGVRLALEAEGFEVVVHQPIEVRRFAQMKRWRAKTDRLDARLIAAATVQVEAVRAVQDPRLQDLAERLTAYEQITDQAAQLKTFLEHVTLTDLVKAVRAQIRVMIALKVKLAAEILRQIKAHDDLAARYRLLLSLPGFGPIVAATHVIRMPELGQMRRGQAAALIGVAPFARDSGQYKGQRFIRGGRSRPRRMLYLAALSAKRWDPSLRAFADQLIARGKPAKLAIVAVMRKLVEAANLVLSRGQPWLRTATA

SEQ ID NO: 497797 - protein, 389 aa, unidentified
MPSVSERPEAPTAIQTHLAASFVSLELSRSIWLITSLSPASGEKMSKHSVRAGDVAALLARFSELKRKASERTGKSFPIVVIQEAGLDGFWLHRVLQSEGVESHVVDPSSIATSRRRRRAKTDRIDGEALLRALLAYKRGEPRVCAMVKAPRPEEEDRRRLCRERKVLIAERVKHVNRVKGLLFSQGISGYEPLRRDRRQRLDELTTGDGRPLPVHLKTQIRRELDRLELLLDQIKEAEAERDALLAGPLPAAPTPAGRMLLEFKGIGAELAAVLWLEALFRHFDNRRQLASYAGLAPTPWQSGSVDHEQGVSKAGNPRLRTSLIQLAWLWLRHQPQSALTLWFKERVSGNGGRFKKSTIVALARKLLVALWKYVTAGVVIDGAVMKDA

SEQ ID NO: 497798 - protein, 338 aa, unidentified
MKKIITVGIDLAKNVFAVHAVDAEGKVVWVKPTVKRTQLLELIANLAPCVIGMEACSGAHHWARQFMAFGHTVKLIAPKFVVPYRMSGKRGKNDAQDAAAICEAVTRPQMRFVPIKTMEAQANLSIHRVRQGFIEERTALINRIRGLLAEFGMILPQRAEAVRQGTGQFLEDLPGFANRVVGDLLSHLTILDQRIDEYDGLIKQSAQADTRSVRLMEIPGIGPTTASALLASIGNGRDFKNGRQLAAWLGLVPGQYSSGGKAKLGKITKAGDRYLRTLLILGARSVLAVAAKRTDRVSQWALALQTRIGYGKALVAIAAKNARMIWAVLAKDEAFKAA

SEQ ID NO: 497799 - protein, 417 aa, unidentified
MTQPFKYLAGIDWASDSYEVCVVDANGSVLGKKHVEHSGDGIRQCIDWLLQMAGGDASSIAVAIEVPHGAMVESLIENNLTVFAINPKQMDRFRDRYTVAGAKDDDLDAFVMADSLRTDQPCFHRVELDEPAIIRLRELSRMEQDLQKDSNRLANQLWEQLRRYYPQMLKLSPAADEVWLWDLLESAPLPGGTLKLAKVKAILRAHRIRRVTAEQVLEQLRQPALRLAPGAAEAASEHVQMLLPRLRLLQQQREATARRIRQILDELCTAQPEGQGREHRDAEILLSLPGIGPVVAATMLAEASQPLIDRDYQALRNYAGAAPVTRRSGKRKVIVMRYACNEPLRNALYHWSRCSMQKDARAKQHYAELRQRGHSHGRALRGLADRNLAMLMSMLKSGTLYDPARRGSAALAEAQAS

SEQ ID NO: 497800 - protein, 337 aa, unidentified
MTLYCGIDLHSNNSVVAVLDEQDRTVYQKRLDNDITTIIEALAGYQPELAACVVESTYNWYWLVDGLMDAGFPVRLAHTSALPEYSGLKYSNDFSDARQLAHLLRLGLLPTGYIYPKKERALRDLLRRRLLLVRQRSLHHVSLQSLIARHSGRRLNTLQIKQLRKVQLADYLQGHALLGGEITHQARCWLETAVRKIEQELQHHIKPREDYQLLQSMPGVGSVLGTTIALETGTIERFASPGNYASYARCVKSEKISNKKYKGQGNKKNGNKYLAWAFMEAGHYGAIWDPRIKRYYQRKQAKSHILVAKKAVANKLARACYHMLKRGEEFDVNRAFS

SEQ ID NO: 497801 - protein, 345 aa, unidentified
MATYYIGADVHSNNTELAVENRHKIMARYSVPTTIPAISTVLNSLQGKKILAMEEGPMAGWLYRNLCESVDELVVCEPRRNKLITCDGDKDDKIDAGKLAVLLRGKFLKTVHHTNDNKRAYLKHWVNLYHDRVRDAVRYINKIRACCRMHGVATPRKVIHNNANLNDWLSSINNSVLQAQLQMLWIGYEATKEQVVMAREQLNSLARKYPTIKHWCRLPGIGLIRAATIFAYLDTPWRFKKKSKLRKYCGVGLERTASGTDKKGRIKPARLRLPRMVNRRLKDAVLGAATSAINRHKHNGFKKYYERMLSNGVTPANARHSVARKMISVMSGMWKTDSKYDPKML

SEQ ID NO: 497802 - protein, 366 aa, unidentified
MSKHIMVGMDVHDENILIKYAVDRQEPEVRSFKNSKGGREHMIRNLKKHALDEGGAKAVFAYEASQLGFGLYDELTDAGFEGYVLAPTKLSHSPKRRKQKTDEADAEEILEIIRGHILAGNKMPKIWIPDHQTRNDRELVRMRLTVGEKITSTKAQVKCLLKRNKLHKPGNTGRGWTKKYRDWLEVLTSDDSDLPLGVKAALRSLLRQLKMLEQEVRFLENDILALSKTPRYAEPVKELIKIKGVGLLTSMVFLTELGDLRRFPNRQCLASYLGLIPSCHESGENNDRKGHITHQGPARVRKMLCQTGWTIARCNPNEKIVYRRIVDKNPQHKKIGLVALMRRTSIKMWHRGLEAQLRANCFQDAV

SEQ ID NO: 497803 - protein, 390 aa, unidentified
MPLDHHSEEPTAIRTNLGAIFVSLELSRSTWLITSLSPGGGEKMSKHSVSAGDIAALLSRFSELKQKAFARMGQSFPIIVIQETGLDGFWIHRVLQSEGIESYVVDAASIATSRRRRRAKTDRIDGEALVRALLAYKRGEPRVCAMVRAPTPENEDRRRLCRERKTLTVERVQHVNRIKGLLFSQGVSGYEPLRRNRRQRLDELKTGDGRPLPPRLKGQIGRELDRLELLLGQIKAVEAERDALLTPATETEGMPGPQAMLIDLRGIGAEFAAVVWSEGLCRSFANRRQVAAYGGLAPTPWQSGSVAREQGVSKAGNPRLRTTMIQLAWLWLRHQPNSALAQWFKERVKRNGGRLRKTTIVALARKLLVALWKYVTAGVVVEGAVMKAVS

SEQ ID NO: 497804 - protein, 400 aa, unidentified
MLSIGIDVSKGKSTVCGMKPGGEIVYTPFEVQHTREGMSELVSLLRGSGEEVRAVLESTGSYHCPVVAALLENGIFVSVVNSLRMKRFCSQSIRKVKTDRIDAMQIALYGLAYWQELQPTRLPEDTYRELQLLARQYYQMTSLLIKAKVDFNAICDQVLPGMQELMNDHAGRHKLSDFVLRYHHTTHILEMGETRFRKDYCKWAEKKGYRNCERMAALIFATAQNGIPVLPNAPSTQIVITEAIRVLHTVEASRDAILTQMQALAKTLPEYSLVREMPCIGDTLAPRLIAEIGDVRRFHSKRALIAYAGIDAPPYQSGKFCANNRHISKRGNRYLRKTGYEVMQSYVMHKPANDPIFTFIEKKRGEGKSGKLAMVAGLNKFLRVYYGKVTELYRSLPAIE

SEQ ID NO: 497805 - protein, 360 aa, unidentified
MKIMVGIDLHSNNAVCGLMDESGRRLLHKQLPCDLTGILQLLKPYKKRIDTIAVESTYNWYWLVDGLQDHGYHVVLANPAAMQPYSGKKHTDDVSDAYFLAELLRLNLLPTGHLYDRKLRPVRDLLRRRMLLVRQRTTLILSFKSLNERTLGQRVPLARVKAMSPEEAQARFTEPADQLLATEQITLLDHYTDSIAKIEKHILEVAEKSPAYQRLQEMPGIGKILGLTIALETGDAKRFADAGNFASYCRCVKSVRQSNHKKKGENNRKCGNKYLGWAFVEAAHFACRYDERSRCFYDRKKQKTNPIIATKSLACKLAKASWHVMVADVPYDATRVFGPGKKDFGETGREPARRSGHQSQ

SEQ ID NO: 497806 - protein, 344 aa, unidentified
MDITTIGLDLAKSIFQVHGVDANGRVVIRKSLRRAQMLPFFARLPSCLVGMEACGTSHYWARELIKLGHEVRLMPPAYVKPYVKRSKTDAADAEAVCEAVTRPTMRFVPVKSPEQQAALSMHRARDLLVKQRTQLVNMIRGLLAEFGINIPKGLERALLMARRIVDDEAPDVPIEAAKIVGTLSQQALDIHVRLRQIDRDLLVWQRGNDVARRLMTIPGIGPVGATALAASVTDPHQFRSGRQFAAWLGLTPLQKSSGGKERLGRITKMGDKYLRKLLIVGMTSLVRRAKHNPPTIDPRLTNLLVRKPVRVATVAMANKTARIIWAIMTRGETYRASHQPALAA

SEQ ID NO: 497807 - protein, 355 aa, unidentified
MEKAYDGRQVVGMDLHRRRSVLVRITEDGRRLGMARFTNSPEELRAQIARAGKSPKVVLEATYGWYWAADALAAAGAEVHLAHPLGVKAFSYRRVKNDERDAADLADLLRMGRLPEAWIAPPRVRELRELTRYRHKLVGLRTSCKTQVHAVLGKLGIPVGYSDVFGKAGSAWLDELTLPQPYAGKVTSLRQLAGQLTTEIAMLSRVIADLLADHRGYQVIQQLPGIGPVLAAVIIAEIGEVTRFKNAGQLCSWAGLTPRHRESDTKVARGHVTKQGSRLLRWALIEAIQRIPADSVIGSVKAAIVARRGKEARNIAKVAAARRLLTLVYYGMRDGQIRCLTAGQPPVTQPPARAA

SEQ ID NO: 497808 - protein, 360 aa, unidentified
MLVGCDLHEKSLVLQVACGAGVPVLKRFENSRLDRLLMIAWLRARAKEWQVVRIVFAFEASGQGFGLCDELQAAGIECHVLAPSKLPQSRHTRTRKTDPKDALRVLEVLRGHVLGGNELPKVWVPSRELRDDRELVRQRLSLSDDLTRVKIQVQSLLKRNELRRPVEMSSWTLSFWRWLNELAYLDESPLAPGARRTLLSLIRQVHAAEQERERMDLSLEHLAATDRWHAAVTELRKVKGVGLLTALTFLTELGDMNRFRNRRQLGSYLGLAPSSYESGEVSNRKGHITRSGSSRLRKVLCQAVWSHVRYDTDARAAYQRLKAKNPLKVKIAIVAGMRRLGIKLWHVAQAALNAQTAQAV

SEQ ID NO: 497809 - protein, 408 aa, unidentified
MEQIHDRVAGLDVHRDSVTACFRQAGPRGGVVREKDRFATTTIGLRGLAGWLADRGVGLVAMEATGVYWKPVFYALEDQFTLWLCNARNVKKVPGRKTDLSDAEWLADVAAHGMVRPSFVPPPPIRELRELTRYRKTQIDARVSEIQRLEKVLQDAGIKLTSVASKVLTQSGRAMIEALIAGERDGAVLAELAKGKMRPKISELTEALTGHFGDHHAVAAHRILGHLDFLDTTISALSVEIDARTASFESVYNLLLPVPGFERSTIDVIIAETGADMGRFPSAGDLASWAGLCPGNYESAGKRRRVGTTQGNQWLRRALIQAAHAAARTKGSYFGAQYRQIAKRRGPNKAAVAVAHSLIDLIWHLLRTGETFQDLGDDYFRRRHDPERQARRLVSQLEELGFTVTIAA

SEQ ID NO: 497810 - protein, 342 aa, unidentified
MADITIGCDLGDRVSELFVISADGQVSRARVKTTPQGFREGFTGPPAHVIIEVGPHSRWASRLLAELGHTVTVANPRRLKLISANDSKTDRNDAELLARLGRVDKALLAPIEHRGAVAQADLAVAKARDILVESRTRLINCARGMAKSAGALLPRCSAEAFHKKAREHIPEMLRPALDPLFATLEQLDAAIRKHDQEITRLASKYPEVEILSQPVGVGKLTALVFLLTLEDKGRFKSSRQVGAYLGLRPRRDQSGSSDKHLRITKAGDTFLRRLLVSCATYILGPRARDSDLRRWGQELAKRGGKNAMRRARIAVARKLAVLMHRLWVTGEVYEPLRQAAAA

SEQ ID NO: 497811 - protein, 405 aa, unidentified
MQTIVNNCAGIDVHKMMVMVAIRKETAEGNIQTLTREFGTFRKDRELMCQFLQQHQVDLVVMESTGVYWKSIYASIIRCKLNPWVVNARHVKNVPGRKTDTLDSQWLAHLAHCGLVRPSFVPHPDQEQLRLLTRRRDTLVKQMANEKNRLHKILDDSGIRLGGLISDINGKSGQRMVNALIDGESLQDIIKKADSRLKADRKQLMASMDEELSPSHRIVLTDIRDHIDFLSKQQDKLEKQILKSIEPWKEAWQILQTLPGVSEMSAATLIAEIGDDMSKFGGMKEIASWAGLCPGNNESAGKCKSGRTRKGNKMIKTILCEVANAAIKTKSQFKGKYQSLVIRRGHKRSLVAIAHKLIRVIYTLLKRRQPYIDPDTDYEGLMVRKNASRWLNKLVDYGYLAQAQQ

SEQ ID NO: 497812 - protein, 416 aa, unidentified
MEVLLWKEFYDKCCGIDVHKKLIVACFKKGNKQELREFGATTRELMELAGWLKSGGCEMIAMESTASYWKPLYNILEASELSAMVVNAHHMKAVPGRKTDVKDAEWIADLLQHGLLKASYIPGKDQRELRELVRYRKSLVGERTRELNRLQKMLEGANIKLSGTVSDINGKSARSILEYLLTGESIDSEKYDEMYEKKVIAHNLKTSKEQIIDDLNGIMTPLQRRMMKELLAHLDELNIHIKNLDDEIDDFMKPEEKQAVKDIQDIIGIGNSSAQAIVSVIGADMERFPTDRHLASWAGLCPGDHESAEKRKYGKTRKGNALLRSTLVICAHSAVKNKKSYFYAQFMRISAHRGKKRAYVAVAHSMLIAIYHILKEGVAFKDLGAGYYNQFNKERKINAYLRKLKALGWEAPAVAA

SEQ ID NO: 497813 - protein, 428 aa, unidentified
MSGKETVQAEPEFVAFVGIDWADQKHVWCLQAANSAQQEDGELEHKPEVVEAWVSELCRRFGHGPIAVAVEQVKGALVYMLRKYECLHLYQVPSTMSASMREALYPSGAKDDPRDADMLLELLVLHRDKLRRLTPDNEATRRVQNLVEERRKLVEEKTAQLNRLTGYLKVYFPQMLEWFAKLDSKLVCDFLERWPSLEELQKVPSAELKKFFRHRRGRHGELTEWRMQGIGQATPAIRDRAVIEAKQTVVQVIAQLLRTLLEGIATLERKIAEAAEVHPDFFIFQSLPGAGAALAPRLLAAFGSQRDRYSSAEEVQKYSGIAPVTERSGKKKWVHFRWACSKFLRQSFHEWAGHSIAQSVWARAYYQRQRERGKEHHAAVRALAFKWIRIVFRCWQDRVAYDETRYLAVLTKRGSHLTSAFVDVAVSM

SEQ ID NO: 497814 - protein, 417 aa, unidentified
MTVNSLVQRRSAIKPDTLIVGIDVAKFKHVARTLVPTGVIGRPFEFPNSREGFVALSAEIEARKPTSASAVIVGLESTGIYWINLARWLAEQGYQVVQVSGLYVHHAKELADNSRGTSDGKDALLIADLVAQGKYLGFVRPAGILADLRQLVGLRQRLVRERAARYNLLHQSVDLLFPEFPTVFKDVTGSGARRVLRRFPTPAAALVNPPDEMRRLLSEDGRVQAGVAKLARLQVAAQQSIGTYEGTAGLSYALNDTLLELDSLDTRVKQVEAEIDRLLAQVDETPILTSLVGRMTAAVILGETGGLRQYSCAAAVLKLAGLNLYQISSGQYCGDRHISQMGRPLLREALYLAVLQHTHPGMPLYPYYAELLRRGKPKPVALVALCCRLVRLLYALVRDGRCYSPRPPDKSQQTQAA

SEQ ID NO: 497815 - protein, 397 aa, unidentified
MIAVGIDVSKSKSTVAILNGDGSIRAKPFDVHHVADELQALVDYIKRTSEPPTILMEPTSHYHYPLLKAFTEAELPVCLINPYQMKKYGDTKLRKAKTDKRDSLRIAQYALEKSYSLIPYTPQDQKYEDLRFLSRQYSQRISTLTVAKVQLLSLLDETMPGITTILPLKSRDPDNCVLLRFIKRFKSFDVIRKMGKTRFLDSYQVLVKKTKDRFAGSKGLAIYELVLNSVTTRGENPLSAMTQDQCVDLVSTSQKAADEINLQMRIIAETMPEYKVLRSMAGVGDRLGPIILGEIGDIRRFHSGKALNAYAGNDAPPYQSGQFESRNRHISKRGNPALRKACFEVMQALKLTKPQDDPVYLFLLKKEQEGKPYNVAKMAAVNKFLRIYYARAMELYK

SEQ ID NO: 497816 - protein, 345 aa, unidentified
MTNQPCFAALDVSLEKTTICVMSLDGTVLREAVVTTDPNAIATCLAVAQERLERIGLEAGPLSEWLVRGLADHGITAVLMETRQVRAALSAIIVKTDRKDARGMAHLLRMGWFRPVHVKTMDAREQRTMLSARSTLMARLKAIENSVRGLLRGFGLRLPLRLRGRWDAGVREAVAGHPSLLQILDPLLTARRVLREQLILLDKRVRDAARNDQVCRRLMTTPGVGAIVAMTFRAAIDQPERFRSSKKVGACFGLTPRKYQSGETDRDGAISRAGDASVRVALFEAAHVIMTRVASWSTLKAWAMNVARRRGAKRAKVALARKLGVVLHAMWIKETDFRFTRPTSV

SEQ ID NO: 497817 - protein, 369 aa, unidentified
MEQHTEVFVGIDVAKTRNAIAIADGERGGEVRFLGEVDASKENMRRVIQRIASKYGRTHFCYEAGPTGYGLHRLISSMGHDCMVVAPSMIPRKPGDRVKTNRRDAVALAKLHRAGELTPVWVPDDGHEAIRDLVRARAAAVETVRVHKQQVSSFMLKHGRVFPRKTTWGARHMRWLQEQHFDYPAHQIVLQEAIEAVRLARERVERLEKIIDEFVPHWSLAPVVEALQVLRGVNLIIAVTFVAEIGDLRRFENPRQLMGYLGLVPSERSTGDTIRRGSITKAGNGRVRHLLVESAWTYRHAPRIGKAKLYKLERVPPKIREIAWKAQTRLTARYRGMIARGKKTTVVCTAIARELVGFMWSVAREAQTT

SEQ ID NO: 497818 - protein, 361 aa, unidentified
MPSIALARTDAIIGVDTHKDQHVAVAVDGLGGRLAERFVPATTAGYGQLQSWAADQGRVVAFGIEGTGSYGIGLTRFLRRNGHTVHEVHRPPRKAERRLLGKSDTVDAEHAARQVLAGTATAVPKLGDGDIETLRLVKLARDTAVKAHSQAMITLKATLVTANDELRADLEPLTDFKLITACAAFPPAVDLADADTAMRHVLGSLARRWLALHDEIKVHSRHLKARTKKVAPRLIAAFGIGPDIAAELLVAAGDNTDRIRSEAAYAKLCGSCPIPASSGKTNRHRLNRGGNRQANSALFRCVIVRMRWHEPTIAYVQRRTAEGLSKREIIRCLKRYLAREVYKLLPAPTDAAPTPESTCDL

SEQ ID NO: 497819 - protein, 375 aa, unidentified
MTAMTRSSVSVPEVLLYVAFELGKKDWKLAMTSGFGVKPVLKTVPSGDWSAVERALTLGRQRLGLSAAAPVISCYEAGRDGFWIHRALTARGVSNRVVDSASIEVNRRARRTKTDRIDAVKLVTMLVRAAAGERTVWREVRVPTAADEATRHRSRERQTLVRERTRLINQMRSWLATWGTALPPHATGEWWTTVRDWAGAPVPPEVQARIARAAARLRLLAEQIATLQVAQRTTVRAAAAETPVARLRRVKGLAATTISVLLDEGLVWRAFANRRQVGGMLGFAPAVYASGTQEHQLGISRAGNTRLQSVMTQLAWRWVRWQPSSALTLAYQRRCGDSARARKVGIVALARKLLIALWRWAVQQIEPAGAIIAAA

SEQ ID NO: 497820 - protein, 360 aa, unidentified
MKTNTLSHAVKSSTPSTPEVQARIQQLKLGVDWHADHLRVARMCDGQSPQPAQRFTHAAFLEFVRKQLTLADQVLVVYEAGPGGYHLHRQLTALGVFCYVVHPEKLDPRNTGVITDKTDSRELVLKLDRYVNGNARAMSVVRVPTPAEEQRRSLSRQREQLRRERQRLAAQGRSLCLTQGLRLRGDWWKQTLSLPQWLEERLSVWRQLIAAVEAQLETSTQQVEALSPKERPKGLGPLTLGLLIAEMCDWQRFKNRKQVGSYTGLCGGVSSSGPSHCDLSITRTGNARVRWALIELAWRMVLYQPQSKAVQRWRHLLLNPNAAARQKKRALVALARQLAVDLWRWQTGKVTPEQLGWVMV

SEQ ID NO: 497821 - protein, 476 aa, unidentified
MGKRKSKHIQGLKGRRFIESLRGIPLEQVVIVPIDAAKHHPKALICNYFGDILEDSFFFSVNIHGIKLLTEKIQQAIINHNAKRVFIGIEATGHYHEDIVRELEKQGYEVTIINPYTTFEERASALNWSKTDDLDLAAIATAIIQNKGTESKLPLGIHDKLLAACRARRSEVKKRSALQMETRCLMDVIWREFQGIPTVVNGKPQVKPVFSDLWGKASCYFMRHYPLPNQVLALGEKGLRTLSKEQGLQLRSSTIEKLLRAAAGAITKDPADLEIELLQLQMKLDDMKRANEKIEVLEHKIERLLVQTPGVLLLSAPEIGVITAAEFTAEVGPVSQYNNAGQIIKKAGTNSMVSQTGGGEAAYGKISKQGNPHLRTVIYNIGYNLAYGTNLYFKAFAKRLKDNGKRSKQVSIAVGNKFVKVAFAMLRDKSLFQPPTWDDDLLSKDFLVKKIGDDEHRRLALETLNSLLKKNQKIVC

SEQ ID NO: 497822 - protein, 433 aa, unidentified
MQEAEDEPLFADRAAGIDIAKAGIEVTIRVPSDTRRGGRQQETRSFRTTRKELLALADWLRCWQVTKVGMESTGDYWKPVYFLLEAEGLDCVLYHAAQVKALPGRPKTDKLDSVWLAKITERGSLPGSFVPPEEIRRLRTRTRYRRHLTQARTAEKQRAEKLLEDAHLKLSSVISDIHGVSGRAMLEAIAAGERNPKTLAQLARGTMRGKITRLEDALDCAFVTGEHAAVLAMMLGTIDYYTARIDELTAKIKILCQPYEHQIAQLDAVPGTGVITAQDIIAEIGTDMTVFPTAAHLVSWAKWCPQVAQSGGKRKGANATGRGNRYLSGALGEAAVSAGRTQSFPGAKYRRLVKRMPKKKALVATGNSLLTTYHALLSDPEATYTDLGTDYYERRANIRRQARNHLRGLERLGYKVTIEPIDPATGELQAPAS

SEQ ID NO: 497823 - protein, 426 aa, unidentified
MSKTDKTNQKPIAAFVGIDWADQKHDIALRAAGAEAKVEHCSIKSDPEALTDWVLELREGFGNQGKILICLEQSRGALIHFLMGYDCFELYPINPKQLDNYRKAFRPSGAKDDPTDAQLLGEFVRLHYQQLHPWRADDEHTRKLALLCEKRRQAVDSRSALSNQLKSELKQYYPLALAVVDNDLTTVLAADFLLQWPNFESLKKASVHKLRRFFYGHQCRSEQKIQERIQLIQAAQALTKDRAIIEASTLTAQMFAQQLKALAPYIRLYEEQIAELFSQHPDSGLFNNLPGAGDNLAPRLLSAFGSDRERFTSPLQVLTFFGIAPVTQRSGKSTWTHFRWACPKFLRQAFHEFANHSVRFCDWARAFYDYQRARGKKHHAAVRALAYKWIRILFRCWKTRQPYDPQLYLTALARRGSPFAPVNNSP

SEQ ID NO: 497824 - protein, 344 aa, unidentified
MNYHTALDVSLRSVSICIVDDQGTIQFEAKVPSEVNEIVACLRRFSQEISSVGFEAGALTQYLTYGFQAAGYEVICLEARQVSAALSAMRNKTDKNDARGIAQILRTGWYSRVHVKSMESHLIRALLSGRKTILKKCVDLENEIRGLIRLLGIKLPAPLKHGAYDAFVRQAVEEHVCMASTLIPLLDARLVLYKTFLKLDNQVKALVREDTICQRLMTVPGVGAITALTFKVGVDDPRRFKSSRTVAAHFGLTPRRFQSGEVDNPGRISRAGDPDVRSALYLAAHALVTRSEEWSSLKVWGIRLIKTKGRKRAVIAVARKLAVILHRMWLDGTDFRYGSTEVIN

SEQ ID NO: 497825 - protein, 387 aa, unidentified
MPQPNDLSRSPIALNQDGTLIAIIEMSQASWLVAGIVPGSARHPLKKLAADAAALLGLLERWRGEATQAGRQITRVAVAFEAGRDGFWLARWLRARGIEAYVIHPTSVAVSREHRRAKTDRLDTALLKRVFLGWLRGEPGHCTMAAIPTLEEEDARRPNRERESLVGERTRIVNRIKANLARLGIRGFKPTVRGASERLEALRTPEGAALPPNTQAELRRDMARLGFIVGQIKEIEEARQKGLATQPDQGPPAMVRLLARVIGIGLETADMLVHEILSRNLRDRRAVARYAGLTGSPDESGSRRREKGLARAGNARVRRGMVQLAWRFLLFQKDSALAQWYRARTADARGGTRKTMIVALARKLLIALWRFVSTGEAPEGVVLRPAS

SEQ ID NO: 497826 - protein, 403 aa, unidentified
MNSVGIDISKGRSTIAVMRPFGEVVISPFEVRHTGSELSKLARQLKSLDGETRVVMEATGNYHASVAKLLHNAGLYVSVINAKLVHGYGNNELRRVKTDRKDAVKLADYGLDRWLTLPRYIPEEDTRLLLKNCYRQYRQYSKVQTVLKNNLISLLDTVFPNANRLFSSPIRGDGSEKWVDFVAEFWHCRCVSEKSERAFTSKYLRWCRKHGYNFREAKAHTIYAEASGHIGVMPKSETTKLLVKQAVSQLRATSTALAALKHEMQSLASQLPEYPVVMDLFGVGPTLGPQLIAEIGDVRRFYSKKALVAYAGLDAPPNDSGDVTGRHKSMSKIGASSLRRTLFLVMSVYLQTAPLDEPVYQFMDRKRAEGKPYRVYMMASANKFLRIYYATVKAYLESLEHTA

SEQ ID NO: 497827 - protein, 341 aa, unidentified
MGMFAGLDVGGKRTAVCVVDEVGKIVFRGIVDTHPEMLAAALKRFDGKLAKVGLESGPFTPHLFRSLAAMGYPMVCMDARRAADAIKSRRIKSDKADAFALAEMLRTGWFSPVHVKSIDSHKIKTLLGARDQLVKVKRALGNQVRGLLRPFGIRLPSRVGAKKFAEAAYQATRNDPLMHASINALLEALASIDAQVAKLDDGLKELARRNEIAWRLMSVPGVGPVTALAFIAAIENVERFRRTRDIGAYLGLTERRYQSADTDVKMGISKQGDAMARHYLYEAANVLLTTVKKRFALRSWGLKLIRKLGPKRARVAVARKLAVLMGRMWKEGAHFEAAAAA

SEQ ID NO: 497828 - protein, 343 aa, unidentified
MKITTIGLDIAKSVFQAHGIDKDGTVVLMKRMHRKQMLPFFSKLPSCLIGIEACATAHHWARTLVSLGHEVKLMPPTYVRAYVKRGKNDAADAEAICEAVLRPNMRFVPVKSPDQQSILMVHRTRSLVVRQRTMAANAMRAHLAEFGLAANPGVRNLMKLIRKTFDEIEPDKQLPEMARTALAVLARRLCELEEELKALDRTLLDWHCQNAASQRLAAVPGIGVITATAIVATVSDPGGFRSGRQFAAWLGLVPKQNSSGNKLRLGGISKQGDRYLRRLLVVGATAVIRHSKNKNTPLANWLRGLLEKKPVRLVSVALANKTARIAWALLAHDRTYHPYHRIV

SEQ ID NO: 497829 - protein, 479 aa, unidentified
MDAPWGVRAFERQYREWLTSRRLRHNGGFDMEDENNWLVGVDWASQTHHVRLSDAKGAKIGERAFAHGGEGLKEMADWILKSTGAAPETVMVAIEVPHGPVVESLMERGFQVYTINPKQLDRFRDRFSPAGAKDDSRDAEALADARRTDRRCFRLLAPLDPVVVELREWSRIADDLRVERNRLSNRVRELLWRYYPQFLELSDDFAADWFLDLWRLIPTPDKAKRVRETTVERLLKRHRIRRITAAEALERLRAPSIPVAAGTVSAATGHLEAVARRLALVNRQISEANCKIDRLTASLAGGEEPAEGQREEQRDLTILRSLPGVGRIVLATLLAEAQDALQRRDYHALRCLSGVAPITKRSGKSKIVLMRQAAHVRLRNAVYHWARTAVQHDPRSRAKYTALRARGHGHGRALRSVADRLLAVACAMLESRTFFNPNLSIEITSHSARWDFTNGSIRISYARGPHIQHSRGCGEDRAG

SEQ ID NO: 497830 - protein, 352 aa, unidentified
MTVTNLPRSVTGGVDTHLDVHVAAALDERGTLLGVESFATTEHGYKKLLSWLSDFGPIELVGVEGTGSYGAGLTRHLQAEHVRVVEVDRPNRQRRRLKGKSDPQDAISAARAALSGDACGDAKTRDGNVESMRVLRVARASARKGRTQALNQMRNLVSTAPDPIRAELRGLSVFNLLERASAYRPRDKRDIVSLTKLSLRMLARRALTLEEEISEIDAILKPLVKETAPELVATLGVGTDAASALLVAAGDNPERLRNEAAFAHLCGASPLDASSGKNQRHRLNRSGDRQANSALWHIVLTRMVYDPRTNEYIDRRKREGLTKKEAVRCLKRYVAREVFNLLPHDKLGLDSP

SEQ ID NO: 497831 - protein, 326 aa, unidentified
MVLGIDVSKATLDAALLLDPGAAKARHKVFPNTPQGHGQLLLWLQEQGTAPVHATLEATGTYGEAVAVALHEAGHRVSLVNPALVRAFGLSQLKRTKTDKADAILIARFGAMHQPAAWTPPAPELRELQSLVRRVEALEEMKQMEENRLESGAWCETVRASLLDHIKYLHSQIEAARRQIQDHIEAHPALKEQSRLLQSIPGIGQVTAAVLLSEIGDFSHFQSARQVAAFAGLVPRIRESGSSVRGKPRLSKVGSPRLRKCLYFPAMTALRWNPLIKALGLRLSAQGKPKMLILGAAMRKLLHLAYGVLKSGKVFDVNFNAQTCAV

SEQ ID NO: 497832 - protein, 357 aa, unidentified
MKYIGCDFHPSFQVIAMLDKETGELVERRLLHTEEARAFYEGLKGPVVVGIEASGNTHWFESLLARCQHELWIGDAAAIARQEGRKQKHDRRAAALILKLMVENRFPQIWVPTVAERDLRQLLIHRQHLVRMRTRVKNQLQHIALNQGWQKKRKLWSKTGLQLLSSLKLEPWTGQRRDTLLEMLAELEAKIGPLDQAVEKEAQAGAAARRLATHPGVGPVISLATVLTMGDVQRFADSRSWVSYLGLNPSEQSSGQRRRLGSISKQGNPFLRYLLVEGASSAARGDKSLARMYARLKAKKHHGVAKVAVARKLAVRLYWMARTEKSYPEVVRTQGSQSHPVAAAMADLLNRPPASHQ

SEQ ID NO: 497833 - protein, 339 aa, unidentified
MKITTIGLDIAKKFFQLHWVDMTTGEVHRKQLKREQMAEFFANCEPSVVAMEACGSAHYWARKLGGFGHEVRLVAAQFVRPFVKTNKTDAADARAIWEAAQRPEMKFVAIKTEAQQSVLTLHRLREQMVKLRTMQTNQLRGLLYEFGVVLPPGRAKGMPAAIEALCELEDRMPAMMIDALRQQMVRIQKFSEDIADIEKKLTLWKKEERSAAKIMEIPGVGILTATAAVATMGDAGAFKNGREFAAFLGLVPKQSGTGGRVRMQGISKRGNVYLRTLLIHGARARINFQKQRDPWIEQLLARRPFNTVVVALANKMARTIWALMAHGREYQKNYATSIA

SEQ ID NO: 497834 - protein, 431 aa, unidentified
MLGGNQEKLMSQNQPEIQYAAFVSIDWADQKHVWSLQEANSSTREHGEVGHMPEAIEAWIAQMSQRFVGRQIAVAVEQSRGALVFMLSKYEQLHIFPVPPAMTANLRKAFYSSGAKTDPADTDLLQDVLQMHREKLRRLSPDTEATRLIQNLVEERRKLVDEKTAQSNRLEAHLKIYFPQIPQWFGDVDSPLVCALLVRWSALEALQKARPDTLRSFFRKHQCRKEELIESRIKAIGEAMPALKDRAVVEAQLAVVKVLVQVIQVLHQGIEDFNRQIQEAAAAHPDFFIFESLPGAGAVMAPRLLAAFGSQRERYRNAAEVQTSSGIAPVTESSGKSSWIHFRFACSKFVRQSFHEWAALSITQSQWARAYYELQCRRGKRHHAAVRALAFKWIRIIFRCWKERVAYDEKVYLAALAQHNSPLLAATKIAL

SEQ ID NO: 497835 - protein, 400 aa, unidentified
MKQERIVAGLDVHKDSVYLCIMRYDEAIIFEKTYGTLTTELRQMRDDMLAHGVSECAMESTAVYWMPVWNELCDHMQLRLANPMFIKQLPGRKSDTKDAQWIAECQLKNLIRKSFVPEPIVQDMRKLNRRIFDLNEDLTYNKNKLDAAMQRCGFRLSNYVSSTGGKSYQAVARAIADGVTDAEILLRKVHGRTINKHGKATILGAVTGNFSATDIQVIKQYLAMMDLLNGQIEECQKSLTDLCEEHFPSQFKRLQTIPGVKERAATAIIAETGADMSAFEKSSNLVGWCGLKPRNDISNRKMKSRKITHGNKYLRQILIEIAWCASRTRNCFFSNFSYVQVTQKHKSKMKIQVAIARKVLVAVWHMLSKGEDFIDIYLKRLEIRARIEAEIQQMESSMGI

SEQ ID NO: 497836 - protein, 355 aa, unidentified
MERYIGMDVHAASCTLAIISEKGRKLKDFPVETNGQALVEAIRMIPGHKHLVFEEGLQSAWLYETLNPHVDDIVVAGITTSRGQKSDKIDAYGLAENLRVGSLDKHVFKAPRQFTRLRELSRSHSMLVSDTVRVQARIKALYRSRGVWVAGVNVYGVRQRQEWQKELPSSIQTRATRLYLYLDFLLEQKKQAESDLLREAKKHPIAKVLETAPGFGPIRSARLVPIVVTPHRFRTKRQFWSYCGLGIVTRSSSDWIQTPDGQWIKARVPQTRGLSLQHNHFLKSIFKGAATTVITQRNKDPIYARYERLLDGGTKPTLAKLSLARMIAATVLRMWKDEKEYDPGRASPIAKKREG

SEQ ID NO: 497837 - protein, 356 aa, unidentified
MIVGAFDVHRRQITYDWVDRATGEARRGRIAPATREVLRSWLGELPAGGGHVAVEGCTGWRFVAEELGAAGLTPHLAEPADTATLRGRKRRAKTDRADARHLRELLEQDRLPESWIPPAHILDLRELVRLRKTLIDQRTQWKQRIHAVLFHHGLPKPPQAVCTQASRAWLAAVWLPPPSRLLVDVGLAEIDTADARLEPISGWLRAYAPRQPGCRALMRQLFGVGPLCAPTILAELGDARRFRDGDAVVRYTGLDVTVYASDGKRSPGHLARQGPEVLRWALFEAAKSSARRTAPSHDYYGKVKDRLTPNRATLSVARKLARHARHVLVELGEEALAPVSPELLPPLLPVPLPEAA

SEQ ID NO: 497838 - protein, 343 aa, unidentified
MQRVTTIGLDIAKSVFQVHGVDCNGQVVIRRQLKRRYVLAFFEKLAPCLIGIEACASSHHWSRQLLALGHDVRLMPPSYVKPYVKRQKNDATDAEAICEAVSRANMRFVPTKTPEQQSGLVLHRTRHLFIRQQTSLINAIRAHCAEFGIVAPVGRQGVEELLNVIADAEDEQIPEIARACLSALGDQLHRIKAQILEFDRMIGAWHRSCEASRRLDEIPGVGPALATALVASIADPRTFRSGRDFSAWIGLVPKQSSSGGKPRLGSISKQGDRYLRGLFTAGALAVIRYAKAHRIGHRPWLTALLARRPTKVAAIALANKIARMAWAMMARGEHYREPVALAA

SEQ ID NO: 497839 - protein, 447 aa, unidentified
MADRVRTQRLEVAHQNAAGIDIGSASHFVAVRPDADDTPVREFQSFTEDLEALAQWLTQCGVDVVAMESTGVYWIPLYELLESRGFTVHLVNALHVKNVSGRKSDVLDCQWLQQLMSYGLLSGAFRPQEEICVLRATSRQRDMLVQYQSKHVQHMQKALTQMNVQLDNVISDIVGETGQKIVRAILAGERDPLTLAKLRNGRIRASEAEIVKSLQGNWREEHLFSLKQAVNLYDSYQTSIGECNAQLARVLGRLAVHDEPAQPPKRGRGGRPAKVEKFDLRTALYRICGVDLTRIDGVDVGTALKMIAEVGPDLSRFKAVKHFASWLGLCPGTKISGGKALSGASKRIANRLALALRMSAVAAGNSHSALGAYYRRLSARLGRAIAIRATAHKLARLIYALITKGEAYLDQGQDYYEEQHQQRVIKNLKKKALAMGFSLTPIEVAAA

SEQ ID NO: 497840 - protein, 364 aa, unidentified
MNKCHLNTELSSLEGTRSEFNRSKAVIKLGIDVHQDFYVVVEQMEGTNPKPAQRFQKQVFLHWAAKLSKSGSKVHAVYEACGFGFGLQRQLTAQGIHCYVVCPQKLDERNKSVKTDGLDAKALCLKLDRFVQGNREALALVRVPTEAEEQKRAIHRQREQLVKARKGLEAQGRSLLVNHGMEPASNWWKGRTFAQLQVPEWMKELLSNSQPILLALEEKIRALTAQLQAAAISKQPRGLGLLSSVVIDREIGSWTRFKNRRQVGSYTGLCPGEYSSGNTRVQSCVTKHGNPRLRAALVETAWRLVRFQPNYKPVLKWRKILAKGALATGAARKKAIVAVARQLAVDLWRIRTGRVAIETLGLIN

SEQ ID NO: 497841 - protein, 441 aa, unidentified
MAMRRRDEEVVFPNSAGIDVGASSHWVAVPRDATEDPVREFGPMTDDLNAMADWLVASGVDTVALESTGVYWIPVFEVLEQRGLKVWLVDARQMKYVPGRKSDIQDCQWLQKLMSLGFLRAAWRPEGDVCVVRAVARQREILLAEQASWVQRMQKSLVQMNIQLTEVLTDVMGTTGQAIIRAIVAGERDPKALAKHRNRRVKASAEEIAKALTGNWRDEHLFVLCQALAMYDDIARHLTECDSKLQALLRALGQCNVDLGKAPRTGSKLRDQFDARQILANWAGVDLTRINGLGLTAVMKILSELGPDLSRFATVKHFCSWLGLCPGTKISGGKVLCAKTKHSANRVRQALKMAAMSLSHSDSALGAFYRRLCSRMDKPRANTAAAHKLARMVYFMLTRGEDFVDQGQQRYEEQQRQRSIAALKRRAAALGFDINPTPAPA

SEQ ID NO: 497842 - protein, 329 aa, unidentified
MSSTVFVGIDVSAVTLVVTTAIGDQKPGVAREYPNDSRGHKRLIKHISALGESAHICLEPTSTYHLDLVFRLAKEPCFTVSVVNPRAVKDYGRSLMRRAKTDVCDSRILTLYCQAHDLPVWQPPRVIDYELRSLSRQIHNLTKRRTALKNQQHSAKRAPVAKRVLQTLAKEIRFIEGLITQLQDEAMKLISSDEEQSEFYQLLISIVGVGQKSAIRILGELMVMARNLEKKQLIAGAGLDPMPRESGTSVKGKRRLSKQGNAHLRGALNIPALVAIQRCAEVQAYYEHLLEKGCAKLSAICAVMRKLLQAIWGMFRTKTAFQPEMFFKG

SEQ ID NO: 497843 - protein, 424 aa, unidentified
MKVTYQTCCGVDVHKSFLVATIVKTTGDIEPSYQKKRFSTFNNSILEFKQWLLDNDCHDVCMESTGKYWVPVFNLLEDDINVVIANPKWVKAVKGNKDDTKDSKWIGDLFRLGLVKGSYIPCKKVRILREYTRYRYKLVSCRSSEKNRYQNALTVWNVALDSVVSDIFGKSSTSIIDYLLEQSGSSINHEEIASKLLRSLKSKEDAVIESVEGYQMTDAQKYRMRLVRAHMDYITAEINDVDKMIENMISSNTDFENAVQFLCTIPGVKRDSAITIISEIGTDMSQFSSSRRLCCWAGLTPGSNESAGKKKSVRFTRAGVYLKPALVQCAHAAVKSDKSPYYKKKYESLVKRRGKKRAIIAIARMILTAIYQMLSTGEQWNPSDLYKIDMPVALVEKQKAKAIKQARKLLQREGLLPPDEPFAS

SEQ ID NO: 497844 - protein, 348 aa, unidentified
MRFYTISHKYFCGIDLHTKMMYVCILDSEANILVHQNIPTNSKAFLALIEPYKEDIVVGVECMFSWYWLADLCAREKIEFILGHALYMRCIHGGKAKSDKIDSEKIARIMRGGDFPLAYAYPAELRPVRDLMRRRSHLVHIKSEIQSHIAITNYQYNLEPFEKNIVHKANRQGIADHFKDASVRLNVETDIAVMDALHDQINHLENYIIKHAKHYDGRMLYRLKTVPGIGDILALTIMYEVLSVERFPTVQKFCSYARLVKCANESAGKKMGFSGSKIGNAHLKWAFSEAAVLFIRGNDQAQKYVAKLTKKFGKGKALSILAHKLGRAIYFMMKRNDVFDMKYFFRTH

SEQ ID NO: 497845 - protein, 465 aa, unidentified
MTPRKGKKFRTSTSIGDLAITHRHAAGIDVHSAVHFVAVPAADVPTGFINPDAKLPPGVRKFAANTADLEAIASWLKACGVTKVAMESTGVYWIPLYDLLASQGFDVILVDPRQTKHAPGRPKSDVLDCQWIRRLHSYGLLTASFRPADEIVQWRGFQRQRDMLVRYAAQHVQHMQKALEEMNVKLTEVVSDIVGQTGMKIIKDIVRGKRDPLTLAKHRHERCKATEAEIARALYGNWRKEHLFALKQAVEMYEFYQRQLRACDQEIEACLRGFGDKSDGAALPSRPKKQKPRRHEPRFGARALMFRMAGVDLTVIEGISETTALVILSEIGTDLSRFPTEKNFVSWLGLCPQHRGSAGKIFNRRVRRGANRAARAMRMAGQGCHHAKNALGAFYRRIQARCGGAKAVVATARKIAERVYRLLKYGQQYVAQAEHAYEQAYRLRTLKAMARKAQTLGYRLVPAKA

SEQ ID NO: 497846 - protein, 341 aa, unidentified
MTVYIGVDLHARQQTLAFVDTSDGEIKCQELHHQKDDAAAFYRQFTGEVIVGVEASGYTTWFEEMIEDCGHTLLVGDAAEIRRFARRRQKNDRRDAELILDLLMHNEFPQLYRYSPESREVLRQLRFRHKLVKLRTIILNSLHALSISAGLSLQAKLATAQGRARLEQLRLSPVLTTQRDEWLTLCDELSKRILAVERWLKRQAKGDTRVQRVQTHAGVGLLTSLCLVHTLGDVTRFAGARKVTAYVGLDVTEHSSAERKVYGGISKAGSRLLRYLLVEAGQTAAKSDEQLRDFYQQVMKRRGKAKAKVAVARKLLVRTFIMLRDEIDYAEFLRRGKRTGE

SEQ ID NO: 497847 - protein, 427 aa, unidentified
MKYKQNFKIMQITDKTLVVGVDIAKKVHFARAFDWRGIEVAKTFSFKANGTGFSRLIEWVRENAKKNGKDKIVVGFEPTGHYWLTFAQAVLEEGMMVVQVNPYHVKTSKELDDNSPSKSDRKDPKTIAMLVKDGRYQIPYIPKGKYAELRKANNLREEWLKKIWAIKNKVQRWLDTYFPEFLDVFSDWEGKAAIMTLERIGLPNKIAAMTANDIVTIWREDVKRAVGVKKAQMLVEAASSSVGIREGLEMAGYEIRLLMREYREVRTIMDEFEVKLEEIVLTISGAEKMLQIKGVGIKTVAGFLAEVGDITRFNHPDQIIKLAGLNLRENSSGNHKGETTITKRGRSRLRAQLFRAILPMVAQNKEFNELHKYYTTRAENPLKKKQSLMVMCRKLIKIAYKLITEDISYDPEKMMGDIRRNPEPRAA

SEQ ID NO: 497848 - protein, 445 aa, unidentified
MELEVVNPQCAGIDVGSRSHFVAIGQDLNDVKEFGVYADDLTAICQWLKENKITSVAMESTGSYWQNLYVELLKDGFELVLTNGKFTKQSHGKKTDVKDCQWIQKLHSLGLLSSSFLPDEDTEQLRTYCRQRTNLLSLAAETSSKMQKYLKLLNFRLDVVVNDICGFTGLAIIADICNGNHDPQKLAEHRHYNCRKSKEEIAKALKGNNRKDYLFGLKQEYESYLFFQSKIADCDKQIELFMKTEIGIDSNKKKLKTSNKKHKKANKNAPDFDLNQLAFQYFGGTDFMAVEGVSHATILTLISEVGPDGFKKFPTAKHFTSWLRLAPNNRISGGRVLSSRTPKGSNRLKIGLRQAANAIGNLKGTHLSDFFRRIAFRKGRAAAISATARKLAIIFWNMQVKKIPYMPPSEYLFLEQKRHLKLVTRIRKQVSKLNITPEELGFSTN

SEQ ID NO: 497849 - protein, 429 aa, unidentified
MTSNPSITAPVVRVAIDVAKLTHQVLMELPNGKRRTMRVANTKSEIDGFVEALRALGHRCEIAFEPTGDYHRPLAYVLGQAGFHLALVSSLAVARTREALYNSWDKNDPKDAQVILHLLKNGTTQRYLDPLVTGHLDLQEMANTYQQISLRKVRLQHSLITHHLPLYFPEAERYLHSSRAEWFTALLLFAPCPAAVRQYSKAAFVKAASAQIAGRKVDRARWLADFYETACHSVGLPVTPESETVRMLRVVLEEYRALCALRKRLEVDITTQLATHPDFVRLQTLPGIGPILAMIILAEARELRRFGCARQFLKYCGFDLCTEQSGQFRGRTHLSKRGNARLRYAFWMAGTVAIRMQQNSFRRKFEDYIRPDPKNADRRRKGDTAVAAKMARVAYAVVTSGIDYRRFPEATRPGGKIPSLGAVEAHATS

SEQ ID NO: 497850 - protein, 325 aa, unidentified
MQSSINYIGVDISKSFFDVAIKNGQTYAYYKFDNNPEGFEALLKVVPAEGVVVMEASGPYYLRLANYLTKQAIGVSVVNPLVIRRFCQMRLARVKTDKKDSMMIAEYGHIEKPALWQPPQEHVIALQQMETLLHNVRKEYTTVSNQLESVRSSGMLNQGLEQLITKELEHKQELIDKLTHQMEELAQKHYASMLADLESIPGLGRKTAIMLIVLSGGFSRFSNYRKLSSYIGLCPRIFESGTSLKGKARICKMGMSRIRAMLYLCSWSAKRYNKACHQLYGRLLAKGKGKKVALIAVANKLLKQAFAIATKQTMYNENYLIKSCF

SEQ ID NO: 497851 - protein, 406 aa, unidentified
MKQIVSVGIDVSKGKSTVCAMIHPNTIIKESFEVLHTVEEMSMLADYIGSLDGEIRIVMESTGHYHLPVAQFLYQKGFFVCVENAYIIRQFSRIMLHGAKTDPLDAKKLAKYGLAYWSELKPYKFHPSCYTELNLLSKQYQTYIKLLIAAKQNVIHLMDEMLPGFKEALDTASSVQFSKVKYVDFAKEFYHVDMIKSMGKEIFRENYKQWCKEKGYRFQSEKADELFHLAEDGIPTLPTEFPSTRLCMEVATEQVSQLGYALEQILSQMQNLAKTLPEYQTIRQMGGMGEKLCVRFIADIGDVRRFHNGKALVAYAGIDAPPYQSGQYTGTKRRISKRGNSALRKTGYEVMKSLKSHPPKTDTRVYDFIIKKENEGKSKKQAKIAGLNKFLQIYYARVMEIYKNIV

SEQ ID NO: 497852 - protein, 315 aa, unidentified
MAEGVYVGIDVSKAELVVAAHPLGECVKLSNDRDGIKQLLARLGKWAPELVVMEATGGLQRQVMAALWSARIPAAAVNPAWVRSFAKGRGLLAKNDRKDAQLLALFAERERPQPRPPADSETQALQELVMRREQLVAMLVAEEHRLKRASAPVRKELRHHISYLEGRIKDSEEEIDKTVRRSDAWRRKRDIVHSVPGLGKVFCAMVLAKMPELGTLNGKQAGALVGVAPVARDSGTRHGPRVIAGGRFEVRHKLYMCALSAVRANPELKQFYRRLIARGKPKKLALVAVMRKLIVILNAMLKTNTLWRPPCPAST

SEQ ID NO: 497853 - protein, 335 aa, unidentified
MWHVGIDLHRRTLVVAAVNDAGEVRPAVTLETAEPDAIADLFEDIRPFRAVIEATGTYRWLHDLLAPKGTVLLAHPLRLRAMTVRRSKSDRLDAQLLAQLLRLNQIPLAYVPPESYQMLRDLLRYRAHLGRQIAQAKTQLKQIMARHNVRAPYKFPFGPKGLYWLSRQDFGEVGNQMRDHLLERLSWTEQQVQSVEAKMQSLRPRFPQIEALLDLHGVGLFTALMVVAEFGEVERFGMAKQAAAYTGLTTRVYQSGDTRRTGHISKQGSPWLRWVLVEAAMKLVAKDVKLANFYQRIRKRSSSKIARVAAARKLAEICWKRLRRWHRMHPTSAAA

SEQ ID NO: 497854 - protein, 364 aa, unidentified
MEHFAGLDVGTKASSLCVIDQDGTIVFEADIPTDPDLLARALKPWRRTLRRVGHEAGSMSPWLHAELESRGVPVICLEAYHARAAMRAQRNKTDQTDARGIAHLVRAGWFRRVHIKSDQSYRLRFLLAQRALLVRKRVDIENSIRQSLKVFGLRMGIAGKAKFEGRARELVGDDAVLGGLVEAMLRVRQAILEEVARLHKLVIGVVARDELCRRYMRIPGVGPITALSFKTAIDDPRRFDSAKTVGAYFGLTPKRWQSGETIDRQGRISKQGDKDVRRCLFEAAHILLVKYRGRTPIKTWGERLMAQKGHHKATVAVARRLAMAMYAMWRDGTEFQLDAGGPMPAGDAHIKIRRLLGASNLKPA

SEQ ID NO: 497855 - protein, 362 aa, unidentified
MTINAGVDLHKTQFTVFVKQSGNQFEQYSTDEEGYKRFLGRIQRWRKNGMTVRIGVESTGNTRYFKYRMEQAGAEVVVINTLKFKVVNESVKKTDRHDAATIAEFLEKDMLPESRLCSEESEQIRRLLKVRTTLVRTMVTVKNQIHALLTGLGMKDSRATLQSKRGRQKILDTLRKADNELVVQPLFETIEQLEKSVKSIEAELEKLTEGDRTVELLMTIPGCGKIGAWTIRAFTDDISRFASAKKYSAYAGLVPWVQNSNETIHHGKITKRGPEELRTALVQLVMGMRRCRATASWRLMEHYTELKRNKGSGKSIIATARKLSKIIWCMLSAKEEFNPALMIDKKLVRKAESMRNTAVKSA

SEQ ID NO: 497856 - protein, 366 aa, unidentified
MNYVGVDVHKRYSVLCALDGWGRKLREARVEGNAPSGFGQFFACLDGPSKAVVEACWNWGLIHDELEELEELEQVEEVVLAHPHKTRLIADAQIKRDRLDAHALGTLLRGNLVARAHIPSRQTRARKNLLRQRLYWARLRTMLRNRMHALLDRQRRLELPQCSDIFGVRGLSFLRALQLAQPDATLLREQLALHDLIAQQMKAQEKRIALDFAQEAMHRRLKSVPGIGVRLAAVIACEIDNIARFSNAEKLCAYAGVVPTTRSSGGKTMHGSLLYFCNKWLRWGLVEASWVAIGCSPYFGTLYKQHRARGKKSNTAILIVARRMCRIIWQLLHEKRDFEKRPLSPKLNSFPGCSVVRLTAVKATSP

SEQ ID NO: 497857 - protein, 400 aa, unidentified
MDRNRIVAGLDVHKDTIYLCVMDNAETIIFENVYGTLTPNLQLMCSDMVSHGVTEAAMESTSTYWVPVWNALCESMSLKLVNPYFIKQLPGRKSDVKDAQWIAECLLKNLIRGSFVPDKVVQDMRKYNRRIFDLNEDMTYNTNKLDATLQRCGFRLSNYVSRVKGKSYQKCIKAIIDGVTDPEKLVKLIHGRTLRKFGHNLIKDAVTGDFHRADICLLRQYAVFIGMIERQIEECKNALTTMCKEYFPKQFERLQSIPGVNERSASAIIAETGADMKPFEKATNLVGWCGLKPRNDTSNNKVKSNRTTHGNRFLRQMLIEISWVASRTRNCFFSNFSHVQCTQRHKNKMKIQVAIARKILVAVWHMLTKDEDFIDVYLKRLEKEAELQDEIQTLESLVVE

SEQ ID NO: 497858 - protein, 373 aa, unidentified
MLGPPAPTGGGIPIGIATEEDDMPRIADPEQAVTGGVDTHAEVHVAAVVDLVGRVLGTEEFPATAAGHQKALDWMRGHGRLAKVGVEGTGSYGSGLARYLTVHGVEVVEVIRPNRQTRRRRGKSDAVDAVAAALAALNGDAAARPKTHDGAVESIRMLRVARRGAIKARTQAANQLRDLVVTAPQSLCDRLAPLPTVERVAVAARLRPGDLTDPAGAATVAMATVACRYQMLTAEIDQLDGQLDRLVEHTAPPRLLAKQGVATQVAAALLVAVGDNPTRMEREASFAALCGVSPVDASSGKQRRHRLNRGGDRQGNSALWRIVITRMAHDPRTRSYVARRTAEGKTTKEIIRCLKRYVAREVYKTLVAVASSP

SEQ ID NO: 497859 - protein, 338 aa, unidentified
MKTYAGIDLHSSNNYIGVINAKDKRLYSKRHDNRIEDVLKVLGKFKASLQGVVIESTYNWYWLVDGLMDQGYTVHLANPNAIQAYDGLKHTDDKWDSFWLAHMLRLGILPEGYIYPKHQRPIRDLLRRRLMFVRQRTSQILSLQSMITRNRGLNFSGAQIKRFRDEFIDKLFSDRHLVFTAKKNITTIRFLDQIVSEIEIEVASQIKLKKEFISLLTTPGIGNILGLTIMLEVGNIGRFPKAGNYSSYSRCVESKRTSNGKKKGENNKKNGNRYLAWAYVEAANHAIRCCPKAQKFFQRKMAKSKRVLATKALANKLTKATYFIMRDQVAFDEDKLFR

SEQ ID NO: 497860 - protein, 317 aa, unidentified
MSKPNLIAIDLAKNVFQFCHMSPAGKVLTNKEVSRAKLKELLFTSPPSLVAMEACSGAHYWARLAQSVGHTVKVINPKIIKGFQFKQKTDKNDALAIATAASLAHIHSSKVLTINEQTLQSMDRVRSLAIEQQRSSSNQIRALLFEFGITVPQGSSALRKQIPLILEDAENGLPTEFRQLLHSLWEQLQNQMAFVQDITIKLENTVKSNPICNKLMQLEGVGPICSLALYIRLGNGEAFKKSKDASACVGLTPRQHSSGGKERIGGISKTNADKRLRSILFQGALSVINHITKRSPRTYKEQWLKALIERRGKKLLP

SEQ ID NO: 497861 - protein, 465 aa, unidentified
MTTAKLWRNRKERKDWARRLRSEDPGLEVVHPHAAGIDVGNSAHYVAVRPDRDPEPVRRFECFTADLYRLAEWLESCAVKTAAMQSTGVYWIPLYEILEDRGFEVYLVNARHTKNLPGRKSDVQESQWLLKLHTYGLLNNSFQPPAEIRVLRTYWRQRAEHVSGAATCIQRMQKALTQMNLQLANVISDLSGVTGQAIVRAIVAGERNPQKLAELSDPRIEASREEVAKSLEGNWRPELVFVLRQEVEMYDAYQRRIAECDQQLQKHLASFADTELPQSPKAESKEKRAKSTKNAPRFDLGSELKRITGVDLTRIDGIDVMVAQTLLSEVGMDMSRWNTEAHFSSWLGLCPDNRISGDTLLGKGTRHVVNRAATALRLAARNLIRSRSYLGAQYRRLRTKLGAPKAITAMAHRLARLVYRMLKYGQRYVDKGTEYYENRYRQQQIHLLQKKAAKLGLQITVAVHP

SEQ ID NO: 497862 - protein, 339 aa, unidentified
MSYYLGIDLHSTNCVLGLVDQKGARVFHRKVPNDLAVVLDTLRPFKRRLREIGVEATYNWYWLVDGLREAGYTVRLGHPAAFKKYEGLKYADDVHDAFWLGEMLRLGILPTAYIYPKEQRMVRDLLRKRAFLVNQRGALQINLQHTLVNHGQKKLKSCEMQAVHTDHVTGRLNSHAALALSAQVSKECIDFLTLRIKRIERQVEKWLKLEAPYQTLLTLPGVGRILAMTLMLETGPISRFAKVGNYVSYCRKVSSQWLSNSKVKERGNEKNGNPYLAWAFAEAAELARRYDPAVRAYYQRKAAHKHRMVAHFAVAHKLARAAYFMLRDQVPYDGCRLFG

SEQ ID NO: 497863 - protein, 341 aa, unidentified
MKQSTTKSYLGIDVSKGWFDVSLMQVVEHQKQPMQSTQFDNTLKGIRQFAQWLKSEHVTDPKNTLIVIENTGVYHRLIWKFCSDQKLPLYIGNAAHIKWSLGITRGKSDLVDSQRLCMYAVKEHDGLKLTPAMDIVFMQLKDLMTARTKLLSQLRSTEVYLKELKLSNDPSIQQVLEKAHKVTLKGMKESIRLLEQQIQLIVKNNATIKTNYQLLVSVPGIGHITALYLICCTNNFAGKISGKQLASYAGVVPFEHSSGSSIRGKNRVHKMANKDLKKLLYMCAMTTIQHYPEFRDYYDRKLREGKHTLIVLNAIQNKIVLRAAAVINNRQSYVDNYTKAA

SEQ ID NO: 497864 - protein, 414 aa, unidentified
MELLHERCAALDIGKKDLKACVRTPSVRRKHSRSQQIRTFATTTNALLELRDWLVAERVSLVVLEATGDYWRGAFYLLEDDLNVILVNAAHAKGLPGRKTDVCDASWLCQMGECGLLRASFVPPEPIRQPRDLTRYRTTLATERTREAQRLEKELEDAGIKLSSVATDILGVSGRAMLAALIDGERDAQVLAEMAKARMRPKIPQLVAALTGNFGEHHAFLCRLHLERIDQLSAAIGELSARIEEQMRPFARQLEHLMTIPGVGQTVAEVIVAETGADMSRFRTAENLASWAGVCPGHHESAGKRKSGRTRHGDRWLCGALGTAAMAAARTRDSTYLGARYRRLAPRLGKKKAIVAVEHSILTAAWHMLTDDVDYHDLGGDYFARLDPERAMRRIVRQANALGYTVRFDPIQAA

SEQ ID NO: 497865 - protein, 412 aa, unidentified
MRIVYKRSCGLDVHKKVIVACLLLLEADGELRREIRKFGTMTEDLLALLDWLQQAGCTHVAMESTGVYWKPIYNILEGHLEVVVVNAQHLKKVPGRKTDVRDAEWLAECFQLGLLKASFIPPAPVRELRDLTRYRTSLIRERARTANRLQKVLEDANIKLAGVVTDIQGVSAGAMLQAIVDGSTDPEALADLAKGRLRKKREQLVAALSGRVKPHHRFLIAEHLSQIDYLEEAIERLNAEVGERLCPFELQVKRLDSIPGIGRQLAEVMLAEIGWDMSRFATAKNLASWAGMCPGNNESAGKRRNGKTRKGSRWLRHALIEAAHGAARTKNKYLKSQYHRVAAHRGKKKALVAVGHSILIISYHLLTREQEYTDLGTNYFDERDRSAVQRRCVKRLEKLGYSVQLQPTALAA

SEQ ID NO: 497866 - protein, 338 aa, unidentified
MQDRPHSGVPSVLPDTIIGVDVAKDTLVAATYGTGTSTTLTNSPAAIKAWLRKLPTGACIAMESTGRYHLELASQARAAGLTVYVLNAMDVHHYAKAMGQRGKTDPLDAHLIAQYVAHQLIGQAGQRLSTRQRLRPWQPTPALLGELRDLLNGRVQLSNSCARLTMALAHIAPIKEEVKALQAGFRELMAQIDTKVAELLSSDEGLAQNCKRIRSIVGVGPQGAALLAVLFARIGFAHSDAVVAFSGLDPRPEDSGTKRGRRRLSKKGDPQLRRQLYLCAMAASRSALFRPQYEALKARGLPTTAALVVLARKLLRIAFAVWKGSGTFDPMKFMPKPA

SEQ ID NO: 497867 - protein, 401 aa, unidentified
MLFAGDDWAEDHHDVCLQDGAGRVLAARRLPEGVAGITRLHELVAGHLEVLAIETDRGPWVRALAAAGYRVYAVNPKQAARHREVVAVSGKKDDTFDAAALADMVRTRRHQLREVAADSDEAEAVKVAARAHQKLVWERTRHALRMRSALREYFPAALAACAPLTLTGPDTLELLARSPDPAAAARLTITQITAALKRARRRDVAGKARQIQAALREQHLGQSEVVTEAYAAGVSASAAVITVLNEQIKKMEATVESLFRRHPDAGVYLSQPGIGVITGARMLGEFGDAPGRYADVKARRNYAGTSPLTIASGKKKTVHARFIHNDHLVNAMHDQAFAAISASPGARAYYDELRARDTDHTDALRRVANRHAGILHGCLKTATFYDEHTAWGHRSHPAAAA

SEQ ID NO: 497868 - protein, 415 aa, unidentified
MSLKIVYKICCGIDVHKTFVVACIASTNDKGITSYESHRFSTYTSGLKTLLQWLLNRNCKDVCMESTGKYWIPVYNILENDCSIVLAHPKYVKAIRGKKTDKKDAKWIADLFKHDLVAGSFMPPADIRQLRDLMRYRFKLTCFQSSEKNRLQNCLTVSNIQLGNVVSDTFGKSAQAILDKLLENPADTSFDLEPLVYKSLKKKLPELRDAIDGYINPEQAGKLKVIKSHYENLESRKAELEELILALAAPYQQELAILQTAPGIRSDFTAIGIISEIGTNMEAFPSAKHLCSWAGLTPTNNESAGNKKSVRVSKAGCYIKPLLVQCANAVVTSKKHPEIRNRYLRLKKRRGHKKAIIAIARMLLTALYHMLKNGENYNAELYRKSYLPPVDREITVEQAIIIARNQGYKIKSATA

SEQ ID NO: 497869 - protein, 344 aa, unidentified
MKKIKRVGIDLAKNVFQLHGADHQGEAVWKRRLTRSKWLNTLIDTIEPGCEVGMEACSGAHHWGRELQARGYTVKLIAPQFVKPYVKSNKNDAKDAEAICEAMGRPNMRYVQVKQVYQQDIQATHRIRSELMNHRKAKANQVRGLVAEYGLVAPQQYARLRAAIPAWLEDAENGLTDLFRRLLQGLWEDLTTLEKRIVEMNKEIERFARNDPVVQRLQQLRGVGPLIATAMVASIGKGTQFKRGRQMAASLGLTPRQYSSGGKQRLLGISKRGDAYLRSLLIHGARSVIIHAKHKDDRLSRWVTALAARRHINVAAVALANKTARMAWVIMTKEVDYDPALAAG

SEQ ID NO: 497870 - protein, 342 aa, unidentified
MDYYAGIDVSLESSSICIVDGVGKIVRETKVASEPEALIGWFGSLGYGVSRIGLEAGPLSQWLYAAMREAGLAVELLETRHVRNAFKSMPVKTDRKDARGIAQLMWLGWFRPVHCKSIGAQETRALLTARKLLQNKLHDVEASLRGVLRGFGLKVGPTTPRRFAERIRELVAGHASLEVIAQALLAAHAVLLREFNGFERRVRGVARQDARARLLMSTPGVGAIVALTFVSAIDDPARFSSSKTVGAHFGLTPKKYQSGETDRTGRISKIGDKEVRTALFESAHVMLVRATKTSALKRWGMRLARRVGMKKAKVALARKLAVIMHRMLVDGTPFNFAAGAAA

SEQ ID NO: 497871 - protein, 324 aa, unidentified
MEKKGKRYIGLDVHKHYLVALGVDDNLEVVLPVRRVEFSYLESWMKKNLTKQDEVVLEMTTNTWQLYDELIQHVGKVTVVHPPHVALITRSQVMNDKIAASILARLLAKGLLVGIWVPPQEIRELRGLVAQRRKMTRLATQAKNRLHAVIQRHHLKPPEGNPFSKANNAWWEKLSLGKLEKMNLQSDLETLQFAEQQEVRIEKEMTGIAAEDAEIGRLLHMSGFGVVTAVTVYAAIGDIRRFLEPKKLVGYAGLGARVHDSGMTTRTGKITKAGRRDLRVAMVEAAHVVANSHPHWKAELARLEPRLGRNKAIVATPAPTAGAV

SEQ ID NO: 497872 - protein, 385 aa, unidentified
MSELNDLSRSLTSLEQDKTIIAVIEMSQSSWLVAGIIPGIERHPLKKLEPSEEELVRLLMRWRTEATKNGQTITRFAVAFEAGRDGFWLARWLRARDIETYVIHPTSVAVSREHRRAKTDRLDTGLLKRVFIGWLRGEPDHCHMAAIPTLAEEDAKRPNREREGLVRERTRIVNRMKSCLARFGIRNFKPTLRKAPERLATLATPEGVPLPPNTLLELRRDMARLRFVMDQIKEVEEARAQRLEQAPQEKTHAMVRLIARVIGVGIETADMLVHEILSRQLRDRRAVARYAGLTGAPDESGNKRREKGLAKAGNARVRRGMIQLAWRFLVFQKDSALARWYRTRTESAGKKRKTMIVALARKLLIALWRLVTIGEVPAGVVLRAA

SEQ ID NO: 497873 - protein, 344 aa, unidentified
MDHFAGLDVSVKETSVCIVDDTGRIVKEVKVASEPQSLLKVLGSPAYRFKRIGLEAGPLSQWLFSALAEAALPVICVETRHMQAVLKAQINKTDRNDARGIAQMVRAGLYRPVHVKTLRSQKLRMLLTHRKLLQSKAIAIENDLRGTLRNFGLKVGMVGKVRFEARIQELVENQPDLAVLVEPLLIVRRVLREQIVILHRRLLATVRDDEVCRRLMTTPGVGPVVALTYRATVDVPARFRKSKSVGAVFGLTCSRYQSGEIDWSGKISRCGDEMMRTMLYEAAQSMMHSKKWSWLKAWAMQIARRRGMKKAIVALARRLAVIMHRIWIDGTEFRWTREQTAAAA

SEQ ID NO: 497874 - protein, 365 aa, unidentified
MQILYSRCCGIDVHKDSVTACVLVYGAGKEPEVRKKEFGTYFKALLNLKMWLLAQKVTHVAMESTGVYWKPVWQALEGNFKLILANPFQIKTMPGLKTDARDSQWIAELLAHGLIKPSFVPPQATRDLRDLTRYRVKLTEERNRVHNRIHKVLEDACIKLDTIASDILGASGRAMIKAIIDGQEHPDWLADHAKGTLRGKRPELRLVLRGRITDHHRLMLRELMDDLEFVEGKLKRIEKEIATKVDVDTLARLATIPGIDLITAWTLLAELGSDMSVFHSPKHAAAWAGLCPGNHESGGKRLSNRSRKGNRWLRRALCDAAWAATRKKNLLPARFLLPQSGQARHSQSDRCHRSPPAPDRFLHFA

SEQ ID NO: 497875 - protein, 325 aa, unidentified
MVAVVGIDVAKHTFDIATLQPNGKYRTRSRLANDPSGFAQLCEWLEKHAGPDAWIVMEATGIYHEALATCLFERGYRVSVVNPAQTAAYAKTQLSRGKTDKTDAKLIAGFGQDQLAKSRLRLWQPEPPAQKRLRALVRRLADLREMEQMERNRLESADANIQDSIHTVLRHIEEEIRRTLKAIEDHIDNDPDLRQRKELLTSIKGFGDQTAALLLGELGDPLAFRSAKAVAAFAGLTPRPDQSGEHQGPTPISRIGSGFLRSRLYMPAISAMQHNPAIKALAERLRSRGKRGKQIVCAAMRKLLHIAYGVLKSGQPFDPKLALAR

SEQ ID NO: 497876 - protein, 372 aa, unidentified
MDESSKILYVGLDVHKDSIAVAYAPDDRGAEVVSLGAIGPRQCDIDKLIRKLQSKGATTLVFVYEAGPCGYGLYRYLTGKGFACHVVAPSLIPRKPGDRVKTDRRDAMALARLMRSGDLSSIYVPGVEDEALRDLSRGRDDAMQDLKRSKRRLKSFLLRQDIRYEGRATWNAAHLRWLSEVVCPTPPPQIVFQEYLRAVSEQQERVQRVERELHEAVKGWRLYPVVEAIQALRGVELTGAVILMTELGDITRFDSPRQLMSYLGLTPSEYSSGERRRQGGITKAGNSHARRALVEGAWAYRYPAKVSRHLQLRLEKLPAEVQAISWKAQVRLCKRYRQLTARGKHVNQVVVAIAREMAAFAWAIARLVPLAS

SEQ ID NO: 497877 - protein, 468 aa, unidentified
MKRKSRGAKCQKGTPFDGELKLIEPDAAAIDVGSRSHWVAVNPQRDPDAVREFGAFTTDLIRLADWLAQCEVKSVVMEATGVYWVVLYDLLESRGFRVYVVDAHTVRHLPGRSKSDVKDCQWLRRLHSYGLLRGSFRPPAQIRQLRNYLRSAAKIVEAAAQQQLRMQKALTLMNIQLHHVISDISGLTGLSIVRAIVGGERDPKQLAKLRDPRIRASKETIEKSLQGHWQEELLFDLKMALESYDHFQGQLAAYEEQMRRALQEVPSKVDVLEEPLPAARPKVCHKRPGMSREDQLDLRVELYRISGVDLTRIDGIGLQTAQKVFFEIGTDVSPWSTEEAFSSWLGLSPNHRISGGKVLKRASRKVVNPLSIALRLAARTLRNSQSALGANFRRLIAKIGMPKAITAMARKLAVLIYRMLKYGTQYVDKGMEHYEAKYRETKLQYLRSQAAKLGMTLVANDPALTVAC

SEQ ID NO: 497878 - protein, 427 aa, unidentified
MSEEKSIELRVSVDVGYRRHSVAIGLPNGEVLEEFEIAHGPEGFREFFLRIEKHRKAQDCGVGVAMEGYNGYARPLDSLVRSRGYRLYNINNLKLARFKEIFPGAAKKDRIDARKGLELFQLSDHLPLAKEVLQEVKGTPHENEVLKRLTRRRRRLVNERVRVVNNLQADLQAVCPGLLEITTEAGNQWFLNFLLSADTLPQLARLRKATLLKIPSVGRKYASLIQEWQKRAHFSEEAAWVSEMIQEDAKRCLELDEKVKTLETKIEQVAEDSKIAKILLSIPGFGPVCTTELAGEIGTVERFSKEGSLALYLGMSTLDNSSGKYQGTKAPKHVNTRAKAAMMIALDRHRKYISESQRYYEKKRAQGKKHNQAIRALGRHLCRIIYKMLKEQREYQIRSKQGDTQARVRSRSCVKTKMRRPKISGKG

SEQ ID NO: 497879 - protein, 453 aa, unidentified
MEAVYARCAGLDVHKKSVVACRARPASGGGQERETRQFGTTTAELVALVEWLHAWGCTHVAMESTGSYWKAVYNLLEGEFEVLVVNAQHVKRVPGRKTDVGDAEWLCQLLEHGLLQGSFIPPAAQRDLRDLTRYRTALIEERAREVNRVQKLLESGNIKLASVATDILGTSGRAMLAALASGEMEPAAMAELARGRLRAKIPALEQALTGRMRRHHRYMLAHYLRHIEFLDEQIAAVSEQIVEQLAAIPDAAGEDEPTDDSGTSGPPSQDAASRDGEVATQERGALGGMSAVQLLTTIPGVDQRIAEVIVAELGTDMRRFPTADHAAAWAGVAPGNNESGGKHYSGRVRQGNHALRRALVQAAWAASRTADTYLAAQYHRLAGRRGKKRAVVAVAHSILVIAYHMLSRHEPYRELGGNYFDERKKESVVNRLMRRIQNLGYHVSLEPIAAAVT

SEQ ID NO: 497880 - protein, 348 aa, unidentified
MRFYTKQHKYSCGIDLHARSMYVCILDEEGKTVLHKNRKATPEALLRAIAPYREDVVVAAECMFVWYWLADLCAKEKIPFVLGHALYMKAIHGGKSKNDRIDSHKIAALLRGGTLPKAYVYPRKMRSTRDLLRRRNYLVRKRSELLTHLQNTNSQYNLPEFEKKIALKANRDGVAEHFSDPSVRKSIEVDLELLDFYDRLLSELERYIEKSAKGHDVHSWYLLRSIPGVGRILGLILLYEIHDIRRFPRVQDFVSYCRLVKCPRESGGKKFGAKNTKVGNHHLKWAFSEAACFFIRVNEQAQHYHSRLVSKHGKGKALSIFAHKIGRAVYFMLKRKEPFSMEKFFAHA

SEQ ID NO: 497881 - protein, 342 aa, unidentified
MYYIGLDVHKKTISYCVKDVSGQIHRQGTLGATRDELDRWIKTLPQPWTAAMEATIFTGWIYDHLLPHAAQVKVAHPVMLRAIALAKKKNDRIDAGKIADCLRCDFLPECHMASTEIRDRRRMLRYRQLLVRQMVQMKNRVSGLLLETGVSHNKQRLHKVGYFRELMANQEQVHENIRPLLLLSRETIERLHKMDYALVSTLQRDPVLAQRIKRLRTVPGVGPITSLTWALEIGDVTRFRSIKQAISYCGLCGDEKSSADKQMRTPLSKQRNKHIQRALVEAAKLAPRQDHQLAAIYDKEKQKGNANRATLAVARKMVAYLLAVDRGKRDFVPSENHSSTAA

SEQ ID NO: 497882 - protein, 316 aa, unidentified
MSDAVEIFVGVDVSKDTLDVASSAAERWQTRNEDESIAALVARLSQLAPRLIVLEATGGFEAPLASALALAQLPVVVVNPRQVRHFAKATGRLAKTDRIDAALLAAFGAAIKPEVRPLKDEFANELTALLARRRQLIGMLTAERNRLVTAPPVLRKDLKAHIHWLVKRIKDTDAQLTDLMRSSPLWREKEDLLATVQGVGRVTAQTLLADLPELGRLNRKQIAALVGVAPFNRDSGTLKGHRRIWGGRAQVRAVLYMASLTAKRCNPVIRIFYERLVAAGKPKKVALVACMRKLLTILNAMLRTATPWRENLLITP

SEQ ID NO: 497883 - protein, 341 aa, unidentified
MNGSKNVVGIDIAKRVFQLHSIDMETGEIVSLQLKREQFLEHFANRQACLIGMEACGGAQHWARKLTAMGHQVKLLPGKAVKGFVTGNKNDRQDARAIWTAVQQPHVKAVAIKTEEQQAILALHRMRSQLVKFRTAQINGLRGLLTEYGEVMPQGKAGVRKGITEALARLSDRLPAMVIDTLREQWARIGKMDEEIGTIEQRIKLWLKNDDACRRIAEIPGVGPLTATAAVALMGDAKAFKSGREFAAFAGLVPRQTGTGGRIKLLGISKRGDTYLRTLLIHGARSVLTHAKEPGPWVTELRQRRPLNVAVVALANKMARTIWAMLAHERTYQKEFVSQPA

SEQ ID NO: 497884 - protein, 408 aa, unidentified
MKTLHQRCAGLDVHKQDVVACLRLATKGRVHREVRRFPTTTRGLLELAAWLEAARCTIVAMEATGVYWKPVWHILDGRFELVLANAAHIKGVPGRKSDVNDATWIADLLAHGLIRASFVPPQPIQDLRDLTRTRKQLSREIVRHTQRLQAVLEEANVKLASVITDILGASGRRILKAMITGETDPSHLAELGSRRLGCSRDTLVEALDGRVRDHHRFLLDQHLKTIEQLEETMAAFDARIEAALAPFRDTVERLTQVPGLSTRAAEVVIAEIGLDMSRFPTAEHLLSWAGLVPALDESAGKRRSTRVTKGAPWLKPVLVQCAWAAANKKNSYFEAQFLRLKGRRGPKKAAVAVAASILTTVYHMLRDGTCYQDLGPNYFARRNPARTARKLADRIRNLGYIVEIRSAA

SEQ ID NO: 497885 - protein, 413 aa, unidentified
MTKSNNNTESTLWVAIDVSKHKHDILIEYPNKTRKRMVIANTKKDFERLASLLISSELNVSVALESTGYYHRAIGYFLIQQGFNLFLISGIATARTRECKFNSRDKNDKRDTEVILYLLQQGTVQYYYEPLLHDYNEIQELSRTYSRVSDRKTRLQHSVINHFLALYFPEAEKYFCSTRAEWFAEFFKIFPCPSIIVQYKEDEFIEKAWKLAGRKVDKENWLRDVYNTAKNSVGLPITLASNTLTMFRYILDEFADLCKRRKQLEIDADQYLLQNPDYCLLKTVPGIGPIIALTILAEAGDLRRFKHCKQFIKYCGFDLATYQSGNSKGKTALSKRGNSKLRQMFWMAATIATRMRENSFRKKYQQYIKEDPDNADLKRKAYVAVAAKMVRVVYSIIRYKTNYYCSYEPVVTQ

SEQ ID NO: 497886 - protein, 347 aa, unidentified
MKKYVGLDVSLEETAICIVDDQGKILAERKVPSLPEAIAAFIRERAGEVDRIGLETGPLAVWLWNELRAFSLPAICIDARHAKAGLSMMINKTDRNDAVGLAQIMRTGWFRQVHVKSGASHVTRALLTSRGLLVGMRGDIDNQVRGLLKTFGILFGKRVGGFMKRAEELLAGELSASPELSKLVGTLLKTRAELQSRISDLDRDLMRQAKASEVCRRFMAVPGVGPVTALSVWAAIDDPARFVRSSSVGAYLGLTPRRYASGEVDLSGHISKCGDQEVRTHLYEAANVLLTRIKKPSGLQTWGLRIAKRSGFKKAKVAVARKLAVILHSMWCDGSEFRWMPEPDAVP

SEQ ID NO: 497887 - protein, 346 aa, unidentified
MLIVGCDYHPKWQQVAWFDTETGEIGEQKLVNGDGEAKRWYEQLPVPSLIGLEATGNSQWFLDLLNQLGHEVWVGDAAEIRASYVRRQKNDRRDAGHVLKLLREGRFPRLWVPSAEQRDLRQLLIHRHKLVQIRSRVKNGLQHLAMNQGMQKKSRLWSVAGQKAFRQLPLVGWAQCRRQDLLQLLVYLDQQIAPLDQAAQQAAEQDPQARLLLTQPGVGPITALAFVLTIGDVTRFPRGKQVASYLGLIPREHSSGGRQRLGAISKQGNSFLRMLLVEAAQSVVRLDEGFRKQYAHRCHSKPKGIAKVAAARRLAVRLYWMLRTNTPYPEIVRIESSPRVPLVGKS

SEQ ID NO: 497888 - protein, 351 aa, unidentified
MSEYISFDSHKHYTIMEREDIPTRAARQCRIEHAPGAIRAALHGCGAGTAVAVEATGNWYWIVTEIEQAGLRPLLVHPRKAKLMMGLINKTDRLDVHGLNRLQRNGTLPTVWIPPADLRDLRELTRVRMVLAAQRTRLKNRISATLAKYGLVVTDASDPYCQKARPQLVGLIGQLPPHTQWAARTLLAQLDFIEVQIREQEQRLKRLIEFTPQMRLLMSLPGVGVILAAVLWLEIGMSERFASADRLASYAGTTPRVHASGGVVRYGRLRPDVNRYLRWAFLEAANSVAVNHLRCPQRHVSGLYRRLKARKGHAKAIGAVARHLAEAVYHVLSRNEPYQDRAGGVGRSREV

SEQ ID NO: 497889 - protein, 338 aa, unidentified
MTRPEYFIGIDLASATFTASVLTTPEEFVMLGETTPNTSEGFAGFLSGLQAQQITPKNSVIVMEATGVYGESLCYFLHAKGFKVAVEPPNVVKKAFRSKRKNDTVDSQQIAEYAYRFFDTLRVWKPQADLLEQIRTLLTTREQFTKQRTANQNTLRALKRKVVQTPLATQLVQENIQRLGEEIKAIDKAIKEGIGQDPTLKEKGQLADKVPGVGLLLTANLMVVTSGFSEHVDPKSLAAYIGICPYEHESGTSVKRKPTSDRHGTGRLRKLLYLASLSVRMHNEQFKKDFYRKVAEGKPERLVLNNIANRLLRILCATVKSGIPFTENYRSVNPALLK

SEQ ID NO: 497890 - protein, 343 aa, unidentified
MDYFAGLDVSVKETSVCIVDDAGKIVREARVASEPEALLQVLTNTLYRLKRVGLEAGPLSQWLYSLLAEAGLPVICVETRQMRAMLKAQINKTDRNDARGIAQMMRVGLYRPVHVKTLRSQKLRVLLTHRKLLQSKAIAIENDLRATLRNFGLKVGMVGTVKFEARIKELVENLPDVAVLVGPLLVVRRVLREQIGILHRRLLAVVRGDDVCRRLMTVPGVGPVVALTYRVTVDAPARFRNSKAVGAVFGLTPSKYQSGQNDRTGGISRCGDEMMRVMLYEAAQSMLMRSTKWSWLKAWAMKIARHRGMKKAIVALARRLAVIMHRMWLDGTEFRWTREVAVA

SEQ ID NO: 497891 - protein, 334 aa, unidentified
MKKDHYIGVDISKKTIDVAIYVKSKNSKDTYPHETFENSSSGFNKMSKWLRKQGIALSKSLFCMEATGSYTYELCLFLEKLDIAYSIQSPLHLKRSFGLAHGKNDKVDASRIAYYAYLHREDIKESKLASDSVRKLKALMTERKSIVVEMARCKAQLKEVGEHTPSTSTIKRTEDLLGFLQEQVRAIEDDMAQTIEADESMKTNYQLLLSVDGIGVVNAINTIIATHNFEMFDDARQYASYIGVAPFEHTSGISVRGRTHVEPGAKMLKADLTGAVRACINHDKEMKYYYDRKIKEGKAYGVVANAIKFKILLRMFAVIKRQTPFVRKPDFIFK

SEQ ID NO: 497892 - protein, 340 aa, unidentified
MSEIKRIAIDTSKAVFTLHGVDDAGRPMLRRNVRRRELLPFFEKLPPVEVVLEACGGSHHWGRALSTIGHRVRLLPAQYVKPFVKRSKNDRNDAEAISVAASQPSISSVPIKSLEQQAAAMLLSVRELLVRQRTQLVNALRGHAAELGMVAPLGEKGLAELRTEIAAADERAVPAAAKQALMLLGQETRRIETRLAAIEVKLMQQHRANPVSRRLSGIPGVGPIGALNFALRIDPAQFRSARHLAAWLGLVPRECSTAGRQRLGGISRAGDERLRQLLVLGATAVIRHAKPGRPATSPWLLSLLGRKPRKLAAVALANKMARIIWAMMTSGQAYRSQPAA

SEQ ID NO: 497893 - protein, 412 aa, unidentified
MEIMVERCAGIDVHQKTVVVCVRCPGSGRRARGSEVRTFDATTPGLLSLHEWLSQQEVTQVAMESTGVYWRPVHNVLEGTFEVLLVNARHVKQVPGRKTDVRDCEWLAQLLEHGLLRGSFVPPEPIRDLRELTRFRKVLIRERGHHVNRLAKTLETANIKLSSVATDIMGKSGRAMLDAIIQGQSDPAVLAELAQGLLKKKREALRPALTGRVRAHHVFLIREHLRVIDDIALRVAEFDAHIAECMQPFADAAALIRTTTGVGDRTAEVVVAEIGVDMSRFPSPGHLASWARLCPGNNESGGKRKSGAIGKGQNWLKAALVEAAWAATRKRGSYYGAFFRRLKARRGPKRALVAVAHALLRAIWHVLTRSTQHRDLGADYFDQIDRERLRRHHIKRLTQLGFAVSIQDAAAS

SEQ ID NO: 497894 - protein, 361 aa, unidentified
MKKPSQHLIAEVPRRQAKVEMTIGIDLGDVWSHYCTLNQDGEVVDRGRFRTTPKAIEKWFTDVAPARVAMEAGTHSIWISAQLQELGHEVIVANVRELRAISHSDRKSDQVDAEKLARYARLDPNILRPIAHRTVEQQQALTLIRARALLVRLRTAAVNAVRGLTKSCGYRMPASATKCFAQRSLAVMPPGLAQALGPVLQQIAEMTIKIKLYDRQIQQLGQTEYPETQALLTVHGVGHLTALTFVLTLGSKERFGRSRDVGCYVGLRPRRSQSGDHDPQLGITHAGNAYLRSLLIECSNHILRPHGRDSALRQWGLHLAARGGKQAKSKAVVAVARKLAVLLHHLWSTQEPYMPFYEQAA

SEQ ID NO: 497895 - protein, 372 aa, unidentified
MKQNVIHIGLDVDDTQYHGSALNKSTGEVLDFKCRPNLKGLLGQLDKLHKYFPGSTFKLCYEASYIGYTLQRDLAEKGYHCDVVAPTSIPSPRGKQVKTDRIDAAQLVQFYANKLLTLVAIPELEQEQDRDLIRSRQKLLEQQTELRKHIQALLRRNGRHYKVETQNKSHWTLRHYCWLERTIETSSGSLKVNLELLVRQLKGINSILTEYAQQIEALAKTPRYESLVQALTCYKGIKNLFALTMITEIGDVKRFPHPRQLVSWIGMDIREYSSGGKHNRFGITKHGNRYLRTAFIEANQRGYRTARITKDLKARRKSTDPEFISIADRCLRRLNKKGNRLLVAGKHPNKVKVACAREMVGFVWESLHKAAA

SEQ ID NO: 497896 - protein, 346 aa, unidentified
MLHAGLDLSRKRLDVHLVDEAGTTVEVGAVLPDRDGLRSLVERAARYHQPVRAVIESMTGARFVHDQLELLGWQVEIADAQRAKGLAPLACKTDKIDAAVLAQLSCRDLVPAVWLPTPEVRAERERARWRLHLVHHRVGLKNRIHAILITFGHQRPMADLFGASGRRLLDQLDLPEPWRGTVLASVRLIDELDREIDACDAELRRLGAEHPAVPLLMTAPGIGWVLASTIAGEIGDIRRFPSPKSLCGYTGLCPRVYQSGTKDRRGALAKNGPNYLRWALIEAAVHAAHHPAYSAHYEATKKRLGRQRGAAVARIEVARQLTEAIWYMLTRHQAFSPAGPATRLVA

SEQ ID NO: 497897 - protein, 374 aa, unidentified
MKEFSKYVGLDTHKETIAVAVADALGGKPRYYGEIANTPAAVRKLVKNLCPDGEMLSFCYEAGPCGYEVYRQISQLGHHCSVVAPSLIPLKPGERVKTDRRDSEKLSRLDRAGELTPVWVPDQEQEAMRDLTRAREDMKGLERTTKQRLNAFLLRYGRIYESGKSRWTQTHFRWLEGLKFDITIQQIVFQEYVDAVKQGEARVVGLEKEMEKALKHWVLAPVVEALMALRGIKLITAMTIMAELGDITRFDSPRQLMSFLGLVPSEFSSGQTRRRGGITKTGNGHVRRVLIESGWCYRFPARKTAHLQRRAEKCSSEVQAIAWKAQKRLCGRYAHLLERGKLKVQVCTAVARELVGFIWAIACEVMNQRVVSAR

SEQ ID NO: 497898 - protein, 367 aa, unidentified
MKKVSTAATMQSRNISQQKLTIGLDLGDRNCWYCVVDEAGQIRLEQRVRTNAKGLREVFGAMPRSRIALEIGTHSPWISRLLSELGHEVIVANARKVRLIGESRKKDDRLDAQTLARLARIDPELLYPVKHRSAQAQADLTLIRARAGLVRARTALVNAARGLAKSYGERLRGCNVRNMNPEKAEGLSPELQSALEPLLAGIEAVSERICEYNERIEQLAQQSYPQTALLKQVKGVGTLIALTYMLTLEDPHRFQKSRDVGCYLGLQPGRRNSGRSEPQLHISKEGDPYLRTLLVQGAQHILGPFGIDCDLRRWGLRLAERGGKSGKKRAIVATARKLAVLLHHLWVSGEAYEPLHNSSRTTVAAAA

SEQ ID NO: 497899 - protein, 341 aa, unidentified
MVEYIGLDVSMKETAVSIRREGERIWRGKCASDPKLIAELIRKRAPAVERIVFETGPLSIWFYHELKNAGLPAICIDARHAKAALDMAPNKTDANDADGLSQLAEIGYFKEVRVKGFDSMLTRTLVAARTRLVRITVELSNQIRGLMKTFGLVVPAGQGSTFDKSVCDLLAEQDELGRIILPLLDAWRGVRERAAELGRHLMADARNSQACQILMSIPGIGTVTATSFMAAIEDPDNFRKSRSVPAWLGLTTRRYQSGEVDYDGHISRRGDKHLRGLLYEAAVVILTRSYADSGLRTWGLKLKERIGFKRAATALARKLAVTMHAMLKSGELFDPTIGATV

SEQ ID NO: 497900 - protein, 343 aa, unidentified
MPTSTPSPPRYHLFVGVDIAAQTFTTVWMTPDTSPGRPVALDQTPQGFAALQARLLTTGHAAADILVVMEATGSYWVALATTLAQSGFAVAVINPDQAHNFAKALLQRAKTDAIDARTLARLAATLQPAPWTPPPAIYTELQQRLAERDALVGLRQQVRNQRHAPVQLPVVIPAVRAHGGADCDVRRADRCYRAGDHPDPATGCRVGGERRLLVSIAGVGVLTAAWLLVTTLNFTIGATPEAVTAYAGLAPVPKESGTSVRGRGAIGHGGNKRLRTALSRATLSATRDNPLIKAFYDRLRAAGKPAKVARCAAARKLLHLAWAVVRKGQVFDPLYRQRPQSTA

SEQ ID NO: 497901 - protein, 402 aa, unidentified
MYSSFVGIDIGKWNHQAAFLEVSGKETARSLAFQNTSEGFQSLSKSLAPFDKGQTVIGLEAPGHYWLALFSFLVDNGWTVKVINPMQSDALRNMNIRKAKTDRKDCVVIADVLRFGRYTETVLPDEDLLQLRELSRCRVAHVELLGDLKRRALGILDRIFPEFASCFSTVFGAAPTELLQECTDPEELADYDIDKLIKLLEKESRGRHSREKAEELKAKASRSVGTRFGRDALKFELKMLLEQLDFIKGQVKEFDKFLKKLMKNHELIYTIPGISVTLGSAILGEIGDVKRFGTPQQLQAFAGMDPSVTQSGNFQGTQGKMSKRGSPYLRRAVYLAANAARRFDPVFKDFYDRMIARGKHPKQALAAVGTKLLRVIHAVMTSQKPYNPQKLLTPAAISQLNP

SEQ ID NO: 497902 - protein, 321 aa, unidentified
MENARTYVGIDVAKEKLDIAVHSSDQRWTFANTDAGIGRVLSCLQKLNPVLIVLEATGGIEVALVAALAVAGLPVVVVNPRQVRDFAKATGQLAKTDTLDARTLAHFAAVIRPPLRPLSDAQTREMTAILTRRRQLVEMLTAERNRLSAARSKPVRDRISAHITWLEKELANVDDDLASGIRESPVWREKDNLLQSVPGVGPVLSTTLLAHLPELGNLNRRQIAALVGVAPFNRDSGNLRGKRTVWGGRSAVRAALYMATLVATRHNPVIRAFYHRLCADGKPKKVALTASMRKLLTILNAMLKHRTPWHYTDTQTLGPCS

SEQ ID NO: 497903 - protein, 416 aa, unidentified
MAIKRLIERCAGLDVHKQSVTACVRVPGPGAGERSSETRTFSTTTAGLLVLRDWLASFGVTVVGMESTGVLWKPVFYLLEDDFECWLLNAQHLRNVPGRKTDVKDAAWICELVEYGLVRPSFVPPTPIRQLRDLTRYRKAVIEERTREAQRLHAVLQDAGIKLSSVATDILGRSGRDMLQALVAGTRDPKVLAELARGRMRPKIAALCEALEGRFSAHHALLVAEMLARLDHAEETIARLSAEIERAMAHFAEQVELLRTIPGIDRRVAEIIVAETGGDMARFPSPGHLASWAGVAPGNNESAGKHRPSRTRKGDKWLRKALTEAAWGAARTKDTYLASQFARLKGRRGPTKANVAVAHSILVIAYYVLERGEPYSDLGADYFLHRQSSDAYKARLVHQLQRMGLKVTLEPIQPAA

SEQ ID NO: 497904 - protein, 480 aa, unidentified
MNTKAKRTKNQENSKKSIVDIQNQKEVVRKAEEILKELKACTWRELETRGKFTKNDKLTFISDDMLILGYDIGSETHYVRAIDARGRELSRNAFPFSNSAEGFQSAKAWAVELAAANDKKQIVLGLEPTGHYWFCLAAWMIANGISVVQVNPYAVKQTKELEDNSQLKDDRKDPKLIANLVKDGNYGMPYLPEGLYADLRRLSTFRDQLTEDRIRNVNRLHREMKIYFPEYMDAFGKVDGAFTLEVLKKAPFPKDILELGTEGLKKIWHEAKLRGRGYSRAGGIVRYAGESVGLTDGTDAGKAAVKWFAEGIVELDHQLNEIESILHQRCQEIPYAEKILEIAGVGETILSGIIAEMGDIDRFDDVKEIQKLSGLGLVACSSGKHKGETKISHRGRKRLRYWLFQAAKSVVSHAGEFKEVHEYYTTRSQNPLKKMQSLIVIACKLLRIIYTILKTGTTYDPKKMRKDIKLPDVGQVQAAA

SEQ ID NO: 497905 - protein, 407 aa, unidentified
MNAVGIDVSKGKSMVAALRPMGEVALLPQEFLHTGVGLEQMAYAILALGEDTRVIMEATGRYHEPVAAALHEYGIYVCVLNPLFIKQSGGGSIRKVKTDKADAIKIAKYGLDNWVDLREYTPMDTVRQQLKLCSRQYNLYMKTVVSLQNNLISLTDKTFPGVSELFSSPERTDGHQKWVDFVMTFWHCDCICRVSEKAFTERYQKWCKRKGYHFSVEKALEVYAGSCGHFTTLPKNDNTKLLIISAAQQLLAGKMTLAALRAEMTRLARQLPEYDTVRTMYGVGDKTAPALMAEIGDVRRFPRRSSIVGFAGIDPGVDESGKHSAKSVPTTKRGSAHLRKTLYQIVCTYLKKSPADEPVYQFLDKKRSEGKPYFVYMTAAQNKFLRIYYARVKECLEAFDAQTTEQK

SEQ ID NO: 497906 - protein, 464 aa, unidentified
MQQLRLGVDIACRTPHQASLADETGRFLWSGRRFRTRIDELEALWASLPADAAITVVIEPTRNAWVPLASWFRRKGATVVMVPSEQSADLRDYYSKHAKSDRIDSKLLATLPLLHPEGLRPIEHLGPAEPLRRATRLRTSLVKRRTEVVNRIDSLLEVLGPQWYSAFDGKIDQLTPLRFLAAGYGDPNLCRRLGKARIARFMHRHSHGRWNTAHAAAVLAAASESLELWGDELDYGELADDLAIEAHLALTITSQIHELEQRIDVMRRALDPSDLLRSVPGVGSVNAAQILARLADPGRFRSLAGVRSYSGLVPSLNASGRNGSHGGPTKSGDALLREALFNSADVARKIDPTLAQRYHRLMTEAGKHHNSAVCSLAPTLLTRIVSCWRSGEHYVIRDVDGRAITADEGRRIVAERYKVTPELRSLRRTTKPSEWTSRRNKESLGAPSTGPSAVDLRERMHSTA

SEQ ID NO: 497907 - protein, 359 aa, unidentified
MTMLAEPNEKVEDPTVLDAVVGGDTHRDTHQLEMLTGAGVMISTISIDNDADGYAAAIAWIAQHAPGPRVLVGLEGTRSYGVGLCRAVQAAGLQVVEVEQPKKGQRRGRGKSDPIDAHLAALTVLRMPADRKALPRSDGDREAMRILLVARNEISTTRTAQINRLRALLLLGDDEDRALSRGAMSKAHLDRIGRRRGRRDETREQAVRRGEARRLAIAIRAADLELTANHKQLKTLVQAFAPGLLDRKGVGPFSGAQAIVSFSHVGRCRDDAAFAALAGASPLPASSGRTDRHRLNRGGDRQLNRALHTIMLTRWRDCTRTHAYIQKRRTEGLSDRDIRRCLKRYIARELFRALTAVGG

SEQ ID NO: 497908 - protein, 400 aa, unidentified
MKYYTSTTEFNCGIDLHARQMYVCVMDRQGQKRVHTNVRDNDFNFFLKLVAPYKHSLTVCCECMFGWYWLADACQDVGLTFVLAHALYVKAIHGGKNKNDRVDSEKLTHLLRSNLIPPAYVYPADKRPLRALLRQRIFYVWRRSELLARIHSHQLAHNRIPAKQTRRTRDLWEEALLKAEDHPLRQIALKNDLVMIKHFDTQIFQLEEELQRQTQKVACREYSLLQTVPGIGENLGLTILHEIGDISRFPTVKDFLSYCRLVKGTVASAGKIKGLRGAKLGNPYLRWAFGEAAVIAKRDHYLVGPLSQRLEAQMGGNKFKANTVLAIKLARAVYFMLKNKTVFDPERLVASMQKCFSPGRRQPGSLTGRAKKAMPPPVPEDASCAPSTALCVGQASSPAP

SEQ ID NO: 497909 - protein, 354 aa, unidentified
MIVLGADTHKRSHSIAAVAATTGELLDELTVQVGQRGFDALLRWARALDGERVWALEDCRHVSGVVERFMIGRGERVLRIPTHLSAGARKSARQRGKSDPIDAIGVARVALQEGLESFPVAHLDGPELDLRLLVDHRERLVRQRVALNSTLQWHLHDLWPELELPGSSLFYDRWAPRVARRLARAEQTMRVRIARDELRRIRELSQAIKALEREIASLVAAIAPQLLSEPGFGPLTAAKLVGEIAGAQRFATPAKLARAAGVAPIPASSGNTQRQRLDQGGNRQINAALHRVIVTRARCHPATRDYIARRQAEGKSTREAIRCLKRYLARDVWRLLQPPHPVQGTPPSPINFLT

SEQ ID NO: 497910 - protein, 344 aa, unidentified
MLYVGLDLSRKRLDFDARLAGGELVERGAVPPDADGLAGLVRRLGDAQVLAVIESMNGARYVHDRLELEGWDVRIADAVKAKGLAPLACKTDKIDAWVLAELARLNLVPEIWLPDPAVRGERERARFRLHLVKHRSALKNRIHSILIAHGVASPSSDLFGMGGRRMLERLSLPEPWRSTTAASLALIDTLDEEIERCERELRSLGADHRYVPLLVTCPGIAWILAFTIASEIGDIARFPTPVKLVGYSGLTPRVEQSGESDRRGPLRKNGPDHLRWALVEAAHGASRHALYRPILERNRDRHGRKRGTKIAALTIARKLAEAIWYMLTRNQPFAPAGATRPLAA

SEQ ID NO: 497911 - protein, 378 aa, unidentified
MKKHSIGSKNSKGEKKQPAKRRQDKPTGLTIGMDLGDKTSRCCAIDRDGEVLFERSVPTTKKGMAQLFGALGRCRIALEVGTHSPWVSRQLSGLGHEVIVANARQVKLISQSTRKDDKLDARTLARLARIDPELLRPIRHRSERAQIDLMQIRVRAALVEARTGLVNTARGLAKAIGERLPKCDADYLDVERMGSLPVPVQQVLKPLLEEVESLTESIHACEERIEQIARTEYPETELLQQVSGVGTLIALTFVLTVEEAERFQKSRDVGCYVGLRPKRNESGERQPQLGISKEGDLYLRKMLVQGAHHILSKRGPDTDLKRWGLKLAEHGGKNAKKRAIVAVARKLAILLHRLWVSGEVYEPLRNSQAPLAAKKKVA

SEQ ID NO: 497912 - protein, 352 aa, unidentified
MEKNNKLDFGGQHIYVGMDVHKKSWSVSIHTEQFEHKTFTQPPEVEKLTYYLERTFPGATYHTVYEAGFSGFWLHDKLREKGIDCMVVNPADVPTKDKERAGKTDRVDCRKLARGLRNGEIKGIYVPPRVKVEDRTLMRTRQSMVRKQTRCKNQITSILFFYGIVIPEDGRWSRRFINWIESIRMERASGDFALKAHLEELKHLRQIIANLNKAILSLSRAEEYRADVLLLKSVPGISTLTAMILLTELADLSRFASLDKLASYAGLVPDIRSSGETEYSAGITFRRNAALRALLIESSWIAVRKDPALTMAFNKLSTRMKKTKAVVHIARKLLNRIRFVLKNRQEYVPAVV

SEQ ID NO: 497913 - protein, 427 aa, unidentified
MISASIERCAGIDVGKKFLAVCVMVGPLEGEPRVEIRKFGTIRAELEGLRDWLKQQGVTHVVMESTGSYWKPVFNVLEDAVKVYLANPQEVKNRKGHKTDNKDGWWLAHLLRHAMIRPSFIPPRAIRELRDLTRRRKRLLGAGTSERNRVQKVLEDANVKLGNVLTDLFGVSGQLMLEALLRGQAKPEEIAQFAKGRAKKKIPEMIAALEGHQMSDHHRRMIRYSVDHMRFLEEQIAQLDKDIAARIREAGLEPQWQLLQSVPGVQETSAAAILAETGTDMTQFPSEKHISSWAGICPGNNRSAGKNRSSHTTGGNRWLRGTLTECAWAAAAKKNCFIKDKFWRITTKSGGKKAPAVVAIAHTLLILIYQALNTSQPYQDKRVPVLDQRQKQRMIRHHIRRLGKLGIAVCSPRPGSSATATSPPTST

SEQ ID NO: 497914 - protein, 347 aa, unidentified
MRFYTKQHKYYCGIDLHTKKMYVCILDSEGKIRLHQNIRTDPESFLQILTPFREDVAVAVECMFTWYWIADLCVQQNIPFVLGHALYMKAIHGGKAKNDKIDSHKIATLLRGGMIPQAYAYPAKMRATRDLLRRRNHFMRKRAELFAHIQNTRSQYNLPDPLKCIAKPQNREGIVERFEDPSIQKSIGANLVMIEAYDRLLTPLERDIIASAKEHDLRSYALLQTIPGVGRILALVILYEIESIERFPSVQDFVSYSRLVKCTKESNGKIYGTNGNKIGNAHLKWAFSEAAVIFLKGNEPGKKYLERLARKHGKAKALSILAHKLGRAVYFMLKNKEAFNQKKFLGF

SEQ ID NO: 497915 - protein, 366 aa, unidentified
MLYLGIDQHARQITVSLRDDKGDVLQARQVSTEPKKINAFFEQLTRERLRNGESFVAVLEVCGFNDWLIRMLRDYRCHKVILIQPDERKNRKTDRRDAAGLSELLWVNRDRLLHGKPVRGLRQVDIASTTDQENRRLTMLRKEAGQSRTRMVNKIRHLLRRHNLQWEMPTKRLPTLSAIAWLKQVVLPEIDRLEMNQLLTDLEQVRQRLKELEGVIAQRSGASKEAAIIATMPGVSHFTATSLACRVGRVERFPRAHSLANYWGLTPGCRNSGENNQRLGSITKAGSAMARWLLAQVTHKVLRKDARLREWFKRIKRRRGSSIARVAVMRKLATIIWHMLSKRKTYAECRAVTEAGTNEREKQGCG

SEQ ID NO: 497916 - protein, 364 aa, unidentified
MHYVDNTELSSHEETRCQFNGGTGAIKLGIDVHQDFYVVVEQVGGSNPKPPQRFRKEAFLHWATRLKQKSGAQVHAVYEACGFGFALQRELSALGIHCYVVCPQKLDERNKRVKTDGLDAKALCLKLDRFVQGSRDALAIVRMPSEEEEQARALHRQREQLVKARKQLEAQGRSLMVNHGLEPVQNWWKPRTFAALPAPQWMKELLANSQPILVALQQKIAALTVQLQSAASPDQPRGLGKMTSVIIDREIGDWNRFNNRRQIASYTGLCPGEYSSGNTRLQSCVTKHGNPRLRAALVELAWRLVRFQPNYHPVRKWRAVLAKGALATGAARKKAIVAVARQLAVDLWRIKTGRLRAEELGLIN

SEQ ID NO: 497917 - protein, 444 aa, unidentified
MAMRKREDEVFPNAAGIDIGASSHWVAVPRHLAEAAGDEPIREVGAMTDDLNALARWLVSLGVDAVAVESTGVYWIPVFEVLEQHGLKVWLVDARQMKYVPGRKSDVQDCQWLQKLMSLGLLRAAWRPSAEVCVLRAVARQRETLITEQASWVQRMQKALVQMNIQLTEVITDVMGQTGQAIIRDIVAGERDAKVLVRHRHRRVKASEADIIKALTGNWREEHLFVLKQALGVYDDIGRHLAECDAKLEALLDERVAAKVDLGPAPRAGSKSRAEHDIRQRLADWAGVDLTRINGLGVTVVMKLLTEIGPDLTRFASVKHFCSWLGLCPGTKISGGKVLSSGTKRSASRARQALKMAAQSLCRSESALGAFYRRLCSRMDKPRANTATAHKLARMVYFMLTRGEAFVDQGQQRYEEMQRQRNIAALKRRAAALGYQINPMEAVA

SEQ ID NO: 497918 - protein, 445 aa, unidentified
MSERTIAREAPGIRATHDSATMHATQRKHMNTWHQLTHYAGFDWARDHHDLVIVDPQGQIVAEFRIPHTLAGWQDFRQKVSAYPALGIVIETNQGAAIDQLLQIDLTVYPIHPVAAQRYRERKAPSGNKIDRLDAWSMADALRLDGRQWKALQPLDPLTQQLRLLCRDEISLIEQPTALINQLQQALSEYYPAALEAFEDWTRPSTWKFVIEFPTPQILLKRKRSRWEKFLHKHKLWRPDTAEKPLETFARAQAFCGSPAVTAAKSLLAVSLARLLGLLQGQLDEYRTQIEKLFEQHPDSGLFGSLPGAARFLAPRLLGEITADPERFDEPQALQCLAGTSPVSYQSGQIHKVQVRHQCHKLLRHVVHLWADCARHAAPWAQTYYQKKRQEGMSHACALRCLGQRLLKILWKIIQTRSPYNADVHTKNQLAHGSWVLQLMSPKPA

SEQ ID NO: 497919 - protein, 510 aa, unidentified
MKVLYERVAGIDVHKDMVKVAIRSPGEKPWTRKTEILEFRTFYGVLQEMARELRRRGVTHVVMEASGVYTEPVYYALCEQDFEQVAVINPAHAKALRGHKTDAKDCARLAELFECGLLRGSYIPPAELKEMRDLTRYRMKTVQARTSEIQRLGKALESAGIKLGSVASSITGVASTAMIEALIDGERRGGVLADLAIGRMRAAGKLTDLSMALAGRFTGHHALLCRLHLDRIAVFDDAVDGLDKRITGKAARWQREAGLLTSVPGFGDVVAQAWLGEIGPAPHRHFATHEKLASWVTLCPGNNISARKRKHGRTGDAGTYIKPMLVQAAWAAIRVRGRLQARYNRLVRRFGGDKNPGAKKKAITAIAHTLLKIAYQVLKSGTPYQEPGADFYTRRESPEHKQAWLERQLQKLHPGCTITVTISPPEAALPASTKTTSPIPTAPEPPPTQAPRPSRRTSQRHCPALATAQARVHCRAPTRDPVIVSGTGPPCRSIGLVNWAGPVGEWREGA

SEQ ID NO: 497920 - protein, 356 aa, unidentified
MLNKQIIWVGIDVGKKESVCAIDWHNNQEISDSNNLISLPIKSIANTSEGVKRLFNWLKANKKDIEEQMRPQRQVVYQFVMEPTGCYSNLLIEHLKAKKKDVYIALVNPGKMPAFKMLINVKTKTHKLDAQCLARLGSIQKPKARYEMPKDYAGLRHLTLMRSQLVRAATIFKNQLKSMDVPGERLFFQSPLDSVKSEIKNLDDTIKAYLKQHHSLQRDLFHLISIPGIGIVVAATLLAEYGPKCRFINVRQIVSFAGLNPKNKFSGTSVKSTHLSKQGSPIIREVLYSASLTAQPRIPLLDELSKRLIKLTPMQKRCAVMRKLLTICWSVLHNDRDYMEYQPSSKKLIPLSEQKK

SEQ ID NO: 497921 - protein, 411 aa, unidentified
MEVVHARCAGLDISKKDAKVCVRVAGAGRRKTVETVTTWSSMTSQILSLREHLMAERITCAVMEATGDYWKPFYYLLEDAGFELLLVNARHVKNLPGRKTDVADATWLAQLGAHGLVRGSFVPPEPIRQLRDLTRARTALTRERSREVQRLEKLLEDAGIKLSSVACDIVGVSGRAMLEALIAGNNDPGALADLAKRRLRSKIPALTEALTGRFNEHHAFLARVHLDLIDQHTAAIDQITARIEETIVPFQGFRDLICTIPGISVLTADVVIAETGADMARFPTAHHLASWAGTTPGNNESAGKVKSSRTRPGNPYLQGALGAAAMTCAQNPRTYLGARYRRIAARRGPQKANVAVQHSMLVAIWHMATNGCLYDEPGADYFNRINPDHAKKRAIHQLEAMGYKVTLSNAS

SEQ ID NO: 497922 - protein, 366 aa, unidentified
MPIYCGVDFHARQQLVKWCNTDDGEIHEQQLGHESIADVRDFYGQFSGEVIVGFETSGYSSWFEAMLEELGHQVWIGHATEIRRRARSRQKTDRRDAELILDLLLKNEFPRIHRVKAASREVLRQLRYRHRLVQQRTRSYNSLQAIALGAGVSLKAKLKTRKGKERLLGLSVSEAHSRQRQEWLDLIAQLNGYIERVETELELVAEADERVQLVRTHPGVGLLTGLALVHTLSPVSRFANSRKVAAYVGLEPREYSSGERQQFGGISKAGSRLLRLLLVEAGHKAINKDAQLKQLYHRVLQRREKAKAKVAVARHLLVRTYIMLRDEIDYAEFVRRGVAVQSARVSYRPQVPGKLIERLASEQQLS

SEQ ID NO: 497923 - protein, 412 aa, unidentified
MKDLLEISCGLDVHKEKIVACILTGPLGKPTRSEIREFTTLIPDMIELRDWIVSQNCHHVAMESTGIYWMPIYEILEDAFSGDITLLVVNARHMKNVPGKKTDMRDSEWISTLLRAGLLNGSFIPEKRIREFRDLNRYRKSVIRDITSQKNRIEKFLQSSGFRLSSFISDIFGASGRNIILHLIEYGQIDKTALDSCLKTKTRNRIDEILMSVNGTLSEHQRAFLRILMTYYDSLKKHLTEIETSLEEDMAPFTLQVEQLNSIYGISTTASCAIIAEIGIDMKPFKTAEHICSWAGLCPGNNESAGKRKNTSVTKGNPYIKSMLCEIAWVIAGKRNTYLSAWYWRIKQKKGAKKAIVALARKLLVIIYTMLKQGTLFDESYFETRRKNCEQKQLSRYIRELEKHGYHVEAQS

SEQ ID NO: 497924 - protein, 296 aa, unidentified
MNATTYGMDIAKNVFQVHWVDGNTGEICRKKLPRGKVTEFFAVRPAGRIAMEACGGAHHWGRTLGPLGHQIELLPTHQVRPFISGNKDDAADARGIWLAAQHGDIRRVAVKSSEQQAMLSLHRMRTHWVSVRTATVNADQRCRAGGHGAAGGRSTTRPCEHRTARPSDGRGDQPDAQEPESARRLRDTRGSAVLGATALAATLGDGTSWRNGREFACVALGLAPGHRGTGGKVHREHLQAWKAYLRTLLINGARALASQPRAPGPVDRGAAGEAPPFQRGGGRHRAQAGTTAWALA

SEQ ID NO: 497925 - protein, 314 aa, unidentified
MIGLDVSKDTLAACCWERDQSAPTWERTYPNSEAGIRQLLKDTSAEEPWVLEPTGPYALLAVEMAVAAGREARQADPLAAKRYLQSRSLRAKTDRVDARGLACFGLDRELPPYRLKDPQLQRLWELLQVRRTLTKALATLRQQRRVLASVGAVVDDGIATLQQRVHELNRQIQAAGRQHELFGRLLKVPGIGPISGAALTVRLLSCDFPTDDAFVAYIGLDVRIIDSGKRQGQRHLTKRGDAQLRWLLYLAARATRRAKDDPGFSELYQRKVAEGCTTTGAFCIVARKLAKLAWAMARHGEKYDPARVFTQRKA

SEQ ID NO: 497926 - protein, 504 aa, unidentified
MGYRDSQTLFEGGIEVSTTSRKLKFTPFPQRFFDPVVPLLKDYCFLLSTPENIHLGYYGSPIIHGDTIHHQAICSVEKQEELILQKEYRVFKESPKGDEGGSMFYLGIDVAKKSSRYLVLDSEGKRIISFSLENLKERFQNLLSRLQEAKIATKDILAGLEATGWFWENLYQFLQEKGFKVVLLNPYYVNKFREALAKKAKTDDIDALVIANLLRTGEYMNSVVPEEKIQVLREYTNLRYEFLRTRQDYQRKVISLLGVVFPEYERTALKNPFGVAPLQILKEFPTAKDLALAKPRHIEKIVRSIQGNNFDLKEIQSLIDWAKNSIYSGRAREARGVSLKMLLGQVQALNSNIQEIDKSIEDILSPGTDDSFPGENLLSIPGVGKKTIAAVLSYLGVDGSSFCSAKKVTGYVGFFPRLYQSGETKRENRISHRGPKVLRWALYMSAVSCLIHNKEMRVIYQRKISQGKSAKQALIVVAKKLLEVMLAMLKSGKPYNPIQVYANT

SEQ ID NO: 497927 - protein, 320 aa, unidentified
MEKLIFDQVVLVGCGIDVHKDIIVATIRKSEKEYETKEFRSYTSSLTELREWCKSERVTHIAMESTGVYWKPVFNILEEGDFEIILVNARHVRNVPGHKTDKKDSQWLSKLLLSGLLKASFIPPVEIRDLRDLVRYKKKIVAQASSEKNRIIRILEDANIKLSSVLTNVDGAVGSRIIDDLIAGNTKVDQLMEHYHGKIKVSKAEFRMALQGRLTPHHQFMLRVIKESITDKERLIAKIEKQIDELAKQYSVEIELLQTIPGVAYDSAVSIISEIGADMKQFSSEQHLSSWAGMSPGNNESGGKKKAQPPSTETNSCNQP

SEQ ID NO: 497928 - protein, 400 aa, unidentified
MGIERMSVGLDVHARSVVGAAVDGFTGEVHRRRLTPDAGEIVAWVRSLPGPVRVTYEAGPTGFGLARFLAAAGIECLVAAPSKLQRPTGDRVKTDARDALHLAKLLKLGEIVEVMVPGVAQEAARDLVRAREDVRADLMRARHRLSKLLLRQGIVYFGGQPWTDRHDVWLRSQTFAETGRRVAFDSAYEAMLLTSQRRDRLDVAITEMALNSGFTEVVHRLGCLRGVSTLTAFGLAVEIGDWHRFTGGTIGAYLGLVPTEHSSGGSRSQGPITKTGNTHARRLLVEAAWHHRRAYRNPGATMRTRWEQAPPAARARGHQGNRRLHQRWQVFNERKKKPVIANVAVARELAGWCWSLAVLEQPPHHLTGPGRGRRTVAARGTTRGTPMSNPRAGSMITLDL

SEQ ID NO: 497929 - protein, 392 aa, unidentified
MYIVGIDIGKNHHEASIVSPKGKQIGRSLRFATTHKGADSLMSFIFKNIGNSPCVFGMEATGHYWYPIYSFLKAKGYTIYVINPIQSDSLRKMYIRQTKNDSIDSFLIAEVIRFGQFGTTSMADENILAMRQLCRYRDSVISSRTEIKLRIGTIMEQIFPEYEKQFSSLWVSTSMGILEKYLTPENIENAPIDELFEIIKDKSHNRLTRAKAISIKEAAADTFGIKIAQDAFSFQLKQLIDRMNFLDKQIEALDCQILEYYEKFDCYLHTIPGIGMIAAATILAEIGDINRFKSSSALVAFAGIDPTVRQSGEFSSTHNHMSKRGSPYLRHAIFLAATTCSFHNSPLNAYYKKKRDQGKHHLTTTGAVARKLTSVIYAVLRDSKPYEPKSFC

SEQ ID NO: 497930 - protein, 435 aa, unidentified
MGQERLLIGIDFSKSRSDLALLKSNGQILKAHKAFANSRAGYDQAKELILKTIQEHNLTGLDVAGEATSYYWLPMFIHFEEDTDLAAYSPNLYLLNPKWVHWYKKAQPKDHKNDQSDPRYIGDYLRVHRPTTSWHYDDRWAPVRILTRLRSHLVKTVTREKNLLSLYLFLDYTTYTDRKPFSKHLSAISQTLLKDPTLLESFADDDLEDLVELLQEQSNNSLKDPLESARRLRQVMQERYELPDKLGTSIQHGIDILLDTINALQSQIKRVETQIMEMTREGYPEISWLDSVPGVGQVLASGIASEIGEIRRFLDHQVWDDHSQSYRSRRSSEVTDAISKYAGLWWPDNSSGNFQAEDKRLSREGNSYLRFYILEAADCMRRSLPVFARYYQSKADQATHHKHKRALVLTGSKALDLFVALLRKGEFYRAKEQAS

SEQ ID NO: 497931 - protein, 346 aa, unidentified
MKTAFARVIGVDIGAEKLDVNDSAARLAALVPNTVAAIRTHIVALIDEKDKTLVVCEGSGGYEHVLVDALHEAGIAVCVANPRQVRDFAKGHGYLEKNDRLDAWIIRRFGEDVELNLTPPRSPAEKALHALVLRRGQLLQTQTADQNRLAQVTDSFTRTMIEESLAHLKKQLQTLAERIQAVLRELAQTEAKVNILQSVPAVGLVTTATLVAELPELGWLNRGEIAKLVGVAPLVDQSGTSDKPRQVRGGRAQVRSVLYMAALVATRHNPVIKRFYQRLLAKGKPKKLALIAAMRKLLTILNDMVRRGEPWLEETSPAKTPPQQKEATAASSLNEGCDRLACSMHH

SEQ ID NO: 497932 - protein, 408 aa, unidentified
METIHPICCGLDVHQSSVSACLRRVTAEGTVSVESREFGTTVKELVALADWLVEAGCPIAAMESTGVYWKPVWNILSPLLDVWVLNARDVKQRRGKKTDRTDAKWIAELVAHDLVQPSFVPPPRIGALRDLVRMRTVVVQMRTQVKNRVLGVLEDTNVKLASVVSDPFGVSGRKMMEALVKGERDCKVLSEMAMGVLRRKIPQLEEALQGSFTEHHAFLIRLGLESLDQCNRQISELDSQIALLMEPLQEQASRLMSIPGVSETAARVVLSEIGTDMSRFGSAKRLASWAGLSPGNNESAGKRRSGKTCKGNRYLRRVLVECAWGARKTDTFLGRTFHRLQIRIGGKKAAVAVAHKILVIIFHLLNEAEFYDDGRYDYINEREQKRQEKRALKMLQRLGYQVVLTPAA

SEQ ID NO: 497933 - protein, 364 aa, unidentified
MTIAEESAARRVVGGVDTHKDLHVAAVVDDQDRVLATHCFATTRQGYRQMLAWMRSFGAVQRVGIESTGSYGAGLLRFLQQASVEVLEVTTPDKHDRRRRGKNDDLDAQNAAHAAFAGKRTVTPKSRDGMIEALRVLNACRKTAVAARRIALQMIQNTVVCAPDSLREVLRSMTRMQLVRTLAAWRPDLTRYRDVESAYRISLKSLARRYLELHDEIADLDVMIGAIVDELAPNLVARNSIGHAGAAQLLLTAGDNPERLRSEAGFAALCGVSPVPASSGKTVRHRLNRGGDRAANSALHIIAIGRLRTDARTKVYVAKRIAEGHSKLEAIRCLKRYIAREVFTLIAQRQREINRTRIAAVDSA

SEQ ID NO: 497934 - protein, 353 aa, unidentified
MTNTQYIGMDVHKESISIAVRNDVGKIVMECVIETKANVILDFIHGLRGELQVTFEEGTWATWLYDLLKPQVTKLVVCDPRKNSRQGNKNDRIDARELSDRLYMNKLSSVYHGGAGIRTLKELARSYLTISKDLARVMTRVKAIYRSWGIPCAGKQVYAPPHRAEWLAKITEVGVFRRAEFYYQQLDALRSLRHQVRRELLAESKTHKASKLLCQIPSIGPIRAALLIALIQTPHRFRTKRPLWKYSGFAIETHSSADYRKVQGQLERTKKQVSVRGLNRDCNHDLKNLLKSAATIASVKPGPFQEFYAALVAKGMRPEMARLTLARKIATIVWIVWKKGVSFDAQYLKPQTA

SEQ ID NO: 497935 - protein, 349 aa, unidentified
MRRDLDGGRSCHVMSAFVGLDVHSEHTFATVIGPDGRVVDQRKMLNELVPTFLKLFRVERVGLEASTHVAPLYRILVKEGYVVQVSHPKKTRYIAEARIKSDRVDSRAIAELVRLDALPLSYMPPSDIAELREKVRRRAFLVRERAKLMTKIRGVLAYEGAKPLGGYGLFTRKGVEWLHSMGLEPIECYLRIMAPLSDEIRHLSLQLRHMAGEDGDVRLLMTIPGIGYYTALLVKAEIGDVNRFGSGEQLCSYAGIIPSTYSSGGVTRHGHITREGSRWLRWAMVEAAMTHLKHDTSITRAYHRIAEKKGKQVAQVAAARRLLLCCYSVLKHGRPYRPFFMVRRSINSS

SEQ ID NO: 497936 - protein, 337 aa, unidentified
MNYCGIDVASKSSDISIINGKGKQLRRREIDTEASDIGKALKGFGELKVIIEAHPLAETVAQIVEELGHIPVIIDARAAKNLMSAMKKTDRRDAQTLAEIGRCDWYVEVHRKSAAARQMRSILQARQALLKSNKALASSIRGLLRSHGIRLCKVSKGQFVEQVKKVTAQEAPGILAALSGMLDAWVVTGERAEQIKKAMVKECKQDEISGYLESAPGVGPLISTAYRATIDDPHRFKRGEEVGDYLGLAPRVYQSGEVEYRGRITKQGDALLRSLLVEGAHVLLTKGRDCALKRWGLSLEKRKGSAKAKVAVARKLAVLLWRLWKEEKMFDAFPQSV

SEQ ID NO: 497937 - protein, 369 aa, unidentified
MTSIIYVGLDVHTSNYTACCYSMSDNRTFAVMQMEPDYKEVLKYLNRIKNQYGGHCDFHCGYEAGCLGYSLYHQLMSNKIDCVILAPSTMPSAPGDHIKTDRRDAEKIAKCLAYHTYSPVYIPDKEDNAVKEYIRMRDDGAAAFKRVKQQIIALCTRNGKLYDGKNYWTKKHLDWLQKQEFDHAVLKETLQEYLILYYTLSEKVDIYNKRIEELSRLPKYEESVKKLCCLNGIATHTAMCALVEVGDFKRFEKAANFAAYLGLVPSEHSSSDSKRRGGITKAGNAHLRRLLVEASQCQSRGKLGVKSRALKAQQAQVSPQVAAYSDKANERLKRKYFRIAMHSKHNIAKTAVARELACFIWGIMTENYA

SEQ ID NO: 497938 - protein, 412 aa, unidentified
MQAIIERCCGLDVHQETVVACLLIGAPGAQPNKEVRTFRTVTRDLEALRDWLLEAGVTHIGMESTGIYWRPVYAVLEGQFELIVGNARHIRNVPGRKTDVKDSEWIADLVRHGLIAKSFVPPRPVRELRELLRYRRKLVESQAAERNRLLKLLETANIKLASVASDVFGVSGRAMLRALIAGKASAEAMAGLARGQLRRKRDDLILALDGRLEEHHRFLLAMQLRRLEAIEADIAALDQRIGERLEPYSAPHALLMQIPGVDWVVAAVLIAEIGVDMSVFVSVYHLAAWAGVCPGNHESAGRQKSGRARKGNIHLRTMLVGAAISASRTKGSYLKDKYHRLKARRGALRAALAIAHKILVSAYHMLAQNLPYRDLGEAYLDRIGQTRTVANLKRRLERLGYKLTLEPSVRPT

SEQ ID NO: 497939 - protein, 338 aa, unidentified
MKLYGAIDLHSTNNVMVVINEHDQVVYQKRLPNDLSLIAQQLSSYRRSLEGIVVESTYNWYWLVDGLMEKGYRLHLANTAAIKQYNGLKYTDDHSDARWLAHLLRLGVLPEGYIYPKQERAVRDLLRKRGQLVHQRTANLLSIQSLISRTTGNSISAKYIKALNIQRVDGVLPNPDLVLALKANLAVMNSADGQIEILEKAVQDRVKLRPQFRFLKTVPGIGPILALTIMLETGQIERFASVGNYASYCRCVGSKKISNGKRKGSGNTKNGNKYLAWAFVEAANFAIRFNSKIKGFYQKKKSKRNAIVAIKAVAHKLCRACYYIIKDQVAFDLTKAFA

SEQ ID NO: 497940 - protein, 322 aa, unidentified
MKEKKKETISFEQVISRGCGIDVHKAVIVLTVRGEGLREETFSYSTFTEELEKMRDMLKAKQITHIAMESTGVYWKPLYNILESDFEIILVNARHIKNVPGRKTDKKDSKWIAKLLLSGLLSGSFIPPRHIRELRDLTRYRKKITGQIASEKNRIQKILEDANIKLSSVVSDMSGATATKIIKAMLDGVEDIQELVKYRHGKMQATEEELAASLKGNLTEHHKFMLSIIKKSMGEKESLLLEIDERIDKLLELQKIDVDSELLQTIPGVGKIASAGIIAEIGTNMEQFPNEQHLASWAGMSPGNNESAGKKKVVEQPMEINI

SEQ ID NO: 497941 - protein, 335 aa, unidentified
MLFSITIGVDSASEKFDWHALDSQEVELGYAETKNTSTAIQAQFTTLCIDHKVRPENVLVCIENTGLYSLRLAYELHLEKFSVWMVDAFHLNHSIGRVKGKTDKLDAYRIAKYAVRNTKDFSAFTPNSKALAKIKTLMTQRKRMVKAKNLLMVPINEERKHSPYDLSDCYEETDSVVALAKSMIKAQDARIDKALKTSPEHSQTYATLQSAPGIGPITARLVIAKTNNFANGFDGRKLCSLAGVAPFPRESGKCLKKRPGNGSGSDRELKSCLYLGMLRQIKMDNKMGKYYAKKIAEGKHHNSVINAMANKILHTVVACLRKGVMYDENYTHKLA

SEQ ID NO: 497942 - protein, 423 aa, unidentified
MKYALVRVLPEVPPGGVCAGIDWASADHAVCVVDLAGRVRDRFTAVHDRAGIARLIARLRGSGAAEVAIERGGGVLVDALLAAGLTVVVIGSRQVKNLRSRYISSGGKDDRSGAFVLADTLRTDRARLRPLVPDSPATIALRAAVRARRDLVAHRVSACNQLRAHLAVAFPGAIGLFSELDSPVSLAFLAAFPGQQAAARLDEQALAAWLATVPRRGNTAPAGVLAARLAAAPRGAAGADAAQAAVTTQLAAATAGLAGRVRALEAEIAAQLSAHPDQHIFTSLPRAGTLRAARLLAETGDCRARYPDPWSLAGLAGVAPVTRRSGTYISHEFRWNVNRQLRDAICDFADGSRHASPWAATVYAAARDRGKDHPHAVRITARAWVLIIWRCWQDGTGYDPAKHRALQDILTRQSAAGTPQPHR

SEQ ID NO: 497943 - protein, 443 aa, unidentified
MSFDRLKRTQKGKRLPGHKLKPSRATLFVQNSKPHLSMKPTYFLGIDAAKHKIRAALSDRSEHVLFEKDLSVRATGLRQLLAAIKRQVNDPEQLLVLIEATGLLHLNWSAALTKAGYAVAVINPLIARRLYTLQNSIRDNKSDPIDARGLCTIGLLHGEKLLVHYRFSLRPEQFTLQRAQSVRKALRSALTNLKKTYQSLMDLSFPELGGLLQLDGVGIRQLLIQAPTPAAIAGKRLSTLEKNWMVRPKAAALKALAADSMADPDLAAASGPALVALLQSVAAMEARLHALDQQIAKLACTSVDPQTKALIETIPGFGPVNAAKTLAWLPTEILHSGSNRKVAARLQAFMGNDPRLRQSGQWKGHTKMSKRGVEMLRTAFFQSAFSAAHNDPELRTYYQCKRAQGKTHEVALSHLMRILTRRLVAVLRSGKPYQSHYNLKNAA

SEQ ID NO: 497944 - protein, 421 aa, unidentified
MRGFGLDVHRDFCEVAIAEEGRIRSAGRIPTRVPSLELFAQSLAAGDVVALEATTGADKIVSLLQGHGVRVVVANTRKLKSITEAKAKTDRLDARTLARLLVSGLLDEVWTPDERTRTLRRLTNRRERLVRARTRAKNEAHGVLARNLCERPPVTDAFGKGGRRWLAELQLPLDERLTLDGCLRQIDFLDAEVAALDSEIAKQALAWPEVLRLMSVPGVNVQTAATFMASVGDVRRFSSPRKLVSYLGLDPRVRQSGSGPARHGRISKAGASEARHMLGEVAWKVMVTPGPLRAFLERVRARRGPQVAATATARKLVVLFWHLLTREEDYAFARPAMTRSKVRRLELLAGAPPQKGRKGVAGGKSKAVFDAERELSRQAEAAYRRLVSDWRSSGPRKAGAGATPGRASSGPSKGKAARQTP

SEQ ID NO: 497945 - protein, 312 aa, unidentified
MAILSFCGIDVSKDRLDVVVLPEGRFCSVSNDAAGWAELVARLHPLAVSAIGLEPSGGYERGIIRALLAAGLSVRRINPNKLRQFARARGVLAKNDRLDARLIAEYVAIMPTRVVQRDDAVERLAEIVTMRRQLCDEHVAVENQAAHLEDAMLRRLSKRRLIRLEADIRLLDKRLAEMVATNAAFAQLYELLTSMPGVGPVLAFTLIALLPELGKMSRKQIAALVGLAPYDFDSGKLRGHRSIYGGRMPIRNVLYMAALSASRYNPALRAFSNRLADANKKSKVVIVAVMRKMITTLNAMLRDNTAWQLKST

SEQ ID NO: 497946 - protein, 320 aa, unidentified
MSVEIKTVYVGVDVAKATLQVHLNGAQIELKNAPAAHAKLCQKLQSIAGAQVICEATGGYEQALVLSLNTGQVPVSVVNPAQVRASAQAKGQRAKTDPIDAAMLTDYGQRYQPAPTPPVSKNQRRLVALTQWLQQLIEAQAVAKTQSEHHSDAFVGEGHQALIAHYGSQIKATEVQIQKLMEKDQILKQRVECLDAIQGVGSRTAVLILTHMPELGQMNRQQVAGLAGLAPWTRDSGTMKGKRCIGGGRPEVRVALYMASLSVVRCNPILRVFYERLVAKGKPKKVALTAVMRKLLVYMNHQLKTLARQPMSAEAQEKSR

SEQ ID NO: 497947 - protein, 411 aa, unidentified
MADRTFTLYAEDASGEALGHLDEVANQPVGFERAQVWLEQLRDRHQLRLIVLAMETTGVFYWAWWDYLADCPRLARVLYNPRTTEHMTEVLSKKVRNELVDAFALAEQVRHGATPEVVMVEDSELLTARFASRAARDLAGQVNRQKNQLRALLRAYNPALSMVFPGPKLHHPAVYALIGTHLFPEELVAAGEEAVNDILQANCRTAFGIVEAKKLVALCRQLPCRAIGREVVRQRALHLMADIQQAKKRQQDFLHMGFALIADRPETQLLRATKGAGISNTLALVSELGGAGRFADGEHMASFLGITTSKHISGTTLHHAKHITKQGPPNARFAAVNLADKLRRYVPKYQDMYLRIKNRKPPRKGHFIALVAVARDFVANVLYDMWLNQRPFFLEVDEYRDYCRRHAGILT

SEQ ID NO: 497948 - protein, 338 aa, unidentified
MKVYAAIDLHSNNSVLGVVNEAGELLHERRYPNELPVIVEALRKFGKDLVGVVVESTYNWYWLVDGLMAAGIHVHLAHTAAIAQYAGLKHGDDFTDAQHLSNLLRLGILPEGHIYPQAQRGLRDLLRKRSTLTREQTRHCLSLQSLWTRHTGQQLSANGLRRLTTADLASRFLDAHVRQSAAVTFTLWQTLHRQVDALERSVHKQVKRSASLAHLQSTPGIGDILGLTILLETGQIERFASVGDYASYSRCVDSQRWSNGKKKGHGNAKSGNRYLAWAYIEAANFAIRFSPPIKRWYDRKHSKCHRMVALKAVAHKLARACYFILREQTDFDLTRAFG

SEQ ID NO: 497949 - protein, 481 aa, unidentified
MKIKSIYPARNSSQLREVLGKYSPGELLYAPIDVAKYNHKACAVNFFGDILTPAFEFSNNAHGVKFFISKITEAARNAKAKKIFIGLEATGHYHQNLTLHLKSLGYEVAVINPFDSWKERLNKSSKTDKIDLGSIAKSLISRKFSSSTVPEGVYYNLQRATRTRRKFVNRRTSSKNIITGLLDNLFPGLWDKEDTIFSDRWGKASLSVLEHYPTPQMILRLGEKRLTRFLKKGTTKLGEKTARKIISAAKVALTRSPYEQTMDILALRSHLQAYRLYEEIIFHLEKEIAYLLVQTPGTYLLSVPGISVTYAAEVTAEIGDISRFAYANQIISLAGTCSKKDQTGEHDPQNLPISKKGNKFLRTVLNQAGLSLNTWCPDFNAYYSRKVEEKKGRCGIARTATGNKFARLAFALMKHESLYHPHSFNTLVQDPGNYYLSVYGEILKKLRAFSSEKILPQSNYLEKIKQKLEKEYAINLSEVKG

SEQ ID NO: 497950 - protein, 443 aa, unidentified
MRSIYLPGKRRLSGKDYREEILMKGLRTKRTGTIKEGTLIVAVDIGMVSNHGCCTTADGRSTKTFKFDNTREGLDRLWNMVLASKTRFQCSEVIAGYESTGPYGEPLIHYLKQRPVTIVQVNPMHTKRMSEINDNSPLKTDRKDPRVIADVIRIGHALSVVVPEGDAAHLRRLNNARERHTKERSALLNQLQQFVFLIFPEFTRIIKTIYSKTALYILKKYTTPAKIGSAKIEELGEEMRRRSMGKFGTEHATALINFAKTTIGIQEGLEGLVMDIQHVLIQLEMLDSLIAELEHEMDITLQRIPYSRKLLSIKGLGIVTVAGLIGEIGDFTKFTTQSEIAKLAGLDLYEISSGKRQGQRRISKRGRSLLRKILYYAAMQTIRKNGIMHDYYQRLIGRGMKSIMALVAVSRKLLRIIFAIVRDNSEFILNHEFQNKKEIRKAA

SEQ ID NO: 497951 - protein, 371 aa, unidentified
MADIDGVAGIDAHKHVFTVAVLDARGGRCGIESFPTSPDGLAEVLALLDSFEFAIGRIGVEGSAGLGRHVAAFLVAAGYDVREVQANRTAERRRRRRRHKTDREDAEAIARETLADPDLPPAGKQRRPDPCWDELVAVRNRRKSLIGQRVRLLNEAEAVLTGLPLTIRAALPQTSRVRPRLRALDRGAASSIQVTAADRVNLAWLVEAAGDIARLDTRVTELDKQIPALLGRLGCTLTEEYGIAAVGAMDLLVEVGDPTRFATEAQFARWCGAAPVAVSSGEGDQAPTHHRLDLAGNRQVNSTLHVMHVTQVRGYPPARDYITKKHAEHKTKREARRAHKRHLANIVIRRMWADHAQRFETAHKPAAPVAA

SEQ ID NO: 497952 - protein, 347 aa, unidentified
MRFYTKQHKYYCGIDLHTKKMYVCILDGEGQIRLHQNIKTEPESLLRILTPFREDVVVAVECMFTWYWIADLCIQENISFVLGHALYMKAIHGGKAKNDKIDSHKIATLLRGGMLPQAYVYPVKMRATRDLLRRRNHFMRKRAELFAHIQNTRSQYNLPDPLGCIAKPQNREGIVERFDDPSVQKSMAANLEMIKAYDHTLTQLEHDIIASAKEHDLRSYALLQTIPGVGRILALVILYEIESIERFPSVQDFVSYSRLVKCIKESNGKSYGPSGKKIGNAHLKWAFSEAAVLFLKGNEPAKRYLERLSRKHGKAKALSILAHKLGRAAYFMLKNKEAFNQKQFLNL

SEQ ID NO: 497953 - protein, 319 aa, unidentified
MAQNDLVVAGIDVAKDKVDVCIRALSLRRTFASTAEGRRELASWLRRQKVGKAVMEASGGYEREWAKALRNAKIEVRIVDPKRVRSFAQSAGRLAKNDTIDAEMIAWFAETFDEARGQAYDATREQLHQMVNARQAIKDMQAKLENQGEHAMPAAIQRMHARILKTISVELVKLEAAISAMIQATPHFAELAEIIESVPGIGRTTSAALIAAMPELGQANNKIVAALLGVAPYDDDSGRRRGERHIKGGRRRTRNVFYMACLGAATQHNPVLKAFYDRLVAKGKEKKVALIACMRKLISILNIMIERRQKWDASRYAVS

SEQ ID NO: 497954 - protein, 385 aa, unidentified
MKPPPRHVRRRSALLPLQPKGDQVIVVGVDPHKRTHTAVAIERASGELRAELTVAARAAGHEELLLWARQQSQVRLFALEDCRHVSGALERFLIARGERVVRVAPKLMGQSRRGSRSYGKSDSIDALAVARAALSEPRLPEARLAGAELEVKLLLSHREDLVGEANRTSNRLRWHLHDLDPEIALARGRLDRTAWMERLSRRLQRGEQTVRVRICRQQLRRLKALAREIKGAEAELDALIRTQAPELLELPGCGTLCAAKLVAEVAGVERFPDDAKLAMLAGVAPLDASSGRQQRHRLNRKGNRQLNLALHRIAVTQARFHQPARVFLERKRAEGKGRREALRCLKRHLVRVVWRTLRAASSERMISISPNLQEIKMPTPEPVLT

SEQ ID NO: 497955 - protein, 344 aa, unidentified
MTSIDYIGLDIHKKTISFCAKAQDGTILDQGTIVARRDTLLAWAKARPRPWIGAMEATLFTGWIYDLLKPLAQELKVAHPAMLKAIAASKKKNDQVDARTIADLLRCNLLPECYMAPSAIRDLRRVLRYRNLVVRQATRMKNRIAGLLMETGTPYNKERLHGRAYFSELLASLREVPRSVVELLQLSRGQLEFFATIQRRLLKGLGQNPDLSERVARLQTIPGVGEIMALSWALEVGEVKRLPSIAQAASYCGLTSAQHNSAGKEQRGPISKQRNKHLQTILIEAAKLAPRHNPQLAVVHERELKRGDRNQATLAVARKLVAYLMAVDKSGKPFAMRASGEEAA

SEQ ID NO: 497956 - protein, 435 aa, unidentified
MTRYVGIDLHKHLIVGHVVDPAGKKLDTFRYESVDAMTLDYIGRMRLKPQDQVVLEATTHCWAVVRALQPFVARVVVSNPMATKAIAKAKVKTDKVDAAVLAHLLRLQYLPEVWQPDQTTHDLREWTARRTRVVGQRTALINRLRSTLAQRLLHCPYEMTSPTARRWIADQSVDGDTRWLLESDLRLMDSLQTELDAMDKLLAKRGYVDPRVKLLMTLPGVSQHTAQSLLAAIGDITRFRDADALASYLGLVPSTRQSADHCHHGPITKQGRGHTRCMLIQAAQSVRTHPGPLGYFFRRLRKRKPHNVAVVAVAHKLALLAWHLLTQGEPYRYAVPQATQRKLSRMRVQAMGERRRPGLPSGTKKSPARLPGGSHRIKPLAEVYASEQVPAARPAPAGELRHLAALKLNNFVGSLQQAHIVPRCRTQPENALESR

SEQ ID NO: 497957 - protein, 315 aa, unidentified
MAMPVSVSKPIVGVDVAKKELVIYHAELDLLEEIPNNKTSINKWLKDLPGSVAIAIEATNIYHLEFADLAFEAGCVIYMVGGYELKHYREGVKVRAKTDALDAKLLARYLKNEHEELHPWTPPTPLYRQLLSLFRRRAALVQARVGLVQSWSNEPLLKAAFSEQIKSMQQLETLIEKTINDQLKEAGLLGQLKRCLKVEGVGFLTGARLLTAFQRGDFRNADAFIAFLGMDLRVSKSGQKDGRRSLTKRGDPEARRLLHNAAMSASRTEAWKGFYQDQRNRGFSTTQALVMLARKLARVVFALLKGQSEYQPKTS

SEQ ID NO: 497958 - protein, 355 aa, unidentified
MKLMAGMDLHSNNLMCGIVDMEGKRVFGKKLPCSLDEVLKALEPFRQGLDTIAVESTYNWYWLVDGLQAQGYRTVLANPAGIKQYSGLKHTDDTSDSFFLAELLRLGILAQGYICPARLRPIRDLLRRRGRLVSQRTSLLLSVKSLYTRTTGGSLALKELKAAEVKAVQQWFKHPADQLISGLQMGLIEQLDQSIEQIEKAILHVRDRLPCYEILHTLPGVGIILALTISLETADIGRFAHAGDYASYCRCVNSGRTSNGKGKGQNNVKCGNKYLSWAFVEAANFARRFDERCRKFHDRKTAQTNGILATKALACKLAKAGWHMMKENKPYAPERVFGPSASKPSPEPAEKTKTT

SEQ ID NO: 497959 - protein, 348 aa, unidentified
MAHFVGLDVSVKETSVCVVDDAGKVIFEQKVLTEPADIIALLTSLGVTYGRIGIEAGPLSQWLVNALTAADLPVICVETRHMKALLTAQQINKTDRNDARGIAQMMRVGLFKPVHVKTLVAQEQRMLLTSRKLLQRKLLDVEADLRGTLRNFGLKVGVVGGSRYEARVRELVAGFPRLAAIVEPLLSVRRVMRQQFAVLHKMLLDMVRGDPVCRRLMTAPGVGAVVALTYRATVDQPQRFVHSRAVGAHVGLTPKRYQSGEIDYDGGVSKCGDALLRTVLYEAAHSLLTHSRKWSWLKAWGVRVAQRRGIRRAIVAVARRLAVVLHRMWIDGSEFRWRKDSAAVPAVA

SEQ ID NO: 497960 - protein, 397 aa, unidentified
MYIVGIDIAKRKHEAAVIDGEGTVIIKPFSFTNNCSGYNRLLAMLAKAKLPLDEVSFAMEATGHYWLALFTRLQKEGFRVQVINPVQTNSIRNFYIRQAKTDPRDALLIAEVIRFGHFSESTLHPENIYELRELCRGRHAIVSMQADVKRKVVALLDQVFPEYETAFTNLFGDTSMAILQTCPTPMELSEMPLEELCHLIEVSSHKRFRMAKAQELQELARNSFGFAMAGDVFSTMIRLYAKHLNFLKQQVREMDCKIAEIMETLDTPITTITGIGPTLGAYILSEIGDISRFSSAAKLAAYAGIDPTMRQSGEYNGVRNRMSKRGSPYLRHAIWLAASSAVLHDPALKLYFQKKRDEGKPYMASVGHACRKMVSIIYAVMRDNKEYVPCIPNEISA

SEQ ID NO: 497961 - protein, 346 aa, unidentified
MNQEQFVGFDVSQAETSVCVVDGSGKVVWQGKCASTPEAMAATVRRRAPHVTRIALETGPMSAWHYRSLTALGLPVVCIDARHAKAALAMQLNKTDANDAVGLAQIVRTGWYREVAVKSEQSHRTRGLLAARAKLVGMRKEIANQLRGLLKVFGHVIGAVGGEKFDTRARELAAGDATLTITAEALLAARAALAVQIARLDKLLLSQARQDPACQRLMTVPGVGAITATAFIATIDDPARFKHSASVGAYLGLTPRRYQSGTMDVSGHISKAGDVLLRCYLFEAATTLLSRVQRTSALKEWGTRLAKRIGHKKARVAIARKLAVILHRMWADKVEFSAMPRVAAAA

SEQ ID NO: 497962 - protein, 337 aa, unidentified
MGRQYVGIDLHRRSSTVYRMSADGEVLGCARIPSQPFELAEVMAEAGPGPEVVLESTYGWYWAADLLSELGATVHLAHPLGNNWGNRRVKNDERDARDLAAMLRLGRLAEGWIAPPPVRELRELVRYRFRLVNHRTSCKAQVHGVMAKNGILPARVELWGPGGNAQLDSLELAPAYALRIASLRKLIAYYDGELKSLDALIHGELKDDVGYRAIQRIDGVGRVLGAIFVAEIGDVGRFPSPEHLCSWAGLTPRHRESDEHVVRGPITKQGSPLVRWAAVEAISKYRGGPKLRADYHRIAERRGKFKARIAVARKLLTLVFYGLRDGEIRSLAQPEAA

SEQ ID NO: 497963 - protein, 344 aa, unidentified
MEVAIGVDPAKGSLAVTAVDPLGRVLDGGEFTNDPRGHRALLGWVRERGPGRVIGIECSLSYGASLSRLLLGAGEDVREVPTTLTHRERRRRRSQGKSDLVDSVAVARIVASGEVLPSAHRVEVLTDLRALVDYRDQLVRARTQVANRAHADLLNIRPGYGREVPNLRAKVHRARARSVVRGDRSVRAELVRKRLGELSRLDGDIAAVDRRIVAMVRETGTSLTEIPGVGPFIAAKILGEVGDPSRVRSKAAFAVLTGTAPLSASSGQTHRHRLNRGGNRQLNWALHYIALVQCRILPDAQAYMARQREAGKSHKEAMRCLKRHLSNVVYRHLQADGREAERVA

SEQ ID NO: 497964 - protein, 333 aa, unidentified
MQSAKKIVGIDVGKEKLDICYPSGQKETVRNIRSCRTKVIKKTAKLGAFIAFEATGPYEEPLADECLARGVKAVRLDAWGTRKFAESQGRLEKTDAIDCEMIRDYAASLKDEKLHFIKPRTEAQKRLKKSVRTRKNLLKARAIIANQFEDDLDPETARHLKSALNSLDKNIAKVEAECDAAIASDERLRELDRRFREVKGVGPCLSRIVLAQCPDIGDFNSKSIAKMCGNAPLDHESCTIKHKAKPRRGRSDLKKALYMAAVSASRNNHILREFYQRLVANGKPRKVALTAVSRRIAILLNTIAKHPDFKPAQDPKASAKAGGAKRGRPRKVK

SEQ ID NO: 497965 - protein, 391 aa, unidentified
MSMYFLGIDISKYKHDCCIISAADQQVVSMFVIRNDKDGFNELLKTLNSLSSPKDIKIGFESTSHYALNLELFLEKAHHSFMEVNPVLISEYKKSTTLRRTKTDRVDCESIARWLMTVEYKPHPNGFYHAYSLKSLTRLRDRLIRQRSLYLVKLTNVLDHTFPEFKPFFGERFSKTAFYLLETYGTAEKMSRMNSASYEKIRVLSRGKFSPQQFLALKEIAANTVGVSNEIFETELTCLLALYKGIAEQVDCLETKIVELISEIRPHYISIPGVGPISAAVIYAEFGDVSNFSSPAQMLAFAGLEPGVNDSGTESHGGRMVKRGSSHLRYVLMNCALPLIRFDITFATYYAKKRAEGKPHRVAMSHVAKKLVRVIFALERQKTDFVTAALR

SEQ ID NO: 497966 - protein, 337 aa, unidentified
MMYSGIDLHSNNSVVAIIDDADRIVAQKRLPNDITKIVGFLARWQDDLAGVVVESTYNWYWLVDGLQDAGLHVHLANTAPIKQYDGLKHSGDETDAQHLAHLLRLGILPTGTILPREHRVVRDLARKRMQLVNCRTTHVLAVENIMARQLGERMTSNQIKQLTADTIDSLPLAADVGLAIKANVAVIATLQSQIEVLEKRLQERVKPQPQYGLLTSVPGIGQTLATVIFLETGPIDRFADVGNFASYARCVDSVHTSNRKKKGEGNVKNGNRYLAWAFVEAANFARRFCPEAKRFHERKKARTNNIVATKALAHKLARASYHILKEGKPFDATRCFA

SEQ ID NO: 497967 - protein, 343 aa, unidentified
MQTITTIGLDIAKSVFQVHGVDANGSVVLRRQLKRRYVLAFFQKLPPCLVGIEACASSHYWSREHQALGHTVRLMPPAYVKPYVKRQKNDAADAEAICEAVTRPNMRFVATKTPEQQSCLTLHRTRHLFIRQQTAVINSIRAYLAEFGIVAPVGRSGVEALLEVVADANDTRLPEIARACVAALGTQLLSLKAQILAFDRRIIAWHRSNETSKRLDEIPGVGPALATALVASVADPKAFRSGRDFSAWIGLVPKQNSSGGKEKLGSISKQGDRYLRSLFTAGALAVIRYAKLHGTKHRPWLTALLARRPTKVAAIALANKMARMAWAMMTRGERYKEPVALAA

SEQ ID NO: 497968 - protein, 366 aa, unidentified
MQKSSTMRVTGKRIFNGRQLTIGLDLGDRWLFYCVVDEAGEIILEQKLQTTPEAMRRAFGKMPRSRIALETGAHSPWVSRLLTQLGQEVIVAHARNVRLIGESRRKDDRIDARTLARLARIDPQLLSPVQHRSAKAQIHLTVIRARAGLVSARTALVNTARGLAKSYGERLRKCGTQQVRRQMATGLSAELREALEPLLREVESLNGRIQEYDRRIAQLTKQDYPEVALLQQVKGVGELIALTYILTIEDPHRFRKSRDVGCFLGLRPGRRNSGQSEPQMHISKEGDRYLRTLLVQGAHYILGPFGEASDLRRWGLKLAERGGKNAKKRAIIAVARKLAVLLHRLWVSGEVYEPLRNSQKAVCAAA

SEQ ID NO: 497969 - protein, 342 aa, unidentified
MQITTIGIDLAKTVFQIHAVDSDGATVIRKRLRRAEVLSFLAGLEPCLIGMEACATSHYWARELTKFGHTVKLMPPAYVKPYVKRGKNDATDAEAICEAVTRPNMRFVPVKSPDQQAVLMLHRTRALLIRQQTMLANAFRAHLAEFGIVVAQGIRHVRTLIEKVFGEDTIDLPVLARIALRPLVAQLMELRLQIKMIEKELLAWHRTSQESRRLETIPGVGFITATAFAATVTDPSHFRSSREFSAWLGLTPRQKSSGGKDRLGRISKMGNRYLRSLIVVGATAMIRYAREKGPVSARWINALLEKKPARLVSVAVANKTARIAWALLVRKEDYRASMPVAA

SEQ ID NO: 497970 - protein, 322 aa, unidentified
MSGSILGVDIAKKKFDVALLINGKPKHKVFPNNEEGFELLMAWLQKQNVDHVHVCLEASSTYGDELATSMHDAGHTVSIVNPARIKGFARSELLRTKNDKVDASLIARFCLAMHPEPWIPPPLVIRNLQALVRRVDALITMRTQEFHRLGTAQDTIEHSIREHVVYLDRQIEAIKQQIVDLIKNDPDLKAKRDLLKSIPGIGEATIAAILAELHMFERYDSVGKVVAFIGLAPRQFISGSSIKGKPRLSKVGHARLRKALYMPALVSIQCNPIIQTFYHRLKEKGKNGKVIVCAIMRKLVHLIFGILKSGRPFDPNYTPYCA

SEQ ID NO: 497971 - protein, 356 aa, unidentified
MIANKVSRKSKKDNSSLTETESYDHYIALDWSERNMAIARMGKKDSEPKVIDVPTDLKGLKKYLSNLKGKKILTIEETTTSHWLYVELHDHADKIFICDPYRNRLLSDGPKTDRIDAGKLCKLLKNRMMKEVFHSTNELYELRKLVSYYDDEVRAGVRLLNQKSALYRAENKSWKKQEQLEASQVNKFIVAQLDEKIESYHEKHKKYEKEFERISKNNKVLKSLKTIPGLGPISSVTILSIVIDGKRFKSNNHYLSYCGLVKHEKQSGGRSYGRRLPRYSRRLKAVYVSAAVRVASTENPMREYYEYLLKEKKLPDYNAKNALARYIAKVSLGIIKSGEKYKPYKWRDNKKAKAAA

SEQ ID NO: 497972 - protein, 388 aa, unidentified
MDVLYQSCAGIDVHQANIVVCILHGPLTSTRPKREMATFDTTTKGLRACHDFLSQFHVEAVGMESTGVYWRPVWHALCDDFELILAQPAHMKAIPGQKTDKKDAHWIAKLTRIGLLPRSFVPDETIQELRELTRQRKHYVESRNRETNRIHKFLQSGGIKLTTYIEDIMGLSGRNLLQLLVDGTPITPRIVHQSVYTSLKKKVPQLLEALDGYFSDHHRFMLKQSLEIYDFYQKQIELLEERMNVYLSQYENHVETLDSIPGIDVITASVIISEVGVDMSQFPTFGHLASWAGLCPGNNESAGKKRSTKIRHGNSYLKKCLCQAAFAVKRQKGSPLAERYYQIQSRRGSQKATIALAHQLLKIAYILLKEQMTYPEFLAQKKRLLGTS

SEQ ID NO: 497973 - protein, 416 aa, unidentified
MGDLRQRALPVDTLVVAVDPGKVQNRVWLSTDTDGLRVEPITLPVLRPGLDELDRLIMLHRGLRPPVIAIETTGALHQAWVSELSRRFPGSVRLFAPSETSAARAQLGSRRFKTDDRDCAALTYLARQGHGRPVQADDQDALLASVRFRRGLLAERKPAQQRLHDQVNALCPGLSAPPGHGRKLDLTGVAGQAFLGCLVTFEGRPAAARSLRARAVGWLSDQDAQYWASRWKDCLPPPADTPVRVQRLARSVARWRQLNADIVGAGADMARLLTLTDGQILTTLPGVKYVRAACFSAFTVPISRFPSAERLYSATGLAPASYQSSSIERRCGISRQGLPEHRDALMAIAWGLSQSCTPFIEREEQLRTRGDAPDSGPGGDRPARLPAHLPDAHRPRRLRRAALPSSEAPGRTVTAC

SEQ ID NO: 497974 - protein, 346 aa, unidentified
MMLIGCDYHPSWQQICWMETTTGETQEKKLEHARGEAERFYRQVPAPALIGMESTGNCQWFVEMVTTLGHDVWIGDAAKIRASEVRQQKHDRRDAELILKLLLEGRFPRIWTPSGEEKDLRQLLIHRHKLVRIRAQVKNELQHLAMNQGVTKKQKLWSQAGEKVLRKLTLKPWASQRREDLFKVRGMLDEQISLLDAAAVDVAEKNEKARLLMTQPGVGPITSLAFVLTMGDVNRFPRGKQVASYLGLIPREYSSGGHQRLGSISKQGNRFLRMLLVEAAQGAVRCDPGFRNEYLHRCHTKAKGVAKVAAARKLAIRLYWMLRTNTGYPEIVRVESSSRVPLVGAS

SEQ ID NO: 497975 - protein, 315 aa, unidentified
MDHNKAVYGVDVSKRNLVAAGYDEPTPVVVANLPESIATWLAQLPRGATVAMEATGTYHQVLAHLAHTAGMQVYVLNPQTLKHYAAAIGQRGKTDGCDARMIARYVVHEQAKLRRWLPPAPAANRLSQLLERRHTVVSTRQTLAQSLAVPMLKAPRQSLLANVDRILRRLDILIRHEIARLPGMAALYERLKSIVGIGPVVAAQLVAVFSTLNFAKTDSFIAYTGLDPRAEDSGDHRGRRRLSKRGPPLLRCLLYNAGMAAANSRLFKPVYKQLRARGLQTTEAIVILARKIARIAYAIYKSGECFDAQKHLKTV

SEQ ID NO: 497976 - protein, 399 aa, unidentified
MFVGWDWASATHDVTVLDDVGVVVDRWAFRHTEQDLVGALERLARLAEPAALPVIIERASGLVVERLLAAGHPVVPVHPTAFWAARPRWGASGAKSDPGDSYKLADDLRTDGHRLRRLDPPDVGLQELQALVRLREDHVRARTAASNQLGALLEAHWPGPKAVFFRLASPIALAFLTDYPTPQAAARLGQARMASFCRRHSYRGGKTPAQLLARLHSAPTAPVGIPAATLAILVRAQVEVLRTLLGTIAELEAAIATRVAASPRAQLLAALPGVGTINLAQLLAEVGPVLDRVANAEQAAAECGAAPVTRASGKTTGVYFRWAANRRARKALTAFAHNARMQSPWAGRLYADARARGKRNPHATRIVARAWLRVIWACWHTGTPYDPHAHLAEQRLAAT

SEQ ID NO: 497977 - protein, 341 aa, unidentified
MNISMIGLDIAKSAFQVHGVDASGCAVLRRKLRRGQMKPFFAKLAPCVVALEACGTAHYWARELRALGHEVRLVPPAYVKGYVKRGKNDAVDAAAICEAASRPSMHFVPVKSAGQQAALTPHRVREMLVKQRTMLINTLRSQLAEFGIVAPRGREGVGGLIALLHDPEEDRLPELARETLLEIAGAIEALAPRLRRIEKAILAWVRNIPLARLLMTIPGVGPITAAAFLAAVGDPWAFRNGRHFSAWLGLVAKQHSTAGKSRLGRISKMGDRYLRKLLVLGATSRLKVVKTGTTPLDAWTRRLLEHKDKRLVTVAVANKTARILWAVMTSGQPYQPERAAA

SEQ ID NO: 497978 - protein, 414 aa, unidentified
MERIRDRVAGLDVHRDSVVACARVINVGTGEIVDDLERFSTTTGGVAKLGLWLLDHGVTTVAMEATGVYWKPVYYGLEDMFAEVWVCNAQHVKNVPGRKTDMADAVWLADVVAHGMIRPSMVPPPLIRELRDLTRYRKTQIDARAREIQRLEKVLQDACVKLTSVASTVWSKSSRAMIEALIAGVRDPVVLADMAKGRMRAKADQLTEALAANWRPHHSALAVRIIAHIDFLDATIAELSEQITGRAGPFDQTITRMAEVPGIEVMTAEIIIAETGGDMTKFPTPAQLCAWAGVAPANRESAGKRRPAGTRPGGRWLRRALVEAAKSATKSKNTYFNAQYHRIAARRGPNRATVAVAHSILTICWHLMNDPELHYQDLGPDYFKERQDPTRQIDHLVRRLAELGFKATLEPAAA

SEQ ID NO: 497979 - protein, 419 aa, unidentified
MAFKIFRKNCSGLDVHKTWIFACIGFTDANGRTEYKEKRFSSFSRGLRDLAAWLASYNCTDVCMESTGKYWIPVFNVLEKTCNVVLAHPKYTKPQKGNKTDRKDAKWICDLFMCDMIRPSFIPPAEIRHLRDLVRYRFKLTNMLTGEKNRAQNCLTVSNLKLDDVFSDVFGKSSRSITEYILAHPGETFDVTPFVDKRCKTPIEEIQAAVDGAISPEQAIKLRQCLDHIDELEKHKAEMEREILRVSDPYFDALNLIRTVPGFDKNLFTAIQILSEIGGDMSVFPTDQHLVSWAGCCPRNDQSNFKIKSTRISRAGSYLKPVLVQVANALIKSKKHPEITERYRRIKSHRGYKKAIIAICRMLLTAIWHILTDLKPYTAEGYLAPRPVKEEKILTTSQALSLLKLRGYVIKDALPATAS

SEQ ID NO: 497980 - protein, 344 aa, unidentified
MAEVSTIGLDIAKSVFQIHGVDVEGAVVIQKRVNRAKVLEFFAALPSCLVGIEACPTAHHWSRRLQALGHTVRLMPPSYVKAYLKRSKNDANDAAAICEAVMRPSMRFVATKSEQQQSILMLHRSRQLLVRQRTMLSNAIRGHMAEFGIVSAKGRNGTAELLAILANEQDDRFPIAARFSLDVLARQYAVLTTEISIIEKRIHAWHRTCEESRRLQEIPGVGPIVATALIAEVSDWKAFSSGRGLAAWIGLVPRQHSTGGKERLGGISKQGNRHLRWLLVAGAMAVIRYARKHGTKRLWLIRLMGRRPIKVAAVALANKIARMAWAMMVRGERFKEQNLLPAVA

SEQ ID NO: 497981 - protein, 351 aa, unidentified
MKITTIGLDLAKNVFQVHGVDTHDKVVVKKALKRAQVLPFFVKLEPCLIGIEACGSAHYWARKLTDLGHTVKLMAPQFVKPYVKTNKNDAADLPRRKYPWGAAAICEAVRRPSMRFVPIKNTEQQAALALHRARQGFVKARTAQANQIRGLLAEYGLIIPQGIAHIAKQLPLILEDAENGLPGLFRELLQRLGDHLTVLNEQVAALEVQIQAWHRANDLSRKLAAIPGIGPITASALVASIGDAKHFTDGRQLAAWLGLVPRQHSSGGKPTLLGISKRGDTYLRTLLIHGARSVIRVAEAKTSHAGSWLAGVMARRHKNVAAVALANKNARIVWALLAQERDYDADYGASA

SEQ ID NO: 497982 - protein, 349 aa, unidentified
MRYFQPAAETRFYAGVDLHARTLFLVILDHTGQLRYARNLPANPQAFRKAIAPFRDGLVVGCECMHCWYWLADTCRDDHIPFLLGHAWGMKAVHGSKTKCDRKDAEAIARLLKGGNFPLAYAYPKERRGLRDLLRARLRLVRQRAELYGHIHTARRQLNLPPVSNHVKYKSKRAAITADIDDACVRRRVEADLSLLEPLDSTIRRLEKDIEVAARQHYATEMAVLQSTPGVGLVIALTILLEIDTLERFDTRQQFCSYARLCGARQESAGKTVGQGNAKQGNAWLKWAFSEAAVLSAQKNERIGKYLDKLSSRLGKAKALSALAHKLGRAFYHMLQKKEVFNIDKFLRH

SEQ ID NO: 497983 - protein, 351 aa, unidentified
MSQPVSTTIAVMGIDIGKNSFHVIGLDQRGAIVLRQRWSRSQVERRLANMPPCLVGMEACVGAHHLSRKLKALGHDARLMPAKYVRPYSKGQKNDFRDAEAIAEAVQRPTMKFVATKTADQLDLQALHRVRERLVSQRTGIINQIRAFLLERGVAVRQGQRFLRIELPRLLTAPPDVLSPRMVRVIEDLAGDWRRLDQRIEALSAEIEAIARRDAGCQRLMSVPGIGPIISSAMVAAIGKGDGFGKGRDFAAWLGLVPKQISTGDRTILGKISKRGNRYLRVLFVQAAWVVLIKPKSWERHGLKRWLEAARKRLHRNVLAIALANKLARIAWSVLANHRNFETTRILVAAQ

SEQ ID NO: 497984 - protein, 378 aa, unidentified
MPSETTVYVAVELSVSSWLVAARSAGAEKSRLHRIQGGDTTTLLALITKLRSRASTKLGRAVDVACCFEAGRDGFWLHRLLTAHGIAAYVLEPTSILVNRRARRAKTDRLDAEGMLRVLAAWLAGDRQVCSMVRVPTPEEEDAKRPHREREHLVQERVRIENRIEALLFTQGIRKRPSLRSWVRDVAELRTGDGRELPCLLRIELERLRRRLVLALELIHEVEADRAEALAATADDKMTQKIAALQRLRGIGPNFAAVLVREVLYRSFANRRQLASYVGIAPMPYQSGGMDRDRSISRAGNPRARTTLIQLAWLWLRYQPGSALATWFRERVGMLQGRTRRISIVAMARKLLIALWRYVETGVMPEGIEIRAEADVTA

SEQ ID NO: 497985 - protein, 410 aa, unidentified
MTKVIIGADPHKLSATIEVVDRREKLLGSGRFSTDQAGYTAMRAYAKTWPERVWAVEGSNGAGRPLAQRLLEAGEDVVDVPAKLAARVRLFDTGHNRKTDARDAHSIAVVAVRTTTLRVLRPDGDLEALRMLSDRREELTRLRVQTVNRLHRLLAELVPGTAKKDLTALQAKAILASVRPRDIAGKTRRRIAADELADLVAVEAKMKKATAELKVLVKARGSRLMDLRGVGPVVAARTLADVGDVARFADRNRFASWTGTAPLAASSGQQNRHRLSRAGNRRMNHMIHIAAISQIRPDTDGRAYYRRKLAAGKTKLEALRCLKRRISDALYRQLVADAERARLEAAADAGRMAATGPGGHCGATQESSAVDLPPHIDTSDQPLPGPAIPTLQPASTPLKPSRSRTASAAH

SEQ ID NO: 497986 - protein, 353 aa, unidentified
MIVIGIDPHKSSHTATAVDPATNTDLGSIRIDATRTGYKTLIDWAKTWPTRKWAVENAEGLGHHLAQWLLVLGELVLDVPTTSTARIRQLSRGGRRKNDRIDAAAAACVAVLQGDARPVDSEGPTDILALLDERRTNMSNSRTRLVNQLHALLRQLFAGGAPTSLTAASATTLLRGFRARSGVDRTRVGLCRDLIADIRRLDDQLAANEKQMAHTLDEHGTRLREVDGIGAVTAARLIGRTGRASRFPTAAAYANYNGSAPVQIASADTDRHRLSRYGDRQLNSALYTVAMVQTRMPASAGRAYYDKKIDEGKPPAAARRALKRHLSDHVWRIMLADEKRRYRRNEADTASAA

SEQ ID NO: 497987 - protein, 328 aa, unidentified
MQALLDICCGLDVHKDSVVACIIKSIPTDTSTGKEETEVEIKTYSTLLSDPVQLKGWIVENGCRNVAMESTGVYWYPVFETLETAFDGEITILVANARHMRNVPGRKTDIKDAQWIASLLRAGLLNGSFIPDADVRELRQLSRYRRNIVQDVSRQKNRIEKTLQQAGFKLSSFLSDIFGVSGRNLISVIIKKGRVSPLEIDSETKKLSPSKKEEMKFALNGRLSVHQRDFLKLELEHLDLLLAHQNKIESAIFEKTKTFSDAVERLDTIPGIATVSAISIIAEIGTDMNKFPTAEHFCSWAGLSPGNYESAGKKKAHASHSATLTLKD

SEQ ID NO: 497988 - protein, 418 aa, unidentified
MDNRPPFLYQATVGIDWADQKHDVFVRFANGDSYRRKIDSRPEAIQEWLLELRSACAEGKIAIALEQRRGALFYQLCTHLNWIDLYPINPHSLASFRLTFFSSRAKDDPIDSQLLEELVRTHPDRLRPYLPESTTERKLDQYCRRRRSLLDLATKTELKLISTLKQYFPLAVNLFATVGMKSDIALNFLSRWPTLNELHRAKTHTIRSFFYAHNSRSQSLIEKRLQQIAEAHNVTDDFALIEPLVLTSKCLVGQLRQSNQAIKEFDRKIKDLFKSHPDHFLFENLPGAGEQLAPRLLSLFGSNRLRWADATDIQKYSGVAPVIERSGKSIWVHRRLSRPIFICQTFHEFAQQSIQRSAWADQYYRRQRERGKSHHSAIRALAFKWIRIIFACWKANKPYDESFYLQALAKKNSSLSPT

SEQ ID NO: 497989 - protein, 453 aa, unidentified
MRLKRPARKPARQRTMAIRRDAAGIDIGARRIHVAVDPERDARPVREFQTFTQDLYTLADWLEACAVRTVAMESTGVFWIPLFQILETRGFEVCLVNAHHVKHVPGRKTDIADCQWLQSLHAVGLLTASFRPAQTICGLRSLLRHRESLIQAAASHVQRMQKALDQMNLQLHHVISDITGLTGLAIVDAILAGERDATKLAALRNWRIHATAETVTKALVGDYRPEHVFTLRQSVGAYRYYQQLVAECDVEIERHLTALPDVHPDAPSPPTSAVRRKPRGNEPAFDLRTHLHRLFGVDLTTIPGIDVLTAHTLFTEIGPDLSKFPTPEAFASWLGLCPDNRISGGKVLSVKTRRVKNRAALALRMSAQAVQGSRAALGGYYRRMRAKLGGPKAITATAHKLARVVYHLIKTQQSYQESIFLRHEARHRERVHKRLHAQAAALGLRLVPATVVP

SEQ ID NO: 497990 - protein, 398 aa, unidentified
MTESSDYESVQVFIGVDVGKDTHHAVAINRSGKRLFDKALPNDENKLRSLISDLKQHGQILLVVDQPATIGALPVAVARSEGVLVGYLPGLAMRRIADLHAGEAKTDARDAAIIAEAARTLPHALRTLKLADEQIAELSMLCGFDDDLAAQTTQASNRIRGLLTQIHPALERVLGPRLDHPAVLDLLQRYPSPEKLASLGEKKLAAQLCKLAPRLGKRLAADIAQALAEQTVVVPGTNAPAVVLPRLALQLITLRKQRDEVALEVEQRVLAHPLYPVLTSMPGVGVRTAARLLTEVACRAFASAAHLAAYAGLAPVTRRSGSSIRGEHPSRRGNKALKRALFLSAFAALRDPLSRAYYTRKMSQGKRHNQALIALARRRCDVLFAMMRDGTFYTPQAS

SEQ ID NO: 497991 - protein, 446 aa, unidentified
MMQKIMAMTSVHHSRRTLMNCTQNEKLNQVTPHTLIVGVDIAKFKHVARAQDDRGKILGKPLTFTNTKEGFDAFFTWMEEMQHKHEKADVLVGMEPTGHYWLNLAYTLKERLISFGVVNPLHVKRSKELDDNSPTKNDIKDARVIAQLIKDGRFSYPRLPMDQDAEVKAGITIRNQIVGDLQALQGRIHNWLDKYFPEFLTVFKDWSGKMALATLEHIPLPGQLNQTTPERVAEIWSTYGGVQRPSHKRIQRLQEAAARSIGLTVGLQMAQREIATNIKRYKMLKEEIQALEEDLETLVLTLPGIAEMLTVPGVGRVTVIELYSELGDIKNFENPRQILKYAGLNLRESSSGKHKGQTRITKRGRAKLRALLFRTVMPLVRHNRAFKALHQYYTTRQENPLRKKQSLIVLCGKLVRILHTVGQKQCPFDEERMIRDIPHLSLALGA

SEQ ID NO: 497992 - protein, 356 aa, unidentified
MQTQVTKKIDFTGKDLFVGLDVHKKSWSVTINVDGMEHRTFTQPPDPESLQKYLQRSFPGGNYHSAYEAGYCGYGIHRRLNGLGIKNMVINAADIPSTQKEKLHKRDPVDSRKLARGLETNTLHGIHVLDRDLEELRSLNRTRFYLMRDLRRSKNRIKSFLLYYDIPLPGEFDNNQWTLKFIAWLKQVKLQTPAGQEAFSHLITSYEHHRQQLLILSRIVRLRISQHDKELYDLLKTTSGIGPLTSSALITEIGDINRFSNIDDLGSYVGLVPRVRESGETTHTGGITFRCNNFLRVLLVEASWQAIRHDPALMQYYHHHLTGSKGHKVIIKVARKLLNRIRYVMKNRKPYVTGVA

SEQ ID NO: 497993 - protein, 341 aa, unidentified
MENCGIDVHQKSSQVTVVDDEGEVLERASLPTTRAGLERWFGNRPQMRILLEASGSSPWVVRVLRELGHEVGVVDPRRIRLVAESTLKTDRIDADTLAELARLKLRLRTLVWQRGEATQRQRAHLRVRRALVEARARFIVTVRGLVRSFGGRIASCRSDRFAARCEATALPPGIGDVVAPLLAAIRELDSRIAAMDEVTELVGTSYPVVARFQAIPGVGPVVALAYVLSLEDPTRFRRSRDVPGYIGLRPRLRASSDTVQRGRITKQGDGDVRRLLVQAAHAHLRSSRDTSLKRWAEGLVPRIGKRKTVVALARKLAVLMHRLWITGEVYVAFPKNAVKAA

SEQ ID NO: 497994 - protein, 442 aa, unidentified
MDEHGEVVELYAEEERVARVAAIDVGKAQAVVCTRLPAGANPERRVQKTFTVGATSGAIADLADHLVCQEVELVVMESTSDYWRPYFYLLEARGLRCWLVNARDVKNVPGRPKTDKLDAIWLAKLAERGMLRPSFVPPEPIRALRDLTRLRTALVAERSRHRQQVEKVLEDACIKLSNKKEGASDLFGLSGRAMLEALAAGQRDPRALAQLALGKMRTKIPTLTEALTGRFTDHHGYLITTLLQLHDQVDTKIVELDARIAQAIAALDPTPPPDPDHPGRMPLNERLQEIPGVGPACAQAIIAEVGLDMSVFPTPGHLASWAKLTPRTIQSGAKHTHGPSGKGNGWLKGPLGQAANNAARTHTFLGARYRRIVKHAPAKKALVALARNILEIAWVLINDPDARYHDLGPDWHERHANRTRKTRQHVRELEHLGYTVTLAEAA

SEQ ID NO: 497995 - protein, 478 aa, unidentified
MLLVSASSGLVPRRNGRDLCPVGKPRLRAPVQEPDKVAVARVACTINGAPCMAPSRGKCIMHGERQWFVGIDWASQEHVVSLCDGQGKKIGQRNFAHGGTGLSDMIAWLLKMSGGEPSEIHVAIETPHGPIVEALLERGFNVYSINPKQLDRFRDRFTVAGAKDDSLDAYVLADSLRTDMHLFRKLTIAEPLIVELREWSRIDEELKVERVRLANRLRDQLWRYYPQMLELGDLDEDWMLDLWEAAPTPEKAARASKAAIERVLKKHRIRRFDAAQVLSALRRPALSVAQGTIEAAIAHIKVTIERLRLVHRQLADAELQLDRLCKKLAEPVANDGENVPGQRQEHRDATILDSLPGVGRTVLVTMLAEAPHALQRRDYHALRNLCGSAPVTRRSGKSCLVTRRRACNRRLSNATFYWAQTATQCDPTSKAKYQALRARGHSHARALRSVVDRLLYVACAMLEKGTLFDPSFAEKKTS

SEQ ID NO: 497996 - protein, 340 aa, unidentified
MKDSRVFLGIDVHKKTYAVTAISNNRVIKRTVMEACPQKLVRYCKKYFPNEKIISAYEAGFSGFVLHRVLIENQIENLVVHPAAIEVASRDRVKTDKRDSLKIATQLEARRLKSIHIPTIEQEGYRAISRLREKLVKDRSRIGAQIKSFINLNGIKRENYERRISRRFIKNLLTLKETSEIVFYLQSMAKRWLSTDEEISCVEEKLLVQAESQKELEKIYRSIPGIGQIISRVLINELGDMSQFKNERALFSFTGLTPQEYSSGEHIRQGHISRQGRAILRKVLVQAAWLAIRKDAGLNKAFERISRKAGKKRAIVAIARRLIGHARACLKKKEEYIYRG

SEQ ID NO: 497997 - protein, 335 aa, unidentified
MQIYGIDLAKEKFDVSFFDLTSKKVSNQPSHKVVKNNLKSIGRFLETLPSDAVLVAEHTGVYGDTLLKCCMDCNVKIAFVGGYVIHRYRATPDRAKTDVLDCALLREFGERYPDKLKYKTFPEEALYELRQLARHREMLVEQRKQLITADKSEDCRPVRSLVVKRSMDRIKEMLDTEIAETEKEMLKVINGHDSIHHNYELVKSVDGVGLITAVELLVKTENFTKITTARQYSAYAGTAPYEKSSGKMDKGAHISKIGNRRSKTLLYICAESARLHNKEIKLYYERRTLIDKKPRHYVLNAIANKLLRIIFTLVEKGEYYDANFIRQDPRVVKYN

SEQ ID NO: 497998 - protein, 345 aa, unidentified
MQIRSIGIDLGKTTFHLVGLGERGKSVIRKKLSRKQLLASTANRPPSLVGLEACSGSHFLGRALSQQGHDVRLIPAQFVKPFVKSNKNDYLDAEAIAEAVERENMRFVPIKTDDQLDLQALHRVRERLVSRRTAVINQVRAFLLERGITFRKGPATLRRQMPEILENADAQVSPRMRNLLATLWQEWKQLEEQIDCLSADIETICIADPACQRLRQIPGVGPLVATAVVAAIGNGAAFHKGREFAAWLGLIPKQYSTGGKAKLLGISKRGNPYLRKMFIHGARAAVLRVKREGSSLGTWMSGLETRAARNVVIVATANKLARISWAVLASGNDYHPRHKALVFSN

SEQ ID NO: 497999 - protein, 375 aa, unidentified
MIKDSEVFVAFDTSKLRNAVAIAEAGRAGEVRFLGEIENTAAATTKLVRKLEAKYERITFCYEAGPTGYELQRHIRGLGHECIVAAPSLIPKKPGDRVKTNRRDAVSLVKLSRAGELTAVWVPDRRHEAMRDLTRAREAAVIDLRAKRQRVSALLLRQGRSYPADKKTWTKVHMNWLASQRFEQPELGVVFAEMMFAIRQAQERVERLEQAIRTAVPDWSLAEMVTAFMAFRGIDLVSATCLLAELGDLTRFPTAPEVMGYVGLGCSEGSTGDRIKRGGITKSGNRRARRTLVECAWSYQHPPRVGIAKQAKVAAAPTKVREIAWKAQCRLNRRYRVLLRRGKLKTVAITAVARELAGFLWAAARELSSPQRVAK

SEQ ID NO: 498000 - protein, 320 aa, unidentified
MSGSSVVVGIDVAKAHLDVAALGAKLGAERFDNDAEGHTALLGALQPLDAALVVMEATGGYEAALACALQAAGLPVAVVNPKQARDFAKSMGRLAKTDRIDAHTLAELAAVLLRREDLARFIRPVADIQQQHLAALVTRRRQLLTMLGSERQRLQLALPMVRPSIEAMIQAIRAQLDELEGQMIAHVQEHFAQLDALLQTTSGIGPIASATLIAELPELGRLNRREIAALVGVAPIANDSGSSRGRRRVRGGRFEIRRVLYMATLTAARRNPLIRSFYQRLVAAGKLPKVALVACMRKLLTVLNAMVRTNKPWNNSLHHS

SEQ ID NO: 498001 - protein, 456 aa, unidentified
MSNLRIKKKSKKFKAADLPVELKHVNLDAAGIDIGSDRHLVAVPAGRDDVTVREFGAFTPDLHALADWLEKCGVTTIAMESTGVYWIPLFEILEQRGFEVKLVDARKSKNVSGRKSDVLDCQWLQTLHTYGLLTGAFRPADEICVLRGYMRQKEMLVQSSSMHIQHMQKALQQMNLLLHNVVTDITGVTGMTILKAIIAGERDAKVLARHRDSRCRNSVQTIAKSLVGNYRQEHIFALTQAVELYEIYQAKINDCEVAIARFLTTQARQTEDEPPPSQKNIPPRQRIRAGVDLRSRLFKLTGVDLFSIPGLGADTLLTILAEVGFDMTPWKTEKHFASWLALCSGTKISGGKVLDRKTKRSTNRAAQAFRLAASSLARSNTALGAFYRRIRARIGAPQAVTATAHKIAITFYSLLKNRTTYVEIGQNAYELKFRERRFKAMQKQALAMGYQLIPAA

SEQ ID NO: 498002 - protein, 425 aa, unidentified
MNQDNQSFAAFIGLDKSDKKINVTLQRCSTARSERSIIQGSAEALHAWVAALCARFPHQRVAICVEQPAAGLIHALMGYDFVVLFPINPVTLARYREAFTPSRAKDDPTDADLLCELVAQHREQLKVWQPDDICTRKLRHLTQARRSSVNMRTRLSNQLKALLKGYFSQALELCGDDLTTPLACAFLQKWSSLQQLKKARPETIRRFYYAQNARRGDVIEKRLTLIAQAVALTNDPALIESSIITVQALTLGLRAVHTAIARFDREIARTFTQHPDASLFAALPGSGTVYSARLLAAFGSRRERFESAEALLNFSGIAPVLKRSGQTTIVHRRYARPIFLHQSFIEYANESIRHSLWARAFYQMHKAAQQSHWVIIRALAYKWIRILFRCWKEHTPYDELRYLKSLQKRGSPLLQYLAQPNTQTV

SEQ ID NO: 498003 - protein, 346 aa, unidentified
MEQYIGMDVSLTMTAICIVDRTGKIEREGVVASDPEAIAAFVRLHAPHVARIGLETGATSTWLWTELNKMELPVICIDARHAKAALKMQINKSDRNDAVGIARIMQCGWYKEVRVKGLDSHAIKALLVSRALLVKIKRDLENQIRGLLKNLGLVIGRAKMNVFLMRAVELTEARPELAAAIEPLLKAREAVEKQIADLDRKVMQLARNDVQVRRFMTAPGIGPITALCYLAIIDDPTRFKRSRSVGAYVGLTSRRYASGEVDWTGRISKCGDAMLRSYLYEAAGVLLTRVAKWSVLKAWGMRVAKRSGLRKAKVAVARKLAVILHRMWVDGTEFKWSSKEVVPQSA

SEQ ID NO: 498004 - protein, 328 aa, unidentified
MQGKVSSERTAMATVYVGIDVCKEWLDIHLHPLGRSFRVTNDTAGLRRLKRELDALDQMPPSALHIVMEATGKWHRAVQRSLHADGFYVSVVDPLRARLFAKACGFLAKTDRLDARLLAIMGEALKPAQTPPQDQALEALQELVNARSAANGERTALSNRMKTAVTAFLRKELTRRLAALDTHIARLDVEIERSIGAEPEMRRRLDILISIPGIGAVTAASLIAGLCELGACSGKQAAMLAGLAPLACESGERAGHRSIRGGRPAPRNAIYMAALSASRHNPDLAHFAERLKKAGKPNKVVLVAVMRKLIVLANTLITKNRIWTPNPP

SEQ ID NO: 498005 - protein, 429 aa, unidentified
MNCTQNKKIEQVKETTMIVGIDVGSEKHYFRAFNWRGIELTRKPVAFSNSMEGFNSFYNTIVELMQKSELEEALVGIEPTGHYWFALGQFMGEKDIKFVMVNPHHVHKTKELDDNSPSKNDRKDPRVIAGLVRDGRYFYSYMPTGVYAELRNASNRRFVLVEEQTRAKNRLQKWIAVYFPEYKGIYTHIDAKGGMLVLKKAPTPEEIVRLGVEGIIKIWKDAKLRGNGHKKAMLILAAAMRSIGLKAGLTEARMEIQDLIEDYELQTKRLERVNDLIKGLCQQVRYADKLLEIKGIGITTVAGFIAEVGDITRFDSTKELQKLAGLELVADSSGKHNGKTKISKRGRKRLRYLLFEAAISVVGKNEEFKEIHRYYTTREKNPLKKMQSLIVVACKLIRVFHAILTKGIRYDASKMLEDIRHPGEQLKAA

SEQ ID NO: 498006 - protein, 416 aa, unidentified
MSFALPEALFFTGIDWAAEAHAVCVMDAGGKIAAEFTIEHSADGIALLVRRLAGYGQPGGMPVAIERPNGRLVDLLLEAGHPVVPVKPNAIKAWRDGEVLSGAKSDAGDAAVIAEYLRLRAHKLKAAAPYSDETLALRTVVRTRGDLVEMRVAATNQLSALLDAHWPGAKAIFADVESPISLEFLTRYPTPAAAAHLGEKRMAAFLTKHGYSGRRSAAELLTRLRRAPAGAAGEALAEALRDTVLAAVGVLTALNASVKNLDRSVAAHLGEHPDGAIFTSLPRSGQVNAAQVLAEWGDCRQAYEHPDSVAALAGCTPVTKESGKHRAVHFRWACNKRFRAAVTTFADNSRHASPWAAKTYNDARASGKDHPHAIRVLARAWIRVIWRCWLDGVPYDPATHGAAAALAEQSTKQIAA

SEQ ID NO: 498007 - protein, 388 aa, unidentified
MMADPSATPIEATTRPDAGRLFAALELGKSRWLVTVDAPGSDKLSRHAVAGGDGAALLDLLARLRTTAERRTGRPVEVLVIREAGLDGFWLHRLLERNGISSRVVDPASIAVDRRHRRAETDTIDGEMLLRSLMAWARGERRVCSMVRPPSPEEEDRRRLTRERATLLKERIQHTNRIKGLLHGRGIIDYDPLRKDRLARLDALETGDGRPLPERLKAEIRRELERVELVASQIAAVERERDALIEAPSEAAGPGTPAAALARLKGIGGELGALLWLEALFRRFDNRRQIAAYAGLAPSPWQSGGTEREQGISKSGDRRLRHAMVGLAWFRLRHQPDSALSAWFRERVGPGRGRVRRIAIVALARKLLVALWRYTTQGVVPQGAAFKA

SEQ ID NO: 498008 - protein, 319 aa, unidentified
MSRTCLGIDVSKKTLDVALILNGKTLSKQLKNTSDGFKLLAAWLQSLQIREVHACLEATGSYSEAIALFLHNQGHRVSIVNPLRIKGYAQSNLQRNKTDRLDARLIASFCQTQNPSEWIPPSAEIRHLQALVRRIEVLEEIRQSEENRLANAAKEVRPSIERIISLLKEEIRELEQQIKEHIDQNPNLKEQSELLQTIPGIGERTANLLLSEIEFERFDSARQIAAQAGVTPRRRQSGTSLRQTSLSKLGNARLRKALYFPAIVAKQHNEIVKEFAKRLKKNGKTPMQIVCAAMRKLLHIAFGVLKHKRAFDSSLVFTA

SEQ ID NO: 498009 - protein, 372 aa, unidentified
MQQNSKVFVGLDTSKLKIAVAVAEDGRQGEVRFLGEIDNTPEAVRRLVSKLSGKHRELLFCYEAGPTGYGLQRQISALGHECAVIAPSLIPKRPGERVKTNRRDALTLARLHRAGELTAIWVPDPGHEAVRELVRAREAAMEDLREKRQHLQSFLLRHGRIFSGHKPWTRAHARWLSELIFEHPAQYLVLREYRQAIEDAEARLERLNQQVAEVVKTWSMAPVVEAYQALRGVALLTAVTFVAEIGDVRRFESPRQLMAYLGLVPCESSTGERVRRGSITKAGNPRVRRVLIEGAWTYRFPARMSRVLQERQEGLPAIVRAIAWKAQVRLCARYRRLMAAGKRQTVVTTAIAREMAAFLWAIGREIQPRSAA

SEQ ID NO: 498010 - protein, 386 aa, unidentified
MGASPGFPDCRCERDHQTRLFWKPLQATVLFVFDVGGSVETIYERVGALDVHKAQVTACVRVPDSAGRRDPQLAEFSTTVAGLMALRDWLAAYRVTHVAMEATGVYWQPVWHILEDDFELTLCNARHVKQVPGRKTDISDAQWLCQLMEAGLLRGSFVPPKPQRQLRTLTRYRKTQIAERQREANRLHKALEDTGIKLDCVASDILGASGRAMLDALVSGTTDPEILADLASSLTGVARRTAEVMVAEIGVDMSVFPTAGHLPSWAGRCPGNDQSAGKRRSGRTRKGSKWLGIALEEAALAATRTKNTYLAAQYQRLRPRIGHGRALGAVKHSMLVAYWHMFTTGETYRELGGNYFQTRDPERITKRLIAKLQELGHAVTLEPAAA

SEQ ID NO: 498011 - protein, 345 aa, unidentified
MDQINRMGMDTSKHIFQLHGVNAVEAPVLRKKLRRKEMVTFFEKLAPTVIAIEACGASHHWARLLQSFGHTVKLIAPQLVKPYVKRSKNDAADAEALCEAMSRPTMRFVPVKTAEQQAALMLVGVRDRLIRNRTQLANAIRGYAAEFGLTAAKGMAHLVPLLERIQADESLPALARELFAIQAKEYTQRQTQIDEVEAKLTAWHRADESSRRLAKIPGVGPIGAVLLQMKTPEPGLFRSGRQFAAWLGLTPKDHSTAGKVRLGVITRAGDEGLRSVLVAGATAVIRHAQHGGRASPWLAALLKRKSPKLAAVALANKTARIAWKMMATGEIYTAKSVAAFSASAV

SEQ ID NO: 498012 - protein, 431 aa, unidentified
MEVIHPRVAGIDVHKKIVWVAVRLPGQRPGERTVTVKRFKTFWRSLRQMAAWLAEPGVTDAAMESTGVYWWPVFHALAGAGIEVCVCNAAHMRNVPGRKRDVIDCQWIAELHEHGLLRPSFIPAGAVAELRARTRYRKKLIEQRTSEGQRLAKVLEDAGIKIDSVASRLLLKSGRAMIEALIAGERNPGRLADLALGRLRRKIEELALACDGRFTAAHAQMGRLHLDAYDHLTAKIAELDELVAEAAAPFAAPIARLQTIPGIGRRTAEVIVAETGGDMARFATAARLAAWAGLAPGDNESAGKRKHAAARKGNRHLRTAMVESAWATARTRTRPGARFRRLARRFGKGNEKKAAVAVAHTLICIAWAVLSRGEDYAEAGEDYYQQRDRRDREHLIRHHQQALARLGCQVTLIPPGDGSPPPSATSQQPAA

SEQ ID NO: 498013 - protein, 345 aa, unidentified
MKKVIAGMDLHSNNVVIGVMDMDGKRVASRKLPCELKEVVKFLAPFKKRLEQVAVESTYNWYWLVDGLQELKYPVVLANPAGMTQYSGIKHADDTNDAFFVAELLRLKILPTGHIYDAELRPVRDLLRRRLMLVHQRTALMLSFKSLYTRTTGQQMTLSELKGLEIKAAQDLYDHPANQLIAGMQIKHIDGLSESIGKIEKVVLSSARELPYYSKLETLPGVGKILGMTITMEVGEIKRFAEPGNFASYCRTVEAKRTSNSKKKGQNNSKCGNKYLAWAFVEAANFARRYDPQCRKWFDRKAVKTSNIIATKALACKLAKAAWYLMAEGTEYDSKRMFGQPAATK

SEQ ID NO: 498014 - protein, 347 aa, unidentified
MRYLTTTAASYVGVDLHARTLFVCVLDQAGTIKLSRNMPAKPEPFLAAVEPFVPDLLVGCECVHSWYWLADTCRDRNIPFALGHAFGIKAVHASKTKSDAHDAGVLARLLRGGNFPLAYAYPHERRGLRDLLRTRLRLVRQRAELYGHIHTVRRQLNLDPVGADVKYKSKRDAIAADITDPHTKRGVEARLNLLGPLDTEIRRLERDIEVAAEEHFPTELAALQTIPGVGPIISMTILLEIDTVTRFDSRQQFCSYARLISPKQESGGKIVGVGNKKAGNAWLKWAFSEAAVLSAQKDERMKTCLAKLQSKHGSGKGLSIFAHKLGRVVYHLLRTKKVFDVERFVRG

SEQ ID NO: 498015 - protein, 318 aa, unidentified
MSTSMPQTLGVDISKDSLDVHLHPAGARGRFANDRKGFSALIQWLRGHAVSRIVYEPTGAYHRAFERRFLEAGFTLAKVNPRQARRFAEAIGTQAKTDAVDAGMLARFGAMVEPRTLEVSSPILMEMKELIVARRGLIKDRTAAHNRAHQRGLALLQAQAKDRLKQIERQIQAIDAALRERLTADATLKDRFDILVSIPGLGEATAFVLLVEMPELGTIENKCAASLAGLAPIARDSGQSRGKRFIRGGRAQLRHALYMPALVAARFNPDLNAAYKLLIDAGKPAKVAIVALMRRLDCCRFYGHPVRLIRPSFRTRPG

SEQ ID NO: 498016 - protein, 415 aa, unidentified
MALKIVYKICCGIDVHKNFVVACIAKTDKQGVTTYERHHFSTYTKGLKQLLKWLLDRNCKDVCMESTGKYWIPVYNVLEHDCSIVLAHPKYVKAIRGKKTDKKDAKWIADLFKHDLVAGSFMPPADIRQLRDLMRYRFKLTCFKSSEKNRYQNCLTVSNIQLGNVVSDTFGKSSQKIIAKILENPDDTSFDIGSLIHGSMKDKLPELELAIDGYITPEQAAKLKIIKEHFDNLEARKAELEELILALANPYQQEISIILTAPGFKNTFTAIGIISEIGTNMEAFPSAKHLCSWAGLTPTNNESAGKKKSVRVSKAGCYIKPLLVQCANAAIKSKKHPEIRDRYLRIKKRRGHKKAIIAIARMLLTALYHMLKNGENYNSDLYQKSDILPTTREITVEQAILMAQFQGFRIKSATE

SEQ ID NO: 498017 - protein, 353 aa, unidentified
MEYIAFDAHKHYTLASVARPDGQLVREERVEHDRGALRHFLERCEQGSPVAVETIGHWYWIVDEIEAAGCLPKLVHARKAKLMMGMINKTDKLDARGLNQLQRNGTLPTVWIPPGELRDQRDLPRTRMVLVRQRTQLKNRIHATLAKYALHDLEVSDLFGVQGRDVLRQRLDLLPPHTAYATQQLLEQVEELDRRVRGFEQRMRTVFTVTPEIQLLMTVPGVGLILAVMIALEVGDVARFATAEKLAAYAGTTPRVHASGGKTRFGRLRPDVNRYLKWAFVEAANVTNLHRSRYPGRHVSRLYERIARRKGHPKAIGAVARHLAEATYWILTKEEAYREPRRSTVLSTGDQRA

SEQ ID NO: 498018 - protein, 356 aa, unidentified
MSHDVKYIGMDVHKEAIVIAVLNESGKQVIESVIETKASSILQFLHGLRGELHVTWEEGTWAAWLYDLLQPQVQHIVVCNPRRNALLKEGSKSDKVDARKLADLLRTGMLRSVYHGENGLRTLRELGRSYQTISKDLTRVMNRLKALYRGWGIACAGTQVYAARSREEWLSKLPQAGVRRRAELLYQQLDGLQALRREVRPEFLAESRKHKAAKLLRQIPCIGPIRAARLIALMQTPHRFRSKRQLWTYSGLGIETHDSAQYRFVRGQLQLSKKPQQLRGLNRNHNHEMKEIFKSAATRASCGRGPFYDFYAALLAKGMKPEMARLTLARKIAAITLTLWKKEERFDAEQLKTQAA

SEQ ID NO: 498019 - protein, 343 aa, unidentified
MKQKATILGVDLAKRVFHLVGMDDTGHIVLRKRLTREALMPYIAQLPPMIIGMEACGGAHYWARRFRAHGHTVKLIAPQFVKPYVKSNKNDPADAEAICEAVTRPTMRFVPVKEVEQQDLQSLHRARERVVKARTALINEIRGLGMEYGLVFPQSVTKFRHTFATTLEAEQDKLTPLSTELFEQLYDEFGALEKRLTYYNEKIAAICAAHPVCQRLGTIPGIGPLTATALVAAVSDANHFKNGRQFAAWVGLVPRQHSTGGKARLLGISKRGDIYLRTLLVHGARATLRWVGLKTDRRSQWVRGLIERRGKNKAAVAVANKNARIVWALLTTDQVYTPEHTAA

SEQ ID NO: 498020 - protein, 323 aa, unidentified
MYSIGLDISKSTINVYVPYNDLDLIIENNLKSIKSLYSKLKKYYKKELDKLVFVYEPTSNYSFLLKSFCANQNIKSFIVNPKKSASFAKVIGHRNKTDIKDARLLSKMIVTAKNEDIKVPIINSVEEELKELIACYKLIIKQQVIAKNHIAALKAKREKSYSIKELESQYQFLKKQELKLIKQIKSMIKKDEKLQEAFKNIQTIDGIGEISAIVLLSHFTQYPNANQKQIVSLAGLDPIEKSSGSSVKGKTKISKAGSKICRGTLFMPAMTSVRHNERLKSFYDRLKENGKHTTVIQVAIMRKLLIIAHSIYKNNEVYEPNRI

SEQ ID NO: 498021 - protein, 390 aa, unidentified
MAPGDKIIRRPFDVKHTKEELQPLVDEIRVQAKYDEIKVVMESTGVYHLSIAYFLQQNGIFVSVVNALKVANFNKAENFRHTKTDSIDSTNIARYGIAYWAKLPQFDLNGDKYFLLKRLCDAYLNFSEERSRILLQLQSQLEQTMPGIFDLFGGFDINSGKDKLLDFLERYCHIEDIIAKSEAEFVASYREWAEEKGYRSNESKAATIYAQAKNGIPSIPNNPIVRETIMWYVGLLRRADEALMASLTRMEDIAKDLPEYELVGEMGGVGRVTRVALIAQIGDVRRFKNKHSLICFAGLTPSIHESGKFRASQNHIVKKGPARLRKVLYQVMMSLVMHKIPKDDAVYRFIKKKEAEGKYKKVAKVAGMAKFLRIYYGRVMHLYRDLGLAA

SEQ ID NO: 498022 - protein, 346 aa, unidentified
MENIALDVHKHYTWARVENPQGQPLYASRLAHGRGCIKHFVQRWTPGSPVAVETVGNWYWVVDEIEAGGGKPQLVNARLAKLMIGNVNKSDKLDAKGLNMLQRAGTLPTVWIPPSGVRDARELPRTRMVFSRQRTQLKNRVHATLSKYGYVVDEVSDAFGKRGRQIIEELSSKLPPHTKRALDHVLDQLDEVMENLKAIEADMIKVFAPCPQTTWLESLPGVGKILTVVIWTEIGSIERFNRAEQLASYSGLVAREHSSGGKFHYGAVRRDVNVYLKWAFVEAAGSAIQNRHRCGYQHISQLYQRIKPRRGHNRAKVAVARHLAEASFWMLKKGEPYREPRLSTQR

SEQ ID NO: 498023 - protein, 419 aa, unidentified
MFEEGKRTHQSGEVSFSRRKNRAFGQVDVRGHRDFDRRALRGLNEHRRRRYVLHIINLKSSVDIVASIPKVSREWPMQDVATVGLDIAKQVFQAHGADASGETLFNTKIKRENVLEFFSKLKPCLIGMESCATSYYWARKLLEFGHDVRLIHTRYVKPFVKRGKTDANDAEAINVALTQKTMRFVPVKTLNQQAAITIFRTRSLFVSQRTQLVNALRGHLAEAGLVAAKGIQNYSKLLKLMESAADTVLPTVMKQALTDICDQIHRLNDLVTKLDKEIERRVQHDENACRLLTIPGVGPKTAMCVIATIPDIHRFPSGRHFSSWLGLTPRTHSSGGRSVLSRITKMGNSELRTMLYLGGTVIMMRDKKTPIGRWASRLRARRPYKVAVIAVANRIARIIWALLTNGGVYDPTYGREASA

SEQ ID NO: 498024 - protein, 346 aa, unidentified
MMIIGCDFHPSWQQIAWLDTATGETEEQKLVHASGEAKKFYRQLAAPVLIGMEATGNSQWFVELAEDLGHEIWVGDAAQIRASYVRKQKTDKRDAAHILKLMVEGRFPRLWTPDREQRDLRQLVVHRHKLVEIRSRVKNELQHLSLNKGMQKKRTLWSQAGQKLLRELALKPWAACRREDLLGLLAMLNQQIGKLDAAVQHAADEHPQAQLLMTQPGVGPNTALAYVLTVGDVSRFPRGKQVASYLGLIPREHSSGGHQMLGSISKQGNRLLRSLLVEAAQIAVRFDPGMKKEYLHRCHQKPKGVAKVAAARKLAVRLYWMLRTQVAYPEIVRIESSPRVALVGAS

SEQ ID NO: 498025 - protein, 353 aa, unidentified
MTAICVLDANGRVLLETMVDSAPEAIAGRLHEFGQPFERIGLEAGPLSQWIYAGLVDVGLAAICVETRHMHAALSARINKTDRNDARGIAQMMRVGLFKAVHVKTPASQHRRLLLTSRKLLQRKIYDIENDLRGSLRNFGLKVGVVGKIKFEDRIRELVADHSFVAAVVAPLLEARAALRAQFAKLHRMLLDLVQVDPVCRRLMSAPGVGPIVALTFRTCVDNPARFSRSKCVGAHYGLTPRIYQSGEISRTGRISRSGDVILRSSLYEAALVVLTGPGRWNPLKAWGIAVARRRGMQKAMVAVARKLAIILHRMWRDDTDFRWCAATTQRKTTTDSTSSMLEEASREDDGIG

SEQ ID NO: 498026 - protein, 408 aa, unidentified
MSIVFGIDVSSRDSSVCVLQSGATREYKITNDTIGFKTLLIDLKEYAEHPQIILEATGVYSRRITRFLDEYDYDYVLLNPLKAKKEINQGLRRNKTDRNDAYHLALAQDRNQHQPNRKEPEVYHQLQSLSRAYEELTHDIISSKNRLHKYLQLTFPELETIFNNSRGVNYWYLVELFPHCQDVRNLEVSTIAKQIKDFKGYGINRAQKLAIKLKHLADLAYPAVDQDDPERDEVVYYANRLLRLTADRERRSEAMIKLAKALPNRDLEILMSIPGIAEITAVRILAELGDIRRFSNPNKINAFVGIDPGRYQSGEKDSNLRISKHGNAVARKILYRAIGQIDLAAKTSPCHIADYYERKKQFSQTKGFKKIAIASIHKLLRTVYILIITDQMYDYNVANNNQKDFCRN

SEQ ID NO: 498027 - protein, 334 aa, unidentified
MAKNDFDELMSIGVDIGKDVFHLVGFDRNGQLVLRKKIKRMALAATFEELPRCVVGMEACMSAHFVSRTLRKMGFEPRIIPAIYVQPFNKGQKNDYNDAEAIAEAALRPNLKTVSEKTQEQLDLQALHRVRSRLVSRRTATMNQIRAFLIEQGITVRKSVAALRTSLQAILDNRDDEMSLRIRKLILGLQQDWIWIDKRIEMTTSEIEGVSKSEASCQRLMTIPGIGPIISTAVVAAVGNGEAYDRGRDFAAWLGLVPRQHSTGGRTILGRITKRGSRYLRMLFLQAAQVIMMRPKNWPKFSFGPWLEAAATRMQHNKLGVALAELPPEHRTLT

SEQ ID NO: 498028 - protein, 361 aa, unidentified
MQTSNAAESATTIGIDVSDKYSRVCVLDGSGAVVEEGRMATTGPAFRRRFSTAPRARVAIEAGAHSAWISRLLTEAGHEVIVANPRRLRLIYENDKKSDRVDAEWLARVARLDATLLAPIRHRESESQAALALLRARDALVRARTQLVNHVRGTVKVFGARLPRCSTQGFVKQVTPGLPAELSPLLGPVLEAIETLSREIRGYDRQVAAMADTSYPETKRLRQVPGVGPVTALTYVLTLEDPHRFPSSRAVGSYLGLRPRQQDSGVDEPQLRITKAGDGAVRRLLVGCAHYILGPFGPDSDLRRWGLTLAQRGGKTAKKRAVVAVARKLAVLLHRLWITGATYEPLRKLAMAPGAQVGTSA

SEQ ID NO: 498029 - protein, 347 aa, unidentified
MAFIGVDLHTNSFTICRLHDDGSEAFETFTLSASALQAFCMSLDADDEIAVEATGNTAWFCDEIRPCVGRIVVVNPRQFQVIRKSVNKTDKNDARSLAFFLSKDMLPETRLKSTAEAELGSLVATRDVFVKQRTMLLNKIHAMFVRRGTKLKKEGLASKKRLRELDVSQFTALEQVELNALRNQALGLTETLTELDKAIESAGADLPGHEGISSIKGIGSRSAAILLAGIGNIEDFESADKLAAYVGIVPKVSQSNDTDNRGRITKRGNKLMRTTLVQCTLIAIRYSGYLNAFYQRIKERRGAGKAIIATARKLLSIIYDTLKNGWVFEDFSEFKIKQNQCPTGQPS

SEQ ID NO: 498030 - protein, 338 aa, unidentified
MLYAGLDYHLRTSSLCILNEDGKVVKRQTIRGRIDDVVGELAKVDQPLEVVFEATGGYGPLHEKLSKVARRVVMAHPAGLALIWKSKRKNDRVDARKLAKLLYLDAVPAAHVPAAATRQWRRLIELRRSLVRRRAALKNQVHALLRTGGLASPPSLFSGKGAAWLMAQPLDEASSLERAVLLEQVRGVKDQLKVVEKALARTAKSEPRVTLLMTVPGVGRRTAEAFVAYVDRIDRFGRSGQVGSYFGLVPCEDSSAGRERLGHITKQGPPAVRQLLVEAAWIGIRRSPTLRRRFEQVCHDDRDRRKTAIVGLARHLSQVMAAILRDNRPWREESSAAA

SEQ ID NO: 498031 - protein, 381 aa, unidentified
MAEPILTVGGRAVGHCSEIFVGIDVSKARNAVAVADGERGGEVRFMGEVDASEESMRRVVKRLTAKGEQAQFCYEAGPTGYGLHRLITSLGHSCMVVAPSLIPRKPGDRVKTNRRDAVALARLLRAGELTAVWVPDEGHEAMRDLVRARAAAVETQRVHRQQISSFMLKHGRAFPRKTTWGARHLRWLQEQQFDHPAHQIALQEMVDAARTSKERVLRLEAAIEEFVPQWSLAPIVQALQALRGVDLIVAVTFVSEIGDLARFESPRQLMAYLGLVPSERSTGDTVRRGSITKAGNGRVRHMLVESAWTYRHPPRIGKLKLYKLERVSPAVREVAWKAQSRLTSRYRALSARGKKTTIVCTAIARELVGFMWSIGRQARPA

SEQ ID NO: 498032 - protein, 338 aa, unidentified
MNYLGIDHHRQYSHITWLNEKGEVVKSGRVANRRRELEGFLQGARDVRAVIEAGRSSYTMVDILAEVGIETVVAHPKQVRAIARAKVKTDERDSWKLAHLLRTGYIPEVHKRSRENRSSQRVLRQRAFYVGKQTSVKNRLRALLAQQGEEIRQEVERVENLFTDKGMKILRGLALPEREAKLVGALVRTYDHLEERINETNALVKQLYEQMPSAQLIQTVPGFGVFLAVLVAVEVEDIGRFKEVSQFHAYAGVIPSTYSSGERTWHGKIIKEGNRWLRWAAVEAVWPAMRADFSIRCFYDRLKKRKGANSAKVATARRLLTIIYRMLKENRPYIPYKR

SEQ ID NO: 498033 - protein, 345 aa, unidentified
METMYYIGLDVHKKTIDYCVKDGSGRIYAEGSIPATRLTLDMWMKTLPRPWTAAMEATIFTAWIYDHLKPHAAAVKVAHPLMLRAIAVAKKKNDRIDARKIADCLRCDFLPECYMAATEIRERRRTLRYRNLLVRQTVQMKNKIAVLLMEAGVSYNKQKLHKVGYFRELLATNQDIDEGLKPLLRLCREMVVRLGKTESALVRSLERDSLLVERVERLMTIPAVGPITALTWALEVGDVKRFSSIKKAISYCGLCGAEKSSANITKRTPLSKQRNKHLQTTLIEAAKMAPRNSPELAMVYEQAKQKGNANRATLAVARKMVAYLVAVDRRQKDFLVVEKENRAAA

SEQ ID NO: 498034 - protein, 343 aa, unidentified
MAKDTMIGVDLAKNSFQVHGATMGGHVKFRRKLSRAQFLSFMATQAPAIVVMEACAGAHHWARELLALGHEVRLIAPIYVKPFVKRQKNDAADAEAIVEAAQRPEMRFVEPKGPEQQVRALLFRAREQLVHQRTDLVNAMRSYLYEFGHALPIGIASLRRIETIIEDPDAGLPDMVREICRDLRQQIAEKTARIDAMMKRIRSTAEITETSRRLQTMPGVGPVTSLAIDAFAPPLETFRCGRDFAAWLGLVPRQNSTGGKQRLGRVTKAGQADIRRLLIVGAMSRLTWLGRKSIREGSWLARMLERKPKMLVAIALANKMARAIWAMLTRNEDYRDPMPVAAA

SEQ ID NO: 498035 - protein, 407 aa, unidentified
MPLFVGIDVSSKNLDACLMDGMGETLATQTVTNNLPGASELRDAILQHAEADDTIQIAMEATSVYSWHPAMFFHEDPELKQRRTKVFTLNPKLVRNFKKAYAEMDKTDPKDAWVIADRLRFGRLPKSVIQSEQYLALQRLTRMRYHLIQSLTREQQVFLNHLFFKFSAFNLEVDTPVFGHAITEFLLEAYSLDEIAQMPLEDLAMYLQTKGHGRFSDPEDLAASIQKAARSSYRLSKCVEDSIDLVLGSSIEIIRHLKRQIKDLDKAIARVLDGIPNTLQTIPGIGPVSCAGILAEIGDIERFDDQAAIAKFAGLFWPRHQSGDFEADDKMLARTGNRYLRYYLVEAANLVRRHEPEYRAFYQKKYREVHKHSHKRALVLTARKLVRLIDALLRNDQIYAPKKKVTR

SEQ ID NO: 498036 - protein, 351 aa, unidentified
MSQQVGTTIAVIGIDIGKNSFHVVGLDHRGAIVLRQRWSRGQVESRLANMPPCLIGMEACVGAHHLSRKLKALGHDARLMPAKYVRPYSKGQKNDFRDAEAIAEAVQRPTMKFVATKTADQLDLQALHRVRERLVSQRTGIINQIRAFLLERGVAVRQGQRFLRIELPRLLTAPPDVLSPRMVRVIEDLAGDWRRLDERIEALSAEIEAIARRDAGCQRLMSVPGIGPIISSAIVAAIGKGDAFGKGRDFAAWLGLVPKQISTGDRTILGKISKRGNRYLRVLFVQAAWVVLIKPKSWERHGLKRWLEAARKRLHRNVLAIALANKLARIAWSVLANHRNFETTRILVAAQ

SEQ ID NO: 498037 - protein, 399 aa, unidentified
MLAVGIDISKSKSVAAILNQDGSMHTSPFEFHHTQPELDAFIKYILNSKQSATILMENTGHYHYPVLKAFQEAGLPVCMVNAYQIKKFGDMDLRKAKTDKKDAVRIARYALEKSYSLVPYTSMEQKYEDLKFLARQYNQRMLTLKTNKVFLLNLLDETMPGITNILPLTTRTPETSLSVLFINRFKSYDRIKKMGKSRFLDAFEKITRKSRNRQTKTYGLAIYEAALRNITTRGENEYTLAAQDQCLELVCESQKAADSIILKMQTLAETLPEYAVLRSMAGVGDRLGPLILAEIGDIRRFHSGKALNAYAGNDAPPYQSGTFESHNRHISKRGNAALRKYCFEVMQALKLTQPQDDPVYLFLLKKEQEGKPYNVAKMAGVNKFLRIYYARAMETLKQQ

SEQ ID NO: 498038 - protein, 320 aa, unidentified
MRNAVGLDISKLTFDASAMVGKTEHSAKFDNDSKGLDQFSDRLKSLGCQNLHICMEATGNYYEEVADYFAQYYSVYVVNPLKISKYAESRFKRTKTGKQDAKLIAQYCRSAQESELVKRQKPTDEQYRLLRMTAAYAQIKSECAAMKNRHHAAKDEEAAKAYAQIIKAMNEQLEVLKEKIKEQTEKPNCKEGVKRLETIPAIGRMTAAVLFHHLTSSKFETSNKFAAFAGLSPQQKESGTSVRGKGKLTKFGNRKLRAVLFMPAMVAYRIRAFPGFIKRLEEKKKPKKVIIAALMRKLAVIAYHVHKKGGDYDPSRYKSA

SEQ ID NO: 498039 - protein, 359 aa, unidentified
MTAMVDRAGSHPVQVIIGIDTHRDTHVAVAVDQQGVRLAERDVETSTPGFVQLERWSRSQGEVRAFGIEGTGSYGAGVARFLSNRGYTVVEVNRPDRSTRRQKGKSDSTDAEMAARAVLAGVATATPKSGEGEVEMLRMLKNTKNSAVKARTQALNQMAALVVTAPAQLREILDDLATGALAARCASLRPGHIDHPTAAAKYALRSLARRHRQLTAEIRGLEKELGRLTWKIAPALVDAFGVGPDTAATLLVTAGSNPERLRSEAAFAALCGVSPLPASSGKTTRHRLNRGGDRQANAALHRMVVVRLRYDQRTIAYMQRRTQQGMSKAEVIRCLKRYVAREVFAFLQSLGRNDLPKAV

SEQ ID NO: 498040 - protein, 340 aa, unidentified
MNRYLGVDLHRNCFTVCTLGEDGASELRKWSIHALGDFAQEVQATDAVAVEATGNARHFCQALKERGCRLVVVNPHQFQVISRSVKKTDARDAKTLAEFLAKDMLPEVRMKETLPAEIASLLQTRDKLVKLRTTLKNKINNLLAARGILLPKESLSTEKGLEQVLQMNVGELAQVELVVLVEQIRHLNQGIAKLEAAIKKQGPKLPGYESLKSIKGIGDIGGSTLLSTIGDINDFSGEGKLAAYFGIVPRVSNSNETERSGRITKRGNKLGRTALVQCALIAMRYSPYLANYYARMKAARGTGKAIIALARKFLGIIYKTLKNGWVFEDFPKFVLAPAPG

SEQ ID NO: 498041 - protein, 341 aa, unidentified
MKQFIGLDVSLKDTFISVREGGQRIWRGKCPSDPKLIAQVIRKRAVNAERVVFETGPLSVWFYHALTLEGLPAICIDARHAKAALDMAPNKTDANDADGLAHLAEVGFYREVRVKSFDSMLVRTLVAARNRLLKMTTQLSNQIRGLMKTFGLVVPKGAGRVFEGHVRNLLATNAGLEQIIRPLLDAWRGMRARAAELSKQLVASARASEQCRLLASIPGVGAVTASSFVAAIEDPENFRKSRSVGAWIGLTTRRYQSGEVDYDGHISRRGDNHLRGLLYEAATVILTRTRADSVLRAWGLKLKERIGFKRAAVAVARKLAVIMHAMLRRGELFKSSIAVEA

SEQ ID NO: 498042 - protein, 272 aa, unidentified
MEHYAGIDVSLELSSVCVVDAQGKIVKEAKVSSEPGALVSFFKGLGFPMKRIGLEAGPLSQWLHAGLAQAGFETVLLETRHVKAALSAMTVKTDRKDARGIAQLLRMGWFRAVHAKSIGSQEVRALLVARKQLLGRLIDVELSIRGILRGFGLKVGPVTRKGFEPRIRELVTGQATLERVAGAMLLARAALKMEYEKLHKAVLAIVRDDAVCRRLMTVPSVGPLVAITYKSAMDDPSRIAKSKAAGALFGLTPKKYQSGQKRRHWRDHADRR

SEQ ID NO: 498043 - protein, 347 aa, unidentified
MGYFAGLDVSLEETTICIVDNAGKIVREARAASEPEVLVAFFRACGMKMERVGLEACSLTAWLHAGLTEAGIPAICIEARQAKAAMGAMPNKTDRNDARGMAHIMRTGWYRAVHVKSPSCRSWRALLTARRMVLNKRRDVENGVRALLREVGLKVGTPSRKDFPARVRGLAAADPVLMSLAESLLSVIEVMTREVERLTKRALDEVRVEPTCRRLMTVPGVGPLTALAFRATIDQPGRFRKSRDVGAHLGLTPRRYQSGETDVQGRISRCGDELARTALYEAAHSLLIRCTKWSALRAWGMNIAKRRGMPRARVAVARKLAVILHRMWVDGSEFRWGKQAAAATVVA

SEQ ID NO: 498044 - protein, 352 aa, unidentified
MMIIGCDYHPSWQQISWLDTLTGETGERKLEHASGEAERFYRQLPAPALIGMESTGNCQWFVELAAGLGHDLWTGDAAKIRACDVRAQKHDRRDAALILKLLLEGRFPRIWTPSGEEKDLRQLLIHRYKLVRIRAQVKNELQHLAMNQGVTKKRKLWSKAGERVLRELPLAPWARQRRKDLFRVREMLNGQIDPLDQAVVEVAEKNEKARLLMTQPGVGPITALAFVLTMGDVKRFQRGKQVASYLGLIPREYSSGEHRRYGSISKQGNRFMRMLLVEAAQCAVRCDPQMRSEYLHRCHRKAKGVAKVAAARKLAIRLYWMLRTNTGYPGVVRVESSSRVPLVSASLPGQAS

SEQ ID NO: 498045 - protein, 401 aa, unidentified
MPTVRENSQRIKRFRELKATLRTDRTRLLVGIDVAQAEHVIHLRHAHTRVVVPTLTIPNTPRGFTALWTRIQQAQHSTGCREVVVGLEPTGTYHQAVATFLEAQGADVVFLSSSVAYWNRRTQDGTWDKNDRKDAANCADLLEQGKVLFYSQPTGPLAELRQLVRCLRRARTELAACKARWRTTLRPALAPAGASLPPRLRAELPAVLQAWERAAPGRPAGPKGRLSLGLATACADLGAQVTAVQARIAALEQTLTPVAERLPAYGLLRSIPGIGATVTAILLAEIGDIAWFTQFSQLRKLAGLDIVRVQSGRYAGQHRISKCGRGLLRWALYHAAMGLVRTAAGQARFAAAKAKRRGDRYAGFKAITELAAKQLRVVWGVWRSGRAYDPARAAGLRRQPR

SEQ ID NO: 498046 - protein, 360 aa, unidentified
MSANETGTTPIIVAKRRKIFTHFIGVDVSKDKLDYAVLNQEKLLFHEVRPNTKEDIGLFLARLKKIPGFTLPKALFCMEASGIYGNHLIEAVRKSKAAMVVDNPVHIKRSMGLVRGKEDKVDAIRIARYCRSHKDEVRLWTARRAEVTRLTALFALRNRLLSLSIAISNPLMEEQRFVKKNYHDRNKELCSSTIGALKNDLKKVEKAIDALITGDLVLSRLRAILLSVPGIGRITMIQILISTNEFKSITCPKKLACYAGVAPFKNESGTFAGRARISRFANRRLKSLLHICAMNARKAEPELKVYFERKTAAEGKPKLAVINAIRAKLIQRVYACVRQNRFYEKRHIENNKQQPDQYTT

SEQ ID NO: 498047 - protein, 406 aa, unidentified
MKDVRILGVDLGKNSCSIVGLDGAGRVLLRRRTRREGVIALAAKLPGCVVAMEACCGAHHLGRLLVEQGHEVRLMSPEYVRPYVKAQKNDDRDAEAIAEAATRPTMRFVALKSEAQLDVQVLHRVRDRLVGQRTSLTNQIRSILLERGIVVPQGRRSLLEALAVLSSEPDGSRVGTRVQRLLDDMLDQWRALDARIKALDDEFAEMARNDPAARRLATIPGIGVLNATALVAAIGDGRTFSRGRDLSAWLGLVPHQATTGGRPKLLGITKRGSRYLRKLVIQGPERHCRRWPGRRRRSAAGYAACSLALMATPSSWRWRASSSGSPGRSCATRPGSSPAAQQWRRTGSAGGDHPTSQAVQGLRVVEARWPDSQPVSQKPMPSNGTRCRPLYQDRDARISILARVEP

SEQ ID NO: 498048 - protein, 490 aa, unidentified
MARLLEHSPRPESTYRPTWAVVFGKAEKMQDSDKRKDNADSSKQIAGLPVVRHKVAGIDLGSERHWVCAATVEGSGREVADFGATTCELIRMAKWLNARKVESVAMESTGVYWIAPHEVLEAEGLEVMLVDTRQLARVPGRDKKSDPFDCEWIQRLHSCGLLMGSFRPKEAVCMLRTLVRDKGNLVAEAGDWLRRMQKSLDQMNVRVHRAVSDIDGVTGMAILRAIVDGERDARQLAKLRHWRCHKSEEEIAEQLSGHWREDHLFSLRQGLKMYDAIQERITDYEKEILQKLAKMEREECRGQEVPKSKKPQKGRAIQSRGAEPMRQALYRMSGVDLTGIDAIGVETVQVVLSEYGPDLSRFPTEKQFVSHVTLAPHKPTSAGKPVKKKKRNSASTRVAAALRMAASSLRHSETALGAYYRHIARRIGGDVAVFATARKLATIIYRLLRWGQPYVDEGAQTYEQRYRENRIKSLTARAKELGYQLTPTTA

SEQ ID NO: 498049 - protein, 304 aa, unidentified
MFGIGIDVSGENLDVAVHEQAFRQFKNNKRGWASLIKWLQQWPAKQVVLEASGGYEQKALDALHGAGLPMVRINPGRGRSFASATGKQAKTDRIDAMVLAHMADALKLTRYVPPAAWQRRLGELCQRRRHLVQMRVSEHQRMRAFSEPSLISMLNQHLRQIQRSIKQLDSIIAALLAEQDGWRDFAKLKGAGPVLMATLACELPELGRLSGKAISALVGVAPMSRESGTWKGRRSITGGRAVVREALYMAALTAKRYEPRLKEFFESLVNQGKPGKVALVAVMRKMLVILNARKRDAEAQMASA

SEQ ID NO: 498050 - protein, 374 aa, unidentified
MSAGKKFIGLDVHQDTIAIAVADGGADREVRYFGTIANRAGELHAALKKIGQDGAELRVCYESGPCGFVIYRLLAKIGVDCMVISPSSMPRRPGDRVKTDRRDAQTLARLLRAGELVAVWVPDEAHEAVRDVVRARRQTKDELSSAKSALKSFLLRHGRRFSGKAIWGKAHWGWLSEQKFAFPHQQFVFEEYKRRIHDLMDRCNRLDDVLKEAVSGWALGPLVHALQALRGVKLTAAVTLVAEIGDLHRFDSPKQLMAWLGLVPAEHSSGKRIKRGEITRSGNAAARTMLIESAWHYRFPAREGRALLDRNAEIPEHIKAIAWKAQVRLCAKFRRLAASGKQTVKVVTAVARELAGFVWDIARHTLAVAVVARR

SEQ ID NO: 498051 - protein, 467 aa, unidentified
MAARKQKQRRMSAQVVEDEDYQLRYEIVAGIDVAKESAVVCVRMPPGAGRKHRTSHLQTVPATVPAIGELAAELKAAGVQMVSMEATSDYWRIWFAVLEEAGLAVQLVNSSQARNLPGRPKTDKEDARWIARLTEMGMLRSSFVPPPEIRALRVYTRHIFDLTADRTRYWQRLEKLLEDALCKLSAVVSKLAGHQTARAVIEAMIAGERDPRVLAALGQGKMRSDKLPALAEALAGMRFGPQHAHAAASLLRAIDLLEAELRDLHERVTAHLAAIPAAWGVDSDGVTGPEAGRADDAAALPAADRLDEITGLGREAAAALIAEIGLDMRRFPTPGALVSWAGLTPTARQSGPRKSRGKKGHGNTYAKRIAVLAAYAAANTDTFLGERFRRLASRPGGGGRKKAGCAVGRSILVIVWHLLNDPAARYRDLGPDWHARHTDRSRKARNAQRQLEALGYDVIITLREDAA

SEQ ID NO: 498052 - protein, 477 aa, unidentified
MEETKDLQPLPAASITKRYKKMARRIRRKRKGSLPPHLKTVNEHAAGIDVGSRQHSVAVPVGSCAPGDEVLFFDTFTPDLNALADWLERCSVDTVAMESTGVYWIPLYELLVERGFEVLLVDTSQIKYAPGRKTDYLDCQWIQKLHTFGLLTGAFHPDNEIRQLRGYVRQRSMLVVEGSKPVQHIQKALEQMNVKLTSVLRDVMGKTGLSIIEAILDGQRTPEELAQFRHANCKEDASTFVKALQGNWREEHLFSLRQSLDLWLYYKTKIKECDAEIEKLLGDQFDLSGGKELAPRKTKRPNRRNELSFDGRTLLYQMTGVDLTAVEGIEESTALTIISEIGTDMSAWGNAKRFASWLKLCPGNNKTGGYNKSGRNRKSANRAAQALRLAAQTVARSKTSLGAFYRRKAATRGSSIAIKATAHKLAVIVYSMLKYGTEYVTRSQEQYEQQYRNRQLRNLKRQAKRLGYQVLELPKTA

SEQ ID NO: 498053 - protein, 397 aa, unidentified
MGEGMVAGIDWASEVHVACVIDRHGAVASRFSFSHDAAAIGAMVRRLRAAGVAGVAIERGDGPVVEALMEAGLAVFVVPSRQIKGLRSRYGSAGNKDDRFDAYVLADTLRTDGHRWKPLRPDTDPTRALRALSRSRKDLVETRVAILGQLRANLELAFPGAIGLFTKPYSAISLAFLQRFPTGAKAAWLSPKRLASWLSSVGYTGGVSAEILHARLAAAPPGLAGAEGEARGQITVALVAAIRTLNTQIAVMDAEIGRLFAAHPDQHIFAGLPRSGTIRAASLLAEIGDCRQRFPTDDALAALAGACPSTRQSGKRTQAVFRWSCSKKLRAAVMDFANGSRMADPWAAGIYAAAIGRGCRHPHAIRILARAWLRIIWRCWQDGAAFDPALHRSRHLT

SEQ ID NO: 498054 - protein, 361 aa, unidentified
MAGTMTWVGLDVHARSTHGAAIDVLTGELTRVRFGPGVDGPVAWLTELAGPVRACYEAGPTGFGLYRAAVAAGVGMQVIAPGKTPRGPSDRVKTDRKDAELLARLLLAGSLTRVVVPPPEVEAAREMTRAHDACRRDLMNARHRVSKMLLRHGRVYPKSTAWTAEHRRWLSVQRFDEPASDVVFADLIATVDGLMSRKQAIALRLSELATDERWWPTVARLRAFRGIDTLTALSIHLELGADWKRFERATSLSAWLGLTPSLTQSGESSRQGSITKTGSMLARRLLVESAWHYGKQPRLGATLANRQAGQPEHILQISNRAQQRLFKVNRAMKARGKPHNIVVVACARQLAGFLWAAATAD

SEQ ID NO: 498055 - protein, 344 aa, unidentified
MEHYAGIDVSLESASLCVVDATGRIIREAKVASEPEVLIGWFHSLGLEVTRIGLEAGPLSQWLYAGMREAGLSVELLETRHVRDAFKAMPVKTDRKDARGIAQLMRLGWFRPVHCKSLPAQEVRAMLTARKLLQTKNHDVEMSLRGVLRGFGLKVGSTTPRTFASRVRELVAGHPTLSTIAEALLAARGTLFEQWQQLEKRLRSLAREDRRVRLLMTAPGVGAIVGLTYASAIDDPDRFRSSKTVGAHFRLTPKKYQSGETNVTGRISKIGDGGVRTALYEAANVILTRPVKGSTLKSWGMRLAARAGMRKAKVALARKLAVVLHRMLADGTGFIADKAAAAAR

SEQ ID NO: 498056 - protein, 339 aa, unidentified
MTVKTVGLDLAKDVFQVHGISENGRVIFNRAIKRAKLLAFFETLPPCLVGMEACGSSHHWGRQLRKLGHEVKLMPAGYVKPYVKRGKSDAVDAEAICEAVRRPTMRFVEIKTEDQQAILAIHRTRDLAVRQRTQLANMIRSLLREFGHILPIGIEAVAAFAKRHLDGDHPDMPEIANGLLGVQCYQFLGLNERIAGYSKMIEQHAMMSADARRLMRMPGIGPITASAIVATIGDAKQFRTGRDLAAWLGLTPLNKSSGGKERLGKITKQGDRYIRKLLVVGMTSRAVMAKRSPQKVDLWTAKIVADKPFRLATVAMANKAARAVWAMLTKKQEYRQPAF

SEQ ID NO: 498057 - protein, 380 aa, unidentified
MAAPATKDVISRSRYKTSWVCAFAVPGESKVAIHKIKAGDTDRLMAVLTGSKARAEQQLGRPLQIVLCYEVGYDGFWLARYLIARAIHTIVFDPASFLMPRRSRVAKTDRLDAEGMTRILRRWLSGDREMARPVQIPSVEQEDAKRIERERKYLVEERISVIGRIKGLLALHGIWLVKKNIGKGLRQRLDAMKTGDGRPLAPFLRSEIERMLTRYDLISRQIADVEADRKAALNNEKGVFPHADKVRRLTTLGAVGETTATVLVAEIYHRTFLTRRQVASFVGLAPSPYKSGEVDRDRGINKAGSKLARHMLVELAWFWLRYQSNSQLSQWWHSRFGNQGMRGRKVGIVALARKLAIALWRFVEDGIVPDGATLKVRHAS

SEQ ID NO: 498058 - protein, 334 aa, unidentified
MDFTYFIGNDTSKNELDIAVYKSKELLYHTEVSNESKAIRKFLKELNKLEGFNLQEAVFCMEFTGIYNNHFVYELVKKKANVWLEPASRIKKSLGMVRGKNDKLDAIRIGKYAYKNSDEARLWKPRRNVISKLHHFTTLRRRLLTIKNMLSTPLKEMDLYVEKSVSSKCKRFSKRTLNSIEADIKKVEKEIDQLINEDPGVARQVELITSINGVGKQTAIGVIVTTNEFKDIRDLKKYACYSGVAPFPYESGMFKGKAKVSHLANKRIKTVLHMAALSAIQYNVDLNRYYERKLTEGKNKMSIINAVRNKLIHRIFACVQQNRKYENSYATTLA

SEQ ID NO: 498059 - protein, 329 aa, unidentified
MDPHSFLPVVGIDVSKATLAVCFQVDQQLKHLEVSNSKAGFQQLVKACGKYCRFVMEATGTYNLAVAYYLHEQGGQVAVLNPLVIKRFIQMHLSKGKSDRKDAQWLLRYGQQQAVKVWQPEESLLVECRQLEQVTEQLLKQKTMVSNSLEALQRQPVISKAALKRLQQLQKALTQQVEAVEAELLALLEQRFSAEILLLCSIPGIGRKTAGMLLLFAGGFTRLDNYRQLIAMAGLSPREHTSGTSVRGKVRITKMGGALIRSKLFMCSFAAKKKNAACQALFDRLVTKGKNKKLALIAVCNKLLKQAFAIVKSGVPYQEDFTSKLVLNS

SEQ ID NO: 498060 - protein, 350 aa, unidentified
MLIIGCDYHPGFQQIAWVNSDTGEFQERRLQHREEAEKFYRELAVGGVQARVGMEASGQARWFERLLAELQFELWIGDAAEIRAKRVRKKKTDREDARHILRLLLEDRFPQIWVPSWENRDVRQLLWHRHRMVQMRTRIMNQLQAVALNEGLRCKKRLWRERGRQQLESFQLAPWASRRRRDLLELLDRLNPTIAELSQAIEQEVEKYPAAQRLMTHPGVGVLTALAFVLIIGEAERFGCGKQIASYLGLVPEEDSSGESRRLGHISKQGSRILRFFLVEAAQVTVRSDPEWRSKFFHLALRRGRKIAKVAMARRLAVRLYWMWRKQWDYEQWKKFGPHAGQPGTGVGVK

SEQ ID NO: 498061 - protein, 404 aa, unidentified
MVFVGIDWAEAHHDACLLDESGRALAKVRIPDGVAGVAQLHAMIADHAQDPLEVVIGIELDRGLLVGALCAAEYHVFAINPLSVDRYRDRHGTSGAKSDPSDAKLLADIVRTDRHNHREIAGDSDLAEAIKVLARAHKDMIWARQRQANRIRNLLREFYPGAIEAFGNDVADRDALAVLAAAPSPAQGRRLSQAKVAAALRRGGRQRNLDKRAAEITQALASSQLEAPEVLVRAYAASVEAQVRVLTEIVAQVEALEQELASTFRSHPDAEIYLSLPGLGDVLGARALGEFGDDRTRYANPKSRKAYAGTAPITKASGTRRVVLARFARNDWIADACQLWAFAAISRSPGARRYYDALRARGKGHNHALRQLANRLVGILHTCVERHALYREDVAWPLTAEVAA

SEQ ID NO: 498062 - protein, 340 aa, unidentified
MTITTIGIDLAKNVFAVHGVDQNGKTVLVKSRVTRAALPGLIASLSPCVIGMEACSGAHYWARLFLQYGHEPRLMAAKFVSPYRMAGKSGKNDAADAQAICEAVRRPYMRFVPVKDESQQAMQCLHRTRQGFIEEKTATYNRLRGLISEFGVIAPQSTDALRHMVSAQKSSLPLQVQQCVDDLLEHVDRIEANITEYDRILSRIAKTDHRSQRLMKLKGVGPTTACALVACIGNAHDFKNGRQLAAWLGLTPSQYSSGGKSKLGRITKAGDSYLRTLLVQGARSVLIGAEKRTDSFSRWVCSLVERRGYWRAVVAIAAKNARLCWASLHYGDDFRLYSAS

SEQ ID NO: 498063 - protein, 339 aa, unidentified
MSAIVTIGIDLAKNVFAVHGVNATGQPALVRPSVPRAKLLELFASLPPCLIGMEACSGAHHWAREFQRFGHTVRLMAPKFVIPYRLSGKRGKNDAADAAAICEAVTRPNMRFVPIKSIEQQGQLLVHRARQGFVEQRTATLNRIRGLLSELGIVLPLKAAVVRREALARLEDLPGWANTVIGDLLSEVSRLDERIAQYDQHIKTMARQSTEAQRLMQLSGIGETTATALLSTIGNGRDFKCGRQLCAWLGLVPGQYSSGGKQRLGRITKAGDPYLRSLLVLGARAVLVAAKNKTDPISRWAVSLAQRRGYWKAIVAIAAKNARMCWAVLSKGEDFHLPA

SEQ ID NO: 498064 - protein, 346 aa, unidentified
MLHVGLDLSRKRIDVCLISDQGELIDRFTAIPDRDGLYGLARRVAVYGEAVRAVVESMNGARFVHDELTSHGWEVLVADAQKVKGLAPLACKTDKIDSGVLAELSFRDLVPAIWLPTFELRREREISRWRLHLVKHRSTLKNRVHSTLITFGHQRHMSDLFGVAGRRLLMELEMPEPWRSHVDASLVLIDDLEARITQIAKELRRSGADHPYVPVLMTAPGFGWITSFTVACELGDVNRFSSPVKLTGYTGLCPRVKQSGQMDQRGPLSKHGPRYLRWGLMEAAIAASSHPLYRERYQRTRRRLGRQRGPKVAQIDLARQLTEAIWYMLTRNQPFAPAGAINRLAA

SEQ ID NO: 498065 - protein, 343 aa, unidentified
MRSLYYIGLDIHKKMIAYCIKALDGRLITQGKICADRKSVSDWVNGLPGPWIGAMEATIFTGWIYDFLTPHAVELKVAHPEMLKAITAAKKKNDRADAEMIADLLRVNLLPECHMLSEEIRELRRILRYRNHVVRTAVNMQNKISGLLMEVGVSYSKSRLHGKKYFTGLLESVEEIPPSVKELLKLSRASFEMFRTVQKRLIAVLRTNGLIHDRVQRLMTIQGVGEVTALTWALEIGDPQRFSSIRQAISYCGLCSAQKESAGKEQRGPVSKKRNKHLQVMLVEAAKIAPLWNSQLAAVHERELKKGNRNRATLAVARRMVAYMMAVDKKQVDFVIHKEEKSA

SEQ ID NO: 498066 - protein, 347 aa, unidentified
MTLYIGVDFHPHQQTVSYCNTEHGEVEQISLAHNVELVRRFYEQFPKAVVGIEASCTAAWFEHLMNELGHELQVGNPTLIRARARSRHKSDKRDADLILELLLKGEFPSLWRRSTKSQSVLEQLRFRHQLVKHRTQVCNRLQALAHSAGLPKRGIQTKRARLALMAANFTETQSFERSQLFELLDDLSGRIKVIEKWLEEKAAGDAQVGLLLSHKGIGTLSALVVVHTLGDITRFPSSKEAVAYTGLDPLERSSAGKVRTGSISKAGSAVLRHLLGQAMHVAARAGGELKAFYKRLANRRTKSVAKVATTRKLLIRLFIMLRDGIDYQEFKRRGSAVGMPVLSHGLQ

SEQ ID NO: 498067 - protein, 338 aa, unidentified
MFMIGIDPHKGSHTAAAIDDQEQLVGELSVCADRRQRDRLLRWAAAFEPRVWAVEGANGHGALLAQQLVASGERVVDVPAALSARARLLDSGHKDKTDAHDARSAAIVALRHRKLRTVALEDDRLVLRLLARRHHQLTAARTRAICRLHAVLAEMLEGGLSKNLSARRAADELRRLRPHDAIGIERKRIAVEFLEEVRRVDRALVELHERIDHAVKAACTSVTNVFGVGPIVACYLIGYSGDVRRFPTAGHYARYNATAPIAASSGPKVRHRLNPNGNRQLNHAIHIAALGQISHDTPGRAYYLRKQTQGKNRKEAMRCLKRRISDAVYRQLRTDLDH

SEQ ID NO: 498068 - protein, 310 aa, unidentified
MDIITVGIDVSKDRLDVAVRPSGETFAVERNAAGLDRLTARLRELSPHIVALEATGGFETVAVAALAAAGLPVVVVNPAQIRAFARALGQRAKTDPIDAAVIAHFAEATKPEVRPLPDEATRLLADLIDRRRQIVEMIGAERQREKRVTMPRLRKSIARVIKTLEKELTSLDADIDDAVRSSPAWRDKENLLASVPGVGSVIARTLIADLPELGHLSRKEIAALAGLAPFTRQSGQWRGRSFIGGGRSAVRTALFMGAMVAKQHNPVLKAFFDRLVAAGKPKMVALIAVARKLLTILNAIIRDQQPWQTA

SEQ ID NO: 498069 - protein, 474 aa, unidentified
MVTRAPEVILDEAHEQIVERVCAIDVAKDSGKVCVRVPAESGSGRRVSKVWDVPARTKAVIELGDHLACQGIQKVTVESTSDYWRIWFYLLEARGLDVQLVNARDVKNVPGRPKTDKLDSIWLAKLTEKGLLRPSFVPPRQIRVLRDYTRLRVDLTAERTRHWQRLEKLLEDALIKITAVASRIDLVSVREMIEALIAGQRNPRILAGMARGRMRLKHADLVEALTGQFDDHHAELARMLLDQIDALTVQIDTLTERIDVVLADIPVPAPQPEPDPDDHGPGTSDDAEVTAVIRPSHGGAPRPRTAARAVTALDLVDILDEIPGVGRHNAHEIIAEIGLEMTRFPTAGHLVSWAKLCPRTIQSGAKSSAGKTGKGNRYLRAVLGDAAAGAAKTQTFLGDRYRRLIKRRGKLKALVAVARSILVIIWNLLANPGMRYHDLGVDFHTKRMDTERRTRNHIRQLEALGYTVTLTAAA

SEQ ID NO: 498070 - protein, 417 aa, unidentified
MPYHVAAGLDVHKKFIVATLLWSTGTKIQQRFERTVQGTLALKTWLLDYKCDVVACESTSDYWVTIYDLVIEHVPVLVGNAHDLKVLAHKKTDKIDSEMIALLALKGMISPPRVMPRHHRDFRKLVRLRHFRVGKRTDLKNRIHSILDSELFPLAALLTDIFGVSGQRILHGILNGVSADEILLSIPRRIREKKEPEIRALIDQNLSVGALMQLGHLLRVMKQLDEEIAALTEEAQAYVLRKFPREYALLRTVPGVGNITAITLIAEIGNFKDFTSGDHLASWLGLVPKVYQSANHVVKQSITKRGSRYARWIITQAAHAAAKARKNVLRDWYEAKKAVIGTGKAITALSRKMITIIWHLIVNDEEYVDKYRDPGTPQSPQMHTLRIPASPHYTLEDVIRLVSEAIELLNQRDPDPV

SEQ ID NO: 498071 - protein, 426 aa, unidentified
MADTTDVTTQTHWLAIDVAKHWHAVLIETAAGARHRFKMANTAQDYERLIHFIDGLGGRCRAALEPTGDWHRPLAYRLIVAGVDLVSVSSVAQSRYREAKFNSWDKNDPKDATVILDMLKQGVVQRYVDPMIAGHHDLQELSKTYFQISKLKTRIQHSVLNHHVPLYFPEMARYWNSSRSEWWIRFMLEFTTPAHVKRLSREDFIAAAWSLIGKKSDKVGKLGEMWDTAHQSTALPHEVGSLAVETFRITLRQLQHLNETRADLERRAETILSDNADYKQLRTLPGVGPVIALMILAEAGDLRRFNHHRQFLKYCGLDLAKHQSGAMRGREQLSKRGNARLRLAFWMAGTIAVRLRENSFSDKYERYIRTAPGDADLKRKALTAVCAKMARVAYGLIKSNRSYQQFYEQSLPSGSIPLCRAVEASA

SEQ ID NO: 498072 - protein, 322 aa, unidentified
MQYIGIDVSKATFVVAYSSDKGGEIRTFNNTTAGIKQFIGTLPKDGSIHCVMEATGNYSALLLYMLNVAGITVSMENPLKVKNFARAMLSTVKTDKIDARLIALYGEKMNPQPFKVQGEAILRLRQKRTVIRQLTKQITAMSNLRGSLACLPVPDKGATHTVDETIKFLEKRRDRLQSELTDLVEVEFSRQLALLTTIKGIGITLATALIITTGGFTYFQNAKQVSRYLGICPTYEQSGTSVNIRGHINRNGDAYTRGLLYIAAWPASRFNAQCKETYTRLRQNGKPGKLAMIAVANKLVRQAFAVVAHDKEYIDGFVSNRP

SEQ ID NO: 498073 - protein, 391 aa, unidentified
MVCVGIDVAKDKHDCCILDSDGTIRADYITIPNNMDGFKQLLQTIRDCTKKSDKIKVGLEATGHYSYNILGFLLDNDLAVYVMNPLHTNLYRKSLSLRKTKTDRVDARTIATMLLSDVDLKSYTDTAYHNEELKSLTRYRFDKVRERAKLKQSVSRLVTILFPELEKLVPSLHIASVYALLSEYPGAKQISEIHLTKLTNLLATASKGRYGKDKAIQIRDAARTSIGSVMPAKFLELKHTIKLIRELTSEIDEIEVSIQKIMDELNPPILSIPGVGIQSAAMILAEIGDFSNFESPDKILAYAGCSPSTYQSGKLTNCYAHMEKRGSRYLRYALYNATKYVCHWNPVFAEYLAKKRAEGKHYNVALSHATKKLVRLIYALQKSGKAYLVAA

SEQ ID NO: 498074 - protein, 367 aa, unidentified
MKEYIGCDAHKRYSVFVSVNERGQSSRPVRVSHDREGYRQFLASLPAGSPIALEATGHWYWLADEIEAAGHQVHLANPGESKKRMGKTNKTDTLDAGGLGMLLRNGTLPEVWIPPAALRDQRALLRTRMRMVRVSTGLKNRIHAALDRYGLQSEGYSDLFGKVGRQHLAILLESLPAHTRQAVRHEVALLDHLQAQLTPLEEYIEKVVEPSPEIARLRTLPGVGVILAPVIAWEVGAVKRFAGPGKLTAYAGLVARTISSGGHTWHGRVSSAVNHYLKWAFVEAANAVVRHQNKYFSWHVMSLYQRLRGPKGHAKAATAMARHLAEATYYILARSEEYRDPASSTLETAVQAAGSSCPGKRDVALAL

SEQ ID NO: 498075 - protein, 344 aa, unidentified
MESMHYIGFDIHKKVISFCEKQADGSIVEQGTLRATRTSLSNWAEQRKTIWCGAMEATMFTGWVYDHLDDYALELSVAHPEMLKAISAAKKKNDAADAEMIADLLRCNLLPQCYMAPTEHRDLRRILRYRNFLVRESTRMKNKTAGLLMEVGAEYSKSRLPGKQYFQQLLDSLDYVPESVVDMLKMTRTGVELFTSLQKRLLRKLHSVPEIRERAALLMSIPGVGQITALSWVLEIGDVHRFNRINRAVSYCGLCSAQKQSAGKDYRGPISKKRNKHLQTVLIEAAKLAPRWSPQLAEVYERECSRGHRNRATLAVARKLVAYMLVVDKTQQPFMTEEELLPVG

SEQ ID NO: 498076 - protein, 365 aa, unidentified
MGEVTTVGIDLAKEVFAICVLDARGAVIERKVLRRVAFERWAESLFGPCVIAMEACGSAHHWGRVFAARGHAARLIAAEFVVPFRQGGKNDGNDALAIAIAARQPTMRFVPVKTVEQQAILAWHRVRQGWIEERTALLNRVRGLLAEFGLVPGRSPAVLMAAMARLVDEAAAPEPMRAIVQQAREQLCQLDARLAACDAQIQAHAHHSPQAERLRALLGVGPITASAVVATVPDATLFRHGRLFGAWLGLTPRQHSTGGKTRLGASSKRGDAYLRGLLVNGARSALQAALRAAPEKATRLQQWMVGLAHRCGYQKALVAIANKHARMIWAMLARDETYDPQAWQRHPQAQPSAVTAAPAVALGMT

SEQ ID NO: 498077 - protein, 340 aa, unidentified
MKRLYAGFDLHSSNNYVAIIDEGGKRIFSKKLPNDPEQIVSALRPHKDNMAGIAVESTYNWYWLVDTLMAKGYKVHLANPSAIQKYKGLKHADDRYDARWLAEMLRLGVLPEGYIYPKHQRGVRDLLRKRGHLVRLRTSLIISLQHIITRSCAIKLGVNDIKRLGEDRVNPVLCGNEEVLMAGEVSKETIDYFTRQIRKIEKAVEGKIKLSSPYLRLVSIPGVGKILAMTIMLETGPVSRFPTVGDYVSYCRKVDSKWVSNGKKKGKGNKKSGNRYLAWAFSEAAELARRYDAAARAFYQRKASKSNFMVAHQALAHKLARAAYCMMRDDVAFEAAQLFR

SEQ ID NO: 498078 - protein, 308 aa, unidentified
MTFVGCDLHTRMQQVAVLDTGTGEVSEHRLPHEGTAVEEFYAALPRPVTVGIESTGYAVWFHTLMQRLGHTLLVGDAAKIRAMVVRKTKTDRRDALHILDLLRHDRFPAIWIPDPATRDLRALLTHRMRLVRIRTMVKNGLQAIALNSRLACGAQLLRQAGLAQLQALALPPHTARRRDQSLELLAGLTSQIRELDDAITTTALGHPDAPRLITHPGVGALTALTTIVVLGPVSRFPDSKHVVSYVGLAPALHASAEKYHLGRITRKPKSPSPVSSSCASSLCCVIRLTMTSSVAGVARRRPRPKEGD

SEQ ID NO: 498079 - protein, 407 aa, unidentified
MLKIVHHICCGIDVHKSFVVAVLAITNDKGITEYKRQRFSTFTNQLIELRKWLEYYSCFEVCMESTGKYWIPVYNILEESCNICLAHPKYVKAIRGKKTDKKDAQWIADLFKHDLVAGSFIPPIAIRQLRDLFRYRMKLTNCQTGEKNRYQNCLTWLNLQIASVVSDVFGKSAQNIITSILDNPKQTPDIENLMHKSMKASTEQMTRALDCDLSEEQANKLRVIKAHFDALTFCKNNLDEMILELGMEFKHQQELIQTVPGFKNPMTALRIISEIGVDMTQFPTLGKLCSWAGVVPANNESAGKKYSTRISKGGQYLKPLLVQVANAIVRSEKHPEMRNKYLQLRKRRGHKKAIIAISHRLLVAIYHILLRNEAYNPELYKRIDVPTKKLSVQGAIEYAQKHGFNVA

SEQ ID NO: 498080 - protein, 340 aa, unidentified
MYPFYLGIDLHLKRTYAVLMTSTGDVIDERRISNLDIEKYLKSTVLRETYAVLEATRNWAFMYDLLDAHVERVELAHPKELKAIASAAVKTDQIDAKVLANLARTNFLPTAYAAPQETRDLRLYIRHREWLIRQRTQAKNRIHAILASYNRMSPVKDLFGVQGRAYVNEIMAEIRPTAQRVVCDHLTLIDHLDQQVAALEADLTLSKADEQVVKLLKSMPGVGRITAIVILAEIGDIQRFDTPKALCHWAGLTPRVRKSDQVVRHGRITKQGSPYLRAALTRAATVASRTSKRWYHVHEKMLPRCGRTGAKVAVARRLLTVIFFMLTRHEPYLENYPTDR

SEQ ID NO: 498081 - protein, 394 aa, unidentified
MQKVCGLDVHKDTIFLCILAENGQSFIKEFGANTPDIIEMRDLLHANQVWEVAMESTGVYWIPIWRIFQGHFDLKLVNPYFIKQLPGRKTDVKDSEWIATCLQKRLIKGSYIPGKNIQELRQYERRYVHLVGQVTRIEQALDRQLHRCNIRITNFTSRIGSVSVMNVVQAIIKNETTPEELIKHVHGRITNKHKEKIKAALTGYISDSDRFLFRQNHEELELITRQQQECVKEMERICDSLYRQELELLCTVPGIQKLSAMTIIAELGVDLKSFATAASLVGWAGLRPRNDESNKKVKSRKITKGDKYVRRILVQCAWAMTRSKKSWLSKKFNELTKRLSKKKALIAIARKLLVIIWNILSKHESYRDYKPIISRDQKKRRIAWLEKQILELQA

SEQ ID NO: 498082 - protein, 407 aa, unidentified
MARRPVIWIGIDVGKRTHHACAIDTDGKVVFSRKVSNDQVAIEALLVRAKEAAQDVRWAIDLTCSYAALLQVVLTAADQQVVYVPGRVVDRMSGVFRGEAKTDARDAKVIAETARMRGEDLTTVTATDETTAELARLVAHREDLMADWVRGVNRLRDLLGSIFPGLEAAFDYSTRSALVLVTGFQTPQALRDAGEATVIEYLRGHRAWAPGIAVMAATAVEVAHAQTVALPSETRTAILVAGLARRLLELDREIKDTDKLITTVFRSHPDSAIIESLPGLGPILGAEFLTATHGGVGPELGGFASPGRLASYAGLVPVPQDSGRISGNLRRPRRYNRRLRRVFYMAALSSLKANGPSRAFYQRKRSERMLHTQALLALARRLVDVLRALLRDRRMFTITAPQPAIAT

SEQ ID NO: 498083 - protein, 379 aa, unidentified
MNKRITFIGLDVHKDSISAAVAEHDAEPRSLGKIANTPQAIHKLMRRLGPFQNLKVCYEAGPCGYVIYRQLSRMGIDCVVVAPSLIPKKPGVRVKTDRKDGIMLARLLRSGDLEPIWVPDADHEALRDLSRAVEAAQGDLMRARHRIRKLLLRQGIRKPDKMNAWTYRHREWLHTVKLPQASQQVVLREMLLTMDQARERRQRLEAELEQTIEFSPLADLVQAWQCLRGIKVISAIRLAAELGDIRRFTTPRQLMGYVGLVPSERSSGSREWRGSVTKTGNAHVRHILVQAAWHSRHAPRISADLRKRQRGQPERVKAIAWKAQDRLHRRFRRLVGRGKPGQKAVVAVAREMLGFIWAIAQEVPVPEQDQRPNQFSKAA

SEQ ID NO: 498084 - protein, 377 aa, unidentified
MKRIKFVGLDVHAETITVAVAEQEGEVRALGVIPNRVESIRKLVKKLGPVGQLRFCYEAGPTGYAVYWQLTALGAKCEVIAPTLVPVKTGDRVKTDRRDSLKLARNYRAGELTSVWVPDAAHEALRDLVRAREVAKKDQLRARHRLIKYLLRHGRRPPTGVKPWTLNYLSWVKHEVHFEPMAQEATLLDYLNEVEHAELRIARLNLAIEEAVKLTPPKMRAVIAALQALRGVAQVTAVTIVAEVGEVSRFTGARQLMGYGGIVASEHSSGESTWRGGITKTGNAHLRRVVVEAAWAYRHRPSVGETLRKRQAVVSEEIREIAWKAQHRLHTRYQKLMARGKEKEKVVTAIGRELLGFIWAIGVKAEAAQEKTERRAA

SEQ ID NO: 498085 - protein, 360 aa, unidentified
MLYGGIDIHKRYSVLSVINDRGECLETKRFENNRAELQEILDRYKGETFKAVIEAGLNWGVMYDMLWEMEGIVDVKLANASKVKAIASGKIKTDKIDSKILGQMLRMDYIPEVWVPDNPTRVLREVARYRLFTVKFKTMIKNRIHDILLKSHIEVPEVKDLFGSHGLKFLESLELRDKNYDILLKRQLGLLKQMKEEDKEMQEVLEMELKDRSDIKLLRSIPGIGKIFGQLIVLEISDIGRFANAQKLCSYCGLAPSIHSSGNTSYHGKLVIGNKWLRWAFIEASHSAINVSPYFKKHYIKVKNRAGTSGATVSVARKLATVAYHVLKEKRDYVELMPNNKGHLPSVGASRSLSPDSCQV

SEQ ID NO: 498086 - protein, 393 aa, unidentified
MIGGIDSHKDTIHVAVITGLGVDVVDREFTTTQAGYHEAIDWLRTQDCLDVVGVEGTSSYGLGVTTALREAGARVIEVNRTRAAERRRKGKSDRLDAYRAARGVLSGEASTIAKSDTIEPLRAVHNARKSAVKAKRVAWQQISATLINAPAPLRDRYRGLAEDKAVQQLIAARPARGTEPAVAGIMVALKVLARRHRALSAEIDELGDYLAETTTAINPGLAALQGVGPVVAAQLLITAGDNSDRLRSEASFAALCGTAPVQVSSGRVTRHRLSRGGDRQANAALHHIVTNRLRHDPRTRDYRDARLAKGGTKAAAMRALKRAVAREVFRALRGRCPVPDYSDLRPARQARNLTLAAVAVELKVWPSALSQLELGQRVDNDLVARYRNWLTAA

SEQ ID NO: 498087 - protein, 391 aa, unidentified
MVCVGIDVAKDKHDCCILDSDGTVRADCFTIPNNSDGFKRLLQTIQDCTQKSDKIKVGLEATGHYSYNILGFLLDNGLPTYVINPLHTNLYRKSLSLRKTKTDRVDARTIATMLLSDVDLKSYTDTAYHNEELKSLTRYRFDKVRERAKLKQSVSRLVTILFPELEKLVPSLHIASVYSLLSEYPGAKQVSEVHLTKLTNLLATASKGRYGKDKAIQIRDAAKTSIGSVMPAKSLELKHTIKLIRELTSEIDEIEDSIQQIMDELHPPLLSIPGMGIHSAAMILGEIGDFSNFESPDKILAYAGCSPSTYQSGKLTNCYAHMEKRGSRYLRYALYNATKYVCHWNPVFAEYLAKKRAEGKHYNVALSHATKKLVRLIYALQKSGKTYLTAA

SEQ ID NO: 498088 - protein, 363 aa, unidentified
MHESTTVTVGLDVHARSIRLAAVRADELLEERTLPYDEQAVERLLRRWPAVRCCYEAGPTAFGLSRNLTEGGIDCAVVAPGLVPQRPGDRVKTDPRDARKLARLLAGGLLEPIHVPTPELEAVRDLVRAREDARLDRMRDRQRLSTFCLRHGRLLPTSAWTVIRRKWLGEQRFEHSAEQITFDTCLHAVDLVDARIGQLERAIRETAEQGPWSELVARLRCLRGIDTLTALALVAEIGDFGRFKCAEEFMAFVGLVPSEHSSGEQRRQGSITKVGNSHVRRLLVESAWHARRRPKVGYGLSRRHRGQDAAVIERAWRCQQRLYQRWQRMAGRGKPHQKIVVACARELAGFVWAIATEQPLRTT

SEQ ID NO: 498089 - protein, 411 aa, unidentified
MEVIVACCAGLDVHQASVVACVNSSGGGGRSHKEVRTFGTMHDDLIALRDWLQGAGVTLVAMESTGVYWKPVYEALEDAFETIVVNAQHIKNVPGRKTDVKDCEWISDLLRHGLIRPGFVPPRPIRALRELNRYRRKVAQGQAGERNRLIKVLETAGIKLAGVASDVFGVSGRAMIRALIEGEDTAEAMAGLARGKLRRKRADLARALDVPLQLHQRFMLRTQLARIEQAEAELERIDAMLSEMIAPYDHYVGLLISIPGIDWINAVTIIAEIGVDMSMFASPAHLASWAGLCPGNNESAGKKRSGKSRKGNAVLKTALVSAVITGSRRRGGGYLAEKYRRLTARRGKLRAAVAVAHKILVSVWHMLRNGTFYQELGAGFLDRLDRERTAKHLVRRLANMGFDVQLQQKAA

SEQ ID NO: 498090 - protein, 412 aa, unidentified
MEVVYPCCCGLDVHKKSITACVLWAEAKGKSRKEKRRFGTFTHDLLQLADWLGECGVSHVAMESTGVYWKPVWNILAEQFEVLLVNAQHIKAVPGRKTDQKDSEWIADLLQHGLLRGSFVPPRPTRELRDLTRYRVSLAQEINRIANRIQKVLEDANIKLASVATDALGASGRAILEAMLAGEQDPARLAEMSKGLLRNKIPELQLALEGRMTEHHRFLLRQLFDHLHFTESKLSKIEQEIDRRTRPFEDQVTRLRTIPGVDRVTAWGLLAEIGLDMNQFPSAEHLSSWACLCPGSFESAGKRLSGKMRKGNVSLRRCLSQAAWAISMTKNNYLSALYRRIAARRGAKRAIMAVAHALLVIAYHMLKRKEDYRELGADHFDRIDVNRTRRSLVRRLERLGHKVTLEPLAQTA

SEQ ID NO: 498091 - protein, 344 aa, unidentified
MAKSTTIIAFDQHAATTVAAVLLPGQRTPALHQLTSDIPTILRFVERIRRAGPVQCCYEAGPCGFELHRGLVAHRIPCDVIAPALIPRRPGDRVKTDRRDAGQLAILSRAGALTAIHIPTEQEEAARDLLRCREDIRADLLRARHRLSHFLLRHGRRFTLTKKAWTKRHAEWLQAQRWPLPALEQTHRAYVRAVDEAVGRLQAVNLELRDLLTLEPLHARVDRLRCFRGIDDLTALTIAAELGDARRFPNAPSLMAFTGLIPSEHSSGAKHSRGPITKTGNAHLRRVLVEAAWQYRHHAFLGPSLQHRQRGAPQAAIALAWHRNIAYIVATARSPSVANRNNSS

SEQ ID NO: 498092 - protein, 348 aa, unidentified
MTYDYVIGMDVGKYFHHACVLDIDGTQVLSKRINQNEKSLRALFSAFSAHDHKVLVVVDQPNNIGRLTVAVAQELGIDVRYLPGLAMRQLSRIHAGNAKTDIRDAYIIAHAAKNLPESLRSVDRVEEAFLQLKVLNGIDEDLARSYTRLINQIRSALVGCYPQFEQALRGQIIHRKWVLHLLARYGGPTKIKRLGKAKATAFARRYKARNPEPVLDAIFAAISEQTVAIAGAHYAEMGVAMSAKDALLKLEHRTQIEQEVIELINDIPHTQILLSMPGIGPKTAAQILMTAGDMTDFPTAGHLASYAGLSPRTNQSGTSIMSNSLNRAGNKKIKERPMAIIFCIHQIP

SEQ ID NO: 498093 - protein, 348 aa, unidentified
MNRIYIGVDFHARQQTICYLTTEGGEIQLHELKHQHKQEVRAFYAQFQGRVIVGLEASGYSPWFERLLEELGCEVWLGHATEIRRRARWRQKNDRRDAELILDLMLHDEFPRLYLPPLQSREVLRMLRYRQKLVKIRTMGKNSLQALALQSGLAKGSHLFSKAGLQELRTAVMSPAMQWQREQWLQLLEPLNQRLLETMFWLKQQSQDDQRIIRLRTHPGIGLLTSLCLVHSLEPVTRFRNQRKVVAYAGLEPLERSSAERIRFLGISKAGSRILRYLLVEAAHVAVRKDEELKRFYQRLAARRGRAKAKTAAARKLLIRAYIMLRDEIDYAEFRRRAVAARLARKIT

SEQ ID NO: 498094 - protein, 351 aa, unidentified
MNIIGCDLHTRYQVVAWVEEATGEIRTRRLEHENGEARSFYTGWPRGARVGIEATIPALWFERLLGECGHELWVGHSAQIRAQAVRRQKTDTRDAEHLLDLLRTQRFPRVWTPSLEERDLRQLLVHRLKLVRARTTVKNQLHALAISQGVCRKGRLWTVKGRAELASLSLLPWASRRREELLALLDQLDAAIEPLDQAVEIQAQAREDAVLLMTHPGVGPVVSLAFVLTVGPASRFPNSRKLVSYLGLNPRENSSGGRQHLGAISKQGNSMLRWLLVEGAHRAVVYDPEMRRAYQRLKFRRVSGVAKVAMARRLAVRLYWMLRAHMNYAQLVRMSGSPSSAVAPTGSESKL

SEQ ID NO: 498095 - protein, 344 aa, unidentified
MSDVITIGLDIAKHVFHVYGADERGRAMFSKKISRGKLLDFFTEQPKCMVALEACGGAHHWARQLTQLGYKVRLIPPAYVKPFAKRQKNDAIDAEAICEAAQRPNMRFVAVKSEQQQAAGLLFRTRDLLVRQRTQLINAIRGHLTEYGWIAPKGPSHVAMLADLIEEEEMARSLPEAAHAMFRVMLDLLTGLNGKIADLDKEIARRAREDEVSRRLMTVPGIGPISATAIAALAPPVETFAKGRDFAAWLGLTPLQRSTGGKQKLGATSKMGERTLRRLLIIGSSAVVKQASKRGAPRGSWLEQMLARKPRMLVTVALANKMARIVWALLVKQETYRAPVAARA

SEQ ID NO: 498096 - protein, 338 aa, unidentified
MERQYVAIDLHLQRSLIVRENEAGEEISVVRVDNDPVALSLALAEAGPDPEVAIEATYGWYWAVDLLQADGARVHLVHPNGLGWEGRRVKNDYRDAKELLDRMRLGKLPEAWIAPPEVRELREMVRYRARLVALRTGLKAQLKSVLAKHGIRPPVNDLWGVAGPAWLDTVELPKGYAARVDSLRDLVAAYDREVAIFERLIAQELAGHAGYRAIQTIDGVGRTLAAIFVAEIGDIGRFPTPQHLCSWAGLTPKHRESDRKVWRGKATKQGSKLVRWAAVEAISHMHGGPKIKADFIRIAKARGRNVARVAAARKLLTLVYYGLRDGEIRCLAPAEAAG

SEQ ID NO: 498097 - protein, 345 aa, unidentified
MEQISRIGMDTSKHFFQLHGVNAAEKVVLRKKLRRKEMVAFFKALAPTVIGIEACGAAHYLARLLGSFGHEVKLIAPQLVKPYVKRGKNDGADAEALCEAMSRPSMRFVPVKTAEQQAALMMVGLRDRLIRNCTQLSNAIRGYAAEFGFSAAKGKAHLVPLLERIQADESVPVLARELFTAQAEEYARLQAQIDAVDVKLLAWHKADESSRRLVKIPGVGPIGAVLLMLKTPAPELFRSGRQFAAWIGLTPKDHSTAGKVRLGGITRAGDEALRSVLVVGATSVIQHVRRGGRGSPWIVNLLKRKPPKLAAVALANKMARVAWKLMVTGERYAAKSVPAALANAT

SEQ ID NO: 498098 - protein, 304 aa, unidentified
MSSYVGIDVAKLELVVHVLPQEQGRIFANSAVGLAELVVWLQQMPCQRIVFEASGGYEQALLKCLHHANLPAVRLSAQRPRELARALGVKAKTDALDARVLAVAAQLLPATVSEPLPETTAILREWLQLRSALVGERDSHRRRLQQLQHPQVQAFLQEWVAKLQVQIKDLDKLLAKLVRDEPSALDKAPGLGPILRATLAARLPELGRLDRRQIAALVGLAPYNRDSGRWRGQRRIAGGRADVRRVLYMATWSAIRGDAALASCYQHLVAAGKPKKLAVTACMRKYLTRLNAMKRDNAPWRAAA

SEQ ID NO: 498099 - protein, 455 aa, unidentified
MKTKKQQAKNADKMISVPVVNPHAAGIDIGSKSHYVCVAQDNVKEFPVFTSDLHEIARHLQAHLVKTIALESTGFYWVPLFVLLQEYGFEVFLVNARHLKNVKGHKTDVVDSKWLQFLHSIGLLSNSFQPDLLTHELRTYSRHRQSLIENASKYINKMNKTLVLMNIQLSAVLRDITGVSGLRVIQAILQGERDPQKLEQLVSARCKADRKDIEKALVGDFRPEYLFELKDCYDLYMYYWDKIHNVDKQIEELLKKRSEQHTHQVKRAEFNPQKKKGVSKNDPDFNVASYAYEMTDGVDLTEIPGVSVSTLLVFLTEIGIDLSMFPTAKHFVSWLGLAPNRKITGGKVISSSTRKQTSPFAKMLRQAANSAGNSKTKIGDFFRHLAFKKGRMLAIIATARKIGVIIYNMLRNKQPYCYEYSTEDTQRARTIKIKQIQKTLQNYNISKNDLQFATV

SEQ ID NO: 498100 - protein, 281 aa, unidentified
MENRPEFIVGIDVSSEYFTCAAGQAKDKWKISLLPQDFDNKTSGFNKFSQWLQKAGIEKEKAVICMEKTGVYNELLVAFLCKQGYRVCVEDPIKVKKAFKPHGIKSDSVDSKQIAEYGWRFFDQLHYWKPLSETIEKVKTLLSVREDLVKANTADKNRLHAFRRKAYRVQLAEDILESNIAERDKEIKAIEKEIDKLIHQLPYLAQIFRNLQTIPRCKLLLAANFLVFFHEFDGEITYKKAAGRLGICPYEHSSGSSIKKRAKSFGHGTGTIRKLLHLAAC

SEQ ID NO: 498101 - protein, 411 aa, unidentified
MGYKVAGIDVHKKVLMVVVCDVSAPESEPERRRFGTTTSELQRLSLWLRQQEVDEAVMESTAQYWKPVWYELEPYLRLQLAQAYSNRAPRGRKHDFKDAERLIRRLVSNELTLSFVPAGEQRAWRTMTRMKVQLTREQSRLHSQLECLLEEMRIKLSSVISDLLGVSGYRILRALSAGETDPSKLAALGDERLRCSLGQLIDALTGNPLPLHLHLLGLYLDRYQMIAGQIAKLNGMIAEAMKGHQEAVLRLAEVPGFGADSAQQVIAEVGAQASTFASPANLTSWVGTCPGQQESAEHNHSSRCAKGNRYMRRILNQAAHAAVKKNGSHFQAVFRRLLPRLGYKAAIWAIAHRLCRLVWKILHEGVQFVEQGSEPDPRRKHQRALKLLRILRRLGYEVDIKPVANLAAATG

SEQ ID NO: 498102 - protein, 342 aa, unidentified
MNPRELYIGADLHERESQLAVFEKDGTLLFEKRLPTKTLRRFISSLPGTKHVGAESVGFIYPIYDELSGIQDCDVSVCNPNTIRERAKSKIKNDRVDARTVGDLLRTNYFPKSHMPDEGTREKRLLTKERVTYGTKQAELKNSIKWMLKRRGIEVRKPLSIQGREQLRSLHLAEIDRRLRELELVESIVDELDGRIRAVASTDAKAKLLDTIPGLGPYTALFLSSSLDDVSRFADSKQACAYIGLVPSLHQSGDVSYTGHITRLGNKWLRRNLVECARWSVRKDPHIKEFFLRIMHKKGKKKAYVAVARKLVAYAYWLLKRNVTYQELAPWKNDRGQSSNFE

SEQ ID NO: 498103 - protein, 430 aa, unidentified
MKSNTQNAKIEAITEKTLVLGIDVGSETHYARAFDYRGIEYSKKPFKFSNTEAGFVTLKEWILDLKERHEKDKVVPGMEPTGHYWFNLGKFLQDNEMKPVLVNPHHVKKSKELDDNNPTKNDRKDPKVIAGLVREGRYMIPYLPDGVYADLRTASNIRFQLQAELTRIQNRISRWFNIYFPEYKTVYGKPDAKSGMLILKAAPLPEDILTLGIDGVNQIWRDAKLRAVGKARAKTLIEAAEHSVGSKEGAVSARMEIRMLLEDYESRNTRLQEVMVLIEELVRKIPMAEKLLEIKGVGIRTVSGFLAEVGDISRFNNPKELQKLAGLALVENSSGKHKGETTISRRGRKRLRYLLFEVAMSLVSKNQEFRELHNYYTTRRLNPLKKMQSLMAIAAKLIRVFYAMLTKGVDYDPKKMVSDIKRPAVYLQAA

SEQ ID NO: 498104 - protein, 428 aa, unidentified
MKKNSTYKLEAITPETLIVGIDIAKKLQWARFTDYRGLEIGKASKFKNDKNGFEAILASIRTLCKFKKLNRVIVGMEPTGHYWKPLANYLILNEITVVMVNPYHTKRAKELDDNSPTKSDQKDALTIARLIRDGRYYEVYMPQDVFAELRVLSNARVSLMKRHNAIRNTITAMLDEYFPEFATVFKCPLKGKASLQILKSCPFPSEILELGAEGVLGEIRKAVKKTVGLKKANQLVEAAKESVGVTYGVASAKMRLGLLLEELELLTKQLGQIEEAMAKALTDTGIKETILSVPGIGIVTAAGFLGEIGDPLRFEHPRQISRMAGYNLVEDSSGKNVSGTTISKRGRKNLRNVLYQMARSMVAVNTEMKELYQYLKKRPSNPLKGKQALVVISKKAVTIIYNLVKKQMAYEAELALGDYRRNQIQQVA

SEQ ID NO: 498105 - protein, 378 aa, unidentified
MSPSNLLFVGMDVHKDSVMIAVLPEQAKEPTRVERLPNDPRRLRRFFQRLGREGEIRACYEASGAGYLLQRQLKEWGRHGDIAAPSLIPTRPGERRKHDKRDAIELARLYRAGELVLIHVPSEAEERVRDLVRCRETFNRETLKSRHYILKFLRRRGLIYREGSHWTHRHFEWLRRLSSGGALSGEDTVVFDEYLALLEYKLTRREELDRQIEELALRPAYRSAVERLRCFRGLDTHSAMVLVTEIGDFRRFESPRQLMAYVGLVPSEHSSGERERRGSITKAGNSRCRHVLVQAAWSYQHRPAVGAVLRKRQQGAAAGVIGHTWKAQHRLYKLFHRIARRRPRQVAAVAVARELVGFIWAVTQDPQPKVEAADRAAA

SEQ ID NO: 498106 - protein, 361 aa, unidentified
MKNPTQHHIAEVPSRSSKVGMTIGIDLGDVWSHYCTLNEDGEVVGRGRFRTSPSGVEKWFTDLPPVRIAMEAGTHSIWISEQLEELGHEVIVANVRELRAISHSDRKSDQVDAEKLARYARLDPKILRPIAHRTVAQQEALTLIRARNLIVRLRTAAVNAVRGLAKPCGYRLPASSTLCFAKRCAAVLPPGLAQALGPVLEQIAEMTKKIKHYDRLIKRLTETEYPETQALIQVYGVGQLTALTYVLTLGSKERFQRSRDVGCYLGLRPKRSQSGDRDPQLGITKAGNIYLRTLLVECANHVLGPHGRDSTLRQWGLHLASRGGKQSRNRAIVAVARKLAVLLHRIWITQEPYIPFYGVAA

SEQ ID NO: 498107 - protein, 413 aa, unidentified
MHVTCGIDWAEYHHDVAVVDRDARLLGKLRIGDDAAGFQDLLRFLAENGDSPDDPIPIAIETSRGLLVACLRASGRRMYAINPMAVARYRDRHVVSGKKSDHQDAVVLANILRTDAELHRPLPDDSDLARAIAVLARAQQDAVWDRTRAHNRLRSHLREYYPAILEAFAAKRERLLAREARAILAIAPTLAEAARLTRSKLRAAVTRAGRQRRIEAETDRLLEVLHRTRLRQPALVEKAMGHQTRALLAQLETVCRACDELAHDTEELFLQHPDAEIITSFPGLVVLTGARILAEIGDDRTRFDTARDLKAYAGSAPVTRESGKSRRVSHRRIKNSRLAAVGRHWAFAALTASLGAHSHYNRRREAGDRYHAALRNLFNRMIGQLHHCLTTRQKFDETVAFAPPTMPSLATAA

SEQ ID NO: 498108 - protein, 335 aa, unidentified
MKALSKPERLVGSKSRIEHKEGSNNMEQFVGIDVSKAWLDGEAVPQSRPMRYGNDSAGIATLVSALGADPPALVVLEATGGFETEVASALAAAGVPTVVVNPKQVRDFAKAMGILAKSDRLDARVLALFGQRIRPQVRPLPSPEQRDLAELLDRRAQLVSMRAQERTRLATALAVAKPSLREHIQWLDARIGEFEIELTARLRSSAAWKVKVDLLKPVPGVGKVLLFTLLARLPELGHLNRCDIAALAGLAPFADDSGERRGQRFIRGGRSEVRKALYMATLSATQHNPAIKAFFARLTAAGKPFKVAMTACMRKLLTILNAMLKTNQPWQPRVA

SEQ ID NO: 498109 - protein, 407 aa, unidentified
MEDTTGYDVYLGLDVGKTAHHGCALLTDGTKVHDKPLPQDEAQLTALFDQLKTHGRVLLIVDQPNTIGALPVAVARATDCGVAYLPGLAMRKAADLYPGQSKTDPRDAFIIANTARTMPHTLRAVDRNDEVLSALKMLSGLDDDIARDCTRTINRLRSVLVQIYPSLERVLPGDVIQRPFVLELLIHYGGPTKLKKSGKNRVLTWARNHAKKNPDRLIEDIFTALDAQTVTVPGTAAAEVAIPMLATNITALKAQRESIAGQVEEMLDEFPLAQVLMSMPGVGIKTAANILLAVGDCSDFPDAAHLAAYAGIAPVTRRSGTSIRGEFPARSGNKRLKNALFRSAWVASNCHPASKTYYEKKRAEGKRHNAAVMCLARRRCNVIFAMLTNGEFFRELPARPAGESVAA

SEQ ID NO: 498110 - protein, 364 aa, unidentified
MNKFSKYVGLDVHQETIAVAVADMAGEVRYIGEIVNTPEAIAKVVARLKRGTGRLAFCYEAGPCYTICRQLRDLKQDCQVVAPSLIPRKPGERVKTDRRDALSLARPHRAGELTPVWIPDEAQEALRDLTRAREDMKHLQRQAKQRLSRHGHRYTGRSRWTQAHWRWLEGIKFARPEQQIVLQEYIDTVQACGRRVASLDPAVETAAHASPIWPVIEALMALRGISLLAAVTVVAELGDLARFAGAPQLMAHLGLVPSEHSSGKRERRGGITKTGNSHVRRVLIEAAWTYRHTARKTAILQRRAERTAPEVQEIAWSAQKRLCQRFRNLMARGKLKNQVFTAIARELVGFIWAIGQHVVPLSRA

SEQ ID NO: 498111 - protein, 338 aa, unidentified
MSIVMGLDQHRAQITADWLDTDSGEVKRGRVAPADRAGVRRFLERFAGQELEVALEATTGWRFVVEELRRVGAVVHLAEPAETAGLRGPKKRAKGDRSDARHLRELLMIGRLPESWIPPDHILDLRARVRLRHELGEQRSEWQQRIQATLYHHGCPQRRQLMLADGRDWLAAQPLPQTAREQVTVALGMIDALEVQMRPIEKELRAYARRQAGCKALMAHYGIGELTAVTILAELGDCTRFSSSRQAVRYAGMDITVYQSDQRRAPGHISRQGPPALRWALYEAAQVARRPGSPDRDYYVQAAERVGGNRACLSVARKLLKRSYHTLRELGQEALAPA

SEQ ID NO: 498112 - protein, 369 aa, unidentified
MYGLPPNNWSTVLIRPKTKPRRPYMSYRNILAIDLAKEVFQICKTDHNGKVIYNKAVSRRKLQEILRKEKASLAAMESCATSHYWCRYAMECGHAVKPMHARTVKAFLTKQKTDKNDALAISIAALQPHVPSTRILNTEEQALQSVDRMRELAVSQRRSCSNQIRSLLNEFGITIAKGIAHLKAKLPDILEDAENGLPGMFRQSIAMAFEMLKTHIEYIADLDKKLEAEVKNNETCQKLMMLEGVGPLSAIGLTIRLGQPAIFKNGRAASASIGLTPKQHSSGGKEVIGHIAKYSADKRLRSTLYQGALAVIARVDKREARTQKEVWLKGIIQRRGKKVAAIALANKNVRTTYALIKNNTNYKATAIAA

SEQ ID NO: 498113 - protein, 360 aa, unidentified
MVSPIKYSVGIDMSKSDFQAVMLLQNNDLSTFVKGSRKFANTATGFDQFEVWISRHKKFDVPVHLTVEATGNYHENLAFYFDSQDFVVNVVLPNKAKKYLQSLGYKSKNDKIDARGLAQMGAEQQLRQWKPFSENIYGLRALTRYCEQLSVHRTMYRNQLSALSQGMYQVASVENSLQELIELTEKQLLGAKQKIEELVKSDKKIWERMEKILPIQGLGVYSLATIIAETNGFELFHNERQLSSYAGYDVVESQSGTKTGKTRISKKGNSHIRRILHLPSLNVVRYGEKKFVDIYERIMSRNTKKKVAYVAIQRKLLALIYTLWKKNEMYISDYERISGNDESKVLFPVGFEKATKKVAS

SEQ ID NO: 498114 - protein, 420 aa, unidentified
MKENNAKKALIVNGKTLVVGVDLSKSKHMGYYRFPDGEDVKPFEIFNTGRGFGKFWSHISLTMKEHHLEHVVIGFESTGPYGQPLIHYFRKKPVRLVQVNPMHTKRLRELCGNSPNKTDRKDPKVIVDVMMLGHFLSLVVPQGVPAELRRLTQARERTMAERTVHFNQLGQLAFVLFPEFVQIMSNLKTKTARYLLRHFPRPEDVAACGLEKLSLIVRKISRAKLGAERAKALYDAARDSAGVREGQGSIVFEILHLLDMIEVAESFITDVEHRMSSFLRQVPYSSCLLSMKGIGEVTVAGLIGEVGDFRQFGTIAEITKLAGLDLFEVSSGQHQGQRHISKRGRALMRKLLYFAALNAVRKNGILHHTYQRYLNRGMLKKKALVAISRKLLGIMFALVRDHSQYVWGYTRTQSAIKQAA

SEQ ID NO: 498115 - protein, 457 aa, unidentified
MPQTKRARRPQGLSPVHPAAAAIDIGATMHVAAVSPSRDQEPVRTFRTFTADLHRLADWFCECGIKMVAMESTGVYWIPVFEILEQRGFEVMVVNARDAKHVPGRKTDVSDAQWLQRLHEYGLLRASFRPQAELAALRAYLRQRDRLLDYAAAHIQHMQKALMQMNLQLHHIVSDITGVTGMAIIRAIVGGERDPNVLASHRDRRCHASVETVCQALIGNYREEHIFALTQAVELYDVYQTKVLACDTQIEAILKRLQKNARPPKSKLPPARRRARQSNEPAFDVRGALHAILGVDLTQINGLGPSLALKLIGECGTNLTAWPSAKHFTSWLGLAPHNKISGGKVLSSKTRRTGNRAASLLRLAAGTLGRTDTALGAFYRRLSARVGKAKAITATARKIATLFYNTLRHGMSYTDPGAGYYEDRYRQRVLNNLQRRAKSLGFVLREMEPDTEQVSVS

SEQ ID NO: 498116 - protein, 437 aa, unidentified
MTQKKAFPIISPNAAGIDISSKEHFVAVNPDLSEPVKAFGAFTEDLETLVAWLKECKVDTVAMEATGIYWVSLFLMIQEAGIDVLLVTAKHVKNVKGKKTDISDAEWIRQLHSCGLLSSGFQPDGFTRKLRTYVRHRKNLIEMSATHVRMMQKAFEQMNVKLQHVIADITGKSGREIIESILKGERDVEKLTALCDNRIRREKKESIKKSLNGIWKEEHLFELEQSYNMYKTYSTSIRDCDKKIEEHLKTLVNEKELEEKKQNGKRNKNDINLGNTNLVKTITSVDLTEIFGITDSNAIGIISEIGLDMSKWPTVKHFTSWLNLAPNNKISGGKILSSKIPKKKNRAGQVFKLAAYSIQRSNNWLSHFYKKIKSKKGTPKAIVATARKIAVIFYKMLKDKVKFEPMRNEIYEKQFKEKQINRLNKQAKTLGLQLVRV

SEQ ID NO: 498117 - protein, 332 aa, unidentified
MRYFLGLDVAKDSFVAVLLDEAGQLLGSATFANALDGFTELLAWLPAPAQTIGVCEPTGIYNQHLKQTLAAALESLHEINSQTLKQYAFSQVRTKTDQADALAIADAARTLFLSRPEKLAKTRVSWSPQRENLALWLAEYDRLRKAIASLRLQIGDLDHHAAPDARKVQKRRQLELKRLLAQQAEVKRQVELVYQQLDDSQARLVDSIPGIGPLSTAATLVVVRDISRFRSADALKAYLGIYPRRNQSGLREKRSHLAHHGNKLMRHVLWNAAKAAVKVKHEGNPFRCLFDRLIAKGRTYSHAIGAVCRKLVQVIYGVLKSQTPFHYPASTP

SEQ ID NO: 498118 - protein, 370 aa, unidentified
MEEDIKFFVGLDVHKDSIVVGVAEAGRAPARLVGRIAHDVGKLLKLFARYGEPAAVQAVYEAGPTGYGLQRALAARGYACQVVAPSLIPKRAGDRVKTDRRDGLRLAELARAGELRAVWVPDPADEAIRDLARAREDAVRARTQVRQQLKGFLLRHDVRYGARTSWSKSYYRWLARLSFERSGAQTAFTEYWQAVTSADERVARLTQALAVSIEGWRFEPVVSALQALRGIEQISAIGLVAEIGDIGRFAHPRQLMAYLGLVPCEYSSGEQVTRGSITKTGNAHARRLLTEAAWSYRFVPRIGYQAQRRAEELPQALRDIAWKAQLRLSARFARLRARGIHINKVCVAVARELAGFVWAIASARAKLPQN

SEQ ID NO: 498119 - protein, 309 aa, unidentified
MEKVYVGIDISKDYLDVAVHQSEKQWHYCNDHAGITKLCRMLVKLEPVLVVFEATGGYEIPLHLGLDETGLPATPVNARQIRDFARSTGKLAKTDSLDARVIAHFGYAIKPTPHPLPNTQELKVVQSRRIQLLEMITAETNRLRGASEVLRGRIEAHIAWLKKELVDTDRELKDMIENDPVWREKDSLLQSTPGVGPILSATLIAQLPELGNLNRRQIAALVGVAPLNRDSGILHGRRMVWGGRANVRTMLYMATLAATRYNTVIRDFYLHLCSAGKRKKVALTACMRKLLTILNTILKHHVPWSYSPC

SEQ ID NO: 498120 - protein, 408 aa, unidentified
MKDSRKRYIGLDVHKHYLIAIGVDDELNVVLPARRVAFSYLETWMKQTLTQQDEVVLEMTTNTWQLYDELSVYAGSVMVVHPPHVALITRSQVMNDKIAASILARLLAKGLLVGIWVPPQDIRELRGLVAQRKKMTGLATQAKNRLHAVLQRHHLLPPAGNPFHEAQQSWWLTLPLGALEKVNVQSDLDTLHFAEAQRMHLTSMMEALANQQEQVTRLLQVPGFGVVTAVTVWAAIGDIQRFADPQHLVGYAGLGTRVHDSGMSTRTGRLTKAGRRDLRVVLIEAAQVAANSHPHWKAELARLAPRLGRNKAIVAVARKLLVAVWYILAQHKPDRFAQPEAIAQKFLKFAYQLGKENRPAGQSAAHFVRQRLDALLLGQELTSIAWGSKKPIPLPPSTNKVSDVPNTK

SEQ ID NO: 498121 - protein, 432 aa, unidentified
MKYKLKQKQNQRITRITEKTLVVGADIAKKIHVARAVDFRGIELGKECVFHNDQEGLTKLAAWMKELGRIHEKTDIVFGIEPTGHYWFPLAAFLKEQDIRGVVVNPHHVNKSKELEDNSQTKSDYKDAKVIADLIRSGKYSEPNLPTKEYAELRILMNFREKVMVSLNQVKARITNWFDRYFPEYPQVFKDWEGKASLMTMRQFPTPEEIVSIGARGVLTHWKTEIKRGVGIKRAEQLYAAATVSIGLTEGLTAARIELAALLQQYDLYCKQEESIMTEVLQILEKIPGTKQMLSIPGIGILTVAGFLAEVGDLNNYDHRQQIIRLAGLNLTENSSGKRKGKTGISKRGRSRLRGILFRCMLPMVAKNKEFKALHEYYTTRSQNPLKKKQSIIALCGKLVRVLYTLGTKQKEYNANEVLGPIRQAQLQQSAA

SEQ ID NO: 498122 - protein, 320 aa, unidentified
MKTSDNVSVTVGIDVSKLNLDLHVSSGLYDSFRNDGSGFSDIKKLLSKFTVSLILLESTGGYENGIVCYLQRLGYDVVVVNPRFARDFARSLGRLAKTDKVDADLLSQFASVINSRVDRARFVRPLTDETRRHLADMVSRRRQLVDLITVERQRKSVSSQYASESIDVVISYLRSQLERVDADISAHVSLYYSDLSDLLTSFKGVGSATVGVLLGEVPELGNLNRRQISALIGVAPFNRDSGQMRGRRRISGGRSLVRNSLYMPTLSAIRFNPVIRDFYERLLKSGKSRKVAQVACMRRMVCILNAMLRDGSRFEPVMGN

SEQ ID NO: 498123 - protein, 409 aa, unidentified
MSQNIAGIDVHKKLLVVVIVDRTRPDVVLQIRRFGTGSGELRHLSAWLCQYGVEEAVMESTAQYWKPVWMELEPHLRLHLAQAQSNKAPRGRKSDLADAKRLVRRFVAGELMLSFIPEPEQRSWRMVTRGRLQLVRERVQLQNQIESLLEEGRIKLSAVLSDLLGASGRRILRSLAKGESSPEEMAALGDRSLKCGLPALVDALTGSMGEIHRQLLAQHLDRIELIDRQITELNQLAATRMQAYQDAVTRLIEIPGIGAEAAQEILAEIGPEAAAFPSAEQLASWIGVCPGSNESAGENHSGRSAKGNRFLRRLLCQAAQAAARTNGSHLQSLFKRLVVRLGYVKSVWAVAHRICKIVWNVLHKGARFIEFSEARNPRAVQRAINHHLKALRRLGYAIPLPVQPEAARG

SEQ ID NO: 498124 - protein, 360 aa, unidentified
MRILALDLGKSKSVAYTVDTATGECGFKTVRTEPAVLGRLFAEGRPDRLVFEIGPLAGWVHDAAREAGIRQIEVANVAHEAWRWRHTRRKTDRVDAVRLADLSAAGQLPTVHVPQAATRQWRGLIAYRARLVARRTAVKNRIRAILASVGETMPRGAGGWTHQTLASLEVLARPLADVGPEDLWRGELALELEALAHLEAQVATVEAKLDTLAEADERVARLRTIPGVGPRLAELLVALFDDPHRFRSGRQVGSYLGLVPRQFQSGAMDRHGRITRHGNPLARALLVEVAWLGLRWNGRLRAIYERVHRGSRARRKVAIVAVARRLAVFAWAMLRDGTTWRPYRPAETPAQHPVEAGVLA

SEQ ID NO: 498125 - protein, 476 aa, unidentified
MGKGSGNGTTRGDRRRNARRERLRGLLPRDGAVTGIDLAGDEQAIAVIVHDVRVLARKTVKVKAFRLVEALDWAVAQARAKGFTAVTAACEPTGPRWMQVQRLCAERGLPLVCVQPLMSHIAREQQDYTTHKTDESDCVMIARLAIELHCYIPEELDEAWAHLRQLGRRRAQLITAGTASMHRIGEFLSVAWPTVTETCAQPLLSRTWLAAVQLVTERCGGQPARLAEMGEEAFTAAVRGAVAGWGGQKARGTISRRIFAALTGTEGVVAWSRRGLLRRVADELGDLQRTRAQLRAVEADMAGVLDELGLSRLADIPALTAVGAAAILAEAGGPHRYDSSSSLVNHAGLAPSDNASGAFLGDAHISRRGRPGLRLAVWPAVWPMLQFNPVMAARYQEMTQAAGTAAQAAEAQPRTGSRRASAAAAARARRAKARVACAASLLRWIYSMVVHGTSWDAAVAAGEAACQHAPGPAETA

SEQ ID NO: 498126 - protein, 402 aa, unidentified
MIFINCFGIDISKSESVVAHYKDEVFVKELVIQNNQNGYRYLKNYIKHLDSLFILFESTGVYSRGMKHFCEIHKINYLEMNPLEAKFKTNSLRSWKTDKSDAHKLALLAFRMKDSKVQRHPEEIYFELRERARFHLEMEINQNCLKVELVETLHQTFPGLEKLFTNRYSKIALNIAKAFPHPDYVSILTHDELVEKVLHSTDKGISIKKAHKYAKKLIEIKNNSFPNVRKSSFLLQKVQYLCDKLLIGIEEMKAFNQEMIDLAKNTTEFENIISIPGIGELTATLLIGELGDIREFKTNKQLNAFVGIDIKRYQSGTSKSRDTINKRGNKKARRLLYLITMNILRGRNHYQSHIVDYYYKLREQPHGKPHKTAVIASINRLLKTIHYLIVNDKLYDYQKAPH

SEQ ID NO: 498127 - protein, 390 aa, unidentified
MLFVVPCCCGLDVHEETFEACILKGLTEEPQVIRKEFSTLQDSLIDFANWLHANECFYVAMESTGVYWMPIYEAIETYCHYYEKIYVVNAHHYKNVPGRKSDAEDAEWLATLLRHGLLTSSYVPDRDVRNLREASRLYKKLKSERCRYVNRAEKLLQAHGFKLSSVLSDIFCVSGRKILNFLAERGSLTQEDVKTCLKGKTKYTAEEIHRAVAGSLNAAERAMLSMLLQKIYRADDDLSSMLALMSDIACPHEAQLEQIDSVYGIDKLSGLLILAEVGANPSLNFSSPERLCSWAGLSPRNDQSAGKVLSRKILPGNPYIKSILCQVAWVAVKDRKSPFGIWFWSHQARMGRKKAIIAVSCKILTTIYCILRDGTFYNPDYELRCKKVST

SEQ ID NO: 498128 - protein, 403 aa, unidentified
MDFYVGIDVSKFKHTVAIIDEEGEIRKKSFNISNSREGFDSLLNELCLLGEKEQIKIGMEATGHYMSCLVRCLISNGYQVQIYNPSLISMFRDSESVNLAKTDNLDAMLIAKYVATHPFTSSPQISYLIGEIRKISRAKYFLFGDKASCYNHLLRYLDEVFPEFVSFFKKNEDGTRKNMGRNLFESPTIRWLLSEYTSPQKMARMRSETGETLRRMSKGSISFNKFNQLRELAKNSIGYSTEVDEQIIRNLVTQVRIIDEEIDVLNELLEPLMEELNSPILTIPGIGINLAAMIIGEIGDINRFSNPEKLIKFAGLDVKVYQSGTINHKGHIRKRGSSILRYALALSVQKLRIHSPVFSEYYYSKLKQGKATNVAIIATTRKLIRVIWKMMTTNQVFKNIRRD

SEQ ID NO: 498129 - protein, 325 aa, unidentified
MWHAGIDVSKARLDVYLLLEMDHPAQQAQFDNTLSGYRQLVKWLKRHTEGDGQVCLEATGVYGQAVTQYLYEQGIAVSVVNPARIKKYAESRLERHKTDQIDAKLIAIFCRKEAPDLWTPPLPELLALQALVRRRDDLLDLRQQERNRLEAAQDAAVRLSLEQHLHFIQTQIEQVEQAIHDHLDQHPDLKHQHDLLTSIPGLGDITACVLLAECRGIRSFDNVRQLVAFAGLNPQQRQSGRMNFTAGISRMGRKSIRSALYMPALSAMRYNPLMVDFVARLRQNGLQGKQIVVAVMRKLIHLAYGVLKSGQPFDPHYAAKMAVSA

SEQ ID NO: 498130 - protein, 343 aa, unidentified
MIKPSLGIDVSKLDLSLSLLIDNKHYQTKIDNNQHGFKSFEKWIKKHNIQHVKACMEATGSYGRSFAHYLYNNQHDVHIVNPLCINAFAKSKLSRHKTDQVDRKLIAEFAQQNDLPLYSPREKNLQVLQDLYRCLQNLKHQAKQVQNYLENKKHLANSVCKAYARLEKSISKETIAVEAEINTLIDKTEDIKNKVTHIQTIPGIGRLTAVAILAEAPCLDNFTNARELAAYAGLTPKHKTSGTSVKGRSTISKMGSSTLRKALYFPAIVAKKHNPIFVKLNQKLASKGKPTKLILIAIMRKLLHIIFGVVKHNKPFDPNFCSSHLRQYQNLKKVGKLQSHWIL

SEQ ID NO: 498131 - protein, 350 aa, unidentified
MDAIYIGVDFHARQQTVCYLKTETGELVISELKHQDKAQVRAFYQQFPAPVIVGLEASGYSPWFEALLEQLGCAVWLGHATEIRRRARWRQKNDRRDAELIWDLMVHNEFPRLHRPAVQSREVLRMLRYRQKLTKLRTMAKNSLQAIALQAGLAKGKQLFTRAGQEQFRAAALSPALQWQREHWFSLLQPLNQQLLETMVWFKEQSKDDACVTQLRTHPGLGLLTSLCLVHTLQPVSRFRNARKVAAYAGFDPVERSSAERQRFLGISKAGSRLLRYLLVEAAHTAVRYDEDLQRFYKRLAQRRGRPKAKVAAARKLLIRAYIMLRDEIDYAEFRRRAVAARLARQGQRP

SEQ ID NO: 498132 - protein, 400 aa, unidentified
MNAVGIDVSKGKSTVAVIQPFGIVIAEPFDVFHTDSGLKELVSFIKSLSGETKVVMEYTGTYYEPVANALHDAGIFVSVVNPLLIDDYDTNRVRKVKTDKIDALKIASYALDKWIKLRKYEPAETVRRTLQIMNRQCIKLNKILVMQKNSLIALLDCCFPNANALFTSPRRASDGHEKWVDFVVKFPHVDSVAKLPLSIFKTKYQSWCKKEHYNYSESKAGQIHAYARTIVSTLPMTDAVRKMVSVAAKHLNSTLEALGTLHSEMDTLASQLPEYETVMNLYGVGKAFCSQLIAEIGDVTKLKSNKSLTALAGIDPPPNQSGKDEPKSRRISKRGSPALRRTLFLIMAIYLQHQPADEPIYQFLDKKRTEGKPYKVYMIAAAHKFLRIYYARVKAVMPTQ

SEQ ID NO: 498133 - protein, 403 aa, unidentified
MTIFVGLDWGGSSHAVCIVDPAGKILDHFSVAHDRDGLADLIARLRRYGPPGAIPIAIERPSGLLVDVLVEAGFVVTPAHPNVVKACRPRYRAVAAKSDHGDAYILADVPRTDGHRLVPLKPQSDAIKALRALVRGRDDLVATRLVLANQLRALLDSFWPGAAGLFADIASPIALAFIQRYPTPESASRLADKRMAAFLAQNQYCGRRSVADVLGRLRSAPSPTAAEAEADAKGELARAIATALESLVGQIAKLSSRIEHAVAELPEGRIVMSFPRAGKICAAQITAELGDVRTRFQSEDHLAAEAGVAPVTYQSGKSRSVAWRCACNKRLRAAVTCFADNSRHASPWAAKVYQEARSRGCRHPHAVRILARAWLRILWRAWRASIPYDPQKHPAARAISTKG

SEQ ID NO: 498134 - protein, 370 aa, unidentified
MEKYSEAFVGFDTAKKKHAVAIADGGRDGEVRYLGEINSTPATVEKMIVKLAKRYAKLHVCYEAGPTGYGLYRQVKALGHECIVVAPSLIPKKPGERVKTNRLDAVTLARLHRAGELTPVWVPDAIHEAVRDLARAREGASEDLRKKRQQLLAFLLRHGRIFGEGKHWTLAHARWLARQSFEHPAQQIVFQDAIDAIEGGAMRLRTLEQRLAAIVPSWSMAPVVAAFQAMRGVSFLVAVTFVTEIGDVRRFDSARQIMSFLGLVPSERSTGEAVRRAGLTLAGNRRARRVLIEGAWTYRYPARIREVLRARLEKLPKAVRDIAWKGQVRLCARYRRLIAAGKRPPVVIAAIAREMAAFLWAIGHQVEPVS

SEQ ID NO: 498135 - protein, 350 aa, unidentified
MLIIGCDYHPGFQQIAFLDSESGEWNERRLGHREEAEQFYRDLKVRGVKVCVGMEASGHARWFEHLLGELQFELHIGDAAEIRSRRVRKQKTDRQDAQLLLTLLVEDRFPSIWVPNGENRDLRQLLWHRHRMVQMRTRIMNQLHVVALNEGVRLKKALWRPAGRAQLESLLLAPWASRRRQDLLELLDQLTPKIQELTRALEQEVEKRPVTRQLMTHPGVGPLTALAFELVIGTPERFGSGKQIASYVGLVPCEESSGDRRRLGHISKQGNSLLRFLLVEAAQITVRCDPDWRRQFLHLAMRRERRIAKVAMARKLAVRLYWMWRKGWDYEQLKKLGTHAGEPGNRQGVQ

SEQ ID NO: 498136 - protein, 387 aa, unidentified
MIAHYSDEKFQKEFTIQNNKNGYNYLFNYLNRVNHPQLIFESTGIYSRAMVRFCRNNQINYIELNPLEAKFKTSSLRSWKTDQSDAHKLTQIAPFLNDSDSLNNTTDDIFFELRERARFHLEFENEQNRLKVEIIEILHQTFPGLEKLFKNRYSMIALNIAEIFTHPDFVLQHDSESIISTILKSTDKGLSQRKAESYGETLFKLANDSYPNVNSSSFLVKKAQLLIQKLKKSIGQLSQLDKEMILLAQELDCFEIIYSIPGIGELTAAMIIGELGDISRFKSNKQLNAFVGIDIKRYQSGGTHYRDTINKRGNKKARRLLYLVIMNIIRGQHRYNNHIVDYYYKLRKQPNEKSHKTAVVACINRLLKTFHYLIMNHKLYDYEMSPH

SEQ ID NO: 498137 - protein, 345 aa, unidentified
MPIVGGLDIHRKQITFDYLDTVTGQVQRGQVSPADRAHLRAWLARFAGREDVAFAVEGCTGWRYVVEELAAAGVTAHLAEPADTAFARGRKRHAKTDKTDCRHLRMLLAEGRLPECWIPPGRILECRALLETYHDLRREHTAWAQRIHAVLFRQGAPALGEGTLRSEPGLAALREAAAGCLSPAGQLQVATALEVTDALDARLLELRHQLLDAARHLTGAKVLAARLYGVGPVTALAITCWLGGEGRFSSSRKAVRFAGLDVTVYSSDRKGPPGRLSRQGPPVLRWAVYEAGKTHARSSAPDHAYYAQVKDRCNGKRAALSEARKILRQACHILAELGDDALTAA

SEQ ID NO: 498138 - protein, 326 aa, unidentified
MIDDAGRIVFEGKARSEPGALAKVIRKRAQHAARIGFETGSMPRWLWHELKRIDLRVVCIDARHAHAALSVRINKSDPNDARGLAELMRMGWYREVRVKSAESQVVRSLLIARARLVGIRRDLENQVRSLLKENGQLFPRAIGRQFRDRVREMLGEGHPLRDIIESLLAVHERVSEQQTALDTRVRALARTDQTTRRLMTVPGIGVVTALAFRHTIDDPSRFRSAASVGAYLGLTPRRKQSGELDLTGRISRWGDRFLRSYLFEAASVLIHRTKRWSPLQAWGLRLVKRIGLKKAKVAIARKMAIVLHCIWSDGTEFDWGKQPGML

SEQ ID NO: 498139 - protein, 338 aa, unidentified
MTTSISMLAIDLAKGSFQVCAVGPEGTVLYNRSLSRTRLATLLAEQPACIVAMEACATSHYWGRVAQRHGHEVRLVPAVYVKPFVKRQKNDKADAEAIAEAALRPTMRFVAVKSAETQGRAVAFRTHQCLVRQRTQLINALRGHLAEFGLVAPKGPASLKVLENALEDEATDLPRPVQEMGTIYLGQIARLTEVIEHLADELEAASKTDAQLRRLCTIPGIGPVTAGAVSAFAPDLDTFDSGRNFAAWLGLVPRQRSTGGKTRLGSVSKMGQTDIRRLLIVGAMSVIRWVVRKGGSANRWLAALVARKPRMVAAVALANKMARMIWAMTTKKEDYRMA

SEQ ID NO: 498140 - protein, 342 aa, unidentified
MKILKQSVGIDVSKSDFKVCLGKLDEQLSVAFSFQKAYDNNLKGVTVFLKEVSRLFTAQVPVQFILEASGVYHELLAHKIYQHGYEVSIILPSKSRAFFKSITQKVKTDKVDARLLSQLALERQLDNWVPADPIYAQMRSLTRERESLMKEKTVIMNKIHAQQSAYQIAKSTLRRSKQRLKLLQKQIMSIDSELKTLVESSEMLSSKVNRITKVKGLSLLTVATVIAETNGFGIIRNRRQLVGYAGLDVLINQSGQKSSKGRLSKKGNPHIRKAYYAALSSSRSNELMKIIYQQLHQRQAAKKQGIMVVAKKLLLLIYALWKNSTEYDPQKNIQSRLVLATV

SEQ ID NO: 498141 - protein, 393 aa, unidentified
MEVIHMYLVGIDISKYKHNCFIATESGVPLKEFVFENNSEGFKLFHKVLSELDQGQEIRTGLESTGHYGTNLKQFIMASGYTYLEFNPYLTHQFSKAMSLRRIKTDKVDAKTISNMLGSVDYKTLHTQFYHINELKQLVRDRDEILTNRSKTLVKLTNSLDIVFPEFKSFFNNRLGSTALFILKKYKSPAKISKLIMKDYECLRSASNGRFTYPKFSRLKLLAKDTVGVQSTIYNKRMLALISDYEYFDQSLDEIDQEIIQLFSEAKTKLRTIPGLGIIQAATIYAEIGDIHLFSNPQKLIAYVGFDVSINQSGISEHHGHIVKRGSPLLRKAIWIYALPSLRFIPTLNDYYHKKKAEGKHHKVALTHVCRKLIRMIHHIEYNQIDFDDKEIK

SEQ ID NO: 498142 - protein, 338 aa, unidentified
MSIVMGLDQHRGQITGEWIDTETGEVQRSRVAPADRAHVRKWLERFRGQELEVALEGTTGWRFVVEELRRVGAVVHLAEPAETAGLRGPKKRAKGDRADARHLRELLMVKRLPESWIPPAHILDLRARVRLRHTLSEQRGEWQQRIQATLYHHGCPQRRSLMTGDGREWLAAQPLPVAAREQVTVALAMIDGIETQIAPIDKELRAYAQRQAGCKALMAHYGIGPLVAVTILAELGDCTRFSSSRLAVRYAGMDITVYQSDQRRAPGHLSRQGPPALRWALFEAAQSACRQGSPDREYYREAAERLGHNRACLSVARKLLKRSYHTLRELGEEALAPA

SEQ ID NO: 498143 - protein, 382 aa, unidentified
MKKNTTQVSRREVRFTAGLDVSDKYSYLAVLDSSGELVEESRVPTTRKALGARFSRDKGARPLTVVIEVGTHSRWISRLLEECGHKVIVANPRYLRLIFENDSKNDRSDAESLARVGRMDPKLLHPIKHRGDRAHADLTVIRSRDVVVKSRTKLVNHVRGVAKAFGVRLKKCSTPSFHRRVRESIDSLPEGLKPAVVPLLDILEQLTREIDRFDRLVEKTARDKYPETERLSQPVGVGPLTSLAYVLTLEDPHRFSGSRKVGSYLGLRTRRDQSGGRDPQLRITKAGDSLVSRLLVGSAQYILGPFGPDCDLRRWGLKLAARGGKNAKKRAAVAVARKLAVLLHRLWITGEDYDPFRNAKRMEKRLEAMSQIPAQAGLLKAS

SEQ ID NO: 498144 - protein, 352 aa, unidentified
MLIIGCDFHPGFQQVAIFDNRTGEIEEKRLQHRAEAEQFYRALAGQEVRVGMEACGHYPWFERLLQELGIELWFGDAARVRASVVRKQKTDRRDAEHLLELLREDRFPRIWVPSLEVRDVRQLLVHRHKQVQARTRTKNQLQAMALSCGVQKKRKLWTKAGRAELEQLPLLPYAAQRRKCLLEALDALEVEIVELDRRVAEEARQRPEAVRLMTHPGVGSVTALAMVLTLGPAERFGSAKKLGSYFGLIPSEESSGGKQRLGKISKQGSSFLRFLLVEAGQTAARYDPQLKRFYRRLAARKNRSVAKVAVARKLATRLYLMLREDWTYAQLCQAVMQVSPSHAVAGKQEPSA

SEQ ID NO: 498145 - protein, 312 aa, unidentified
MMTDDSIGIDISKDSLDVHRLSDGGTATFPNSPRGFRTLSTWLGCDIPTRVVFEATGPYHRGLERALSGKFPLVKVNPLQARRFAQACGTRVKTDAVDARMLASFGSALSLEPDQPVDGEQFDLRELFTARAGLVKDRTRLLNRLQTQTLALVKQQTKARIDQLTRQLKALQHDINKRLHECPSRARANTILRSIPGIGEVAASTILIEMPEIGKLRKKKSASLTGLAPMTQQSGKWHGKARIQGGRKPLRDALYMPALVATKHNPDMRKKYKAMVEQGKPKKVALTANMRKLIELANALVKADREWLPNGA

SEQ ID NO: 498146 - protein, 429 aa, unidentified
MEAMLLLKIVRKICCGIDIHKKFVVATIGTTNDAGVTDYQTKQFLTFKDELLMLRDWLTANNCRDVCMESTGKYWIPIFNVLEDDCKVFVANPKYVRGIRGNKTDKRDALWLCDLHKHGLTRNSFIPPKLIRQIRDLMRYRFKLTNNASSEKNRAQNCLTVSNNMLSSVVSDTFGKSARSIIDKLLSNPEDIGFDVAPLMQKNMKATPEEISRAIAGTMDASQATKLQVCLDHLDHIAEHKTVVEAKAMELAQPYQRQHDILLTLPGISDSLTTVAVIGEIGVDMSAFLSVRHFCSWAGVVPANNESAGKKKSVRCARAGVYIKPLMVQIAHAAVKSKKCPYFAVRYNQIARRRGKKKAIIAVAHMLLVCIYHMLSRDEEFNPELYTLPENQSPKRNAPLTADEARKFLEKLGATVLMPDAAEPKVEFG

SEQ ID NO: 498147 - protein, 364 aa, unidentified
MVVVGTDAHKYSHTFVATDEVGRQLGEKTVKATTAGHATAIMWAREQFGLELIWGIEDCRNMSARLERDLLAAGQQVVRVPTKLMAQTRKSARSRGKSDPIDALAVARAVMRETDLPLATHDETSRELKLLTDRRDVLVAQRTSAINRLRWLVHELDPERAPAARSLDAAKHQQALRTWLDTQPGLVAELARAELTDIIRLTGEINTLAQRISARVHQVAPALLEIPGCAELTAAKIVGEAAGVTRFKSEAAFACHAAVAPIPVWSGNTAGQMRLSRLGNRQLNAALHRIALTQIRMTDSRGQAYYQRLQDAGKTKRAALRCLKRRLARTVFQALRTVHQPSSEHTQPAAACHRSYCSRSCLSG

SEQ ID NO: 498148 - protein, 418 aa, unidentified
MSKSNSSAILSVVHQNCCGLDIHKDKISATLLITEDDGSVTEEIREFGAFTDDLYLLKQWLLDDGCHVVAMESTGVYWKPVHNVLEDIAQVILVNARHVKHLPGRKTDVSDSRWLASLLRHGLLRGSFIPDMHVRQWRDLSRLRRVYVDSLSDYKRRVHKLFECANIKIDSVASDLFGVTGKNLMNLLISGKDITFGDVCDCTRGKLKGKEDEFLKSIRGFFTEHHRFQLMSILTLIDTVEKQITAVHERLKKLLSDRKDKIDLLMQVPGISDVSVHSILSEIGDTLEQFESSAAIASWCGLCPGNNESAGKRHSGRSHVKSNHMKTLMTEVAWGAIRKKGSYYREKYYSLRARKGAKKAIIAIAHRILKAIYHILKYGTPYRELGELYLINLNNDAKLRNLRKQADKLGYGLIPLEA

SEQ ID NO: 498149 - protein, 340 aa, unidentified
MHKPSAEVFLCCGIDVSASQLMVALEGQGGTHLQRSFPNRASGHQALILWLQKNQTRIRVCLEATGLYSLDLALALHAANGIEVAVLNPKKVSGFAATLRRSKTDPADAQVLAEYARRMPFQPWHPPQAAALELRAITRHIAALTQQRTQQSNRLHALSASSAAARCVQHDLKRSLRDLERRTEKMRRAARALIAQDAELRPRLALLLSMPGIGEVSALNLLGELALLAPSLTVRQWVAHSGLDPAHHDSGTSVHKRSRIRRAGNRYLRRALYMPALVAVRHDPHLRAFYQALVARRKAKLQALMAAARKMLHAIFGMFRGGVGYDGSRLFPQLALADAD

SEQ ID NO: 498150 - protein, 442 aa, unidentified
MSGRALSRGDRRRNERLARLRSIVRRDYAIVGVDLASAKQAAVVTDHDSIVLGRRMFTGDAWVIDDILDWAETIVATAGFAGVVLGCEPTGHRWKPLLDRARARECELVCVNPMLVHRGREEEDFTRDRSDFKDATIIAKRVAELRCYVPQALEGHWCRLRHLGARRNDVLVAAGSARQRLRDLLECAWPTVLSAAADPLDALTWRAAMAVSADPEVIAAMGIDAFAAAVREQLPRWGGTRRNMRVLRAVFAAALAPGGVASERAAACERAAYAVDDWHHALHQLADVEARMSDVLDALGLAELVTSIDGLSIVGAAAILAETGDPARYDCARTWAKHAGLCPRANESGNFHGTTTVSRRGRPALRTAAWRAIWGALRHNKVYADRYAHLTTRPDNPLRDGQARAAIAAALLRQLFVVVTRRIAWDPAIAAGIREGVAPRAA

SEQ ID NO: 498151 - protein, 393 aa, unidentified
MVVSVGIDVSKDKHDCFILSSEGEALTDVFTIPNTMDGFHCLLQRIQDCTHTQDKIKVGLEATGHYSYNLLGFLLDNGLTTYVLNPLRTNLYRKSLSLRKTKTDRVDARTIAHMLLSDAGLKPYTNTAYHNEELKSLTRYRFDKVKERAKLKSSISRLVCILFPELEKLVPTLHMASVYTLLEELPGAKQIAAAHLTRIKALLETASKGHYKRDMALEIRDSARNSIGFRMPAKSLELQHTIRLIRELNAEIAEIEEQIQSLMDELHSPITSIPGMGFRMAAMILAETGDFTRFDSPDKLLAYAGMSPSTYQSGQLKNCYPHMEKRGSRYLRYALYNATKYVCHWDPNFADYLAKKRAEGKHYNVALSHAAKKLVRLIFAMEKSRQPYCSLAA

SEQ ID NO: 498152 - protein, 315 aa, unidentified
MFVGIDVSKDWFDAAWEVDGQLRTQQFAYTDEGIEQLMEQMPPEAVCVMEATGTYHARLALKLFEAGRGVSVVNPLVIKRYGQMKLLRVKSDRADAQLILGYAQQERPALWQPASEQVQELQQAHGWLNDLIGQRVRLLNRQHAVSHRAKPSAFVVGQMAAQLQQLNERIDECERHLEVLVKKSFAELYERLLTIPSIGAKTALELIIVTDGFTRFEDVKQLGAYIGVSPTTLRSGSSVKGKGSIAKLGQGRMRQLLYLCTWTAKSCNPACKKLHQRLKAQGKPAKVINIALAHKLLRQAHAVATKNVSFSAEMA

SEQ ID NO: 498153 - protein, 319 aa, unidentified
MTKTAELKNQYVGIDISKETLHVALGSRGLVFETTNNPAGIANLIDRLKDLELALIVMEPTGGYEIPLAAALAAAQLPVAVVNARQIRDFAKAKGRLAKTDKIDAGVIAEFAEVFKPEPRPLKDDQTMEIDSLVRRRKQLQENRISEDNRLRTALHKRERESIERHVVWIEQELKDIEKTLRKSITDSPIWRATDKLIQSVPGVGPVLSMTLLAGLPELGKLRRTAIAALVGVAPFNCDSGKQRGERHIHGGRHDIRRALYATTRAAVNLGYNPLLAEYYARLRAAGKPDKVALVACMRKLLVILNSMLRTNTPWSNYP

SEQ ID NO: 498154 - protein, 364 aa, unidentified
MLKKRYYIGMDVHKESVQMAVFEETGNEPIYERQLNNDLELLIKEVKRFSQKGETEVAYEAGCLGYVIHRGMKKNGITCFVLPANKVAKKREDKIKTDKRDARLIGRELRSQSIRPIAVPEAADEAARDLLRCREDISEDLRRVKQRLLKFLLRHGHIYSGGANHWTIKHQQWMDKLEFAHENEKKVYEEYRSQVRAMEERLKRIEKEVEEVAESGQYKAGVTKLRAFKGIDYVIALAMICEVGDFRRFGSAKAFMSYLGFVPSEYSSGGKRNQGGITKAGNGHLRKLLIEGAWHYTKGTRLGKRLERRREGCSVHVIDIADKALERLHKKYIRLVMRGKHKNMAVTAVARELAGFIWAVQVTA

SEQ ID NO: 498155 - protein, 403 aa, unidentified
MKHVIAFDISMGKSYMVIYNVQKQCVFESEIKHTKPDFKKLQEKIHKLTDENGESPEIVFESTGIYSRQLERFMQDNQYTYCLLNPLEAKLQCDSLRIHKTDRSDAHRLALTHFTVTRRVSNGTNNLFHQLKSLSRLYSELDSELSIIRGRMHKVIQLTFPELERMFTSKSDLFLNFVQLFPHPDCILGLSKTIIKNRIRANTNKKISNITAEKKAIQILEIAKTSYPAVSQNDVLCDQLKLYARRYQELLHQKECCINKMVYIAEQRAEYDIILSLPGIGPNTAVRLMAEIGDITRFNNNKQLNAFAGIDIRRFQSGKTFFKDKINKRGNKHLRKLLFLIIQNMIKQRRYGQNHVVEYYDKLKTQPYNKCHKVASIACVNKFLKLLFHLITHDIHYDYRLTA

SEQ ID NO: 498156 - protein, 317 aa, unidentified
MNKSDIIYIGVDVSKATLEVYCNNQQALNIPSSVDNHKSAITKLIKKLDKLNVHVVFEATGGYEKCLLLLLQEAQIKASCVNPALVRNYARACGVLAKTDAIDARIIAEYGCKFNPDITQPVEPYLAELHDIVSYRKKLTQELTRERKQLEHPRSKAVTKMVKLRIKALVKQIAQLEAELVAIKQEHAAVREPVELLSQTQGVGELTAFSLLAAMPELGTINRYQAAALAGLAPFNRDSGRMMAKRSIYGGRSEIRAALYMAALSASKYNPVLREFYQRLVAKGKPKKVALTAVMRKLLCHLNHTMYQYLETQKLPA

SEQ ID NO: 498157 - protein, 341 aa, unidentified
MKNLFIGVDFSKEKVDVAILFADGLVETAARVFNEFKTTVSGYRQLIKWVEQNSCGIDSSLWLFCGENTGDYSKGLCNFLYGKGYDMWLENAKSIKDASGLRRLKSDRADASMIAEYAMRNYDKAVMYEPLSESLTQLRELFLYRQMIVRHRCSFQVRRGEKRLTMEKSPVKTMISQSGRHIVSELNKEIEKIDKRIADLIKSDEELTKVFTIVTSVPGIGTQNAVCLMVYTDNFRRFNYDSRKIACYYGLAPFGKDSGTSVHSDPHVHYMANRQIKAMLTQAALAAVNFNPIMARYYMRLVERGKKKQVALNNVKNKLVHLVTAMVRNRQTFTPEYKISA

SEQ ID NO: 498158 - protein, 403 aa, unidentified
MQVTHERCAGLDVHKKTVVASVITPEGQETRTFGTMTKDLLTLADWLTEHGVTHVAMESTGVYWKPIYNLLEGSFTLLVVNAQHIKAVPGRKTDVKDAEWIADLLRHGLVRGSFIPDRPQREMRELTRYRRSLIQQRSQVVNRIQKVLEGGNIKLASVASSVAGISGRAMLEAMVEGIEDPQQIADLAKGRLRKKTQSLEEALRGQIGPHQRLLLGSHLRHLDFLDGEIDRLDEEVVARMRPFEEALERVDGIPGIGRRTAEDLLAEIGTDMSRFPTAAHLASWARVCPGNNESAGKRKRGSTGHGNSWLRPTLMQAAYAASHTKGTYLAAQYHRLAARRGGKRAIMAVAHTILVVVYHMLSSGTTYSDLGGNYFDERDRQAALQRAVRRIQALGFTVTLEAA

SEQ ID NO: 498159 - protein, 351 aa, unidentified
MVHVGLDLHKKRTEVAVLDENGQVVDRCELEHGDKIGMGEYFRAIGSDGIATVEATRNWYWMVELLEECGLSVKLASPLKVRLIAEAKVKTDKIDAWTLAHLERIGFLPEAYIPPQEVRDQRELLRYRLALVGIGTSLKNRVHALLDKLGIRHGFTDLFGKGGREFLAALELRDVYRKTLDGYLASLDFIDTQLKQATRDIRATLRADPRAEALMTIPGVGQLTAYLLLSEIGDIGRFLSAKKLCAYSGLVPRTYQSGEHRYTGAITRQGNRYIRYAMVEAAQLAYKRDPALGHFYDRLKRTKGSAKARVAVARKLLVAVYHVLKYGEHYRYNCLTKQHLGKPAFVSGHTM

SEQ ID NO: 498160 - protein, 355 aa, unidentified
MSSEKYIGLDVHQATISVAVMDSSGKVVMESILETKASTLLEFFAGLRGSLFVTFEEGTSAAWLYDLLKPHVTEILVCNPRKIPLLKQGNKSDKIDARKLAERLRLHDLKPVYHGENGVRMLRELARSYLTTVKDLTRVMSRVKALYRSWAIPCAGRDVYYTRHRSEWLDKIPEAGTRRRAEQLYQQLDLLQHLRQQARRELLAESRKHAITARLRQIPSLGPIRSALAVALIQTPHRFRSKRQLWTYSGLGLETRDSGEYHFVQGQPRRRKKQATIRGLNKDYNHDLKGLFKGAATRASVKPGPFQEFYQRSLAKGIKPTMVRLTLARKIAAITLTLWKKGEDFDINKLNSQAA

SEQ ID NO: 498161 - protein, 367 aa, unidentified
MDAPCTGVECAKMEVLLTPQQGTPMSEITVVGLDLAKHVFQVHGADPDGRPVLRKRLRRGQVLEFFASLSPCLIGMEACAGSHYWGRELQALGHEVRLIPPQYVKPYVKTNKNDAIDAEAISEALTRPTMRFTAVKSAEQQSVLMLHRTRELLVRQRTMLVNALRGHCGEFGIVAAQGLSRAGDLIKRIEDPADIALPDLARQALQCLTSQIRAIQEQIALIEKKLLAWHSSCEASRRLAEIPGVGLITATAVVASVGNATQFRSARQFAAWLGLVPQQHSSGGKERLGHISKRGDGYIRRLLVHGARAHLSWSRRKKQIRSAWLTGLLARRPTNVVLLAMANKTARIAWAMLSRGERYQEMIAAAA

SEQ ID NO: 498162 - protein, 388 aa, unidentified
MGKNSEKAKKKIGFHDGLPQIRANAAGIDVGASELWVDVGGKDPEPVRRFETFTADLHEIGDWLKRCGIETAAMESTGVYWIPICQILESKGIEVVLVNARHAKNVSGRKTDMVDCQWLRILHRYGLLAASFRPARYIGVLRAYMWNEETIAKALEGDYRPEHLFALKQSLELFDSYQKQIEACHQQIADHLKSLESKANPAEALKASRTTKKKRRNQPQFNLREEAFRISGVDLTQIDSINESAALGLLAEIGVDMRPWKTEKHFASWLTLCPNNKISGGRVLHRATRKSASRARDIFRLCAQTLLGSRSALGAYCRRMCGRLGSAKGIVAVAHKLALLVYRMIRFGRDYIDIGQERYEEKYKERVLKNLARRAKDFGFQLVPSIPK

SEQ ID NO: 498163 - protein, 337 aa, unidentified
MYYTGIDLHRKTSFITTVDPDGRIVKKANLCNDEPAILEYFINLENDTRVVIESTANWYWLYDLLTQHSIPVVVSNPLKTKAIASAKIKNDKLDSHMLAQLLRADLLATVHVSSQQTRQLKELLRHRHKLVRDTVRLKNRIHNIMAKNNVSVPASDLFGKHGLAFLSEVQLPLYQRRQVDTYLRLYHPLKEHVDALTKQIKQKAKVDPMARLLMTIPGVGAITAMIIVAEIEDIGRFRSYRHLASYAGLVPRLDASADKQRMGRITKQGSPYLRTALVEAAQAASRTKSRLNIFFRKRIVRSGYQKAVVATAHKIIQYAYYILRDQTPYRESIDALA

SEQ ID NO: 498164 - protein, 365 aa, unidentified
MQKISTMQTSGKNIFQGRLTIGLDLGDRSSAYCVLNETGEIVLEHKLATTPEAMKQVFGSMPRCRIAMETGTHSPWVSRLLTALGHEVIVGHAQKVRLITKSRRKDDRLDARTLARLARIDPELLSPVKHRSAQAQLHLTEIRARAVLVSARTALVNAARGLVKSYGERLRKCGTQQFSRETMNGSSAGLREALDPLLREIESLNDRIKEYDRRIEQMTKEKYPETALLKQVKGVGDLIATAYVLTIEDPHRFRKSRDAGCFVGLQPGRRNSGESEPQMRISKEGDEYLRTLLVQGAHYILGPFGEDSDLRRWGQKLSRRGGKNAKKRAVVAVARKLAVLLHRLWVSGEVYEPLRNSQKVMSAAA

SEQ ID NO: 498165 - protein, 403 aa, unidentified
MVFLGIDWAEAHHDVCLLDEQGKVLGKRRVVDGLEGVRRLHELVAEHAEEPEQVVVGIEIDRGLLVQALVAAGYQLYAINPLAVSRYRERHGTSGAKSDPADAKLLADLVRTDRHNHRPLAGDSELAEAIKVLARTHQNLVWSRQRQVNQLRSLLREFYPAALEAFGTDLAAADAIAILERAPTPYQGRSISQAKITSALRKAGRERNLESKAAEIQTGLRAPQLEAPALLAQAYGRSVASTIRLLRQMNQELAALEQELAASFELHPDTEIYLSLPGLGKVLGARVMAEFGDDRTRFKNPKARKSFAGTAPITKSSGRRKTVLRRLACNHRLLDACYLWAFASLRRSPGAKHYYQQRRNRGQSHPQALRALANRFVGILHGCLDHRELYREELAWPLLRAAA

SEQ ID NO: 498166 - protein, 411 aa, unidentified
MHNRQNYLYVGVDLHKEHHTAVIINCWQEKLGEIQFENKPSAFSKFLLEVETYVCDGITVVFGLEDVGGYGRALAKYLVDHEQVVKEVNPALSFLERKSEVMIKKNDSWDAECVARILVNKFNQLPDAKPNDLFWSIQQLVSRRNALVKAQSALKNQLHIQLNHHYPSYKKFFSELDGKTALAFWQQYPSPSCLEGTNIKRLTAFLLDVSNNTCSVKKASDILKLVKEDGQTMKEYQEMRNFLVRSIVREIEFKKKEMKYIERELKQLVKLLDYQLETIPGIELVTASALIAEIGDVRRFPNANKLARFAGIAPVYFGSGGKGKVHKSKQGNRALHALFYNLAVQQVQVAKGSKTPRNPVFHAYYQKKLKEGKTKGQALVCIMRRLVNIVYGMMKYKTAYELPVVEEKEVV

SEQ ID NO: 498167 - protein, 438 aa, unidentified
MSNKVIFNLDELFISVGIDVGADFSWMSIALPNQQFVGKPFKILHNSIDSLTTAVSKIKEAEELYSLESRIFLESTGIYHYPLFCYLRDKGFNCSVINPIITKNSTNINIRKVHNDRFDSKKAALVGLKPDLKVSLMPSDLALNCRNLCREYYDLIDNRSAYVNKLQGELRMAFPQYLGIFSKVTINTSLTLLETYTSPSAFLKADKQEIIDIIKSTARFGLTYAQNKYNAIIQAATDANQFGYIIDSNIKRIRLYISFIRKYDEEINSILESLHELVDANEDSDFVKQIHLIETFKGAGFLSAVSIMGEIGDFSAFSKPKQLFAYFGLDPSVKQSGKFEGTKVQMSKRGSAIARRVIHTLTLQSISISRNGEAKNPVLREYYLKKCDSKPKLVAMGAVSHKVCNMIFAILRDNKPFKIIAPQEHIKQYNAAKCDIAA

SEQ ID NO: 498168 - protein, 347 aa, unidentified
MTTLARSVTGGVDTHLDVHVAAALDEKGTLLGVEYFETTRRGYKKLLAWFENFGPVVLVGVEGTSSYGAGLTRHLHAEGIAVVEVDRPNRQRRRRKGKSDPEDAISAARAAFSGDACGAAKTQDGNVEAIRVIRVARLSARRARTQALNQMRSLISTAPDPIREELRHLSVARLLERVASFRPGTKTDVVSLTKWTLRTLARRAIELEDEVKAFDAILEPLVAETAPELVSTLGIGTDSAAALLVAAGDNPHRLRSEAAFAHLCGTSPIDASSGKHQRHRLNRTGDRQANSALWHIVITRMVYDARTTAYIERRMKEGLTKKEAFRCLKRYIAREVYGLLPMDRLTA

SEQ ID NO: 498169 - protein, 431 aa, unidentified
MAKAKSSHTVDIVYPICCGMDIHKSFIVACIAITDERSHTKHHLKRFSTFQKGLRELVAWLKSYNCLDICMESAGKYWVPIFNTLETAGLNVCLTHPKYVKAIKGKKTDKKDAKWIVELFKCDLVRSSFIPPLIIRQLRELCRYYVKLTYALSSEKNREQNCLTICNFKLDDVFTDLSGMSASRVIAKLLEHGNSDFDVAPLLDHRCKATVQDVIDALDGELSPAETEKLKLVRLHKEYLYYLRDTLESLILELAQPLARQIELLLTVPGIKEPLTAVRILAEIGADMSVFETSKQLCSWAGLTPQNQESAGKKKTTRIGRAGQYLKPLLVQIALAVSKSAKHPEIKNKFDSLKKRRGGKKATIAIARRLLTAIYHMLSKNEAYNAELYHKADKPPKERILSPAQALDFARRHGFLIEGIDPPPDPAIPAA

SEQ ID NO: 498170 - protein, 448 aa, unidentified
MVEKELRSYTWRELEANGKFAKNDKLSFITDDMLIVGCDIGSETHYIRAIDVRGRELSRGAFEFSNTSEGFENAKAWVLALAAKHDKKQIVLGLEPTCHYWFALAAWMISNGISVVQVNPYAVKQSKEIEDNSQLKDDRKDPKLIANLVKDGNYGMPYLPEKVYADMRRLSMFRDQFTEDRIRNINRLHRELKIYFPEYMDAFGKIDGAFTLEVLKVSAIPTDITALGAEGMKNIWHNAKLRGRGYSRANEIVNYAEKSVGLTDGTDAGREAVKWYAEQILRLDEQLAEIESALHEKCREIPYAENILAINGVGENILAGILAEMGDISRFDDVKEIQKLSGMGLVACSSGKHKGQTKISHRGRKRLRYWLFQAAKSAVSHADEFKQLHEYYTTRSNNPLKKMQSLVVIACKILRVIYTILKIGTTYDPQKLLKDIKHPAASQAPMAA

SEQ ID NO: 498171 - protein, 354 aa, unidentified
MSQQLNTTIAVIGIDIGKNSFHIVGLDKPGAIALRQKWSRGQVEAHLANMPPCLIGMEACVGAHHLSRKLKALGHDARLMPAKYVRPYSKGQKNDFRDAEAIAEAVQRPTMKFVATKTTDQLDLQALHRVRERLVSQRTGIINQIRAFLLERGIAARQGQRFLRAGLPTILTTPPDVLSPRMVRIIEGLASDWRRLDERIEGLSSEIKAIACQDSSCERLMSVPGIGPIISSAMVAAIGTGDTFSKGRDYAAWLGLVPKQMSTGDRTILGKISKRGNRYLRVLFVQAAWVVLIKPKSWQRHGLKPWIEAAKKRLHRNVLAIALANKLARIAWSVLARGRGFEASTISDTATQPA

SEQ ID NO: 498172 - protein, 406 aa, unidentified
MKYTQNEKILQVTEDTLIAGVDIAKESHYARAFDYRGVEYGKYLRFENNREGMTKFFRWAKELMERHKKNKLIVGIEPTGQYWLCFAQYLKDNNIKVVLVNPFHVKRSKELDDNSPTKSDKKDPKTIAMLVKDGRYVEPTIPEGVYAELRVAMDIKDRLNKQIGMTKNQITRWMDIYFPEFNTVFSDWEGKAALITLREFPTPEKIAKKSAEEIISIWKKEVQRGVGEKRAIKLIETAKESIGKKQGIKMAEYEIKTLIEQYEFLKKQIEEIEKKIEELIVEIPGVKELLEIKGIGVNTVAGFIAEVGDIEKYEHPKQIQKLGGLNLVENSSGKHKGEMTISKRGRKRLRRVLFNAVMALVAKNEEFRELHKYYTTRAQNPLKKKQSLIVLCNKLIRVFYVILKKE

SEQ ID NO: 498173 - protein, 403 aa, unidentified
MEILYKRCCGIDVHKNMLIACVFMGVRKKEIRQFGTMTDDILQLTKWLNEVDCEMAAMESTGNYWKPVYNIFEDEEIPIMIVNAQHIKGVPGRKTDVKDAEWIADLVRHGLVKASFIPNREQRELREITRYRQELIEERARELNRIQGVLEGCNLKLGSVLTDISGKSGIAILRAIVSGETDPVILSKFAKGKAKNKLAELQRALKGSIHPHQQLMLKHQLEHIETLSRIIEDLDSDIDEKTESMKKQIQLLDEIPGIGRKSAERLLAEIGTEMEQFKNQSHFSSWAGLVPECKESAGKKMSTRIRKGNKHVKSVLVECARSAIRNKKSYFYSRYQRIAARRGGNRALIAVAHSMLTAIYHVLKDLQPYKELGCDYYSTYNREKSIQRNIRSLERMGVTVVIK

SEQ ID NO: 498174 - protein, 339 aa, unidentified
MTELKLIAIDTSKHIFTLHGVNERGDPVLRRELRRAQLEPFFRKLAPTDIVLEACGGSHHWGRMLTALGHRVRLIPAQYVKPFVKRGKNDRIDAAAICEAALRPSMHVVPVKPLEAQAAAMVLTVRETLVKQRTQLINTIRGHAGEYGVIAAKGTAHIAALLERIAADPAIPAAAQAMFVVLGRQLDSVSEEIATLDRRLAAQHRADPVSRQLAEVPGVGPLGALTLSLTVDAAQFRSGRHFAAWLGLTPRQNSTGGKPRLGGISRQGNERLRQLLVLGATAVIRQARPGSRLASAWLMGLLQRRPKKLVAVALANKMARVVWAMMTRGEAYRPPVAAA

SEQ ID NO: 498175 - protein, 338 aa, unidentified
MENIVYDHYIAADWSVKNMAIARMTKKSNKITVIDVPSDIKELQVYLENLKGTKILTVEETTTSQWLYTELRDSVNKIIICDPYRNRLLSEGPKTDKIDARKLVHLLKSNLIKEVYHSADKFLYLRRLVSGYEDLVKSGVRLKNQKYSLLKASGKNGKEKNSISLIFNEDQYVLECLDRQINSYEKEKVGYENQFKKLIRKYPEIKHQKNLPGIGIINAVKIVSRVVTPYRFANKGHYLSYSGLIKLDRISGGRSYGKKKPRYSRQLKSVYKSGVIAAIKGNNSIGNYYKYLIKEKNYPEHNARNKACRKLAVLSLGVFRSGKKYQPYRRISLTDRNN

SEQ ID NO: 498176 - protein, 387 aa, unidentified
MKRNDLSRSLVAFDQNSTLVSVVELSLKTWLVGGVVPGLERTPLKKQGPDAEALLALLHRWRDEAVKAGSKIDRIVVAFEAGRDGFWLARWLQARGIEVYVIHPTSIPVSREHRRAKTDRLDAGLLTRALLGWLRGEPKHCGMVAIPTLAEEDARRPNREHEHLVGERSRIINRLKAATIRHGIRNFNVKLSKAAECLEELRSAEGVPVPPNTLDEMRRDMARLRFIREQIKEIERMRLERLQRAPREGTHPMVLLLAKVMGIGIETADMLVHEVLSRSLRDQRAVARYGGMTGAPDESGGKRRDKGLARAGNARVRRGMIQLAWRWLMFQKNSALAHWYRARTANARRDTRKTMIVALARKLLIALWRYVTTGEVPAGVVLKPVAI

SEQ ID NO: 498177 - protein, 355 aa, unidentified
MESVKYIGLDVHQSTISVAVLDAEGKQRMQSVIATKATAVLDLVKGLRGALHVTFEEGTYSAWLYDVVVRQVARVVVCNPRKNALLKSGNKSDQIDARKLAELLRAGLLSPVYHGEQSTRTLQQLVAGYSALTEDTGRAMRRIKALYRSQAIACAGQKPLGKRHREEWLARLSDSGQRRRAEWLYQELDAVQVLRREARQAVMVECHKNPAAKLLRTMPFFGPLRAAVLIARVQTPHRFRTKRQFWTYCGLGLETRSSADYVEKDGQILRRRKPVYIRGLNWNYSHELKNVFKSAATTASAMDGPFRAFYEMRVANGMLPAMARLTLARKMAAIALILWKKGETFAAEHLNLQAA

SEQ ID NO: 498178 - protein, 372 aa, unidentified
MDEGITAYVGLDAHAESTAIAVAEAADKTAPRFVGTVGAGFSALSKALGRLGKAGALRIVYEAGPCGFALARQLRQAGYPCEVVAPSKVPRRAGDRVKTDRRDALMLAGLARAAQLTYILVPDERDEAMRDLSRARIDAVRARLKARQQLKALLLRHDRRYSGKSSWTAAHERYLAKLSFPHRAQELAYAEYRRAVGEAQARVELLTQGLNHELEHWRMHPLVRALMTLRGVDSVGAITLVAELGEFKRFAHPRELMGYLGLVPSEHSSGSKRSLGAITKTGNTHARRILIEAAWNYRFPARISTALQKRQEGQPAAIRDIAWRAQLRLTHRYRRLSARGLQHNKVCVAIARELAGFVWSIGQHVSAAPDRL

SEQ ID NO: 498179 - protein, 354 aa, unidentified
MSQTQNAAIAVVGIDIGKNSFHIVGHDERGAIVLRQKWSRGQVEARFANMPPCLVGMEACVGAHHLSRKLNSLGHNARLMPAKYVRPYSRGQKNDFRDAEAIAEAVQRPTMKFVATKTADQLDLQALHRVRERLVSQRTGIINQIRAFLLERGIAVRQGQRFLRAELPRILATPPDVLSPRMVRIIEDLAGDWRRLDERVEGLSNEIKTIARQDAGCERLMSVPGIGPIISSAMVAAIGAGDVFTKGRDFAAWLGLVPKQISTGDRTILGKISRRGNRYLRVLFVQAAWVVLIKPKSWERHGLKPWIEAARKRLHHNVLAIALANKLARIAWSVLAGGRAFEVRKINQAAPEPT

SEQ ID NO: 498180 - protein, 343 aa, unidentified
MKVKLIGIDLAKSVFQVCALNQAGRVLFNRSLRRAQLVKQLQDLEPTTVAMESCASASYWGRRFQAMGHTVRLIPPQHCKPFLRTGKSDARDALAICEAALRPNLHCVPIKTTAQQDLQLLHRIRQRHIRNTTALANQIRGMAREYGVDFPVGLRALRNALPAALEDGENELTPVAREMLHELYEELLQMIARNQALLARIVEQARTQPAYERLQTVPGIGPVVASALIAAIGDGRQFRNGRQMAAWLGLVPRQHGTGGRIALLGISKNGDRHLRMLVIHGARAALRWARGKDTPLGAWISPVVTRRGMNKAVVALANKIARISWNVVAKGCTYEPAKAFGRA

SEQ ID NO: 498181 - protein, 356 aa, unidentified
MPETNPAEVIIGVDTHKHTHAAVALTALGARLGTITVPASRRGYQELEAWAGSFGPVRAYGVEGSGSYGAGLSRFLQSGGHTVLEVNRPNRQLRYQQGKSDPLDAEGAARAVLSGQADARAKPGTHAVEMIRHLKVARDTAVKSRTQAMITLKALIVSAPDALREQLEGIAGKMALIRHLAALRPGALTSPTASAKAALRALARRWLALDAEIKAHEAHLDALTAACTPTLRTAYGMSTGTAAEMLILVGDHPDRIRSEAAFAKLCGACPIPASSGKIIRHRLNRGGNRQANAALYRVVIVRMRSHPPTLAYVRRRMGEGKTKLEIIRCLKRFVAREIFGYLCGAKTPPKAPLLAS

SEQ ID NO: 498182 - protein, 332 aa, unidentified
MNGYKIVIGVDVSKNSFTATVLYDNKKETFEVKSDPVEFEKKIKPYLKKFKQSDMLIIMEHTGVYHLKLANYLYENGYKVAVVNPFSIKKFMEAKMSRVKTDKADSYFIAEYGRTFFDGELYKPKPDVEKEIEVKLKILEDLQQQLTMLRNKRESLSHVPMKRLKENLEYYDELIRKIEKSIKELEKEIKELSKKNYQEEYKLLKSIPGISDRVIGVVISIFGGFKRFKSAKEAASFAGLNPSPYESGTSVKKSGSIKKMGNPYARKILYMAALSAIRFNKYCRELYERLISKGKAKKLALVAVAHKLLRQAYGVLKNKRPFDENFCTWHLT

SEQ ID NO: 498183 - protein, 482 aa, unidentified
MNWTRLSNLAVVLEPGNEYSDEDESSLRRLRLAIRNSHPSRAARTTITPLSNMNESVSEPPLSPKVAAFVGIDWSDQKHDVVLRWAADPAKPEHQVIKSEINALNDWIAQMHERFGAKGKVLVCLEQSRGALIYQLMAYELFELYPINPSQLANYRKTFFSSGAKDDRPDADLLSELVMCHRDRLKAWKPDDQMTRELASLNEGRRQAVDRRTELANEIKSQLKLYFPLALQILDHDITTALAADLLVQWPTLAELQKVSPSKLRKFFYGHNSRQEKKILERLALIKEAKPLTTDLAIIRPNALRVKLLAQQLKSLLPFIAEYERRIAELFGSHPDRFLFDNLPGAGPALAPRLLTAFGTDRDRFEVAGDLLNLSGIAPVRIASGKKTGKNASVHCRRACPKFLRQSFHEFGECSIRYCPWAQACYQAQRARGKGHHAAVRAVTFKWIRILFACWKQRTPYDPQRYFQALQSRGSHYAQTAA

SEQ ID NO: 498184 - protein, 344 aa, unidentified
MPHYVGLDVSQKTTVICIVDEQGRQRWRGACVTEPGAIAARVFRHAGVADVKVGIETGSMTPWLVHGLRSAGIDVECLDARRVKAALQMRLNKTDENDAEGLAQIMRTGWYRPVHVKSFDAHRARSLLAARAQLVGMRTQLSNMIRGVLKTFGLLPGGGRGLRFDRAVEALLEGAPEISLIVRPLLATWRQLREQITTFDKAVQQRVRADPICHLLMTVPGIGALSSLMYVSTVEEPGRFARSRAVGAHLGLTPRRYQSGETDRSGHISRCGDSLARTFMYEAAVVILHRVKRSLHLKDWALAIEQRSGPGKARVALARKLSVILHSVWRSGEPFRWASSTIAA

SEQ ID NO: 498185 - protein, 429 aa, unidentified
MRTESTPGARGPVFCGVDTHADSHWLCVLDWRGRKVLSRQFPADAAGYEALAGAIAAAGEPACVAMEGTSSYGAGLTRHLASLGMPVREALSPARMQRRRPGQGKCDEADAERAARAAMSGSGLGTPKSQDGWVDGVRCMLAARSGAVKARTSAINTARSLLTTAPEGLRSRFRGMGGPRLMEELPSVRAEGALGAALGALADLWEAARDAALDMERAIEASLEENCPALLAMYGCGPVSAAKLAVAAGDNPGRLRSEASFAAICGACPIPASSGKTVRHRLNRGGDRQANSALHEIARQRVMRDPETAEYAERARGRGKSDREVMRCLKRYVAREAYRALMHPHEIRRPGDASGLVAARRAAKVSQVRAASILGTSEKYISMLERGQRELKPIRRAYEAWVEAGLPLDWDRRAFEAERKMDSKKHLAK

SEQ ID NO: 498186 - protein, 346 aa, unidentified
MKYYAGLDVAMKETFICILSEEGERIFESKAPTDPQPIYDELVKSGVELEKVGLESGSLSNYLTKGLQDLGVKAMCIDARKMAAILSVTINKTDKNDARGIADAMRCNHYKLVNLRDNDNGSTGVLLKSRATLVDSRRTLKNTIRGFLKAYGIRLGAVSNQQFPKTVRDASVEVLSHAKLGMESLLKSYEAMHSEIKKIEKSLNEICKYDEDAKLLMTVPGVGMIVALTYKADMGDPSRFQKSESVGAYYGMTPRQYSSGESVRQGSISRCGSKDVRYLLTESGIVLLTRCKTWSPLRAWGLKLMKKYGLKKAAVAVGRKLSIIMHRMLVTGEVFKYSKADVKAAA

SEQ ID NO: 498187 - protein, 407 aa, unidentified
MRPIYGRCCGLDVHKKTVVACRLTPEGSQTRAFGTMTTDLIQLREWLLAGGVTHVAMESTGVYWKPVFNLLENHGMELWVVNARHVKAVPGRKTDVKDAEWLAELLQHGLLKASFIPDRESRERRELVRYRRSLVEQRAHLVQRIQKLLEGANIKLGDVASDVMGVSGRAMLQALAQGVDDPAAIAGMAKTGLRNKIPELERALTGSVGHHQRFLLRSQFRLLESIEAEIARLDEEVAERMRPFQVALERLDEIPDIGRRAAEQILVETGTDMRRFPTSAHFASWARVCPGNNESAGKRQYASIGGGNRWLRNALLEAAWTVSHSRKQTFFTARYRRIASRRGKKRAAIATAHSLLIAVYHVLRDGVVFQDLGPAHFERRNVDAIVRRSLHRLEVLGYKVTLEAMPA

SEQ ID NO: 498188 - protein, 314 aa, unidentified
MNHKHENTDLIHYVAIDISKATLQIQDDKGSFAVTNDAIGLKKVLVHLNSHINPLVVFEATGGYERLLLESLRKAEMPMAMVNPARVRDFARSEGIRAKTDPIDAKMILAFAKSKKLKPMATPSQACIKLAAPLDRRAHLTEQLAREKNRLQNSEAFIHRSIKRMVRVLEKELAAIEKEIDALVDSDPGLKARAQIIESVKGVGHVTAWTLLAYLGEMEELSRNGLVAMAGVAPFNRDSGKFSGKRCIQGGRAKVRKCLYMAAHTAARCNPVVAAYVKGLRDRGKPYKCAIVAAMRKILIHIQSLIKKAQLSPC

SEQ ID NO: 498189 - protein, 335 aa, unidentified
MDRQYVGIDFHRRRSVIVRKSGAGDKLGSVRVANDPLAIASAVAEAGPNPEVVIEATYGWYWIVDWLQVQGATVHLANPSGLNWGARRVKNDERDASDLVDMLRLGRLPEAWIAPPATRELRELVRYRAKLVALRSGLKAQVHAVLAKEGVLPSVRDMFCGSGNAQLDALELGDAYTTRVESLRDLIERYDREVGMLERTIYQRVRDDRGYRAIQRIHGIGPTMAAILVAEIGDVSRFRSAEALCSWAGLTPKHRESDTKVHRGAVTKQGSRLVRWAVIEGTVRYHGGGKLAADWHRIAERRGKHKATVAVARKVLTLVYYGLRDGEIRCLAKAS

SEQ ID NO: 498190 - protein, 362 aa, unidentified
MKTSSVSRAPTTDCRKKNYKWFIGIDVSKNVLDFAVLHDSDLLLHSEIINEKHSIVDFTRSLKQRIPGFRMANTLFCMEQTGVYGAVLTKALNSLKANFAVENALRIRRSAGLLRGKDDQTDAARIATYARNYNIDIRLWEPRRPILEELKYLSTLKTRLQGISSRLNHPVNEQELFLPKGLQHKLNGLCQTTIDAARADLHFIELAIDHLIDNDPELNRLVRIITSVKSIGKITAIEIILATNEFRTINCPKKFACYAGIAPFKQESGIMKKKHKISPIANRKMKTLLHLCAMGAVYRQPELKAYFERKTKVEGKPKMAVINAVRYKLLLRVFACVRQDRLYTIDYIRPQGIPEASEIRLS

SEQ ID NO: 498191 - protein, 397 aa, unidentified
MYIVGIDIAKRKHEAAVIDGEGTVIIKPFSFTNNYSGYNRLLAMLTKAKLPLDEVSFAMEATGHYWLALFTRLQKEGFRVQVINPVQTNSIRSFYIRQAKTDPRDALLIAEVIRFGHFSESTLHPENIYELRELCRGRHAIVSMQADVKRKVVALLDQVFPEYETAFTNMFGDTSMAILQTCPTPKELSEMPLEELCHLIEVSSHKRFRMAKAQELQVLARNSFGFAMAGDVFSTMIRLYAKHLDFLKQQVREMDRKIAEIMETLDTPITTITGIGLTLGAYILSEIGDISRFSSAAKLAAYAGIDPTMRQSGEYNGVRNRMSKRGSPYLRHAIWLAASSAVLHDPALKLYFQKKRDEGKPYMASVGHACRKMVSIIYAVMRDNKAYTPYIPNEISA

SEQ ID NO: 498192 - protein, 356 aa, unidentified
MLNKCNKNPDFSDHNVYVGLDVHKASWAVNIVVDDIEHRRFTQPPSPLVLYNYLTDNFPGANYYSAYECGFCGYHHHRELLNLGIQNIVINPADLPITDKEKINKRDPLDSRRISRALQKNQLKGIHVFDPDHEQFRSLNRMRWRAAKENRRVKNRIRSFLHYYGIVPPENLHPEYWSQAFLNWLKQLKLPCEAGTLSLEYLLIAYQNTKTQILQVTKHLRQQVKLYYSDIYKSLLTVPGIGPINAVCLIAEIGDISRFHSCRQLASFVGLVPRSHQSGDKDPHGALTYRNNKYLRSALVESAWIALRYDPALLKYYKERIIKSKPQVVIIKIAHKLLNRIRHVWLYDNTYQLGIL

SEQ ID NO: 498193 - protein, 405 aa, unidentified
MGGLDVHRDTVVACTRVREPDGMVTLSKETFNTTRKGLEDLARFLVDAGVSTVVMEATGVYWKPVYYALEGLFPQLWLCNAQHVKNVPGRKTDLSDAEWLADVAAHGMVRPSFVPPPEIRELRELTRYRKTQVDARAREIQRLEKVLQDAGIKLTSVASAVWSASSREIIEALIAGERDPAVLAQMAKSRMRAKIPQLEEALYGHFGAHHAFVAKQIIDHIDYLDSAIGALTQEICERLLPFESAVALVASIPGIPTITAQVIIAETGGDMSRFPTAEHLCAWAGLAPASYESAGKRKPAGTRHGSTSLRRAMIEAARAAARTKGTYASAQYARIARRRGPNKAAVAVANSMLNVVWHLLTNGELYQDLGADYFESHNDPTVQVKRLTKRIEALGFDVTVTERVA

SEQ ID NO: 498194 - protein, 412 aa, unidentified
MTAKDQFAAHVGLDWADKKHDVCVQFKNGDRIFHVIEHTPEALDIWLNELHQRVKGRIAIAVELKKGPVVYALQKYPFVTVFPIHALSLARYRQAFWPSGAKDDPQDAELALDLMLRYPHKIKAIEADNPDIRLLQQLVEQRRLLVEDKRRFVNRLINTLKQYYPQPLEWFSHRDSSLFCELIIRWPSLQQLKRARSDTIRHFMNAKGGPAVAYTEQRVASIASAIPLTTDKSVIEANALMATALASKIRLVGDLIRTYDQRIELLFDTLPDAELFKSLPGMGPCMGPRMLAALGDNRNRFNSAEEIQNYAGIAPVTERSGQKSWVHWRWQCAKFVRQTFVEWAAKTVNSSYWAKLYYQGLREKGKSHQSAIRALAFKWIRIIYRCWKTRTQYDEEKYLLALKARHPPLLKS

SEQ ID NO: 498195 - protein, 409 aa, unidentified
MGLYCGIDWATAHHDVAVIDDDGKVVARGRVGNDAAGFAALLGLLAEAGDSAEHPIPVGIETDRGLFVAALRETGRVIYPINPLAASRYRSRYSVSGAKSDATDAALLANIVRTDPGAHRPLPADTELAQAIRVLARAQQDAVWARQQVGNQIRDLLKDFYPAALVAFADLDGGLTRPDARTILTAAPTPAQAATLTPARLRRLLIKAGRQRYLDRDVARLREVFSDTYLHQPPAVENAMGIQLSALLGQFEAACTAADTLAEAAIAHFDQHPDAEIITSFPGLGMLAGARVLAEIGDDRTRFVDARGLKAFAGSAPITRASGKKTVVLHRHIKNRRLAAVGPIWALGSLRASPGARRHYDTRRAAGDWNQQAQRHLFNKFLGQLHHCLQTGQHYDEHVAFPPPLQLAA

SEQ ID NO: 498196 - protein, 336 aa, unidentified
MLYVGLDVHSRQSSLCILNSAGGTVNEIQVKGPRSQVVDRLRQLDQPFSVCYEASCGYGHLYEALRPLAHHVAVAHPAKLRLIYKSKRKNDRVDAQKLAKLLLLDMVPQVHVPHVDVRAWRSLIVLRQRVMAQMVRAKNQIRAVLRENDIAGPKWLWSKKKLAWLDSLELHPIAKLRLDLAVEEFKSLDQKVKRLEAELQRYADRHPAVTLLMTIPGVGIRTAETFVAWVDDVARFRRTRQLGAYFGLVPCQDASADRNRLGHITKDGPPVMRKLICEATWTAVKKCPAFKRYFERVMADKPERKKIAVVAAAHRMIRVMGAMLRSGTAYDPNYKG

SEQ ID NO: 498197 - protein, 383 aa, unidentified
MFHSPSADASFSGSTHTIYLALELSRRSWLVALHAPDAAKVELHRLPAGDGQAVLDLLARIRTRVERRTGVRPQVSCCYEAGRDGFWLHRLLEAHGVSSHVMDPSSLQVDRRARRAKTDRLDAQALLRALMAWARGEPKVCSMVRPPSPDEEDARRPSRERATLLQERIRLVNRIQGLCATQGIDDYEPLRPDRPRLAQLITGDGRPLPPRLSKEIAHQLDWLELVLRHLAEVETRRDAEAAAAAKAASPSKLGALLHVRSIGPELATVLAKEVFYRCFASRRHVASYVGLTPSPFASGRRSREQGITKAGNARARKALIELAWLWVRNQPDSVLAVWFRSRVGSATGRVRRIAIVALARKLLILLWRYVETGALPADVAVKP

SEQ ID NO: 498198 - protein, 383 aa, unidentified
MFAGIDTHKDTLAVAVVDQVGLPVAVAEEPNTRAGFVRIGKLLAAYQVVRVGIEGSGHYGRCIAAYLALDWGRPDVSVVEVPTLMTSRERGAQPGKGKTDPVDAVAIARITMRESTLPPVRLAVGEAADLRALLDYREDLVTERSELTNRVHADLLGLFPGYQEQITTLTGKAHLEAAAQLLDGDTRVRAELARRRLARVAAIDAEASQLKRRIAGYVAASGSSLTRLHGVGPIVAGRFLAEVVDINRYAGRNAFAAINGTAPLAASSGRTKRHRYNPGGNRRLNRSLYTMAITQIRADTEGRAYYQRKRDAGKSKKEALRCLKRRLSDIVYTTMRRDADGVDAASATRARPTAKQASSVTENPSPATRSSAPATNHAHRQQD

SEQ ID NO: 498199 - protein, 312 aa, unidentified
MANPVYAGIDVGKEKLFVNVYLDSQVRDFPNTHSGIERMSRFLIKNAVDLVVMEASGGYERLPASDLRACGLSVAVVNPTYVRRFAQGMGTLAKTDTIDARLIAHFAFVKQPKPQLARTVEEEELAALVERREQLVSLLSVEKNRLSKASDYSKSSIQNSIQFLAGQVDIIETEIKVLVAKSPERQAKLRCMCSFIGVGDVTAVTLLTEMPELGNESREHIAALAGVAPINRDSGKMKGKRRTYGGRGRVRRTLYLAALSASKHNPIIRTFYERLLAAGKEKKVALVACMHKILTILNAMLKKGELFNPISA

SEQ ID NO: 498200 - protein, 356 aa, unidentified
MQSIGIDYHKRYSVLCVLDEEGREQHLERIEHAFPERFGSLLQDYAPCQVAFEATMNWSWLYELLEEIPGVARIIMANPLHVRLISAAQVKTDKVDARKLAQLLRAGLLPASHIPDRATRLRKEVLRQRTFWVRQRTKLRNRVHRLLGRQHGLVMPQVSDLFGKKGRAALNAMQLEAPDDLLLRQQLEMLDALARQIRELEEKIAASGKADETLARLATIPGIGNLLGNVLATEIDGFARFGTGDQLCAYAGLIPTTSSSGDKTYHGRLVPGCNKWLRWAFVEAAWVAIGCSAYFGGLYRQHRARGKKANTAIMIVARRMCHIVFRILKEHRAYEARAYSTNLPGGSHKGRTERVA

SEQ ID NO: 498201 - protein, 352 aa, unidentified
MKQFIGCDAHKRYSVFVAVGEDGGCSPAWKVSHTEGALEAFLEELPEGSEIALEACSSYYWMVAAMERTGHHPHLAHPLEAKHRMGKTHKTDKLDAGGLGILLRNGTLPEVWIPPAELRDQRELLRLRMQLTQQRTRWKNRIHGALIRYNVHVGASDAFGVRGREQMTQQLGALPPHTRRSVEQQLAVLDFVESQIADCERRLAGLLEPSEEVRLLRTLPCVGPILSAVLWLEIGDVNRFPDAPHLASYAGLVPRVRASGGHIRLGQVCRDVNHHLKWAFVEAANLVAVNQRRLGPCHVLELYQRLKKRKNHQKAVVAVGRHLAEAAYWILKKREAYREPKTPRLAVSSTHG

SEQ ID NO: 498202 - protein, 351 aa, unidentified
MMIIGVDYHPSFQQIAFLIEETGEYDEQRLNHEGGEAERFYRDLKRKGIRVRVGMEATGYARWFERLLAELDFELWIGDPAEIEAKRVKKRKTDREDARLLLRLMREDRFPRIWVPSPENRDLRQLLWHRHRLVQMRTRIMNQLQALAMNEGKRWKSKLFSQQGRVAFEKLALGPWASRRRSELLELLDRLNPSIEELTKAVEQEVKKRPEALRLMTHPGVGPITALAYVLIIGTPERFARGKQVGTYVGMIPIEESSGDKQRLGHISKQGSSLLRYLLVEAAQAAARFNPHWRRRYIHLAMRRHRSIAKVAMGRRLGVRLYWMWRNGCDYSPSFEFGSYAGQLEVRHGGR

SEQ ID NO: 498203 - protein, 420 aa, unidentified
MPDHDFAAYVGLDWGDQQHAICLAAGGPRVATRLAQRAEDIEAWAADLRTRFGGRPIAVCLEQSRGAFIYALLKYEFLVLFPINPKQLASYRDAFVPCGPKDDPTDAELLCTFVEQHHARLRAWRPDDASTRTLRLLAEDRRRWVDERTALKNRLRQRLKEYFPLALEIASEDLDTTWFLTLVKKYPSHAELRRANPKTLAKLFPKRSRVADDAGEDARMALIRSASPLVSDQAVILTHRLDVLHIVGVILQLNETIAEYDREIARHMAQHCDAALFQSFPAAGPAMAPRLVAAFGTDRERFGSAQEVQQLSGIAPVLKRSGKSCSVIRRLARPKFLHQTFHEYADHSRKKSAWAGAYYRMLKARGMRHHCALRSLAFKWQRIMYRCWKTRTLYDESRHLQQLRLRNSPLLAYLPPTTSP

SEQ ID NO: 498204 - protein, 421 aa, unidentified
MSNVTEFGKKVKDQEKKLMENVSWVVGIDIGKEKLSCALMNMNKALICRFDVEGSLAGYNELLTRVKEATKGSGKIVFALEPTGHYWMVLGQFFEDHNQSYVLIHPLVVARSREVHRLSKGKTDSLDARLIGELACDKSITRTQIPEDYWATIRFYAREYMDREKEIAREKNRIVSYLETTLPGFVEIFPKPLCMSGRACLRFLANFREASKGDMEHFEMQIRKHFPGKRLMTSRVRRLYTMLQQGNVLGLRAGRQAMFFRIIHSLDRLEMYGGQEEAAKQAMLDMYEKSEYKEYLDSIWGTAPSVNALVLGFMGDPALYDSPASLVKLAGCDPVPNESGKFKGRASISHRGRSLLRKAGDRVSFLLEKRNSVFRAFFNHLMSRQKNRFSKRQARVACINKYFRIVWVLCHYRVPFNPALA

SEQ ID NO: 498205 - protein, 345 aa, unidentified
MWSVGLDVHQRSSAMCILDENGKIVKQVQVKGPWPEVMGVLKGLVHPFAVCYEASCGYGYLHDQLRPIAQRVVVAHPGQLRLIFRSKKKNDRVDAKKLATLLFLDQVPTVHVPSVHVRSWRSFIVFRQRLIAKRTRVKNSLRSLMRGHGVILPRGKGLWTSQGLVELGEAELPTDESAVQRDLLLEELGHLEGQIRRVTRELDAKGRRHPGVGLLRTIPGVGPRTAEAVVAYIDDARRFARNKCVGSYFGIVPCQDATGAANRLGHITREGPAVVRKLLIEAAWQGIRHSPHIRAFFERIRNDDPDRRKIALVATGHYLVRVMQAMLRTGEVWRHDVPATEKEAA

SEQ ID NO: 498206 - protein, 340 aa, unidentified
MKKFLFIGIDFSKSKFDVTVLKSIDQQDFAQTIFLNEKRGFNEFLKWVTKQSDIPKQDWLFCGEHTGLYSRGLAEFLIKKNLFIWLENPLQIKCSWGIKRAKTDKIDSLEIARYALRFEDKAVACKPANKEIESLRLLFAYRGRLVKNKVSLEVSANETRRVINRDTTSRLVFENSQHNIDRIKKEIEVIETKMHQIIMSGDIKENYLLVVSIKGVAMITAIALIIHTNNFEAFKTARQLACYCGVVPFERSSGTSINKGNHISRLANKDIKTLLTQCARCAVQYDKEFAAYYTRKIAQGKLDRVVINNVRNKLIHRIFAVVNNKIPYRENYLNPFEDCA

SEQ ID NO: 498207 - protein, 374 aa, unidentified
MSHHSEAFVAFDTSKLRNAVAIAETGRAGEVRFVGEVDSTGIATAKLVKKLAAKYDRLTFCYEAGSTGYGLYRQIRTLGHDCIVAAPSLIPQKPGDRVKTNRRDALSLAKLLRAGELTAVWVPDERHEAMRDLSRARGAAVEDLRGKRQQVSSFLLRHGLHYPGKKTWTKAHTVWLASLKLAHAEQRIAFEEMLLAVRQAQERIERLEQAIRAAVADWSLAEVVTALMAMRGLDLISATTFLAEIGDLSRFQTPRELMAYLGLVPSEASTGDTVRRGPITKTGNRRARRILVECSWSYQHAPRVGKKKLEKVAAAPSVVREIAWKAQCRLCARYRALIRKGKPKNVAVTAIAREFAGFIWAVSREATSAGAAAA

SEQ ID NO: 498208 - protein, 350 aa, unidentified
MTVNYVIGVDVHKHNHTFVAVDCTGRKLATKSVQATTAGHQMALRWARTTCPGSRLWGVEDLRGLSCRLEAELLDAGESVVRVPPKLTARQRASARTVGKSDPIDALAVARAVLREPDLPTARHDAYSRDMKLLVDYRDTLLTTRTAITNRVLGRLHELAPEHSSTRLVLCYANHRRVAQALLQSHTGLLAELIRADLTQIATASDHINSLEKRIKDAVQRGASALVGIDGCGPLMAAKIIGETADVSRFTNEAKYACYAGVAPIPHWSGGTPVHIRATRSGNRQLNRALHTIAMIQIRHGGRGEHYYRRRIADGDTHRQALRCLKRHLCRTVYRALITDTKSRATAASN

SEQ ID NO: 498209 - protein, 422 aa, unidentified
MEAFNVSDFAALIGIDWADRKHDICEINRDKNTQHLSVISSDPKSINAWALELKQRYNGRPVAVACELKKGPLIYALSKFKHIVLFVINPSSVAKYRAAFTHSGAKDDPTDAIIQVEILQLHMDKLTVIRPDSEDVRCLAQLVEYRRKLVQDRVDLTNKIATTLKNHYPHVIDWFKEKDTQIFCDFLLRWPSLAHAKKARKQTLLDFFNQHNSRYPLVNEKRIKEIKDAEILTDDMAVITPNLLLIECLVPQLKQLMLAITRFDDEIKTLYKQHADRAIFDSLPGAGPQLAPRLLAAMGSNRDRYKCAADIQKYAGIAPVTERSGKKEWIHWRYSCTKFLRQTFVEWAGLSVRYSFWAKAYYRQQEGKGKPHNTIIRSLAFKWIRILFRCWKTHTPYDESTYLTALKSKGSPLLKFAVESEL

SEQ ID NO: 498210 - protein, 346 aa, unidentified
MKILALDLGKYKTVGCAYESESGAHQFKRGFTSPAGLTRMVQEVKPDRVVIEICSIAGWVCDLLWELGIEVQVANTSDDAWRWRKVKQKDDRRDALKAARLSAVNQIREVYIPALAVRQWRALITYRQQLIRRRTKIKNHIRDLLLREGQILARGSSCWSEVGIELLAAQARSFSECGPAELWRGELQLELEQLREVQRQVVTVTAQLDKIGAGDTRVKLLRTVPGVGPRLAEAIVALLDQPQRFRKASQVSGYIGMVPKALDSGETERRGHITRQGSRVVRSLLVEVAWAGLRHNAWVRQTYQRLSGGKKARKKIAIVAVGRKLLVRCWAMLRDNRAWDWQPQIT

SEQ ID NO: 498211 - protein, 354 aa, unidentified
MKRTTKYVALDVHQATTSASVREESGRVIARSVLPTDGAAITEFVRGMRGAVHVALEEGTQAQWLHDLLAPLVDRVVVCDRRGAPRQGNKGDQVDADQLSELLRRGGLRAVYHGSAHCATLKELTRTYRNLVEDATRVMLRLKALFRARGIPALGDRVYHPRARAQWLAQLQDPGARLRAEALYAELDVLRTLRPRAKAAMVTEARRDAAWGVLRTIPFFGPVRVALLLATMQTPWRFRTKRNLWAYAGLAVVSRSSADYALVAGQAVRRRRPPLTRGLNRNHNRVLKDVFKGAATAATARPGPLQDFYHSVIARGTREELARLTLTRKLAALTLRLWKKGERYDPTKLTTPAR

SEQ ID NO: 498212 - protein, 458 aa, unidentified
MYRELQPFREALSRELKASLFPAVAGVDPDKLLETYLDRLTMYVGIDVADQTFTTLALDASREILGSLEDCANSPDGFGQFITWARNLRDQHGLRIIAIAGETTGIYYWSLWDFLGEQPDVARVLYNPRTTEHMGEVLSKKVRNELVDALLLAEQLRLGSTPEVLLQEDADLLTARYYSRAARDLAQQINRKKNQLRALLRAYCPPLSQVFPGSKLHHPAVYALLQENLFPDEFIQAGTKPLTATLVAHCDTAFGLAEAQQLVETCRQALIRPIGRDVIRHLVHAHTQDITTFQQRKGFYLKTGYALIEDRQETELLRTVKGAGVSNTLALVSEIGEVQRFPGGEQLASFLGLTTSKHISGTTLFHAKRITKQGSPNGRYAAVNVAQHLSRHVPRYQAMYQRIKGRKPDRKGHFIALVAIARDFVSNVLYDMWRNQRPFFLEVSDYRDYRRKNQRLND

SEQ ID NO: 498213 - protein, 504 aa, unidentified
MSKKKSCSDSGPPPSGDSIQINILDEKGIEIVHTKSYGVGIDCHRDFIQVSVIVKGDENKTIEYRHEFNTTLPVLENARDWAISIIRLKSSASVDVSTDTLHYVIESTSCYHLPVIMVWKGIPSIINPSIAGATKRKTDVLDARMLAIHDLNGIWRESYIPSSDVQQLRLLLAQKQQYSKMATRINNRITNSLLKFGYTISRDGSITKDSINRAILENEISDSPSPDMAYRPPDGIPEDVKGIFKEELELYDDYVQKASEYEKKAVSKAKSMQWETRDGTLPGTEMVRILTTAPYVGEYTAVIWLAFIITPNRFPNSKAVAAYCALDPSLKISAGKVSSTKKRGGNKDLHTILHQAASNLMRVHNEPFGIWGYQLYMQSGKWKKGTNAVARRLSVALYYMQLNGREFSYDGYKSAEPPKVINITILQLSQINTAFKRYITPLGKAEIYNTEILVKAYYECRLKKIQGLGKKFFGLVREFIENQKYYVNALNDPNGGGCIENAEQ

SEQ ID NO: 498214 - protein, 381 aa, unidentified
MHGSHASLSPNGRHSFNRILALDLGKFNSVLCDYDPASGGHRFESLATTPQAIHDLLAGLAGEEPAKAVVVMETCDTSGWVYDIATTLGFSVLIANPSNEAWRWTKVKRKTDRDDALKLARMADRGELPTVHMPSPQLRQRRRLVHHRRTLVGRRTQIKNQIRSIYSQQGLSLPKGTKCWTKIGIAQIEQESKPLEECAIDQLWRGRLSVELQLLKSINQLIEQMDKALDALGSEDARIKLLQTVPGVGPRLAETVVVHLDDPHRFKSVGDVSSYAGLVPKQIESGTMKRVGKITRRGPSLLRGMLVEVAWMVYRHNPWAKAFVERVSRGIKSRKRIAIVALARKLLVKLWAMLRDGTAWRDPDAVGQGSQREDLAALGQV

SEQ ID NO: 498215 - protein, 335 aa, unidentified
MQSYGIDLAKEKFDVSFFDLTSKKVSNQPSHKVVKNNLKSIGRFLETLPSDAVLVAEHTGVYGDTLLKCCMDSNVKIAFVGGYVIHRYRATPDRAKTDVLDCALLREFGERYPDKLKYKTFPEEALYELRQLARHREMLVEQRKQLITADKSEDCRPVRSLAVKRSMDRIKEMLDTEIAETEKEMLKVINGHDSIHHNYELVKSVDGVGLITAVELLVKTENFTKITTARQYAAYAGTAPYEKSSGKMDKGAHISKIGNRRSKTLLYICAESARLHNKEIKLYYERRTLIDKKPRHYVLNAIANKLLRIIFTLVEKGEYYDANFIRQDPRGVKYN

SEQ ID NO: 498216 - protein, 333 aa, unidentified
MNVVGIDVGSKEVVIVISVKGKARKAKTFKNTTSGHLAIIALLSKLKGEVRVCLEATGIYHFDLAVTLSRTENIEVMVINPKASHNFAKALLKRSKTDAVDAEVLAIYCERMPFEAWERPADENIILRGIARRISALKKLKAQTKNQLHALLATKETPVIVIEQTQELIDILEKQIASLTGSALEVIREHVGLAEAFALIISIKGIAEASAIQILAELLVLPKELSAKQWVAFAGLDPRAYESGSSVSKKPRISKAGNKYIRQALYMPALVATRFEPNIKGYYAHMINDNGLKKMQAICAVMRKLLHAIHGMLKTNKKFDGDRFYTFPVEAKS

SEQ ID NO: 498217 - protein, 334 aa, unidentified
MYIVGIDVAKRSHEAIVIDDSGSTVHKAFNFKNDADGFRKLLSVLDSVSADPADFIIGMESPSHYWLALFSNLTKSPYTVHMFNPIQSNALRDMYIRQTKTDERDCFIIAEVIRFGRYSQGSMPPADIYALREMCRARFFMVDMTSDLKRKVIALLDQVFPEYETLFTDIFGLTSSALLCTCPTPAEILAVDTEKLIELISVPSHKRFGRQKAEQIRSVAKKSFGVLLGNDAISGLIKQYMEHIRFSQQQIMELDENIAALFSKFDTPITTVPGVGPVLGAAIFSEIGDISRFRSAAKLAAFAGIDPSVRRSGEFSGIRNHMSKRGSPYLRRAL

SEQ ID NO: 498218 - protein, 384 aa, unidentified
MDQTTSTLSANTLHCALELSKNSWLLAIQFRDREQPSLYPIEGGNTDKLMAKLAAARDCWAKVNGALPAITLCYEVGHDAFWLARFLKARGIECLVIDPGSLQVNRRARRVKTDRVDVKMLLRTLIAWCRGERHVWSLVRIPSVDEEDLRRSHRERSRLVRERTAHINRIKGLLFAQGVRGINIKSQYKTLAVDQLVTGDGHRLPPRLVCEVAREIQRLAMVQEQIAKIERERDTAPTPCEATERKRRLLLRLKSIGPAISALLSREVYYRQFANRRQVGSFLGLTPSPYSSGEEERCQGISRAGSGHVRAIMIEAAWLWIRHQPKSALTRWFLERTAGQSTRMRKTMIVAVARKLAIALWRYVEHGLVPQGAILNPPTTGNSR

SEQ ID NO: 498219 - protein, 372 aa, unidentified
MTSIIYVGMDVHTTNYTLCCYSMEDDRFFAEVQVEPDAKNILKYLARIEKQQSRDCRIVCGYEAGCLGYSLYHQLHAHGIDCVILAPTTMMTKPGKRIKTDRRDARLISKCLAFHTYSPVYIPTEVDDAVKEYIRMRDDANSALGRVKQQIIAFCIRHGKIHDGKSYWTNKHLEWLSSLDLGNKILSEVLQEYLIRYYQLREQVDMYDMRINELAQAEPYRQKVEKLGCFRGIAAHTALSFCVEVGDFRRFATAQQFASYLGLVPGECSSGDKQQYTGITKAGNSHLRKLLVETAQVFGRSATKSGKSVALKERQAKCDSLTVAYADKANARLKKKYFKIAMRSKVNIAKTAVAREMACFIWGMMTDNISCA

SEQ ID NO: 498220 - protein, 363 aa, unidentified
MKMMAGIDLHSNNAMCAVMDIEGKRIKHRRLPCDLSSIAGFFEPYRDELDTIAVESTFNWYWLVDGLQDKNYKLALANPAAIKQYDGIKHSDDASDAYFLADLLRLGILPTGHIYERSSRSLRDLLRRRMMIVQLRTSLILSFKSLNERTLGEKVSQNLVKKMKPEEARKRFTEPADRLISGHQIGLIRELGSVIRQLENHVLSVTEKWTTYQRLQSMPGIGKILGLTIALETGDVTRFAGAGNFASYSRCVDSRRISNGKKKGENNRKCGNRYLGWAFVEAAHFSCRWDDQCKRFYERKRQKTNTSVATKALACKLAKAAWHVMSGDVDYDTERVFGSKKKLQFQEVRREPVQGLDMKSHKN

SEQ ID NO: 498221 - protein, 354 aa, unidentified
MIIIGADYHPGFQQIAFVDTDSGEFQERRLQHREEAEKFYRELAAQGMQVRVGMEASGHARWFERLLSELHFELWIGDAAEIRTKRVRKQKTDRQDAQLILQLMLEDRFPQIWVPSGENRDLRQLLWHRHRMVQARTRIMNQLQAVALNEGLRCKKRLWREAGREQLESFALAPWASRRRRDLLELLDRLTPTIAELTQAIEQEVEKCPAAKRLQTHPGVGALTALAFVLIIGRAERFQCGKQIASYLGLVPLEDSSGQRRRLGHITKQGNSLLRFLLVEAAQVTVRSDPEWRSKYFHLAMRRGRKIAKVAMARKLAVRLYWMWRKGWDCEQLKKFGSHAGQPGNRDGVQSITE

SEQ ID NO: 498222 - protein, 381 aa, unidentified
MKTNSDTTRTLYLGLDVHKEQTVIAILEGERDAEPRQYGSVATTQHALERAIRRIAKQQNRKLDDLHVCYEASGCGFWIARRLLQMGVRCDVIAPSLIPTRSGDRVKTDKRDAAKLAKMLRSNDLVAVHIPDSVDEAIRDLCRARTDAVDDLRRAKTRLLALLRRLGFHYDGKTHWTQSHQNYLRGLKLPDAAHNRVLEDCIATIDFHEARIARLEDEMLQLLADWQRKPLVEALMAFKGFKLVAAMVTVSEIGTFSRFEHPNKLMAFLGLVPSENSSGKSRKQGGISKCGNPHARWLLVEQATHYRVPPKISPQLSERQRNTPRWIKELSWKTQTRLSHRFSLLRKRGMHHNKIKTAIARELVAFVWELGTRFESKTTAQ

SEQ ID NO: 498223 - protein, 410 aa, unidentified
MAERFVGIDVALREHRIAVLDRDGEAVGPSFTIAASQDGVATLLRTLAARDATAAQIVIGLEASGHLWENLEAALVGAGYRVLVLNPLQTRRYRDVLRRKAKTDDIDPHVIAGLIRSGAAQASYVPDEPIQSLRELARLRARLMDDWQDYLRQLIAQLDVVLPEHRTALGDLRSARARGILAQFPTAQHLAQASPRAIRRAAHDAGTRGFSLDDAIAVRDAARPSIYSGKAAPARAQVVRTLVSQLDRLTTALDEVDRAATALLPPSEPGTGPSDADLLQTIPGIGPHTAATLLGELGVPMRFTDAQALVAYVGFYPVITESGQRVGTPRLSPVGSRIARRALYLAAVNAVRRSAEWRTIYLRKRAQGKPAKQALIVVAVKLLHTLYAILKHRRPYNPSRLLVAAATSGT

SEQ ID NO: 498224 - protein, 409 aa, unidentified
MYDKTKYIYVGLDLHKEQHTAVIMDCFNEKLGEITFENKPSEFTKLITKCKKHCTDSKGIVFALENSYGYGRGLAAWLIERDYIVKDVNPALSYAYRKSVPQYKKNDSYDAQCVARVAINELNKLPDAMSEDMYWTLSQLVNRRANLKTHHIRLKNQLHEQVCVAYPSYKQFFQDIGRPTALYFWEHYPSPRLLRGKTVEELAEELIPVSHNQFSTRKCQIILDAVKADGDTTRDYQPERDEITRGLVKDVRHYVEQLEAVDKSIADFLPRFECPLNTIPGVSDTTVAKLLSEIGDISRFPNADKVANFAGIAPVNFSSAGKGDDKHSKQGNRRLQGTIYFLAIQMIQLSSKGLPRNPAFYAYYQRQLARGKTKPQALILISRRLISIIYGMLKNKTEYVMPKVQDNLG

SEQ ID NO: 498225 - protein, 391 aa, unidentified
MTSSHRIDTLAAGDKDGTLYVAFELSKSKWLIGLVVSGESKLSRHQVSGGDTAAVWQLISKKRAYAEKKLGRAVRVVSCYEAGYDGFWLARRLGEQGIDNRVLDPSSIEMPRRARQAKTDRLDLERLMRVLIRHDGGEPRVCSVVHPPSPEQEDARRLSRERDRLIGERTGHGNRIKGLLHGQGVREVEPRRKDFLERLAQARTGDGRVLPARLVAEIKREHARLVLLGEQLAEVEGQMRAEREAAAPDSRARQVNQLLGLKGIGAVGGETLVNEVFWRDFQNRRQVGAYFGLVGTPFDSGQSSREQGISKSGNGRARTLAIELSWLWLRHQPDSALSLWFKRRVGDQKGRVKRVAIVAMARKLMVALWRFLTLGVVPENAIVRTAAPAGR

SEQ ID NO: 498226 - protein, 344 aa, unidentified
MQITTIGLDLAKHWFQVHGVDAAGAVVVKRRLRRSEVIGFFKGLEPCLVGMEACATAHHWARELITLGHEVKLMPPAYVKAYLKRNKNDAADAAAICEAVTRPPMRFVPIKNVEQQAVLMLHRGRALLIRQRTMLVNALRAHMAEFGIIAPQGLRNVEQLVATVSDERTPLPELARSILQLIIGQLNDTEVRIRMLEARLAKWHRANGVSRLLASVPGVGIMGASAIAATVIDPSLFRSGREFAAWLGMTPRQNASGGKERLGGISKRGDKYIRSLLIAGAVAILRHARNRATKDAEWVRGMLARKPAKVVAVALANRTARIVWAVMRRGTPYRATAILGQAAA

SEQ ID NO: 498227 - protein, 426 aa, unidentified
MWDARRRVLKIKSLKHGIIQDKRGNIMRTVFGIDVSKASSEVAILVNGEKIHGYTMLNDAIGFNRLLNDLKTAHNPEIIFEVTGVYSRRLRAFLEEYGYAYTQLNPLEAKKQLDSLRVRKTDKIDAEKLAHSQFILNRKPTYAQEEVYQHLRDLSRFYQNLTEDIVRAKNRLHKVLQVTFPELENLLSTPTGEQYWNLVMAFPCKEFVLNLSQNELCKIIRQSTSKRISEKRIAYLTDKLIKLAKQSFCAVKKISPILEEVRYYAQELLRLSEHRQVVLDDMVALAQPLPEYDILRSIPGIAETTATSIIGELGDIRRFQSTNQINAFIGIDLRHYESGNFLAKEHITKRGNPYARKILFKCIHNIASASHTNPCHIADFYEKRKRQSTIASTKPHAIASIHRLIRTMYYLITHNKLYDYSLTQNR

SEQ ID NO: 498228 - protein, 458 aa, unidentified
MSRNKSTDQGRRTMSVVHPNAAAIDVGATMHMAAVNADRTPEPVRSFGTFTTDLHRLVDWFAECGVDTVVMESTSVYWIPIFELLDARGFAVFLVNARDAKHVPGRKTDVSDAQWLQRLHSFGLLRASFRPKGQIAELRAYLRQRERLLEYGASHIQHMQKALTEMNVQLHHVVTDITGATGLRIIRAILGGERNPAVLARMRDRRCHATVETIEKALAGNYRAEHLFALEQALALYDTYQQKASACDARIEAVLKELSVRRGRKAGPLPAPRQNRSRQQNSLLFDVRAALFALLGKDLTQINGLGPYLALKLIAECGDDLSAWPSAKHFTSWLCLAPSNKISGGKVLSSRTRRSGSRAAALLRLAAATVGRTDTALGAFYRRLSARIGKAKAVTATARKIAVLFYNAVQHGMEYVDPGASSYETRYRARVIDNLHRRAKAFGFVLQPIDPTPGIAVS

SEQ ID NO: 498229 - protein, 368 aa, unidentified
MKQQTSATTETIVKGRNIIDFTGKTIYVGIDVHQKDLQVAKVLDNICLGNHRMPSNSKVLIDHLYSRYPGATFKCVYESCAWGFTLQRELTAAGIECIVVHAADVSSSDKEKKRKTDNVDALKLARNLAAHQLTAIHVPEEDIQKQRNLIRFRKKLVGDLNRSKNRLKSLLKYQGINIPEQLGKKNNWSRNFMNWVEDEAKKDVLLQDTFLLMLEEIKLLRQLLLKAEKALRKLRQDKYNEQSKLLMTAAGIGRTVAMLFLLEIGDIKRFGPFDKLNDFIGFCPDTDNSGDTERDTGITSRRHKQLRSELIEAAWTAIRIDPALMDAYQKLVKRMEGHHAIVRIARKLLRRMRAILLTGQPYQMGIIA

SEQ ID NO: 498230 - protein, 468 aa, unidentified
MKRKSRGAKCQKVSPFDGELKLIEPDAAAIDVGSRSHWVAVNPQRDPNAVREFGAFTMDLIRLADWLAQCEVTSVVMEATGVYWVALYDLLESRGFKVQVVDAHTVRHLPGRSKSDVKDCQWLRRLHSYGLLRGSFRPPAQIRQLRNYLRSSTKIVEAAAQQQLRMQKALTLMNIQLHHVISDISGLTGLSIVRAIVGGERDPKQLAKLRDPRIRASKETIEKSLQGHWQEELLFDLKMALESYDHFQGQIAAYWEQIRRELQEVPSKVDVLEEPLPAARPKACHKRPGLSREEQLDLRVELYRISGVDLTRIDGIGLQTAQTVFFEIGTDVSAWPNEEAFSSWLGLSPNHRISGGKVLKRSSRKVVNPLSIALRLAARTLRNSHSALGANFRRLIAKIGMPKAITAMARKLAVLIYRMLKYGTQYVDKGMEHYEAKYRETKLQYLRSQAAKLGMSLVANDPALTAAC

SEQ ID NO: 498231 - protein, 270 aa, unidentified
MTFRPHALHLKAELFVKSSRVHVRDDGFTRCNFHLKFFIMVYRGIDISKSSFVAAYPSTNGNPTKTFPNTTAGMRELIGTLAVAEHHCVMEATSNYGCCCTCYIRTVLPSVLPPPKKKQIKHFSRMMMPVTKTDEKDAYMIAMYGEKMNPPIYKMPSQATIRILTTEGFTYFDNAKQLSRFIGICPTYQQSRTSVNIREHINRNDDERLRSLLYIAFWTALRYNSRECYIRLKANEKPFKVALIAVTNKLVRPVLTITTINSIYRWICPG

SEQ ID NO: 498232 - protein, 353 aa, unidentified
MAVYIGVDLHVRTQTVCWMNTADGEIHQHTLDHSRDDVRAFYAQFTAPAVVGIESSGYALWFHQLIEQAGHRLLVGDAYAIRQFARRRQKNDRRDAELLLDLLRREEFPVVHRPAPPSQDTLALLRYRHRLVRMRTMVKNGLQAVALNHQLRLGFRLFTVRGQQRFAALPLSGAYATQRQQSQVLLTTLEAQIAAVNQELATRAAADARVVRLRTHPGVGLQTALAVVHTLEPVTRFDRARRIAAYCGLDPSEHSSGDTTRYGHISKQGNRLLRFLLVEAAWSAVQHEEDLGRFFRRMRARKKPHAVAVVAVARKLVLRLYRMLREGIDYEEFRRRGRDARRARKWTSPAQRG

SEQ ID NO: 498233 - protein, 354 aa, unidentified
MKRNSKYVGLDVHQAMTAVTVRGEGGRVIMRSVIETSERSITEFFSALGGTVRVALEEGTQAQWLYDLLSPRVGQVIVCDLRGEKRSGNKGDRVDADHLSEQLLRGGLRSVYHGSRDRADLKELTRAYRNLVEDSTRVMLRLKALFRARAIRTIGGGVYKPTERAVWVAQLPGHGARLRAETLYAQLDVLRTQRKKAKAAMVAEAKRDPAWGVLETIPYFGPVRISLLLATIGTPWRFRTKRNLWAYAGLAVVTRSSADYEFFDGRARRRSRRPLTRGLNRNHNRVLKAVFKGAATTATGRSGPLQDFYHGMLERGMREELARVTLARKLAALTLRLLKTGEVFDPTQLSRPQT

SEQ ID NO: 498234 - protein, 405 aa, unidentified
MFYAGIDWADQKHDGLALDEAGQKLGSIRVAHTPEGLDKLDAWLSSMLGGQDKEQMACIIETTHGLLISFLLERGWPVYPVNPRTVDRKRSASGSKTDAIDAYLLAKTGRADFADLRRLTPDSEKIAELKGLTRDQDSLIQRQTRLVNQLTACLKAYYPVALDLFAKLQQRSALMFLQTYPTLEAAQTASVEQIGQVLKSAGHTTASKVAPKLFAQLHQPSLRADAVTTRTKSRLAVALIVQLLPLIEQIAAYDKEIEQLFLSHEANEVFSSLPRAGQRLAPRLLAEIGDDPTRYETAASLQALGGTSPVLFESGNYSKAHRRGGCIKPLRNALHQFAWQSTLQEEWALAYYERKRARCGKSHSVAVRALSNIWARIIFAMLQSHEPYDRTTFEKARHLHAPKAA

SEQ ID NO: 498235 - protein, 345 aa, unidentified
MHDPTTAIHLYVGIDIAAETFTAAWLGPKGKPTAPFTRAQTPAGYLALQQQLRATAVPPAATAVVLEATGSYWVALAVTLHEAGYHVSVINPLQAHHFAKAQLRRAKTDALDAQDLAQLAATLRPPRWTPPPPVYHEVRQRLVARDGLLTMRQQARDQRHALLQWPVVVAAVRQQLDEVIADLDARIATLEVEIAAVLKESVWAATLARLTSAPGIGIVTASWLLVATLNFTLCTGPAAPAAYAGLAPMPRESGRSIRGRPRIGHAGNGRLRAAFYMATLSAAQHNPAIKAFYDRPRLPGKPMKVARCAAARQLLHLAWALGTKQRPFDPRQQQQQTVVLADQTP

SEQ ID NO: 498236 - protein, 405 aa, unidentified
MAAGKVWVGIDVGKGFHHACAVDAAGKVVFSRKVANGQAAIEALIARTTAKATGGVVWAVDMTSGAAGLLITLLLDTGQPVVYVPGRLVNRMAGAFAGEGKTDARDARTIAETARLRSDLAAVTSPDAVVTDLQVLTARREDLMADWVRGVNRIRELLASIFPALERAFDYSTRSALVLLTGFQTPDGIRAAGAAGVSTYLAEHGAWAKGIPAMVDKALAAAGEQTVALAGESVTAPLIARLARQLLELDREIKDLGKQLADRFGEHPDAGPITSLDGFGPVLGAQLLAGTGGDLRAAFRSSAHLAAYAGLAPVPRDSGRVRGNLHRPKRYHRGLRRVFYLAALSAIKRPNGPSRAFYLRKRAEGKRHTQALIALARRLVDVIWALLRDRREFHPSPPVTAAAAA

SEQ ID NO: 498237 - protein, 345 aa, unidentified
MHIASIGIDLGKTTFHLVALGERNKILVRRKFSRSQLLAYTANLPASLIGLEACAGAHFMGAALREQGHQVRLIPAQFVKPYRKSNKNDFIDAEAIAEAVTKQNMRFVQIKTQEQLDWQAMHRVRDRLVQRRTALINEIRGFLLERGLTFAARPIYLRKNLPTVIEDAEQNLSSHLRWLLDRLWQEWKQTETEIEAITDEIERISNEDARCRQLRQIPGFGPLVSTATVAAIGNGSAFRRGRDFAAWVGVVPRQYSTGGKQKLYGISKRGNIYLRRMLIHGARSVLFRVKYDTGGFGQWVHRLAQRAPSNKVVVAIANKLARIAWAVLSSGQDYRHQPLQQLAAA

SEQ ID NO: 498238 - protein, 411 aa, unidentified
MLEVKVEKCAGIDVGKKFLAVCILIGLANQKPVGEVRRFGTSVKELERLRTWLLESGCTEAVMESTGSYWKPVFNILEGSLKIILANPEQVKALRGKKTDPNDSRWLASLLRHGLVQGSFIPPRDIRELRDLTRRRRTLVGEGAAERNRVQKILEDANVKIGNVLSDVFGTSGQRMLEALLENKQSAAEIAQLGHWSLAPKIPQIIEAVEGHRMTDHHRFMIRQSLRHMRDIEEMIEELDKEIAVRLKPYEQHIRLACTVPGIKPTSAASILAETGMDMSPEGPFPDCHHLASWATVCPGNNESAGKRKSGRTRQGNRWLRATLTQTGWAGAADKKSLFQRRFQRVKLRRGGQRAVMAIAHAQLIAIYWALRNGTPYPEQVQSMEQDRREAQIRYHLQRLTKLGYESDIHG

SEQ ID NO: 498239 - protein, 396 aa, unidentified
MESAVYLGVDIGKSGHYAVAVDASGKPIYQTAVPNDEAALRKLVIWAKEHQATVVVDQPGGAAAVLLKLCWASEVRIGYLHGLAMARARDFYAGESKTDPKDAFVLADVARAHASRVVWLEPSSEALAHLELLCGYDADLRSDANRLTNRLRALLVSHWPALERALGERLDTRGVLAVLQHYPSGPALKDAGVEQLVAALKAQRVHRAEAFAKHLHQAALAQTVTISGSATAAGLISELAVQLAAILARRVELEKEIEQGFFALPEAPILRSLPGIGPRLGARIAVELGSISRFRTPGHLAAYAGLGPTPWKSGTSINANRPSRFGNHRLKNALFLAAFASLRHAPSRSYYDRKRAQGKRHNQAVLCLARRRVDVLHAMLSRGVPYRSPVPLAAAA

SEQ ID NO: 498240 - protein, 395 aa, unidentified
MFIVGIDVAKRSHEVCMITSDGQTVQRPFSIRNNCTGYNLMLEKIRKHTNIKSQIVFAMESTAHYWLALFTRLRKDGYHVILLNPIQTSAMRDMFIRKIKTDAKDSFIIAELIRFGRYAESNVAQDRLLALKELCRNRFYLVDMAGDLKRKLIALIDRVFPEYEAQFDTIFCKSSVALLKKYPTPQKLSNAHLDKLTELLWNSSNGHFGEWKARELRELARNSFGVEDCDGAYSTLILLMLDQIQSLSGKADALEKEISRLFQSFDTTVTTIPGVGPIIGAVILSEVGDISRFSSADKLAAYIGVDPSVNQSGEFQAAHAHMSKRGSPYLRRCIWMASQVAVQRDSMFRAYYEKKTAEGLKYMTIIGHVTRKMTAVIFAILRDHKVYEPVLPTAA

SEQ ID NO: 498241 - protein, 399 aa, unidentified
MNSVGIDISKGRSTIAVMRPFGEVVISPFEVRHTGSELSKLARQLKSLDGETRVVMEATGNCHASVAKLLHNAGLYVSVVNAKLVHDYGNSELRRVKTDRKDAVKLADYGLDRWLTLPRYITRLLLKNCYRQYRQYSKVQTVLKNNLISLLDTVCPNANRLFSSPIRGDGSEKWVDFVAEFWHCRCVSEKSERAFTSKYLRWCRKHGYNFREAKAHTIYAEASGHIDVMSKSETTKLLVEQAVAQLRATSTALAVLKHEMQSLASMLPEYPVVMDLFGVGPTLGPQLIAEIGDVRRLYSKKALVAYAGLDAPPNDSGDVTGRHKSMSKIGASSLRRTLFLVMSVYLQTAPLDEPVYQFMDRKRAEGKPYRVYMMASANKFLRIYYATVKAYLEPLERTA

SEQ ID NO: 498242 - protein, 442 aa, unidentified
MHIIHPYVAGIDVHKRQITVAVRIPGDTPGEYREIVKNYRTFWRHLRKMSTWLVELGVTDVAMEATGVYWWPVYHALVLTGKIEVCVCNAAHMHNVPGRKTDVSDVRWIAELHAYGLLRPSFIPTEAIGALRARTRYRKKLIQARVSEGQRLAKVCEDAGIKIDSVASKLLSVSGRAMLAALIAGERDPQVLAGLAKGLLRKKHDDLVMACEGRFNEGHAQMLRLHLAAYDQYTDQIAEMDQLVAQAAQPLGAVIARLCTIPGIAQRTAEVIVAETGGDMTRFPTRSHLAAWAGLAPGNRESAGKRRKAGTRKGNQHLRVAMLEAAWATARTRTRPGARLRRLVRRFGKGNEKKAAVAIAHTLVRIAWTVMACERDYTDDGADFYDRRDLRNREHLTARYAQALQRLGYQVTLTAVDPPASDAQSPTDAPTDAPTDAQEAAA

SEQ ID NO: 498243 - protein, 438 aa, unidentified
MAGGKFSTRPADLERLWADLFLADATDVTVVVEPTRNAWIVLAEWFRRRGARVVMVPTTQSADLRKYYSKHTKNDRIDSELLARLPLLHPEGLREYSGQGPADPLRRLVKQRSTMIKRRVAVYSRLDALVELLGPAWYAVLGSNYGNAALEFLARYADPNTVIRLGQGRLSRFLIARSRGAWREDHAAGLIVAAKETLMLWGPDGMNFAELGDDIAHEAEQALFLTRQIKQIDERVANLYADADPEGIVASAPGVGPVISAVIAGRIGDPHLFTSLAAIRAYTGLVPKVSQSGLSRVESSITKAGDPLLREMLCTAADQARKIDPQIAAKYQRLMAGDRHHDSAICHLATLLVTRIATCMRNGQPYVLRDVDGTPITDAQGRNIVKERYQIEPRRRDNIRHQRMRDRRKQAAGQESQESPSAPTSRPAKHEPTSPHVA

SEQ ID NO: 498244 - protein, 346 aa, unidentified
MNYYAGIDVSLECSSVCVVDGAGKIVRESKVASEPEALIGWFGKLGLSLERIGLEAGPLSQWLYAALRQAGLAVELLETRHVRNALKTMPVKTDRNDARGIAQLMRLGWFRPVHCKSMEAQETRALLTARRLVKGKLHDVEMSLRGILRGFGLKVGPTAKTAFEARIRELVAGHPTLQSIAEPLLAVRGVLRRELAGLEKRVRTMARCDPRARLLMTTPGVGAVISLTYASAIDDPARFKSSKIVGAFFGMTPTRYQSGETDVSGRISRIGDAGVRAVLYEGAHVILTKPVKGCTALKSWAMRIADRAGMKKAKVALARKLAVIMHRMLVDGTPFIDAAKAAAAAA

SEQ ID NO: 498245 - protein, 390 aa, unidentified
MLVIDEKGHQVGSLRIDHSPQGLARLNTFLQQIIGSESKEPMACIIETTHGLLMAHLLEAGWSVYPVNPRTVDRRRSASGAKTDTIDAYLLARTGRADFAELHRLTPDSEKVAELKLLTRDQDALIHRQTRLVNQLTACLKASYPVALELFTKLQQKNTLLFLQTYPTAQEAMAASAEQIQNVLRQARHPTPTTAAPKIFERLHQPHLQADAVMTRTKARLMLVLVSQLLPLIEQLAQYDKEIDTLFLTHEDHTIFESLPRAGQRLAPRRLPEIGEDRERYQDASSLQALGGTSPGLFQSGMYSKAHRRLGGIKALRKALQQFAWQTTQSEPWARDYYQRKRAEGKSHTVAVRALANVWVRIIFAMWSRHCCYETATFERAQQQHARRAA

SEQ ID NO: 498246 - protein, 483 aa, unidentified
MKPKQQEQTKKASCRPTPGRWHEMNRKQRREMMRKMESEDLSLEVLHPHAAGVDIGNESHYVAVPPTRDSQPVRRFGCTTAELKAMADWLKQCGIHTIAMQSTGVYWIAVYDILEQAGLEVYLVNARETKNLPGRKSDVQESQWLMKLHTYGLLRNSFRPSQEVRTLRTYWRQRNDLVRAAGRHIQRIQKALTQMNIQLANVLSDVSGMTGQAIVKAILAGQRDPHQLAAFRDWRVKASEEEIAQSLEGNWQEDLLFVLKQEQDGYEFCQKQMVECDQRLAKYLQQREDRSQGASLPEETRKERRRKKKKGNAPQFALRAELFRMTGADLTQIDGIDVTTGMTILSEAGWDMSKWKTEDHFVSWLRLCPDNRISGDKIIGKGRLPTHNRISIALRMAASTLRVSNTYLGAQFRRFRTKLGAPVAIKAMAAKLARLVYRTLRYGMQFIDRGAEFYEAQHRKLQISYLKRKAANLGFKIIEAPAA

SEQ ID NO: 498247 - protein, 354 aa, unidentified
MKAKVRDFSGESIYVGIDSHLKSWKVTVMSKELMLNSFSQPPDSVQLSAYLKGHYPGADIHCVYEAGFAGFNIQRELSSAGINCMVIHPADVPTSDKEKRRKSDSIDSGKLARGLKNGDFKALYVPTLEQQQDRSLLRIYDRLTRDITRVKNRIKFFLMYFGEAIPVELQGSNWSKDFIRYLDNFSPGGNGNLSFQALLSEYKMLNQQSAILKKQIKELSEQPRYKTDAELLKTIPGIGNLTSMILLTEIGDINRFVSIKELSAYVGLIPNSHDSGETKRVGRITKRGNVFLKYILVEVSWMCIRFDASLLLAYKAATKKMEPNKAIVKVARKLLNRIRFVLKNKEPYRINQGL

SEQ ID NO: 498248 - protein, 410 aa, unidentified
MEVIHKKCAGLDVHKKVVVAAILVEGRPKEIRSFGTMTADLLELSDWLIDCGVTHVAMESTGEYWKPIFNILENNFEVMLVNAQHISKVPGRKTDVSDAEWIADLLRHGLLTASFIPPVGQRELRELTRFRSTFVKERATHVNRVQKVLESANIKLASVASNVMGVSGRAILESIVAGTATPEQMAELSKGRLRNKREELSRALEGGVKPHHRFVLTELLSQIDSLEETIARFNQEIEEYCRPFEEVVVLLDTIPGVARETAENIVAEIGTDMSRFPTANHLASWAGVCPGNNESAGKKHAGKAKKGNKPLGVTLTQAAHAATHTKNTYLSAQYYRLAGRRGKKRALKAVAHSILVISYYMIQRHIPYFELGSDYFDKRRPETTAKRLISRLEHLGYQVSLQQTAIPVSL

SEQ ID NO: 498249 - protein, 433 aa, unidentified
MLKINYMSTLFVGIDVSSKTNAVYAMDFEENKYISSSFGNNQPGADQLVTMIAECMHKHKNLDTVLIVLESTSVYSVHISSFLSTSEVLMPYKPYVFCVNPKATSNYRKSYIGMEKTDPTDAYLIADFGRVGRTKKLEPWRGGQFIALKRLTRHRMHLSECITREKTYMVSNLYLKFSELQLLEGDDKPFGSLYGAASSAVLTEFLSPQEIIDMPEEDLLTFLAQKSRNRISDLSKTSELLRKAARDSYRLGKCMYEPLNISLASSFNCIHAYQKEIKLIEQAIEKCINGMNPNALIILQSIPGIGPVWASGILSEIGDITAFHSSDALAKYAGLYWPKGDSGDFTSEDNKMSKAGNPYLRYYLGEAANSVRKHIPEYADFYARKYAEVTKHQHKRALALTSRKFVRLVFGLLAKNQLYTGEKLDAEYNIEPN

SEQ ID NO: 498250 - protein, 447 aa, unidentified
MAHRKRPTTESAITLTHPNAAGIDIGGASHFVAVPPDRDDEPVREFACFTADLHRLADWLDACCVDTVAMESTGVYWIPLYELLDSRGFTVLLVNARHVKNVSGRKSDVLDCQWLQQLMSFGLLRGAFRPAEQVCALRALTRQRTMLLRSQGRFVQHMQKALTQMNMQLANVISDVVGETGQKILRAIVAGERDGLTLAKLKNARIRASEDDIAKSLQGSWRAEHLFALKQALDAFDFCGTQLAECDAQIQAQLQALHVREDEPAAGKKRGRARNAPKFDLRTQLFQMCGVDLTRIDGIDVTTALVVVSEVGADMGKFPSDKHFASWLGLCPGTKITGGKVMSGKTKRCANRAAQALRLAAAALRSSQSALGAYYRRLCARMDKPKAVTAAAHKLARLIYAMLTHGQEYTDRGQDYFEERYRQRVLHNLTQKAKAMGMQLVPAHSTA

SEQ ID NO: 498251 - protein, 340 aa, unidentified
MTDINLVSIDLAKTVFQVCQLAEGNKVQSNKKISRKKLSQVLAQLSPTTVAMEACYTAHYWGRVCEQYGHTVKLVPAQHVKPFVRGNKNDANDAVAIAEASLRPNMKFVRVKTVEQQDIQSLHKIRERHNKQHTRINNQTRGLLSEYGLIAGLGFKALKSLIHEALESKALTELFKEEIASIYEELLDLEERLKRVNIKLKGIAEQSPLCRLLMTIPGIGVINATAIYAAIGDGKQFETARDFAVWMGLTPRQYASGTKSYTGRITKRGNSYLRKQLVHGARAIMHRSQGKEDVLNVWINDIKARRGQQKACVALAHKLARICWAVLSKGEEFKAKMVAA

SEQ ID NO: 498252 - protein, 351 aa, unidentified
MRTSQNTAETINTIGIDVGKNTFHLVGLDKRGAIVLQQKVTRHQLGRRLSNIPRCLIGMETCSGTHFIARQLAALGHDVRLIPAQYVKPFLKGHKNDYRDAEAIAEAVQRPTMHFVSIKTPEQMDLLALHRVRSRLVRQRTGVANQIRGFLLERGITVRQGFMPLRKALPEILSSKSDALSPRMINLIGELIQDWRRLDDRIASVSTEIEAMAKRDESCQRLMSVPGVGPIVSSAVVAAIGNGTGFKQGRDFAAWLGLIPKQESTGDRTILGKISKRGNKYVRTLFVQAAHVVLERRPRTARQGLWPWIEQASKRLHRNMLAIALANKLARIAWAVLARGHAYQPRIIANA

SEQ ID NO: 498253 - protein, 410 aa, unidentified
MEVLYPHCAGLDVHKDTVVACVRHMVNGTVKREVRTFKTTTTELLALSDWLAAEKCTHIAMEATGVYWKPVWHILSDGDFSLVLANAAHVKNVPGRKTDVNDATWLADLLAHGLIRGSFVPDQQTQEMRDLLRTRKQLTRERSRHVQRLQKTLEDANIKLDSAISDIIGLSGRKMIEALIAGESDPERLARLAHRRIKATPEALCEALRGRVTRHHRFLLRLHLQQIDAIDEVISDIDREVDALVEPFRTTVLLLTTIPGIDELSACVILAEIGRDMSRFPTAAHLISWAGLCPRNDESAGKRRSTRMRKGAAWLKTTLVQCAAAAARRKASYLQAQFHRLRARRGAKKAIGALAASILTIVYHMLLGGELYHDLGPDHFDRRAKSTHIKRLVTRLQNLGYAVQITPLAA

SEQ ID NO: 498254 - protein, 370 aa, unidentified
MLDTTTFIGLDVHARSIKAVSLDVMTGEVRAATFGYDAGAVAEWVRSVDPRARCVYESGVTGFDLQKRLSGLGVDCVVGAVSKMIKPSADRRRKNDRNDAEFLARMLSVGNVVEVWVPDDECEAARDLTRALEDARDDLSRSKQRLSKFLLRHGLAFDERTPTGRRKGNWTRAHWSWIESIRFAERADNDVLAYYVDAVRRAAEEKARLEGLVEAEARKPRWRKRVDSLRCLKGVDTASAADLVFEAGEFSRFRNARSFAAWVGLTPSEHSSGESDRRGAITKAGNKHLRKTLVEAAWHYLTCSGRPKDLAKGQAPDRGARRHAAKGVRRPVERREALLARGVHGNKANVATARELACWVWAVGLMAEEA

SEQ ID NO: 498255 - protein, 366 aa, unidentified
MKKHTTINQSLSADVSTCVNIAVDLAKKVFQVAGEDALGQVIFEDRVKSREAFQAFLQNLPTSVTVLVETGPGAQAWARLLQAQGNYVRILPAQLVANHRSGPKNDRNDALAILRAGRDCTICAVPVKSAAALAMQALHRARQGYVRRRTAVGNQIRGLLLEHGVAMAQGEMAISHLVPRILEDASQPLPDLLRELIAELQGEWHQQGERIKVLTGRLETAAKENETAKRLMTVRGVGPITATALLAKETAPERFANARQFAAYFGLVPSQNSSGEKVRLGKMSKHGDAYLRSLTIQGAHAVLKQIQPDSEQPDDQRLLRWMSRLGRKEAAVRLANRNLRILWVLLQNDQTYRRQPGNSLEAAMSH

SEQ ID NO: 498256 - protein, 353 aa, unidentified
MQRPEAGSVVVGVDTHKEVHVAAVVDHDGNLLDESSFPTTRQGYRMLERWAESFGPIYRVGIECSGSYGSGLMRHLLKSGIEVLEVTYPDKSVRHKRGKDDFIDAEMAAEAAFTGNRTVTPKTRDGMVEALRMLHKTRQTAVRSRRIALQMIDGQIVSAPEELRDQLRGMTRMQLIRHLVATRPDKTAFRTPDGAARISLKHLAKRYVELDDEVSELDDAIAAILADLAPKLIALPCVGPQTASQLMITVGDNPGRIKSEASFAMLCGVAPIPVSTGMKSRHRLNRGGDRAANSAIHIIAVGRLRTDERTRAFIDRKMSEGHTKTEAIRCLKRYIAREVYYVIKEQNRSINSA

SEQ ID NO: 498257 - protein, 411 aa, unidentified
MATILCGIDWASDHHDVALIDPGGRKLGRRRIGDDAGGLGELTGMFAEHGGGPGTVKIAIEPERGLLVASLRAAGYEIYPVNPKAVDRYRDRHHLARGKSDAADAMVLAHILRTDAHLHRPLPADSPAARAIEVLARAHQDLVWSRQHEVNRLRSLLAGYYPAALAAFGDLTTRTAMTVLAAAPAPAQAARLTTSDLLDLLAAAGRGRHRAEARRLAEVFAAPRMRQPAEVEQAMGDAATAVITTITAMNTAVAALAQRIDSNFEQHPDAAIYHSMPALGPILSARVLGEFGDDPTRWPDPASRRSYAGSAPITRASGKKRVVLARSIRNRRLYDAAHWWAFAALSVSPGARAYYDQRRAAGDGHEAALRRLASKLIGQLHHCLEHRVPYNEAVAWARHQNQSNPASPAAA

SEQ ID NO: 498258 - protein, 344 aa, unidentified
MDITVLGVDLGKNVCSVVGLDRSGAIVMRRKVRRETLVRLAEKLSPCIIGMEACCGAHHLGRLFVAHGHDVRLMSPEYVRPYVKAQKNDDRDAEGIAEAATRPTMRFVELKSQDQLDMQTLHRSRDRLVGERTALINQLRAILLERGLVAPQGKRKLEQFLTVLMDEQGGAGLSPRMVLLVGDARAQWAELDRRIAAFDAEFVHWARENEDARRLTTIPGFGAIVASALVASVGRAESFDRGRDLSAWLGIVPQQFTTGGKPKLLGISKRGNKYLRKQLIHGARAALPYVAERDTPLGRWAKGLISRAHRNVAVVAFANKLARIAWAVLRRGERFAVKGSLVPA

SEQ ID NO: 498259 - protein, 412 aa, unidentified
MDEVVEFCAGLDVHRDTVVATVRFPQGRQRGSETKTFGTDTAEPVALGDWLISHRVTRVGLESTGVYWKPVFYLLEDRIEQLWLLNAQHLKNVPGRKTDVVDSAWIAQLVEHGLVRPSFVPSPPIRELRDFTRHRRVLSEERTRMVQRLEKVLQDAGIKLTSVASTVLSKSARAMLEAMLAGESDPVVLAELAKGRMRSKIPALTDALRGSFRVCHHGVLVRQILAHVDFLDAQLAEIDEQITTRVATFEPIIERVQTIPGVARKCAIGMIAEIGVDMSVFATPAHLASWAGICPGNNASGGKARSGRTRHGPVALKTVLTEAAQAAARTKNTYLGARYHAIRGRRGTFKAVGAIRHDILIAYWHVVTADVGYQDLGVDWVARRHSREHQIARLAKQIEKLGAAVEITMPAA

SEQ ID NO: 498260 - protein, 341 aa, unidentified
MVCRYIQLGIDLGKMTFHLVALRTAGNVLVRKKFTQKQLLAYTANMQTSLIGIEACSGAHFLGRALHKQGHDGRLIPAQFVKPFVKSNKNDFIDAEAIAEAVERKNMRFVPIKTDDQLDLQAIHRVRDRLIARRTAVINQLRAFLLERGLVFARTPTKLKASMADILENAESNLTSRIRNLISGLWSEWKLVEQQIEELNDELERISAADAGCTRIRKIPGIGPIVATAIVAAIGNGAAFRKGREFAAWLGVVPRQYSTGGKAKLFGISKRGQEYLRRILIHGARAAVLHIKRDRAPIGAWLDALDARAHKNVVIVAMANKLARIAWAVLSSGNEYRPVAT

SEQ ID NO: 498261 - protein, 393 aa, unidentified
MYLVGIDIGKLKHSFCLLEKETGEILVEPVFFKNNRDGFNALLSSFKHLPQKDILIGMEDTGHYNLALLKFLLDRNYQVALINPVATNLTRKMKGGISKNDKLDTLTICDVLASNQRVKSYRISKYSSFDLYEQKLLTREHHNLKEEENQLLNRLQKCIDVVFPEFNSLFKSKYGIVYMNILKEFGSADAIAHADIRTLRKCFDTGRGKHISLTAEELKEAARNSIGFPSSSEATQIKHLVARIELIKEQIAEIDKKIEEFSIQNNSPILSIPGISHFSGTSILAELGDIHNYSKPSQIIKFAGVAPLTYESSQFTAQHTAITKKGCKYLRKTLYQIITPVIQYNPVFRKFYLLKIAQGKGHRCAQGHCVRKLMRVIYHLLSTGTQFDPALLR

SEQ ID NO: 498262 - protein, 485 aa, unidentified
MSDRRLVGVDLGIASAHTVVVTDAEGTVVARRRCRPIRESLEAVEAAALAGAPEGTRLEVVVEPTGVAWLPVAVFFVRRGHLVYRVSSAKAAALRRFLSANAKTNSIDAETLARLPIVDPGGVRPLELPTGELAALDRRVRACERLTEAQTQRKIRLRELARQLYPSIDDVIGGEVSRCDVAVLERWGDPRRLAKVPHRRLVEVIAKASSGQKGADHAASWRQAAEDALDLYGDDPAVPFEALAAEIATECRLLRAIWAEHKGHAVAREDAYKAADPDGLARSLPGVAAIGGPLLVASMGRPGRFRDAAAFKSFTGLAPRASETGDTDRKGQPMSKAGPGRLRHQLVLSANTARRLDPQLAAVYYTQMVERGAHHTKALCVVATRLAERGWVTMARGEPYVIRDIDGRPVDPAEAKAIIAERYTVPEEIRRRRRSRKTKAKGKAPHHAGRRDTRGDLPQPSSSGPNGPRVKTPADASSRPNRPHS

SEQ ID NO: 498263 - protein, 367 aa, unidentified
MGWMAPLRHLGAKVLVGENQSADKEPSMNEITTVGLDLAKNVFQVHGVDAEGTTVLRKQLRRAQLLAFFSRLPRCLVGMEACATAHYWARELRALGHEVRLMPAQYVKAYVKRNKNDAADAEAICEAVVRPTMRFVPAKTAEQQAAVLLHRGRERLVRQRTMLVNALRGHLAEFGVIAPQGLRNVGRLIAIIRDEEDARLPGLARQVLQVLAVQIEQLEAAIAALEKQLMSWHKSNPVSQRLATIPGIGPIIATAIAAMVAEPSGFRSGREFAAWLGLVPRQNSTGGKNRLGGISKRGNQYLRRLLINGASANLLRSKATNADPWVIGLRRRRPSLVVAVALANKTARIAWAVMHRQENYQRMATAA

SEQ ID NO: 498264 - protein, 385 aa, unidentified
MPSDLSKSLVVLNQDSTLIAVIELSLSNWLVAGLVPGLRRQPRKKLDPDPDALLALLWRWRDEAIKAGRTIERITVAYEAGRDGFWLARWLHAHGIEAHVIHPNSIPVPREHRRAKSDRLDTELLLRGFLGWLRGEEKHCSMAQIPSIEEEDLKRPNREHQRLVNERTSLINRLKACLIRFGIRNFNPKLKKATEQLSRLLTPEGVALPANTLAELGRDLARLQLVKEQIKTIETERVKQLTQAAQGRHATTVRSLIRVVGLGVETADMLDSEMFCRHLRDRWAAARYGGLTGSPDESGAMRREQGLARAGNSRVRRGMIQFAWRFLRFQKDSPLAQWYWQKSQSARKDIRKLMIVALARKLLIALWRMATQGVIPEGIRLREAA

SEQ ID NO: 498265 - protein, 309 aa, unidentified
MKQESVYVGIDVAKAYLDVAWEKQFHRLPNNAQAIKQLMKWLKPIAGSVQVICEASGGYERRLVQALHGGGLRVSVVQATRVRQFARAAGILAKTDSIDAGLLCAFGQAIQPAATVPNQAQQERLREMESHRRHLLHLLGATQNRSTQLCDRSVVALNKRLIGQIQKQIERIDLLIKELIEQSVELSTKAQKLTAVTGVGPRTAALLLAHMPELGALNRREAAALAGLAPFNRDSGNMRGKRTIFGGRRAVRTGLYMAALVATRHNPILAAFYQRLRAAGKPPKLALTATMRKLLLALNSALKPQPLLA

SEQ ID NO: 498266 - protein, 339 aa, unidentified
MRREEFECIGVDVSKGTLDVALFLGKVDWNDGHIKVSNNESGYKELKKWLRLKNAEKSRLRICMEATGLYTHDFRSWLEKEGITYYVVDPKRMHHFAPPLSIKGIRQTKTDKADAFRIAIYCSLFHDSMEPSRLPSAAYFKLKRLLAERRQYVKQSVLYKQQLSDISIYDTVSSRMRKEKEVENLKDDIRQTDKEMKSIIDSDPAIKRNYDLLTSIIGVGIVVAVTTIVLTENFTTFTNPRKYASYIAIAPFPHESGTSVRGATRVSKQGFRQAKADLSVSVLNAITHDTELKEYWQRKKAEGKHTGVILNAIKFKIVLRMFAVVKRGKAYVNTKGYKG

SEQ ID NO: 498267 - protein, 397 aa, unidentified
MYIVGIDIAKRKHEAAVIDGEGAVIIKPFSFTNNCSGYNRLLAMLAKAKLPLDEVSFAMEATGHYWLALFTRLQKEGFRVQVINPVQTNSIRSFYIRQAKTDPRDALLIAEVIRFGHFSESTLHPENIYELRELCRGRHAIVSMQADVKRKVVALLDQVFPEYETAFTNLFSDTSMAILQTCPTPKELSEMPLEELCHLIEVSSHKRFRMAKAQELQALARNSFGFAMAGDVFSTMIRLYAKHLDFLKQQVREMDRKIAEIMETLDTPITTITGIGPTLGAYILSEIGDISRFSSAAKLAAYAGIDPTMRQSGEYNGVRNRMSKRGSPYLRHAIWLATSSAVLHDPALKLYFQKKRDEGKPYMASVGHACRKMVSIIYAVMRDNKAYTPYIPNEISA

SEQ ID NO: 498268 - protein, 426 aa, unidentified
MKCNQNQRILQVSESKIIIGIDVASEIHYARAFDHRGIEQAKVFRFTNNREGFEAFVKWIDAVKAKSGKKDTIIGLEPTGHYWFNLAQHIKSQSMKIVLVNPFAVKRSKELDDNNPTKNDRKDPKTIAMLVKDGRYMEPYIPEGVYAELRVAMNTRWQIVKNLNSIKNQIDRWLRIYFPEFLQVFADWEGVAALIALHEFSTPAQVMQKGVAGIVERWKQDKIRAVGIKRAERLVEEAKASTGITEGLISADIELKILLEDYDRKMAQYTALMDMVEKLMPQIPGVAEVLKIKGIGLVTAAGFIAEVGDISRFSHPKQIQKFAGLNLRENSSGKHKGKSGISKRGRKRLRAILFRAMMPLVAKNKEFKAIHEYYTTRQNNPLKKIQSLILLCCKLIRVMYAILAKAVRYEPEKLLSDMRKDELFAA

SEQ ID NO: 498269 - protein, 327 aa, unidentified
MFFLGIDVSKAKLNCALIGAEGDKRKTKVVPNTVAGIQALLGWCAKQGAQPEQLHVVLEPSGPYHEQAGTALHDAGARVSMINPAQARDFAGALAVRTKTDEIDSYVLARYGQALRPPLWQPAPLHARQLRALLARHEALAKDLQRELNRQEKAQFGQSPEPVTGSIDQGVAFLTEQIKRLERAINDHIDRHPDLKEDRDLLTSIPAVGPQTGNALLSIMHNRRIESPQSLAAYLGLAPVQRQSGTSLNGRSRLSKTGPARVRATLYMAAVVAVRHNPHIQALYARLLAAGKSKMAALGAAMRKLVHLCFGVLKNRTPYRSDYALAT

SEQ ID NO: 498270 - protein, 335 aa, unidentified
MHYLYYVGLDVSKETFDASLVAFEDANEMAHRKFANSRKGICSCLHWVEKRHGILLDDVIFCAEDVGSYISEMAVCASDRTLTFNFSLISPLVIKYSMGIARGKTDRVDARRIAEYAITHYRKIALYLPAEKELCQLRTWLILRAYLAKQRVAKLVLLEKLDYKEKFADVSIQRSMLQEEIAYAETHMKTIEREMKELIAADSNICRNYKLLTSIKGVGPITAIVMLCSTLNFTKITDLRKFACYCGLAPFEHSSGTSVRGGCHTSSMANRDIKVQLNRSALIAIRCDPQLKAYYERKVAEGKHKFSVLNAVRAKIAARCFAVVRRGTPYVALQI

SEQ ID NO: 498271 - protein, 369 aa, unidentified
MAKRSMFVGMDVHKESIDVSIAEEGRTGEVRHYGVIPGDLEAVTKLVRTLRAPTRRLRFVYEAGPCGFGIHRYLTAEGEDCVVVNPSSMPKRSGDRIKTDRRDGASLARLHRAGELTAIYIPTADDEALRDLVRAREDAVGLATQAKHRLKAFLLRQGRRYPGRAGWTQPYRRWLADLSFSRTPQHIALQEYRDTIDESERRVARLTTQLRDLVPGWRWAPVVDALQALRGVSFVTAVGLVVEVGDIRRFTHPRELTAYLGLVPSEHSSGPSVRRGGITKTGNPHARRLLAEAAWAYQGVPRLGRQMLYRQEALPKAVCDIAWKAQLRLTGRFRRLVARGKAKPKVATAIARELTGFIWAIAREVPPPA

SEQ ID NO: 498272 - protein, 389 aa, unidentified
MIYTGIDVAKLNHFASVISSDGKVLVEPFEFSNDFEGFRSLSLVLDQFDRDQLLIGLESTAHYGNNLVEFLFSKGYHFCVLNPIQTSAMRKTNIRNTKTDKVDAIVIAKTLMNGEHRLFERQDLDCIRLKSLGRSRQDLIKKRTTAKIKLTSYVDLAFPELQYLFHGVHHKAVYALLKEAQTPEQIASMHMTHLAHLLEVASHGHFKKDKAQDLRVLAQKSVGSNDSSISIQITQTIEQIELLDRQISDDEAQIETIVKAMGSVIMTIPGIRFIEAGIILGEIGNIHRFSDYSKLLAYAGLDPIIRQSGKFNASRTRMSKRGSRTLRYSLIYAAHNIVKNNETFRTYYELKRSQGRNHYAALGHCAGKLVRVLYKLLTEDIPFDPNILT

SEQ ID NO: 498273 - protein, 310 aa, unidentified
MDIITVGIDVSKERLDVAVHPSGEAFVVERNVAGLERLAVRLRELTPDIVALEATGGFETIAAAALAAAELPVVVVNPAQIRAFAKAIGQRAKTDPIDAAVIARFAAATRPEPRPLPDEATRLLADLMARRRQIVEMMAAERQRERRVTVVRLRKSIARLIKALQKELNSLDADIDDTVRGSPAWRDKEDLLASVPGIGPVIARTLLAELPELGRLGRRQIAALAGLAPFTRQSGQWRGRSFIGGGRTVVRTALFLGAMVAMRHNPVLKAFFTRLVTAGKPKMVALIAVARKLLTTLNAILRDNRPWQSA

SEQ ID NO: 498274 - protein, 324 aa, unidentified
MSDGMLGIDVSKNTLDVSLSSCNKVRARSFPNSSDGWRHLLDWLINQKVRRVHACLESTGRYSLGVACVLYEIGHVVSIVNPAQIRDFARTKLGRNKTDGVDASHIREYCELFKPQPWAPPSEAHRRLGELQTIRAGVVAGLTEWNNRKNSGMVDAAALSLAAATISHFTSQLGAVDEAIAKTIDNDSELRCKRDLLLSISGVGETLAGVVLTELPGPDVLRSSAEVVAYAGLNPRRHQSGTSIDRMTRISKIGNAVLRAALYMPAMSAMRYNPAIVALVTRLKSRGRLKPMQIVVAAMRKLLVLCFGVLKTGKRFEPALAMGC

SEQ ID NO: 498275 - protein, 322 aa, unidentified
MTMIPTERRFKRVIAFEVSKHSLVVHRLPEDEQVTIANEGRAIARLLARWQAGAPVLVVCEATGGYERHVLEAAEAAGLTLHRAHGSRVRAFARYLGHRAKTDPLDARLIARYGLETPGLRLYSPPPPEQAALRALRGRRDEIAVMARMEENRLEQAVHERVRRSLATQLAALTAELAALEREIAALIAADDRLARRAALMQSVKGIGPKTAAAILAYLPELGTLSRGGAAALVGLAPYADDSGRQRGVRHVAGGRADARKSLYMAAVVAMTHNPAIRDWASSLRQRGKPPKLVITAVMRKLIVVLNAILREEKPCRLNQQP

SEQ ID NO: 498276 - protein, 359 aa, unidentified
MEYGAIDLHKKQSQIRILTEGGDVIEDRRIVTARERFTAVFGLRRPMRILVEASTESEWVARHLETLGHEVIVADPNYLPMYGDRSRRVKTDRRDVAALADACRRAVYRAAYRRSDQQRAVQAQLRVRQGLVNTRTRAISLARSLMRASGHHIRSGESASFLQRLAACEVPNDLTAILAPLRGVIEVVNDELASADTRFAALVENDPVIKRLTTLPGIGPLTASAFVAALDDVNRFRGAKAASQVTSYLGLVPREFSSGERQHRGHLVRSAQPQVQTLLVQAAWRVRRSTRSETAALRDWADRVSRRRGKNIATVALARRLARILFAMWRDEVDYQPRRIHANRQSQAATTEPPVARAV

SEQ ID NO: 498277 - protein, 338 aa, unidentified
MKRYHGVDLHRNCFTVCTRREDGHEEMREWSIHHLAGFAKTVKATDEVAVEATGNTRLFCEALKERRCRVVVVNPHQFQVVSRSVKKTDEHDAKVLAEFLSKGLLPEVRMKDEVHARVASLAQTRDKLVKLRTTLKNKVNNLLAARGILVRKESLASEKGLTEALAAPVSELERLELEVLVGEIRHLNESIKKMETLLREQGPKLPGWENLTSIKGIGDTGATVLLSTIGNIEDFADEGKLAAYFGIVPRVSNSNETQHSGRITKQGCKLGRTVLVQCAMIAARYSPYLQAFYRRIAATRGTGKAIIALARKFLGIIYKTLKNKWIFKDFPQFVLANG

SEQ ID NO: 498278 - protein, 352 aa, unidentified
MTVTIVETPAQTRAITGGVDTHAEVHVAAALDPVGGLLGVQEFPAAPAGYAQLLSWLAGFGAVCLVGVEGTGSYGAGLARHLTAAGVGVVEVDRADRQDRRRAGMSDPLDAVSAARAAQSGRAAGAPKGRDGAVEAIRALMVAKRSARAGRTQTINQARALILTGPDDLRIRFGEHPPAGLVAELAALRPRPGAPVGYPTRIALRELGRRAVFLDRQLQRLDALIVPLVAGRAPGLLALYGIGPDTAAMLLIAAGDHPERLRSEAAWAHLCATAPIPASSGKVTRHRLNPGGDRQANHALWRIVITRMSSHPATRAYVARRAKEGLSKKEIIRCLKRYVAREVYPHLRAHAG

SEQ ID NO: 498279 - protein, 331 aa, unidentified
MNYSHFVGLDVGKKTFDASLMSAAEKELSHKSFDNTPEGIQSLLDWIAGYHLSLSKLLFCAENMGSYVTELSVSSVSMGFSLALVCPLTIKKSIGLQRGKNDRIDAKRIANYAVLHYRKLELYKLPNKDLVRLRGWIIIRDNLVKQKVSSIKLLETFSQMAKLADVTESISFLEEQLKSIKEKILQVEEAMEQLIAASSSLCTNYLLLRSIKGIGIINAIVLLCVTDNFQRFDTPRKFACYCGVAPFEHTSGISIRGKTQTSSLANKEVKVYLTRAAITAISWDPQMKAYYKRKIAEGKHKASVINAVRAKIIARSFAVIRRQTPFVTLAV

SEQ ID NO: 498280 - protein, 402 aa, unidentified
MNPVIGLDISKEESHGQAFLERGKPYKGTFHFAHTRDGLEELLQAIQEVEHASRLRPLLILEATGHYQCPVVQFLEEHRYLYIVINPLISNRLRKSNLRKVKTDAADAYLLGELFYKEEFEPFKKRGVQLLNLRYLTRQYESLSKMCVQTKLQFQAVLDQVFPAYKGVFGAMYSGVSLRFLSEFPTSYSVLQTDEETLKAKIKDMLSTKRGRSKDWINERVKRLLDAAKQNPFEQTLYASHLINLKVLITLILQYQEHLAELEQNINALAEEIEEYDLIQSIPGIGHKIAATILSEVGEIDRFDHPKKLVAFAGIDPSVFASGKFTATRNRITKRGSRQLRYALVMAVQCGLIRSRNMRIKEFYDRKRAEGKPHKVALVACANKLVHWIHAILKSKKAFRQA

SEQ ID NO: 498281 - protein, 452 aa, unidentified
MPARKDKLMLFNKLFQMPDSSPYLSIGFDVGADFSWMSIALPNGSFWGRPFKVIHHDPLSREMAVAKIKEAQELYSLKSRCFLESTGIYHIPLLCFLRDKGLDCSVINPIITKNSTNINIRKLHNDKFDSKKAALVGLNASLKTSILPDEDIADLRNLVRDYYYFKDLQSAVVLKLNAELKVSFPAYLKVFSKITTQSSLKLLAAYPLAKDMLAAPKGELVAIIRSTARFGEAYALSKYEAILEAAKDAAVFGRALPSNAVRIRLYIESYQTYQKHLDDILLALHEAVDKLQDTPVYDRICLLQSLRGVGFLSAVVLMAEMGDFDLFSSPKKLYAYFGLDPAVKQSGKLNGDKVHMSKRGSSLARRVLHMVALNNLKVEKGTKAPVNPVVYNYYTGKCASKKKNVAVGAVMHKICNIIFAMLRDNKPFEMIPPEVHCKQYALDHPASVTSAA

SEQ ID NO: 498282 - protein, 340 aa, unidentified
MIGLDTAKSVFQVHAVDPSGKVAMKRKLQRGELIPFFEKHEACTVVLEACGAAHHWARVLTGLGHDVKLIAPEAVRPFVKKGRKNDAADAAAICEAASRPSVKFVSAKSLEQQSVLTLHSARCLLVKQQTMLANALRGLATEFGLTVPKGIGKLEELAALVNADEAFPETARHVLTGLFDHCRATAASIETVEAEIVVQARQDETARRLATIPGIGPITASLIAATVGDIGMFKSARHFAAWLGLVPRQYSTGGRNRLGRITKTGNREIRRLLVLGATSMVYRAPQWKSAAGLWTRAVLERRPVRLVTVALANKMARIAWALMTRKEVYHAKGRAAAAAA

SEQ ID NO: 498283 - protein, 369 aa, unidentified
MYVGLDVHKESITVAYAINSEPVELMGKIGTSPTDIQNLCKRLRSKSSQVSIVYEAGPCGYGLYRRLVKSGFDCMVCAPSLIPKKPGERVKTDRRDAIRLVRSLRAGDLSAVYVPGIEDEAFRDLARAWASARDDLRHARQRLKSFLLVHGVHYVGRADWGPAHRRWLSKYSFESPWRQLAFDEHRRTIEDRQAQCERLESALKEAVTEWRLYPVVEALQAMRGIQFITAVGLISELGDLTRFEHPRQLMSWFGITPSEYSSGGSRHQGSITKAGNSYARKLLVEAAWSYRHPARISPAIQKRQENLPRPVIDRAWDAQLRLCKRYRKLQAKGKNVNITIVAVARELAGFIWDMGRIAMSVAQQPQCHK

SEQ ID NO: 498284 - protein, 401 aa, unidentified
MKRLSGGIDVGSESHHIVILDEEDNVLYNQKVAHKLNEFAESTKLFKKIEKKEGGKISFALEGKNGYSNPLDRILLDKGFTLYNVDNLKLKRFREAFAGEWRDDHRDSLMLSKMLKLKDYINSKREKVFIKIEKPSLVTESLKLLSRHQQTLIDEKVRLISRLGKKLLEVCPQILELSKLKNKKIIAILAKYPDFSKYKRITLKSLLKIKGIGKRQAPFLLKRLNHIEYMSGLTDIYKTIILSFTKRILVLQKEVEDIDKKLDEIGEKSKSVKHLKTIPGVATKLSSRLIGEIGDINRFPSEKQLAVYCGVACVNNDSGKVTKAKAVYKANKICKQTLITMAGGSIRFSFQCKDYYLKKRAEGKAHNHALRCMARQLIKVIYKMLTEDRNYMIRKELKKVA

SEQ ID NO: 498285 - protein, 324 aa, unidentified
MTEVVLGIDIAKDSFAVCLLSPGKSLCGSFANDAKGFAVLGRWLSKHKTGLVHACMEATGRYWEGLAFYLYQAGHPVSVVNPARIHSYAKSQLSRNKTDALDAELIARFCQREEPSLWTPPPQEVRELQAMTRHLDALLANHTQESNRLQSGLPSAAVKRLIEEHLAFLDAQITALKQRIETHIDSHPALKDKRDLLSTIKGIGDATAARLLGDNIQSFSSAKALAAYAGLSPRLDQSGTSVHRQARLSKTGSGSLRRALYWPAITAMRFNPIIRSLCQRLRERGKPEMVIIAAAMRKLLCLALGVLKSGVPFQADYAPAPSPA

SEQ ID NO: 498286 - protein, 408 aa, unidentified
MQVLYPRCAGLDVHKDVVVARVRCVCEPQHDEVRSFATTTASLLELNEWLTSHGVSHVAMEATGVYWKPVWHLLEEQFELVLANAQHIRNVPGRKTDVNDATWIADLLAHGLIRSSFVPPAPIQELRDLTRTRKQLVREISQHSSRIQKILEDANLKLGSVLSNVLGKSGRAILRALIAGETNPETLADLAEGVARKKRAELIEALHGRIRDHHRGLLKVHLELVAALEQALADIDATVGKTLAPIRDSARLLTTLPGVSDLTAQVMVAEIGVDMSRFPTAAHLISWTGLCPRSDESAGKRRSTRLRKGAPWLKTALVTAAWAAVRVKDSYLQAQFHRLRSRRGAKKAILAVAASMLTAAYHMLKHGIPYRDLGADHFSSRDRSKAILRLVRRLNDLGCQVQLTPQAA

SEQ ID NO: 498287 - protein, 347 aa, unidentified
MRFYTNQHQFYCGIDLHARSMYVCIVSQDGEILLHRNMKAAPEPFLKAVAPYRDGLVVAVECIFTWYWLADLCADEGIPFVLGHALYMKAIHGGKAKNDKIDSQKIAALLRGGMLSQAYVYPAQMRATRDLLRRRTHLMRKRAELLSHVQNTNSQYNLPEIGKKIAYKANRGGVAERFPEPAVQKTIAVDLSLITYYDELLKELELFILKAAKHHDANTLYLLQTVPGIGKVLSLVLLYEIHQIERFPSVQEFASYCRLVKCSKESGGKRLGTSGKKIGNAHLKWAFSEAATLFLRNNPQGQKLLARLEKTHDKGKALSLLAHKLGRAVYFMLKRKTAFDMNLFLRS

SEQ ID NO: 498288 - protein, 341 aa, unidentified
MKNKSFIGIDISKNVIDASIFCEGTPIKDFPHAVFNNSRKGFGEMCTWLKKNHVVLSNCLFGMEFTGSYSMELEKFLNARNYQFCMLSTHVVKHYPMGPKDKSDKIDSAKIADFLYRYNGTECVKPYKMPDKTMQRLKALMNERKFLVEQRTSFMNRRQLCTTKEDAQLYDGYIKKLCHDIENIELEEQKLLATDDSLLATYKNLLTIPGVGFVNAINVIVITRNFTAFETARQYASYVGVAPHSHTSGTSVRWRPRPSARCDGQAKADLSMAATVAVQYDAELQSFYNRKLGGKQDSDTKRKALNAVKFKLVLRMFATGKQNRKWEPLDSKSSNEKLAIS

SEQ ID NO: 498289 - protein, 403 aa, unidentified
MQHHKFAVGGIAMICVGIDVAKDKHDCFILNSEGVVLADVFTIPNNLDGFNTLLDKLRVCSTPQDSIKVGLEATGHYSYNILGFLLDNGLATYVLNPLRTNLYRKSLSLRKTKTDRVDARTIAAMLLSDAGLKPYTDTVYHNEELKSLTRYRFDKVKERAKLKQSVSRLVCILFPELEKLVPTLHMASVYALLSEFPGAQQIASAHLTRLKTLLADASRGRYGRDMAVEIRDAARCSIGSRMPAKALELQHTIRLIRELDAEIEEIETAIQAIMEELHSPITTIPGIGYRMGAMVLAEVGDFSRFDSPDKLLAYAGMSPSTYQSGQLKNCYPHMEKRGSRYLRYALYNAAKYVCHWDPTFAAYLAKKRAEGKHYNVALSHAAKKLIRLIFALEKSRQPYCPAA

SEQ ID NO: 498290 - protein, 350 aa, unidentified
MSSNSAAATTATIGIDLGKNTFHLVGLDRRGAIVLQLKLSRGQLERRLANVPRCLIGMEACSGAHHIGRRLTELGHDVRLIPAQYVKPFLKGHKNDYRDAEAIAEAVQRPTMRFVAIKTPEQMDLLALHRVRSRLVGQRTGLINQIRGFLIERGITVRQGVLPLRKALPDILSSNADVLSPRIVGLIADLAQDWRRLDERIATVSAEIEALARQDDGCQRLMTVPGVGPIISSAVVAAIGNGAGFKQGRDFGAWLGLVPKQESTGDRTILGKISKRGNKYLRTLFVQAAHVVLARRPGTAKRGLWPWIEQASRRLHRNMVAIALANKLARIAWAVLARGRAYEPKLPAHA

SEQ ID NO: 498291 - protein, 350 aa, unidentified
MSQTLKTSVAVIGIDIGKNSFHLVGQDRRGAIVLRQKWSRGQVETRLANLPPCLIGMEACVGAHHLSRKLQILGHDARLMPAKYVRPYSNGQKNDFRDAEAIAEAVQRPTMKFVATKTADQLDLQALHRVRERLVSQRTGIINQIRAFLLERGIAVRQGLRFLRAELPGILATRTDVLSPRMVRIIEELAADWRHLDERIEGLSSEIERLARQDKGCERLMTVPGIGPIISSAMVAAIGTGDAFSKGRDFGAWLGLVPKQISTGDRTILGSISRRGNRYLRSLFVQAAWVVLVKIGPKRWDRYGLKSWIETARKRLHHNVLAIALANKLARIAWAVLYKGRAFECVRTDR

SEQ ID NO: 498292 - protein, 359 aa, unidentified
MAVIEGQERRIVGGVDTHKDLHVAAVVDEQDRVLGTRSFATTRQGYRQMLAWMRSFGELRRIGIESTGSYGAGLLRFMQQAKVPVLEVTTPDNQDRRRRGKNDDLDAQNAAHAAFAGQRTVTPRSRDGMIESLRILMACRKTAVSARRVALQMIQNTIVCAPDGLRDQLRSLTRMQLVRTVASWRPDLTAYRDLDSAYRIGLKSLARRYLELHDEIADLDAMIAAIVDELAPNLVARNSIGHVGAAQLLLTAGDNPERLRSESSFASLCGVSPVPASSGKTVRHRLNRGGDRAANSALHIIAIGRLRTDQKTKDYVARRIAEGHSKLDAIRALKRYLAREVFTLITQRRREINATQIAD

SEQ ID NO: 498293 - protein, 348 aa, unidentified
MRGAVQMQVSTIGLDIAKNVFQVHGIDANEKVVVRKQLRRSQVLAFFKALPPCLIGMEACGTAHYWARELTKLGHTVRLMPAKDVKAYIKRNKNDAADAEAICEAVRRPTMRFVQVKSAEQQSQLMLHRTRDLLMRQRTQVINALRAHMAELGITAAQGTAGLKELLKIIAGDADARLPVDAHASLVVLAAELQAMQTLIGSLEKRIMAQHRTSDESKRVATIPGIAVIGATAITATVTDPKVFRSGRDFAAWIGLVPRQDSTGGKQKLGPISKQGDRYLRRILVVGAHAVLKQAKQKPEKYPWLTQLLARKPFKVVAVALANKMARTAWALLAHGGTYRAPRLAAAA

SEQ ID NO: 498294 - protein, 338 aa, unidentified
MFFIGIDPHKTSHTAAVLDAHEHLVSEVRVGADRSQRARLMAFAAGFEPRCWAIEGATGTGALLAQQLVAAGEIVLDVPPALSARVRLLDNARSDKTDAHDARSAAVVALRHSKLRTVGLEDHSALLRLLAKRHHDLVAHRTRAVCRLHTVLCLLVAGGLPKGLSAARAASELRRIRPTDQVGIERRRLAGELLAEVRRADADLIELKARIAVAVTASSTTVTDVVGVGPIMAAYLIGYSGDVRRFPTAGHYARYNATAPIEASSGPNARHRLNPRGNRQLNHALHIVAVTQVRNDTPGRAYYLRKQAEGKTRKEAMRALKRRISDAVYRQLLTDTPR

SEQ ID NO: 498295 - protein, 374 aa, unidentified
MEKFSTFIGMDVHKETIAVAIAGEEGVPRYYGEIMNTPEAIAKLVKKVAGKKDRKAFCYEAGPCGYGVYRQLKGMGYRCDVVAPSLIPKKAGDRVKTDRRDAVMLTRLYRAGELTAVWVPELEQEAIRDLTRAREDIKGMERHARQRLSGFLLRHNKKYSGKSKWTPGYFQWLEAVRFESPIQQIVFHEYVDMVKQLQERVAAIEEEIRKALIGWSLGPVVEASMSLRGVNLVTAMTVVAEIGDMSRFERPRQLMAHIGLVPSEHSSGSRQKRGGITKTGNGHVRRVLTEASWSYRLPARKTAHLQRKAEKTTEAVQAIAWKAQKRLCKRYWYLIHKGKLTVQTCTAIARELVGFIWAIAREVMGNNNVCKVAA

SEQ ID NO: 498296 - protein, 295 aa, unidentified
MQAITTIGLDIAKSVFQIHGVDAAGNVIVRRKLKRRYVLSFFQKLPACRVGIEACASSHHWSRELQALGHTVRLMPPAYVRPYVKRQKNDAADAEAICEAVTRANMRFVATKTFEQQSCLMLHRTRHLFIRQQTAVINAIRAHLAEFGIVAPVGRNGLEQLLDVAANASDNRLPEIARACVLALGAQLWTLKVQILNFDRQIMAWHRSNEASKRLDDIPGVGPALATALVASIADPKAFRSGRDFSAWIGLVPKQHSSGGKDKLGSISKQGDRYLRSLFTAGALAHLECGLLTGT

SEQ ID NO: 498297 - protein, 426 aa, unidentified
MNTTTKFAATIGLDWADQKHDLWICPADGSKAKHVRLEQTPEALHAWVAKMRERFGNRPIALAVETSRGPVISALVAYDFIVLFPVNPKALKDYRSAFAVSGAKDDRTDAQLLEELVRLHPDKLRALEPDTELTRRLAGLVENRRRLVDQRTRLVNQTHALLKTYYPLAQTLLADQMNSAMAAAFLLRWPELEALQKASPEVLRAFFYKHHSRSAKKTEQRLQAIQQAQALTTDPALIEPARDLVLAFAGMLRPLHQAIARFDKQIEQAMDQHPDAPIFRSFPGAGPVLAPRLLVAFGSNRDRFDQAADVAQFYGIAPVVVQSGNSKQVHFRHRCPKFGRQTFHENAGCALKKEPWAKCYYNQHKQRNKGKHHQACRALAYKLVRIYFACWKQRQTYDPHRYLKALETHASPLHPKLQNLTASPCE

SEQ ID NO: 498298 - protein, 367 aa, unidentified
MEKSSTVFVGMDVHKESIDITVAEPGGEVRRLGQIGGDRGSLLKMVRRQQSKGRKSVFVYEAGPCGFWIYREITALGHACMVVSPSLIPRRAGDHVKTDRRDSERLASLARAGELEAIHVPDIRDEAIRDLVRGRDDAVIAQRRVRQQLKALLLRNDIRYVGRTSWTGAHRRWLSELKLPEPAQRIVFEEYVDAIVVATARIERLTRAIETEMAGWRFAPVVGALQAMRGIQFVHAVTLIAELGDLTRFASARQLMGYLGLVPREDSSGEHRHQGSITKAGNSYARRALIEAAWAYRHPARVTRIIATRQTGIPKAVCDIAWRAQLRLSAKYRRMNARHVNHNKIVVALARELSGFVWAIGQSVKPQ

SEQ ID NO: 498299 - protein, 400 aa, unidentified
MLSIGIDVSKGKSTVCGMKPRGEIVYTPFEVQHTREGMSELVSLLRGSGEEVRVVLESTGSYHCPVVAALLENGIFVSVVNSLRMKRFCSQSIRRVKTDQIDAMQIALYGLAYWQELQPTRLPENTYRELQLLARQYYQMTSMLIKAKVDFNAICDQVLPGMQELMSDHAGRHKLSDFVLRYRHTTHILKMGETRFRKDYCKWAEKKGYRNHERMAALIFATAQNGIPVLPNAPSTQIVITEAIRVLHTVEASRDAILTQMQALAKTLPEYSLVREMPCIGDTLAPRLIAEIGDVRRFHSKRALIAYAGIDAPPYQSGKFCANNRHISKRGNRYLRKTGYEVMQSYVMHKPANDPIFTFIEKKRGEGKSGKLAMVAGLNKFLRVYYGKVTELYRSLPAIE

SEQ ID NO: 498300 - protein, 402 aa, unidentified
MDGIGRYAGIDWAKDAHAVCIIDGQGSALARFEVEHSAAGLRELARRLEGVEGVAIERPDGPVIDALLEAGLPVVVIASRHVKALRTRHGLAGNKDDRADAFILADALRTDGQRLRPLRPDAPATVALRATVRARKDLVRHRVALVQQLEAHLALVFPGAIGLFADLSADIARAFLLRFPSAERAAWLSPRRFDHWLAAQGYCGRRTGTELHARLEAAPRGMTGESAEAMAAVTLALVRAIGAIREQVDGLERHIAELLQAHPDGHIFTSLPRAGRVRAAALLVEVGDCRERFPTPESLACLAGATPSTRQSGQHRAVTFRFSCDKKLRDALIDFADDSRQSNLWAADLYRRARARGTTHPHAVRIIARAWVDVIWRCWQDGVPYDPARHHALQRLLLAPAA

SEQ ID NO: 498301 - protein, 337 aa, unidentified
MKRYLGVDLHRTQFVVCTRWENGEQEIRQWRIGELPKFVEQLCTEDQIAVEAMGTTARFYDAVAGRVARVVVVNPHQFKVISESVKKTDRKDAQALALYLEKDLLPEVRMKPKQNRELMHLAETRDLLVKQRSALKGKINNLLAMQGIELKREALSSKIALDRVLAQPVSGMVQLELRILVEQIRSLSESIAELDERLEEEGQQLPGYENLTSIKGIGSLSATVLLTVIGKISDFADENKLAAYLGLVPRIANSNESERSGRITKQGNKLARTALVQCGLVAKRYSPYLNRFYDRIKQRRGGGKAKIALARKLVKIVYDTLKNQWVFEDFPSFTLAA

SEQ ID NO: 498302 - protein, 345 aa, unidentified
MKLTTVSVDLAKALFQLHAIDEQGKTALRKQLKREQVVPFFATLEPCLVGMEACGGAHYWARKLQALGHTVKLMAPKFVKPYVKSNKSDVADAEAICEAVTRPNMRFVPIKTVEQQAILAVHRARQGFVKARTAQANSIRGLLGEFGVVLPQGIRHITERLPGILEDRDNALPRSLRQLMQRLSEHFKELDRQVVELEREIQQWHRSNEDSCRLAEIPGVGPLTATALVASVGDAKNFTNGRQMAAWLGLVPRQHSSGGKPTLLGISKRGDGYLRTLLVHGARSVVRVVESKTDPSADWLKGLLARRHTNVAVVAQANKTVRIAWALLAHGSKFRADYTPDVTGA

SEQ ID NO: 498303 - protein, 414 aa, unidentified
MQHAPKDTLPTAGPGHRTAGVDWARDDHAVAIVDAYGRVVERLTVAHTAAGIRDLVRRLAKRGTNEVAIERPDGPVVEALLEDGLTVVVISPNQLKHLRSRYGSAGNKDDRFDAFVLADTLRTDRARLRPLVPDSPPTMALRAACRARKDLVGHRIALANQLRAHLQRAFPGAVGLFADIDSPINLRFLARFDCQERADWLSPKRLAAWLASVGYCGRVAPATLHARLAAAPRGAIGEEGAAQAHVTRALLAALTTLVEQIKALAEQIDEQLALHADAHVFTSLPRAGTVRAARLLAEIGDCRARFPTPESLACLAGVAPSTRQSGKHRAVGFRWAADKQLRDAICDFAGDSRRANPWAADLYRRAIARGHDHPHAVRILARAWLFVIWHCWQDGTPYDPAQHRALQALLRPAA

SEQ ID NO: 498304 - protein, 317 aa, unidentified
MIPAPHFVGIDVAKANLDVAERPETAPMRLPNDELGITALVERLTAAPPTLIVLEATGGLEGPVVAALTAAGLAVAVVNPRQVRDFAKAVGHLAKTDALDAQVLAHFAEAIRPTPRPLPEAERQALAALLTRRRQIVAMLVAEQQRLGTTAMALRPRIEAHIAWLRQERDDLDRELKHQVRQSPAWRADDDLLQSVPGVGPVLATTLIADLPELGRLDRKQIAALVGVAPFTCESGILRGRRIIWGGRAQVRAALWMGTLVAVQHNPVIRAVYARLLAAGKPKKVALTACMHKLLTILNALLRQRTAWNPGPPAISA

SEQ ID NO: 498305 - protein, 329 aa, unidentified
MKLQHIIGADLSKKSIDLVCHLFKSHFQIENSIAGFKNLMQWMRQQKISPSETMIVMEHTGLYSFCFENFLHKHQITFCKVNALAIKRSIGLVRGKTDKLDAARIAAYGYEKKDKLAIDVPASDALKRLQMLHSTRARLVRQRAALTCAVKEYRHIGICEKDIIMQTQLRLIKNFDKEIEKLMAEIESIINEQEPLKQNFHLLQSIKGVGKILAVATIIKTSNFTRFANARKFACFCGTAPFEHSSGTSIKRKSRVSHLADKQMKSLLDLSAKSAIQYDKELREYYLKRTQSGKSKMSTINVVRNKILYRMFAVIKRQTPFLENYLQAA

SEQ ID NO: 498306 - protein, 401 aa, unidentified
MVSDFRKGRYNLMKIYVGIDIAKLNHFAAAISSDGEIIIEPFKFTNDADGFQLLVSKLESFDKNSLIIGLESTAHYGDNLVRYLVTELYQVCVLNPIKTCQMRKNNVRKTKTDKVDTYVIAKTLMMQDNLRFVSFFDLDMMDLKALGRFRQKTIKQRTRLKIQLTTYVDQVFPEIQYFFKSGLHQHAVYALLKEAPSPKEIASMHMTHLANLLKVNSHGHFTKEQAKELRVLAQKSVGANDSAISIQITQTIQQIELLDSQLEKIEAEMTDIMKFNDSVIMTIPGIGYINGGMILGEIGDIHRFSNPNKLLAFAGLDPSVYQSGNFQAKTTRMSKRGSRVLRYALVNAAWNVVRNNATFKAYYDAKRAEGRSHYNALGHCSGKLVRVIWKMLTDEVEFNLE

SEQ ID NO: 498307 - protein, 360 aa, unidentified
MSAAPAPEVETSNNPDVVVGVDTHKHTHMAVALSANGGWLGSLKLEAKRSGYQELMRWAAEFGSRPMFAVEGTGCYGAGLCRALQTAELEVVEVNRPDRATRRRLGKDDTIDAEAAARSYISGKATVIPKAGNDLVEMIRMLKVVKDSASGNRTAALNQLHAIVVTAPAALRERLQRLKGKELVECCSGLRSGEISTPLAAAKLALRNLARRIQQLDQELKDTVAQLDRLTMQHCPELRNTYGVGVDISATLVVAVGDNQERMKSEASFAALCGVNPLPASSGKVVRHRLNRSGNRQANCALHRIVVCRLRWHQQTKEYAERRMAEGRTIKEIIRCLKRFVAREMFGVLRGGPAIRTAAA

SEQ ID NO: 498308 - protein, 379 aa, unidentified
MSSSTAAASIIYLGMDVHKDSITIAVLPMGAKNPTRLERLPNDLPKLKRFLDRVARDGELRVCYEASGAGYVLHRALREWGYACDVIAPSLIPKRPGVQRKHDKRDAADLARYYRAGELTPVRIPTEAEERIRDVVRCRETFQREILKSRHYILKFLVRRGFVYRDGTNWCTPHLRWLEHLTSEASPLAPADRLVFREYHALLAYKRQRRDELDRQIEALALTPAVAAAVARLQCFRGIALQGAMVLATEIVDWRRFERPGQLAAYLGLVAREDSSGPRERKGSITKAGNSHCRHVLVQAAWCYHYRPNLSAEIRRRQQGQPPAVVAHAWKAQQRLHQRYQHLAYRKQPQIAVVAVARELVGFLWAVMRDLPTPEVTAA

SEQ ID NO: 498309 - protein, 339 aa, unidentified
MHATIIGLDLAKNVFQLHAEDRSGTVLWKRRLRREELEAFLRKQPPALIGMEACGSAHHWARVFTAMGHEVRLMHAKYVKAYVKRGKSDVRDAEAICEAVQRSSMRFVPIKSVEQQIDRSLERARDLLVKQRTQLMNATRALLAELGIVARAGLRGFTTLADKIAAGDAVIPRPSLTALKPLVEQWRALQASIDQLEARLVARAHSDERMRRLMKIPGVGPLTAHAVVTAIGDPKRFSTGRDFAAWAGLTPLTDSSAEKTRIGHISRQGDHSLRRLMVLGAVNMARHARAKPCEANAWLNGVIARRPVKVAMVAQAAKTARIAWALLCSGENYRGRTAA

SEQ ID NO: 498310 - protein, 340 aa, unidentified
MQAPRHIGIDLHRNQFTCCVRLENGRNYLTDWKLEDLPRFVKKLRPEDEIAVEVTGNTRLFHDAVAPYVKRVVAVDPNQFKVISHSVKKTDPNDARNLALYLQKDLLPEVRMKDKTQAQLASLTQTRDTLVKLRTALKNKINNILSAHGINLEKEALSSEKKLNEVLSMRFDPMVKIELEVIVEEIRSLNQRVAKLEKTIADEGSKLEGHKNLTSIKGIGPLTSSILLSVIGDINDFADEGKLAAYFGIVPRVSNSNETVHTGRITKRGSKLGRTALVQCALIAQRYSPYLKRYYERMKANKGAGKAIIALARKLLGIIYRTLKNNWVFEDFPNFVLAEA

SEQ ID NO: 498311 - protein, 411 aa, unidentified
MRGWRRWISARPNWCAACEVPDEDRPQRRLQEVETYSTMTRPLLGLAGRLRCLGVTRVAMEATSDYRKPVFYLLEAHGFQAWLDGARDVRHLPGRPKTGKLDAVWLAKIAERQMIRPGFVPPPQIRRLRDLTRYRAGLVAARTAEKQRAEKLPVDAQIKLSVVVSGIFGVQGRQMLAALIRGQRDPKALAQLARGVMRRKITTLQEAFTGYFTDHHAFPLATMLARVDAIDTDLATLDATIEQMAAPFTAAVQRLAEIPGINATAARAILAETGTDMDRFPTAGHLVSWAKFAPGVRESAGKKKGKGTTGHGNRYLARVLGNAAASAGRTDTFPGERYRRIARRRGSKKAVVATGRSMPVIIWHLLADPGTRHTDLGSDFYDTRINPERRNRNHIRQLEAPGYQVTLEPAA

SEQ ID NO: 498312 - protein, 366 aa, unidentified
MLQKAELSGTLIQRTTQGGSSETMYYIGLDVHKRTISYCVKDAAGKIHQEGKIGSSRRELDGWIKTLPQPRMMAMEATIFTGWIYDYLLPHAEKVKVAHPLMLRAIAVAKRKNDKMDARKIADCLRCDLLPECHMASTEIRDRRRTLRYRGLLVKEMVQMKNRVSGLLLEKGVPHTKQRLHKVGYFAELMSSYEEIDQSIRPLLKLSREHIVRAQKLDYALVSSLERDPLLTERLKRLRTVPGVGPITALTWALEIGDVSRFRSIKQAISYCGLCGAERSSADKVTRMPISKQRNKHIQHVLIEAAKLAPRQCPELALIYEKEMQRGNRNRATLAVARKMVAWLLAVERRKQDFVPAEELIGTTAA

SEQ ID NO: 498313 - protein, 373 aa, unidentified
MPKYSTAFGMDVHLRSTTVCALDADTGEAVTRRFPGNPWGEIAGWMDGFPGPSLAAYESGYLGFAPQRELAGLGVECVVAAVSKIPRSAADSASKNDRNDAARMAKAILAHDISPVWIPSPEVEGIRDLAGAYDGATARLATAKQRLLAFLAKRGFVYGGTTPAGNPRKYWTYDFLRWLDKVRPEDDGGVRTLAALRNEVEAAAEARADLLSEYRAAVDASPIAAEVAALQSIKGCAFALAAAFSAEVGDFTRFRSGRQVTAYFGLAPSQRSSGDSVRLGGISGAGNALVRKLAVEGSWCYAAARHQPKLMPRDTGVPLEIRMHGRKGSERLLRRRGEMLERGMPQAKANAATAAELVRWLWALGAMCREAGE

SEQ ID NO: 498314 - protein, 359 aa, unidentified
MRTQSNKVNFNGENIYVGIDVHLKSWAVTIYTEHLHHKTFSQPPVPLLLWKYLDENFPGGNYYSAYEAGFCGFHIHFELEKLNIKNIVVNPADIPTSQKEHVNKNDSCDSKKIARSLRAKELTGIHIPLIETLENRSFVRSREMLVKDLVRFKQRIKSFLYFYGIAYPPEFEKSSCHWSKRFLKWLKEISLNTQNGNEALSLLIREVEQQRLLLLEVNKKIHSLAISDKYIKEMELIRSVPGIGLITGLTFLLEIENIERFSNTDKLACFVGIIPTCHSSGETSNNGEMTFRGQIHLKKGLIESAWVASRIDSALTHSFIQLCKRMEPNKAIIRIARKLLNRIYYTLKKKHKYEYGMVK

SEQ ID NO: 498315 - protein, 418 aa, unidentified
MDEEDRRWFLGVDWGSAEHWARLTDGGGHQLGQKRFVHSGEGLAQLADWVLSLSGAEPHEIWAAIEVPHGPVVESLMERGLRVFAINPKQVDRFRDRFSPAGAKDDRRDTVVLSDSLRTDTKAFRELKPTPAQLIELREWSRMRDDLTTERSRLANQLREQLWRYYPQALDLAQGDLERDWFIELLTLVPTPAAAKRLRKEPLARLIKRHRLRRIDADGALKILRQTQISSAPGAVEAASAHVGLILPRLALINKQLRACERRLDQLTKAFAQEQAAGQPSEQRDVAILRSSPGIGRVVLGTLLAEAWEPLQRRDYHALRCFAGTAPVTKASGKSRIVRRRRAANTRLSNAVYHWARVASQHDPASRAKYAALRARGQTHPRALRSVADRLIGVLCVMLQNQTLFDPLRPRQRALSAS

SEQ ID NO: 498316 - protein, 340 aa, unidentified
MHATTYGLDVAKRVFQMYWVDGDTGEIVNRRFGRDNLVQYLSRRPPGRVALEACGSAHWWARKIKSLGHEVVLLHAKFIRPFVQTNKTDAADARAIWTAVQQPGMRTVAAKTEDQQAMLSLHRIRSLLIKFRTMQVNQLRGLLYEFGASFRAGRVAGLAEIRSRMVELEEALPGALMCGLQDQLKRIEGLQAEIDQLEHRIGAWQKQDAACRAISEVPGIGRLTATALVATMGDAATFKSGREFAAFLGLVPRQSGTGGKVRLGSISKRGDPYLRTLLIHGARSVLCHTKVPTPWQSAIQERRPANVAAVAVASKMARTAWAILAHGQAYRRDYVSLRPA

SEQ ID NO: 498317 - protein, 317 aa, unidentified
MSKHSMICAGIDTGKRKLDVAIKGQADELQVDNSPDGHRALSGWLRQRRVKRVGIEASGGYEQAVVAHLRRDKFEVVVFQPAQVRAYAQFHLQRAKNDKIDAALIADCTAAVQQIHAPPDPRLAPFAKHQTLIEQITEDISRFKNRHESCREQRIGRLWSEEIARLKGILRSERKQLVAAIRQYPDLAERLALIASVDGVGLATAVTILVRMPEIGRVTREQAAALVGLAPYDDDSGDHVGARCIDGGRERLRKSLYNATLAACFRWNAQLIAMYERLIAAGKPHKVARIACARKLLIYVNTVVERGTPWVQNPTTA

SEQ ID NO: 498318 - protein, 419 aa, unidentified
MSFKIIKNNCCGLDVHKTWIFACIGITDSHNRTEYKQARFSSFTKGLNELCDWLAKYNCNDVCMESTGKYWIPVFNILEKQGMWVTLSHPKYTKPMKGNKTDRKDAKWICDLYMCGMVKPSFIPPADIRELRDLVRYRFKLTCMITGEKNRVHNCLTVSNLKLDDVFTDIFGKSSRSITEQILQHPGESFDVTPFVDGRCKTPIEEIQAAVDGAVSAEQAVKLRQCLNHIDELEKHKSEIEREIFRLSEKYEAALNLIRTVPGFDKNPLTAIQVLSEIGGDMSVFPTAKHLVSWAGCCPRNDQSNQKIKSTRISRAGSYFKPVLVQVANALIKSKKHPEFTNRYQRIKARRGHKKAIIAICRMILTAIWHILTDLKPYTVEGYSEPRPVKEGKVLSTSQALNLLKQRGYIIKDESPITS

SEQ ID NO: 498319 - protein, 352 aa, unidentified
MQHFIGCDVHTRNQVVAWIEEETGEIKKRRLEHDGEEVRKFYAQFARGTVVGIEATFPAYWFERLVGELGHELWVGDAARIRASEVRYQKTDRRDAGDILDLLRTGRFPRIWVPSLEERDLRQLLVHRMKQVRARTQVKNQLHALAISQGVCRGRKLWSAKGRKEIESLALLPWAARRRKELLESLDRLDEQVRELDRAGEEAGRARPEVALLRPHPGVGMVVGLAFVLSVGPIERFPNSRKLVSYWGLNPREDSPGGRQRLGSISKQGNTMMRWLLIEAAQTAARLDPQLRRTYQRLKHQGNSGVAKVAVARRLVVRLFWMLRTRHNYAQLVHMSGSPSSAVVPPQGGPNL

SEQ ID NO: 498320 - protein, 369 aa, unidentified
MGHSTEVFVGIDVAKARNAVAVADGERGGEVRYLGELPATPEAMRRMVQRLASRHQQMHFCYEAGPTGYGLYRQITSMGYPCTVIAPSLIPKRAGDRVKTNRRDAIELAKLLRAGELTAVWVPDESHEAVRDLIRARTAGVEILRVHRQQVSALLLKHGLSYPGKKTWGARHLKWLQEQRFDHPAHQIALQEMVDAVRVAKERVARLEKAIEEFLPQWELEPVVRALQALRGIDLIVAVTFVTEIGDMRRFDNPRQLMAYIGLVPSERSTGDTVRRGGITKAGNTRMRQLLVESAWSYRYAPKVGARKLYLLEKTVPAVREIAWKAQSRLSARYRALMARGKKSTVVCTAVARELVGFMWAAARRVQPT

SEQ ID NO: 498321 - protein, 344 aa, unidentified
MQIASIGIDLGKTTFHLVALGERNQVLVRKKFSRTQLLAYTAKIPSALIGIEACAGSHFMGARLREQGHEVRLIPAQFVKPYRKSNKNDFKDAEAIAEAVRKENMRFVPIKTQEQLDIQGMHRVRDRLVQRRTALINEIRGFLLDRGIIFAADPKHLRKNLPAVIEDAEQNLTPRLRWLLDRMWQEWKQLELDIETMSDELERISAENELCRRLRKIPGFGPLVSTATVAAIGNGAAFGCGRDFAAWVGVVPRQYSTGGKQKLLGISKRGNRYLRRMLIHGARAVLFRVKYDTGGFGEWFRRLAQRAPRNKVVVAIANKLARMAWAVLSSGKEYQHHRLQATAA

SEQ ID NO: 498322 - protein, 371 aa, unidentified
MNSILYVGMDVHKENYTLCCYSFDRDKVEYRQTVPSDYRLILKYLEQVRRKYPEEVEFICGYEAGCLGYSLYHQLTDHGVKCIILAPTTMGITNTNRVKTDRKDAANIARCLAFHTYSAVYVPDGEDNAVKEYLRMRDDQKLALKKIKQQITAFVLRLGKQYTGGKSLWTENHLKWLRGLDLTLLEKETLQEYLITYDYLTDKLERLDARIKELAGNERYGERVHRLGCFIGIKPHTALSLLVEVGDFRRFEKAPNFAGFLGLVPGEDSSGGGRNRLAITKAGNSHLRRLLVESSQSYSRGTIGFKSKELKKRQEGNPPEVVAYADRANERLRRRYYRMTLKNGAKRNVAIVAVARELACFIWGMMTDEIA

SEQ ID NO: 498323 - protein, 338 aa, unidentified
MDKYSGIDLHANNCVVVVSDEEDRICCERRVANDLAKILALLEPFRSELVSVAVESTFNWYWLVDGLRAAGFDVKLVNTAAIAQYDGLKYSGDEHDARHLAHLLRLKLLHFGYVFEPEWRAVRDLGRKRLQLVRTRTTHVLALETIYARQTGGHISGHAAKQIDIEDVARLGWPEDVTLAAQVNVLAVQAMERGIAILERRLHERVKLSPEYAVLKTVPGVGEILSTVIMLETGPIDRFTSAGNYASYARCVGSGRYSNNKKKGEGNRKNGNTYLAWAFVEAAHFALRYNEAAKRFYERKRARSNAAVATKALAHKLARACYHMLKGHTVFDEKRCFA

SEQ ID NO: 498324 - protein, 343 aa, unidentified
MDVIIGIDPHKASHHAFAVSDREVELAQLSVRATRTQTQRLLAWAASFESRTWAIEGADGLGYLLSQQLVAAGERVVDVPATLAARTRVLGSSHSNKTDPNDARSVALTALRHPSLREVRPVGHSEVLRLVAKRNIDIGDRRTQVVGRMHSLLVELVPGGIAKEINASDVDGFLAKVSPATPVEQIRYDLAVELLDDIRRLDEQLKASHKRIRAAVAASGTTVTDLFGIGPILAAMLIGYTADITRFRNRDHYAAYNGTAPVEFSSGGRVVHRLSQRGNRQLNHALHMAAICQMRHPHSEGRAYADRKIADGKTKREAIRALKRQISNAVYRQLVIDNHRATH

SEQ ID NO: 498325 - protein, 343 aa, unidentified
MQVVRIGLDLAKYVFEVHGVDNHGKVIVRKRLRRDAVARFFANLPACLVGMEASNGAHYWARVLTELGHQVRLISPQFVTPYVKSNKNDRNDAEAICEAVGRPSMRFVPQKSTDQLAVQAVHRIRQRLVADRVRLVNQIRGLLSEHGIVIARDIAQLRRGLAVIVGNINDGLSEMVRALMRDLQAELAELDARIAAYDRRIKEIFRASEQCQRLGKIEGIGPVTATALIAAVGDRSCFKNGRQFAAWLGLVPKQRSSGGRARLFGISKRGDRYLRTLMIHGARAALSRASGKQDPRSLWLGKVRQRRHPNVAAVALANKNARIVWAILAGDTAYEPALSVKAA

SEQ ID NO: 498326 - protein, 373 aa, unidentified
MKYSTVYVGMDVHKESFSLCCYTNEKEQAEYPQKVDGHYSKVINYIEAMRFHYGDDALFICGYEAGCLGFTLYRQLTDHNVKCIILAPTTMLQQKGRKKVKTDKRDAALIARCLAHHDYSPVHIPTEQDEQTKEYIRMRDDHKLALKKVKQQILSFCLRHNYRFDGTTNHWTQAHLKWLRSLKPEGLYAEILQEYLLTYDNLTDKLERFDKRIEELASDETYQENIHKLSCFIGVKTVTALAVLTEVGDFKRFASAQHFASYIGLTPGEDSSGDDQNRLGITKAGNRHVRSLLVEAAQSYSRGQIGFKSKALKARQAGNSPEVIAYADKANERLRRKYYRMVLRNNKKTNVAKTAVARELACFMWGMITGNVA

SEQ ID NO: 498327 - protein, 344 aa, unidentified
MLYAGIDLHKYYQLITDINDGGHQVSQVRLNNNRLLVKNYFGQFTESVKIVVEATLNWYWLVDLLDELNYHIVLAHPKKLRSIVEAKLENDKISSFMLAQLLRNNFIPEAYCLSPEIRALRDLCRTRLFFVRQRTALVNNCHSTLLKHNIVAPSKGKLHSSSGLAYLKNPDLELHEISKLGLNCKSDLIKILTEKIKSLEYKIKRYCIEDEIIKLLKTIPGIGDVLSPTIRYEIGEITRFKSHKHLASYSRYTQKIHQSGRLNKHYNTSKEGNAYLKWAFSEVVINAIRFDKDIRKCYQRHLSKKGKPVAKAIIGRNLTTVVFNVWTNNESYKGFKVSKKNQSN

SEQ ID NO: 498328 - protein, 374 aa, unidentified
MKQGGKFVGLDVHKDTIAVAVSEANGGTTRYYGEIPNTPKALAKLVKILTAQGDTVSFCYEAGPCGYGIYRHLTALGQACTVVAPSLIPTKPGHRVKTDRRDSESLSRLHRAGELTAVWVPDQEQEAMRDLTRAREDLKGLERMTKQRLTAFLLRHGRAYAQGKCCWTQAHSRWVEGLKFESPVQQIVFHEYVEAVKQATARVGGIEQELRQALKTWKLAPVVEAYMALRGVKRVTAMTVMAEVGDLSRFTSPSQLMAYLGLVPREYSSGQTRRRGGITKTGNSHVRRVLVEAAWAYRFPARKTAYLQRRATQTSEAVQAIAWKAQKRLCGRYQHLLAAGKLTVQACTAVARELAGFLWAIACEVMNPQDMHTR

SEQ ID NO: 498329 - protein, 457 aa, unidentified
MPARRKKPQSGAVSPVHTIDPDAAGIDIGATEIYIAVPADRDPHPVRRFATFTEDLIAAAGWIAKCGIKTVAMESTGVYWIPLFQILEARGMKVCLVNARHVKNVPGRKTDVCDCQWLQHLHSAGLLRPSFRPEQQVCAVRSLVRYRDSLVQLSAMHLQHMQKALDQMNLQLHHVISDLGGKTGMAIIDAILAGERDPRQLATLRDPRTKASQETIAKSLVGDYRREHLFTLRQSLTGFRQNNQLIADCDVEIESLLKEFSSGDGPGAEAVPEPQAELKRKPRRNEMSFDLRTQLHRIFAVDLTQIPGINTLTAHTLFTEVGRDLSKFAHVAAFTSWMGLCPDNRVSGGKILHARTRKVNNRVAKALRMAAQALSRSHGWLGQYYRRMRAKLGGPKAITATAHKLARIVYHLLTTGQAYDETVFAQQEAQNRQRNENRLRHQARQLGYELTQIPLEV

SEQ ID NO: 498330 - protein, 399 aa, unidentified
MRYCLGVDVAAVDSMYCLVAETGEIIFMPAKSPHTKSGFQWILEKLNGIEQKDIAVIMESTSTYHLKVERFFRENTDCEVIILNPMISKNHKRNLRKTKTDKEDCLNLVDIFFKGEYNCQVRHEEIYAEMQFLSRQIQHLQEGATRTRNRLRQLLSMLNPAYFDAFRNDFMYSETGLRFIAAWPHCDLLNAATAEDIAISLASTHQRSPGYYRRKAERLKTFAANCYPAVSKESVMTDCLAETALRLLAQQQEIEVLKSRLVALGSSTELYDLFISVPGIGPYLASSLIAELKDIRRFENHKKLIAYCGFDPTIIQSGKSIHYNGPISKRGNSTARKILFYTVSIILVVARKTNRQMPLLLYYEKKRGEGKHHHACLVACCTKLLRILLAMSKQNTPYS

SEQ ID NO: 498331 - protein, 331 aa, unidentified
MPTAPAVATPAGLYVGIDVAKEKLDLARSDSDDDRVDTFGNDPDAIARIVRLLTAAKPAMVVVESTGGLERPLLEALLEAGLPAALVHPGRVRHFAKAMGILAKTDRIDARVLARFGRQAAPRLLTRCAANQTELRDLVACRRQLCATRTQQANRRGTTFSKAALKSIDAVLKTVDKQIGRLDEQIRDLIDADDDFKHLDGLLQSVPGVGPTLSATLAADMRELGEADRHQVCALAGVAPFPDDSGKIKGKRAIRGGRADVRCVLYMATLAAIRVNPVIKPFHRRLRDAGKVAKVTIVACMRKLLSLLNAMIRDDLSWDQLDVVKKLASTH

SEQ ID NO: 498332 - protein, 420 aa, unidentified
MKVSDTAEFAAYIGIDWADDHHDICEIARGASQSQHTIIKHRPEDIHHWSMSLLERYHGERIAVACELRKGPLINALRQYEHLVIFPINPTTVANHRKAFANSGSKSDVMDATIQTEILLTYPERFSPLNVEKKDIRILDQLVVYRRQLVQSSVDMTNKITAVLKLYYPQALDWFEEKDSVIFCDFLLKWPTLQMLQRARASTIMDFFNAHHSRYPATNQARIEHIKQARPLTQDTAFIIPNQMMVSLLVPQLKILIEAIKKLDSEIRHYYRKQPDYCIFDSFPGAGPQMGPRLMVAMGTDRARYPSAADIQKYAGIAPVIEASGKKSWTHWRYHCPTFLRQTFVEWAGLSRRYSFWAQAYYEQQIKKGKHHNTAIRSLAFKWIRILFRCWQNHTPYDESTYLTALKKRKSPLLENAIME

SEQ ID NO: 498333 - protein, 370 aa, unidentified
MVHISEVFVGFDTSKMRNAVAIAESGRDGEVRYLGEIDNTETGTRKLVARLKARYQRLTFCYEAGPTGYGLYRLIKSLGHDCIVIAPSMIPVRPGERVKTNRRDAVNLARLLRAGELTAVWVPDDRHEAMRDLARVRDTAQKDYKAKRQHVSSFLLRLGRHYPGKKTWGKAHLNWLASQKLEHREQRIAFEEQLLAVRQAKERVERLEQAIRESVADWSLAPIVEALQAMRGVDLVTAVSFLAEIGDLSRFESPRQLMAFLGLTPSERSTGESVKRGGITKAGNTRARRLLVESAWSYRHPPRVSKEKQAKVEAAPRSVREIAWKAQMRLCGRFRTLTRKGKRSTIVATAIARELSAFIWAINREVVGRP

SEQ ID NO: 498334 - protein, 512 aa, unidentified
MIIRPNPSNPPSSKARKRFAAAKCEQVQKRQGTPQKKPQKSPRKSKASRSLPVTAPSMPAELKQVNLNAAGIDVGATVHFVCVPEGRDPQPVQSFGAFTADLEAIADWLAQCGVTTVAMEATGVYWIPLFELLERRGFEVQLVEPRRLKHVPGRKSDVLDCQWIQQLHTFGLLCGSFRPDDAICVLRSFVRQRQTLVRSISRCVQHMQKALTQMNIKLQHVISDISGVTGMAILHAILAGERNPQQLAKLRDGRCSNDEATIALALQGNWREDHLFALKQAMDTYRFYHEKLTEVDEKIQAHLETFEDKSQGKPLEPPAVTKKHRVNDPAFDARKYLYTTTGMDLTEVDGLEASTVLTVISEIGLDMSRWPTEKHFTSWMTLCPGVNKTGGRSESKSGRTRPSSNRAATALRMAASTLMRADCALGAYARRMRARLGAPKAITATARKLAIIIYNMLKYGKAYVDRGAEYYQEQYRATMVKNLKRRAKQLGFAVVEVTAQPVAPETTPTPPA

SEQ ID NO: 498335 - protein, 428 aa, unidentified
MSNQEIIRRRKYCQIVKEITGSDQYLVVGIDVGKDKHHAFMGSATGKSLFRKLIFENNMDGFSMLLKTAEAIKSQNSLSKIVFGVEPTGNYHKPLARHLIRCDCNVVLVSGVAVKRNRELLDGRWDKHDTKCAANIADLVSRRRCLYYDSPSPGTIELRSLLSLRRRLKKEEHSLRMRIRNNLLAQYFPELDRFYSACESESLAIVKWCLDPNKIAGMDFESFFQMVTRTRRGTAQLLRLRKIHQQAIESVGCSMGSAAAFEAQLLVEKLKQVRQQLKETETAIKDVALEFAEYSYLLTIPGFGPYVSARVLASIGDPFRFENRKQLIKLAGYDLCAKRSGKTSDKAIPVISKKGNGELRYALYQAANVASARVDLFRTYFTRLIRGRERERGIKTKMCVKLAAKMLIIAWTLMKKREVFDPAHLNIE

SEQ ID NO: 498336 - protein, 402 aa, unidentified
MNCVGIDVSKGKSMIAVMRPFGEVVVSPFEVRHTASELSELARLLKNLDGETRVVMESTGNYHAPVAWLLHGAGFYVSVVNAMLVHDYGNNSLRRGKTDKKDAVKLANYGLDHWLTLPRYVPEEDTRLMLKTCYRQYQQYSKVQTMLKNNLISLLDTAFPDANRLFTSPPRADGSEKWVDFVATFWHCECVCGLSKKAFTAKYQKWCRKHGYNFSQDKALDIYASACGRFGVMPKTNTAKLLVEQAISQLQTTSAALAALKQEMQSLAASLPEYPVVMGMFGVGPTLGPQLIAEIGDVRRFHSKKALVAFAGIDAPPYQSGQIDVRSRSISKRGSASLRRTLFLVMGVLLQCAPMDEPVYQFMNKKRSEGKPYRVYMMASANKFLRIYYASVKAYLDSLEHD

SEQ ID NO: 498337 - protein, 412 aa, unidentified
MSLPECDFYVGIDWAAQTHAVCVQDAAGKITAQFTIEHTADGFATLLARLGRLASDPMQVSVALERPDGRLVDALLEAGYPVVPVSPNAIKTWRDGEVLSGAKSDAGDAAVIAEYLRLRSHRLRPATPFTPATRALRTVVRTRDDIVAMRTATANQLTALLDAHWPGATKVFADIESPIALEFLTRYPTAKHAAGLGEKRMAAFCVKHGYSGRRSAAELLTRLRAAPAGTTDPDLVEAVRDAVLALVAVLRTLGETRKDLDRSVTAHLGEHPDAAIFTSLPRSGQINAAQVLAEWGDSRQAYDSPDAVAALAGLTPVTKASGKYHAVHFRWACNKRFRKAMTTFADNSRHQSPWAAEVYRRAIQRGHDHPHAVRVLARAWVRVIYRCWLDREPYDPARHGNANKINRGQLAA

SEQ ID NO: 498338 - protein, 321 aa, unidentified
MKTYYVGMDVHKSTIVIAVLDANGKVVSQAIIETSTQAVRDFLKNLRGEVHITFEEGNHAAWLYDVVKPLVKRLVVCNPKHNHLLKQGSKNDRIDARKLAELLRLKALKPVYHGEHGTRTLKELVRCYECLVKDLSRVQNRLKALYNSQAIRNRGRELYHLKRAARKAMIAESRRHEAQQVLLQVPELGLVRVAQIIATVDSPFRFRTKRPFWAYLGLAVETRSSADHELTNGRVSRRRLKIETRGLNEDYNRRLKSVFKSAATHACSCGVYKEYYEKLVAGGMRSEMARLSVARKLAAAVLAVWKKGESFDEKMIMSRAA

SEQ ID NO: 498339 - protein, 400 aa, unidentified
MTGSRLWAGVDVGKEHHWICVLDASGTVVLSRRCDNDEATIRAVITEIDALGETVSWTVDLTTAYVTLLLTVLADAGKPVRYLSGRSVWQASSVYRGGEAKTDARDARVIADQSRMRPDLPVLRPDDELIRELQMLTGHRTDLVADRTRTINRLRQQLVAICPGLERVAQISSDRGWVVLLARYQRPKAIRRVGAARLATMLTGAGVRHAESIAQAAVTAAKAQTVRLPGEDVAAELVTELAQAVIDLDARINAVDAEIEARFRRHPLAEVIVSLPGMGFRLGAEFLAAVGDPALIGSADQLAAWTGLAPRPRDSGKRTGRLHTPQRYSRRLRRVMYMSALTAVRCDPASRAYYQRKRAEGKRPVQATICLARRRVDVLYALLRDNRTWQPTVPVTAVAA

SEQ ID NO: 498340 - protein, 452 aa, unidentified
MQTDAARRCIGLDVHREFAQVAIWQNGLVTHAGRFATTPEGVRAFAEGLGPVDEVALEATGNTWAIATLLASRAGRVVVSNPVKTRAIAEAKVKTDKVDAEILAQLLAADYLPAVWRPDPATSALRRQVLRRAHIVRQRTRLKNQVHAILHRNLIPRCPAADLFGHKGRRWLAEQELPPDELAAASALLRQLDFHGEELRLIDTDLGQVALGRPEVLRLMTVPGVDATVALSIVAAVGDFTRFRTPDKLVAYFGLNPRVRQSGGQPASHGRITKAGSAHARGMLVEAAWSASKAAGPLRAFYQRVQARRGMQIAVVATARKLAVLCWHLIISGEDYAYAQPSLVAHKRRKLELRAGLPSARGHKGKSAGYSLQAVRAAERDLAAQAEMAYRVTIAAWQPTRPTGKTAAGRTAAGTAAPRRSGAARSGVGVDVAATNGARLSRPSRGNAARQG

SEQ ID NO: 498341 - protein, 337 aa, unidentified
MEYLGIDVHSKYSEVCGLSDDGTVTVRRRVATTETALRRFFGGRECSKVTLESGPVTPWVYRLLCELGHDVVVVNPRRVRLIAESTLKTDGIDAEVLARLSRLDLDLLRPVYQRTPEAQELRTRLRVRTSLVKTRTSLINTVRGTVRAQGYRVPSCPTKSFVAHFASLDLRPTLAKAIEPLLTTIGELTDRINELERELVTESKSSDLLMRLQSVPGVGPIVSLAYAGWMDTPDRFSRSRNVGPCLGLRPSLRSSGGHEIRGRITREGDIEMRRLLVQAAHAALQCRKDSALTLWAQALVERLGKGKAVVALARKIAVLLHRLWVTGESFRPFPRAA

SEQ ID NO: 498342 - protein, 354 aa, unidentified
MIRRQDFISIILYDHANTNFIGIDVFKLNIHIYQLEIKEYLSIKNDYKVLLKFFKKFNKSSFFVYEPTGVYSKNLEKVFNDLWLQHFQVHPNDMHHLGKSLLGLNKTDKIDSKHIAQIWKLLYTQYQDLWWKNKFITPVPNYINQINHHMSQIRFMKKEISRAKNWIECLLNNPYESKTALGTYNKVISDLEKSIEKLEKEIDNLLNKNELHGKIENIKTIPWIADTTALELFVFFISLASKWMKKEDHKKVIAYSGLNPIENSSWTSLHKEKISKKWNKNVRKALYLPWIQRSQLCEKEKYKNTTIGKFCVRMKNKFTTAKNKRWKSVACAVAKKLLHTAWAMFCDNTQYSFV

SEQ ID NO: 498343 - protein, 464 aa, unidentified
MKIAKVNQQTRKGKKTRVPSFPIINPNAAGIDIGSAEHWVAVPEDRDEQPVRKFACFTQDLHAMAAWLKKCKVETVVMESTGVYWIPVFQILETHGFEVKLVNAKQAKNVPGRKTDVLDCQWLQRLHTYGLLSGSFRPDDAICVLRSYWRHRHTLIGYISAHVQHMQKALTQMNVQLHKVISDITGVTGMSIIRAILSGERDPVKLAQMKNYRIRSTTETIAKALEGDYRQEHLFSLRQAVELYDFYQQQIQACDHEIEAYLSQLDGINIASNPIPPSRRRIRTHKGNQPDFDLRTHLYRISGVDFTQIDGLDVLNVQTILSEVGLNPDAFPTVKNFTSWLAICPNNRITGGRIKSRSTRKAVNRAAEAFRMAAYTLSHSSSALGGFCRRMHARLGAPKAITATAHKIARIFYQMWKYRTPYQDLGADYYEQRYKQRLLSNMKKTAKQIGYFIELTPMPQPAVS

SEQ ID NO: 498344 - protein, 331 aa, unidentified
MHRRQITYDWLDTTNGETKRGVIRPATRQSLREWLAELARTDGAFALEATTGWRFVVEELQRASLEAHVAEPADTRALRGKKRRAKTDRADARHLRDLLLAGSLPESWIPTEFIADLRTQVRLRKSLIDQRSGWIRRVRAQCFHHGLADPPNVQTAAGLGWLARAELPAVARQVVAVALTMIEAIDVHIHALEAELCAVARHQKGCLALQSQWRVGPLSAVAMVAELGDVTRLSSSRKAVRFAGLDITVSESDIKRSRGYLSRQGPPVLRRTLYEAATSAWRKASPDHEYYLQTKGRLGTKRARLSVARRMLRRTYHLLANLGEAAIEPAR

SEQ ID NO: 498345 - protein, 340 aa, unidentified
MKTTILGIDLAKNVFQLHGVDDQGHVVVRKKLTRPKLLPFVSQLAPCRIGMEACQGAHYWAREMRKLGHDVRLISPQFVTPYRQSHKNDPNDAAAICEAVSRPHMRFVPIKEVEHQDIQALHRARQLLIKQRTALCNQVRGLLSEYGIIVARGVQRLRTSLPTLLEDADNSLTFASRELFQDLYQQLVWLDERMGRMDEKISQVFTATEPCQRLAAMEGVGPMIATAFYAAVPQADLFHNGRHLAAWLGLVPRQHSTGGKAVLFGISKRGDRYLRTLLIHGARAVVYRWKDKLNPSARARWVQQLIARRGINCAIVALANKIARVAWILLSRDVQYQPAR

SEQ ID NO: 498346 - protein, 352 aa, unidentified
MGSFTTPVSQVIFIGIDYHKRSSTVTLGDRDGNVVCQERLVNDEQILRKFFGPYHGAKCAVESSRAFEWLVDLLVELGLEVVVCHPRQVKLIAQTAFKTDKRDSKTLMLLLAKDFLPTSYYATAEERALRERLRWRVQLVRNVTRTKLRIHALLDKEHKGWNKKDLFRKTGRKYIAEVQLSAPRRALVDKAVRILNFLEAELEIEENWIAKEVKRRPDAQLLMTAPGIGQLSALVLIAELGDVSRFRRAERVPAYLGMVPREDSSGDIRRLGKITKQGSSLVRWLLIQDAWRAIDTDWQLKMKFAQISKRRGRNVAIVAIARKLAEIAYCILRDKKPYNPERLVTAQRAMLQ

SEQ ID NO: 498347 - protein, 426 aa, unidentified
MGWASTLAELPSEGATVQILYPRCAGIDVHQKTATVCVRILDQSRRAPSETRTFRTMTADLLDMKGWLAEHGCTHVAIESTGVYWKPVFNVLEDQFTVVLANARHVKAVPGRKTDVRDAEWLADLLQHGLIRGSFIPPAPIRELRELTRYRTTLVQDRTREVNRIQKALETCNIKLGAVASDVLGVSGRAMIEAIIAGTEDPVQLADLAKRKLRAKLPQLEAALAGRVQPHHRVLLRQSLDHVDFLDRSIAELDRQIEERMAPFEWALKLLDEIPGIGRRVAETIIAEVGLDMSQFPSAKHLCSWAAICPGNRESAGKRLSGRIRHGNRYLRAMLVQAAWAASHVKDSYLGAQLRRLAHTCGLKRALVAVAHSILTIIYHVLAKRTPYTDLGPTYFQRVDPDKLTDYHTRRLRDLGFTVTLTPNAA

SEQ ID NO: 498348 - protein, 358 aa, unidentified
MESQDIKYVGIDCGKKSLEVVRIHSENSLKERRQFSTTETGINNLLKWLTQNDIVGLEAGAQSFRIAKSILNKGIQVIVLNPGDLATIYQSLKKTDKEDSLKIARLIQRYPMEELPVVPVPTDEEEDNRRLCTEQENWTRQLTQGKNRLHSLFTQAGLTEITKKHLRTKSSRETSVTLLPSRYQKEAERILQVLDLVEQNLKLIEEETKDALKKNPAYVQTIMSMPGIGMVTSLAIMSYMGDCKRFSSGKQAAYYAGLVPRVDISGDTVRYGKIVSRGCHSIRRVIVQAAWSLVRCQHGGKLKEFYERLYSKKGAKKSIIAVSRKMIEVLYSMIRTGALFDSMPEEVLHRKLAQHGLM

SEQ ID NO: 498349 - protein, 468 aa, unidentified
MTPRIQKKLRPPRSHESLRMTHPHAAGIDVHADIHWVAVPPGDAPPPEANHPINLPAHVRSFGTCTADLIALADWLAECGVKTVAMESTGIYWIPLYELLESRGFEVFLVEPRQSRHAPGRPKSDVLDCQWLQRLHSYGLLTASFRPAEKVVVLRGYLRQRQMLIRYAGQHVQHMQKALEQMNVKLAEVVSNITGVTGMAIIQAILKGERNPLELAKLRNDKCKRTEAQIARALYGNWREEHLFALKQAVTLYEFYRQQLAECDVQLQAYLGTFADRSQGRPRPPRQRRSTPTLNDPVFDVGGGLYRMAGVDLTVLEGINANTALVLLSEVGPDVSRFPTVKRFTSWLGLCPQHQGSAGKIRSRRVLRGGNRAGRALRLAVQGCYQAKHALGAFYRRIQARAGAPKAIVATARKLAERVYRLLKYGAEYVCQGVEAYEAAYRARVIKGLARRAAELGYRLELATEPGT

SEQ ID NO: 498350 - protein, 480 aa, unidentified
MKHIAIDLGSRESQICIRDSSGTILVEEKRATCSLGKYLAGVEKSRVLLESCAEAFVVADAARAAGHEVVVVPAKLVRQLGVGDRGIKNDVRDAQQLSNVSCRLADLPSVHIPSTLSRERKAMCNMREAQIEARTKLVNTARSWLRTQGIGVLAWRRAGDLPRAVRRHVASRGRTVPEEVNRVLQALEALNLGILEADKQLAKAAESDPICKLLMTAPGIGPVSSLRYAAALDDISRFHSAHGVEAYLGVVPGENSTGESRKRRMTGITKAGPPRVRWALTQAAWAVLRCKKRDPMAQWAWEVAKRRGKKCAAVALVRNSRGAVRHVARRQALRSAPRGQGDKDGRPGGEPHRALTDGSAGLRPLGEGAPRPAPRTPPRRPAQTRAGDSGQVEDSSTGCPEAATACVSERPSALTGTGDRVLPIAARQRTSNPCGADSITSSAKTRIVDRDNPRLTLQTLTSPCTCSQPGRRTGMAPICS

SEQ ID NO: 498351 - protein, 349 aa, unidentified
MIARSDAACFVGIDLHKDTLTACVVRGRDREVSYVKIACKCRDQIRSFFGSLPQPSAVAIETVGFYRWLWTELEPLAGQLVLCDARGARALAGRRIKTDREDALNVALLLADGRLPLAWAPPENVQVLRNWTRHRNGLTRQHAKVLHHVRSILNRLNFPGPVRLDAAALQRYLLAGVERLPDDDVTMLWQHQRRLVEIEQDRAQSERRISELMRAPEFARMRVILESVPGVGLVTAATVIGEIGDFSRFPDSKAIGRYAGLAPTVYASGNSSRLGHISKTGAPDLRWVLQQAAWTAIRCDAGFKKTWLKIAKTAGKKAAAVAIARKMLVLMWTLVRKDEPYKSREPVAA

SEQ ID NO: 498352 - protein, 346 aa, unidentified
MEHIGIDVHKGESQICILTEEGELIEKRIRTDRDRFGVVLGKRPRARILIEASTESEWVARCLEGLGHEVIVADPNFAPMYASRTRKVKTDLRDARALLEACRLGAYRPAHRTSDAQRHVRGHLAVREALVRTRARYIALIRSLLRREGLRIRGGSSKTFLVRLQELEVPTSLSEEIAPVVAMMTPLNDQVQDADKAIARITQGDDAVRRLCTVPGVGLVTAATFVATLDHAGRFAGAHQVEAYLGLVPREMSSGERQHKGRITKSGNGRARSLLVEAAWSILRYDKPETATLRVWAERIAARRGKSRAVVALARRLAGILYALMRDGTVYQSEVLQRSTRRSEAA

SEQ ID NO: 498353 - protein, 407 aa, unidentified
MELVALYKRVIGLDIHQAQITACALIEEADGSTRIEQRQFGGFKRDRRELADWVASLRPDEVVMESTGIYWKSPYAALEAVGIRAKVVNARHVKNVPGRKTDVGDAHWLATLARAGLLRGSFVPPAKLRELRLIARQRQKLVGQLAAEKNRLHKVLTDSGIRLGVVVSDLHGKSARAMVKAIIAGQAPHEVLKLASTRLKASREEIFDALQGDLTASHHFVLDELIRHIEEIEARIARFDARLLSELESERNFLALLQTIPGVDLIGAAMLLVEIGTDMDAFGNADRLASWVGICPGNNESAGKRKSGHIRKGNPYVRRLLCEFAHAASRTTSVFKSKFQALLVRRGYKRAIIAIGHKILRTIFFMLKRREHYRDSATDYEALFVQRNAPRWKKALIKFGFVKPANA

SEQ ID NO: 498354 - protein, 399 aa, unidentified
MDRENVFYCGIDVAKKKHAVVVLNDQGQVHRPVFTVENTRAGMEFLVSVLKQVGAEIWIALEATGHYWLPLYDVLTREEYPVTVINPLQIAAYRKSGVRKVKNDRTDSIWIADFLRISNLPAAARNIPLLLQLRELSRFRYWLSEQIGDCKRKLITILDRVFPEYEDLFSSVFVKSSRALLSEAVSAHEIAEFDLRELTELLAKKSRGRFGRAKAQQIQEKARESIGVGFLADAAQVEMRCLLAQLELLEEQIAEVERAQEELMAAIPQHIISIPGVGLPTGAAILSEIGDIRRFASEDKLVAYAGIDATVHQSGQFNGTKMRMSKRGSPYLRLALWQAASMAIQHNDELKAYYQKKRAEGKAHGTALGAVCRKLLVRVYVILKENRPYEVRPVPEIGT

SEQ ID NO: 498355 - protein, 343 aa, unidentified
MQTVTTIGLDIAKSVFQVHGVDAAGQVVIRRQLKRRQVQAFFEKLPPCLIGIEACASSHYWSRELQALGHSVRLMPPAYVKPYVKRQKNDMADAEAICEAVARANMRFVPTKTPEQQSCLMLHRTRHLFIRQQTAVINSIRAHLAEFGIVAPVGRKGVTELLHVVADPSDKRVPEVARACLAALGDQLLGLKQQILEFDRMIMAWHRSNQTSKRLHYIPGVGPMLATALVASVADPRTFRSGRNFSAWIGLVPKQHSSGGKDRLGSISKQGDRYLRSLFVAGALAVIRYAKIHGTGHRPWLTALLARRPTKVAAIALANKIARMAWAMMARGERYKQPVALAA

SEQ ID NO: 498356 - protein, 343 aa, unidentified
MKVTTIGFDLAKNVFQVHGVDERGHVVVRKQLRRDQVAIFFANLPACLVGMEACGSAHHWARKLQGFGHEVRVISPQFVKPYVKSNKTDAADAEAICEAVVRPSMRFVPVKTVEQQAVLSVHRVRQGFVKARTAQANQIRGLLTEFGLVLPQGITNVMNRVPQLIDAAADLPASMRQLIARLLENMRVLDRQVKELEAQIKAWHLGSELSRKLEKIPGIGALAASALVASIADARSFKNGRQLAAWLGLVPKQDSSGGKPKLLGMSKRGDTYLRTLLIHGARSAIIAAQKKAKPNVWLSGLLTRRHPNIAAVALANKNARTIWALLAHEREFRPDYMPRPATA

SEQ ID NO: 498357 - protein, 430 aa, unidentified
MEIVYPRSCGVDVHKSFIVAVICISESVKPKYIKKRFSTFNNQLIQFRDWLIENNCQNVCMESTGKYYIPVYNALEGHISNVVVANPKWVKAIKGEKDDNKDAKWIADLFKFGIVRSSYIPEKDIRVLREFTRYQYKLVNMRSSEKNRFQNALTTGNCKLDIVFSDIFGKSASAIVDTILSNNPYTSEDILSKVHAGCKASHEDILSAVEGIQLNQFQKARIRIVQKHMEYLDSLLDEIQHHIDLMVANYEEYIQLLCTIPGINRKSAITIISEIGTDMSQWSSHRKLAAWAGLAPGCNESAGKKKSVKISKAGVYLKPCLVQVAHAAVKDKNCDYYADKFNKISKRRGKKRAIIAIARKILIAVYHLLKTGEVFNPTDMADVETTKKQRIEYVKNNLRNAFNQLSRTGLSEAEILQLIRKESTNSPQIE

SEQ ID NO: 498358 - protein, 334 aa, unidentified
MEWKYFIGMDVSKATLDVALVVEKEVVFQQQISNSPAGLKQCLKALQKTIAGFELHRAVFCMEHTGIYNHHALYYLHSMGVALCLESAVQIKLSLGMQRGKNDRIDAVRIARYAYKNREELRLWQPKRAVVEELNRLTVLRERLIQAKNQLKVSYEEMRQFDKQSATRMKTLSKSSMEALARDIEKVEAAIEELIRQDEELTRLFKLITSVQGIGKVTAAALIVTTNEFKDIREAKPYACYAGVAPFEHSSGIKKGRAGVSHKANKHVKSLLHMAALTAIAYNNDLKIYYERKLKENKNKMVIINAVRNKLLHRIFACVKRNTPYEKNYATTLV

SEQ ID NO: 498359 - protein, 340 aa, unidentified
MSLLLQSFLPYPDSCLGTSPHQQGWDTKMAELSFGGIDVSKDRLDVLVLPEGVCFSVCNDTPGWAELIARLRPLAVSAIGLEPSGGYERGIIRALLAAGLSVRRINPNKLRQFARARGVLAKNDRLDARLIAEYVAIMPTRVVRRDDAVEHLAEIVTMRRQLCDEHAAAMNQAAHLEDAMLRRLSKRRLVRLEADILLLDKRLAELVAADPRLAHRYRLLISMPGVGPTLAYTLLATLPELGQIDRKQIAALVGLAPYDFDSGKLKGHRCIYGGRMPVRNVLYMAALSARRYNPALKEFSNRLAAASKKSKVIIVAVMRKMIITLNAMLRDNTEWRPSSV

SEQ ID NO: 498360 - protein, 363 aa, unidentified
MEVLIGVDPHKATNVVAAIDEQGELVGQETFPATRKGLRTLQRWAKRFPERRWAVEGASGIGRPLAQKLLAAGERVVDVPPKLSSRVRVLSTGNARKNDRLDATFTALAALRNDRLSSVQPEDGPESHGEILRLLTERREDLVSERTRAFNRLHVLLRDLLSDPVRKQLSTDAAAKLLRRSRPKHPAGQLRRRLASEVVRDVRTLDRRIAELDQRIATEVKASGTMLTEIFGVGPILAAKIVGIVGDVSRFPSKAHFASYAGVAPIEASSGEVVRHRLSLAGNRSLNQVMHMITVCQARSDPRGRAYHRKKLAEGKSRREACAASSGASQMRCSGCWSPIRRSLRKRSLDTEGPRSGVLRSSR

SEQ ID NO: 498361 - protein, 329 aa, unidentified
MNVHPQGRETATAARPNAGIDVSKQWLDAAWGTEVRRFAHDAAGIKQLAASLRQAAADLVVLEATGGWELRVAAELQGEGLAVAVVNPRQARDFAKSMGVLAKTDRVDAQVLRDFADVLARHPQRARYVRPLADAPRAELAALVMRRRQLLEMRVAEANRLPLAHPAARKSLAAILKALDKQLAEVDNDIDRQMRAHFKELLTQLDTVKGVGPVAMSTLAALLPELGQLSGRAISALVGVAPLARDSGTHQGKRHTWGGRAEVRAVIYMVVLSGVRYNPSLREFHQRLIAAGKPPKVALVACMRKLLVMLNAMVRDGTVWNPEKMMKTT

SEQ ID NO: 498362 - protein, 313 aa, unidentified
MKSKDEIIGIDVSKVYLDGYSWRKQEYKRFENEIEGVEELISWVRKRKAKLVVLEATGGLERKIVTELISAGIACAVVNPKRIRDFARAMGQLAKTDRLDAQVIAQFGAVTNPEPQQAKNETVRNLQELVIRRRQIIDILTAEKNRKHTVSETIGKSIAEHIQWLERDLEQLEEQIESLIQDDSEMNEKAKLLQSVPGVGPVTVMTLLGLLPELGTTNRQQISALVGVAPINHDSGKKQKKRRIFAGRGSIRSALYMAALSATRHNPPIKAFYQRLLSNGKEKKVAITACMRKLLTMLNIIIHRKTVFSIQTI

SEQ ID NO: 498363 - protein, 386 aa, unidentified
MQKLNDLSRCLTLLEPDSTVIAVIEMSQSSWLVAGIVPGVERQPLKKLAVNEAALLKLLHRWREEAEEAGYGITRITVAFEAGRDGFWLARWLRARDIEAHVIHASSVAVSREHRRAKTDRLDTELLKRAFLGWLRGERDHCKMVAIPTIDDEDAKRPNRERESLVGEQSRIINRIKATLARLGVRGFNPKLKKAAERLEGLHTPEGELIPPNTLSELHRDMERRRLVRDQIRQIESARLDRLEHAPGEGAHAMVRLLARVIGVGIETADMLVQEVLSRNMRDRRAVARYAGLTGSPDESGTKRREKGLARSGNTRVRRGMIQLAWRFLMFQKDSALAQWFRARTENARGSRKTMIVALARKLLIALWRLVREGVVPDGVILRPAQ

SEQ ID NO: 498364 - protein, 416 aa, unidentified
MKLFVGIDVSSEKLDVCFLTDDNQLSILSEISVANDIEGASFIRETILEFNNSYHFDQIVIGMESTSMYSFHPSMFFHEDEKLKKLNTLVTIENPFRVKQFSRMFDENKTDRNDALRIADFLRIQRFTTSPIKEEKYMALQRLTRTRYQLIKQLIRTKQHFLENLTYKCNTLAREMRDESTSLFSATLISLMTEDFTLDELAELPLEAFCDLLQEKGKGRFKQPEKIAKAIQRAITMSYRLGALAQESINVVLSVLVREIRALEKNIKELDKAIEQVIVVIPEYQCLTSIPGVSKVYAAGLIAEIGQIERFEDQTKLAKYAGLSWKVNQSGNYQSQNTPLTKQGNRYFRYYLVEAANSVKNYLPEYKAFYQSKYKEVPKHQHKRALVLTARKFTRLVDTLLRKHQLYTPPRNVIEK

SEQ ID NO: 498365 - protein, 402 aa, unidentified
METPLLVAVDVGSRFHEVAIGDGSGCVLDGFRIDHDPDGFAAFFDRIEAHRSGPGQAVRVAMEGYNGWARPLDSQVLERGWALYNVNNLKLARYKEIFPSPAKTDAIDTRSMLELFALDGHAGVARNALQRVAVAPEDHRRLKYLTRRRRVQVKERAGRLVRLGCELQALSPGLVAITGSLDNQWFLRFLTCRERLTALPRLQAKTVSGIRGIGRCYLEKIRAWQRTARFSPDIAFADTDVVDDARAILALDERIAALDARIEALSGESSFATTLRSIPGFGVTGVAELTGEIGTLERFAGESSLAIYVGVAPLDHSSGLRVKGKRPKCVNDRCQRAMMTCVVRHMACVAESRAYYDRKRAEGKTHNQAVRALGRQLVRVMWSMLIHEREYEDRTQNGDAAA

SEQ ID NO: 498366 - protein, 428 aa, unidentified
MKASNPTFPPGAVAAYIGIDWADQKHVVALRSASEPAKIQHQLIEQRPGALMEWIGQLEQRFGGQGKILVCLEQSRGALIYHLMGYELFELYPVNPLQLARYRQTFSPGGAKDDLPDADLLSELLYCHRDRLKAWKPDTELNRKLAFFNEGRREAVDQCTRLSNAIKSQLKVYFPLALELLDDDTSMALAADLLLKWPTLEALQKQTAHSLRKFFYAHNCRGESKMLQRLERVQQAKPLTQDQAVIEPAVLRVQMLARQLKALLPDIARYEQNIAELFAAHPNHFLFDNLPGAGPALAPRLCSALGSDPDRWQSAQEISTLYGIAPVRRASGKKTGKRASIHFRQACPKFLRQSFHEFAACSIRYCNWAKALYDSQRARGKGHHAAVRAVAFKWIRILFACWKHRTPYDPQRYLQALQHRGSPLANAC

SEQ ID NO: 498367 - protein, 370 aa, unidentified
MPRRSARLILAIDLGKAKSLACWYRTDDATHEFRAVRTRPDDFRTLLADRPVERVVIEVCDAAGWVVDLCRTLGIPSQVANTNQAAWRWRNVKNKSDREDALKLARLSAMGQLWPVHVPEKPVREWRSLILYRHKLVDRRTSVRNAIHAILVAQGRAVPGRRSAWSDDSMSGLADLARPLGECTTMEDLWRGHLRMELDHLDELCRRVAELDRELDALGEADARVRRLRTIPGVGPRLSELVVAMIDDPKRFGSARQVSAYAGLVPRRYQSGEMDRSGRISKAGCGKLRKLLTEIAWGMLRHNPHGAGVFNRISKGQKTRRKQAAVALGRKVLCWCWAMLRDGADWRVPAAAARPKPTLAAAPPAALPCG

SEQ ID NO: 498368 - protein, 348 aa, unidentified
MNAVHYIGFDVHKKTISFCVKTAAGEIVEEGSLLAQRAVLRRWAAARPQPWRGALEATLFSNWIYDTLQPYGGQLEMAHPAKMKAISAGKKKSDTIDARTIADLVRCNLLPACYVAAPQIRELRRLLRYRSLVVSEAVRMKNKMAGLLMETGALYVKEKLHRKKYFASLLEELEEVPESVVDLLRLSRGALEMFESTQKRLVRELLAYPELAERVERLMTIPAVGEITALTWALEVGDPQRFHSSSDAMSYCGLTAALKSSAGKQQRGPISKQRNRWLQTTLIEAAKLAPRWNPQLAALHARELERGHRNRATLAVARKLVAYLLAVDKSGQPFRVRAPSEVPTQKAA

SEQ ID NO: 498369 - protein, 342 aa, unidentified
MKEVSIVGLDLAKRVFQVHAVGSDGSVVLRRKLSRGQVVTFFTELPKCTVAMEACATAHYWAREIGKLGHDVRLNPPAYVKPFVKRQKNDAADAEAIVEAATRPSMRLVVPKTESQQACSMLFRTRDLFVRQRTQLINALRAHLAEHGVIAPQGIANLASLAEIIEDHDTVLDLIVVETARLYLDQIDGLSSRIASLEKALRSEAKHSQSTARLMSMPGMGPITAMAVEASAPTMVTFRRGRDYAAWLGLVPKQHSSGGKQVLGRTSKMGQRDIRRLLIIGAMTVIRWACRKAPPENSWLARMLARKPRMLVAIALANKMARSIWAMMTKNEDYRDSALAAA

SEQ ID NO: 498370 - protein, 543 aa, unidentified
MVTATARKRWRSIPFRRVHPVSPEGRTGTSDYLKRGSQLQRPEMKTNHSKQTAKAASNDKAAVSAQRRPRRKKARNLRGAVLDGLEQINLHAAGIDVGAGENFVCVPRSSVKAGESPVRSFGVFTQDQDALVEWLKACQVSTVAMEATGIYWVSLFDKIEAAGIEVVLVDPHSVRQVPGRKSDVMDCQWLQQLHTYGLLRGAFRPEASVRRLRVLCRHRADLVCEGASHLQQAQKALVQMNVQLHLVVSDINGETGLRIIDAILAGKRDPSALAKLRDPRIKKSTVPQMEAALTGHYPEEHLFALRQNIEAWRFFQSQLAGCDLQIEAALKAMASAERTGVPLVPPKAVPAAVPGTEGAKPKRSRPLHGNNALTLDFSQQMRRICGVDLMKVCGLNLLSVLMIVAEIGVDMSRWRSAKAFSSWLGLCPGTKISGGKTLSRRTRHVVNRASILLRLAALAAGQTDTWLGRFYRRKRSHLGAPKAITATAHKLACVIYHMLKYQEEFLPLDVAIYDIKAQEHRMRYLRKQAEELGFELVERKEAA

SEQ ID NO: 498371 - protein, 370 aa, unidentified
MKQYATSIGLDVHARSIAACAFDPMTGEVTRASFPYDPAAVAEWALTFEAPRAVYESGVTGFHLCRALRALGLDCVVGAVSRMQRPSADKRRKTDRRDAEFLARLLATRNVVEVDVPDEECEAARDLSRALEDAREDLQRAKQRLLKFLLRHGLVFDERTPSGARKGNWTRAWWAWCRGISFPEPDAQRVFEHYKDEVRRLEDAKRSLERAVAEAAGRPRWKARVDALRCLKGIDVATAHALVVEAGEFSRFRSAPAFAAWCGLVPSEHSSGEGQSRGGITKAGNGHARRLLVEAAWHVPMSGRDPKDLASGQAVAPAVRRHATKGVRRLIDRREAMAEAGKRPAVANCATARELACWVWAVGRMVEACA

SEQ ID NO: 498372 - protein, 387 aa, unidentified
MNYNQNRKISQITENTLIVGVDIAKHKHVARAQDFRGIDLANRLVFTNDLKGFQTLTQWINHLKGCHQKNRVIVGMEPTGHYWMTLAYYLKTHDIKCVVVNPLHVKRSKELDDNSPTKNDTKDAKVIAQLVKDGRYSEPTLPESIYAELRQGMKLYDQMVQDRNAIKAKVHNVLDRYFPEFLTVFKNWEGNAALQILRAGLFPKDIVKMPEEAILFEIKKAAQRAVGMKRVQKLKEAAAKSVGLSVGVRFAKKELRYLMEQYDDLTARIDELAEELSEMVLTIPGAKEISAIKGIGVMTVVGFFAEVGDLSQYHHPRQILKLAGLNLRKNESGEHKGRTTITKRGRKRLRALLFRVAMPLAATNPAFKRLHEYYRHRPENRSQENKR

SEQ ID NO: 498373 - protein, 366 aa, unidentified
MKKISTMQVFSNEILKEQKLTIGMDLGDRWSFYCILDEACRIILEQKVPTTPEAMKQTFSRIPQSRIALETGTHSPWVSRLLTELEHEVIVAHAQKVQLITKSNRKDDRHDARTLARLARIDPELLGPVRHRSVQAQIHLTVIRARAELVSARTALVNAARGLVKSYGQRLPKCGTQQVNWELAAALSTELRDVLEPLLKEVESLNERIKEYDERMEKIAKEVHPEVSLLKQVKGVGTQIALTYVLTIEDPHRFLKSREVGCFLGLRPGRRNSGESEPQKKISKEGDRYLRTMMVQGAHYILGPFGQDSDLRRWGLKLAARGGQNAKKRAVVAVARKLAVLLHRLWVSGEVYEPLRNSQKAMRAVA

SEQ ID NO: 498374 - protein, 411 aa, unidentified
MQVLYPRCCGLDVHKATIAACVLVADGHTKQKHLLRCKTMTHDLLAFAEWLAGFGVTHVAMESTGVYWKPLWNVLEGRFELLLINAQHFKAVPGRKTDMKDCEWLADLLQHGLIRGSFVPPTATRDLRDLNRNRTILVQQRAAISNRIEKLLEDANIKLAAVASHVLGQSGRAMLHAISAGEADVDTLAGMARAKLRNKIPELRVALNGMIRDHHRFVLKQWLLELEAVEKRIASFELEIEQRTEPFQEVVNRLMSIPGVDRITACALIAEIGTKMSQFPTAQHLASWAGICPGNHESAGKRLSGTIRKGNPWVRRILCQAAWAASHTKDTYLSAQYRRLAARRGKKRAIIAVGHTILVIAYYLIARGERYRELGGGYFDQIHSEGLKRHLVKRLEGLGHKVTLESPIPGC

SEQ ID NO: 498375 - protein, 458 aa, unidentified
MKLLYRRCAGLDVHKSSVTVCVRRRVSGSSQVEMEEAVFATFTQDLRRLGAWLKQHKVKHVAMESTGVYWIPVWNALEGQSLSLTLVNPATVRALQGRKTDRIDARRIAEYMQYGLLGGSFVPPRAVRQWRELTRMRVHVQQDRNRVINRIARQLETVNIKLSSVASNIVGKSGRAILAALAAGRSTPEQMANQALSRLRDKRAALVLALDGKPDAHFRWMLSRLLRKLESLDMELAEIDAQLDQQMSEQADLIERLSTIPGVDRTTAQAVIAELGTDMSVFPDAAHLASWAGLCPGNAESAGKRFSGRTRKGDRYLRRVLVQSAWAAARTRNCFLRALFFRIAGKRGLKKAAVAVAHRVLTIIWRIIRDGGAYEERGDDYFDQRDPQRTARKLTRRLEHIGFEVEIKRRPIDPVPNDQAVPASVCGKCHRWHLAHCIHHNPRPLRKRHQPKSFESQG

SEQ ID NO: 498376 - protein, 340 aa, unidentified
MGDITTIGLDLAKNVFQVHAVDAAGNVVVRKRLRRGQVLVFFARIPSCLVGLEACATAHHWARELIALGHEARLMPPNYVKAYVKRNKHDVADAEAICEAVRRPSMRFVPLKTVKQQSALMMHRARDLLIRQRTMLVNALRGHLAEFGLIEAQGLHKVVRLITIVMDEMDRRIPDIARQVLKVIVHQIEDIQTGIAELETQLLAWHKNNPVSQRLVTIPGIGPVIATAIAATVADPSTFRSGREFAAWLGLVPRQNSTGGKARLGGISKRGDSYLRRLLVNSAHTVLLCSKAAKTDPWLTSLLGRKPRLVAAVALANKTARVAWAIMSRQDTYRHVAAAA

SEQ ID NO: 498377 - protein, 387 aa, unidentified
MHIQQIAPVAKSEFAPVCVAMELSRSKWLVGVGGPHRRNVSRHQVTGGDLAALLALLARLAVTESKVIGQTVCFHICFEAGRDGHWLYRALKAEGYDVYEIDPASVSVNRRARRAKSDKIDVDMLVRTLAQLLRGEIDACSVVQVPSEEEEDAKRPHREYERLVKERTSHLNRIKGLLFAQGIRDFDAMAADYAGRLAALPIMPNLKAELGRQCHRLFAIQQDIDAVESAMKAAIVSSKRKSVRAAAMPSAMQTKVAQLFKLRSIGVHFSTVLGSEVFYRTFRNRRAVGQYLGLASSPFQSGDVAHDQGIAKVGNRRARKAIVELAWLWQQHQPDSALTKWFQQRVGDQKGRVRRIAIVAMARKLAVALWRYLETGLVPEGAVLKRA

SEQ ID NO: 498378 - protein, 479 aa, unidentified
MSKRTPKKTTTDPPQKTPRARTVERLRVTNSHAAGIDIHSEIHWVAVPPEDALPPPSDHPANLPANVRSFGACTADLHRLADWLAECGIKTVAMESTGIYWIPLFELLESRGFEVYLVDPRQSRHAPGRPKSDVLDCQWLQRLHSYGLLSASFRPSEQVVVLRSYLRQRQMLLRCAAQHVQHMQKALEQMNVKLTEVVADITGLTGMAIIKSILAGERDANKLAALRNVMCKRTRSEIARALEGSWRSEHLFALKQAVELYEFYHQKLRECDTQLDLHLQTFADRTEGQPLQPRPKGHSPTRGRNVLTFAGGREALYRMSGVDLTMLEAINESTALVILSEVGPDVSRFPTAKHFASWLGLSPLHRGSAGKIHSRRVRRGAHRVAQALRLAVQSCHHAKNALGAFYRRIQARAGAPKAIVATARKLAERVYRLLRYGEAYVRQDVEAYESAYRARLVKGLARRAGELGYRLEPTVSAVS

SEQ ID NO: 498379 - protein, 462 aa, unidentified
MNRKRSKSKSRVDRTMSVVHPNAAAIDVGATMHMAAVRADRAPEPVRSFGTFTADLHRLVDWFTECGVETVVMESTSVYWIPIFELLDARGFTVLLVNARDAKHVPGRKTDVSDAQWLQRLHSFGLLRASFRPKGQIAELRAYVRQRERLLQYAASHIQHMQKALTEMNLQLHHVVADITGATGLRIIRAILAGERDPEALACLRHYSCHSSAETIAKALTGSYRNEHLFALEQALALYDAYHEKASACDVRIEAVLKELSTHRGRAHGSAPPVSRRRNRTDQTNALAFDVRAALFALLGKDITTIDGLGPYLSLKLVAECGDDLSSWPSAKHFTSWLGLAPSNKVSGGKMLSSRTRRSGGRAAALLRLAAVTVGRTNTALGAFYRRLSSRIGKAKAVTATARKVAVLFYNAVRYGMEYVDPGASSYETRYRTRVLNNLHRRAKAFGFVLQPLEPKAGPAVS

SEQ ID NO: 498380 - protein, 413 aa, unidentified
MSIDPSAAAGRITAGVDWAKDDHAVCVAGSQGEALERFTVRHDAAGLRQLAARLLRAGVSQVGIERGDGPVVDTLLAAGLAVFVIPPAQVKNLRSRYGSAGNKDDRFDAYVLADVVRTDARRLRPMERDSDQTTALRSTVRARRDLVGHRVAAANQLRAHLQIVFPAAAALFADIDSAITLAFLSRFTSQEQADWLSPKRLAAWLKSVAYSGKADPAVLHARLLAAPRGQAGPHAGVHAGTTLALVAVLRTLNAQIQALADSIDAQMAAHPDAVIFQSLPRSGTVRAARLLAEIGDARGRFPTRDSLTCLAGVAPSTRQSGKVKAVTFRWGADRQLRDALCDFAGDSRRASPWAADLYDKAIARGCDHPHAVRILARAWAHVIWRCWQDHAPYDPATHNSLQTLLRQQQPNAA

SEQ ID NO: 498381 - protein, 347 aa, unidentified
MSEISIIGLDLAKQVFQIHGADPAGRCVLRKQLKRREVLQFFAKLRPCTVAMEACGTAHYWAREIGKLGHCTRLIPPAYVKPYVKRGKNGAIDAEAICEAAARPTMRFVPVKPMENQAIVMLHRSRDLVIKNRTMLVNALRAHLAEFGFVAGKGIWKLPDLVKIVSQAPAEALPELVRTTLSGLLDIIAAISSQLDAIEKRLREWHKKDARSKRLDTVPGIGLIAATACRALVPDPKLFRNGRHFAAWIGIVPKLDGTGGKTRLGRISKAGDRYLRRLFVLGATSLLRSLENKSTRLALWVQALLARRTKRAVTVALANKLARIAWAVMTRDEAYKPLAAAQPAGCA

SEQ ID NO: 498382 - protein, 356 aa, unidentified
MSHDVKYIGMDVHKEAIVIAVLNGSGKLVMETIVETKASSILQFIHGLRGELHVTWEEGTWAAWLYDVLQPQVQHIVVCNPRRNALLKEGSKSDKVDARKLAELLRTGMLRPVYHGENGLRTLRELARSYQTISKDLTRVMNRLKALYRGWGIPCAGTQVYAPRYREEWLSKIEQAGVRRRAELLYQQLDGLQVLRREVRGEFLAESRKQKAAKLLRQIPCIGPIRAGLLIALMQTPHRFRSKRQLWTYSGLGIETHDSAQYRYVGGQLQRSKKPQQIRGLNQNHNHEMKGIFKGAATRASCGTGPFRDFYAALLTKGMKPEMARLTLARKIAAITLTLWKKEERFDAEQLKTQAA

SEQ ID NO: 498383 - protein, 358 aa, unidentified
MQKYNISFKGQKIFIGIDVHKKNWDVAIALEIGIIKRHTQKPSAKELFDFLKKHYPDGDYLAVYESGFSGFSTYYALKEVGIDCIVIHAADVPTTQYEEVMKSDRLDSIKLVKSLKAGLLKGIYIREKENIDDRAVIRIRKTIQKELSRYKIRVRHILHSNGVQLPDRFEKPGSLWSRAFIKWLKEDVTLLSSTRNSLDLLIRQVETIRKTLLEATNMMRYMSQTERYKHKFDLLTTVPGIGVTVAMCILTEVYDIRRFHNEKQFAAYLGLIPTCHSSGEKMIHGEMTFRGNKQMGPMLIEAAWTTISRDAGLGSLYLRYKERMKPQEAIVRIARKLSNVIFAILKNGTEYIPYQTGK

SEQ ID NO: 498384 - protein, 374 aa, unidentified
MDKAYYTTIGMDVSDRKTQVCVMAKAGATPRIVMETTIPTTKDGLAKFLSTQDGAAPVVFETGMHCRWMNEVAEGMGFKVYVANPCRIRMIAESKTKNDVNDARTLARLALSDPGLLHPVKLRGPEHQKMLNLHEMRNLLVKQRTGIVVQLRAVAKSMGFRIAKCQAASFHKLERRAWPKELNDIAWPMMKNLEQLAVTIKTYEKLIRELAGTPTFKAQVERLMEIRYVGLYVATGFVAVTGGDMDRFERPRDVGPWLGVTPRQDQSGDIDRQCHITKAGSPLMRRLLVESAQMILRDGSADTDLKAKGLRICARGAKIAKRKAITAVARSLAVLMVAMLKKPDAPYVPLSARCEKELLAMRATVEAAGPGKNP

SEQ ID NO: 498385 - protein, 347 aa, unidentified
MNSLTDLLDVVIGVDTHVLTHTAAIVDAGTGGVIAQLTVDATATGYAELVDFADEHSTLRAWAIEGTGGHGAGLARHLERSSEVVVELDRPERAQRRHGAKSDPLDAIRAAREALSRPRLGTPRSPGDRQALSVLLAARRSAVASSTDAQRQVFSLVIAAPEPIRVKFRGMKLPAMLRTAAKLRLSPSWDLETRTTVTVLRSLARRALELTAEAAAHEKEILRIVRTMRPDLLDQPGIGPIVAATVLCAWSHPGRIHSEAAFAMLGGVAPIPATSGQVTHRHRLNRHGDRQLNRALHVIALSRLRYDERTRAYADRRTSQGRSRREIIRCLKRYIARDLYRLLEHPA

SEQ ID NO: 498386 - protein, 339 aa, unidentified
MGLYTAFDLHSNNAYLGIIDENGKRLFKKKLPNDTEMIKTTLLPFKAAIEGIVVESTYNWYWLVDMLMEEGYQVHLANPAKIQQYSGLKYSDDKHDAFWLADMLRLGILPKGYIYPKESRPIRDLLRKRSHLVKLRTSLIISLQNIIARNVGSKLKASDIKVLTIDRVKPLLEYNEDLALAGKVSKGAIDSLSQQIKTIEKNIWGKIHLRNPYDHLLSIPGVGPIIGSTIMLETGSISRFPKVGNYCSYCRKVPTGRFSNDKRKGSGNPKNGNHYLACAYSEAAEHAKRYDEESRKFFNRKLKSTNAPIAHNALAHKFSRAAYYIMRDGVDFMPEKAFT

SEQ ID NO: 498387 - protein, 413 aa, unidentified
MEVLYRCCCGLDVHKKSITACVLWAEGKGQRRKERRTFGTFTEDLLRLLDWLKECGVTHAAMESTGVYWKPVWNILEGQLEQVLLVNAQHIKAVPGRKTDQKDSEWIADLLQHGLLRGSFVPPRPTRELRDLTRYRVSLAEECNRISNRIQKVLEDANIKLASVATDALGASGRAMLEAIVAGEQNSEKLAEMSKGLLRNKREQLKQALEGRITEHHRFMLRQLLDDLRHAEAKMAAIEAEIDRRMGPFAEAVTRLKTIPGVDRVTAWGLLAEIGFDLSQFPSSKHLASWAGLCPGNHESAGKRLSGKTRKGSHTLRRCLCQAAWAITRQKKHYLAAVYHRMAARRGGKRAVIAVAHALLVMAYHMLKRKMDYRELGPDYFDRLNQRHITQVLVRRLERLGNTVILQSAPEPV

SEQ ID NO: 498388 - protein, 352 aa, unidentified
MQHFIGTDMHTRDQVVAWIEEKTGEIKKRRLEHAGEEVRKFYAQFPPGTVVGIEATFPAYWFERLLGELGHELWVGDAARIRASEVRYQKTDSRDAELLLDLLRTGRFPRIWVPSLAERDLRQLLVHRMKQVRTRTQVKNQLHALAISQGVCRKRKLWSAKGRAELEKLALLPWAARRRKELLESLDRLDAQVRELDRAVEEAGRERAEVALLRTHPGVGMVVSLAFVLTVGPIERFPNSRKLVSYWGLNPREASSGGRQRLGSISKQGNTMMRWLLVEAAQTAARLDPQLRRTYQRLKKQKTSGAAKVAVARRLAVRLFWMLRTRHNYTQLVHMSGSPSSAVVPPQGGPNP

SEQ ID NO: 498389 - protein, 403 aa, unidentified
MNSVGIDISKGRSTIAVMRPFGEVVISPFEVRHTDSELSELARQLKSLDGETRVVMEATGNYHASVAKLLHDAGLYVSVVNAKLVHDYGNNELRRVKTDRKDAVKLANYGLDRWLTLPRYIPEEDTRLLLKNCYRQYRQYSKVQTVLKNNLISLLDTVFPNANRLFSSPIRGDGSEKWVDFVAEFWHCRCVSEKSERAFTSKYLRWCRKHGYNFSEAKAHTIYAEASGHIGVMPKSETTKLLVEQAVAQLRATSTALAALKHEMQSLASQLPEYPVVMDLFGVGPTLGPQLIAEIGDVRRFYSKKALVAYAGLDAPPNDSGDVTGRHKSMSKIGASSLRRTLFLVMSVYLQTAPLDEPVYQFMDRKRAEGKPYRVYMMASANKFLRIYYATVKAYLESLEHTA

SEQ ID NO: 498390 - protein, 408 aa, unidentified
MVIGLDLASAEHQVVVLTADGQRLTRFKIPHSRVGLEELLRRTMPAALSRTGGSRVFAFEATGHVWEAVAYILRARGERYVVINPLTTFRVREARQLSREKTDLTDAEQIAELCRSGLVTRTQLEARPYLALRRAWGEYRRLREERARLKVLVAHQLYGLFPEFLRVWADLLQPGALAVLRTGLSPPRWPPCPSGSSWPVCASTAPVAESGASSWRRSTATRSKLSPAPTASTSSHAKSSRAVARIDVLTAQMTTVATEVDALLADLEETPYLRTIPGLGWASVAGLLAHVGAITKYRHGRQLIKLAGTNPSRRDTGQTVGRGQTMSRRGRAGLREVMYLATISCLQHNPRIRAHYDRLIQRADRPLSKMQALGACMNKLLLYAFAVMSRREAFQLDHDWQRTMSRVA

SEQ ID NO: 498391 - protein, 338 aa, unidentified
MKITTIGLDIAKSVFHFVGVNKAGKLVKKKMLKRREVLQFVAKIEPCLIVMEACGGANYWAREFECLGHQVKLIAPQYAVPYRQGNKNDYNDALAIAEAAQRPNMRFVQPKPVEQQDVQMLHRMRERLNKQSIALINQVRGMLAEYGIVIAKSKAAFRMAFPDILSDESSELTVKGRFIFTQLHDEFSDIEKRLKSCDTQIIEEIKTNQVCQRLETIPGIGPVTSTAFYAAAGEGKDFTNGRHFSAWCGLVPKQHSSGGKDNLLGISKRGNAYLRTLFIHGARAVLQHSGGKEDRLSRWAYALAERKGFNKACVAVANKLARMTWAIAAREDEYRTFA

SEQ ID NO: 498392 - protein, 456 aa, unidentified
MKKRIRYRTVNVESVEVKALARKFAGGRCIVAIDIAKEAMVAGFADEKGTCEALVRFSHPTQTLLFVTLLVALRELGLEVEAVMEPTGSYGESLRYQLGKRDVPVFRVDPTRSHALAGVLDGVPSLHDPKSCTLIAHLHAQGISSRWREKSPEARAMRALITEHAMHQDPLERGRGHIEAMLAEYFPEFGDQVDHSSAWHLHLFEAYPSPARMAAAPDDVARLLRRVTRGRLTEARIQTIIDLARRSLGAPMLEEEARQVSALARTMLYHREQKRGVEKRIEDAVERRPELAPLRAMLGPVTTAAIVSDLGNPAEYGSSAAFQKALGLNLKEKSSGTVTGRLHITKRGSPRARKYLFLAALRFIQADPIVRAWYEARSAHKAGLKLKAVVAVMRKLARAIVHVARGDRFDAAKLFDTRRLVLTPPKPPRNDASGAGEETTPAVVGEALDTTSNATL

SEQ ID NO: 498393 - protein, 339 aa, unidentified
MEVTTIGLDLAKNVFQVHGVTEDGTVAFNRSLRRAQMFAFFERLEPCLVGMEACGSSHYWARELSKIGHDVKLIAPIYVKPYVKRGKSDAADAEAICEAVTRPTMRFVEIKSPEQQGILSIHRARDLIVRQRTQTINMLRGLLAEFGIIFAQGVGHAIRFAKRVNEGHLPDLPQAACDVVTDLSEQLLTLHARVNWYGRRMAVAAKSEPRIALLETIPGIGPITASAIVATVGSGEQFRSGRDLSAWLGLTPINKSTGGKERLGRISKMGDRYIRRLMVVGMTSRMKQIRENPERFDPWFADILQRKPAKLAAIAMANKTARIIWAVLARNEPYAARTA

SEQ ID NO: 498394 - protein, 306 aa, unidentified
MLLFAADIAKDDFESFDGKHSLKTCNSPEGVHKFVAALPPGAALALEPTSTYSDLLATKAYGAGHTVYMVQPSWVKHFRKSKKGRAKTDKVDARLIHEYVLDNLKDLHPWRPLDARLAELRELVRQRCAAADDLARARQTYKSLKLHPSLMNPMLRAHENLKKELDKRIAKALKQFPEAKVLLSIKGIGNLIAATILVPLLHFEFKSVDSFIGFIGIDPVPQDSGDKKSIRRISKKGDSYLRRAFYMAAFGACRTDVWKPRYEQLRGKGLKPKQALIALAKKIATTAFHIFRIQVDFDPAMVALKN

SEQ ID NO: 498395 - protein, 459 aa, unidentified
MVSAAKGCGKRKVAGIETAIGRINGNAAGIDIGSQRHYVCVGAEKSDSYVRSFGCYPPDLEEMAKWLLECGIETVAMESTGVYWIPVHTVLSQHGLDVNLVDARHVKNVPGRKTDVADCQWIQQLHSFGLLRGCFLPESDIGVLREYWRHRSSLVESVSREILHMQKSLEQMNLQLHKAISDITGVTGMKIIRAIVAGERSAIVLAGMREAGVKKSEDEIRKALSGFYREEHLFTLKQALDLYDILHAKIRECDQKIHECLRSFEGKSDLESYEPKSPKSSRRKNQPHFALGRELYRITGVDLTAIEGIESLTAQMVISEVGFDLSRFPTEEQFTSWLKLCPENRITGGKVRRRGTQKSQNRLANALRIAAQSLHSSKSALGAFYRRIRARHGASKAITATARKLACLIYRMLRYGMEYVSQGQQEYEQRYQEQQRQALKRRAAALGYELVCLQTGEVS

SEQ ID NO: 498396 - protein, 340 aa, unidentified
MVLIGIDPHKATHTAVVIDDAEHELARIKVKADRSQVAALLEFADEYRPRRWAIESAGGLGFLLAQQLVRAGEDVVDVPATLAARVRLLGSGRGSKNDPNDALSTAIAALRDPHLRTVMVEDHAMVLRLLADRHQDLTSLRTQAVCRLHALIAAMVPGGVQRRISADGAASRLRTIHPDNTVEAARKEMALELVADVRRLDKNIVEVKKRITTAVAASGTTVTEIYGVGPIVAALLIGHTGDITRFPTKGHYASYNGTAPIEASSGRVVRHRLNLRGNRQLNHALHMAAVTQISRDNPGRAYYLAKIEDGKSTKEARRALKRKISDAVFRQLRDDARPQT

SEQ ID NO: 498397 - protein, 404 aa, unidentified
MWYTGIDWADEHHDALTIDEKGHQMGSIRVDHSPQGFAKLDTFLMQIIGSASKEDMACIIETTHGLLIAYLLEAGWPVYPVNPRTVDRRRSASGAKTDLIDAYLLAKTGRADFADLHRLTPDSDQVAELKQLTRDQDTLIRTQTRLVNQLTACLKAYYPVALDLFSKLQQKSTLGFLQAYPTIEAARAATLPEIQQQLKQTRHPHPADAAASIVELLQQPQLQADRVLTRTKSRLMLALVSQLLPLLAQIADYDKEISTLFLTHEDHALFESLPRAGQHLAPRLLAEIGDDRERYQDASSLQALGGTSPVLYQSGMYSKAHRRLGCIKPLRNALHQFAWQSTQCEAWAKDYYQRKRAEGKSHTVAIRALSNVWVRIIFAMWTRRECYQTATFELAKLQHARRVA

SEQ ID NO: 498398 - protein, 341 aa, unidentified
MNTITIGLDIAKSAFHLIWMNESGKVLKKKQLTRKKMFEYFSNLLPCIVVMEACGSTHYWSRVLIRCGHEVKAIAPQFITAYRKGNKNDYNDAEAIAEASQRHNMRFVPLKSLEQQDIQMVHRIRERLVHNRTALSNQIRGLLAEYGLVTPKGLAHLKKNLPIFLEDADNELSAFTRRYFLSLREELDDLIQKIALLDKEIMAISQENTVCQRLTTMNGIGPLISSALYAGIGDGKAFKSGRHVSAWLGLVPGQHSTGGKPTLLGISKRGNTYLRTQLINGARSALRHCDNKTDQVSVWAQKLKARSNYNNATVALANKMARMAWAMLHHQEDYKFKTTIS

SEQ ID NO: 498399 - protein, 419 aa, unidentified
MPKPKPRATMPYLLNNFLFRTNFFYKLRRTRKPKRNYKLLNYTNAKCENAFGLRHLIFPISKKLNLFINYNLTIGGIKCITQVLIFINLHKFTSYLTTVDSSGVILKQENLKNVAHNFVQYFNSIPGEHQATVESTMTWYWLNDLLTSINIPLVLAHAKYVKAIAYAKVKTDKVDSHTLAQLLRMNFIPVAHKISNDNRTLRDALRARLKIVQRHTSVTNSMQLLLAKYNFDSPTQLSGIPEFQYEQLTKVEELLNEQMLELEKQLYPSLIPNDDIQRLLWIPGIGKMNAFTILLEVDDINRFPDVKNFFSYSRLTPSARNSGGKSKQRSSKDGNKYLKSVFTDAAIHAVQYYPVIKKFHNSLLHKKNKFVARTIIAKEIARVVFYTLKYKTDFNNKFKGKELEHTKSLQWPRVVSPSA

SEQ ID NO: 498400 - protein, 449 aa, unidentified
MSDIPTSTTQPEFGALIGIDWGDKKHAWALQVGDSTKIEKGDIEHTPEAIQQWAAGLRQRFPTGRLAVALEQSRGPLVFALSKYEHLTLFPIHPTSAAEYRKIFRPSGAKSDGPDAVLHLDMLARHRDKLRPLNPDTPETRALQLLTEDRRQLVNERTRYSNRLTANLKSYYPQVLQWFDDLYAPVTLDFLDQWPTLEELQKAKPGVWSEFFQEHNCRDAKTQQRLAAIPMAVTATTDFAVVTAGRAGVCAAVRLLRNLNQAIQEYDRQIDQLAKGHPDFAIFQSLPGAGKVMVPRLIAAFGTQRDRYQRAADIQQYSGIAPVTEASGQQLWVHWRWGCPKFLRQTFHEWAAQSIAQCDWAAAYYRVQREDKNKSHHAAVRSLAYKWIRIAFRCWKDRQLYDDSKYELALKTRAKATPEPKQPSAFPLPLRWISCAGFQKLAEKNGENI

SEQ ID NO: 498401 - protein, 327 aa, unidentified
MIKTSAPVYVGMDVAKATLQVHLRGHQYEFSNDAQGHARLSKKLARLTQAHVVCEATGGYERPMVEACHKAKIPVSVLNPAHTLAASQAQGKRAKTDPCDAAALTDYGQRFQPEPTAAMAPALREITDLTLWLKQLIDHRAVVKTQAEHHAHAFVRRQHEALLAHYQSQIETVEQEINTRVQAQASFQQRVDCLTQIKGVGFRTALLTLVFLPELGSMNRGGTAALAGLAPWTRDSGTMRGKRCIGGGRSQVRPVLYMAALSASRSNPVLAPFCQALKKRAKPSKVALTAVMRKLVIHMNSELKKLAAKPGNEETRKSNKTKKSLAK

SEQ ID NO: 498402 - protein, 361 aa, unidentified
MVLERTSVGLDVHARSVVAGVLDVETGELWSRRLPAATEAVLGWVGSLPGPVAVAYEAGPTGFGLARALQAAGVRCVVVAPSKLERPPGDRVKTDRRDAERLARLLHIGELPEVRVPPVAEEAARDLVRAREDARADLMRARHRLSKLLLRQGLVFQGTAWTQAHQRWLRAHQQQLTQPALRLAVDEADGAVLAVQARRERLDQAIAELAATWPWAPVVGRLGCLRGVGVLTAFGLAVEVGDRQRFTGATIGAYLGLVPAEQSSGTQRAQGSITKTGNRHARRLLVEAAWHHRKPYRPSRALQVRQAGQPAAVRERAERGNRRLHQRWDRLDARGKRSTISVVAVARELAGWCWSLAVLEA

SEQ ID NO: 498403 - protein, 356 aa, unidentified
MLNKFNKFVDFSGHNVYAGLDVHGKSWTTTIIVDDIEHRRFTQPPESMALYKYLSSHFPGANLFSAYEAGFCGYHHHRKLIELGIQNIVINAADLPITNKEKVNKNDHIDSRRLAQALQRNELKAIYVFGPEHEQFRSLFRMRWRAAKEHRRAKNRIRSFMYYYGINPPSDFNPEHWPLGFIHWLNQITMPTEAGTLSLKFLLKAYQNTREQLLEVTRQLRHEVKIHYPGLYKLLMTIPGIGPIVAMCLIAEIGDIKRFKSYRHLSSYVGFIPNSHQSGEKDPNGRLTYRSNKYLRSMLVESAWVAMRHDPALLKYYRERITKQKPQYIIIKVAHKLLNRVRQVWISQNPYQTAMA

SEQ ID NO: 498404 - protein, 400 aa, unidentified
MHLTANISIPQKNFIAIDLHSDNAVICVRRNALNKAGELVGKNIWCGRVSIRDGLDNFIKVLVPHCQDFDHVAVVESTYNWYCLADAFEERGWLLRVADPSTVSQANLKSSDDRTDAQYLAERLRVGSLKHYLPLNYSSRALRDLCRYRMAMVQDCASLKIKLINLYRNQLSKNVRVADLLERRQPHMQPNYRFNSDILEEFKDPNIRLRVAFESYRIAMLEEMIEECNAEIQKQCKDQELVKLCKTIPGCGPVLSAVICTEIGTMQRFKSAGDFVSYCRLCSTSKLSNGKSKGLGNAKNGNAYLSWAFTEVAQYASRNPVIREILQRLLRKYGGLRVKAIRTLAAKIARVTFYVLKNKQPFNAAKCFGMELTKSIVKKLPHKPLREDAAVVLPAVAGQA

SEQ ID NO: 498405 - protein, 499 aa, unidentified
MPSRRKGKNTMTTAGKQPSKKEGFDPQRSALKRKARGSCCFEGKGKRRKSKLSVINPDAAGVDVGAQAHYVAVPEDRAAVSVRSFGTCTAQLDEIVQWLKDCGIKTVAMESTGVYWIPLFQKLEEAGFEVLLVDARQAKHVPGRKSDVQDCRWMQQLHSYGLLRAAFRPEDGICRLRTFQRHRKNLVECAGMWIQRMEKALNEMNLQLHHVLSDITGQSGLAILDAIVAGERDPSKLASLAHYRVKKSQAQIEAALRGDYRPELLFVLRQSLENYRQMQQQILQCDLSVEKQLAAMSHQSKPSEHLESKGQSEDSAHCRPGKEKPKNGLESTLAAHLKRILGVDLTTLPGLNVLASLTLLSEIGTNMTKWRNHKAFVSWLGLSPNNKISGQRVLSSRTRKVVNRAATTLRLAAMLVGKTDTALGSFYRRKRAQLGAPKAITATARKLACLIYHLIKNGQAYKEPDLRTYELKYQEQILQSLRKRAKSMGFDLVELPKAA

SEQ ID NO: 498406 - protein, 340 aa, unidentified
MQITTIGLDIAKHVFQVHGIDVAEKVVLRKQLRRGQVLKFFASLPPCLVGMEACATAQYWARELTKLGHEVRLMPAKDVKAYVKRNKNDAADAEAICEAVRRPTMRFVRAKSAEQQSQLMQHRARDLLLRQQTQVINALRAHMAELGIVAAQGREGLKQLLTIVADEKDVRLPIDARASLIVLAAQLQALHTMIGSIDRRILVQHRGNEASKRLQNIHGIGIIGASAIAATVTDPKAFRSGRDFAAWIGLVPRQDSTGGKQKLGPISKQGDRYLRRILVVGAHSVLRRAKVNPERYPWLTQLLARRPFKVVAVALANKMARIAWALLCNGTHYRPQLATT

SEQ ID NO: 498407 - protein, 387 aa, unidentified
MSQTFAAVIPATVDYETTLILSIEVSNKSWVLAAQVPGLPHTKAKRSINPEAKALLTAITGYRARAADLGHQIERVIAVYEAGWSGFWLARWLRRHGVEVYVIQPSSVPVDRRLRRAKSDSIDAELLLRTLLAWLRGEPRVCSMVPVPDEADEDARRCVRERTELISERVGLTNRIGAVLATLGVSDYNPLLRNRHRRLAELRTGLGEPLPPNAHAKIERLLARLELVLAQIAELERERDAVVETEASDQASKMIQQLTSLRGIGVQSATVLVREGFVRRFANGKALGSYAGLASSPYSSGGIDHEQGIGKAGNRRVRTVMVELAWLWTRYQPAAAQVLWFRERVGSTGRRVRKIILVALARKLLIALWRFVIDGVVPEGAVLKSVA

SEQ ID NO: 498408 - protein, 390 aa, unidentified
MEKQTAVAPTAVAGEVVRIFLALELSRSSWLVASHTPAADKISRHKLAAGDIDGLLALIERLRTRVEQKTGQPVQVISCYEAGYDGFWLDRKLKAEGVVNHVMDPASIQVDRRARRVKTDAVDADALLRALMAFCRGEKKVCSMVRVPTRDEEDAKRLSREREQLIKERVRHVNRIKGLCATQGIYDYQPLKANRLERLDELRTGDGNPLPERLRNEIGRQLERLKLLLELIGTVEAERDAVVKADKPASEADRRIRALAKLKGIGPEIATVLYNEVFYRQFANRRDVAAYVGLTPSLFASGDLRHDQGISKAGNPRARATMVELAWLWVRHQSGSDLTGWFLTRVSGIKGRIKRIAIVALARKVLVALWRYLETGLVPTGAMLKAEKQG

SEQ ID NO: 498409 - protein, 391 aa, unidentified
MSMYFVGIDISKYKHDCCIISAADQQIVSKFTVKNDKDGFEHLLTTLNSLSNPEDIKIGFESTAHYALNLELFLENAHHSFMEVNPVLIKEYKKSTTLRRTKTDSVDCESIARWLMTVEYKPHSKGFYHSYSLKSLTRLRDRLIRQRSFYLVKITNVLDHTFPEFKPFFNERLSKTAIYLLENYGSAEKMAHMNSASYDKLRCASRGKFSIQQFLRLKELAANTVGVNNSIFDIELNSLLTLYNSLCKEIKTLEAEITKLIEEVHPHYMSIPGIGPISAAVIYAEYGDISNFSNPGQMLAFAGIEPGINDSGTESHGGRMVKHGSSQLRYVLLNACLPLIRFDITFATYYAKKRAEGKKHRVAITHVAKKLIRVIYALERQDVNFNVQKLR

SEQ ID NO: 498410 - protein, 400 aa, unidentified
MNAVGIDVSKGKSTVAIMRPFGEVVAEPFEVLHTDTELRKLACFLEKLPGETKIVMEYTGNYWQPIANVLHDAGIFVSIVNALLIYKYGNNSIRKGKTDKLDAVKIANYCLDRWTVLERYTPVDQIRQALKTCRRQYDQYIRLKVNLKNNLIALLDGTFPGLNILFKSAPRDMDGHEKWVDFAEKFWHRECICGNSEKAFTNQYKKWCSKAGYRFKEEKASSIYAHALSQVNTLPMTDSIKCLVTLAVSQLNTIIETISVIQHEMLTLAAQLPEYPVVMRMFGVGPVLGPQLMAEIGDVRRFDRKQSLVAFAGVDAPPCQSGTFESKNRHISKRGSPRLRKTLFQVMSTIIQHAPTDDPVFQFLDRKRREGKHYYVYMTAAANKFLRIYYGTVMAYLKKL

SEQ ID NO: 498411 - protein, 343 aa, unidentified
MGEVSTIGLDIAKSVFQIHGVDVDGAVVVRKRISRAKLLEFFAALPACLVGIEACPTAHYWSRQLGVLGHTVRLLPPSYVKAYVKRSKNDANDAAAICEAVTRPSMRFVATKSEEQQSSLMLHRSRQLLVCQRTMLSNAIRGHMAELGIISAKGRNGTAELLKIIADEQDDRIPVAARFSLEVLARQYAAVRAEIAAIEKRIHAWHRSSEESRRLEEIPGVGPIIATALVAEVGDWKVFSSGRSLAAWIGLVPRQHSTGGKERLGRISKQGNRHLRWLLVAGAMAVIRYARQHGTKRAWLARLMDRRPIKVAAVALANKIARMAWAMMVRGERFKEPKLLPAA

SEQ ID NO: 498412 - protein, 322 aa, unidentified
MLPTLGIDISKDSFHVELSINHKLRHRRFTNRKEGFAELCAWLSKHKATPVHACLEATGPYSEALALYLHEQRHTVSVVNPAQIKAFGQSELLRNKDDRPDAALIRRFCEKQCPIAWTPPPAHFRELQALTRHLENLLETRQQQLNRLETTTTKNVVKSLRKLVTHLDAEIKRTEQQIENHVDRHPDLKQQCQLLESIPGIGKRTATRLLAEIENISQYKSARQVAAYAGLTPRNNRSGTMRGQSRLSKTGNARVRKALFLPALVAKQHNPVVRNFCQRLARHGKNKMQLVGAAMRKLIHIAFGVLKSGKVFDPNHELLLNS

SEQ ID NO: 498413 - protein, 412 aa, unidentified
MQDILTCAMGLDVHRDIIVACLVKGAVDAEPEAETRTFSTLIPEMQKLRDWVIESECRNIAMESTGIYWKPIYEMLESCFDGEISILVVNARHMKNVPGRKTDMKDAQWIATLLRAGLLKGSFIPDKAFRELRHLTRYRKSVVHDITAQKNRIDKFLQSSGFRFTAFLSDTFGASGRNIIRHLIEHGSIDREALDKCLKTKTRNRIDEILVALNGSLSEHQRRFLNMVFRHLEDLEAHKHTVEDEITEEVLKHTDALNLLCSIPGIDVTAAAAIIAEIGTDMSSFPDSQHICSWAGLSPGNNESAGKRKSVHINKGNPYLKSVLCEVAWIMASHRKLYLSGWYWKVKQRKGAKRATIALARKILSIIYTMLKTGTPYNEECFEQRRLRCERKRANRLVNELQKLGYVVVAPD

SEQ ID NO: 498414 - protein, 342 aa, unidentified
MDHFAGLDVSVKKTSICVVDDTGRIVREVKVASEPEALLQVLKNPAYHFKRIGLEAGPMSQWLYSALAEAGLPVICVETRHMRAVLKAQINKTDRNDARGMAQMMRVGLYRPVHVKTLRSQKLRMLLTHRKLLQSKAIAIENDLRGTLRNFGLKVGMVGKVRFEARIKELVDNLPDLAAMVEPLLIVRRTLREQFCVLHRRLLAIVRDDEVCRRLMTTPGVGPVVSLTYRATVDVPARFRKSKSVGAVFGLTCAKYQSGESDWSGRISRCGDEMMRVMLYEAAQSILHSKRWSWLKAWAMQIARRRGKKKAIVALARRLAVIMHRIWVDGTEFRWTREVAAA

SEQ ID NO: 498415 - protein, 387 aa, unidentified
MIAHYSDEKFQKEFTIQNNKNGYNYLFNYLNRVNHPQLIFESTGIYSRAMVRFCRNNQINYIELNPLEAKFKTSSLRSWKTDQSDAHKLAQIAPFLNDSDSLNNTTDDIFFELRERARFHLEFENEQNRLKVEIIEILHQTFPGLEKLFKNRYSMIALNIAEIFTHLDFVLQDDSESIISTILKSTDKGLSQRKAESYGETLFKLANDSYPNVNSSSFLVKKAQLLIQKLKKSIGQLSQLDKEMILLAQELDCFEIIYSIPGIGELTAAMIIGELGDISRFKSNKQLNAFVGIDIKRYQSGGTHYRDTINKRGNKKARRLLYLVIMNIIRGQHRYNNHIVDYYYKLRKQPNEKSHKTAVVACINRLLKTFHYLIMNHKLYDYEMSPH

SEQ ID NO: 498416 - protein, 321 aa, unidentified
MKQTYSFSQFVGVDVAKATLDFVDAEGKLKGSIPNSAEPIVSQLIKAIKDPQSTLVVVEATGGYENLLVTTLQQHGIAVAVVNPRRIRDFASALGRDAKTDPIDAGVIAYYGQVAKPAPQEPKTEEAKKLQTLVERRRQLLDLINQENNRLQQTADTEIKESIQKVLETLKTQVKTIDERLAKAVQQDSQHARQVEILESVKGLGPVTICTLLALLPELGVLNRAEIAKLVGVAPMNHDSGESTGRRRTCGGRSYVRRVLYMATLVATRHNPRLKDFYQRLLKAGKLKKVALIAAMRKLLTILNTLIKNDTLWSDEPQKSV

SEQ ID NO: 498417 - protein, 312 aa, unidentified
MTEHYYCGIDVAKDRLDVMVLPDRKSFSVDNNAAGYSELVKRLRGLAIAAIGIEPSGGYERAVIRALLAADLSVRRINPNKLRQFARARGVLAKNDRLDARLIAEYVAIMPTRVVQRDPATEQLAEVVTMRRQLCDEYVAVENQTAHLEDAILRRLNKRRLARLEADILLLDRRMSQIVASNANLTRRYELLTSMQGVGPTLAFTLIALLPELGQMSRKQIAALIGLAPYDFDSGRLKGHRCIYGGRLPVRNVLYMAALSACRYNPALKVFYRRLAATNKKPKVIIVAVMRKMITTLNAMLRDNVAWQPKSA

SEQ ID NO: 498418 - protein, 332 aa, unidentified
MIKKIEIVGIDVSKLTLDVFIHSLNFHFIVSNDPVGFSKLLQIIWQKLPGKKDGLFFCFEDTGKYSLPLCIFLNAEKIDFILASALDIKRSMGLVRGKSDKKDAKVIALYAWRKRDELIPTVIPAGSIIRMKQLLSLRNKLVKHKRAYQSGMSDVHDYFKEGDSKFYLDINKNIIKSLNKEIVNIEREIEVIIKADGEIKNNYKNLKSVPGIGKIIAFYLIAYTHNFTKFGTARQFCCYCGIAPFENTSGTSVKGRTKVNPLANKMIKALLNMGAMSAVQNYKEFKTYYNNRIDKGYSKMSTLNVVRNKIIFRAFSVVKRGTPYVNLYQFAA

SEQ ID NO: 498419 - protein, 488 aa, unidentified
MSAAGQQEGKKDPTLNARAPKRKARGSRCPQGKGHRRRSKLTITNPDAAGIDVGSRVHYVAVPEDRAPVSVRSFGAYTGQLDELVQWLKDCGIKTVAMESTGVYWIPLYQKLEEAGFEVLLVDAHQAKHVPGRKSDVQDCQWLQQLLTYGLLRAAFRPEDSVCRLRSLQRHRKNLVESAAMWVQHMQKALNEMNLHLHHVLSDISGLSGLRILDGILAGERDPAKLASLAHHRVQKSQAQIEAALTGDYRPELLFVLGQSLQNYRQIQHQITQCDLSIEQQLAKMTDCATPRQAAEPMPSSPELGGGKSGKRKPPVALEASLAGHLKRILGVDLTTIPGLNVLAILTLISEIGTNMTKWRNEKAFVSWLGLSPNNKISGQRLLSSRTRKVVNRAATILRLAAMIVGKTDTPLGSFYRRKRAQLGGPKAITATARKLGCLVYRLIKNGQGYNAPDLHTYELKYKDQILNSLRKRANTFGFDLVELPKAA

SEQ ID NO: 498420 - protein, 350 aa, unidentified
MIIIGCDYHPGFQQIAFVDTETGDYGEQRLAHSEGAEKFYRDLAAQGKKVRVGMEASGHARWFERLMAELNFELWIGDATEIARKRERKQKTDRQDALHILQLLMENRFPKIWIPSGENRDLRQLLWHRHRMVQARTRIMNQLQAVALNEGLRCKKKLWREKGRQQLEAFRLAPWASRRRKDLLQLLDRLNPTISDLTQAIEQEVEKCPEARRLRTHPGVGALTALAFVLIIGRTERFQCGKQIAAYLGLVPLEDSSGNRRRLGHITKQGSSILRFLLVEAAQVTARSIPEWRNKYVHLTMRRGRKIAKVAMARRLAIALYWMWRKGWDYEQLRKFGSHAGQPGHRDGVK

SEQ ID NO: 498421 - protein, 500 aa, unidentified
MKTKRSKAKIRVGQKRRSAICSKPEQKLEVLRPDAAGIDCGAEEHYIAVPPDRVGAGEPTVRCFSAFTEGLDAAVDWLKDCRITTVAMESTGVYWIPLHQKLEAAGIEVYLVNARHVRHVPGRKTDVQDSQWLRQLHRFGLLNASFRPQDIVCRLRSLHRHRDNLVSSSGSEIQHMQKALQQMNLHLHHVVSDITGLTGLRIIDAILSGQRDPEQLVKLRDKRVYKSTPRQMQAALVGDYRAEHLFVLSQSLQAYRFYQARIEECDREIEPLLEKLALQVEAASAKLELGVLKPASAKDGAMTPELSNESKAGYGLKAKRKRKPIANEPKIDLAGLLERICGIDLTKVVGLNVLNVLLIVSEIGVDMSKWRSAKAFCSWLGLCPGNKISGGKVLDSRTRQVVNRVADALRLAAQSVGRTETCLGIFYRRKLAHLGAPKATTATARKLACLIYHLLKYKQPYQEPDPAIYQLRLQKSALAKLQRQATALGYTLQPTSPLPA

SEQ ID NO: 498422 - protein, 314 aa, unidentified
MDKTICGIDVSKDRLDVAVRPSGERFVVARTGTGLDELRTRLKVLKPNLIVLEATGGFETVVVAALAGAGLPVAVANPAQIRAFAKAIGQRAKTDPIDADVIAHFGEATGITPRPLPDAATQQLADLVARRRQIIDMIVAERQREKRANPRIKKSIGRLVKALERELSSVDANIDDAVRGSPAWREKEDLLSSVPSIGPIISRTLIAELPELGVLGRKQIAALVGVAPFTRQSGQWRGKSFIGGGRASVRTVLFMGAMAARRHNPVLKAFFERLVAAGKPKKVAIIAVARKLLTILNAIVRDGTPWQGTVGAAS

SEQ ID NO: 498423 - protein, 324 aa, unidentified
MLGIDVSKDSLACALLEPATRRYAWELTVPNTPAGVRELLRRAPAGVPWVLEPTGRYSEGVARRASAAGRRVLMAQPKRAQAFLRSLGGRAKTDRLDSRGLALYGASAELAPYPLKSEAVEAIEQLLSARKGIARSLAGLKQQRRELPHARAPLSAAIEALEAQVAEIDRRVAERAGAAEEFRAVARLDAVPGIGPVTAAAVVARLAAKPFAHPDQFVAYVGLDVRVRESGQLKGRRRLSKQGDAELRRLLYLAAQANLRCKASPFKDHLAEDLAKGLPTTAALCVVARKLARLCWSLVRHGSSYDPARVYTDLKNYRALAPTP

SEQ ID NO: 498424 - protein, 356 aa, unidentified
MIKIIKLDFAGQHIYIGIDVHKKSWSICILTDHFEHKTFSQPPDVTVLVNYLKRNFPGASYHAVYEAGFSGFWTHDRLREQGIDCIVVNPADVPTKDKERAGKSDPIDCRKLARGLRNGDLKGIYVPIRSKVEDRGLLRTRRSMVNKQTRCKNQIKSMLAIYGIHIPEDLAQSHWSRRFINWIDSIRMEKASGDFSLKVHLDELKHLRRIIAGLNKNIRALSKTDEYLANVQLLKTVPGISILTAMTILTELYYINRFQSLDKLASYFGLIPDTNSSGEKDKTTGITDRRNPELRGLIIESSWVAVRKDPALIMAFNQLCTHMTKTKAIVRIARKLLNRIRYVLKNQQEYVPAVVQ

SEQ ID NO: 498425 - protein, 395 aa, unidentified
MFIVGIDVAKRNHEVTVITSEGQVVQKAFSIRNNCTGYNLMMGKLKKLTTVKSQLVFAMESTAHYWLALYTRLRKDGYKAIVLNPIQTSAMREMSIRKTKTDSKDSFLIAEPIRFGRYAQSNVAQDKLLALKELCRNRYYLVDMSSDLKRKAIALIDRIFPEYETQFESIFCKSSIAVLKKYPTPKKLSHANLSKLTDILWNSSNGRFGEWKAQELKSLARDSFGVEDSEDIYSMLLLTMLDEIQSLTEKADELEKKISNLLKDFDSTITSIPGIGPVLGACILSEIGDVTRFRSADKLAAYIGVDPSVSQSGEYISDHAHMSKRGSPYLRRAVWMASIVAVQRDPMFRAYYDKKAAQGMKYMNIIGHVTKKMTAVIFAILRDNKVYAPVLPDTV

SEQ ID NO: 498426 - protein, 354 aa, unidentified
MKRNSKYVGLDVHQAMTAVTVRTEGGRVIARSVIETSEHSITEFFDALAGTVHVAFEEGTQAQWLYDLLSPRVGRVIVCDLRGEKRSGNKGDRIDADYLSERLLRGGLRAVYHGSRERADLKELTRAYRNLVEDSTRVMLRLKALFRARAIRTTGGGVYEPTERAVWVAQLPGQGARLRAETLYAQLDVLRTQRKKAKAAMVTEAKRDPAWGVLETIPYFGPVRIALLLATIGTPWRFRTKRNLWAYSGLAVVTVSSADYEFFDGRARRRRRPPLTRGLNRNHNRVLKHVFKGAATTATGRPGPLRDLYHGMLERGMRPELARVTLARKLAAITLRLLKTGEVFDPTQLSRPQT

SEQ ID NO: 498427 - protein, 387 aa, unidentified
MPQPNDLSRSLVALDQNSTIIAVVELSQSSWLVGGVVPGIERQPRKKLEPNPERLLGLLHRWRDEAVRAGRTITRIAVAFEAGRDGFWLARWLAARGIEAHVIHASSVAVSREHRRAKTDRLDTELLKRGFLGWLRGERGHCTMARVPTIAEEDAKRPNRERDCLVGERTRIVNRIKSTLARLGIRNFKPTLHKAAERLAAVHTPEGVPLPPNTLAELQRDMARLGFVVSQIQEIEKARQKRLEQHPETGPDAMVRRLVCIVGIGVETADMLVHEVLSRPMRDRRAVARYAGLTGSPDESGARRREQGLARAGNARVRRGMIQLAWRFLMFQNESALALWYRARTADSRSGTRKTMIVALARKLVIALWRFVTTGEPLEGVVLRPAS

SEQ ID NO: 498428 - protein, 353 aa, unidentified
MEYIAFDAHKHYTLASVARPDGQLVREQRIAHERGALQQFLERCERGSPVAVETVGNWYWIVDEIEAAGCVPRLVHARKAKLMMGEINKTDKLDVRGLNQLQRTGTLPTVWIPPGELRDQRDLPRTRMVLVRQRTQLKNRIHSTLAKYALHDFEVSDLFGARGRALVRQRLELLPPCTAYTTRHLLEHVERLDHQVREFEQQIRTLFKPTPTIQHLLTLPGVGLTLAVVIALEVGDVARFPTAEKLAAYAGTPPRIHASGGKTRFGPARPDVNRYLKWAFVEAANAICIGRGRAPQRHVSRLYERLARRKGHAKAIGAVARHPAEATFWILSKHEPYREPKPFRPRGISAGGP

SEQ ID NO: 498429 - protein, 352 aa, unidentified
MNSLTDLREVVDVIVGVDTHVHTHSAAVVDARTGAVLDEITVEATADGYAELVDFAEAHAVLRAWAIEGTGSHGAGLTRHLERRDEVVIELDRPERARRRNGAKSDPLDAVRAAREALARPRLGTPRTSGDRQALSVLLAARRSAVNAAGDAQRQLFNLVIAAPEPIRERFRGQKVPAMIKTAAGLRIHSSWDVEAATTVTVLRALARRTHDLTAEASAHERAIASIVRSWRPDLLEEFGVGTIVAATVLCAWSHPGRIHSEAAFAMLAGVAPVPATSGQVTNRHRLNRHGDRQLNRALHTITLCRIRYDQRTRDYFDRRTAQGKTPREIKRCLKRYIARDLYRLLEHPSTT

SEQ ID NO: 498430 - protein, 725 aa, unidentified
MARRQTVRPDIVALPLLPHETLYVGVDVGKFGHIAGFLSRTLLARHERFEGCPTLAFDQSREGFRAFVDRLRELVPIEQVTVLLEHTGHDHSLLEQYLLDLDITVYRIHVQERPKGMVKTDKRDALSLANRLYTQLDLGAQVEDKMQLVRRALPPTKAASQLKGLIQHRYELSHQCTQLRNKLTAICDELFPELVQIFRDPNREVALAYREKFPTPYAIATASMAALRELRSRSFPSEAQFLKFQQLARETIGIKNVDRQQGLLIEQALLIKELRIVQEHLELLQTAIADVVTNCREGQILLSIPPIGPIQAATIIATVGNIANFEKACELKSYFGWAPKRSQTGVSFDRTKLASRGVRPMKQTLFLMAARATTLDCEWARIYQRLLPRLATYDERTKDYRGKLRVIGRIAGQMASMIFALLKTDYETLSQVPPGEVPPPPMLYDPAIHRKHQEGHYQCVKSQLFRTPYGNYFCRFLNGDLRCFLLKLSVVVGLGSTIALDLHQIQNDGVMNDAIYGSHRGHRVFEDVVPLAKDQIRRNDHGFAFIALRQEGEEHFHLIAVLLHIANVIKNDAGKFIEPSQFLGESQIAFGSQQPLHQVRGWCPQHRMPLQNQFIAQRCGDVTFPNAWQARCHDIGGRAKKASRLQALNLKLELGWQALQIKSAEGLVWGKGRSTQESCGTPLHAQLLLVLAQFQQIGFVREALFGGFERQIGKHGSHAAQVQAL

SEQ ID NO: 498431 - protein, 343 aa, unidentified
MEAYAGKQFVGIDLHRRRTVIVRTTEGGEVLEAVRIVNDVQRLASVMARAGHCPEVVLEATYGWYWAVDALQAGGANVHLAHPLGVKAFEYRRVKNDFRDAQDLADLLRMGRLPEAWIAPPATRELRELVRHRAKLVGLRSHCKAEVHAVLAKCGVQVLMSDLFGAWGTELLDGLELPAPYAARIASLRRVMDDLDFEVNVFSGIIRGRLAPEPGYTAVQKIPGIGPTLGAVLVAEIGDITRFASASKLTCWAGLTPKHHESDTHVRRGRITKQGSRLVRWAAIESVKTVSKASEVGVLRERVADRRGRNIGSVAAARRQLELVFYALRDGHVRALEHLPAVA

SEQ ID NO: 498432 - protein, 316 aa, unidentified
MNDQLCIGIDVSKDQFDVASEPSSFTASFDNTAEGIRELVRQLRWIKPQLIVLEATGCYHKALVNALDAAGLPVRVMNPRVVRRFAQADGILAKTDGIDAAALAKYAARMSPSVRELPDATGQQLQMLVGRRRDLADMITAEKNRREGATGWLLRKLNKHIRHLKGEVDAIEAKILSVLQSDARRWHDYLLLLTVPGVGAITAFTLVALLPELGRLNRQEIASLVGVAPYNCDSGRHQGTRRCWGGRAEVRSVLYMATVTARTHNPAIKVFYERLHDEYNKPGKVALIACERKLLTVLNAMLRDRTTWQPELAQAA

SEQ ID NO: 498433 - protein, 422 aa, unidentified
MMTDTAGTRTRDRSDDGPWVVAGVDTHKDTHHVAVLNAATGAGLGDMRVPATPAGYDRLHDFVRFHGRIRMIGIEGTGSYGAGLARALRAAGAPIREVIRPKRSQRRRGKSDPIDAYAAAGRALAEADALPVAKTGTGPCEQIRVLLVERRSAMKARVAAHRQITALLTTAPDAVRTRFARLSGGELIGALARTRPAPTADTPASTTTRTLRRLARRHRILTDEITDIDTELRALTARAAPTMLATKGYGVITTATLLVTAGDNPGRIRTEASFAALCGAAPIPASSGKTNRHRLNRGGDRQANWALHQIALVRLSSDPRTKVYAARLTATGKSRKEILRCLKRAIAREAWHLLTHPQPAPRTDDLRRLRHERGLTLTQAAHHLNTHPARISELERGTRPDTTLTAAYRQWLSTQQPQTHTT

SEQ ID NO: 498434 - protein, 350 aa, unidentified
MNILALDLGKFNTVYCDYISETGEHKFGKVKTTPQAIHDLIVDKEPERVVMEVSEIAGWVVDIARALGKKTETANTSHEAWRWKNVKKKNDKEDARKLAKLSAMNQLPTVHIPAKPIREMRSLIKYRQRLVKHRRSIQLAIRAIFCAQGITGVPRGKSAWSQEGLGWLRKHARPLEEIKDLEQLWRGRLHVELETFDAINRALKAVEDKLNKLGSADARVRRLQTIPGVGPRLAEMVVAFLDDPQRFQSGKQVGNYVGLTPKQYQSGQMERQGRISGQGNKLLRNLLVEACWASLRYNPWAREMYSRLLRGSPSRKKIAITALARKLVVRCWAMLRDEEDWKYDIREDAA

SEQ ID NO: 498435 - protein, 370 aa, unidentified
MKTNTTSPIVPTHTSATIATGGFTLGLDLGDRSHHVCVLDATGEIVREDALSNTRPALAKLMSDFPRATVAMEAGTHSPWISRFLTGLGAKVIVANPRKLHAISRNERKCDQRDAQMLARLARVDPALLHPIEHGSAQAQHDLLGLKLRDALVRTRVNLINAIRFTLKSLGHSVRNPSSESFHKTVLEDIPPDCLPVIQPLITVLVHVTEQIKGMERDLVQRSKKDYPATQRLQQITGVGPLTALCFVLKIGDPQRFGRSRDVGAYLGLCPRRDQSGGTDKQLRISKCGDGLMRRLLVSAAHYVLGPFGPPCALREHGQRLTGTGSAREKKRAVIAVARKLAVLLLSLWKHGTDYEPRATASPVLVMVPA

SEQ ID NO: 498436 - protein, 433 aa, unidentified
MPTNHPYDLVIGLDRSDRTADLHLIDTHTGKVQKQTVATTPEALHDWLAQLRQQQPQARVGLCLEQPAANLIVFLETYSWISLYPINPISLQKFRETFVTSRAKDDGKDAQYLAELLLSHPDKLKPWQPDDSQTRQLQQLVLHRRAVVDQRTGLTNRLKALLKQYFPQALDLCGEDLWRPLATAFLLKWPTLQSLKKARKESLKQFYYLQGSRSQTLIEQRLERIEKAVPLTDEIALLQSYTLRVQLLCKELQLLLKTLEQFDQQIANVFQQHTDRPIFEAFPGAGPVLAPRLLASMGSERERFPQPGNLQCLSAVAPVTKQSGNKCYIHRPYLCPKFLKQSFHEYAKESILHSRWAAAYYFQQRTKGSQHHTAVRALAYKWQRIIWKCWQTRTVYKEAIYQAALKKNKSPLVSLLDQIELGKSPVKTRAKKS

SEQ ID NO: 498437 - protein, 402 aa, unidentified
MKVSGLDVHKDIIFCAIYDGKSYSEVKEYDSTTNSIRQLGTHLKKEGVKQVAMESTSIYWIPVWDILEEMDFDLILVNPFLIKQMPGRKSDVKDAQWIASLLHKGLLRGSMIPCQIIKELRIYTRKYVKFQQKSSQILTEMDRIMVTANIRIGSCMSNLKSKSVLGVVEALIRGETNPDQLVKLVYGNTKNKQSGKLKEALTGNFKEYHQQSLKWAKEQYDLYEKQILECVLCMEKICQEHYSKEIMLLQSIPGISKIAAMCIIAEIGADMSVFENSGKITGWAGLRPRNDESAGKFKSKAITKGNKYLRTILVLVAWAASRTKGSYFKEKFNRLALRKSSKKAIVAIARKMLVIIWNMLNEKKPYNPTLVHVYDPVKVERSIAYHQKEIEKASKLLPKKVE

SEQ ID NO: 498438 - protein, 351 aa, unidentified
MDATTVAVDLAKDVFEVATANRAGRILERKRLTRRQFEVFVDALPAGTTVVMEACGTAHYWGRRSQAHGHHVQLLPVQYVKPYVRRNKTDRMDTEALLEAARCAGIQPVPVKTPEQQALQALHRMRMQWQRTRTARINALRGMLREHGIPVALGARTVLTKMPRILEDAENGLPVHLHQALALVYDEVRALEQRVKEIDRQLARVAAADLVAQRLLTIPGIGIITATALLGAVAHIHAFRRARHFASWLGLTPSERSSGFRRHLGRISKRGDVYLRCLLTHGARAVLLTAQRTLRMKGQGTRLQHWAVAIATRRGHNKAAIAVANKLARMVWAVWRGERDFSDGPRLPVAA

SEQ ID NO: 498439 - protein, 324 aa, unidentified
MLPTLGIDISKTSFHVELSLNHKLRHRRFANRKEGFAELCAWLAKHKTTTVHACLEATGPYSEALALYLYEQGHTVSVVNPAQIKAFGQSELLRNKDDRPDAGLIRRFCEKQQPSAWAPAPPQVRELQALTRHLENLLETRQQQMNRLAVTNTKGVAKSLRKLVTHLEAEIQRTQRQINDHIDRHPDLKQQCQLLESIPGIGKRTATRLLAEIADISQYKSARQVAAYAGLTPRNSRSGTLRGQTRLAKTGNARVRKALFLPAMVAKRHNPVVRSFCQRLARHGKNKMQLVGAAMRKLIHIAFGVLKSGQVFDPEHELLFNSVS

SEQ ID NO: 498440 - protein, 364 aa, unidentified
MSESRTVTVGLDVHASSIQLAAVRGAELLDERTLPYDHAALERALRRWPRVHCCYEAGPTGFGLYRYLSEAGIACEVVAPGLVPQRPGDRVKTDRRDARKLAQLYAGGLLEPIFVPSPALEAARDLLRAREDARLERMRGRHRLSKLMLRNDRRLPTTCWGVTRRRWLSQQRFDFPAQQAAFDDYLHALDLVDARIHTLEREIEALAQDPDFAPLVGRLRCVRGIDTLTALGILAEVGDFSRFRSAEAFMSFIGLVPSEHSSGARRHQGSITKAGNAHARRLLVESAWHARRRPQVGYELARRQRGQDAQVIARAWRCQQRLYLRWRRMAARGKPNQKIVVACARELAGFVWAIGSNQPLRAEG

SEQ ID NO: 498441 - protein, 444 aa, unidentified
MHFSGEVEEREERLNKQKVVAWIGIDWADEGHEVWEYTVQTDSATCYAIKHTAESLQEWVNQLRIRHGGKPVAVVLEQARGGLIYALMNTGFMEIYPVNPESLAKFRKALYPSGAKSDPTDAELLGQMVRQNPGRFRAWVPGDEQTRSLQLLAEGRRKLVEDMTALTNQLTSVLKTYYPQALNWAGDLSSEQACSFLEKWPTLADLQKSRPFRIRNFYEKYGRPPREVLDERVTQMEKAQPLTADPAVVMAGKMMVNAVVAQIRPLRAAIEKYDVEIEQIFRQHPDRAVFESFPGAGKVLAPRLLAAFGADRDRFEAALEVQQFSGIAPVTERSGKTIWVHRRLACPKFVLQTFHEFANQSRRFCVWSKLYYQQQRARGKQHNAAVRALAYKWIRILFRCWKDRRLYDDSRYEKSLIKRGASLAPLLGGTTELGMKSSSYNPST

SEQ ID NO: 498442 - protein, 348 aa, unidentified
MEYIGIDVHKNSSQVCVLTEGGELIERRIKTDRSSLHSLFSARPPALILIESTTESEWVARYLEELGQQVIVADPNFAPMYATRSKKVKTDKRDARTLCEACRLGAYRSAHRTSDKQRNVRAHLAVRETLVQTRAKYISLIGALARREGCRIKSGVSRSFAARVEEAGLPQHVLIQIEPLLIMLTSLNDQIKQADEKLADIVKDDEVIKRLATVPGVGPVTATTYAATIDGVARFQDAKQVRSYLGLVPRENSSGEKQHRGRISKAGNSRVRSLLVEAAWSLLRWKTPKTQALHEWAMRIASRRGKAIAVVALARKMAGILFAIWRDGTEFNPGHLSDRQAFGTLVQA

SEQ ID NO: 498443 - protein, 408 aa, unidentified
MNTLYVGIDVSSRSNVVYLMLPNGNKHSNFSVANSHEGSVQLVKRIHSALTSHSLDTVLIGLEATSVYGDNLVYFLREDAALAPFNRKIHVLNPKQVKKFHDAYNDLPKNDYVDSFVIADCLRFGRINKEVYLGDYRYKALQNLTRARYFAVQNLTKEKQRFINVLFKKYSTLTQEKVFSNTFSTTALAVYDEFESAEALANMDLHELTAFIIEKGKNRFSNPDAVAKAIQKAARSSYRLPKTVNDSVNQVLSISITSMKALEAQIKEFDKAIKSQMELLSNVLISVPGIGPVYSAGIMAEIGDINRFNNQAALAKYAGLAWKQHQSGGFEAETTRLIPSGNRFLKYYLCEAAFSLVRCDKEYSDFYHLKYKEVNRYQHKRALALTARKFVRLVFRLLKDNRLYCPAK

SEQ ID NO: 498444 - protein, 346 aa, unidentified
MNKHSMIFIGLDTHKEFHEVAYCEEQRGAAPVHYGRIPSSKVSVKKLLRQFESKYPGATLHVVYEAGPCGYWIYRLITSLGHCCYVVAPSLIPKKPGERIKTDRRDALKLVRSLKSEDLTPIYVPEPEDEAVRDLSRAREAAMKDLKEAKYQLKALLLRNNIRYEGTANWSKKHLRWLTELILPHPAQQIVLQEQLQTIEERIRRLERLDNELTHHVHQWRYYPVVKAVQAMRGVRLLVAVGVVAELGDLHRFDHPRKLMAYLGLVPSEQSSGGKRHLGAITKAGNGRARRLLIEGAHSYRYPANVSTELQLRQEGLPKDIVDIAWKAQLRLESTASLVQTLPAHE

SEQ ID NO: 498445 - protein, 368 aa, unidentified
MSNFITSFVGLDVHQDSIAIGVAPAGREEPRFVGTVAPQWASLCKALSRLGRREGLQIVYEAGPCGYTLARQLRAHGYACEVIAPSKIARRPADRIKTDRRDALLLARAARAGEMVSVTIPDERDEAIRDLSRAREDAVHARLKARQQLKAMLLRHGHRYSGRSSWTQAHERYLAQVSFPQAPQHITFAEYRSAVRDGHERVERLTEALRAQLEHWRMRPVVEAVMSLRGIDLIAALTLVAEIGDFTRFARPHELMGFLGLVPSEYSSGATRRQGAITKTGNSHARRVLVEAAWNYRFPARVSRVLQLRQQGQPKAVREIDWRAQLRLARRYRHLSARKLALNKICVAIARELSAFVWDIARQVKPSA

SEQ ID NO: 498446 - protein, 384 aa, unidentified
MNPALTTAQAPAPVAWIGWDWADKHHDLFLETATGQAERVRLDNEPGQLHQWLKALGTRFAHQQVAVCVEATRSALLPILLAYPFLELYLVNPKSLARFREVVRPSGSKSDALDCQLACQLVKSHARLLNPHVAQDELTLELEQLVAIRRDLVDERTALANQLGSVLKGYYPLALTLVQDETTSVLAAVLVLRFPTLQALQAASVHQVRQFFLKQGCRLTQGLQARLQLIAGAQPVCTQTHWNNPHSFLACTLAQQLKGLAKRIDQLEERIRILAEQHPNHRLVASLPGAGPALEPRLAVALGTKVEAAASAQDLAVRSGVAPVRQQSGNTCLVMHRWAKPQFLHQTWIEYAKCSTLKCPWAQAFVAAKTNAGKSYYTAIRALA

SEQ ID NO: 498447 - protein, 301 aa, unidentified
MYVGVDVSRARLDVALGDRVYHFPNPDGIPDILSLLPQGAIVGMESTGVYGRPLAFALHRAGFRVYVLNPAAVKAYARSLLRRAKTDTADARLVARFLAERHGDLPPYDPTPDVLYQVGLLVRFARGLTAQRVAVLNRLHAWEYAWPQGLGLEVVASVPGHLEALRGQVDRVALNMLRSDPLGWRWFTALQSLPGVGQGIALTILAYSGDMRRFSSARAYAAFTGLTPKLYQSGEIPEVGRISRMGPPPLRAAFYLAALRAREVEPYADLYGRLLSGGKPKKVALIAVANRLARHAWAVCR

SEQ ID NO: 498448 - protein, 373 aa, unidentified
MKKLRFLGLDVHAETIAVAIAEPDGEDRSLGIIPNREESIRKLVKKLGPAEQLQACYEAGPTGYVLYWQLTALGVKCEVVAPTLVPVKAGDRVKTDRRDATKLARSYRAGDLTAVWVPNEEHEALRDLVRAREAAKQDQLRARHRLSKFLLRQGRRAPAGTKVWTQKYQEWIKKQVHFEQPAQEYTLLDYLHEVEHMADRIRRLEQATEEAVKLAPQQMQEVIQALQALRGIAQISAVTVVAELGEISRFEGARQLMGYSGAVSSEHSSGKRTQRGPITKTGNAHLRRIAIEAAWAYRHRPTIGPALRKRQEGLSEEVKEIAWKAQHRLHKRYRTLTAAGKEKQKVVTAVGRELLGFIWAIGVQVERNGQRVA

SEQ ID NO: 498449 - protein, 353 aa, unidentified
MFDRTTVGVDLAKQVFSVCVVDARGKVIGRHELKRDSLSRFLQQLAPGTVVAMEACSSAHYWGRLSLSYGLVPRLMAAQFVQSFRKSIAVKNDRNDAEAIATAARQGNMRFVPLKSEAQQARLSWHRAREGYKKENLAIMNRIRGLLAEFGVVINRSAVALSRTLARLDEYTLPGTLVTLIRQLQQHWHVIQTAMKDCEKQIKQHADEDERCARLRKLTGVGPLSADAIVATIGNGNEFANGRQCAAWMGLTPRQHGTGGKVVLGNITCRGDTYLRTLLIQGARSSVQQARITALEKLSYEQQWILQLSTRLPFGKVVVAVANKHARQIWAMLARQEHYDADAWRQHPMHITA

SEQ ID NO: 498450 - protein, 347 aa, unidentified
MKFYTNSHKHYCGIDLHTKMMYVCILDSDSNILIHKNISTNEKAFLKLIAPYREDIVVRAECTFSWYWLADLCAKEQLAFILGHALYMKCIHGGKAKNDRIDSEKIARIISGKNFPLAYTYPSEMRAIRDLMRRRSYIVRIKAEVQAHIKITNYQYNLPTIEKNLVHKSNRAGLAEHFADPAVRLNVETDIGIMDSLHEEINRLNNYIIKHARAFKPRLLYKLKTFRGIGDVLALTILYEIEDINRFPTVQNFCSYCRLVKCAKESANKRMGSSGSKIGNAHLKWAFSEAAVLFIRESDRAKEYVDKLSKKHGKAKALSILAHKIGRAVYFMLKRDDAFDELLFFRS

SEQ ID NO: 498451 - protein, 327 aa, unidentified
MYVCIMSQEGKVLLHRNLKTDPEVFLRTIAPFREDLVVGVECMFTWYWLADLCDHEKIHFVLGHALYMKAIHGGKAKNDRIDAYKIATILRGGVFPYSYVYPAEWRSTRDLLRRRLRMVRQRGQLMSHVQNTHHQYNLPTPKKRIAYRANRQGVAEQFTDVSASKSVEIDLELMGHYDEIITNLELYLTRKAKVHSQDSFHLLRSIPGVGKVLSMTILYEIHDIARFDRVQEFASYSRLVKCEKSSAGKKYGTSGAKIGNVHLKWAFSEAAVLFLRGNLRGQKYIKTLEKKHGKRKALSILAHRLGRTVYYMLKKNRTFSMDAFLKA

SEQ ID NO: 498452 - protein, 375 aa, unidentified
MKGKVRFLGLDVHAETISVAVAEPDGEVRSLGTIANREESIRQLIKKLGPVEQLRACYEAGPTGYVLYWQLTQLGVECTVVAPTLVPTKAGDRVKTDRRDALKLARSHRSNDLTGVWVPDGESEALRDLVRTREAAKQDQLRARHRLSKFLLRMGRRPAVGIKAWTEPYMAWVRQVRFERPAQQAALEDYLHEVDHMAARVKGLEQAITEVVKLASPGVQEVVKGLQALRGIAEISAVTRVAELGQISRFDTARQLTGYSGAVPSEDSSGKRKRQGSITKTGNAHLRRIVVEAAWSYRHRPAIGPGLRKRQEGVSEPIKEIAWKAQVRLSRRYARLAAAGKDQRKIVTAVARELLGFIWAIGVKAERSVTQQIAA

SEQ ID NO: 498453 - protein, 479 aa, unidentified
MTAKNKDAKTDTDGKCAGAAAEHGGDGAEVAEDRVQVVTYAAAIDVAKGFGMVCTRVPGSRPDRRRQKVWRVEATCAEVTALMDHLRCEGIQRLVLESTSDYWRIWYYLAEAAGLEVWLVNARDVKHLPGRGKGDRADCVWHCKLNERGMLRRSFVPPEPVRDLRALTRTRARLAQDQVRHQNRVEKILEDALLKISVVISDLFGASGRRFLDALVAGERSPKALAALGDTRLKATRQELEDALTGRFRDIHAFEISTHLRLIDAINDEITRLDEKIEQQLALVPRTAPACTACGLAGGGHAPGCADQEVPLLGLAGRLDEITGIGECNAAVVIAELGTDPSTFPTPGHAAAWARLTPRTMQSGETARPGRTGKGNRYIRGALGQAAMTAAKTDTRLGAMYRRIARKRGKQKAIVAVSRIICEIAWILICDPGARYQELGPDYYSPRSPARQTRDKIRDIERLNPGKKVILVDAGPEAA

SEQ ID NO: 498454 - protein, 351 aa, unidentified
MNYVGVDIHKRYSVLVAVDERGRELGRSRINGNTAFGFAQFFGGLEGKSKVVLEACWNWGRIYDLLSEIGQVEEVVLAHPLKTRLIADAQIKTDGLDAYALATLLRGDLIARAHVPAKPTRQRKEVLRQRLYWARLRTRIRNRIHALIDRQRELKMPQCSDLFGRKGLSALNKLVLSEPDATLLREELGLLELIQGQIKAQEARIVEFNSNDEMTLRLQSIPGMGKILAAVAAAEIDSIERFSSAAKLCVYAGLVPRTHASGGKVYQSHLLKSRNKWLQWAFIEAAWVAVGCSAYFGGLYRQHRARGKNANIAITIIARRMCQICWTLLKERRDFIETFPGRSVVRLTAAA

SEQ ID NO: 498455 - protein, 456 aa, unidentified
MQSYYLGIDVSKGYADFTLLDEKKQTVESNFQLDDTFDGHCGLSDFLNQFLNNHPQATVYASVESTGGYENNWFYSIHKLQQNLNVKIARLNPKGVNHSSRAALQRVVTDSISAKNIAEYMITHPEKIDYEAEDYFASLKRKWQFVKTLVKQKTRLLNQLEKLLYIANPVVLTYCKDGVSQWVLRLLLVYPTANRLARAKVKTVARIPYISQQRAKELISTSKRSIASASDVLTEDSIVTMAKEIRHLEQLIDKQTKLLADGCSLTELEILKSFDAIGNTSAVGLLIEIGAVQRFRNIKKLAAFFGIHPKFKTSGDGTSGVRMSKEGRKEPRAILYMVAMTAIVHNPVIREVYQHNLAKGKCKMDAMGVCMHKILRIIYGMLKNNQPFNPEIDRKNRMKMLHKKPHAVTNINRRYQKQDKNAPISRRQNKKRKEQQSSQSDPVTMHEINAIVLSEH

SEQ ID NO: 498456 - protein, 337 aa, unidentified
MEQQIQYVGIDLHRRRSVIVRRNDAGQTLDTVRIDNDPVALAAELAKAGEHPEVILEATYGWYWAADVIKECGGNVHLAHPLGNNWGNRRVKNDERDATDLVDLLRLGRLAEAWVAPPPLRELRELIRYRAKLVHLRTSLKSQVHAVLAKEGVRVPMSDLFGVGGQVLLDKVRLADAYRVRVESLRDLIDSVNREIAMLEEQTAPYFAGDLGYHAVQAIPGVGPVLAAIFVAEIGDISRFTSARHLCSWAGLTPKHKESDVTVHRGHITKQGSRLVRWGAVEAVAHQRADTPIRRHHRNVGERRGTQIGRVAAARKLLILVYYGLRDGEIRCLAQTG

SEQ ID NO: 498457 - protein, 272 aa, unidentified
MSKAQTALYGGLDLHSDNTFCALLDEKRNVVFEQRLPNDINTIRQALEPHQKRIVKLAVESTYNWYWLVDGLQDSGYDVRLANPAKIKSNIGLKHADDQTDARYLAQLLTLDILPEGYIYPRETRGVRDLMRKRGQMVQDRTNEAQRLAGLCARQTGQDLSARKILAADLPELFHQHTPSIRMAEASKEHIAFINQQIKALEKHILAELPDQDAYALLMTVPGIGNVLARCILLETGPITRFKSAGHYASYCRAVPRQHSSNGKKKDEGEGK

SEQ ID NO: 498458 - protein, 355 aa, unidentified
MSQEKYIGMDVHQATISVAVMDAHGKLIMECLLETKAATIVEFIQGLHGSLSLTFEEGTSAAWLHDLLKPHVNRLVVCDPRKAALLKDGNKSDRIDARKLAEMLRTNQLKPVYHGEHGIRTLKELGRSYLTITKDVTRSMNRIKALYRSWAIPCAGATVYAPRHRAEWLAKITEPGVRIRAEPLYQQLDLLQPVRLQARRELLVESHKHCAVKLLRQIPSVGPIRSALLVALLQTPHRFRSKRQLWAYSGFAVETHDSGEYRCVRGKLQRNRERITVRGLNDNHNKDLKNLFKSAAISASTCPGPLQDFYVALVAKGIRPTMARLTLARKIAAITLTMWKKGVSFDPKQLNRQAA

SEQ ID NO: 498459 - protein, 436 aa, unidentified
MIPAVVTHCAGIDIGKRVLAVCLMVGPADAEPKVEVREFSTFTADLEAMKEWLKQAGCTHVVMESTGPYWKPVFNVLEGSMVVCLANAEDVKGRKGHKTDRIDARWLAHLLRHDMIRASFVPPRSIRELRDLTRRRKQLLSDATSERNRVQKALEDANVKLGSVLSDVFGVSGQRMLEALLEGRGSAQELAEMARQKARQKIPQIIESLTGHRLSDHHRFMIRMSLEHLRMLEGQILDLDQEVLKRIDFLGLDRLLNLLQTIPGLGHDSAVAILAEVGPDVNQFPTAKQLSSWAGVCPGNKKSAGKDFHGHTTRGNRWLRSTLTECAWAVSRSKKSPLRDKFWRWAVAGKKKAVIAVAHGLLLQVYQVMQTQQPLAQTSAPPLDEKRKQRIVRHHLRCLGRLGISTGPKRIYVEGAAPRRGRPPRKAQNNPSAPCS

SEQ ID NO: 498460 - protein, 361 aa, unidentified
MERTIQGRRNREEHWVGLDVSKATFDAALALSDQRFPSTPVRALPWKSFPRTREGAAAFLVWVNERVPKAKVRVIMEATGKYSVELTTWLLARRPSLRPAIENPKSTKAFIDSLNQRNRTDGLAARGLAFYGVERRPAPYEPLSKSRQELRELSRYRDTLVAQRTALKNRRREESTSKIVRRMQTRQLRQLNDDIASIEKETMRVINEDEDFKRDFALLNTIPGVGPITAMTVLAEIGDLRRFERARQLTAYAGVTPRVIVSGTSVRGKTRMCKRGNERVRHALYLSAMATLNTKHPNTLSVVHQRLCEEGKEGKAAIGAVMRKQLTVMRAVLISGKPYDPTFKGCGKLTGQPAQEGTIST

SEQ ID NO: 498461 - protein, 403 aa, unidentified
MNAVGIDVSKGKSTVAVLRPKGEIVLSPFDVFHNPKELGELVTLLKSLDGETKVVMEYTGNYYLPVAQFLQNNGFFVSVINAILIHDYGNKSLRKAKTDMKDSLKLASFALDRWLDLPSFSLSSDTRNLLKSYNRQYNQYNKLKVMLKNNLIYLLDLTFPNVNSLFASPLRKDNGHEKWIDFVLKFPHAECISKKSLSTFSKSYLSWCHKNGYHFSESKAQEIHEFACNCSPSLSLNESTSLLISSAISQLNCIAETLANLASEMNRLASSLPEYNVVMSMFGVGPVLGSQLIAEIGDVSRFHNKRALVAFAGLDAPPFQSGNFNAQSRSISKRGSASLRKTLFQVMSDILQQAPADNAVFQFMDKKRFEGKHFYVYMTAAANKFWRIYYARVTELLNSLQVA

SEQ ID NO: 498462 - protein, 412 aa, unidentified
MEEVLDRCCGLDVHKKTVAACLRVPGPDGNPREVVRTFGTTTHELLVLHDWLRANGATHVAMESTGVYWKPIYYVLEDSFTVWLVNAAHLKRVPGRKTDVSDCRWIAQLLAHGLLRASFVPPREIRELRDLTRYRKTLIQERTREANRVHKVLEDANIKLASVATDILGVSGRAMLEALLHGTTDAEVLAELAKGRLRQKLPALRQALTGRFRDHHGFLVGQLLAHLDYLDEAIGQLSERIAEVLRPFEGQLKQLMTIPTVKRRTAEVILAEVGTDMTRFPTAAHLTSWAGLCPGNNESAGKHRSGKTRKGSKWLRSALIEIGQVAGRIPDTAIGARYRRLQRRRGKKKAVVAVGRHILEVSFHLLSTGRTYHELGPDYFVRARADQVRRRSVRMLERLGYQVTLTPLPAAA

SEQ ID NO: 498463 - protein, 337 aa, unidentified
MNKVIRIGIDLSKHVFQVHGVNGVEQTVLRRTLKRGQMERFFAELPATLIGMEACGSAHHWARVLQGLGHEVRLLPPQYVKPYVKRGKNDAADAEAICEALSRPSMRFVPVRSRDNQAELMLHTTRDLLLKQKTMLINAIRGHAAEFGVTGAKGSDSITALQQLIATTEAVPELAREILARMFEQMKSLEQQALELARKLKAWHRGHEGSRRLMTIPGIGPMNATALTMKVPDPHVFRSARHFAAWLGLTPKDHSTAGRQRLGVITRAGDETLRRLLVNGAMAVIKYAKPGRASPWLLNLLARKPKKVVAIALANKMARIAWVLMTRGEVYRPSLSA

SEQ ID NO: 498464 - protein, 424 aa, unidentified
MKVTYPTCCGVDVHKSFLVATIIKTTGGIEPSYQKKRFSTFNNSILEFKSWLLENDCHDVCMESTGKYWVPVFNLLEDQINVTIANPKWVKAVKGNKDDTKDSKWIGDLFRLGLVKGSYIPCKSIRILREYTRYRYKLVSCRSSEKNRYQNALTVCNVALDSVVSDIFGKSSTSIIDYLLEQSGTTINHEEIASKLLRSLKSKEDTVIESIEGYQMTDSQKYRMRLVRAHMDYITAEINDVDNQIDSLISSDPDYDKAVQLLTTIPGVKRDSAITVISEIGIDMSQFCNSKRLCCWAGLTPGNNESAGKKKSVRITRAGVYLKPALVQCAHAAVKSDKSPYYKKKYESLVKRRGKKRAIIAIARMILTAIYQMLSTGEMWNPSDLYKIDMPAPLVEKQKAKAIKQAKKLLQKEGLLPPDETLAS

SEQ ID NO: 498465 - protein, 350 aa, unidentified
MNHKCKIIIGIDTHKATHVAVALDLQGTRLAALSIPTNPKGYLELERWSQSLGEVHAFGIEGTGSYGAGLSRSLLAQGHNVVEVTRPNRQLRYTQGKTDTLDAEGAARSVLSGQATARPKTQTGISEMIRHLKVARDTAVKSRSQAMVTLKTLIINAPADLRDVLDKIRGKVALIRHIAAFRPGEINNTMASAKAAMRALARRWLWLHEEIITHDKELERLVTERAPDLMTSHGIATLTVAEMLIVVGDDPTRIRSEAAFAKLCGVCPIPASSGKTHRFRLNRGGNRQANAALYRVAIVRMRSHEPTLAYVRKRTKDGMSKSEIIRCLKRYIVREIYSQLCVPKSAQIAA

SEQ ID NO: 498466 - protein, 402 aa, unidentified
MNAVGIDVSKGKSMVAIMRPFGEIVSAPFEIKHTASDINSLVELINSVEGESRIVMEHTGRYYEVLAHQLLEANLFVSAINPKLIKDFDNDSLRKVKSDKADAVKIARYALDKWQNLKQYNVMDELRNQLKTMNRQFGFYMKHKTAMKNNLIGILDQTYPGVNTYFDSPARSDGSQKWVDFASTYWHVDCVRKMSLNAFIDHYQNWCKRKKYNFSQSKAEEIYGKAKELVPVLPKDAITKLIIKQAVDQLNSASTTVESLRTLMNETASKLPEYPVVMAMKGVGTSLGPQLMAEIGDVSRFTHKSAITAFAGVDPGVNESGSYEQKSVPTSKRGSSDLRKTLFQVMDVLIKTHPQDDPVYQFLDKKRAQGKPYYVYMTAGANKFLRIYYGRVKEYLSSLPES

SEQ ID NO: 498467 - protein, 350 aa, unidentified
MMIIGCDLHTRYQQIAMVDTETGEFVQRRLEHESGEARGFYAGLKGAVRVGIEATGHTQWFEAMLSEFGHELWTGDAAKIRAAVVRKQKTDARDAAHLLDLLCTERFPKIWRPGLAERDLRQLLWHRQKLVWMRGAVKNQMHALAMGEGVCRKKKLFTAKGRKELEGLTLGPWASYRRQELLRMFDELQGSVTKLDQAVEQAAQSQPLAVRLMTHPGVGPITSLAFVLIIGPIERFERSKQVVSYLGLNPQEHSSGGRQRLGSISKQGNPMMRSLLVEAGHTAARLDPQLKRIYQRLKFRRGAAVAKVAIARKLAVRMYWMLRSTADYAQLVRMRGSSWPTLVEDNPSLG

SEQ ID NO: 498468 - protein, 352 aa, unidentified
MEEYRRSREEGKAVFVGVDLHRFKWHVTARTEDQELFSGTLPGRWEALRRLLDRYRGCSIQVVYEAGYFGFWLHDRVVAYGAHCIVTPPSLLPQEYGNRVKTDRRDSRKLAHLLAKGMLRRVWVPALEERYHRQVVRRRRQLIGDRVRTQNRIKAELRFYGVELVEPRGPWPRRYVQRLWCIRFGNRWMQESFERLLEEYEFLSGQISKQTRLLRELSETSLYRERVEILRSVPGIGLIAAMELLVELQGVGRFRRAEQLAAYVGLTPSQYSSAEKIRMGRITRAGKNGLRAILVEASWKLITKDGVMRDKYERIKARAGAKRAIVAIARTLLLRSRRMLLDGRPYALGLIR

SEQ ID NO: 498469 - protein, 366 aa, unidentified
MDKVKFYVGLDVHKDSIAIASAAAYSRDDPHFVGTTRYSVISLTKALSRLGAPSELSICHEAGPCGYGLVRALREQGYHCEVVAPSRVARRPADRIKTDRRDALLLARLHRAGELVPVAVPEPQDEAIRDLVRAREDAVNDQRRVRQRLKSFLLRHGHAYTGTRWGPKHELFLSRIKFEDSAQHIVFTEYRMAVRFATELVERLTQSLRAHTETWRWLPMVKGLMTLRSIDFISALTIVAELGDLRRFPHPREFMGYLGLVPSEHSSGNSKQRGRLTKTGNTHVRRILIEAAWNYRLPARIGESLQPRLEGQPGHIIDNAWKAQLRLCQRFRRLRARGLHQNKTCAAIARELCGFIWDIGTRQQPA

SEQ ID NO: 498470 - protein, 403 aa, unidentified
MPALSIRASSALDGLRIFDDQRETPGLFECEVIEEREVLQEAELSGQADSENDLGGSSETMYFIGLDVHKKSISYCVKDAAGRVYQEGKIGSSRGELDVWIRTMPQPRMIAMEATIFTGWIYDHLLPHAEKVKVAHPLMLRAIAAAKRKNDKIDAGKIADCLRCDFLPECHMASTEIRDRRRTLRYRSLVVKQMVQMKNRVSGLLMETGVSYNKQRLHKVGYFKELMTTNQDVHESIRPLLKLSREMISRSHKLDYALISSLERDPLLKERLRRLRTVPGVGPITAVTWALEIGDFTRFTSNKQAISYCGLCGDEKSSADKIMRMPISKQRNKHIQRVLIEAAKLATRESPELAMIRARELERGNPNRATLAVARKMVIYMLAVERRQQDWVPAEQFNRTEAA

SEQ ID NO: 498471 - protein, 345 aa, unidentified
MEKITRIFTDTSKQFFQLHGVNAAEEVVLRRKLKRDQFVAFFAKLPATLVGLEACGASHYWARELMAQGHAVKLVPAQYVKAYVKRGKNDARDAEAGCEAMSRPTMRFVPIKSAENQASLMVMSMRERLTRERTRLANTIRGHAAEFGLTAPKGVAHIAPLLAEAADAEGVPKLARQMFATLAREWDRLGVSRREADARLMAWHRTDALSRRLAQVPSLGPIGASMMVMKLPDPKAFKSARHFAAWIGLTPKDHSTAGKQRLGAITCAGDEALRSVLVVGATAVLKPIGKGGGLRSPWLLKLLEKDKPKLAAVALANRVARIAWKMMVTGEAYDPKRLMRELPTT

SEQ ID NO: 498472 - protein, 427 aa, unidentified
MGAREIFVAVPPDRDTESVRSFPTFTQDLHALADWLQRCHVDTVAMESTGVYWIPLFQILEARGIEVHLVNAQHVHHVPGRKSDVLDCQWLQYLHSVGLLRASFRPEHAVCEIRSLMRHRENLVQMACVHVQHMHKALDQMNLQIHHVISDITGVTGLAIVDAIVAGKTNPQELAKLRDHRIKASIETVTKSLVGDYRAEHIFTLKQSLTAYRHYQQLIADCDQEVQQRVQAFDTQNTKDDGPTATATDESSSTTTSTSSFDLHSHLERIFGTDLTLIPGFECLRIQTIFSELGADLSKFPADDSFCSWLNLCPKDGTSAGRRIHGPKIQTKNRVANAFRLAAQSLHNNKSYLGDYYRSQRARHGALKAIKNAAHKLARIFYHLVTTRQAYDETVFAKLETRNHKRRLNKLQSLARQMGYSLVEVLA

SEQ ID NO: 498473 - protein, 408 aa, unidentified
MQIFIGDDWAEDHHDVHLLDGSGNKLGARRLPEGLEGIRLFHELAAAHIDDPAEVIVGIETDRGLWVTALVAAGYQVYAINPLAASRYRDRHNVAGAKSDSGDAKMLADLVRTDRHNHRQVAGDTSGAEAIRIMARGHQNLIWTRTRHTNALRSSLREYYPAALDAFDDLANRDCLSVLAKAPTPALGAKLTIGQIQAALRRGGRQRNIERRSAEIHNALRSDYLAAPTAVADAFGTTTTAAVAIITEVNRQITQLEATLATSFEQHPDADIYHSLPGFGVVLGARALGEFGDDPNRYANTKSRRNYAGTSPLTIASGKKKAVIARHIRNRRLYDALDLAAFCALSQSPGCRALYDQRRNAGDLHHQALRALANRLVAILHGCLQHRTLYNEHTAWAHRTTTPDQQAA

SEQ ID NO: 498474 - protein, 420 aa, unidentified
MSVMVDGPVVARVCAIDIGKAALVACVRVPHDTLPGSRAQQVRELSTDTRALHGLADWLRCEQVELVAMEATSDYWKPVYYLLESQGFTCWLLNAKHVKNVPGRPKTDKLDAVWLAKVVEAGMCRPSLVHPAPIRRLRDLTRYRRTLVRERTREKSRLEKVLEDAQIKLDSVITDLLGVSGREMLDAMIAGERNPQVLAQMARGPMRAKLTRLRDALAGHFDDHHALLCATMLRRIDTLSGDIAALDRVIAHHCQPYADVVQRLDEIPGIGTRSAEELIAEIGLDMTVFPTAAHLVSWAKFAPIDRQSAGTRKGGSTGKGNPWLAATLGEVVVGLSRTNTFLGDRYRRLARRRGKKRALVAVGNSVLTILWHLLSEPESRFHDLGADYHQSQINTRRRQRDLIRQLEHLTGQTVVLRATA

SEQ ID NO: 498475 - protein, 323 aa, unidentified
MTIVEDRPVITGGVDTHADLHVAAALDSLGGLLGVREFPATAAGYAQLLGWLSGFGDIALVGVEGTGSYGAGLARHLAAAGVRVVEVDRADRQDRHRAGKSDPLDAVSAARAAQSGRASGAPKGRDGAVEAIRALMVAKRSARAERTQAINQARALIVTGPDELRARFAGHRPAQLVEAIAALRPRPGDVPGYATRVALRELGRRAQFLDAQLDRLDELIVPLVTARAPGLLSLHGVGPDTAALLLITAGDHPERLRSESSWAHLCGAAPIPASSGKISRHRLNRGGDRQANHALWRIVITRLGSRPGHPATPGPLQPADLVT

SEQ ID NO: 498476 - protein, 341 aa, unidentified
MPGREARIRKEEPVLISPPPTAKEVQRRVELFVGIDVSKARLDVAVAPSGDAWSVSNSADGMQQLVQALGRLSPRLIVLEATGGLERRAVAALAAATLPVVAVNPRQVRDFARAMGRLAKTDAIDAAVLALFAERIRPELRPVRDAEAQELEALIVRRRQVVDMITAEKNRLSAAPPSKRVRTAIARTIKYLQAQLDEIDSDLDKAVRGSPAWREKDDLLRSVPGVGKVLSRTLLSLAPELGTLGRKQMAALVGVAPLNRDSGTQRGRRVIWGGRAHVRAVLYMSALVATRYNPVIRAFHTRLIAAGKLPKVALVACMRKLLSILNAIIRSGSPWASEITA

SEQ ID NO: 498477 - protein, 407 aa, unidentified
MDELASNHAEVDTGSIRSDRRLEASPERGCLAEKAMEGKQMGKTETGRLCVGVDLHKTQFTVSALSEDGEYLLEQKYPTKEEGYSEFASEMHNREEQGYSIELAVETTGNARFFKNQMEKEGFVVKVVNTNKFKVITMSTKKTDANDAATLAYYLMKEMLPEAHLCSQTSEEIRRLLKTRSILVQSVVKIKNQIHGMMLGYGIETTAAQFQSKRKRQELINDLADHNYSDFTASSLKVMLKILDDLSAEIKDIEKHLEEMVERNEDVELLMTVPGIGINTATTIAAYTEDLERFEGNYKKFAAYVGIIPSVHNSNESNHYGRITKHGPQELRTAFVQAAMGMIRLTRVTSEWRLIKEYQRRKDDKGSGRAIIALARKITRIVFVMLSKRERFNPELMRCDEQIQQTA

SEQ ID NO: 498478 - protein, 343 aa, unidentified
MTISMLGIDIAKNTFQLHGADDSGKAVYKKRLSRRELAAHVANLPACTIVMEACGGANYWARVFQGSGHAVKLISPQFVKPFVKTNKNDANDALAIVEAASRPSMNFVPIKHVEQQDIQSIHRIRTRVVKNRTALINEIRGLCLEYGVVLTLGAARVKSSFCAAIADGDNELTSLSRESMQSLYEELVDVEARLKNLNTRIRQLCRQNERCQRILKVPGVGELTATAIVAAVPDPAEFRNGRHMSAWLGLVPRQSSSGDKQILLGISKRGDRYLRTLLIHGARSVLSHYKDRDSDYSRWVGRKKATLNHNKAAVALANKNARIIWSMLSSGEEFNYGVQTAAA

SEQ ID NO: 498479 - protein, 387 aa, unidentified
MSKKIVAPAYVAAMARAEADPAAARFWVGLDIGFKSTAVCVVDVDGAVVHQVSMKSHATEIGRYLRRNFKSHVTLIGMETGGLSPHLAGKLREQGFQVAVLDALQVHRVLSVKRNKTDTNDARGIAEITRSGRDYLTEVYVKSNLCFEVRASLIMRDRLVKQRRETEAMIRGLVRVYGGRIEPGSDSPATFRERAIDQLCLIADTEGVDLRPRIIPLLDLCERFYIEAGRIERELDLLAASHPVCKRFMEIPGIGTITALSFYSAIEDPTRFRHVDDVAAYLGLTPRVYQSGESLTHGGISKMGNQLTRTHLVGAATVMLANTRSFSTLKDWGMKLSKRVGFNKAKVALARKLAIVMFSLWRDCTHFMAKAADVGPHRDLMRARASA

SEQ ID NO: 498480 - protein, 350 aa, unidentified
MNYIGVDCHISTLDFAVVNEKGTVSQRAKVNTGVKEFMEFVKSIPKPRKIYIEEGELAGWLLETSLKFREKLIITDPKTNKWIGKAGQKNDTIDAEKLAQLARGKYIKEVYHPVNDRRKFKDLVFAYHDTVKNQSRIKNKIKAKFRSNGIKCSGITVYLETHRDKWREKLSSNSMTRLIVEELWVQMDQLRNSKEKLKKIIRIQSKRYSEIKKIMKIPGIGLIHGATISAIIETPHRFANKKKLWMYAGIGLMERSSGGTIYSRRLTREFNRPLKNAIKQSTEVAISAKDNQFRRQFLKLTMEKGIASHRAKLTVARSILAALYGMWKKGEDYDSEIDKKRENKKFVRTI

SEQ ID NO: 498481 - protein, 276 aa, unidentified
MTSKFWVGLDVGEVSTAVCVLDHTGLPVLECPSGSTADDIAKSLAMFPLTNIAAVALETGASPTLPPRLAKLGFPVSVFDSRKTSKVLAVRCHKTDINDARGIAEIARLGGVPRLAVHVRGQEAQQIRTELALRHRLVWLLAANRNCLRAMLRNYGSTIKQLGVGLAMGTKVEAEIKALGQTGMSEAARTLRPLIELCAQLHLSIRQADKDLKRRAEGNPITSRFLKIPGVGPICALSFYSAIDEPSRFHRPADVGPYLGMVPTLKQSGKVLRIQY

SEQ ID NO: 498482 - protein, 349 aa, unidentified
MKHFAGLDVSLEETTICIVDETGRIVKETRAESEPQALIAALEEIDLPLERVGLEACSLTAWLHEDLRRAGWPAVCFETRQANAAMKTMPNKTDRNDARALAQIMRTGWFRQVHVKSRQARLWRSLLVARRTVLNEMRSIENVVRAVLREAGLKLGTPSRAAFAARVRDLVRDDASVRPLVEPLLTILATMLYQLARLTKQVLAIVRQEEVCRRLMSVPGVGPITALAFRATIDRPDCFKRSRDGGAHLGLTPARYQSGKTDIQGKISRCGDELARTALYEAAHTLLVRSRKWSSLRAWGLQIAKRRGLARAQVAVACKLAVVLHRLWSDATEFRFGKAPSPASGLATA

SEQ ID NO: 498483 - protein, 372 aa, unidentified
MNYNTVYVGMDVHKESFTLCSCKYEDEKASHYQRTPASYKNVLRYLAFLRTIYGEDTRFVCGYEAGCLGYSLYHQLENFNVECVILAPTTMLEQRSKRRIKTDKRDAEIIARSLAQHNYSPVHIPTETDNQTKEFIRMRDDHKAELKKIKQQILSFCLRQGYQYDGSGNWTAKHVKWLRSLKPAGLYKEILDEYLLTYTILTDKLNRLDQRIEELASKEEYKESVSKLTCFLGIKTHTALSVIVEVGDFQRFVSARKFAGYLGLVPGQHSSGDDRNGLGITKAGNTHVRRLLVESAQSYTRGKIGYKSRVLRSRQAGNSPQIINYADRANERLRRRYYQMVLKDGKKYNIAKIAVARELACFIWGMMTDNIY

SEQ ID NO: 498484 - protein, 452 aa, unidentified
MAKKSKRRCDTLPVLHPDAAGIDVGASELYVAVSADRDPQPVRSFPTFARDLHAPADWLVQCGIRPVAMESTSVYWIPVYQILEARGLEVYLVNAQHVKNVPGRKTDVSDCQWLQYFHSVGLLRASFRPPGFICAMRSLWRHRASLIQMAAEHVLHMQKALDQMNLQIHCVLNDITGVSGLRILDAILTGERAPLTLARLCHGGVKSSEDVIAKSLEGDYRPEHLFALRQSLAAFRFYQQLVLEADREIQLQLAELTTAATAQPTTPARTKANAHYARHYEPRTFDLRGELCRIFGVDLANLPGISALTAQTILCEIGTDVSRFRNASAFASWLGLCPEKKISSGKVLFTKSRRVRSRVATALRMGAQSLHHAQEYLGEFFRRITRKLGRPQAITATAHKLARIVFHLLSTKEAYTESVFHKTEEETIRRAQYRLRGQAAQLGFQIIPAENG

SEQ ID NO: 498485 - protein, 368 aa, unidentified
MAEPIMVACDLHDKTMLLKIARGRGAAETLSVANTIPGRDKLIAELRRRSKAAKGAKVIFAYEASGQGFGLYDQLTAAGITCHVLAPTKIARSPQQGRQKTDEKDALLILEVLRGHVLAGNRLPSVWIPDPQTRDDRELVRLRLDLAEKITAVKAQVQGLLKRNNLKRPEGLGQGWTKKFWSWLDQLTTGETLGWATRNTLASLLRQLRFLQEEIGRVEEQLSVLAYQPRYLPTLKRMTQLSGVGVLTALVFLTEVGDLGRFTNRRQISAYLGLVPRSYESGDQKDRKGRITRQGPSRVRRVLCQATWARVRCDGPDHEHYQRLVAKNPKRKKIAVVAEMRRLAVRLWHCGRSSSQPPLRPTCRAPAV

SEQ ID NO: 498486 - protein, 427 aa, unidentified
MNYNQNHKLSQITPKTLIIGIDIAKDNHVARAQDDRGFEFGKRLIFDNRIHGFEQLLDWVSKLQKENDKTHVILGAEPTGHYWLSLAYYLRARDLDFVLVNPMHVKKAKELDDNSPTKNDTKDARVIAQLVKDGRYSVPNLLDGMYAELRGAIKLRDQLTKQLIIIEGRIQNNLDRYFPEFQDVFKSWNGKAAWFTLGSFPYPSDIREMTPEEVLTEWKTVVKRGVGIKRATKLVEQAQKSVGIETGLRFAKRELDSLLDQYALYDHQLEELDQDIEDLLQDIPGAKEMVAIKGLGTTTVATFFSEVGDLSNYNHPQQLVNLAGLSLREHSSGKYKGQTRITKRGRKKLRKALYLAVRPLVATNPTFRTLHKYYTTRPNNPLKKQQSLIALCGKLLRVLFAIGKNQCEFDGSKLLKGIPQMESLQAA

SEQ ID NO: 498487 - protein, 349 aa, unidentified
MSQDLNSTVAVIGIDIGKNTFHVVGLDDRGAIVLRQKWSRGQIEARLSNMPPCLIGMEACVGAHHLSRKLKALGHDARLMPAKYVRPYSKGQKNDFRDAEAIAEAVQRPTMKFVATKTADQLDLQALHRVRERLVSQRTGIINQIRAFLLERGVAVRQGLRFLRAELPRILATPPDVLSARMVQVISDLAEDWRRLDHRIDDLSNEITLLARQDAGCERLMSVPGIGPIISSAMVAAIGAGEAFSKGRDFAAWLGLVPKQISTGDRTILGKISKRGNRYLRVLFVQAAWVVLIKPMSWERHGLKHWIDAARKRLHRNVLAIALANKLARIAWGVLAGSRTFEASKLQTA

SEQ ID NO: 498488 - protein, 408 aa, unidentified
MKTLHRRCAGLDVHSDSVVACARVTVRTKVTHEVRRFSTATRDLLEMADWLAAQGITHVAMEATGVYWKPIWHILEGRFELILANAAHIRNVPGRKSDVNDAVWISDLLAHGLIRASFVPPAQIQDVRDLTRTRTQLAREIAQHIQRIQKTLEDANIKLTSVISDIVGMSGRRILKAMIAGETNAAKLAELGSTRLKCPRAELTAALDGRVTAHHRFLIAHHLSLIEDMERHIAAFDARIEELLVPLRDALAQLITIPGVSRVSAQVILAEIGADMTPFSTSGHLLSWAGLVPRLDESAGKRRSTRVRKGAPWLKPVLVQCAWGAARAKGTYYQAQFFRLKARRGPKKAAIAVAASLLTAVYHMLKNGTFHQDLGADFLVKRDKARIATKLANRIKDLGYDVSFTPAA

SEQ ID NO: 498489 - protein, 353 aa, unidentified
MSMVVALDVHRKQITYKSLEGESGEVRRGRIAPAAREDVRGWLKRFEGCEAEFALEGTTGWRFVVEEIERAGHRAHLADPAETSAKRGRKRRAKTDNADCDLMLKLLLAGELPESWIPPAHILELRTRVRMRKTLIDQRTAWQQRLHAQLYHQGTPAGLRLRTRAGRAALEQAELSPAGRELAALALGMMDTIDRELEPIDRWLCSFARRQPGCRALIERLFGVGPVSATAILAELGDCRRFARSNDAVRHSGLDVTVYQSDSKRAPGHISHEGPELLRWALFEAAQQASRRSSPDHVYYRQVAERIDHNRACLSVARKLCRRAHHILRELGDEALAPVEPDPQPEEAIAAAA

SEQ ID NO: 498490 - protein, 417 aa, unidentified
MALPGLVAVVSARPTGGDPRPPASEEKAITSMHTAAPDVTVTIGVDTHKDLHVAVALDALGRRLGELVVPATAAGYQQLHRWATDQGQVDAFGVEGTGSYGAGLARHLRRTGSRVIEVNRPDRASRHRKGKSDPLDAEAAARAVLAGTATATPKDGDDQVEVIRILKLTRDSAVKAQTQAVNQLKAVLVTAPTELRESLAGLGLVALLERCTALRPGEPTTPLSAAKYALRLLARRVLALRAEAKHLREVLTGLTAAAAPALVELTGVGPDTAAALLLAAGDNPHRLHSEAAFAALCGTSPIPASSGKVTRFRLNRGGNRQANAALHRAAPRCHHPHALARTHQDLRRPAHCRGQDQARDHALSQALPRPAGLSLPGKARACQPRRRAISRPPRRSCWCRLTNIGASTPTAKRSSRP

SEQ ID NO: 498491 - protein, 316 aa, unidentified
MNVIGFDISKDTIDVTLLRNSGQVDYIKIVNACEGFEKLNDWIRSKRIRKISISMEATGIYYEEAADYFSAIYQVFVINPLKIKEYSKSQFSHTKTDKADSRLIAEYTKRHLDKLTPFKPSENPTLYKLISLLQQLKQQQNESQNRLHAAKDTFIRATHEAIILLLAKQIDQTAKRIDLMIQQQDGLNTHYKNLQTIPGIGKDTAAILLHHLTDKQFKTANQFVSFAGLSPRIEQSGTSVNKKGRLSRYGHRRLKRALFMPALVAYRIKAFPKLVQNLSQKPKMVVIVALMRKLAKIAYYIHKTQKPFEKMRYQIA

SEQ ID NO: 498492 - protein, 319 aa, unidentified
MFVGIDVAKAELVVSVLPNAERFTVANDERGVRTLVERLRSIGAQLIVLEATGGYELLAVAALVAAALPAIVVNPRQVRDFAKATGQLAKTDRIDADVLARFADVVRPALRPMPDEPAPELKALLKRRRQLLDMLQAEKNRTGQVFGKGKRLAKKSLKAPIAFLERELRMTDTDLGDMVTASPAWRERDDLQQSVPGVGPVMSRTLLAALPELGRLSRREIAKLVGVAPLSRDSGTMRGRRFIQGGRSSVRAVLYMAALVATKRDAAIRVFYLRLVTAGKPKKLALVACMRKLLTMLNTIVRTKTPWRDDVAAGVLTGA

SEQ ID NO: 498493 - protein, 416 aa, unidentified
MLTNTALIVGVDVHRKTNTYCLMTQEGREVVPRFSLGNHRPGSQALVEKVRQIMQTDGFTELRLAAEATGWYWFHLFETLRSDPSLQDWPSELFLLNPRLTANFKKSYVDLDKSDPIDAYVIADRLRWGRDITIPFNYAPELLSLRFLTRYRYHVIHQLASEKAYCTAILYLKASEYSNEDKQAFSNLFGAASRAVLQEFSSMEEIAAMPFENLAAWIDDQGKHRFSDPLENAKRLQQIARDSYPLPEPLQPAVNLVLSLSLKSISHFEGLLKRLDTAIAEQMDSIPNTLQTIPGLGPVLAAGIMAEIGGVQRFDCDEAKVAKFAGFKWRKSGSAEFQAEDTHLTRTGNSYLRYYFCEAAFSVQRCDSEYGAYYQRKFKEARTHRHKRAIVLTARKLVRLVVRLLATNQPYLPRRI

SEQ ID NO: 498494 - protein, 346 aa, unidentified
MEVHTIGIDLGKTLFHLVGVDSSGTVVVRKRCSRAQLLAYTAKIQVHRIGMEACSGSHFLGRALREQGHDVRLLPAQYVKPYVKTNKSDYIDAEAIAEAVERPNMRFVPIKTEEQLDLQAVHRVRERWVMRRTAVVNQMRGLLLERGLTLPKGRRHLEQALPGILRNAESKLSESFCVLLGQLNRELEQLSTRIGEMDKLIERTAADYEACQRLTTIPGVGPVTATALIAAIGNGAAFRKGRDLAAWIGMVPQEHSTGGRQKLLSISKRGNSYLRRLFVQGARTVMQHRHRQPNSLGRWLAQLLARTHQNVAIVALANKLVRVAWAVLHSNQPYRCPELVLSDAAG

SEQ ID NO: 498495 - protein, 338 aa, unidentified
MGSYVGIDLHRQRSVIVVLDEDGNRVSWSRIDNSPANLAREVTAAGADAEVAMEACWGWYWAADVIVECGVRLHLAHPLGIAGYANRRVKNDIRDATLLADLLRMGRLPESWVAPPEVRELREEVRYRHKLIRLQTGLKCQVHQVLGKEGVIPETKGIWWSGGQRWLDELQLADVYTNRIESLRDLIELNNREIVQSDTRIHRRLKGHPGYVAIQQIAGVGRVLGAVFVAEIGDVHRFGDARRLCSWAGLTPRLRESDAHTHRGHITKQGSRLLRWAAIEAVSGAARDRRVASVKARVGARRGHNIGRVAAARHLLTLVYYGLRDGEIRCLAATDDAA

SEQ ID NO: 498496 - protein, 343 aa, unidentified
MQTITTIGLDIAKSVFQVHGVDAGGQAVIRRQLKRRQVLTFFQKLPSCLVGIEACASSHHWSRELQALGHIVRLMPPAYVKPYVKRQKNDMADAEAICEAVTRANMRFVPTKTPEQQSCLMLHRTRHLFIRQQTAVINSIRAHLAEFGIVAPVGRRGVTELLHVVADPSDKRVPEIARACLAALGTQLLRLKEQILEFDRMILAWHRSNQTSKRLHYIPGVGPMLATALVASVADPSIFRSARNFSAWIGLVPKQHSSGGKDRLGSISKKGDRYLRSLFVAGALAVIRYAKIHGTGHRPWLTALLTRKPTKVAAIALANKIARMAWAMMARGERYKEPVALAR

SEQ ID NO: 498497 - protein, 359 aa, unidentified
MEAQVKKIDFNDQNIYVGFDAHLKSWKVTVMAENVVYKTFTQPPNPEVLYNYLKNNFPGGNYHSAYEAGFCGYWIHDKLLSYGIKSIVVNPADIPTTDKERVQKEDKRDSRKIARSLSSGTLMPIYVPSIQTQRDRSLLRTRSMLVKDLARYKNRIKSFLYFYGISIDDSFSNPQSHWSNRFMFWLERIEIDGGSGKEALQVLISECKNLRTSILEVTKLIRQLSQTSVYQENVILLKSVPGIGLLTAMTILTELESIDRFNNLDKMCGYIGLIPSTKSSGEKERTGDITPRGHSVLRTAIIESSWTAIRNDPSLMKSYLSYCKRMESNKAIIKIARKLLSRVRFVLSNKKPYVCLIEK

SEQ ID NO: 498498 - protein, 387 aa, unidentified
MSQATRNQDNNSEAQVLYMALELSNKEWNVAFSVGDSRPPRRVTTPARDCGELLAHIGKAKERFGLNADARVVSCYEAGRDGFWLHRFLLGQGVDNRVVDSSSIEVNRRARRAKTDRLDVGKLLKLLLREQGGEPKVWSIIRVPTEQQEDERRVHREIERLKKERTAHSNRIRSLLVAQGLVVEVDRSFLSFLENARRVGGSSLGPHLKEELRREYIRWELVDTQVRALEKVQYTETTSGSAVGRGKAIEQARELILFRGVGPAISWSLAHEFFWRDFNNRREVGGASGLTGTPYSSGDGERDQGISKAGNRRVRHVMVEAAWLWVRWQPDSGITQWFERRFAHGGKRMRRVGIVGVARRLLIAFWRYLKDGVVPEGAQFKSSGVKA

SEQ ID NO: 498499 - protein, 347 aa, unidentified
MDHVIIGVDTHKDNHIAVAIDAQGARLGSTTISTTRKGYQDLEVWAAQFGQVKAFGIEGTGSFGAGLSRDLLAKGHEVLDVMRPNRQFRYLHGKSDSLDAENAARSVLNGQATAVAKTQTGSSEMIRHLKVARDSAVKAKSQAMITLKALIVNAPAELRDMLDGIRGRVALVRHVAAWRPGKITSPTASAKAAMRAIARRWLTLHEEINGHDQELERLVREKAPELMKSHGISTMTVAEMLILVGDNPERIQSEAALAKLCGVCPIPASSGKTNRMRLNRGGNRQANAALYRVAIVRMRDDERTKAYAMRRTAEGKTRREIVRCIKRYIVREIYRALCASPALVPAA

SEQ ID NO: 498500 - protein, 366 aa, unidentified
MKEQKKAEPRFVGIDLGKRTYQMAIVGKNGKVTMSNGRTTIDGRQKLYKKLTRQDKVALEACSLAFTMAKEMEVAVGCEIRVLNPYQLPLIYGTMKKTDKEDALKLAHILEDYKDERLPVVSIPSDQEMKRRKLVAGYRREQRTRVQALNRLHGLFLSCGITNVVKSELATDEERTERVKVLTCLEREEADHLLDCLRLYEKRIEVLDRQMKKEAEGDKVIERLQSVPGVGPKVSFAFVAHVASERFENASQVSNFLGLVPRVYMSGDTVRYGRITKRGNGYLRALLVQASWALVRSKTGGALKERYKYMTEENGKSKKKAIVAIARRLSEMLYTLMKNGTGYEVRKFRHKKKMEAEQLAQLALSA

SEQ ID NO: 498501 - protein, 347 aa, unidentified
MNFYNNIHPYYCGIDLHARSLYVCIIDQAGKTCLHKEISATPDKLQTLLEPYIGNIVLGVECMHCWYWVADFCDDIGVDFILGHALYMKAIHGGKAKNDRIDSYKIANLIRGGNFPLAYVYPKAMRATRDLLRRRMKIVRHGADLKAHVVNTTSQYNLPPNKVNLKNLEAREQLRNTFPEQAVQKNIDLDMTILDCYAEQLSKLEWYIQQQAKQHKPNHFHLLKSVWGIGPILALTIIYEIGDIERFESVQKFTSYARLVKCKAESAGKTYGTQGNKIGNAHLKWAFSEAAVLYLRGNENAQKYLLKLQKRMSKAKALSALAHKLGRCVYFMLKNETVFDESRFLKG

SEQ ID NO: 498502 - protein, 456 aa, unidentified
MARRSKAKGTRQRTKLHMIYPRAAGIDVGSTFHVVAVPPELSAEPVQTFQSFTGDLYRLATWLVEIGVTTVAMESTGIYWIPVFDILEAHGLEVLLVNAQHAKTVPGRKTDVNDAQWLQQLHTYGLLRGSFHPAQDWSALRVYLRHRERLVEYAAAHIQHMQKALMHMNLQLHHVLSNITGTTGMKIMRAIVAGQHDPAVLATYRDARCKASEETIRAALTGHYRREHVFALRQALELYDSYQARIEACDQEIQSTLASLQRDEISLETLPAARHKKRQSHEPLFDVREALFRVLGVDLSQIDGFSAYTALKLVGECGMDMSRWPTEKHFTSWLTLAPGNKISGGKVLNTKTRRSANRAAAIFRLSAMNVGQTQTALGAFYRRLASRAGKAKAVTATARKLAVLFYNTLRYGMAYEDPGAAYYEDRYRQRVLKGLHRRAKEFGYKLTEVGALEGVS

SEQ ID NO: 498503 - protein, 405 aa, unidentified
MAVMIGIDPHKGSHTAVALDEREESLGELRVRSATNQVEQLITWATPLGERTWAIEGAGGLGYLLAQQLVAAGERVVDVQPKLAACVRLLATGASNKNDPNDARSVAVAALRSSTVPEVRVEDHAAVMKVWAKRHRDLSRQHNRVACRLHSVLCDLVPGGIAGEISPAQATRLLDELEPAGAVATARHELAMELVADLVRLADQRRQARRRIAAAVAASKTTVTELFGVGPIVAATVIGEVGDISRFPTRDHFAAYNGTAPIEASSGGRRKVFRLSRRGNRRLNHVIHMAAVTQIRFRHTDGRAYYDRKIAQGHTGKEAIRALKRRISDAIYTRLRHDAERTARVAVGPGGHSRNDSVACAAGSHPEHRLFGQATPGPNRSLRPSRTTATATTSKPPQQRTRRGS

SEQ ID NO: 498504 - protein, 317 aa, unidentified
MQECSEIYGVDVAKDEVVTAQHGQSQIRSIVNEKSALDAWLATLSKGSIIAMESTGIYHRLLAQRAHDAGMRVYVLNARDVHFYAKAMGARGKTDRVDALLIARYAAEHHTKLHAWEPGNSAHKRVEELLSRRATVVTKRESLRQAFKGDRDVANELEQLDQSFDRFLVALDAKINALIEADEELATGRKRIASVTGFGPLGSALLAVLFARIAFANGDAVVAYSGLDPRPNDSGKKRGIRQLSKRGPAHLRRQLYLSGFAASHSKALKPLYQFLRAKGFATTEAFVILGRKLLRAAFSIWKTGQPWDPAKLLPKSA

SEQ ID NO: 498505 - protein, 308 aa, unidentified
MTTIYTGLDIAKLNLHLHLAGRIHDLPNTAAGHRRLLKLLASQLGVQVVCEATGGYERDVVAALHEAKVPVSVLNPARVRHFARATGQRAKTDDIDAAVLSAYGQALQPKPTVPRTEQEQQLAELIRRRVQVLEILVAQRQQAERLTMPTLRRQAQSLVRRLERDVEQIEEQLQALRAQAATLNERVQKLEAITGVGAITALGVLAELPELGTLNRRQAAALAGLAPHPRESGQWHGRRSIGGGRAPVRRALYMAALVAAHSNRQLKEFYQRLRAAGKPAKVALTAVMRKLIVLMNHILKSPNFVLSN

SEQ ID NO: 498506 - protein, 355 aa, unidentified
MDKQRLGDGEIVGGIDTHKHAHVAAVVDRTGRLLGTFEFPATSAGYRELLRWLREHGSVELVGVEGTGSYGAGITRYLAREGVAVVEVIRPNRQLRRRRGKSDPLDAEAAARAALSKEANVTPKSADGPVEAMRMIRLARGSAVKARTQAANQIDALVTCAPQSLRSQLKELSVLRLAERARRWRPGDIQDPLSACRATIKGLARRWSQLGAEIAGYDKQLLRLTQRVCPELLARLGVGFEVASSLLVAAGDNPDRLHSEASFAALCGVSPLDASSGQQRRHRLNRGGNRDANRALWVVAMTRLRIDERTQAYAARRTKQGRTKREILRCLKRYIAREIYSILRCNTLSRPLDVT

SEQ ID NO: 498507 - protein, 312 aa, unidentified
MIEQCFGGIDVSQDRLDVLLLPQGTGFSVANDEAGWSTLIGRLRGLLLTAIGLEPSGGYERGVLRALLAAGLSVRRINPNRLRQFARARGALAKNDRLDARLIAEYVATMPTHVVRHDPAAARIAEIVTMRRQLCDEHVAIENQAAQLEDAMLRRLAKRRLARIETDIRLLEKRLTETIAAEADLARRYARLTSMPGVGPVLAFTLIALLPELGRMSRKQIAALVGLAPYDFDSGKLRGHRSIYGGRMPVRNVLYMAALSACRYNPALKTFHNRLAAAGKKPKVILVAVMRKMITTLNAMLRDGASWQPQAA

SEQ ID NO: 498508 - protein, 415 aa, unidentified
MKKHSNSVKKSESPMKRRNPRAEPRRDSSAVMAELVSQLRHQLEVKSIPAAESAGDEHDAARPNLDRLTVGVDLGDQWSNYCILGLGGETLREGQFRTRRQEVGEFFQGLATSRVVIEVGTHSAWVREVIAGLGHEVLVANAQRMEGRKRHRRKNDRIDAAKLARLGRVDPKSLYPIQHRSTEVREDLLVIRVRDSLVESRTKLISTVRGMVKTMGARVRGCSSVSFSVKAADQIPPEVRETLEPLLRLIQTLSEEIKSYEKRIEKLGNEKYMDTKLLRQVNGVGPVTSLAYVLTLETPQRFKRSRDVGPYLGLVPQQEDSGDSQPQLGISKAGDRMLRKLLVGSAHYILGPFGPDTDLRRFGMKLCQRGGKNAKKRASVAVARKLAVLLHRLWSSGEVYEPLGYGKTITESAAA

SEQ ID NO: 498509 - protein, 343 aa, unidentified
MKITTVGIDLAKSVMQVHGVDERGKGALKKQLKRNQVAAFFANLPPCLIGMEACGGAHHWARKLESFGHTVKLIAPQFVKPYVKTNKNDMADAEAICEAVSRPSMRFVPIKNGEQQAVLALHRARQGFVKARTAQANQIRGLLAEYGIVIPQGISHISRRLPEILEDGENDLPGVFRELLWRLGEHLKELDRQVGELEVQIQTWHRGNEASTKLAQIPGIGPITASALVASIGDARSFENARQLAAWLGLVPRQHSSGGKQVLLGISKRGDTYLRMLLIHGARAVVRVLERKAEGADAWLKGLVARRNKNIAAVALANKNARIAWALLARERNYQSDYAPALA

SEQ ID NO: 498510 - protein, 359 aa, unidentified
MQTQSNKLNFTGQNIYVGFDVHLKSWKVTILTDGLAHKTFSQPPKPEVLYNYLNQNFPGGKYHTAYEAGFCGYWIHSKLVSFGIDSMVVNPADIPTTNKEVVQKEDKRDSRKIAKALRNGDLMPVYVPSLRTLEDRGLMRTRSMLVKDLTRYKNRIKSFLYFHGIEIPDTFRDSQTHWSRRFMCWLGSISLSEDSSKLSLSILLTGSNHLRTELLKVNRNIRSLSKTDRYKDNVSYLQGIPGIGLLTAMLFLTEIESIDRFPNIDKLCSFIGLVPSTNSSGETEKVGKITPRKHNALRAAIIESAWVAARTDPALLKCYHNYCKRMGPNKAIIRIARKLLSRIQHVLKNKKSYEYSLFE

SEQ ID NO: 498511 - protein, 395 aa, unidentified
MKANELQVAVDVGARTHRVAVGDASGRLIEEFDLEHTAAGLSSFFNRLERLAGSRKTPVAVAMEGFNDWARPLDRQVLEHGWRLYNVNNLKLARYKEIFPAPAKTDAIDARRILELFRLRGDLAVARGVLQEIVATTQEAERLKRLTRRRRQLVNEKARVLNRMQSDLQAVCPGLLAITAEADNLWFLSLLGAREDIRKLVGLRQSSLLALEGVGRAYCAKIQAWQREALFSHEAEWAGPMIVADARRVLALKREIAALDQLIEPLTDDCESARRLRTIPGFGPTCSGELAGEIGAIERFATEASLALYLGMAVLDHSSGTHTGTRRPRQVNPRAKAAMMVAVARHMERVPSSRAYYDKKRAQGKTHNQAVRALGRQLVRVIWSMLKHQRDYELR

SEQ ID NO: 498512 - protein, 347 aa, unidentified
MDHYAGIDVSLECSSVCVVDASGKIVREGKVLTEPEALIAWLGSLGFGLLRVGLEAGPFSQWLYAAMQKTGLAVELLETRHVRAAFEAMPVKTDRNDARGIAQLMRLGWFRPVHCKSLPAQEVRALLTARKLVQSKLFDVEMSLRGILRGFGLKVGRTTPKRFAGRIRELVAGHATLEVVAVSLLAVHEVMRREFGSLEKRVRSMAREDARARLLMSAPGVGAIVALTYVSAVDNPRRFTSSKGIGAHFGLTPKRYQSGERDVTGRISKIGDASVRAALYEAAHVILTRPVRGSALKSWAAKLVKRAGMKKAKVALARKLAVILHRMWVDGREFIFTTPRNAAAAAA

SEQ ID NO: 498513 - protein, 348 aa, unidentified
MWIIGCDFHPSWQQVAWCNSETGESGEQRLEHSNGEAERWYQQLPAGSRIGLEATGNSQWLVELLQRLGHEVWIGDAAQIRASYVRKQKNDKRDAAHILRLLLENRFPRLWRPSAEQRDIRQLLIHRHKLVEIRTRVTNALQHLVMNRGMQKKRQLWSEAGQRALRELAMPGWAGCRRQDLLETLAYLDRKIAPSDRAAEETAQRDKMALLLKMQPGVGPITALAFVVTIGEASRFPRGKQLASYLGLIPREHSSGGKQRLGGISKQGNRFLRQLLVEAAQSAVRYYESLRRPYLHRCHRKPKGVAKVAAARQLAVRLYWMLRTQTPYPEIVRIESSPRVAVVVRHGG

SEQ ID NO: 498514 - protein, 413 aa, unidentified
MIPIKKIFVGIDVAKNSLVAHAMDNQGEDIFHSYSVENNRTGCLKLINLIADHAHSLNPEIIKVGMEATNVFWEHCYRLLKDNEKLNTNFNLKLYTINPKVISNFKKSYTDLPKTDSIDAWVIADRMRFGRVKHSAPPESVYRPLRQIMRYRFNLAQNIKTEKARALNLVFLKFSNYDQKSPFGTFSKASMALLENYTLEEIVNTDIKDLATFLYKNSNNRLGGSTPIDKIITDLKKAARNSYRLKPEIDQAITQTLSMTFDNIRFYQRQNKKLKKVIARQLKAISQTLTTVDGIGAVFAAGIISEIGDINRFDNQANLASYAGLTWTKHQSGSFTAEETSMTKKGNKFLRYYLVEAANSLRVHNDEYQNYYYKKYHESQKHKHKRALVLTARKFVRLVFALLSKGEIYQPRR

SEQ ID NO: 498515 - protein, 339 aa, unidentified
MSKLLKNFIGIDISKSYFDVALIILMHSGQRIHHQFSQSKNGFKEMLQWLAQQGVIINEETIFCMEYTGIYNTGLVNFLVEQKALVWVEMPLRIKRSCGFERGSDDKTSAVKIAAYAFRHQDQIQLWRPLDSSIEKIKNLIAQRDRIVNAITGLTVPVKEMLECGCVGEARQLEKLQRSPLKALQKSKDAIEQLILKIVEQDEHIYKKTKQVQSIKGIGKVTAVTLLAYTKGFTTFSTAKQLACYCGVVPFSKTSGSSVRYKPTVSQHANKKLKKLLHLCALSAIKNDPEIKLYFERKVEEGKNKMCVINAVRNKLIHRVFAVVRDDRFFEENHVRKCG

SEQ ID NO: 498516 - protein, 475 aa, unidentified
MSKGNGMTRGDRRRNARREHLRGMLPRDGAVIGIDLADEKQAVAVIDHDVRVLARKTVRVKAFRLGEALDWAVAQARAKGFTPVTVACEPTGPRWLQVQRLCAERGLPMVCVQPLVTHIARQQQDYTTHKTDEADCVMIARLAAELHCYVPEELDEVWADLRHLGRRRAALITSGTASEQRVRDFLSVAWPVVTEACAQPFKSKTWLAALQVVAARCGGQPEELADLGVEAFTGLVRSAVGGWGGQRVRGPVCQAVFAALTSAEGVVRTHRRGLLRRIAAELGDLQRARAQQRDAEAAMAAALGDLGLARLGDIPGLTATGAAAILAETGDPKRYDTSSSLVKHAGMSPSDNASGAFDGEAHISRRGRPSLRLTAWRAVWPMLIHNPVMAAKYQAMTAAADQAAAGAQDGGAGRAGHASAAAEAARRRRAKARVACAAALLRWIYSIVVHGTSWDPDVAAGRKDHQAAPRYLEAA

SEQ ID NO: 498517 - protein, 402 aa, unidentified
MTTGQLWAGVDVGKEHHWVCVVDDTGTVVLSRKLVNDEQQIRDLVSDVDALGEQVSWAVDLTTVYATLLLTVLADAGKSVRYLAGRSVWQASVTYRGGEAKTDAKDARVIADQSRMRGEDLPVLHPDDDLISELRMLTGHRADLVADRTRTINRLRQQLVAVCPALERVAQLTSDRGWVVLLARYQRPKAIRQSGITRLTRILADAGVRNAATIAAAAVAAAKTQTVRLPGEEVAAGLVAQLAQEVIALDERIKTTDADIEDRFRRHRLAEVITSLPGMGFRLGAEFLAAVGDPALIGSADQLAAWAGLAPVPRDSGKRTGRLHTPQRYSRRLRRVMYMSALTAIRCDPHSRAYYQRKRDQGKRPIPATICLARRRTNVLYALIRDNRTWQPESPPITTAAA

SEQ ID NO: 498518 - protein, 321 aa, unidentified
MTYVGIDVSKATFVVAYSSAKGSRTNSFKNTVKGIHEFIQTISVAEHHCVLEATGNYSALLVYLLSEAGIAVSLENPLKIKNFARVMLSVTKTDEIDARLIAMYGEKMQPTSYKLRNDTILILKQKRTVIRQLKKQLVATGNLKGSMEVLPFFDPKCKKTIEKTIIFLEKQIKGLEEELASLAQSEYKKQMDLLTSIKGIGVTLAAALIMATGGFTYFDNAKQLTRYLGLSPTYQQSGTSVNVKGHINRNGDSSLRSQLYVAAFASLRCNTECKACFDRLRSNGKPGKVALIAVANKLIRQAFAVVTQEKLYVDGFKSEKP

SEQ ID NO: 498519 - protein, 399 aa, unidentified
MLYLAIDQHKNHLTINIRNEHGDVIQKGQVRTNHDDIDEFFNAFAKKARKHRGYMAIVEVCGFNDWLLAKLAKTRCNEIVVIQPDNSAVNKTDKRDADALGALLWNNRKRLQGGQRPNGIKRIFPAAPEDAQVRQLANFRQHLVTQRTRVINKIKGIINKHNMAQDAPTENYATQKFREWIKKVQLPVVDRFEVDTNIQSWELYDKQIDKVEAELVKRSEESKAKMADVYRLKAIPGISAMGAITLLSRIGDIKRFKNPDALANYFGLTPGCHNTAGKHRVGGITKRGNAIARQVLNFAVIHVLRKDPAMKEWHKKIKNRKGAKTARVAVMRRLATIIWHMLRWGKPYQFRYDPPPKPATTPKNGDLRSPKEVLGGINNRNHSRKKEGTPTKCRCKTKA

SEQ ID NO: 498520 - protein, 428 aa, unidentified
MKVLHERVAGIDVHKDMVKVAIRSPGDKPWTRKTEILEYRTFYGVLQHMAAELARRGVTHVVMEASGVYTEPVYYALCEQDFTEVAVINPAHAKALKGHKTDARDCARLAELFECGLLRGSYIPAAELKEVRDLTRYRMKTVQARTSEIQRLAKALESAGIKVGSVASEITGKSATAMIEALIDGERRGPVLADLAKGRMRTAGKLADLSMALAGRFTAHHALLCRLHRDRIAVFDTAVAGLDERIAGKAARWQREAGLLKTVPGFGDIVAQAWLGEIGPAPHLYFPHHGKLASWVSLCPGNNISARKRKHGRTGDAGTYIKPMLVQAAWAAIRVRGRLQARYNRLVRRFGGEKNPGAKKKAITAIAHTLLKIAYRVLKTGTPYQDLGADFYTRRESPAQRQAYLERQLQKLHPGATITITISPPEPA

SEQ ID NO: 498521 - protein, 360 aa, unidentified
MAHFAGLDVSIEETAVCVVDDQGTVLLQCSVATEPEAIAEALAPFAATLRRAGHEAGSLSPWLHPQLKALGVPVVCLETRQVRAAMSAQRNKTDATDALGLAHLMRTGWFRQAYVKTDGAYRLKLLLTHRRNLKRKFLDLENAIRHSLKSFGVRLNKVGRGGFEQAVREACAGDAFTAELMECMLTARAALWRQYLKLHKLAVGLVARDELCRRFMAIPGVGPVTALTFSTAIDDPSRFRRSRDVAAYFGLTSKRWQSGASIDVQGRISKAGDPDVRRALYEAASAMLTRYKGKTALKSWGQKIAKRCHKKAVVAVARKLAVIMHAMWRDGTAYADRPHAAGRPDDAPTAKERKLLGVLA

SEQ ID NO: 498522 - protein, 350 aa, unidentified
MIIGVDYHPSFQTIAFFMEETGECGEQELNHSDGQAEKFYRDLKQRGICVRVGMEATGYSRWFERLLAELGFEVWMGDPAEIKAKRVKKQKFDREDARLLRRLMLENNFPQIWVPGPENRDLRQLLWHRHRLVQMRTRIMNQLQALAMNEGYRWKKKLFSEQGRAQLEKLALAPWASRRRQELLELLDRMNPTIEELTAAVEQEARKRPDVLRLMTHPGVGPLTALAFVLIIGTWERFPRGKQIGNYVGMIPSEDSSAGKQRLGHISKQGNSLLRFLLVEAAQAAARIHPDGRRRYMHLAMRRHKSIAKVAMGRRLAVRLYWMWRNGCEYSQSVEFGSYAGQLGTGHGVK

SEQ ID NO: 498523 - protein, 416 aa, unidentified
MNAVGIDVSSRKSTVAVLRPLGEVVCLPFDVTHDIAGLASLAEKLKALDGETRVVMEHTGRYYEAVAKALHEAGLFVCAVNPLLIKEYGANSLRRVKTDKADAVKIARYALDNWADLRDFTPMDAIRYDLKTLNRQFQLASKQRTASANNLIALLEQSFPGIRKCFDSPVRSDGTQKWVDFAHSFWHVDCVRKQPFAAFCERYRKWCKRHAYFFKLRNAEEVYALAKRAVVLTPKSKVVKVLVQEAANQLISISRSVEVYRAEMDRLAAMLPEYPVVMAMYGVGKSYGPQLMAEIGDVRRFERKQALVAFAGIDPMPNQSGDKNVRSNKSSKRGSPYLRKTLFNVIRTYLQCAPQDEPVFQFLNRKQAEGKPFYVYMLAAANKFLRRYYAKLRDYFASLNPLQPVAPIPTILKATL

SEQ ID NO: 498524 - protein, 344 aa, unidentified
MIEVCVQQPTRKGEVMGNVTTIGIDLAKNSFSVRGVDAAGAVVLRRTVSRGRVLELLMQQPPCLIGLEACSGAHEWARRLQQFGHRVKLMAPRFVAPYRKNGKNDGNDAEAICEAVSRPSMRFVPIKTAEQQAVLCLHRVRQGFIEERTATINRLRGLLAEFGFVLSRSTATVRREAQALVERVPAHAARALRDLLEHIRLLDVRVREYEHSIEAHARENPSAQLVLKRQGVGPITASAVVASVGDVREFKNGRQFSAWLGLVPRQHSTGGKQRLGHITGRGDPYLRTLLVMGARSVLQRAVGKNDPLSRWALAVRARRGYHRACVAVAAKNARVLWAMLSHGA

SEQ ID NO: 498525 - protein, 338 aa, unidentified
MRYFVGIDLHSDSNYTGVIDKKDSRIFGKKLPNDLGAILKELKPFKKEIQGIVVESTYNWYWLVDGLQEAKYKVHLANPAEMQQYSGMKYTDDKWDSYWLAHMLRLGILPEGYIYPKEIRPIRDLLRKRTMLVRHRTAHVLSLQNMVNRNTGRKLKVNDAKRLSEEKISKLLADEHHRMAVRSDKAVIDFFNERIESIETVVLKEVKLRYPYEELLTVPGIGKILGITIMLETGDINRFPTVSDYSSYCRCVSSKKVSNGKKKGEGNKKNGNKYLAWAYVEAANFMRRYSEPARSWHQRKASKTNQIVAIKALSNKIAKACYFIIKDQKPFDPKKLFQ

SEQ ID NO: 498526 - protein, 314 aa, unidentified
MTKRVAGIDVGKQAVAVSIARGPVRQFPHTDAGLTAGLAWVREQAVTHVVCEATGGYERGLVHRVRGTDLAVTVAHPPKVRAFARAGGQGAKTDPLDAQILAHYGEVVELPVETAQEEASAEVRALLGRRQQLLDQRTQEQNRLEKGLQGRVKKSCQRHLAWLDKELEQLEEEYQQALQAKPELAERAALYQSVRGVGRLTAATLLAYVPELGQGSGKALTALGGLVPWAQDSGTHRGYRAIRGGRGLVRRALYMAALSVIRTDTDLGRFYRGLRRRGKPGKVALVAVMRKLLLRLHAIARRGTPWVPEGAPAS

SEQ ID NO: 498527 - protein, 608 aa, unidentified
MLPSASPRCNAPPQFPPTTSAANTAPGTNTPATRIGVGIDTARYGHYAAFLDEQLQTAAPDLEVPETAAGYERLRGRFADLAARHERVHFHIRLDMAGLYADNLVAFLQRFTCDNATVTLSCGDTQRNKNYRTAVFGRQKSDPIEARACARFALAERPAATPLPTPAHQRLRQVAGRLQALVRQRTRLVNQLHQLLARAFPELAMLVKDITVGWCLELLTRYPTAKLLATATTADLEAIAYLPHDRIPELLARAADSVASLDGPLAEDLVRDQVRQVRDVASRQKRLESWLVAAYRELPTPNHLDTIPGLGDVTAAVLTAFIFDIRRFDTPHQLVAYFGTLPIEASSGFERDGTPRGPKRYVMSKRGNDLVRRYLWMAALSASRHNPACCPLYARVRAKHPNQPSIAIGHVMRKLLHLAFAIWKSDKPFDPNHYPWQTPAHVKTSDKELTPKVSDSGLSQKKSQAAGLKSGAEPIPKEVTAACEPSLPETAPQGNTTTRIDFAHVKSQLPMARVLDHLGLTPRLKGNGPQHRCTCPIHRGDGRSRTLSVNLAESVYQCFDARCASKGDVIDLWAALHRRSLRDAAEDLVRLFDLEPYAGAERTEKRNG

SEQ ID NO: 498528 - protein, 420 aa, unidentified
MKSASTTLIAQLPDDPPNGVTGGLDWARDDHAVSVVDARGRELVRHSVEHSAAGLAELVDVLARADVGEVAIERPDGPVVEALLEAGLTVVVISPNQVKNLRGRYGSAGRKDDRFDAFVLADTLRTDRARLRPLTPDSDATVALRRACRARKDLVSHRVAVANQLRAHLRNAFPGAVGLFAEIDSPISLAFLTRFDTQDRADWLSPKRMAAWLTSVGYCGRVEPAVLHARLTAAPRGVLGEHGTAQAHVTRALLAVLSTLVEQIKTLSTQISEQLALHTDQHVFTSLPRSGRVRAARLLAEIGDCRARFPTPEALTCLAGAAPSTRQSGKIRAVGFRWACDKQLRDAVTDFAADSRKTTPWAADLYNRARARGHDHPHAVRILARAWLLVIWRCWQDRTAYDPARHGALQRLLQDQQQAA

SEQ ID NO: 498529 - protein, 406 aa, unidentified
MGGTDVMKQAPPPVSDKLTASALSDMRLKGGAMNIIYIGVDFHARQQTICYLKTETGELVTCELQHQDKQAVRAFYAQFPGPVVIGLEASGYSPWFEALLEDLGCEVWLGDATEIRRRARWRQKNDRRDAELILDLMVHKEFPRLHRPAIESREVLRMLRYRQKLIKIRTMSKNSLQALALQSGLAKGSRLFTKAGQQELNSAVMSPVMQWQCEHWLQLLQPLNQQLLETMVWLKLQSKGDIQITRLRTHPGIGLLTSLCLVHTLQPISRFRNQRKVAAYAGFDPVERSSAERKCFLGISKAGSRILRYLLVEAAQTAVRKDEDLKRFYKRLAERRGRPKAKVAAARKLLIRAYIMLRDEIDYAEFRRRAVAARLARRGQGPNVPAVLIGQPASADYRDDLPSASQ

SEQ ID NO: 498530 - protein, 425 aa, unidentified
MNYKQNEKINQVKESTLVVGIDIGSTKQYARAFDWRGIELGKVFTFSNSREGFEAFKAWMRHLQDKYRKSDVIAGIEPTGHYWFDLGAYLEDEGILLVMVNPYAVKQTKELDDNSQSKNDRKDPKVIAKLVTEGRYSAPYTPDGVYADLRIMVANRKRLIREMTQIKNRFARWFAIYFPEYTDVFGDYEAQSSMLLLKKVCTPEAIVELGAEKINQIWRDAKLRAVGMKRATTLCETAKRSIGLKKGSSAARYEMKLLLEDYEYKKAQLDAVMEEIEKLCRKIPESEQMLAIKGIGVITVAGFLAEVGDVRRFESPRQIQKLAGLSLRENSSGKHKGQTTISKRGRSKLRAVLFNAAIPLIAKNPEFKSLHEYYTTRANNPLKKKQSVIAISCKLIRVFYAILAKGVTYDAQKLISDIHRQPQVA

SEQ ID NO: 498531 - protein, 417 aa, unidentified
MEIVYERVAGIDVGKKIIAVAVRTPGERPGKRRQQLRKYNTFHQTLTQMVAWLVAEGITHVTMEATGICWKPIFHALCAAERPLEVLLVNARHVKNVPGRKSDALDAAWLAELTECGLLRGSFIPPPQIAAIRELTRYRKKLIAQRTSELQRLAKVLEDSGIKIDSVASALTTLSARAMIEALIAGERDPAVLADLARGRMRSKIPDLTLACAGRFADQHALMCTLHLEHIDHLADMIARLDARIDEATLPFVQQTNLLATIPGISERAAQVIISEIGVDMARFPTAAHLASWAGLCPGNNESAGKHRSGRTRKGNTELCTVLTECAWAAGRTSTYVGAQFRRFHRRFGGKGGKKAATATAHTLIVIIWHALAETAAYRDLGSDYFTRRIDSPEARKRRLIHELEALGHKVTLEPAA

SEQ ID NO: 498532 - protein, 313 aa, unidentified
MAKDKLDVAISEDPAAPVDTIANDPPAIADLVKRLSALKPAVIVVESTGGLERPLLEAMLDAQLPVALVHPGRVRHFAKGVGILAKTDRIDARVLVRFARQAEPRLAEKRRKNHDELRDLVACRRQLTATKTQQTNRRGATFAKPALKSIDAVIKTLDKQIASLDKQIRDIIDADDDFKYLDGLLQSVPGVGPAVSATLAADLSELGETDRQCVAALAGVAPFPDDSGTTKGKRSIRGGRADVRCALYMATLSAVRFNPVIKLFAQRLKSAGKVNKVMITACMRKLLALINAMVRDGLTWDQLNVVKKLATTH

SEQ ID NO: 498533 - protein, 310 aa, unidentified
MSQPQRFVGIDVAKAPLDIAVRPTAERWAVSNDAAGIAALVAQLQGMAPTLIVLEATGSYQRAVVAALAVAGLPVVVVNPRHARDFAKATGQLAKTDGLDARALAHVADAVRPAPRPLLDAHTEELRALLARRRQLIAMRTAEQNRLDGASPRLRADIQAHIAWLDTRVVTLDDDLETTLRASPVWREREALLRSVPGMGPVCTRTLLLDLPELGTLSRQRLAALVGVAPFNRDSGTLRGTRTVWGGRTHVRATLYMSTLVAVRYNPVLKVFYQRLRAAGKAAKVALTACMRKLLTILNAMVKHQKPWQV

SEQ ID NO: 498534 - protein, 412 aa, unidentified
MNAAGIDVSKGKSMVAVFRPFNQMVAKPFEVRHTGSELKQLADYLKGLDGETRVIMEHTGRYYEQIAQYLHDAGLYVSAVNPKLIKNYGTGNTLRHIKTDKADAKKIAKYGLDRWTELREYTPMDTIRYQLKTLNRQCGLYTKTKTMMKNNLIALLDQTYPGVNALFNSPVREDGTQKWVDFAASFWHVDCVRSMSQTAFTERYRKWCKQHRYNFSGDKAAEIHAEAQDQIAILPKDAVTRLMIRQAIDALNAVSATLEKLKAEMLALASQLPEFPVVMNMRGVGDSLGPQLMAEIGDVTRFARRSAITSFAGVDPGADQSGGHEAKSVPTSKSGPPELRKALFLVMDCLIQTKPQDDPVYLFMDKKRSEGKPYLVYMTAGANKFLRIYYGRVKEYLDKLEESSSTDSTQPS

SEQ ID NO: 498535 - protein, 354 aa, unidentified
MKRTTKYVAFDVHQATTVASVREESGRVIARSVLPTDSGALTEFVRGMRGARHVTFEEGTQAQWLYELLAPLVDRVVVCNRRGAPHQGNKGDQIDADHLSELLRRGALRAVYHGSADRATLKELTRTYRNLVEDATRVMLRLKALFRARGIPTAGTAVYHPRHRARWLAQLLEGGARFRAEALYAELDVLRQLRPKAKAVMVTEARRDPAWRVLRTIPFLGPVRVALLLATMQTPWRFRTKRQLWAYAGLAVVTRSSADYTLVAGAPVRRRRAPLTRGLNRNHNRVLKDVFKGAATAATARAGPLQDFYHSVIARGTREELARLTLTRKLAALTLRLWKKGERYDPTKLTMSAR

SEQ ID NO: 498536 - protein, 398 aa, unidentified
MRHAPTLLIALGVDANLEVVMPARRVELSYLESWMKKNLIRQDEVVLEMTTNTWQLYDELVEYAGSVTVVHPPHVALITRSQVMNDKIAASILARLLAKGLLVGIWVPPQEIRELRGLVAQRQKMTRLATQAKNRLHAVIQRHHLKPPAGNPFGKANNGWWHALALGKLEKLNLESDLATLQFAEQQQGHLQAEMMGIAVENEAIGRLLHIPGFGVITAVTVWAAIGDIARFEDAKHLVGYAGLGTRVHDSGMTMRTGKITKAGRRDLRVALVEAAHVAAHSHPHWKAELARLQPRLGYNKAIVAIARKLLITVWHVLAHQVADRLAEPERISKKMLHIAYEVGKANRAGKSAAQFARERMDALGLGSELTSIPWGSKKPIPLPPSMLEKKESAVPNQ

SEQ ID NO: 498537 - protein, 340 aa, unidentified
MDKTLPAVGIDVSKLSLDVRVDAQERPRRSPGHLANSGEGFLQLQGWFQEHGMPRVHACLEATGTYSDAIARFLFEQGHQVSVVNPARVAAFRTSEGIRTKTDRHDALVLARFCAQKRPALWSPTPASVQQLQVLLGRHEEVQVTCRQERNRLENHRLDPLTRQEIQQHIDWLQTQSAHALQRADNLLLEHGELRQACAHLDSIPGIARLTAMRLYSVFFDQQRFDGAAKLVAHAGLCSAKEESGTSVHRKASISKKGNALVRKWLYMSALAVKRCNPDFRQWAAELKARGKSGMCIVVAIMRKLLHLVHGVLKAGEDDDARKAFPSHYGRPTPPVEEAA

SEQ ID NO: 498538 - protein, 361 aa, unidentified
MIADKDIVLVVDYHSQNIEFRWFNEANGEERTGTYATTKAGILRQVEQAVGELERGGRVVWVMESTTGWSRVKDLLGDRVKFVLANVLQMPLPPKAKRRKTDKIDTARMLREYLHGDLPESFQPSAWWREVRRVVDCRQDLVERQTAIKNWIGSLLHHETWEDRENLWSAKGLRRLRAMKLSPSDQSLVELKVQQLEQLAKQLEQVEAKMQTIYKGWPEAQWVDEVRGIGLVTAVSLLAHIGPIWRFATAEDLISYARLAPGMRESDGTCRHGRIGGGGTDSHLRYLLIEATTWLCQIPRYRPTYERVVKKRGKKIGRIVVARLLLRSMHKMLTAKVRFNAMPRPASQTTTKATATACCSR

SEQ ID NO: 498539 - protein, 343 aa, unidentified
MQIHSVGIDLGRTTFHLVALGAAGKVIVRKKFNQKQLLAYTANVPASLIGLEACSGAHFLGRALRQRGHDVRLIPAQFVKPFVKSNKNDFVDAEAIAEAVERKNMRFVPIKTDDQLDLQAIHRVRDRLISRRTAVINQVRAFLLERGLVFAKTPAKLRAALPDILENADLDLTPQMRSLIDLLSKEWKTVEDQIEGLSLELERISAADPGCTRIRQIPGIGPIVATAIVAAIGNGAAFRKGRDFAAWLGVVPRQYSTGGKARLLGISKRGNVYLRKILIHGARAAVLRIKRDRAPIGAWLDALDARAPKNVVVVAMANKLARIAWAVLSSGEDYRPMGNIVAA

SEQ ID NO: 498540 - protein, 384 aa, unidentified
MPRPINETADAEHLVATLHASLELSQSTWVVTSLLPGSKTMSKHSVRAGDGSGLLALLARLRTKAEAIAGAPIEIVVIQEAGLDGFWVHRLLEANGIESHVVDAASIAVPRRRRRAKTDTIDGETLLRTLMAWKRGEPRVCAMVAPPSPEQEDLRRISRERAILLRERVRHVNRIKGLLASQGIKDYDPLHKDRRLRLDALRTGNGGPLPPRLKAELLREIEVIELLLRQIAEVEAERDSATKVDTAQNPAPVALLANLKAIGPQIAAVIYLEGLYRQFGNRREVAAYAGLAPTPWRSGSIAREQGISKAGNPRLRHIMVELAWLWVRHQPDSALTRAFHARVGTQTGRVRRIAIVALARKLLIALWRYVNLGEIPEGAVLKST

SEQ ID NO: 498541 - protein, 375 aa, unidentified
MNAITKCVGLDVSKEKIAVAVADQDASPRFCGVIPNTREAIRKQLRRLGESHELRVCYEAGVTGYGLSRFLQTLGIECVVAAPSKIERVPGPRVKTDRKDALMLAEKLRKGDLVSVWVPDEGDEALRDLVRARKARMEDRTQARQRVSMFLMRHGIVKPDTMTPWGNPYRTWLRSLTFVNRASQTAFQEYVIAVEETEMAIRRLEQEIHEIATHSSYAPMMQALQALRGFKEIAAATVVAEIGDFTRFAHPQQLMSYAGLVPRESSSGNKVWRGAITKTGNPCLRWILTESAWSYRYRPSVSASMAKRMEGLSPHVQAIAWKAQNRLHRKYMRLLSRGKSRPVALMAVARELLGFIWAIAQQVSHESNGSAGLVA

SEQ ID NO: 498542 - protein, 428 aa, unidentified
MTVKDCTSVKEFWQLKKEIRGSKNHLIVGIDVAKDNHKAFFGTANGKRLLKRLTFKNDIEGFEKLLARAKDMKMKYNFDELVFGLEPTANYHKPLGEFLIKCARMVVLVSGVAVKRNRELLDGRWDKHDTKDSANVVDLISQGKCLYYEYAPLLLRDLRNLLSLKRRLKKQEHGIRIRIRNSLLAQYFPELDKYYSKWEPEILSVVRWCLNPSVIAGLEYDQFVSLVSPGSKNIRQQGRLEWIWKKAVDSIGCDTGEAAEFEAKVMVEELRHIREVIKETDAKIKDVCVRFPEYNYLLTIPGFGPDVSSKVLAAIGNPFRFNSLRQVLKMAGMDLNANRSGKSSDTAVPVISKKGSPHLRYAIYQAAFIASCKNNYFIRYYTNTLRGREREKGIKTKMRVKLAAKMLVIAWTLMKKKEPFDPAYLKIG

SEQ ID NO: 498543 - protein, 459 aa, unidentified
MDKVKQPKTDRFEKMLVVNLAAAGIDVGSSSHFVGIGQNKEDVKEFGVYTEDLHAICRHLVAAGRTTVALESTGSYWQPLFVLLQQYNLAPILVNGKFTKNVKGRKTDVKDCQWIQKLHTMGLLEGSFIPDFFTEKVRQYYRHRQTLVDNAASYINKMQKALRLINIRLDSVLRDVMGRSGKDIIEAILKGEPDAKVLASLAQPTVKTPKEQIASALTGDWREEYIFELRQCYEIYKYYHKMMDECDEVIKQLLTTEIDRKQKEENLAKAEGVKVKKKKTHKNESKINIQQLAVDLTGGVDISSVEGVGLGLVLCITAETGLDLEAFPTAKHFSSWLSVAPDIRKTGSKVISSHTRKGKGRLAKAFMQAANAIGNMKTGGYLVQFFKRIQRRSERSAAIIATANKLSKIIWNMLVKKQAYNPVLPAEYLDKIRKKEVKNIQRKIRLLNIKEDEILFATA

SEQ ID NO: 498544 - protein, 320 aa, unidentified
MLSFCGIDVSKDRLDVMVLPEQQCSSVRNDVAGWSELIERLRGFSIAAIGLEASGGYERGVMRALLAAGMSVRQINPFKLRQFAKASGVLAKNDRLDARMIASFVAIMPTHPAQRRSPAAEQLAEMVTVRRQLSDEKIAAENASRMLENAMLQRLSRRRITRLATDIAAIDERLVEIVVSDVALAHRYRLLTSMPGVGAVLACSLIAFLPELGQLSRTKIAALVGVAPYDFESGRLKGMRCIWGGRTSVRNVLYMAALSASNWNPTLKAFHDRLAATGKKPKVVIVAVMRKMITILNAMVRDGIVWADRHSARHSVPTAR

SEQ ID NO: 498545 - protein, 353 aa, unidentified
MKKIVKQIVGIDVAQDELVCCFGNVDEVFKITFISRYTFVNNKTGFEKLIKWLVPLADKDVQLRFVMESTGVYHQKFAYFLHDKGYRLSIILPNKISNFKRTLDNKTITDKTMADAITQFGLERKLDNWEPPKAIYRTLQQLTRERSQLTDEKVVIKNQLHAENSEANPNKKSIERATKRLALIVKQQKEIIEEIANLAAADTEVKKTLALICTITGIGMLTAATVLGETNGFELIRNKRQLTSYAGLDVQEKQSGTSVKGKASISKKGNKHLRKAMHLPALSAIKYDERCKAVFARLVSKHGIKMKAAVAVQRKLLEMTYTIYKTGIAYDKDYLNKQNKKEQLETIEKKSSE

SEQ ID NO: 498546 - protein, 391 aa, unidentified
MIYIGIDVAKDKHDCFITNSDSKVLFKAFTIFNNLDGFNDLYQKIESVMDDVTKVKVGLEATGHYSYNLLGYLIDKGLPTYVINPLHTNLYRKSLSLRQTKTDKVDARTIASMLMSDVNLKSYSDTSYHNEELKSLTRYRFDKVKERAKLKTSVSRLVCILFPELEKLVPTLHMASVYALLSEFPSAKHVATAHLTRLTNLLSESSKGRYGKDTAITFRDSARASIGSNMPAKSLELKHTIKLIQELDSEIDEIENEIKIIMDEINSPILSIPGINYRMGAMIIAEIGDFNRFDSPDKILAYAGFSPSTYQSGQLDGAYAHMEKRGSRYLRYALYNATKYVCHWNPTFAAYLAKKRAEGKHYNVAISHAVKKLVRVIYHLEKTKQQYIKAA

SEQ ID NO: 498547 - protein, 312 aa, unidentified
MAKDTIGIDVSKDRLDAFWHSRTEACCLPNTPEGFGQLCDWLAKEEDVLIVFEATGAYHRGLERHLSLAELPFIKVNPKQARRFAQAIGRLAKTDSVDAKMLARMGVVLDLTPQVVEGEDVHDLRELLTARRALVKDQVTAKTRLATALNPLVREQLGRRIEDISADIQALDEVIAQIAKQRGTLEERIRRLMTIPGIGRLTATTMLIDMPELGYLDGKKITALAGLAPMTQQSGKWQGKERITGGRSSIRRAIYMPALVAIRFNRDLHDKYQQLLKVGKAKKVAITAIMRRIIILANTLLRESRDWLPDRP

SEQ ID NO: 498548 - protein, 355 aa, unidentified
MDTIYIGVDFHARQQTLCYLTTKDGEVRTHELKHQDKTEVRAFYAQFSGRVVIGLEASGYSPWFEQLLEELGHEVWLGDATEIRRRARWRQKNDRRDAELILDLMAHDEFPRLHRPCPQSREILRMLRYRQKLIKIRTMGKNSLQALALQSGLAKRSQLFTKAGQQELRTATMSPVMQWQRDQWFQLLEPLNERLLETMLWLKLQTKDDERISRLRTHPGIGLLTSLCVVHTLWPVTRFRNQRKVAAYAGFDPMERSSAERKHFLGISKAGSRVLRYLLVEAAHTAVKKDDDLKRFYQRLVERRGRPKAKVAAARKLLIRSYIMLRDEIDYAEFRRRAVAARLARQSSRPLVPEA

SEQ ID NO: 498549 - protein, 368 aa, unidentified
MTKLQLKPADGQGPQGPPPAAGEVVTIAVDLARSKWVYVCRWHEAEQRRLSTPGALSHLQALVQDYVAQGCAVQVVYEACGFGYEIAWWVAAQPGARVLVVAPSTVEKAPGVGVKTDGLDAGGLALKAERGMLKGIYVPSREQHQHRQLSRTYEQVVRNRRREQTRLRLLLQDHGYTQAPERLAGWGALAAWVAQEQAQWPGALQQCVAEVLAQRAAAEASAQRVQRALRQLGKRPAYAAVVNALAAQPGVGAFTAIRVVLELGDIERFRSGAALVNYLGLTPGEHSSGTVVRRGPVRKCGPGRLRAWLVQCAWAAVRTGGDPALSATFTRLAARAGRKRAIVAVARRLALRLRARWRAVQRATPATT

SEQ ID NO: 498550 - protein, 360 aa, unidentified
MTIAEEGAARRIIGGVDTHKDLHVAAVVDEQDRVLATRCFATTRQGYRQMLTWMRSFGELQRVGIESTGSYGAGLLRFLQQAGVEVLEVTPPDKHDRRRRGKSDDLDAQNAAHAAFAGKRSVTPKSRDGMIESLRVLSACRKTAVAARRIALQMIQNTVVCAPDGLREMLRSMTRMQLVRTLAAWRPDLTGYRNVEAAYRISLKSLARRYLELHDEIADLDAMIGAIVEELSPTLVARNSIGYAGAAQLLLTAGDNPERLRSEASFAALCGVSPVPASSGKTVRYRLNRGGDRAANSALHIIAIGRLRTDARTKAYVAKRIAEGHSKLEAIRCLKRYIAREVFTLIAQRQREINQTRIAA

SEQ ID NO: 498551 - protein, 402 aa, unidentified
MRFFVGIDWASRAHAVCIIDQTGRVRWQGSVPHTAEGLTQLVGRLRRFRGRGGLRVALERPSGLLVDTLVDAGVEVVPIHPNALKATRPRYSAAGGKSDPGDAFILADLLRTDGHRFPPLRPPSDDTRALRALVRGRDDLVAQRIALANQLRALLERFWPGAAAIFADVDSPIALAFLARYPTPQSAARLGEKRLAQFLGQHAYCGRRPVAELLARLRTAPASQVGEAEAEASGDVVRALVAVLTPLVAQVQHLSAAVEAALAQHPDGPLVQSLPRSGAVNAAQILAELGDDRARFPSDEQFAAEGGLAPVTHASGQHHAVVFRWACNKRLRRALTTFADNSRHASRWAALVYQRARARGCRHQHAIRILARAWARILWRCWQDRTPYDVRRHRAAQALAAA

SEQ ID NO: 498552 - protein, 361 aa, unidentified
MDKHKYVALDVDSANIVAGVYDRQGEALMQCCLRNNGQVISEFFKTMTGVVHVTFEEGTQAIWLYELIRPLVAEVIVCNPRENKLLKAGNKSDRIDVAKLGKLLRLGELRPVYQGPSAAQGLKQLVHGYQALVADTTRVKNRLKALYRGRGLSCKGELIYGREQRQQWLSQLETKEMQSRAASLYEELDCVLRLRAEAEKVMCRAARKHAAYKWISSAPGLGAIRTAQILATAITPHRFRGKRQFWPYCGLAVVTRSSSDYEWVDGGARRKRKPIQTRGLNQNYNRTMKAVFKGAAISALQQHPEFQEYYQRLCAQGTRPEMARLTVARKLAAIVLILWKKGELYDSKRLNQAAPGAGPGS

SEQ ID NO: 498553 - protein, 415 aa, unidentified
MRVHHNVCCGIDVHKKSVTVCLMWGPADREPEYEIRRFDTMTSDLKKLGEWLKQAHCEVAAMESTGSYWKPVWNVLEDDMKLILANANHVRALPGEKTDQKDGKRLAGLLRHGLIRPSFVPPREIRQLRDLTRYRSKLLGNGASERNRIQKVLEDANIKLGSVLTDVFGVSGHKMLKALVASDVVEIDQITKLAHWKLEPKIEQIKKALEGKLTDHHRFLIDLSLNHMEAIEKQLIKLDQEIDRRLVKHQQSLDLLDSIPGLGPTSSKSILSEIGADMSAYPDGEHLASWSTICPGNNESAGKKFSGKTRKGNPHLKATLVDCAWGATRKKNSRFRAQYYRIKSRRGAKRAIIAVAHTLLLTIYTVLQSRQPYSEPEPPPLSETKRIKKASDLCRKLRQLGFDIALKEKIQIQNA

SEQ ID NO: 498554 - protein, 391 aa, unidentified
MINIGIDVGKFKHCASVMDDKTDEILIKPFFFNNDQKGFDLFYSKTKQYIHRKHSVGMEDTGHYMINLTDFLLDKKFTVKFINPRSTCLRRKELGMSAKNDRKDSILITEMLSEKKFWRSVTRTTQETDKLREITRLYHQLQEQQNEDMNRLQRALDIVFPEVNKLSWTRYSKAYMQFLAKYPTAASIASEDIRNLRNALKTDGRGRQCKLTAEDIKEAAKCSVGEDNIAVALEVQSIIAIINTRKQQIENLENKIEEFSLNLNSPIISIPGISHITGMTIIAEIGDIHDFSDAAHLISYAGMEPLVHQSGKYDAAHMPISKHGSRYLRKALYQAVFTVCKYCPTFNAYYTRKRNQGKTYRCAQGHCVRKLLRVIYKLLANNTEFDENLVK

SEQ ID NO: 498555 - protein, 372 aa, unidentified
MRDDSEVYVGLDTSKLKISVALASAGRGGEVRFFGDIDSTPEAVEHLVRKLAKRHQRLFFAYEAGPTGYGLQRQIVALGHDCAVVAPSLIPKRPGERVKTNRRDALTLAKLHRAGELTPVWVPDPAHEALRELVRAREAAMEDLRAKRQHLQSFLLRHGRVYSGRKAWSRAHTRWLCGLQFEHPAQYLVLAEYRQAIADAEKRLERLSEQVAELVPAWSMAPVVAAFQAMRGVALLTAVTLVAEIGDARRFETPRQLMAYLGLVPSESSTGEQVRRGGITKAGNSRARRVLIEGAWTYRFPARKSRLLETRQAGLPKAVCDIAWKAQLRLCGRYRRLMARGKQRGVVVTAIAREMAAFLWAIGREVEPLRAS

SEQ ID NO: 498556 - protein, 302 aa, unidentified
MGKAMKVANTKEDRAKLVETLKSYTVNLIVLEATGGLETELVIQLQEADLPVALINPRQGRDFAKATGKLAKTDAIDAQILAHFGEAMQPQILAVESEESRQLGDLISRRRQLVEMRTAEKNRRERARGKALVDIEAHLEYLDNCLEKLNQEIEELTQANQQWLEKVNLLKTVPGIGQVISTTLVSDLPELGQLTAKQISRLVGVAPINHDSGQHKGKRMIQGGRAQIRATLYMGAVVAMRHNPVIKTFYERLVGRGKSKKLALTACVRKILVILNAMVRQNQPWQLADTERLSFRCAFFLA

SEQ ID NO: 498557 - protein, 368 aa, unidentified
MAKGMLANSEELRCNIPAVGQTAAVGIDLGDRYSHCCFLGSDGTVLSEGRVRTTPAAMANHFKDLPSTRIAIEVGAHSRWVSQLLQDWGHEVIVANPRNLPMITSSVRKSDTVDAHMLARLVRVDPQLLSPVVHRGREHYPAIAQLRARDLLVRARTRLINAVRGISKTVGVRIPPCSSPSFAAQAEPFLKEELKASLGPLLQTIAHLSKQIYCCDKEISRLGRQEYPETAQLRQVSGVGPVTALEYVLVIGDPKRFATSRDVGPYLGLTPKRDQSGDTDHQLRITKAGNKHLRSLLVQCAQYVLGRFSPDSNLKRWGTKLYSRGGKNGKKRAITAVARKLAVLLHHLWNTGEVYEALHNSSAPHLSC

SEQ ID NO: 498558 - protein, 408 aa, unidentified
MRIIGLDIHRAFAEAVAWKDGKLSRLGRVIMRREALKEFAKQLSNSDVVVIEATGNAASVAAVIGPHVSRVVIANPKQVRLIAHAKIKTDKIDAGVLAQLYGSGFLPEVWIADEATQALRRQVTRRNQIVRQRSRLKNIIQSILHAHLIPSCPHQDLCGPMGRAWLCEQILPGDERLAVERHLREFDRLTDDLKVIERDLAQSALADDRATRLMTIPGINMVVALALIAAIGDIKRFAKPEQLVGYLGLNPSVRQSGPGPAYHGRITKQGRGHARGMLVEAGWVAARCPGLLRSFFLRVQSRRGQHVAAVATARKLAILIWHLLTKNESYLWARPALHARKLRDLELRAGHKPARGQKGTASAYNLKSQRDQERRWVEQAEAAYARFVAGWNARGPKARTGAANEERQ

SEQ ID NO: 498559 - protein, 296 aa, unidentified
MQVSTIGLDIAKNVFQVHGIDAGEKVVVRRQLRRGQMPGFFEALPACLIGMEACASAHHWARELTKLGHEVRLMPAKDVKAYVKRNKNDAADAEAICEAVRRPTMRFVRVKSAEQQGQMMQHRTRDLLMRQRTQVINALRAHLAELGIAAAQGREGIKELLAIIADDRDERLPIDARASLLVLAAQLQALQTLIGSIEKRIIAQHRANADSKRLQTIPGVGLIGATAIAATVTDPKAFRSGRDFAAWVGLVPREDSTGGKRKLGPISKQGDRYLRRILVVGAHSVLRRAKHNPEKY

SEQ ID NO: 498560 - protein, 400 aa, unidentified
MRWFLGIDISKQRFDACLLDSQTSLVKSSKFDQSLEGFEALLRWLEPIDTKALFVAMESTGSYHKLLLRFLIEQGIATAVVNPMLIKHHIQSSSLRKSKTDRLDAASIAAFAMTHRHNLRCVGNEVFDGLRPLLKERESLSKQIASMKSDIKALVDLLFPELSKNTNIFTKSILHLLLQAPSRKRIRNLKEKKIARILSQACGNKAGITAKEILTLAKRSIALNDSSLEKVLQSKIRRLHLLLDERQAIEASIDELIETSSINDDIDTLTSIDGIGKTTATHFLGEVGNIKRFSSVKKLCAFSGLDPAIYQSGSSLNTQGRISKRGNPSLRRTLWQMALGVIRNNLAFKHYFEKKRQEGKPFKKAVIAVANKLLRLIYALLKNKVKFDPNRYNKQALALT

SEQ ID NO: 498561 - protein, 347 aa, unidentified
MRFYNQLHDYYCGIDLHARILYVCIVDSAGNTVLHKKIDANPDALLDVLAPFQDQIVVGVECMHCWYWVSDLCLDYAFDFVLGHALYMKAIHGGKTKNDRIDSYKIASLLRGGNFPLAYVYPKAMRATRDLLRRRTKIMRHGADLKAHVSNTFSQYNHSAPNLQLRYPYAREEVRNRFNEPAINRNLDIDLNVIAFYTKELASVEHFIEQNAKQHNPQDYQLLQTVPGIGRILALTILYEIGNIQRFPTVQQFASYSRLIKCKAESAGKQYGTNGNKIGNAHLKWAFSEAAVLYLRGNKKAKKYLNRLQKRMSKAKALSALAHKLGRCVYFMLRNKTVFDEHKFLPE

SEQ ID NO: 498562 - protein, 371 aa, unidentified
MTVSVIYVGMDVHKDSIVIATAEEGRRPAQKLAMIANDWPKLHKLLKKLQKNGTKLHVCYEAGPTGFGLCRRLREVGIDCVVVAPSLVPSKAGDRVKTDRRDAIKLAHFLRSGDLTEVHVPDEAVEAIRDLERARDAAKRAELVTRHQLSKFLLRHDRRYTGNAWTQKHRDWVRAQKFDFPAQQHVLADYVKAVDDASERVARLTKLMAELIEDTVLAPLVKALQAFRGIGVVSAVTIAAEVGGDLKRFATPRQFMSFVGLVPSENSTGKQRRQGSITRCGNSYLRRILVEAAWHYRYWPALSKELRRRNQGVAEGVRKIAWKAQTRLNKRMFHLLKAGKNSRKTVVALARELAGFIWSVGQEATLLEDAT

SEQ ID NO: 498563 - protein, 353 aa, unidentified
MKCDKYIGCDLHQATTVVAVLDAEGKVVMETIVATEAAAIIRFLKSLSGPLHITFEETTQARWMYDVVRGYVSEAIVCDPRRNKLLAEGSKADKPDARKLAELLRAGLLRPVYHGHEATRQLKELVRGYETLSADTQRIMVRIKSIYRAHGIRTSGTAVYQQKQREQWLPLLSEPGTRQRVSWLYEELDHLRPLRKQAKMAMVTEGRKHQAFRLLRTIPQLGPIRCAMLVATVDTPYRFRTKRQLWAYSGLAIVTYMSSEYEIKAGRVVRSRKPVATRGLNRNCNRRLKDLFIGAAVAGSRSEPYRSYVEGLQQKGIRAEMARLTLARKIAAVALRVWKKGEAFDPKKLNSTT

SEQ ID NO: 498564 - protein, 343 aa, unidentified
MDYFAGLDVSVKDTSVCIVDDAGKIIRETKVASEPEALLAVLRNAASHFKRIGLEAGPLSQWLFSTLGEAGLPVICVETRHMRAALKAQINKTDRNDARGIAQMMRVGLYRPVHVKTLRSQKLRMLLTHRKLLQSKAIAIDNDLRGTLRNFGLKVGVVGAARFEARIKELVEDLPDLAALVEPLLIVRRTLREQIGVLHRRLLAVVREDEVCRRLMTVPGVGPVVALTYRATVDVPARFRKSKSVGAVFGLTCAKYQSGEVDRSGKISRCGDEMMRVMLYEAAQSMLRANKWSWLKAWAMQVARRCGMKKAIVALARRLAVIMHRIWIDGTDFRWTREATATA

SEQ ID NO: 498565 - protein, 312 aa, unidentified
MIEQCFVGIDVSQDRLDVLLLPQATGFSVANNEAGWSTLIGRLRGLLLTAIGLEPSGGYERGVLRALLAAGLSVRRINPNRLRQFARARGALAKNDRIDARLIAEYVATMPTHVVRHDPAAARIAEIVTMRRQLCDEHVAIENQAAQLEDAMLRRLAKRRLARIETDIRLLEKRLTETIAAEADLARRYARLTSMPGVGPVLAFTLIALLPELGRMSRKQIAALVGLAPYDFDSGKLRGHRSIYGGRMPVRNVLYMAALSACRYNPALKTFHNRLAAAGKKPKVILVAVMRKMITTLNAMLRDDASWQPQAA

SEQ ID NO: 498566 - protein, 401 aa, unidentified
MGAQQDIAWIGIDVGKTHHWACVVGDDGKVLLSVKVANGEAEIVAMLARAGGLARQLVWAVDIIGAPSALLLALLARAGHSVRYASGRVVAAMSAGYVGEGKTDAKDAHVIAETARLRRDLAVIDADTDLVRNLAVLTGHRADLIADRVRMINRLRDLMTSVFPSLERAFDYSSHKGALVLLTGYASPDRIRRLGQTRLTRWLRNRHVRGSADVAARAIAAATAQTAVLPGQELTASVITELAGAVLALDERVKTLDAPIEQNFTEHPQAAVIRSMPGFGPFLGASLLVGAGDLRAFPSAGHLAAAAGLVPVPNDSGRRTGNLHRPQRYSRLLRHVFYLSAQTSMMRTGPNRDYYLKKRDRGATHRQAVIALARRRVDVLWALLRENRTWTATPPALAQAA

SEQ ID NO: 498567 - protein, 356 aa, unidentified
MSRDIKYIGMDVHKEAIVIAVLDGSGRLVMESIVETKASSILQFIHGLRGELHVTWEEGTWAGWLYDLLQPQVSQVLVCDPRRNALLKEGNKSDKVDARKLADLLHTGMLRPVYHGEHGLRTLRELGRSYQTIGKDLNRVMNRLKALYRGWGIACAGTQVYAPRYRKEWLSKIPHPGVRRRAELLYQQFDGLQALRRRLRPELLAESRKHRATKLLRQIPCIGPIRAARLLALMQTPHRFRSKRQLWTYSGLGIETHNSAQYCYVRGQLQRTKKPQQIRGLNQNHNHEMKEIFKGAATRASCGVGPLRDFYVALLAKGMKPEMARLTLARKIAAIALTLWKKEEPFDAEQLKPQAA

SEQ ID NO: 498568 - protein, 402 aa, unidentified
MNAVGIDVSKGKSMVAIMRPFGEIVSAPFEIKHTASDINSLVELINSVEGESRIVMEHTGRYYEVLAHQLSKANLFVSAINPKLIKDFDNDSLRKVKSDKADAIKIARYALDKWQNLKQYNVMDELRNQLKTMNRQFGFYMKHKTAMKNNLIGILDQTYPGVNTYFDSPARSDGSQKWVDFASTYWHVDCVRKMSLNAFIVHYQNWCKRKKYNFSQSKAEEIYGKAKELVPVLPKDDITKLIIKQAVNQLNSASTTVESLRTLMNETASKLPEYPIVMAMKGVGASLGPQLMAEIGDVSRFTHKGAITAFAGVDPGVNESGSYEQKSVPTSKRGSSDLRKTLFQVMDVLIKTHPQDDPVYQFLDKKRAQGKPYYVYMTAGANKFLRIYYGRVKEYLSSLPES

SEQ ID NO: 498569 - protein, 413 aa, unidentified
MNSVGIDVSNGRSMVAVLRPLGEVVSAPFEVRHDSVSLLSLSQFLQQLEGESRVVMEHTGRYYESIAKSLHEAGLFVSAVNPLLIKEYGGNSLRKVKTDKADAVKIAKYGLDNWAELRDYTPMDETRYNLKTMHRQFQLASKTRTALSNNFVALQEQSFPGIRKCFDSPVRSDGTQKWVDFTYTFWHVDCVRKVSLKAFTERYRKWCKRHGYNFNTDKAAEVYALAMSAVVLVSKNETTKVLVQQTAAQLTSISRSVETYRAEMNRLASTLPEYPIVMAQYGVGTSFGPQLMAEIGDVRRFARKQSLVAFAGVDPAPNDSGDKTSRSNKTTKRGSPYLRKTLFCLMSTILQKSPVDDPIYQFLDKKRSEGKPYYVYMTAGANKFLRHYYAKVMNYLDTLENEASGKDPQQPSC

SEQ ID NO: 498570 - protein, 346 aa, unidentified
MKINRVGVDLAKNVFQLHGADRQGKTLWKRQLSRDKWLTVLFATVEPGTVIGMEACTGAHHWSRLMLDKGYEVKIIPPQFVKPFVKSNKNDANDAQAICEAMARPNMYPVKVKTIEQQDMQAIHRIRNEIKSHRIAKANQIRGLVAEYGLVAPKELTSLRSAIPKWLEDASNGLTMFFRRLLQGLYEDLCSMDKRMAELDKQIAVIAQQDPIAKRLQQLRGVGPLIATALVATMGDGKQYRKGRDMAAAIGLTPRQHSSGGKDRLLGISKRGDAYLRCLLVHGARSAMRTAKDKDDRLSRWITNLQDRRHANVAACAMANKMARMAWAMMTKGVDYDPDFSSVSAS

SEQ ID NO: 498571 - protein, 406 aa, unidentified
MEEKRTRYIGLDVHKHYLIALGVDGRLDVVMTARRVELSNLESWMKKNLTKQDEVVLEMTTNTWQLYDELVEYAGSVTVVHPPHVALITRSQVMNDKIAASILSRLLAKGLLVGIWVPPQEVRELRGLVAQRQKMTRLATQAKNRLHAVIQRHHLKVPEGNPFAKTNNGWWASLSLGRLEKMNLQSDLETLQFAEQQETRIQKEMTGIAAENEEIGRLLHIAGFGVITAVTVYAAIGDIHRFEDAKHLVGYAGMGTRVHDSGMTTRTGKITKAGRRDLRVALVEAAHVVANSHPHWKAELARLQPRIGYNRAIVAIARKLLVTVWYVLARKVADRFAEEEMVSKKMLHIAYEVGRENRAGRSAAQFVRERLDALGMGQELTSIPWGSKKPIPLPPSRLKEKERRPK

SEQ ID NO: 498572 - protein, 345 aa, unidentified
MGEVSTIGLDIAKSVFQVHGVDAEGAMVIRKRISRAKVLEFFAALPSCLVGIEACPSAHHWSRKLQVLGHTVRLMPPSYVKAYLKRSKNDANDAAAICEAVTRPSMRFVPIKSEQQQSGLMLHRRRQLLVRQRTMLSNAIRGHMAELGIISAKGRNGTAELLKIIATTGNSDCIPAAARLSLDVLARQYVAIAVEIGVIEKRIHAWHRSCAESRRLEGVPGIGPIVATALVAEVGDWKAFSSGRNLAAWIGLVPKQHSTGGKERLGGISKQGNRYLRWLLVAGAMAVIRYARQRGTKRLWLVRIMERRPIKVAAVALANKIARMAWAMMVRGEHFQELKLLPARA

SEQ ID NO: 498573 - protein, 315 aa, unidentified
MSQPLFAGIDVSKAQLDVAINQGDELLEFCSIPHTEEGISALIQKFRKTMPQLIVMERSGGLERSLVALLTEAKLPVVANNPRQIRDFAKAMGVLAKTDKIDARTMAHFAAAVKPPQRPIKDAERQQLSDRVARRRQLVDMLAREKNRLLRAAEPVRTDIEEHIAYLKERLVKTNKDIEQIIANTPVYQETVEILVSFPGLGPVTAAALVADCPELGTLDRRKIGALTGTAPLNDDSGKRTGQRYIRGGRKTLRVYLYMTTISAIRCNYKIKAFYQRLIEAGKKPKVAITACMHKIITIVNAMVKQRTPWQTEAV

SEQ ID NO: 498574 - protein, 320 aa, unidentified
MHTLSVGIDMAKAKFDAAILNSEDKYRSKIFPNTSAGFLQFLDWLAKHNALGAHLCMETTGIYGRDLANFLVQKQLLVSVVNPAQIHAFGKTELNRAKTDKADARLIARYCRMHRPAPWAPPAEEIATLQALVQRLEDLLGLRMMENSRLEAATGPARESVEAVLQFIEQQIEMVRLQIQIHIDQHPGLKSQKELLSSIPGIGDNTAATLLAFLSPVERFHSAKQVVAYAGLNPRIRQSGQWAGKSPIAKTGNALLRKALYLPAVVAKHHNPIIAAFCDRLLARGKRPMQVVVAAMRRLLHLVFGVLKSGKRFDPKFGLA

SEQ ID NO: 498575 - protein, 370 aa, unidentified
MSQSSTLFIGLDVHKDSIAVAYVAQSHGAEVTYLGSIGTRQCDIDQLIRKMQSKANHLLFVYEAGPCGYWLYRYLTKKGYDCWVVAPSLIPKKPGDRVKTDRRDAVQLARLARSGDLTAVYVPTVEDEAIRDLTRAREDAISDCKDAKFRLKAFLLRHDIRYSGRANWGPAHLRWLSEVVCPTPAQQIVFQEYVRAVTEHTERLQRLDQELYEHVKTWRLQPVVEALQALRGVQFTVAVTLVAEMGDLTRFESPRELMKFLGLVPAEYSSGEQRRQGAITKAGNTHARRVLVEGAWAYRYPAKVSRHLQLRLETQPKVIQDISWKAQVRLCKRYRRLVARGKHANVVTVAIARELTGFMWAIAKEVPLTP

SEQ ID NO: 498576 - protein, 344 aa, unidentified
MEYIGIDVHKRDSQVCILGEGGEVVLEQRVRTQRERLSELLGKRLKARVLLEASTESEWVARCLEELGHEVVVADPNFAPMYATRSRRVKTDKRDARTLAEACKLGAYRPAHRTSDEQRHMRAQLAVREALVRTRTRYISLVRALVRREGPRVADGEAESFVKRVEALALPGRLKAEVAPLLSLLLHLNERSAFLDGMLERLARRDEQLARLCTVPHVGPVTACAFASVVDDPKRFSGPHQLESYLGLVPSERSSGEKQHRGRITKTGNSRVRCSLIQAALSLLRVRKPETEHLREWAEKIAARRGKKIAVVALARRLAGILFAMMRDATEYRVPKPQEEKSAA

SEQ ID NO: 498577 - protein, 320 aa, unidentified
MASRESLFIGIDVSKQTLDVAFGADPHAPRETIPSTDEGVQLLVTRLQRLQPTLIVLEATGGLERMVFAQLLQAGLPTARVQPRRVRALAHAEGRQAKTDRLDARLLARFAERVRPPHHQATDEQRASLRDLLVRREQVIQMRTAEINRLTAAAPNLRPGIQQHIDWLDQEIRALEQERDNEAERTDEVRRKRELRDSVPGIGAITALNLLLRLPELGTIKRTEAAAVVGVAPYANQSGAQHKPRHSSGGRRDVRSVLYMATLAATRRRLVRRAFDQRLCQAGKPRKVAIVAAMRKLLTILGAILRQQKPWDPAVHTSAP

SEQ ID NO: 498578 - protein, 412 aa, unidentified
MSYKIAGIDVHKKVLMVVVMDASTPESKPERRRFTTMPSDLQRLLSWLREQGVEEAVMESTAQYWRSVWLELEPYMRLQLAQAFSNRAPRGRKHDFKDAERLVRRLIADELILSFVPAGEQRTWRNLTRMKLQLTRDQVRLQSQMECLLEEMRIKLSVVVSDLLGASGLRILRALAQGESDPKKLALLGDDRLKCTEEQLIDALTGRPQPLHREMLALQLERLQLMDGQIAKLNGLIAQAMKPHQEAVIRLAEVPGLGVDSAQQVIAEVGVKASTFPSAAEFTSWVGTCPGKDESAEENHSSRSAKGNKYLRRVLSQAAHAAVKKNGSHFQTVFRRLLPRLGYQSAIWAIAHRLCRVIWKILHEGVRFIEQGIEPDPKAKKQRARMLARALRKLGYDVAITPINPATAENAT

SEQ ID NO: 498579 - protein, 412 aa, unidentified
MSLAPPPAQFFAGLDWAAEIHAVCVMDHTGQILDRFTVAHSAEGITMLIRRLAKLADAADVQVGIERPNGRLVDLLLQAGHPVVPVSPNAIKTWRDGEVLSGAKSDAGDAAVIAEYLRLRQHRLRVAVPYSDDTRALRTVVRTRTNLVGMRVAATNQLAALLDDHWPGAKAVFADVESPISLEFLTRYPTPASAAHVGEKRMAAFMTKHGYSGRKPAAELLNRLRAAPAGARGQALTEALRDAVMALVGVLKALNSAVKDLDRSTAAHLGEHPDGKIFTSLPRSGQINAAQMLAEWGDCRQAYDGPDSVAALAGCTPITKESGKHRAVHFRWACNKRFRLALTTFADNSRHASPWAAKIYGDARKTGKDHPHAIRVLARAWIRVIWRCWLDGNPYDPTKHGAAAALMESIAA

SEQ ID NO: 498580 - protein, 343 aa, unidentified
MEQVFFAGIDAHVASLQIAVVSQRGEPVLETRVSTKDPARVLDTLAPFRPLHAVVQTCPVWPWIYDLLVPAGIQFHLAHAKALRLIAISTRKTDEGDAMLLARMLAMGLIPAVYAKPAPQRDVLALLRHRARLVRHRTSFANRIHAQLHAVRLSLPREQLLRVSTRAWLKETAWPRLSREQRCLVRTHLTLIRTLTRLVRSLDVRICARASGSANAQLLQTIPGIGPYRGLLLATELAPICRFPDAAHVASYAGLAPTVRNSGNVTHTGPIPRSANRQVRGALVSAIPTHLRFAPDSALSQSYRQLNARVGWQVARVATARKLSAIVYRMLVTGEQWRASPPM

SEQ ID NO: 498581 - protein, 347 aa, unidentified
MEFIGIDLHKRIFTVCVLDENEKVIDEMIDVETSEKGLDLFMSRHPPDDCLIVFENLTRAHFAYHYLYKNGYAVNVAHTGHGALGEIVNSNFKTDRIDAYKLALLCKDMWSGRRFIRRTHISSDENMRMKAVVRVCNVCSNIRDEMYLRIGEYMNLHNIPPHPRFKDIMGMKYRQYLLDMHDPALTIMVNTMSNAMAQIKEANDTIREFARESEDAKLLMSIKGISALTAVTIVTGIDGIYRFETPESLVAFFGLAVPHKESAHKKTKIGVITKEGDPLIRKYLANAIVNHSVWCPSSDLARFYKKKAESMPHWKAVTAAMRKLTCIIWAMLTKREYYNPQAMNLRN

SEQ ID NO: 498582 - protein, 429 aa, unidentified
MKNSVANKLKQVPVGYLVIGIDPHKKKHAAVIMAQDFTTHSKFKFNNSKEGFEMALERIRMEMVRTGSRGAIFAIETGGHYWRNLAYFLDERGIPFRFINQFTLKRRREGKDLNRRKNDYRDSEVAAQLLCTGEFTDTKLSHGVYAELRAAHNAYRRLVKERTRIINLVKGLLDGLFPEFTQVFKNPCGLTALSVLSICPIPEGIAAMTEEEFVNTIRTGHSGLLMRKKLRALHYAAQSSIGVKADAQSVSYELSFLVEKLQLIRRQICSIDETLVRLVDETEEGKYLLSIIGLNYISVAGILAELGSFRSYNSAKQLIKMAGSNPTESESGGKRSAHTPMSKKGRPVLRYCAWTAVIPMLRFNPDFRAWAKKLRERPVHANPLSGKEIVGAALNRLLRLAFVLVKNQTFYRVPEIESMPEPELLPVAS

SEQ ID NO: 498583 - protein, 328 aa, unidentified
MTPTQQTYNHVVAFEVSKEALVVHALPADEQCTIANKPQAIRRLLKSQLKHNRKQNLGPILIVCEATGGYERHVLDVAIDLGLPVHRAHGARVRFFARYCGLIAKTDPIDARVIAHYGVKTDKLRLYEPPPPETVELRALHARRTEIQQMMIAETCRLDQTHHKSIVKSLKDHIAQLKSALEAIEEEIKQLLHENAPLKKKVELMRTVIGIGPVSAMVLLAYLPDIGSLTKGEVARLCGLAPINNDSGKKRGPRHVEAGRTAIRRALYMAAVVAMDANPVIKKFADRLRGKGYPFKYVAVAVMRKLVVILNAVLRDGQPWKGAEAASA

SEQ ID NO: 498584 - protein, 438 aa, unidentified
MRSIGLDVHKRFAQIAILEGKGQPVQRRIGTTTAALRAFARTLRPDDQLVLEATMNTWAIADLLRESGARVVISNPLRTRAIAEAKVKTDKVDAATLAQLLAADFVPEVWAPDDATRRLRREVAGRAALVRQRTQVRNRVHAALNRCLEDAPVTDLFGVAGQAWLREVTLPDEERAQIEAALRVHEAIEAEIALFERRLAQVALADDRVERLMTIPGIGATTALSVIAVVGEVARFRRPAKLVSYLGLDPKVHQSGEREAWIGSISRAGHAHARSLLVEAAHAAVGSPGPLRAFFQRVERRRGTQVALVAVARKLVVLAWHLLSTGERYRFERATVSRQKRRALERQLGIPAVRRWPAPGQPSVALRREHELAAAAEAEVAYQSEVATRTQRDAAAANGEATMRPSKGRDARRSLHPHRSALLTGSTASEEGGYASEA

SEQ ID NO: 498585 - protein, 377 aa, unidentified
MKIKAYLGLDVHKNSIVVAIAKADGSEPFSYGKWGGSNLSAERGLVKLLKSLGLTKEEVSIVYEAGPSGFVLARRLLQLGYECIIVGPSEVPSKAGERVKTDKRDARKLARFHRAGELTAIHIPEARDEAVRDLCRARSDASQALARSKQQLGMFLLRNGFRYEGKTNWTQAHMNYLRQLRMPHPAQQLVVEEYIMEVDAGVARVDRIEQHMKDLLPSWERQPYVRALMAFRGFQEVAAMTEISELGDLSRFSHPRQLMGYLGLVSNEHSSGEKRRQGGITKTGNGHARWMLIECASHYSHTPRVSPNLSARQAGQSQEVKAIAWRAQNRLNYRFKKLSARSLHRNKVVVAVARELCGFIWELHQQVTKEITAKVAA

SEQ ID NO: 498586 - protein, 428 aa, unidentified
MNQSIAEASCQGVAAYIGIDWADQKHDVVLRSASQAHKVEHHIIEHKPGALMEWVGQLQQRFGGQGRILVCLEQSRGALIYHLMGYELFELYPVNPLQLARFRETFSPGGAKDDRPDAALLCELLYCHRDRLRAWKPDTVLTRKLAFFNEGRREAVDQRTGLSNAIKSQLKVYFPLALELLNQDTSTTLAAELLLRWPSLEALQKQPPHQLRKFFYAHHCRGEATMLRRLQLVQQGQPLTQDSAVIEPAAFRVQMLARQLKSLLSDIAHYDRKIAQLFAAHPDRFLFENLPGAGRALAPRLLSALGSDPKRWESAQEIATLNGIAPVRRASGKKSGKKASVHFRQACPKFLRQSFHEFAGCSIRYCGWARAYYEAQRAQGKGHHVALRALAFKWIRILFACWKQRIPYDPQRYLQALQQRGSIYGNAC

SEQ ID NO: 498587 - protein, 379 aa, unidentified
MDRAIVSTLQENALYVALELSKNSWLLAIQFPDRPQPSLHSIAGGDTAGLMAKLRAARERWAKLSGKAPSIVVCYEAGYDAFWLARFLNAQGIECLVVDAASLQVNRRGRRAKTDRIDVGMLLRGLIAWRRGDRHVWSVVRIPSVEEEDLRRSHRERERLVRERTAHINRIKGLLFAQGIRNINVKRTCKTLRVAALITGEGHPLPRRLANEITRELARLAVVQEQIAAVEHERDREPSPCAAMEEKRLQLMSLHGVGPAIAAVMAREVFWRQFDNRRQLAGFLGLATSPYDSGDTKRCQGISRAGRGPVRGTMIQAAWLWLRHQPKSALSSWFAARTVGQSGRIKRIMIIAVARKLAIALWRFVEQGLIPQGATLARR

SEQ ID NO: 498588 - protein, 305 aa, unidentified
MNTLNQNEINIGIDTSQTNLDIYVRPLGLYKSFGNNTEGIKEAIKFIKQHVPIRVLIESTGRLEMDFVCAGHKACLPISVCNPAHVRSFAKATGRVAKTDKLDAEDIAHFGEAVKPEPTTLKPEKLRHVSDLLTVRSQCLEMSTMQKNRLKRMPKTVHKPINNILKALKKELAVIDVQLEKLIKEIPEWQERVDQLTSAKGVGKVLAYTLMSELPELGRLNRKEVAALVGVAPMNRDSGSYEGKRYIRGGRSKVRTVLFVSMLSAIQCHPKLKPMYQRMVAAGKPKKGSDSCLHAQATDYLKYDG

SEQ ID NO: 498589 - protein, 321 aa, unidentified
MTNPTTRAAGIDIAKHTLEFAIHGLPIHLSVENRRPGWRRLVTELRKAGVARVGLEATGGYERGVVGYLRAAGFTVLVLQPLQVKAYARLHLRRAKNDALDAVLIAACTAAIDASPEPPDARLAPLADALTFVEQIEEELVRLQTRLEHIELPRFRHMVMADIRRLEGRRRAELRRIVQALAGHDDLCRRLHLVQSIRGIGERTAIALVLRLPELGRLTREQVAALAGLAPFDDDTGLHRGQRHIAGGRKRLRRSLYAAALPAASFWNPACIALYKRLMAKGKTHKAALVACARKLLIFANTVVQRGTPWTDRTASAGAAC

SEQ ID NO: 498590 - protein, 431 aa, unidentified
MGKETKQFLSVGIDIGADFSLMAAALPSQELLGKPYRIFHNSQRSLDGAIDRIHAWAKQYDLPVRVFMESTGIYHFPMYYKLKAAGLDAYVLNPLVTHAAKDMNVRNVHNDRFDAQKIALLGLRPGLKTSIVPRDDVAAVKALLREYHGMKKETSMYICRLKNQLRQVFPQFLTIFSKVNGVAAMAVLHEYPTPDSILAAGEDELAAFMKETVLKGPLLIRKKAEMLIQAARAAQDFGHGNSGICYLIQHYVEMIRLLDAQTKRIMAQIRTLLKEQRDSLMAKQVQLLQTIPGVGFLSAVTLVCEIGDFSAFKRPKQLFAYFGLDPAVKQSGNFTGTDLKMSKRGSPYARRCLYLLAIQSVSLNVCGTPKNPVLRSFYQEKCKTKSRMTALGAVMHKVCNLLFAVLRDEKPFVLTTPEEHRAAYSSAKQAA

SEQ ID NO: 498591 - protein, 342 aa, unidentified
MKDTMIGVDLAKRVFQVHGASMTGHVKFRKKLSRDQFRKFMAEQSGCVVVFEACGSASYWAREMEKLGHEAKLIAPQYVRPFVKRQKNDAADAEAIVIAAQRPEMRFVSPKSEDQQAKAVLFRARERLVRQRTEGVNALRAVLYEYGHVFPVGLAHLKRIEALVEDPGCDLPALVVTECQDLLAQIAEKTERIGCKTKTLKALAAETDTARRLQTMPGVGPLTALAIEAFAPDLAQFSSGRDFAAWLGLVPRQHSTGGKERLGRMSKAGQSDIRRLLIIGAMSRIVGRARHKILAKSWIGRMLARKPKMLVGIALANKMARQVWAMLMKKEDFRDPALAAAA

SEQ ID NO: 498592 - protein, 318 aa, unidentified
MEPVVGIDVAKAKLAVVWVDVTGKRRHTHVPNTPAGHGELLRWLARHAPAPIAIGLEATGGYHEAVALTLHDAGQRVSVLNPAAVEAFSRSQLRRAKTDPADADLIADFMRAQTPAPWQPAPRETRQLQALVRRLDALIEMQVQERNRLELAAAVVHPSIRKSVKHLEHQIATLRRQIRRHIDQFPTLRAQRDLIVSIPGIGETTAAILLGELQNLARFSNARQLAAFTGLVPRIRQSGTSVRGRGALSKIGSARLRRAFYFPALAALRCNAPLQAFAARLRAAGKVKMVVVAAVMRKLVHQVYGVLHSQRPFDPHHA

SEQ ID NO: 498593 - protein, 341 aa, unidentified
MKNKLIGIDLAKNVFQICGVNQAGKVQFNKKVKRAKLRAFVSQLEPTTIAMEACYSAHYWGREFEQMGHQVKLVPAQHVTPFVRGNKNDANDVVGITEAAVRPNIWFVPIKTINQQDIQMIHRIRERHVADRTALVNQIRGQLSDYGIIMPKGWRKMKDKLPLILEDAENQLTPIGRECVASQYEELRTINEMIAADEKRLKIYLRDNEDYNRLLEIPGFGPIVASAFVAAIGQAKQFRNARHMAAWLGITPRQMASGDKSVMLGITKRGSRSLRTMIIHGARAVVSNCEHKTDALSLWIKKLIERRGKNKAIVALAHKLTRFAWVILNRQEHYRAPVLST

SEQ ID NO: 498594 - protein, 357 aa, unidentified
MNTTSTLSFANTHFFVGIDVHLKNWKVTIRTGSIELKTFSMNPSPLELLAYLNKHYPNAIYHIVYEAGFCGFWALRIFEEHNIDCIIVNPADVPTTNKEKVNKSDPIDSRKLSREHEHKSLHGIYISSPEQEELRMLMRLRYRIVQSQTRTKNRIKGLLYSQGIQIPVQFSGRARWSHAFILWLESIPMKTTAGQFTLQNLLMQLTETREHHKNILKQLRKEAHKENIAPIINALLSVPGVAFITAMTLYTEIIDMKRFSDEDHLASFIGLVPSTQSTDDNIKSNSITKRQNAFLRFTMIETAWTAVREDPAITMKFNELSKRMKSQDAIVRIAKKLVKRIRHVWMHREKYQYALVA

SEQ ID NO: 498595 - protein, 399 aa, unidentified
MFYGLDVHKEFIQVCVLDAKGTKREEYRVGGSAEEVEAFAKKLRPDDPVVLEATFHTWALHDILSRHVRRVVVANPLQVKAIAQAKIKTDKVDAFTLARLLRADFLPEVEMPDPKTWALRQLVSHRRLLVKQRTAIKNSIHAVLNRRLVHNPNKDPFSKRARQWMKNLDLPAAESFLLQNAMTLLEDLDDRIDAVDHELLEQASIESNARLLMTIPGVGITAAIGFIAAIGDIRRFDTPDQLASYFGLVPRVSQSAGRCHHGRITKTGSSTARALAVEAAQILARSSSPLTATYWRVRRKRGHNVAVTALARKIIVLVWYLLAKQEPYRYTEPRLAQRKLRKATLPELRHRPQCTPQTLAAVYAEAGLPPLTHPTEAERRTAAINRRARTRISNSLKSQ

SEQ ID NO: 498596 - protein, 414 aa, unidentified
MELLHERCAALDIGKKDLKACVRTPNPAGKRSRRQEIRTYATTTNSLLELRDWLVAEQVTLVVLEATGDYWRGAFYLLEDDLNVILVNAAHAKGLPGRKTDVCDAAWLCQLGECGLLRASFVPPEPIRQLRDLTRYRTTLTAERSREAQRLEKELEDAGIKLSSVATDILGVSGRAMLAALIDGERDVRVLAEMAKARMRSKIPQLVEALTGNFGEHHAFLCRLHLERIDQLSASILALSSRIEEQMRPFSRRLDQLATIPGVGQSVAEVIIAETGGDMSRFQTAAHLASWAGVCPGHHESAGKRKSGKTRHGNRWLIGALGTAAMAAARTKDTTYLGARYQRLAHRIGKKKAIVAVEHSILTAVWHMLTNDVDYTDLGGDYFARLDPERAMRRIVRQANTLGFTVRFDPIQAA

SEQ ID NO: 498597 - protein, 364 aa, unidentified
MKQLSKKQPRSIASSKPARIAGLDLGDRYSHYCVLTQDAELVEEGRLQSTEAGLRKQFANEPRMRIALEAGTHSPWVSRLLEGFGHEVLVANPRKIRAITSSESKNDRNDAEKLARFAACDPKLLSPIQHRSPERQQDLNLIHARSSLVRARTGLVNALRGLVKSAGGRLAACSTRSFPDKAAASIPHALQPVCTPLVEQIAHLNLAIAAMDRQVEALGDKHPEIRLLRTVPGVGPIVAACYVLTLDSPDVIQDNRQAGAFLGLRPRQSQSGDKNPQHGISKTGNTCLRSLLVQAAHYILGRFGPDSALRRWGLGLAARGGNRGKKRAVVAVARKLAVLLHSMWRNRTPFVAFPQPSTQASVAA

SEQ ID NO: 498598 - protein, 358 aa, unidentified
MAGKVTETAVVGGVDTHKDLHVAAVVDQNNKVLGTQFFSTTRQGYRQMLAWMTSFGALKRIGVECTGTYGSGLLRYLQNAGLEVLEVTAPDRMERRKRGKSDTIDAECAAHAAFSGIRTVTPKTRNGMIESLRVLKTCRKTAISARRVALQIIHSNIISAPDELREQLRNMTRMQLIRTLGSWRPDASEYRNVTNVYRISLKSLARRYLELHDEIADLDVMIAAIVDELAPELIKRNAIGYESASQLLITAGDNPQRLRSESGFAALCGVSPVPVSSGKTNRYRLNRGGDRAANSALHIIAIGRLRTDAKTKEYVARRVAEGHTKMEAIRCLKRYISREVYTLLRNQNRRINSIPITA

SEQ ID NO: 498599 - protein, 330 aa, unidentified
MLRRWKKEAETAGRTIQRVAVACEAGRDGFWLACWLRARGVEAYVIHPSSVPVSREHRRAKTDRLNTELLKRAFLGWLRGEPDHCSMAAIPTLTEEDAKRPGRERENLVGERTRIVNRIRGALARLGIRNFKPMLRNAPQYLETLRTPEGAVLPPNTLAELRRDMARLSFVKQQIKEVETARLERLQRAPGEGGNAMVQLLTRVVGVGVETADMLVQEVFTRNLRDCKAVARYAGLTGAPDESGKRRRERGLAKSGNARVRRGMLQVAWGFLVHQKDSVLAAWYRARTADARGATRKTMIVALARKLLIALWRLATTGEVPSGLALRAAA

SEQ ID NO: 498600 - protein, 431 aa, unidentified
MDRVVERPSALDVHKEQVTACVRVPDEDGRSRRQEVREFKTTVRGLLAMADWLKAHGVTVVAMEATGVYWRPVWAVLEGEFELMLCNAAHVKNLPGRKTDVKDAEWLCQLLEFGLLTGSFVPPKPVRELRELTRRRRTLVRERAQEVNRLHKALEDTGIKLDCVATDILGVSGRLMLDALLAGERDPAKLAALAKGRLKVKSPALIEAFEGCRFGAQNTLLIGGILRHIDFLDAEITTLGQAIEAHLAAERPQEDRPAPFELAVQIACSLDGIQQRTAQMLIGEFGTDMTRFATDKHFASWAAQCPGNDQSAGKRRSGRTRKGPRWLDGALHDAAMGAIRVKDGHFARKYRRIKARSGHKKAIGAIKHAILIALYHMLKNGELYRPPTPNPEAERRAQERATRRLVAQLEKLGHSVTLQTATSTAQELAVT

SEQ ID NO: 498601 - protein, 344 aa, unidentified
MQTMYYIGLDVHKRTISYCVKDSSGTIHAEGTIPATRFDLDRWMKTLPQPWTAAMEATVFTGWIYDHLQPHATALKVAHPLMLRAIAAAKKKNDRIDANKICDCLRCDFLPECYMASTAIRERRRTLRYRNLLVRQMVQMKNKISGLLMEAGVNYNKQRLHKAGYFRELLATNPDIDEGLCSLLRLCRETVVRLQRTESALVRSLERDSLLLERVERLMTIPAVGPITALTWALEVGDVQRFSSIKKAISYCGLCGAEKSSANTVQRTPLSKQRNKHLQTTLIEAAKMAPRNSPELAMLYDKEKQKGNANRATLAVARKLVAYLMAVDRGQRNFQVVETNCIAA

SEQ ID NO: 498602 - protein, 348 aa, unidentified
MFAIINLKYKIMKTSENKFGTFIGIDVSKLTLDVTILNPQEGKLHHRVIDNSEDGYVRMKKWLMTEHYIDLRRTLFCMEHTGLYTRSLERFLDAHGAYVWKESSLHIKRSLGLTRGKNDKIDSRRIAEYAYRFYDKADIKGYCPSGIQRLRDLLTTRERLNKSLKSIIVSIKELKRVDIEQAIDLETYQLAAIRGIKESISEVEEAMFETIDRDSHLRQHCEMATSIPGVGKILAIKLIVYTQVFNRFESVRQLACYSGVAPFEHRSGTSLNGKTGVSKFANMDLKSTLHLASLSAIQHNPDLKAYYHRKVSEGKSKMCVINAVRNKLLSRIIAVVNRQTPYVVLTQA

SEQ ID NO: 498603 - protein, 393 aa, unidentified
MAAQALGWDIHRKFSKVTVEQMTAEGEIQIVERAHLEHEDRETMQRWLGRVPKGTPVALEAAYGWPWIADLLEEMGLEPHLAHPPAVKVLAKTEAKGDRIDADRLGKFQLRGILPECYLATPEVRMRRERVRYRMALSCLRTGVKNRIQAILHRLGILHPFSDLFGKAGRRFLQKLALPEASHEVLRGYLELLDRISSLMEQVEDWMVANLKADPIVQLLATIPGIGLILAHVIYAEIGEIERFPSRRHLNSYAGLAPLSDDSADRHGQRHCGLACNHALRWAMIEAVTGVLSTHGPRGHRLRKLYARLTHGGRYNKSQAKVAVARELCQLVYVIWMKRAPYSDSPPPRPGSIANRAGMVLDQRRQTKVKQAMRSDQPGFPIPETRAPVKGWL

SEQ ID NO: 498604 - protein, 339 aa, unidentified
MKQEIVTVGLDLAKSVFQVHAIGSDGAVLIRRKLRRAEVIGFFTDLPSCLVGMEACASAHHWARELIALGHEVRLMPPAYVKPYVKRGKTDAADAEAICEAVTRPTMRFVAVKTVEQQAVLMLHKSRDLMVRQRTMLINALRGHLAEYGIVTGIDAGGVTAMLKALHERQEELPAHARSALHGLAAQLRALTSEIDRLEAQILAWHRADETSRRLATIPGIGPITASAISAAVPDASLFRSGRQFAAWLGLTPRANSSGGKERLGGITKQGDGYLRRLLVVGATAVMRMTRKNADRQPWMAQLLERKPAKIATVALANKTARIAWAVMSRKEVYAAETA

SEQ ID NO: 498605 - protein, 356 aa, unidentified
MSTIERVGVDLAKNFIQVHAVDAANKVVTNRALKRDKFLQWCAQLPDGCLVAMEACSGAHHWCRKLRERGLDARMIPASFVALYRIQGRTGKNDANDAAAVCEAASRPHMNFVPPKTVAQQGMLCVHRLREGLKEERTACINRIRGLLAEFGVVLPQSPEVLRQHLSEVIEDASNDIAGMARLVLQKAQEHWKEIDEHIEWCDQRIAAHQKGDEQVQRAAGLKGIGPITASAVVATVGDFKQFKNGAQFGAWLGLTPRQHSSGGKTSLGSITKRGDTYLRTLLIEGAKSVVLTHREPADPISQWAQRLRERCGWQKAVVALANKNARILWAVMTRGERFDVHHVSVHPSAAMPAGA

SEQ ID NO: 498606 - protein, 341 aa, unidentified
METDIIIGVDLAKNVFQVHGANRSGAVLFRKKLSRPQFMKFMTAQPGCLVAMEACSTSYYWARTLSDAGHDVRLIPPIYVKPFVKRHKNDAADAEAIVEAALRPNMSFVEPKSADKQALSMMMRTRDQLIDHRTATVNALRGHMAEFGLIVPVGIKTIERLQELVAADDALPSLVSEMATIHFEQIIELTRQIDILTEKIKAYSTSSATVRRLQTMSGIGPIGAMIIETFAPDMATFKRGRDFAAWLGLIPLQKSTGGKSRLGQITKMGQKDIRRALVIGAMSRIAGYARQKSRAEPWLQDKLDRKPKMVAAIALANKMARQIWAMITKEEAFKQWVVIAA

SEQ ID NO: 498607 - protein, 467 aa, unidentified
MSPRSGKRFRTSQAAADLAVTHRHAAGIDVHSREHFVAVAAEDVPAGFINPDGKLPAGVRKFGANTGDLEALAAWLNDCGVTTVAMESTGVYWIPLYDLLASQGFEVMLVDPRQTKHAPGRPKSDVLDCQWIRRLHSYGLLTASFRPADEIVRWRGFQRQREMLIRYAAQHVQHLQKVLEEMNVKLTEVVSDIVGVTGMKIIKDIVRGERDPLKLAKHRHEACKATEAEIASALYGNWRVEHLFVLGQALKLYEFYQKQLRACDSQIEACLRGMADKSQGKPLPPSVRKRKPEKNEVRFGARALLFRMAGVDLTVLEGISETTALVVLSEIGTDLSKFPHEKNFVSWLGLCPQHRGSAGKIFKRRTRRGANRAARALRMAAQGCHRAKNALGAFYRRIQARAGGPKAIVATARKIAERVYRLLKYGQEYVRQSQEAYEQAYQQRLVKSLAAKAAHLGYKLVPETMSP

SEQ ID NO: 498608 - protein, 472 aa, unidentified
MSKLSHRKPNSQPGSQIEVRPFDGLARIQPHAAGMDIGAHEIVVCVPGPDNTQIVCSFGNYTADLYAIADWLLEYGIQSVAMESTGVYWTPIFETLETRGFKCCLIAATAIKRFPGRKTDVLDCQWIQTLHSYGLLADSFRPEAHLVALRTLLRHRAQLIQHRSPHILHMQKALLQMNIQLSQVLSDITGGTGQLIVRAIVAGERDPHKLAALRNYRCKKNEDEIAKALTGTWREEHLFVLQQSLALFDFYTTQIQACDAEIERTYATIRPDWGSPESENQDPLPPKKPRSHSKNAPKDVSVRVHLKRIAGIDIVAVHGISASLAQTIIAEIGTDMTKFPNEKHFCSWLGLAPHNDITGGKIIRSRTLKTHNRAGQAFRQAAASVIRADCAFGAFYRRLKSRLGPAQAVVATAHKIAQVVYHMLKFKLDYQAVSAQEYDQRFREREIRYLQRKAAKWGFTLSSSTTPVLAVS

SEQ ID NO: 498609 - protein, 344 aa, unidentified
MDHFAGLDVSVKETSVCIVDDSGKIVREVKVASEPEALLAVLKSPAYDFKRVGLEAGPLSQWLFGALAEAELSVVCVETRHMQALLKAQINKTDRNDARGIAQMMRVGLYRPVHVKTLRSQKLRMLLTHRKLLLSKAIDIENDLRGTLRNFGLKVGMVGTVKFEARIRELVDNLPDLVVLVEPLLVVRRVLREQIEILHRRLLTIVRDDEVCRRLMTVPGVGPVVALTYRATVDVPARFRKSKSVGAVFGLTCSKYQSGEIDRSGRISRCGDEMMRVMLYEAAQVMLTRTNKWSWLKAWAMKIARHRGMKKAIVALARRLAVIMHRIWVDGTVFRWTREQAVAA

SEQ ID NO: 498610 - protein, 364 aa, unidentified
MRKKNTSTSSISAGHTMGIDLGDRFSHVHVVDAVGGGVFDGRVPMSPASVESFLKSLPRLRVAMEAGTHSSWVARIAAATGHEVIVANPRKVRLIGQNTRKSDRADAERLARLARMDPALLGPITHRDVQAQRDLAVVRSRDALVQSRTMLVNRVRGTLKSFGLHPAKCSTANFAKKLAADVPDELKPAILPLLEILFELNLRIACFDREVERLSEEQYPVVQGLREIAGVGPITALAYVLTVDNPRRFAKSQDVAAYLGLVPRQRQSGERDPQMHITKTGSTLMRRLLVSAAHYIIGPFGKDCDLRRFGLALAARGGAAGKKRAIVAVARKLAVVMHRLWSSGEVYDPNRNRRGETRNQPAAA

SEQ ID NO: 498611 - protein, 357 aa, unidentified
MKKLFIGIDFSKEKLDATIILACGMNEIGSREYGCFPNNTTGYRKLCNWVKTNAWNTIAEEWLFCGEDTGSCSIGLSKWLYGKGYDIWIENAYAIKHSSGIQRVKKDKADSAIIAEYAWRQQDKVVPFEPLNESLAQLREIFLYRHKLVGQRVAMELRKEDKSQSNKSKAISFINRKSKHLIAEINKTIAECDKAIDSIIEADEELKENYAIITSIKGVARQNATCMLVYTNNFKKFGYDPRKIACYYGVAPFGKQSGTSVNTPAHTSHFANKLIKSLLEQAAHIAKIYNPEIRDYYQRLISKGKKPQVALNNVKNKLIRIIVALVRKKVPYDQNTYKYYEEREVIERKKNEKLIYC

SEQ ID NO: 498612 - protein, 356 aa, unidentified
MIVMKYYTTTTQFNCGIDLHARQMYVCVMDREGKKLVHTNIKNNDFEYFLKLVAPYRHDLTVCAECMFGWYWLADACQAAGLHFVLAHALYLKAIHGGKNKNDRIDSEKIAHLLRSNLIPPGHVYPAAQRPLRALLRQRLLYVWNRSELLARIQSHQLAYNRPTTRQNRYNREAWTTQLLAAEPDAIRQLALQNDLALIGHYDTQLASMEQELLKLTKQTASRDFALLQTTPGIGDYLGLTLLHEIGDIGRFPTVKDFLSYCRLVKGTVASAGKIKGLRGAKLGNPYLRWAFGEAAVVAKRDGVLGPLAQRLEARLGNKFKANTVLAIKLARAIYYMLKNKTAFDADRLVAALSRN

SEQ ID NO: 498613 - protein, 351 aa, unidentified
MFYSGIDLHKDNCFISTINDNGELVQQERVANVPEALLAYFARLGGEHRAVVESTAGWYWLNDLLEDHGIELVLAHAKYLKAIAYAKVKTDKVDSHTLATLLRINLIPRAHKISRALRDIRDVMRARLRFVQRRTRCLVSIHTIGRKFNCDDLITIEHQTIPDGLPEPYRLQMHLLYQQISLLSEQILTLEKSLHPVLIPNDDIQRLLWVPGIGKTSAFTIYLEIDGIERFSSDKHFVSYCRLVPGAHNSNRALRHKSGCKDGNKYLKLAFCDCAVRAIQYYPEIRSFYKRMRRRTNERVARTIVAKELARCVYHILTTKNNYRGFKGQPISRVKALQWPRLASPYASLMA

SEQ ID NO: 498614 - protein, 465 aa, unidentified
MPRPRRRPSIKPRTSPAALERLPPSAAGIDCGSAEHYVAVPPDRDPMPVQCFATFTAGLHRLADWLAACRITHVAMEATGVYWIPVFEILEARGFDVILVNARHVKNVPGRKTDVTDCEWLRDLHILGLLRGSFRPADAIVALRGYLRHRATLVESTSMLVQRMQKALVQMNVQLTLVVTDITGLTGLRILRDIAAGIHDPRQLAHHRDPRCRASPDEIVAALHGHYRPEHVFALQQNLALFDTYQQQVAACDAVLETHLAHLAAQASKATTPLPSPRRRQKPQNNEPRFDLRGPLHQLTGTDLSQLDGIGPYTALRLLSEIGTDMSRWPTEKHFTSWLTLAPCNKISGGRLLRSRTPPSANRAAAMLRLAVMNLGRTDTALGAFYRRLSARIGKAKAITATARKLAVLVYRVLKGELVYADPGADAYEAQHRTRVLRRLRHRAENLGFALVALTTGEVLGPTVS

SEQ ID NO: 498615 - protein, 355 aa, unidentified
MSQEKYIGMDVHQATISVAVTDSRGKLIMESILETKAATILEFIQGLHGSLSVTFEEGTSAAWLHDLLKPHVTHLVVCDPRKNALLKDGSKSDRIDARKLAELLRGNQLTSVYHGEHGMRTLKELGRSYVTITKDLARVMSRIKALYRSWAIPCSGTSVYAPRHRAEWLDKIPEPGVRLRAERLYQQLDLLQPVRQQARHDLLTESRKHHAVKLLRQIPSIGPIRAALLVAQLQTPHRFRTKRQLWAYSGFALETHDSGEYRYVRGKLQRNRERMTVRGLNNNHNPEVKNLFKGAAISASTHPGPLYDFYVALLEKGMRPTMARLTLARKIASITLTIWKKGADFDATQLHRQEA

SEQ ID NO: 498616 - protein, 419 aa, unidentified
MSKCDGRQFANSNFRRYIMNAVGIDVSKGRSMVCVMRQYGEAVVSPVEVAHTVSEMGKLADLLKRLNGETKVIMECTGNYHFPIARALQSAGLFVSTVNPILIHDFGNNTIRKRKNDKADAVKIANYGLSNWFSLPKFIPEEEIRQALKAFTRQYSKYNKIKTMLTNNFISLLDQTFLGLKELFTSNAREEDGHEKWIDFATRFWHCECVGNLSLNAFTETYRKWCRKSKYYCVNADEIHATARQCVAVMPKNETTKSLITLAASQINAVAESLANLVREMNGLAKMLPEYPVALAFRGVGNILGPQLIAETGDMRRFSKKSKLVAFAGLEPTDNSSGNFQGDEDISKKGSPHLRRVLFQIMDGLLKQSPADDSVYQFLDRKRAEKKPYYSYMNAGSAKFLRIYYARVMEHLRKLESEA

SEQ ID NO: 498617 - protein, 426 aa, unidentified
MEETDEAVDLVERVCALDIGKAALTVCIRVPHDDKPGHRRQEVREHATTTRSLLDLAARLHAAGVTLVAMEATSDYWKPAFYLLEAEGFTCWLLNARHVKNVPGRPKTDKLDAVWLAKVVERGMCRPSFVPPAPIRRLRDLTRYRRTLIRERTREKQRVEKLLEDAQIKLSSVASDIFGVSGRHMLQAMIAGQRDPKVLAQLARASMRAKLRQLEEALTGHFDDHHGFICQMMLERIDELTSRIEELTTRIDEQVAPFAAQVAQLDAVTGIGPVCAQELIAELGVDMAVFPTAAHLVAWAKFAPQANTSAGKAKTAATGKGNPWLAATLGEIAVTAGRTNTFLGERYRRIAKRRGKQRALVAVGNSVLTIVWHLLADPNACYCDLGPDFYQSRSSRHRQERNLIRQLQQLTGKTVTLTPRPATPAA

SEQ ID NO: 498618 - protein, 389 aa, unidentified
MYFCGIDIAKKKHDAVIVDGEGNFLGKPISITNTVAGFEELLTRLQSLDQNVLIGLEATGHYWLALYERLSEAGFKIVVLNPLQIAAYRRSGIRKVKNDRKDAWWIADYLRIANLKPTDRQLPILLKLRELTRFRYALMGQVGDLKRKVLSILDRVFPEYETLFSDVFIKSSRALLKEAVTADEIANFDLSELTAILKTNSQGRFGQEKASRIQNLARQSVGIGFLTDAVYLEMRCLLEQLDLLLSQIEMLENAIDEMMDQIPQFITSIPGVGKVTGSAILAEIGDINRFESSEKLVAFAGIDPTVYETGQFIAKKTRMSKRGSPHLRYALWQAASMAIQYDPELKAYYQAKRAEGKHHGTALGAVCNKLISRIYIILKEQRPYIVRET

SEQ ID NO: 498619 - protein, 401 aa, unidentified
MVSDFRKGRYNLMKIFVGIDIAKLNHFAAAISSDVEILIEPFKFTNDADGFQLLVSKLESFDKNSIIIGLESTAHYGDNLVRYLVAEFYQVCVLNPIKTCQMRKNNVRKTKTDKVDTFVIAKTLMMQDDLRFITFFDLDMMDLKALGRFRQKTIKQRTRLKIQLTTYVDQVFPEIQYFFKSGLHQNAVYALLKEAPSPKEIASMHMTHLANLLKVNSHGHFTKEQAKELRVLAQKSVGANDSAISIQITQTIQQIELLDSQLQKIEAEITDIMKFNDSVIMTIPGIGYINGGMILGEIGDIHRFSNPNKLLAFAGLDPSVYQSGNFQAKTTRMSKRGSRVLRYALVNAAWNVVRNNATFKAYYDAKRAEGRSHYNALGHCAGKLVRVIWKMLTDEVEFNLE

SEQ ID NO: 498620 - protein, 319 aa, unidentified
MFVGIDVAKAELVVSIVPSMERFTVANDERGVRTLVDRLRGLTPTLIVLEATGGYELLSVAALAAATLPVVVVNPRQVRDFAKATGQLAKTDRIDADILARFADVVRPAVRPIVDDTAHELEALLTRRRQLLEMLQAERNRTGQVFGKGKRLVKKSLKNHISYLERELRMTDTDLGEMIKASPVWRERDELLQTVPGVGPVLSRTLLADLPELGRLSRREIAKLVGVAPLSRDSGTMRGRRFVQGGRATVRAVLYMAALVATKRNAVIRAFYLRLIAVGKPKKLALVACMRKLLTILNVMVRTAQPWSASHAADVLVSA

SEQ ID NO: 498621 - protein, 370 aa, unidentified
MKKDTLFVGLDTDKKHIDVAVAEPLPRGEVRYWGRTANTPASVDRMVKKLGHGRRELVACYEAGPCGYGLYRQLTGKRGVRCLVVAPSMTPQRPGDRVKTNRRDALKLARLLRAEELTEVWVPDAAHEAMRDLVRARSSVVSALTRCRQHISGFLLRQGIPYAGKPWTNKHRAWLGTLKFEHAAHRLLLAELLLALDQAQARRDRLTDHIRELVPTWSLAWLVEALQALRGYDLINAAVMVAELGDPRRFAKPRQLMGFVGLNVSEASSGETVRRGRLTKTGNKRARKALIEAAWTYSRPAATTSKPAAARLPAAVQQIADKARHRLSRRYRHLLRRGKLKQVAIAAVARESLGFIWAIAHAAAPLPAQS

SEQ ID NO: 498622 - protein, 321 aa, unidentified
MASMTSAIPTAQPDRVVIGGIDTHKDIDVAALLDCAGMVLGTAEFPTTRAGYRQLLGWMGSAGHLGRVGVEGTGSCGAGICRQLSAAGVEVVEVNRPDRSQRRRRGKSDALDAAAAAEAACGGQRLAIPKSRDGQVEALRVLRLTRASAVKAGTKALQLLQQLIVTAPEQLPDQVGELPRMELIGCCAAWRPHSHDAADPSVATRIALKKLARRYLQLAEEISDSDTLLDGLVTDLAPQLIAVTGIGTDTAGQFLLTAGDNPERVHSEPAFAMLCGVAPLPASSGKTQRHRLNRAGIGKPTGLCTSSPPPGNAATTAPRRI

SEQ ID NO: 498623 - protein, 333 aa, unidentified
MLYVGVDAHKTTSHLTIMDEAGKILKRKQVPSSRAGLRQVLGHYEEPMKAVLEASYSWGLMYDWLDELVDEVVLAHPAKVKAIADARIKTDTIDSATLAHLLRTNLIPAAYAPSKDIRAAKRVLRQRMFLVRVQTMVKNRIHALLSQHAVDGPDVTDLFGKTGRQWLLKVALPDSDRHVLDSDLALLEMLQSCIAASNDLLKTLSAGDEPVRWLASLPGIGEFYSVLIRYEIGEIKRFRTAKRFVSHTGLAPSTYASGQRLVHGRLIKRGNKWLRWAFIEAVTPAIRHSAFLNRHYQNMKTRRGTKDARVSTARKLAELAWAVWREHRCYEER

SEQ ID NO: 498624 - protein, 341 aa, unidentified
MLYVGLDVHSKQSLLCILNAGGGTVKQIQLKGPRCTVVDHLRQLAEPFSICYEASCGYGHLYEQLRPLAHQVTVAHPGKLRLIYGSKRKNDRVDAQKLAKLLLLDMVPPVHVPTIDVRAWRSLIVFRQRLLQQVVRAKNQIRGVLRENDLAGAKWLWSKKQLAWLEALELHPVAKLRLELAVQEFKAVDARIKRIEKELQKYADRHPAVKLLMTIPGVGIRTAETFVAWVDDIGRFRNNRQIGSYFGLVPCQDASADKNRLGHITRDGPPVMRKLVCEATWTAIKKCDAFKAFFEQVMGGKSERKKIALVATMHRMIRVMGAMLRSGEAYRAAPLRKTPDA

SEQ ID NO: 498625 - protein, 391 aa, unidentified
MIYVGIDVAKDKHDCFITNSDGEVLFKAFTITNNLDGFNNLYQRIESVMEDITKVKVGLEATGHYSYNLLGYLVDKGLAAYVINPLHTNLYRKSLSLRQTKTDKVDARTIAFMLMSDVNLKSYSDTSYHNEELKSLTRYRFDKVKERAKLKSSISRLVCILFPELEKLVPTLHIASVYAMLSEFPGAKQVANAHLTRLTNLLSESSKGRYSRETAITFRDAARNSIGSNMPAKSLELKHTIKLIREISSEIDEIENEIKIIMDEINSPILSIPGINYRMGAMIIAEIGDFNRFDSSDKILAYAGFSPSTYQSGQLDGACAHMEKRGSRYLRYALYNAAKYVCHWDPTFAEYLAKKRAEGKHYNVALSHAVKKLVRVIYHLEKTNQQYIKAA

SEQ ID NO: 498626 - protein, 438 aa, unidentified
MSNKVIFNLDDLFISVGIDVGADFSWMSIALPNQQFVGKPYKILHNSMDSLTAAVSKIKEAEELYSLESRIFLESTGIYHYPLFCYLRDKGFNCSVINPIITKNSTNINIRKVHNDRFDSKKAALVGLKPDLKVSLMPSDLALNCRNLCREYYDLMDNRSAYVNKLQGELRMAFPQYLGIFSKVTINTSLTLLETYTSPSAFIKADKQEIIDTIKSTARFGLTYAQNKYNAIIQAAHEANEFGYIIDSNIKRIRLYISFIRKYDEEINGILESMHELINANEDTDFVKQIHLIETFKGAGFLSAVSLMGEIGDFSAFSKPKQLFAYFGLDPAVKQSGKFEGTKIQMSKRGSAIARRVVHTLTLQSISVSRTGEAKNPVLRDYYLKKCGAKPKLVAMGAVSHKVCNIIFAMLRDNKPFEIITPQEHIKKHNAAKCDIAA

SEQ ID NO: 498627 - protein, 338 aa, unidentified
MDRQYVGIDFHRRRSVIVRMSRDGERLGMHRIVNDPFELVRVIGLCGESPKVVIEATYGWYWAVDLLQELGAVVHLANPRALNWGDRRVKNDERDATDLAHMLRLHRLAEAWIAPPALRELRELVRYRAKLVRLRSGLKAQVHAVMAKEGALPKVSDLFGPAGTRQLDQLELAEPFARRVRSLRDLIAVYDREIVTLERDIHQHLKHDRGYRAVQAINGVGRISAAVLVAEIGDVTRFPTPAHLCSWCGLTPKHRESDLKTRRGRISKQGSRLVRATLIEGISRYHGGSVLDAQYRQIAKRRGRNKARVALARKVLTLVYYGLRDGEIRCLAPVETAA

SEQ ID NO: 498628 - protein, 356 aa, unidentified
MVLFRGNNKPKEALPMKFIGLDAHSKTCFFVVMNKRGKVVMKQRVITDERNILDFVDSVKGQKKLAYEEGVLSQWLYILLKDQVNELVVCQPSEHSGAKNDEIDAGELADLLRVGRLKSVFHADNELMNLRTLVSGQMDLMSVLNQEKNRLKALFRQVAIPTPGAKIYSSPDMAFQLPTDTQKYVACTLFEQIALLEEQRRGYLERFESNAKKYKEIKRLMTIPGIGPIRANQIVAVMVTPFRFPDKYHLFSYSKLTKHNRESDGKQYGKKPASGHPLLKDVFKSAVLGAMKSNTAFRRKYNEKRAAGADAREARNAVAKKIAATVLAVWKTGKNYDDKHKEVTWAAHSKKSHSET

SEQ ID NO: 498629 - protein, 347 aa, unidentified
MAMTIVEAARAVTGGVDTHLDVHVAAALDPVGGLLGTEGFTADPAGYKAMLSWLEGFGEVAKVGMEGTGSYGAGLARFLRHQGIEVVEVDRQSRQARVRHGRSDPVDAVEAARATLAGRAGQPKSMDGAVEAIRVLVVAKRSARQARSKALGQMRRLSYRAPDQLRCQLKGLTIPALVAAAASLRPTRSPDPVTAGTKASISSLAHRVRFLDVEIAGLDELIGPLLFATAPELLALKGVGPDTAASLLITAGDNPERLRSEAAWAHLCGVSPIQASSGKVTRHRLNRGGDRQANSALWRIVMVRIAHDPDTKAYIERRVKEGRTKREVIRILKRYVAREVYRHLPRG

SEQ ID NO: 498630 - protein, 407 aa, unidentified
MIYCRIDWAERTHDVALVDDPGQLLAKRHITDDAAGYKILLVLLAEYGDTEEHPIPVAIETSRGLLVAVLRQGKRKVFAISPMAAARYRHSVSRKKSDPGDALVLANILRTDMHAHRVLPDDSDLARAIAVLARAQQDATWNRQQISNQLRSLLREYYPAALTAFESWKNGLCRSEAHEVLKLAPTPTRAARLTRAQLQAALKRAGRQRGIEAEAERLREIFRDDYSHQPALVEDALGKQMLALLAQLQAACTAADDLVQAVEEAFPQHPDAEIILSFPGLGVQLGARVLAEIGDDRSRFTDARGLKTYTGASPITRAFGKKTSITRRWVKNDRLNHAGYLWAFSALRASPGAMAHYRRRRDEHGDWHAAAQRNLFDRMLGQMFHCLQRRKLFDENTAFPTALTAAA

SEQ ID NO: 498631 - protein, 425 aa, unidentified
MNYKQNEKINQVKESTLVVGIDIGSTKQYARAFDWRGIELGKIFTFSNSREGFEAFKAWMQHLQDKYRKSDVIVGIEPTGHYWFDLGAYLEDEGILLVMVNPYAVKQTKELDDNSQSKNDRKDPKVIAKLVTEGRYSAPYTPDGVYADLRIMVANRKRLIREMTQIKNRFARWFAIYFPEYTDVFGDYEAQSSMLLLKKVCTPEAIVELGAEKINKIWRDAKLRAVGMKRATTLCETAKRSIGLKKGSSAARYEMKLLLEDYEYKKAQLDAVMEEIEKLCRKIPESEQMLAIKGIGVITVAGFLAEVGDVRRFESPRQIQKLAGLSLRENSSGKHKGQTTISKRGRSKLRAVLFNAAIPLIAKNPEFKSLHEYYTTRANNPLKKKQSVIAISCKLIRVFYAILAKGVTYDAQKLISDIHRQPQVA

SEQ ID NO: 498632 - protein, 601 aa, unidentified
MWTDTTRRQFARSDLRLPSDLTDAEWAVLEPLFPARSHRGRPPVWSYRQIVEALLYLLRGGLPWRMLPPGLFPPMTTVQHYFYRWRDIGLWRSINHTLLMAVREAAGSEASPSAGVIDSQSVKTTESGGPRGYDAGKKIKGRKRHIITDTQGFLVGAVVHTADVQDRDGAPDVLASIRHSFPWLRHVFADGGYAGGKLRSALTNIGKWTIEIIKRSDRAKGFEVLPRRCWCGRPPYGIKKCQSESLDIKRRRPSVEQIIRIGMDTSKHLFQLHGVNAAEQPVLRKKLRRKEMIEFFSKLSATVIAIEACGGSHHWARLLSSFGHEVKLIAPQLSKPYVKRGKNDAADAEALCEAMSRPTMRFVPVKTADQQAALMLVGMRSRLVRNKTQLANSIRGYAAEFGLTAAKGMCRIEPLLERIAMDETVPALARELFASHAQEYAQLEKDLVEIDAKLMVWHRANECSRRLAQIPGVGPIGASLLMMKTPAPNQFASGRQFAAWLGLTPKDHSTAGKTRQGIITRAGDEALRSTLVVGATALLRYVRAGGGKNASPWLLGMLKRKPPKLVAVALANKIARIAWKMMVTGESYRKDAVLPKLVRAA

SEQ ID NO: 498633 - protein, 331 aa, unidentified
MKFLETAGIDVSKDTIDSTLHVKKCSKQFKNNTTGFRSFIRWAQNQSGLSINQIQICFEHTGLYSLNLAMFLSNNEIKFSMVPALEIKKSLGIARGKNDQLDARRIAEYAYLRREKLAFYNVPSINIIKLQALTTLRAHMVKNKSGYQSSLQGLKTFFKQKDNDNIYKTIQSEISGLNKKIKKIEREILQVIRSEESLYHLYSLITSVKGVGLILAANFLVMTNCFTKFETSRQFACYSGIAPFEKQSGTSLKSKSKVSHFANKRMKTLLNLAASSAIQCDPELKAYYNHRIETGKSRMSTLNIVRNKIVYRVFAVVKRGTPYVPLHLHAA

SEQ ID NO: 498634 - protein, 323 aa, unidentified
MCKVIGIDISKASFDVAFKKNDDGFVFYKFDNQQSGFKQFSKLLSPGDHCVMEASGPYYLFLAQYLFEQSVNVSVVNPLQVKHFVRMRMTRAKTDKKDAQMIALYGQSEHPGLWKPDQEYIRQMQQINTALEGLHKQAVMLSNQLEAFNCIPFVDKELVKTLKSLEKTILVKINKLENMMVLLAEKHYGDTMKALKSIPGIVPKTAILLITVTDNFKKFETSKKLSAFIGLAPRVYQSGTSVKGKGHITKMGNHHLRKLLYLCAWSAKKHNSQCKEMYQRLKQKGKPEKVIKVAIANKLLRQAFTIATKLTDYEKNYQFKFAF

SEQ ID NO: 498635 - protein, 336 aa, unidentified
MRFIGVDLHTTQITVCALNHELEPEVKTYQLTELEKFVSQLQPTDEIAVEATGNTRWFVGQVKARVKRVVIVNPRQFQVIRKSVKKTDKNDAVALARFLQANLLPEVREKSAENERIQSLNETRNKFVRLKTSLLNKIHALGVSRGRKLKKSSLSSEKGLTRVLESEWTAGERIELEIVIEQIRSLKESIKKLDKAITQESEKVSGFENLVSITGVGARSAGVLLSVIGDVNDFESADKLASYFGIVPRVSNSNETVRTGRITKQGSKTGRTTLVQCVLSAIRGNEYLRKYYEQVKERRGHGKAKIAVARKYLTLIYNTLKNNWVFEDFNNFVLAE

SEQ ID NO: 498636 - protein, 422 aa, unidentified
MNKHRYQAKELPGVDWAGVAEVVDGQRVVFGVDVAKADFYGVLMVEDAQVVTTLTWQHPSETRTLGGLLAALPAAGIEVVLEPSGTYGDAVREFLRALGFGVYLVSPKRVHDAAEVYDGVPSRHDAKAAYLIARLHLAGASKPWLEVAQPRREHQALVAELELYQDAHRRNLNRLEALLSRHWPELGRIAELNSAGVLHLLADYGTAQAVCADRAQAEARLQQARRGAANPTLVSAILESAQTTLGVPATDGERHLLQVLAGELLRTRQALRGVPRRILEQVNGDPHLPCLGQSFGKATARVLEATLGSPLDDPNPHADLKAMGLNLKERSSGQHQGRLSITKRGPSRARHDLFLSALRLVQRDPVVGAWYRKKVARDGRVPRYNAVVAVMRKLALAMWHVARGQPFDSTKLFDLKALGLAA

SEQ ID NO: 498637 - protein, 321 aa, unidentified
MNVKKSSLVGIDVSHETFNAHFSNADYKYKNARIGWQKMVKEAPKNSTYVMESTGYYHYKLASYLHGLGLSVIVLNPYFVHHWIKSTGNKAKTDKRDARDIFSYALNNKNLTRSWEPMSPLLSRARVIVTLLSSFSKLRQSSRNVNHSISLVVGKSDNLLNPMNSVSAFFNEQEKALESELVGIVKNLYSEQYRLLMTIPGLGSKSVSVFLVCCRGFTDFLTYRQLTSYVGLGLKVEDSGTSVRRRQHITKTGNNYLRSLLFMCAMSAMTCCVPCKSLYNRLVSRGKLKELAIVAVMHRLVKISFGVVQSGEPYRGNLLPA

SEQ ID NO: 498638 - protein, 315 aa, unidentified
MEKTNPAPEANYVGLDIAKDRLDYTVDGTRCDHVPNTAAGHARLVETLRPLPHVRVVCEATGGYERAIVAALLLAQFEVCVVNPGRVRAFAHAEGLLAKTDRLDAQLLRRFGQRVQPRLHAPMDAAAITLRELLDYRRQVSDQLVAVRNRLELAGPVLRVRLAGQIQFLEKELRESDRLIRDHIDHDDTLRRKATRLRELQGAGPVLTATLLAYVPELGEIESPQLSALVGVAPFARDSGRSHRARHVRGGRGVVRHVLYMAAVCATRHNPVLAAFYARLVAAGKPKPVALVAVMRKMLHVLNRLVADPNFVLVR

SEQ ID NO: 498639 - protein, 373 aa, unidentified
MTTVIYIGIDVHKDTYSLCAFNFRNNHAFAQTRIQSRDELVVNYVNRLIVKHEGQGVKILCGYEAGPSGFGLHRHLQSAGIPCVLMAPTSLPKAPGNRVKNDRLDALELAKHLAYGTYSAVSIPTVEDEAVKDYTRMRNARVEALKKAKQNLLSFLLRKGKSFSEGKSYWTQIHYRWLRQQQFTDPLDQETFNEYLQEVIDQQEKVDRFNGRIEEIAQDERWSERVSKLRCFRGIDTHTALSLVSEIGDFSRFRTPQQFSAFLGLVPSEASSGQRELRGGITKTGNVRLRKLLVEGANATLRGNVYGQKSKRLKARQAGNEVQVIAYADRANRRMHRRYSQLTLRGVHNNKAKVAVARELSCFIWGMMNDRID

SEQ ID NO: 498640 - protein, 325 aa, unidentified
MFVGLDLHKRYSEFAIMDIFGKVLRQGRIENTLEEMTTFSESIPAHSSIAIESSSTWYWAHRLLSGRHKVILSNPVKNKAIASAKVKTDKIDSLMLATLLRGGFVAESYVPSRETMELRELVRYRANLVRQRTRMKNQVHAHLLMNNISIEAGPFTKGFVEEVRKIDDARVQGYLRLIDGLNREIREASVAIRQKAGSNEEANLLMTIPGISFYSALLIVSEIGEISRFEDSSSLVAYAGLAPSTHSSGEKTYHGPIMKSGSRYLRWIAGQCTRVHMRAEPDGTVAIFYARLARKKGDQKAIVAASAKLLKVVYWVLRERRAYHS

SEQ ID NO: 498641 - protein, 304 aa, unidentified
MFGIGIDVSKATLDVAVHGEQFRQFSNDKRGFVRLIRWRKTWPIKQVVLEASGGYERAALDVLHAAGLPMVRFNPARARRFAQGTGRAAKTDRLDATVLAQMAHLLPLTRYVPPAPWQQRLAEFAQCRRQLVQMRVSEMQRLRRLVDPDLIAMKQRHIAQLSDDLKQLDKAIAEQLEGQPGWKNIGALKGVGPILISTLACELPELGSLGSKAIASLVGLAPMNRESGTWQGQRRISGGRAVVREALYMAALTAIRYEPRLRAFYAGLKAKGKASKVALVAVMRKMLVILNARKRDAEVALGCP

SEQ ID NO: 498642 - protein, 337 aa, unidentified
MKYCGIDLHSNNSVVVVSDEEDRIVFSKRLPNDLAQILARLEPFQHELAGVVIESTYNWYWLVDGLMDTGYWVHLAHPAAIKKYEGLKHSGDFADAAYLAQLLKMGLLAEGYIYPREDRGARDLARKRMQLVHYRTAQVLSIEGILMRQTGARMKGEAVKRLTAAQVDAFAFAPDVALAVEANRAVSQVLGQQIEALERRLKERVSLRPEYRLLKTVPGIGETLATTIMLETGSISRFAQVGNFSSYCRCVDSLRESNGKKKGEGNTKNGNKYLAWAFVEAANFALRYCPQAKSFYDREKSKTNLVLALKALAHKLARACYHMLREQTPFDVHLCFG

SEQ ID NO: 498643 - protein, 407 aa, unidentified
MEVVYRCCCGIDVHKQVIVACLLKGGKRELREFGTTTREIRGLAEWLSEAGCEMIAMESTGVYWKPLYNLFELLGLDAIIVNAAHMKALPGRKTDVKDAEWIADLLKHGLLKASFIPDREQRERREIARYRKSLIEERAREINRLQKVLEGANIKLASVVKDINGKSSRKLLDTVIADETLDADEVAQLLHPKMRSKLELIMPAIDGITTPLQRKLIAKIVDHIDDMTLRIADMDDLIEEYEAEFEEAIARLEEIPGIARRSAEVILAEIGTDMSRFPSADHLSSWAGVSPGNNRSAGRQKHGKTTKGNKALKTTLTQCANAVKKCKGSYFSTQYQRIAARRGKNRATMAVAHSMLIAIYHMLKNDVAFRDLGADYYDNFNREHKINSYLKRLASLGWSPERAMMPA

SEQ ID NO: 498644 - protein, 399 aa, unidentified
MIGNHDDVEVFIGVDVGKGEHHAVALDRAGKRLLDRALPNDEARIREILAGLEHHGRILVVVDQPATIGALPVAVAQAAGTLVGYLPGLAMRRIADLHPGEAKTDARDAFIIADAARTMPHTLRSVQLADTQLAELSMLCGFDDDLAKQATATSNRIRGLLTQIHPALERVLGPRLDHPAVLDLLRTWPTPEALRHAGRRRIANRLTKLAPRMGERLAEDIIEAIGQQTVTVVGTNAATIVLPQLADMLARIHEGRATVYAQVEALVEAHPLHQVLMSLPAVGIRTAARILTEVAGKDFPTAGHLASYAGLTPVTWRSGSSIRGNRASRKGNKVLKRTLYLSAFAALKDPLSRAYYDRKRAEGKHHNQALIALARRRCDTLYAMLRDGTLYQAKSPTAA

SEQ ID NO: 498645 - protein, 372 aa, unidentified
MKKNTTSSARPKKARQTASNKTTAKLTVGIDLGDQNSAYCVLDADGDVLSEGTVRTSESGFTQQFQSISPCRIALETGTHSPWVSRLLQKYGHDVIVANARQVRVIYESDRKNDKVDARTLARLARIDKDLLHPIRHRSEKAQADLAMLRARDALVQVRTKLMNCARGMVKSVGGRLPGASSACFAKKVREHIPAAIRDALTPVLDEIEQLAGQLREYDKRIEEMAKAKYTQTQLMRQIPGVGVITSMAFTLTIEDPHRFSKSRDIAGYLGLLPRQGDSGDSKPQLSITKAGDHMLRRLLVGCAHYILGHFGPDSDLRRWGLSLMVRGGKNAKKRAVVAVARKLAVLMHKLWVTGEVYEPLREANRIKAAAV

SEQ ID NO: 498646 - protein, 330 aa, unidentified
MRTVAGIDVSAHKLDVACLTEDQRPIFVEFKQSQAGHDQLVAFLKKHRVEVVVMEATGIYYLDAAVALFRADIAVSVINPRSAHHFAKAMLQRSKTDRIDAAVLAEYALRMDLKPWRAPREDWLALRDIARRINQLTGIRTGEKNRLHALKAQRHTRRALIEDLETHIEMLDASIKRLTTSALGLIKHDAVLSAYRSHMTIAQGIADASVVAILGELCLLPLELRSAQVSRQAGMDVRLTESGTSINGPGRLSKQGNAYLRAALHMPFLSFVQHDERAKAHYEALIGRGKKKMQALCAIQRKMLTGLWACMKTGQPFDSAKLFAIEPEKA

SEQ ID NO: 498647 - protein, 343 aa, unidentified
MQVVTTIGLDIAKSVFQVHGIDAEGKVTTRRQLKRRYVLAFFQKLQPCLVGIEACATSHHWSRQLKALGHTVRLMPPAYVKPYVKRQKNDAADAEAICEAVTRANMRFVETKTPEQQSCLMLHRTRQLFIRQQTSVINAIRAHLAEFGIVAPVGRKGVEQLLAVAADASDHHVPEMARACVVALGAQLRMLKAQILEFDRRILAWHRSNEICQRLDELPGVGPALATALVAGVADPKAFRSGRNFSAWIGLVPKQHSSGGKNKLGGISKQGDRYLRSLFTAGALAVIRYAKTHGTKHRPWLTALLARRPTKVAAIALANKIARMAWAMMAKGERYKEPVALAA

SEQ ID NO: 498648 - protein, 317 aa, unidentified
MEVSLIFVGIDVSKAQLDVAIRPTGEKESFANDKAGIKALVKRLAKIEPTLIVLEATGGYERQVTRALVSADLPVVVVNPRQVRDFAKATGQLAKTDSIDAAVLAHFAEVIRPELRPLPDVVTLELRALTARRRQILEMIAAENNRLAMTSKAVRKYIDAHVHWLEQGLERVEKDLDRSIKQSPIWKENEELLRSAPGIGPVTSHTLLAELPELGTLNRKQISALVGVAPFNRDSGSLKGRRSIWGGRAPVRCALYMATLVATRRNPVIRDFYKRLKAKGKPFKVALVACMRRLLTILNSMIKHKTYWSETFSLQTT

SEQ ID NO: 498649 - protein, 368 aa, unidentified
MGVLVTLIRKELSLMANYYIGADVDCKMVELAIEKNEKIIGRYRVPTTIPALREVLGSIGGTKFLTFEEGPMAGWMYRNLKDNVDQLVVCDPRRNKLIACDGDKDDSIDAGKLAGLLRGGYLREVYQSEDIGRIVLKQWVSLYHDKVHEAVRQINKIRARCRMYGIRIPRRALRDHISRRQWMTGLSEKDLAEQLRVLWLGFDTAAKQVQMARKQLLRHSKNYEIIKYWSDVPGIALIRATTLLAYLDTPWRFSNEKKLWKYCGVGLQRTASGTDRFGKPNRGKLQLAWAVNRRLKGVVTGAAMSAINQKNNIFAYEYGRMIGNGLTASNARHAIARKLLSVLWAMWKTSSRFDESLVCYSPVTVKAG

SEQ ID NO: 498650 - protein, 319 aa, unidentified
MMTQSGLLAGPDIAGIDVAKDWLDVSVAGRVERVANRPAELDRLGRRLVKAGVILVGLEPTGGYERLAVERLGEAGLDVRMVDSWRLRQFAKSRGTRTKTDALDARMIADFLAREPARPFPRPSAAQKALVAWTREISRAEADLRRLQARQLACPLAEIAELMKAEAVVLKQTIAQAEAAIAELIAADPDFARKAERLGSMRGVGPKTIRVLLAEMPELGALEAKSAAALAGLAPYQRRSGKAKPKGSIEAGRAALKRAAYLAACAMRLHNPWARALHDELRAKGKAFKVATVALARRFIVIANALVRDNTDWAPARPA

SEQ ID NO: 498651 - protein, 321 aa, unidentified
MKIQEGGAMGFVAGVDTHRDSHAIVFISTSGEQVAELTIPTSTAGFAKAIKTAQKLGDVAWGIEGTGSYGRGFAEALVAQGYTVYEIPGSFTKRARKLGSRPGKSDILDARAIADVVLREYGRLPRFEESDQQEAIRLHYDRRDRYVRLRTEATNRLRAAALRLSLGSLPSNLSSERALKTVETGLRSLVLSSYTAHALADEIRDACAEIRTLNTRIDAIARYLRPFVARLAPELLTMHGVSTVIAAGIIGHAGNLRNYRDAAAFAMRTGTAPIPCSSGRRTAVRVNPGGDRQLNRCLHTIALIQSHKSGHPGRAYYERME

SEQ ID NO: 498652 - protein, 352 aa, unidentified
MIILAIDLGKFNSVSCRFDDETQETSYERFETSRKMLARILEEQQPQVVVIEACTLSGWVVDLCRAMQIEVVVANVAEDAWKWKKVKRKTDRDDALKLAKLAALGQITAVYTPRPAVRQWRTLIKHRKALVGQRNRVQNAIRALLAAQGLAMLRSASAWTQAGLEELRSQARPLEECSPRELWRGELTLHLQMYDFVCGQIKEVEKKLDALGQAEENVQLLETIPGVGPRTAETVAAWIDDPQRFRNGRQVSAYAGLVPRKFPSGEMDRNGRITKRGPRALRSALVEAAWLALRYNPWALEVYSRISKGQKTRKKQALVAVARKLLVTCWAILRTRKGWDPARAAPVQPQAA

SEQ ID NO: 498653 - protein, 359 aa, unidentified
MQSNKKSFKGQKIFIGIDVHKKTWAVAILTESGYLKRHPQEASAKVLFEFLRKHYPDGEYHAVYETGFSGFSTYYALEEYGIKCQVVHAADVPATQYESIMKTDRVDAERLARALKKGEIERPVYIRERDNIDDRAVIRIRRTIQMQLAGYKARVKHMLHSNGVELPERFSKPSSHWSRAFITWLMQDVKLLSSTRTSLDLLIRQVEVIRGTLLEATCELRKLSQTDRYKHAFGLLMTIPGIGPNIAMCILTEVWDVKRFSNENKFAHYLGLIPTSHDSGEHKTDGVKTFRGNKHLGPMIIEACWIAIYKDMGLGACYADYKKVMKPQKAIVKVARKMSNIIFSVLKNDKAYEPYKWDK

SEQ ID NO: 498654 - protein, 382 aa, unidentified
MAAIDVHKKVLMVVVIETTSPEEKPERRRFTTLPGDLSRLSSWLRAQDVQEAVMESTAQYWRTVWLELEPHMLLHLAHAFSNRAPRGRKHDFKDAERLVRRLFADELILSFVPNGEQRIGRNLTRMKMQLTRDRIRLQSQMECLLEEMRIKLSSVITDLLGASGLRILRALAGGETEAKRLAALGDNRLQCTEEQLLEALTGSSQPMHREMLALQLQRLQLIDTQIAKLNHLIAQAMKPHQDAVVRLAEVPGLGVDSAQQIIAEVGAQAGTFSSAAELTSWVGTCPGKNESAEQNHSSRSAKGNKYLRRVLNQAAHAAVKKRGSYFQALFRRLLPRLGYQSAIWAIAHRLCRVVWKILHEGARFIEKSLEPDAQPRRNVPEC

SEQ ID NO: 498655 - protein, 379 aa, unidentified
MKEFSKFVGLDTHQDTIAVAVSEASGGAARYYGEIANTPKAMAKLVKTLTAKGAVVSFCYEAGPCGYGIYRQLTELGQACAVVAPSLIPTKPGDRVKTDRRDSESLSRLHRAGELTPVWVPEQDQEAMRDLTRAREDMKGLERITKQRLNAFLLRHGRIYDRTKNRWTQAHGRWLAGLKFERPVQQIVFQEYVDAVRQAEARVAGLEKEMATAVKNWALAPVVEALMALRGVKLITAMTVMAELGDLSRFASPQQLMAYLGLVPREYSSGKTTRRGGITKTGNSHVRRVLVEAAWGYRFPARKTAHLQRRAEQTSDAVQDIAWKAQKRLCGRYRHLLAVGKLKVQACTAVARELAGFIWAIACEVMNTPLMRTQEAVNQ

SEQ ID NO: 498656 - protein, 412 aa, unidentified
MEGETVIAGVDTHKDVHVLCLLDGLGRKIWSGSFRADPEGYDRLAEAIGDPGSCAVVGVEGTASYGAGLTRRLVELGYNVVEVLRPKRDKARPGEGKSDPLDAERAARKAASGRGCSVPKSQDGWVEAVRQLYVARRLAVATSTSCVACAKSMLTTAPSALRERFRGRERPKDLMPLLARGRKAGDALEESVLASLRSVAAVWKEARSQVESCDERIRALLEANAPALLGVEGCGTTTAAALVVAAGDNPGRLKGEAAFSMLCGVSPIPASSGKTERHRLNRGGNRQANWALYEIAIKRMAYDERTRRYVARRTSEGKSRREAVRCLKRYIAREVYHVLMDPNPDGAAPEGPELAKMRKAMRVTQKQAAEGLGLSAATLGHLEHGRRRSTKLERRYYELLCELKGALPQTAS

SEQ ID NO: 498657 - protein, 350 aa, unidentified
MMIIGCDLHTRYQQIAMLDTDTGELVERRLEHENGEARAFYSALLGPVRVGIEATGYTHWFEDLLAELGHELWMGDAAKIRASVIRKQKTDARDAAHLLDLLRQDRFPQIWRPSPAERDLRQLVWHRQKLVWMRGAVKNQLHALAMGEGVCRKKKLFTAKGRKELEGLALGPWASYRRQELLRMFDELAAATAQLDLAVEQAAKSQPLAVRLMTHPGVGPVTSLAFVLIIGPVERFERSKQVVSYLGLNPQEHSSGGKQRLGAISKQGNPMMRSLLVEAWHTAARFDPALKRMYQRLKFRRGASVAKVAVARKLTVRMYWMLRSTADYAQLVRMQGSPWATLVEDSPSLG

SEQ ID NO: 498658 - protein, 344 aa, unidentified
MAPSSQELEPPAIPGRFRIDIAKSVFQVHAADGTGATVYTKKLSRGQVLPFFTKQPPAMIGMEACATSHHWARELVKLGHEVRLLPPTAVKPFVKRGKKNDAADAAAICEAMIRPSIYSVPVKTEEQQSVLALHTVREQLVAVRTGFVNAVRAHFAEHGMVVGLGRGKLAELATMRPHLPDRTAFAVDILLGRIKDLDADIAGIEKKLMEFHKTCEESRNLATIPSVGPLAATLIVAKIGDPSRFNRGPNFAAWLGMVPRQNSSGGKERLGAITKAGDQSIRRMLFLGATSMVWRAKPATWLGKLRDRKPAKLAAMALANKTARIIWAVLTRGEVYRETIVAAV

SEQ ID NO: 498659 - protein, 331 aa, unidentified
MHYSHYIGVAISKNTLDAAIYAAEMRRSDTKHLPNDKTGLKELVIWAKAAGAKPNDMLICAEHTGVYSNELQLFCEKKGIALCLESPLQIKRSMGLVRGKDDQIDAIRIAQYAYDHKDKLKLFHRPSGNIITLANLLRERRLYVRQKATLMAQQAEIGSYESATSRNRRESLIDKHAAAVKSVEKQMMEIIKGDKALKKTYDLISSVVGIGPITAIDTIVYTNNFQNFDTPRQYASFIGVAPFDHTSGTSVNGRTRVSQFCRKQQKVSITMAARSAIVNDPWMKNYYHRKMKEKGDQRNQHGVVLNAVKFKLVLRMFSVVKSGTPYKVMKY

SEQ ID NO: 498660 - protein, 410 aa, unidentified
MDMIYPHCAGLDVHKDSVWACVRHMSPDGKVRQEVRVFGTATRWLLELSDWLAREGVTHVAMESTGVYWKPVYNVLEDRFNTMVVNARHIKNVPGRKTDCKDCQWIAQLLQYGLLTASFVPRRGQRELRDLTRQRAQLIQERSRVANRVQKTLEDANIKLASVASDALGASGRAMIRALIDGDKTPEQMAELARRRLREKIPQLKEALTGTVTDHHRFMLRQLMDQIDRLERQVEDFDRRIEQVMSPLEQKATENLDQIPGIDVRAAQNIVAEIGADMSRFKSSGHLCSWAGMCPGNHRSAGKRKKGTMNQGNRWLKRTLMQCAWAASRTKNSYFQGQYRRLSARRGKKRAAAAVGHSQLVVAYHLLRDGTEYQDLGTNHFDTLAESQRTAPLVKRLEKLGYRVTLDKAA

SEQ ID NO: 498661 - protein, 358 aa, unidentified
MQSVTRVGIDLAKMFIQVHAVDAVGKVVCNKQLSRDKFIAWCNQLPAGCLVAMEACSGSHAWARKLIALGLDAKIIAANHVTPYRLEGKGGKNDANDAAAICEAASRPSMRFVPVKTLSQQGMLCVHRYREGVKEERTANINRIRGLLAEFGIIAPQSPNKLRERLAEIIEDADNDLCGIARLVIQEAFSHWDEIDKQLEWCTQRISAHVKENQQAQTAVQLMGVGPVTASAAVVTVGDFKQFKNGAQFGAWLGLTPRQNSSGGKTKLGRITKRGDVYLRMLLIQAAKAAVMTAHKRDDPISRWLLQLREKSGWQKAAVAMANKNARILWAVMTKGCDFDPRYVSVKPSGGGSIAVAI

SEQ ID NO: 498662 - protein, 400 aa, unidentified
MAQQLWAGVDAGKSDHYCVVIDTDGQRLLSQRVANDEAVLVELIDEVMALADGGEVTWAIDLNAGGAALLITLLVASEQRLLYIPGRTVYHASSGYRGDGKTDAKDAAIIADQARMRRDLQPLRPGDDIAVELRILTARRTDLVADRTRAINRLRAQLLEYFPALERAFDYSTSKAALILLTGYQTPNGLRRAGAARLTAWLAKHKARNASAVATKAIEAANAQHTTVPGQNLAATMVARLAKEVMTLDTEIDATETMIEDRFRRHHHAEIILSMPGFGVILGAEFIAATGGDMSAFDSANRLAGVSGLAPVPRDSGRISGNLKRPRRYNRRLLRACYLSSQIAIRTDIASRTYYDRKRTEGKTHTQAVLALARRRLNVLWAMLRDHRIYQPTAPNAAAA

SEQ ID NO: 498663 - protein, 435 aa, unidentified
MSLSTPVPHAERSHMKPQVSEAFAAFVGLDWADAKHAICLQAAGTVQREFLSLTHSPETVHTWVQTLRTRFHGQPVAVCLELNKGPIVSALRHYDCLVLFPVNPLTVAKYREAFTPSRAKDDPTDAELLVDILLKHRDKLAPLNPQSPAMRALAQLVEHRRRLVGDKVRLTNRLTSALKNYFPQVLQWFAEKDTAIFCDFLSRWPTLKAAQLARRTALEGFFRTHHVRSTDLIATRIEAIKSARALTTDDGVITPNAILVHALVAQLRVTLQGIADFDRVIVQRAQDHPDFPLFDALPGAGAVFAPRLLVAFGEQRERFTSAEDLQKYAGIAPVTERSGKKAWVHWRLQCPKFLRQTFVEWAAESTRHSFWAQVYYQQQRDKGKAHQAAVRALAFKWIRILYRCWQERTPYDEAIYLQALKRRNAPLLHNLADMS

SEQ ID NO: 498664 - protein, 337 aa, unidentified
MDYFAGLDISMDETHICVLDREGVIVRESKTTSTAQAIADELAKAPSCRRIVFESGRMAPMLFHGLSQLGLPVVCIESRHAYQALKSLATHKTDRNDARGLAHLARTGFFKPVHVKSLSAHAVRSLIIARKKLVGQRVTLENQIRGLAVVFGVRLPRALTAAFIDQALKASEGVAGLSAATRGLIAARTAVMTAVAAIDADMRSMTRASEACRRLMTIPGVGQLTALAFVAAIDDPSRFRRSRDIGAYLGLVPRRYQSGEVDYVGSISKCGDRRVRTLLYEAANVMLTRYKGQLKLKDWAFAIAKRSTMRKARIALARRLAIIMHAMLRDGTEFEPA

SEQ ID NO: 498665 - protein, 339 aa, unidentified
MKITTIGLDIAKKFFQLHWVDMTTGEVHRKQLKREQMAEFFANCERSVIAMEACGSAHYWARKLSGLGHEVRLVAAQFVRPFVKTNKTDAADARAIWEASQRPEMKFVAVKTESQQSVLTLHRLREQMVKFRTMQTNQLRGLLYEFGVVLPVGRAKGMPAALDALGELEETLPAMTVDALRQQMVRIQKLSDDIADIEKKLTLWKKEERSATKIMEIPGVGILTATAAIATMGDAGAFKNGREFAAFLGLVPKQSGTGGRVRLQGISKRGNVYLRTLLIHGARARINFQKQRDPWIEQLLARRPFNAVVVALANKMARTIWALMAHDREYQKNYVTSIA

SEQ ID NO: 498666 - protein, 347 aa, unidentified
MTIVGNPDAVVGGVDTHADVHVAAVVNHLGGVLGVESFTTTSNGYRQLVSWLRSHGELVLVGVEGTGSYGVGVSRYLQREGVTVVEVDRPNRQTRHRKGKSDPVDALAAARAALSGAATGSPKSRDGNVEAIRVLLIARRSAVDARIETLNQLRHVVFTATPEIRTKFTGLTAIGLVNKATALRPREGDDPVRYTTYMTIRALGHRVQYLRKETKRLNRMLRPLIRQTAPTLLEVYGVGYDTAAKLLVAAGDNPERIRTEAAWANLCGVAPIPASSGKTKRHRLNRGGNRQANSALYHVVITRMRHDQRTRDYVARRLTEGKTMGEIARILKRYVAREVFKHLPHPA

SEQ ID NO: 498667 - protein, 363 aa, unidentified
MFAKDFPRRPMRRCYGASGERGIFSAGHKPMERPMPKPNDCSRSVTAFEQNSTLIAVIEMSLSSWLVAGVVPGIERHPLKKLETDEDALLKLLLRWRDEAVKAGHKSERIAIAFEAGRDGFWLARWLRARGIEAYVIHPASVAVSREHRRAKTDRLDTELLKRVFLGWLRGEPDHCSMSAIPTLEQEDAKRPNRERENLVGQRTRIVNRMKACLIRFGIRNFKPTLRKAPEGLEALRTPEGAPLPPNTRAEMRRDMARLRFVQDQIKEIEATRLQQLEQAPAEGPHAMIRLLARVTGVGIETADMLVNEILARNLRDQKAVARYAGLTGSPDESGKRSREKGLSRAGNARVCPSSDNLRQKAA

SEQ ID NO: 498668 - protein, 404 aa, unidentified
MNNVAGIDVSKGKSMVSVLRPFGEVVAKPFSVGHTGRELKELADYLKSLDGETRVVMEHTGRYYEPVARFLHEEGIFVSAVNPKLIKDYGNNTLRKVKTDRADARKIARYGLDNWVELRQYTPMDTIRMQLKTLNRQQGLYSKTKTMMKNNLIALLDQTYPGANSLFNSPVREDGSQKWVDFAAAFCHVDCVRSMSLAAFTERYRKWCKRHGYNFSQSRAIEIHMDAQNLIAMLPRNPLTKTMIRQAVDALNAVSKSLEQLKAEMRTLAAQLPEYPAVMAMRGVGDSLGPQIMAELGDVTRFTHRNAITAFAGVDPGADQSGAYEAKSTRASKSGPPELRKALFLVMDCLLKTQPADDPVYRFMDKKRAEGKPYLVYMTAGANKFLRIYYGRVKEYLASLEDSD

SEQ ID NO: 498669 - protein, 343 aa, unidentified
MQAITTIGLDIAKSVFQVHGVDGAGQVVIRRQLKRRYVLAFFQKLRPCLVGIEACASSHHWSRELSALGHTVRLMPPGYVKPYVKRQKNDATDAEAICEAVGRANMRFVPTKTPEQQSGLVLHRTRHLFIRQQTSVINAIRAHLAEFGIVAPVGRQGVEQLLEAVANPNDQLIPEIARGCLLALGAQLRRIKQQVLEFDRMIRAWHQSNQTCRRLDDCPGVGPALATAIVASVADPKVFRSGRDFSAWIGLVPRQHSSGGKERLGGISKQGDRYLRGLFVVGALAVIRYAKIHGTKHRPWLTALLARRPTKVAAIALANKIARMVWAMMAKGERYKEPVALAA

SEQ ID NO: 498670 - protein, 388 aa, unidentified
MSCRSESGPVGQRASDHSRATLYVSLELSPSKWLVTSLVSGTDKLSKHLVPGGDCGALLQLLAALKAKAEKQSGMAVVVATIQEAGLDGFSLHRLLEANGAESWIVDPSSVAAPRRARRAKSDAIDGETLLRTLLAYRRGEPRVCSMVHPTSPHDEDRRRLTRERRTLMRERIEHTNRIKGLLMSQGISGFDPLRKNCLVRLDELTTRDGHRLPPRLRAEIGREIDRLELLARQLKQVEAERDALISQVADVADSPAAQLMRLKGIGIETATLLWLEGLFRTFANRRQLAAYAGLAPTPWLSGRIRREQGISKSGNPRLRTGMIELAWLWLRNQPGSALSRWFADRVRKEGGRKRRITIVALARKLLIALWKYVNRGEVPEGAALKSV

SEQ ID NO: 498671 - protein, 338 aa, unidentified
MHRKNWRINIQDSDLELEDFSQDPDGVLLHKHLNRKYPGATFRVGYEAGFCGFSAQRLLSSKGIDCLVINAADVATTDKQKRQKNDKIDARKLCEHLQSKKVNSVYIPELHWEHGRSLVRTRSRIVSNQTRCKNRIWQLLHFSGLKLPGDYEAEQYWSKRFIEQLEEIECRSDALKTALELYIKDYQQTKALLLEATRAIRKLCRAPEYRDYILLLRSIPGIGEINAAVILFELQDINRFKHSDQLSSYAGLIPGTHDSGERKMSKGITERANHFLRTALVESSWTVVRKDPALLIKYKQYCKRMNKNKAIIRIAKHVLSRIQYVLKNQTEYVAGVVG

SEQ ID NO: 498672 - protein, 349 aa, unidentified
MNSTDNITIGLDLGDRHHTGCVLNAGGDIVTEETITNTRECLETFAARFPTATIIMETGTHSPWVSRLFEARGHRVLVANARKLRAISQSQTKSDREDARMLARLGRADPKLLSPVRHRREATQRALVRLKVREALVRSRVNLINSVRFLLKSLGVFVSSAIKAMAFARKVRAQLASADAALVEPLLAAIDTLNSQVKALDIELETLARDNYPATERLRQISGVGPLTALCFVLTLEDPKHFEHARDVGPYLGLVPRRDQSGQTDKQLGITKAGHVQLRCLLVNCAHYILGPFGPPCVLRAAGERIAARGGKSAKKRAVIAVARKLAVTLLALWKTGAEYRPQPLPQAA

SEQ ID NO: 498673 - protein, 357 aa, unidentified
MGKSIRNLLTVTRVGLDLAKRVFQVHAVDAKGEIVVARKLTRSQLIPFFAELPPCVVAMEACASAHHWGRALIELGHEVRLIPPAHVKPYVRRNKNDPVDAAAICEAVGRPGQRFVPVRSIDNQAELMRHRARELLAGQRTAALNALRGHLAEIGLIAPQGAQHAYGLKRMAADGFNENGEIVVPDCVRGALRSLVGQIDALDEAIGAIDKELAASVKADETAKRLMTIPGVGPVTASAIVATIQDASAFASGREFAAFLGLTPRQNSTGGKTRLGRITKMGDRYLRKLLVIGACATLRHRRGHSDALRLWASGMLERKTVKYKFKLTAVALANKVARIVFVLMTRGGHYDDRPVAA

SEQ ID NO: 498674 - protein, 368 aa, unidentified
MKKNNTCPKSPKRSKTRKRSLTIGMDLGDKTSRYCVLDSDGEIVREGTVTTTKKGMRQRFGSLAGCRIAIEVGTHSPWVSRLLSSLGHEVIVANARQVKLISASSRKDDRLDAQTLARLARMDPQLLRPIRHRSEKAQGDLMQVRVRAALVDTRTGLVNAARGLAKAMGERLPKCDADQMGVAKTQGMSAELSEALRPLLETVEALTKQIKASDQKLEQLAERDYPETELLRQVSGVGCLISLTFVLTIEDPSRFQKSRDVGCYVGLRPRRSESGESRPQLGISKEGDEYLRKLLVQGAHCILSHKSPDTDLKRWGLKLAGKGNKNAKKRALVAVARKLAILLHHLWVNGEVYEPLRNSRLLEQKAVA

SEQ ID NO: 498675 - protein, 415 aa, unidentified
MLKIVYPICCGLDVHRDFVYACIATTVNGVTTYKSHRFSTFTKGLRELLSWLLASNCKDVCMESTGKYWIPVYNILETDCKIVLAHPKYVKAIRGKKNDKKDAKWIADIFKHDLVSGSFIPPADIRQLRDLVRYHAKLTNFTTGEKNRAQNCLTVSNLKLDSVFSDVFGKASSKIISHILANPSEKLSDVSAFRTKGMKATDEEILEAVDGEIYPEQAEKLRIIRDHMSSLDLCKANLQSLILSTAEKYIPEIDLVCTVPGIATFSAISVIGEIGVDMSVFPTSKHLCSWAGLTPQNDQSAGKKKTTRISRAGAYIKPLLVQCALAAVKSKNKHPEVYNRYSALKKRRGHKKATIAIARMLLTAIYNILKKHEPYNAEIYRKSDAPPEHRNVSVEEAIFILQRQGYLISSPVSIE

SEQ ID NO: 498676 - protein, 414 aa, unidentified
MEKQWNIVCGADIHKKFLIATILSRDGTKTTRRFGMTLDDLLTFKNWVIENGCEQVAVESTGTYWVPIHTVLEGSVGLIVANAYKIKHTPGNKNDLDDADWIAELCLNGMIEPSRIFPKADRDLRRLTRIREGYVNDMTREKNRVHHALESCGIKLSSVLSDIFGKSGRYVLNGLLEGRTIDDILKGIKLKRIKKKADEIKEAIKGSLDLTQIFLIRGSLEQMEAIQKRIDELGVEIKARSAHRNADLKIAMSIPGVGFTSASTLLAEIGDITDFKKPEQLAAWAGLVPSVYQSADKLLTGSITKHGSRHIRRILVQVAHVIARGRNSKLKRFFLRIKSKKGSNVAVVALARKVLCILHHLLMNREMYHEGGINKKIKIDIEKASSSTEIDLEEMIKYIVKAGYEVRKGPSGGG

SEQ ID NO: 498677 - protein, 404 aa, unidentified
MSVQCAPVTSSTIVVAVDVGKTAALFSVTDAARHLLVSPTEFTMNRSGLGGAAASVMAAVPVSGQVKVAVEAAGHYHRPVLDHLWPDGWEVLELNPAHVAEQRRVQGRRRVKTDVIDLEAITELALSGHGRAIADRDVVIGELSAWAGHRSRRITTRTATKNQLLGQLDRAFPGLTLALPDVLGTKIGRLVAAEFSDPSRLAALGVNRLIRFAAVRDLQLRRPVAERLVAAARDALPTRDAAIARQILAADLNLLAGLDAQIQVAEAALAVLLPRSPFSTLTTVPGWGVVRAANYAAALGDPYRWPGPRQIYRASGLSPMQYESAHKRRDGGISREGSVALRRALIDLGLGLWLTEPAAKAYAGGLKARGKRGGVIACALAHRATRIAHALVRDHAAYDPARWI

SEQ ID NO: 498678 - protein, 418 aa, unidentified
MKEHNNSRKKSEPTSKRSKTRGPMRRDTKEVLAELVGKLKEKLDPKKVAATSAGEDHQRGELRPNLDRLTVGVDLGDQWSHYCILGLEGETLAEGQLRTKQEDIAEFFQALNAARVVFEVGTHSPWVQEVICGCGHEVLVANPRLMEGSKRRKRKNDRIDANKLARLGRVDPQSLHPMQHRSREVRQDLVVLRARDALVAARTELINATRGLVKSMGSRLPKCSSPSFAQKVEETVPIELRDALMPLVRMAAALSDCIQGYDEKIEKLGREKYEHTALLRQVKGVGPITSLAYVLTLENPDRFVKSRDVGPYLGLVPKQEDSGESQPQLGISKAGDTMMRRLLVGSAHYILGPFGPDTDLRRYGLRLCERGGKNAKKRAAVAVARKLAVLLHCLWVSGEVYEPLRQGMSATMTPAAAA

SEQ ID NO: 498679 - protein, 322 aa, unidentified
MNRKTFVGIDVSKNTFDVAILSNEHIVAKANFLNSKKGYSQLSKWQKKYALNPHIGMEATGHYSEPIAEYLFAAGFKVSVENPYKIKQFARMLLTRNKNDQLDAEIIARYTQQMLPADFKPRSKVQKEIRELSQLIDTLKETLTRLRNQFSSAQTKLAKTTGKQMIAQTQKQIQKLQLKLNGIVENHDEFKRTIDLLQTIKGFGRDSAITLLAYLPDISLFPSAKSLAAFIGLSPRQNQSGRYVGKTHLCKFGSPRLRRIFYMPALSAKRFNEALQPFVRRLEDSGLAPKAIVGAVMRKLVHIIYGMLKHQRPFDASLACAA

SEQ ID NO: 498680 - protein, 410 aa, unidentified
MDTVCERCAGIDIGKHEVVAAIRVPDGSGGRRREVRTFGTFTRQLEQLAEWLAEEAVTAVVMEATGQYWKPVWYVLEERGFELMLVNARHVKIVPGRKTDVKDAEWLAELLEHGLLRGSFVPPAAIRQLRDLTRYRKRVIQTVTSEGQRIAKTLEDAGIRLDSVASKVLGLSGRAMLRALVAGERDPDVLADLARGRLRQKRVELREALHGRFSPHHALLVRLSLEHIEQLEQAIAELDAEIDRVIAPFARARDHLDTITGVGKRTAECLLAEIGADMSVFPDAAHLASWAGRCPGNNVTGGRRRSGRTNHGSVWLGAALTECAWAAARTRDTYLGAQFWRLARRIGKKRAAVAVSHSILVIAWHLLTKDADYQDLGGDYFATRDSERARDRALNQLRTLGYRVTLEAAA

SEQ ID NO: 498681 - protein, 372 aa, unidentified
MKQTILYVGLDVDDTQYHGSAFDQHTGAGIDFQCRPTLKGLLRQLEKLSQHFSGCAIRVCYEASYLGYTLQRDLAQQGYHCDVVAPTSIPTPRSKQIKTDRLDAAQLAQFYAHGLLTVVSIPEPALEQDRDLLRTRQHLVQQQTALRKHLQALLRRNGLHYKAQTHSRTHWTTHHACWLERTINATSGSLKVNLELLLRHLNGLTTILAGYDQQIEELATTERYAKSVQALTCYKGIKHTFALTMITEIGDITRFAHPRQLVSWMGMDIREYSSGGHHHRFGITKHGNRYVRTAFIEANQRGYRTAIISPKLKARRAHTATEFVDIADRCLRRLHKKGNRLLFAGKHPNTVKVACAREMVGFVWESLRNVAA

SEQ ID NO: 498682 - protein, 318 aa, unidentified
MRVRGFFGVDASQKSLMIAEHGRSATQEIGNSTRAISAWLKALEGPCAIAVESTGRHHRLLATLAIAAGHAVYVVNPRDIKHYGKALGRRAKTDRVDALLIARYLAQEHDSLRAWVLPSKTQELLSSAVARRGVLVGVREQIRASCEAHEAQLTQLGATLEQLARLIEEVDEQLEQLSAADPVIDAIKQRLLGIPGIGPVVSTALANLLSRYQFRNADALIAYVGLDPRANDSGQHRGRRKLSKRGPAELRRLVFNAAMSGARTAAWREYYRCYRERGLSGTASFVILGRKMLRAVFSMVRHNTEFDPIRVQGACAKP

SEQ ID NO: 498683 - protein, 411 aa, unidentified
MKDSRKRYIGLDVHKHYLIAIGVDDELNVVLPVRRVELSHLETWMKKTLTKQDEVVLEMTTNTWQLYDELSEYAGRVIVVHPPHVALITRSQVMNDKIAASILARLLTKGLLVGIWVPPQEVRELRGLVAQRKKMTGLATQAKNRLHAVLQRHHWMPPEGNPFHAPQKNWWLALPLGALEKVNVQSDLETLQFAEQQLARLSSLMNILASEEEHITRLLQVPGFGVVTAVTVWAAIGTIERFEDPQHLVGYAGLGTRVHDSGMSTRTGRITKAGRRDLRVVLIEAAQVTANHHPHWKAELARLQPRLGRNKAIVAIARKLLVAVWYILAQHKTDRFAQPEAIAQKLLKFAYQLGKANRPTGQSAAQFVRQHLEALQLGSELTTIPWGSKKPIPLPPSTNKVSDVPNGALAP

SEQ ID NO: 498684 - protein, 325 aa, unidentified
MYLVGIDISKFKHDCFIQTETGEVIKNSFSFNNSKDGFDYLLSVLNVLDHSQEIRIGLEATGHYGDNLMPFLNEHGYSFMQFNPYLIKKVSDAFTLRRTKTDKLDAMTISRVLLSVDYKPYQLSSYHISSLKSLTRLREALVKERSLHLVKLTNVMDKLFPEFKPLFNGKFGTTAIYILKKYKTPKRISKLTDEEICKLKKVSRKTSASKFVKLRELAKNTVGHTDEYLLIQLKSILIIYETIDNEISNLESQIESIMKEYHTNITSIPGISTISAAQIIGEFGDFNKFSSASKLLAYAGLEPSTIQSGTMIQNGKMVKLSLIHI

SEQ ID NO: 498685 - protein, 346 aa, unidentified
MKINRVGVDLAKNVFQLHGVDRKGKALWKRRLTRGKWLAVLCDTVEPGTEIGMEACAGAHHWARQLMQRGYPVKIIPPQFVKPFIKSNKNDANDAAAICEAMGRPDMYPVKAKTVEQQDLQAMHRIRDEIKSHRIAKANQIRGLVTEYGLVAPLQLHALRRAIPDWLEDADNGLTFLFRQLLQGLWGDLYALDQRMTELDKQIAVVAQEDPTAKRLQQLRGVGPLIATALVATIGDGKQYRKGRDMAAALGLTPRQHSSGGKDRLLGISKRGDAYLRCLLVHGARSAMRTAKDKDDRLSHWIINLQARRHANVVAVAMANKMARMAWVIMTRDVDYDPDLAAASVS

SEQ ID NO: 498686 - protein, 389 aa, unidentified
MIYVGIDVAKDKHDCCILESEADKLYPVFTIPNNKAGFDELYEKIFTVTDDKTKIKVGLEATGHYSLNLLGSLIDKGLPTCVINPLHTNLYRKGLSLRKTKTDKVDARSIAMMLMTNKTLKPYSDTSYHSEELKSLTRYRFDKVQERAKLKSSVARLVNILFPELEKLVPSLHMASVYSLLSKLPGASYITECHLTHLKNLLETASKGHYGRDMAITLRNTARDSIGSVIPAKSMELKHTIHLIEVMTEEIDEIEDSIKSIMDTCNSPIMTIPGISYRMGAMILAEIGDFTRFNYADQILAFAGLSPSTYQSGQLDSSYSHMEKRGSRYLRYALFNAAKFVCKWDENFGAYLSKKIGEGKHYNVAIGHATKKLVRTIYRMELTGEAYRR

SEQ ID NO: 498687 - protein, 359 aa, unidentified
MLYLGIDQHRKQLTVCVRNEQGDVIIRRQVSTEWKRVRAFLADIQRTAGERGFVVIIEICGFNDWLVKLLGEYGCKNIVLVQPEKRSKRKTDRRDANALSETLWVNRERLLAGKRVQGLRCVEWPSEEEASDRQITALRRNLGQSRTRTINRIKHLLRKHNVEQECPTKGLDTIRGKKWLAQLTLNKIDRLEMDQLLAQWKLCDEQIEVVEKEIQQRQAQSPAAAIVATIPGAGAYASLALSSRVGSIERFARPGSLSNYWGITPGSRNSGEVKDRLGSITKQGSAMARFILGQFVMHVLRRDPWMKAWYGRIKRRRGAKIARVAVMRRLATILWHMLKYQQPYVIGGPPRKKLPREGE

SEQ ID NO: 498688 - protein, 396 aa, unidentified
MKNCNAETIKNGTKSQKKAEESLNYPAYIGLDVHSQTIAIAVARSGREDPEFMREIANKPKSVEKLIKQFNTEFGGEVLLFCYEAGPCGYALYRQILESGHECQVIAPSMIPNRPGDRIKTDRRDACKLAHYLRSGDLKAVWVPDEEQEAMRDLVRAREDFKGQECKARHQLSSFVLRHGHYYPSGKQRWSKTHFNWLESLKFPHHWQQVALQEYIDAVKSATQRVADIMAQIEMLIPQWSMETVVYSLMALRGINKLTAIILLAELGDISRFDSPSQLMSFVGLVPMVHSTGDKTHMGKITRTGNSHVRRVLTQSSWTYRFPARQTKHIKSKAAQASDEAKAISWRAQKRLCGRFRYLIMAGKDSKITVVAIARELLGFIWDIARHEMPKLQQSH

SEQ ID NO: 498689 - protein, 352 aa, unidentified
MTVINLARSITGGVDTHLDVHVAAALDDRGALLGVESFATTTDGYKKLLGWLSDFGPVELVGVEGTGSYGAGLTRHLQAEGIRVVEVDRPNRQRRRRKGKSDPQDAISAARAAQSGDAAGEAKSRDGNVESMRVLRVARASARKARTQALNQMRGLISTAPEPIRDELRALNVFHLLERASIYRPGGKRDIVSLTKFTLRMLAKRAIALEAEITEIDAILTPLVKETAPELVAALGLGTDTASTLLVAAGDNPERLRGEAAFAHLCGASPIDASSGKQERHRLNRSGDRQANSALWHIVITRMVYDPRTTEYIERRTTEGLTKKEAVRCLKRYVAREVYSLLPHQKLGLDSP

SEQ ID NO: 498690 - protein, 341 aa, unidentified
MKEVTVIGVDLAKSVFQLHGAAAAGEPVFRKKLSRAQFLEFLNEQPPCLVAMEACASSHFWGREIMKVGHEVRLIPPIYVKPFVKRQKNDANDAEAIAEAVVRPTMRFVPVKSAEQQARTMVFKTRDLFVRQRNAIINALRGHLMEYGIIAPPGRTFVKKLAEQIEDPNSDLPPGVIELCRLHLDQLSILTDKITVMERRLKDAARSDPETIRLQTAPGIGPVSAMAIQAFAPSLRAFRRGRDFAAWLGLVPVQKSTRGRQVLGRTSKMGQRDIRRLLIIGAMTRIRWAVRNGAPRGSWLEQMLARKPRMLVAIALANKTARAIWAMMTKQEDYRDPAAIA

SEQ ID NO: 498691 - protein, 371 aa, unidentified
MGESSKMLFVGLDVHKDTIAVAYAPEDRGADVESLGAIGTRQCDIDKLIRRLESKGATLVFVYEAGPCGYWLYRYLTRRGVSCAVVAPSLIPRKAGDRVKTDRRDAVTLARLLRSGDLTSIYVPTVADEAIRDLSRGREDAVGDLKRSKVRLKAFLLRQDIRYEGRANWNAAHLRWLARVVCPTPAQQIVFQEYVHTVTEQSERLRRLESELHTAVKTWRLYPVVEAVQALRGLDLTGAGTLIAEVGDLTRFDTPRKLMSYLGLTPSEYSSGAHRRQGGITKAGNGHARRALVEGAWAYRYPAKISRHLQLRLEHVPPEARAIAWKAQVRLCKRYRLLSARGKHVNQVVVAIAREMAAFAWAIARTVPVAS

SEQ ID NO: 498692 - protein, 365 aa, unidentified
MLHRLNSAATLIQRTTTEAPRGHMYYIGLDVHKKTISYCVKDVSGRIQQEGKVGSTRRELDCWMKTLPRPWTVAMEATIFSGWIYDHLLPHATQIKVAHPLMLRAIAAAKKKNDRIDAGKIADCLRCDFLPECHMMPAEIRDRRRTLRYRHLLVRQMVQMKNRVSGLLMETGVEYNKQRLHKVSYFRELLCANEEVHPSIRPLLKLSRETIERCQKTEYALISSLERDPLLADRIKRLRTVPGVGPITALTWALETGDVSRFRTIKQAISYCGLCGDERSSADKAMRMPLSKQRNKHIQRALVEAAKLAPRQSHELAVIYDRERQKGNGNRATLAVARKMVAYLLAVDRQQRDFTPAEERRTAAA

SEQ ID NO: 498693 - protein, 372 aa, unidentified
MEDYSEIFVGLDVSKDRHAVALAESGRSGEVRYVGEISSDSASVRRLVRKLGRPGVRLRFCYEAGPTRYGLKREIEALGHECAVIAPSLIPRKPGDRVKTNRRDAEKLARLFRAGELTEIWTPDAAHEAMRDLIRAREAAVKDRTRKRHEIRSFLLRHGKIYPGLKAWGTKYLRWLHGLSFSYRSQEAVLQELILAESQCRERVVRLEKAIEDGLLDWPLAPVVERLQALRGVQLICAATFMVEIGDVRRFANPRQLMAYLGLVPSERSTGDAVRRGGITKTGNARVRRVLAESAWTYRYPAKLGKRKYCESRHMPEVVRDIAWNAQARLTKRYRALIARGKRSTVAVTAIARELAAFMWAIARADEQQAGT

SEQ ID NO: 498694 - protein, 362 aa, unidentified
MEYFTGLDVSVDETAICVVGDDGKVAFETAVETDPAAIAEALRPYADRMRRVGHEAGSLSPWLHTELLAEGVPAVCLETRHVRAALSAQRNKTDAADALGIAHIMRTGWFRQAHIKTEACYRIRLLLVQRRNLKRKFLDLENAIRHSLKVFGIKLGKVSRGNMEKAVRESVADDAMTAGLMDCMLRARAALWAEYLTLHKLVVQLAMRDELCRRFMAIPGVGPVTALSFSSAIDDPNRFRRSRNVAAYFGLTSKRWQSGSSIDVQGRISKAGDPDVRRALYEAASAMLTRYKGRDLIKTWGLKLAKTKCHAKARIAVARKLAVVMHAMWRDGTFYVGDPHASADVVDASNAAKLRKLSIANS

SEQ ID NO: 498695 - protein, 338 aa, unidentified
MALYTGFDLHSANSYLGIIDEDGKRMWNKKLRNDPSLILGMLSPFKKDIAGVVVESTYNWYWLVDLLNEDGYDVHLANPSRIQQYSGLKHGDDKHDAFWLAEMLRLKILPEGYIYPKEQRPLRDLLRKRSHLVKLRTSLIVSLQNILARNIGKKMNTDHIKALRTDHVTPLFSGNDDLSLAGKVSKDAIDSLTIQIKAIEAVVEKKIDIRKPYDLLLSMPGVGRVLALTIMETGPIERFPRVGNYVSYCRKVPAARYSNEKKKGIGNRKNGNKYLSWAYAEVAELARRFDPEARAYYERKRRHSNAPIAYNALANKLSRAAYYIMRDGVTFMPEKMFA

SEQ ID NO: 498696 - protein, 393 aa, unidentified
MTGSICEHVTDVDSAKIFAAIELSKASWLVALHLPSHDKISVFQVPGGDVDRLLAILERARETAMARGVSPTVEIHTCYEAGYDGFWLHRLLHAHGIHNQVVDSASIQVSRRHRNVKTDHTDAESLLRVLMAWHRGETKACSIVRVPTPEEEDLKRLHRSRETLLHERVRHVNRIRGLLCLQGIRHIDPGRDGWTAALVGLQTRDGRPFPVRLMAEIRREGKLLAVAQTLLREVGAELEALVRVKSSGRRQHAVRSTVLHPVALQLARLRGIGPTFAAVLSTEVFYRTFSNRRAVASFVGLTPTPYSSGRSSREQGISKAGNAWARHNAVELAWLWLRHQPASGLTRWFHARVGDAKGRVRRIAIVALARKLIVALWRFVDTGLVPDGAIVKG

SEQ ID NO: 498697 - protein, 338 aa, unidentified
MKKKVIVGIDFSKLTLDVSFFHKEKPAELYYKQFKNTEHGCITMIKWIKRKFPDMQEWLFCGEYTGIYSMTVAYVLNKENLDLWLETPLQIKLSSGICREKNDKIDSYQIALYASRFIDKARLYKISSLVLLKIKELIVYKDRLTKVKHQLLAPVKELMRVWSDWEESQFIDSSSREIVATIKIRIKSVEKKMENLLKTDPELNQLYKLITSVTGVGMQTAIYLIVHTMGFTTFSKSRELACYCGVAPFSKKSGTSLNGKSKVSNIANKKLKTLLHMCALNAIRYDVGLKAYYERKINQGKHKMKVINNVRNKLIQRIWAVTSKQELYNPNFVNKLAA

SEQ ID NO: 498698 - protein, 371 aa, unidentified
MIFYLGIDQHARQITISLRDENGDVLLACQVSTQPDKINAFFHKLTRERLSNGDTFVAVLEVCGFNDWLIRMLHDYHCHKVILIQPEERKKCKTDRRDAAALSELLWVNRDRLLQGKPVRGLRQVDIARSTDQENRRLTTLRKEVGQARTRLVNKTRHILRRHNLQWQMPTKKFPSKSGIAWLRQVALPTIDRLEMNHLLADLEQIQERRKELEQVIAERCGVSDEAVLLSSMPGVSYFTAVSLACRVGRVERFARAHSLANYWGLTPGCRNSGEKTQRLGSITKAGSSMARWLLAQVTINVLRRDARLREWFKRIKRRRGSTIARVAVMRKLATIIWHMLSKRRSYAQCRALAEAGSNEREQPNCAEAGR

SEQ ID NO: 498699 - protein, 358 aa, unidentified
MKDTIKQLDYSGQNIYIGLDTHLRSWKTTIRVGDTYFKTFSQDPSAKILFEYLKRNFPMANYFSAYEASFSGFSAHRELTKLGIKNIVVNPADIPTTDKDRKQKEDARDSRKIAEHLSSSSLQGIYIPSIEAEGDRALQRFRKVLSKEIGRNKNRVKSFLYYHGINIPPQFTDKSYWSKRFTVWLQEVALPTKSARTTLSLIIEIVTFLREKQYQTLKSIKELSQTKGYKENVNLLLSVPGIGLITAMTILTEIEDISRFKTLDKLCSFIGLVPMTNSSGEKESVGGITKRQNKALRSLIVESSWMAIRNDPALMLAYQELIKRMKPTRAIIKISKKLVNRIRYVLKNKKLYVSAVVQ

SEQ ID NO: 498700 - protein, 346 aa, unidentified
MDKVIAGIDLHGNNLVIGVIDEKGKRLNHRKLQCDLKEVVEFLQPFKPQLKSMAVESTFNWYWLVDGLRAHGYPIDLANPARIEQYSGIKHADDKHDAFHLAQLQRLNILPKAYIYDAALRPVRDLLRRRMNLVRQRTALMLSFKSLYARTTGATMELKRLKEITPEEAPKLYEHPAHQLIAQVQSEHIGALNTSIARVEKAVQQAARELPIYPRLLSLPGIGRILGMTITMEVGDIKRFKTDGDFASYSRTVDSRRMSNGKKKGENNQKCGNKYLSWAFVEAANFAKRYDDQCRRWYDRKAAKTSTVIATKALACKLAKAAWHVMAHKVDYDPRRMFPELAIKKT

SEQ ID NO: 498701 - protein, 344 aa, unidentified
MKITTIGLDVAKNVFQVHGVDAAGEVLVRRALRRGQMLVFFGKLEPCMVGMEACGTSHYWARELGRLGHEVKLMPPAYVKPYVKRGKTDAGDAEAICEAVTRPTMRFVAVKSADQQSVVMLHRTRELLVRQRTQLVNMMRGQLAEFGVVLAKGIQHAQKFVRELVDGEAPSIPELAVKIVAILAEQLRQLQIRIGELEKHLKRWFRTNQVAQGLATIPGIGVITASALASSVTDPHQFTSGWQFAAWLGLRPRANSSGGKERQGRISKMGDQHIRRLLVSGMTSQLRCVRRNPDAHPWVASLLARKPAKLVAVAMANKAARIAWVVMTRGELYNTQPPSTQAVA

SEQ ID NO: 498702 - protein, 350 aa, unidentified
MKTQVNQIDFRGQIIYVGIDVHKNSWKVAILWRGELIKVFSQLPEPQILARHLKKHYPGAQFHCGYEAGFCGFWIQEQFASLGINCEVLHAADIPTNDKERRQKTDARDCRKIAGCLANPLTQSIHIPSKQLQHDRSVVRARTKISRDHTRVRNRINSHIHFYGLPLEMPAYWSRRHVDSLWQWAEQEGDTALALMLEELELLRSLNTKALRQLRLLAKQEAYIRFVKHLTSIPGMGLVHSMCFLTEIGDVRRFKTLDQLCSMIGLIPTTNASGEKQGVGRITKRGKARVKNVIIEAAWVAVRCDQQLARTFEHLCQRMKKNQAIIRIAKKLVNRIRTVLLQDRPYVHMV

SEQ ID NO: 498703 - protein, 342 aa, unidentified
MQITTIGLDIAKNVFQVHGIDAAEKVVVRKQLRRGQILGFFEALPRCLVGMEACATSHYWARELTKLGHQVRLMPAKDVKAYVKRNKNDAADAEAICEVVRRPTMRFVQIKSVEQQGQLMLHRARDLLMRQRTQLINALRAHMAELGIVAAQGREGVKELVKIIASEQDARLPVDAHTSLVVLAAGLQALQTMIGSIERRIIAQHRSDEASKRLRSIPGIGIVGATAIAATVPDPKVFRSGRDFAAWIGIVPREDSTGGKHKLGPISKRGDQYLRRILVVGAHAVLKRARHQPENYPWVTRLLERKPFRVVAVAVANKMARVAWALLARGGSYRAPAFAAAA

SEQ ID NO: 498704 - protein, 337 aa, unidentified
MIVIGVDVHKHSLTAVAVDELGRALAERSGPVEGTVVAWARSLGADRLWAVEDCRHVTRGLEQTLLEAGERQVRVPPRLTAPQRRRGRVRGKSDRIDALAVARAFLQEPLLDGPRAGEETLRELKLLVDHRDDLVAERRRCQQRLRWHLHELDPTLAVPLGALDRAVWLDRLGRQFARREQTTQVRIARDLVGRCRTLTRSIGELDRELHARTAALAPGLLQLPGCGPLSAAKLLCEIGPIDRFPTDAQLARHAGVAPLDASSGKHQRHRLDRGGNRQLNCALHRIAVTQGRVHAPARAYLERKQSEGKTRREAIRCLKRQLARTVYTTLKNEPLLT

SEQ ID NO: 498705 - protein, 321 aa, unidentified
MSELTFIGLDVHARSVWAGVLDGSTGEVRSCAAPAPTGELVEWLRAQGEALSVAYEAGPTGFGLARACEAAGIPCLVAAPSKIAKAPGERVKTDRRDALRLAKLLRLGELTAVRVPSPAEEGARDLVRAREDARGDLMRARHRLSKLLLRQGLVWEGSAWTQAHERWLFAQHFEARGLQVAYEEGLATLASVRARREALDAAICAEAATEPWAPVVGRLSCLRGVSTLTAFGLATEIGDWERFDGRSIGAYLGLTPSESSSGERRREGQPALVRERAMAAERRLHRRWRSFDARGKRSTVAAVAVARELAGWCWSLAVMDA

SEQ ID NO: 498706 - protein, 355 aa, unidentified
MTGGVSRPERTSNNMSNANAYIGVDLHKKICFITVMDEAGKIKRQTEIKNEKNKIFKFFKRYSSASVAVESTMNWMPFYENLESMGCNVVLSNPLATKAIAAARIKNDKVDSRVLADLLRTNFLPTAYIQPREIRDLKELVRQRMNYVNMRTQIKNQIHSVLFKSGVSHNFTDLYGKAGMEFLKTLELRDVYRQQLNWHLTALSNISIQIKEMSDIIEETAQADYDCRLLMTIPGIGYFNALLIKSEIGDISRFTNANKLCSYAGLIPSTYASADKVRHGRITKRGSKWLRKALVDSVTSGCRHEGRLAYVYRKLKKSKGTGKARVATARKLCHIIFAMLSDKQPFREFTPVKQR

SEQ ID NO: 498707 - protein, 426 aa, unidentified
MHSIRNDRINQINETTLVIGMDIAKQTHYACAVDDRGRELSKSFKVPQSRQGFQRFHTELVDLMKRHNKTNIYVGFEPTGHYWMNLAFFLRDRGIPFVLVNPMHVKHTKEFDDNLQSKNDQKDARLIAKMVPQGYYNVQRSMTETDQELRRGSAFKARLKKDRSSLQNRIRRWMDLYFPEFSQVIKGLGVQACAILKEAPLPADLLSTTAETLVHTLKEQGVRSLSEKKVEQLIQLAANSIGVKDSPQMARAEILSLLHLFTSYEAQIEELTKQLLGLARQLPDFECIVSIPGISEETTIEFLAETGSFTLYEHPRQLIKLAGLTLTTHSSGKYEGKKRLSKRGRKRLRAILYKATLPLLHANPPFRKLFNYYTTRKENPLTGKEALVVLCSKLLQICHGLCRLETTFDADRMMQDLPCLQPLKAA

SEQ ID NO: 498708 - protein, 358 aa, unidentified
MTHNTPQITGGVDTHGQTHHAAVIDSVGRHLADQEFPATIRGYRDLLDWIRSHGTLVAVGVEGTGAYGAELARVLTAAGITVIDVDRPDRKTRRMKGKSDPIDAYAAATAVLSGRATGVPKSRDGGVEAVRVLRIARRSAVKARTQAMNQIRGLLVSAPVMLREQVAGLDRAALIRTLARLRPGHDLSRPLAATRAALRRLARRHQAMDAEITELDAEIGPLVEQAAPALLELFGIGPETAGQLLVSAGDNPERMRSEGAFAHLAGVAPIPASSGRTHRHRLNRGGDRAANNALHTIVLTRMRFDDRTRAYVERRTKEGLSKKDIMRCLKRFVAREVYRALTTTPTERTTQTDLVPAA

SEQ ID NO: 498709 - protein, 358 aa, unidentified
MDGSKARAPMTAGLDLGDRYSYLCLIDTLSGEVIEEGRLRTTPEALGRRFASERPPMRIAIEAGTHSPWVSRVLEGLGHEVLVANARKLRLIYANKRKTDEVDAENLARLARLDPKLLYPLKHRGEEGQAHLAIIRSRQALVDCRTQLVNHVRGAVKSFGHRLPKCPARSFHKRAKEHIPEALRPALEPVLEQIASLTERIRGYDRQLETICQEHYPETELLRQVEGIGPLTALTFVLTLEDPHRFEKSRSVGAYLGLVPATGRSGDSDPQKRISKEGDEMLRKLLVGSAHYVLGPFGSDSDLRRHGEKIATRGAKNSKKRAAVAVARKLAVLLHSLWINAEVYDPLRNARTPGVRAA

SEQ ID NO: 498710 - protein, 355 aa, unidentified
MSQEKYIGMDVHQASISVAVMDARGKQLMECLLETKADTILEFIQGLRGTLALTFEEGTSATWLHDLLKPHVSRLVVCDPRKNALLKDGNKNDRVDARKLAELLRTNQVKPVYHEKHGTRALKELGRSYLTITKDVTRVMNRIKSVYRSWAIPCAGTSVYTRCHRAEWLAKLVEPGVRVRAEHLYQQLDSLQPPRLQARRELLRESHQHSAVQLLRQMPSIGPIRAALLVALLQTPHRFRTKRQLWAYSGFAVETHDSGEYRYVRGKLQRNRERITVRGLNDNHNKDVKSLFKSAAISASTRPGPLHDFYVARVEKGMRPTMARLTLARKIATITLTMWKKGVGFDPQNLPRQAA

SEQ ID NO: 498711 - protein, 411 aa, unidentified
MKTLHKRCAGLDVHKTEVVACLRVANRGKASYELRRFPTTTRGLIELGDWLEQAGCTHVAMEATGVYWKPVWYILEGRFQQILANAAHIKAVPGRKSDTHDATWISDLLAHGLIRASFVPPQPIQEVRDLTRPRKQLTREIVQHTQRIQAVLEEANIKLTSVITDILGTSGRRILKAIVAGETDPLKLAELGGPRLAATKSQLADALLGRVRPHHRFLIEQHLKTIEQLEETITAFDGRIEAALEPFRDAIARLKEVPGLSETSVQILLAEIGTDMSRFPTAGHLLSWAGLIPRLDESAGKRRSTRVKKGAPWLKPVLVQCAHAAAKKKNSYFEAQYLRLKARRGPKKAVIAVAASILKTAYHMLADGTCYQDLGADYFARRDPGRVVAKLASRIRSLGYHVEVKVAEVAA

SEQ ID NO: 498712 - protein, 450 aa, unidentified
MDVVNTNAAGIDVGSRSHFVAIGQELKDVKEFGVYAEDLSALCQWLVDSGVTTVAMESTGDYWQNLYTELISFGLEVVLANGKFTKNAKGKKTDVKDCRWIQKLHTLGLLTGSFLPDFDTEQLRTYCRQRGNWIELASSATHKMQKYLKLLNLRLDVVVKDVCGLTGMKIIEDICKGNLDPYSLAEHRHYNCRKPKEEIAKALHGNNREDYLFGLKQELQSYKFYQQKIKACDDQINRKIKAYIRQDSKRKDLKTTEKPFKRINKNAPKIKDMNQLAFQYFDGVDLFAIEGLSHASILSIMSEIGPEGFKKFPTAKHFTSWLRLAPNNKISGGKTLSNRVPKGSNRLKIALRQAANAIGNLKDTHLSDFFRRVAYRKGRHSAVSATARKLAVIIWNMVTKKIQYNPPKQYLYLDQKRKLGLAKRIRKQIDKFGLTDEDLGINLNNCKIAT

SEQ ID NO: 498713 - protein, 355 aa, unidentified
MSEYAGRQFVGIDLHRRRSVLVRTTESGEVLEAVQILNDVDRLNAVVERAGEDPEVVLEATYGWYWAVDALQAAGARVHLAHPLGVKAFEYRRVKNDLRDATDLADLLRMGRLPEAWIAPPATRELRELVRHRAKLVGLRSHCKVEIHAVLAKAGVQVLMSDLFGPAGEDLLDRCPLSGPYAARVQSLRRLIDDVEVEVDLFTRLTRGRLAADPDYVALQQIPGIGPILAAVFLAEVGDVSRFRTASQLACWAGLTPKHHESDTHVHRGRITKQGSRLVRWAAVESVKRLGPGNVVGAYKKQVADRRGKNIGTVAAARKQTEFVFYALRDHHVRALHPPRPPDCPRAGGQAGEAA

SEQ ID NO: 498714 - protein, 317 aa, unidentified
MIDLGIDIAKHKFDAALLTQGKFKTKVFANDPAGIGACLKWLATRAPSPVHACREATGAYGEALACALVNAGYTVSLINPARAKAYAASLGLRQKSDAVDAKVLAHFVQAQQPAAWTPAPPEVRALQAPLRRLDALIEMHTQEHNRQGVAEPTVAASIAQHLDYLKLQIDALKAQIESHIDQHPGLKQQQGLLESIPGIGAATSAWLIGELNLTRFDSARQAAAFAGLTPRMRDSGSSVRGKPRLSKQGNSVLRKLPYFPAISAMTHNPLVRALCVRLKAKGKHTMAIIAAAMRKLIHIAFGVLKSGKPFDPSLASS

SEQ ID NO: 498715 - protein, 347 aa, unidentified
MEYFAGLDVSLEETAICIVDDTGLIVREARIASEPEALVAFFRASGMAMKRVGLEACSLTAWLHQALTEAGIAAICIETRQAKAAMGAMPNKTDRNDARGIAQIMRTGWYRAVHVKDPCCRSWRALLAARRMVLNKRRDVENGIRALLREAGLKVGTPSRRNFAARVIELVADDPVLAALTRSLLSVIAVMTEEIDRLTKRVLDEVRIEPTCRRLMTVQGVGPFTALAFRATIDRPDRFQRSRDVGAHLGLTPRRYQSGETDVQGGISRCGDELARTALYEAAHSLLIRSTKWSALRAWGMNVAKRRGMARARVAVARKLAVILHRIWADGTEFRWTKQAAASVTAA

SEQ ID NO: 498716 - protein, 355 aa, unidentified
MNSLRYVGLDVHRDTISVAVLDESGRSIMQSVLATRAAAILDFISGIRGMAHVTFEEGTHSAWLYDLLARRVAKLVVCNPRKNALLKSGSKSDAIDARKLAELLRAGMLSPVYHGEQSGLEVQHLARSYQMLTEDTTRVMGRLKAVFRGQAVACAGTKLYAKRNRGGYLEQLGTAGLRRRAECLYQELDALQQLRREARRELIVECRKHAAAKWLQSVPFLGPLRAAVLIGRVQTPHRFRTKRQFWSYCGLALETRDSGEYRVVGGQVERRKKPVMIRGLNWNHNHELKNLFKAAATTASACNGVFREFYLGLLNKGMQPEMARLTLARKIAAITLKIWKKGEAFDQQHVTSQAA

SEQ ID NO: 498717 - protein, 345 aa, unidentified
MTEAYDGRQVVGMDLHRRRSVLVRMSMDGRKLETVRIENSPAALRAVLARCGQRPLVVLEATYGWYWAAGVLAEAGAEVHLAHPLGVRAFSYRRVKNDERDASDLADLLRMGRLPEAWIAPAEVRALREVIRYRHKLVQQRTSCKDQVHAVLAKLGVPVTHSDVFGRGGGLWLDQLVLPEPYAAKVASLRALIGVLDGEIARLGQRAAGVLGADPGYAALRELPGIGPVLAAVIIAEIGDVTRFRRAGQLCSWAGLTPRHYESDTKVIRGHVSKQGSKMLRWALVEAIQHQPAGTRPRQARDAIIARRGKEARNIAKTAAARVLLTQVFYALRDGHVRSAGRPAA

SEQ ID NO: 498718 - protein, 369 aa, unidentified
MQNTMFVGLDVHKATISVAIAHGARDGEVRHWGTLPNRADHVRRLAEKFGSDGRQLYFCYEAGPCGYGLHRQLTELGHDCMVVAPSLIPVKAGDRVKTDRRDALMLAKLHRAGELTAVWVPDRAHEAMRDLIRARATAVSVAGKARQHLQGFLLRHGRIHPGKKGWTKAYRRWLSTVRFEHSAQQIVLQDYVHAMTDAEARIERLTKQIADLLPSWSLATVVEALQAMRGVAFIVAVTVVAEVGDFSRFDNPRQLMAYLGLTPSEHSTGKTIRRGGITKAGSGLARRVLIEGAWSYRMQARVGRKLVDRIEALPATVRDIAWKGQLRLCQRYRHMMAAGKPKVVATTAIAREMVGFIWAIARAVTPVSA

SEQ ID NO: 498719 - protein, 306 aa, unidentified
MTAVGIDVGKASLDLAVEGQGKVVRFANTPSGIGKLLRHLSALAQVRIVVEATGGYEDELLDACAQAGLWIARINPRQARDFARATGALAKTDALDARLLAAMARLFADRLRPHVAPPPWQRDLRQWLRRRGQLVLVLQMHRQQLQQAATCIQPLMRRTVAALRRELAQVDRAIAALVKQHVSPALQSGKGLGPVFQATSLALLPELGTLDRRQIAKLVGVAPMNRDSGQSQGKRRIRGGRAPLRVALYMATLSAVRWDPRMKAHYEQLRARGKLAKVALVACMRKLLTIVNARRREELREAAAVA

SEQ ID NO: 498720 - protein, 309 aa, unidentified
MFVGIDVSKARLDVAVRPTGETFDVSNTPQGIAHLVDRLQALRPELVVLEPTGGFEQPAVLALAERRLPVVVVNARQIRDFARATGRLAKTDKIDAAVLAQFAEAVRPQLRALPDPEQRSLDALVARRVQLVEMVTAERNRLQHTRNAAVRANIHAHLAFLERQLDQMERELLRAIETSSALKMRFDLMVTVPGVGKVTAATLLGDLPELGTLGHRAIAALVGVAPMNRDSGQIRGRRSTWGGRSSVRRVLYMAVVSAIRCNPVIRSMYERLRSAGKPAKVAIVACMRKLLVMLNAMLRSGTPWMRQAA

SEQ ID NO: 498721 - protein, 356 aa, unidentified
MHSIAPTAAVGKIVVGVDTHKHLHVAVALDELGARLGELTISSDSDGYAVLAAWSERIGRIAAFGIEGTGSYGVGLASFLRRRGHRIIEVNRGDRRLRRSNGKSDTLDAEAAARAVLSGQASAVPKSADGACEMIRQVKIARDTAVKSRTTALISLKCIIVNAPAELREQISSLADKALIDRCAGFRPGTIDSTTASAKHVLRALGRRWLDLASEITSHDRVLEQLTRATAPSLCDGFGIGADTAAEMLIVFGDNPGRIRSEAAFAKLCGVAPIPASSGKTNRHRLSRGGHRQANSALYRVVIVRMRFHQPTIDYVIRRSAEGRSKREIIRCLKRFLAREIYNRVKADKAALEPVT

SEQ ID NO: 498722 - protein, 413 aa, unidentified
MTSHVIEWFAGIDWGSERHQVCVLNSRGEIVAERDFPHTGAGLAELGAWLANIAGEARNMAVGIEVPHGPVVDLLLDRSFVVYAINPKQLDRLRDRFSIAGSKDDRRDARVAASGLRTDRHLFRVVQPCDPAIIELREWSRLAEELQQDRVRLCNRIRQQLWRYYPQLLELVDDMAADWLLELWTMARTPERAKRLRAATVARLLARHRIRRFDVAAVISILRKPAIQVAAGVTEAAVLRVRSLIARLRLVNQELRAAEKKLDELLQARIDDADCKQDRELSDAAILTSLPGVGRVTLAILLAEAFDALSRRDYAALRALSGVAPVTKRSGKSHVVSMRYAAHPRLRNAVFFWMRSAVQNDPGIRSRYEALRKRGHSYGRALRGVADRLLELACTLLQRRQMFDPARRQPSRA

SEQ ID NO: 498723 - protein, 342 aa, unidentified
MSIVYVGLDLGSSNFQQVALNHDGVSRVNRYFSTSEANLRAAFSDLKGEIHVHLEAGELAPWAASVIAPLVARVVCSHPQSNAWIAKDADKCDRIDAYKLAELLRLNRFKEVHYAPDQRRRNFKQLVQHYDELTAQQARLKTKLKARLRMQGVMVTGERLFSAQGRKEVLARVESRDLRTAITQLYSVLDQSVEAQTKARWLMLRAAQAFPEIRVFRTAPGIGPIGACRFSAYIHTPQRFSTTRKLWKYCRLSVSHRSSNGKPLRRPRLDRSGCGRLKDVSRKAFDVAIRSRHDNGFKRAYQRALETTHNQTHARLTVQRKIVSTLRAMWLTMTPYTDELSR

SEQ ID NO: 498724 - protein, 312 aa, unidentified
MAELSFGGIDVSKDRLDVLLLPEGLCFSVCNDAPGWAELIVRLRPLAVCAIGLEPSGGYERGIIRALLAAGLSVRRINPNKLRQFARARGVLAKNDRLDARLIAEYVAIMPTRVLQRDDAIERLAEIVTMRRQLCDEHVAAMNQATHLEDAMLRRISKRRLLRIEADILLLDKRLAELVAADPRLAHRYRLLISMPGVGPTLAYTLLATLPELGQIDRKQIAALVGLAPYDFDSGKLKGHRCIYGGRMPVRNVLYMAALSASRYNPALKAFSNRLAAAGKKSKVIIVAVMRKMIITLNAMLRDNTEWHPTAA

SEQ ID NO: 498725 - protein, 344 aa, unidentified
MDHFAGLDVSVKDTSVCVVDDTGRIVREVKVASEPEALLAALRNPAYHFKRIGLEAGPLSQWLFSAMAEAELPVICVETRHMRAVLKAQINKTDRNDARGIAQMIRVGLYRPVHVKTLRSQKLRMLLTHRQLLQSKAIAVDNDLRGTLRNFGLKVGMVGATRFEARIRELVEGLPDLAVLVEPLLVARRVLREQIAVLHRRLLAVVRDDEVCRRLMTAPGVGPVVALTYRTTVDVPARFRKSKSVGAAFGLTCARDQSGERDRAGAISRCGDKMMRAMLYEAAQSMLVRSTRWSWLKAWAMQIARRRGKKKAVVALARRLAVILHRIWVDGTEFRWTREAVPAA

SEQ ID NO: 498726 - protein, 477 aa, unidentified
MKSKKELLAKKKHIKRKSAKAKHNRVLGIHNPHAAGADIGATEIYIAVPPDRLEMNVRCFGTFTQDLRAIVQWLREYKVTSVAMESTGVYWIPLYELLEQEGFEIYLVNARHVKNVPGRKSDVQDCQWLQYLHSVGLLRGSYRPAQDICAMRAISRYRDNLLHFGAQHLQHMQAALDQMNLRLHHVIADLSGLTGMAIIEAILAGERDPRQLAKLRDPRIKASQETIAKALEGNWRVEHLFVLGQALQSWKQVQQQLGQCDQKLEELSSQLEGKIDLANSPLPPSAKYCGREPRSKNQPNGRWREELYRHFGVDLTEVPGLSLGVVQTLFVELGADLSAFPTPRHFAAWMGLCPDNAITGGKVIRRGTRRNRQRIRLALRLAATSLHHNKTQLGECFRRLRARLGAPKAITAMAHKLARIIWHLVTHRVGYDESIFAEREEQLLRRKQRQLRNLAHSLGFTLVPNPRPAATSNAEVS

SEQ ID NO: 498727 - protein, 319 aa, unidentified
MSEVFVGIDVSEASLDVARLPDGKTWRYANEEQSIAALAERLTEMAPALIVLEATGGVETELLVALATAGLPAVAINPRQGRDFARALGRLAKTDTIDALVLAEFAQRVRPEPRALPDTAAVALRDLITRRRQLVEMLTAEKNRLRRAHPAVRPNIQAHIRYLTAEVADIDGGLKSAIQESAVWRQKDDLLQSVKGIGPAVSSSLLAGLPELGALNRKEIAALVGVAPMNRDSGKWRGHRSILGGRSHVRSALYMGVLAAARSNADIRPFYQRLVAAGKPKKVALTACMRKLLTILNAMLRDASTSQGERSSPTLRHSC

SEQ ID NO: 498728 - protein, 408 aa, unidentified
MNTLYVGIDVSSKSNVVYLMLPNGDKHSNFSVANSHEGSTLLVKKIYSALTSHSLDTVLIGLEATSVYGDNLVYFLREDATLAPFNRKIHVLNPKQVKKFHDTYNDLPKNDYVDSFVIADCLRFGRINKEVYMGEYRYKALQNLTRARFFAVQNLVKEKQRFMNVLFKKYSTMTQEKVFSDAFSTTALAVYDEFESAEALANMDLHELTDFIIEKGKNRFPDPDAVAKAIQKAARSSYRLPKTVNDSVNQVLSISITSMKALESQIKEFDKAIKALMELLPNVLISIPGIGPVYSAGIMAEIGDINRFDNQASLAKYAGLAWKQHQSGGFEAEVTRLIPSGNRFLKYYLCEAAFSLVRCDKKYSDFYHLKYKEVNRCQHKRVLALTARKFVRLVFRLLKDNRLYCPAK

SEQ ID NO: 498729 - protein, 432 aa, unidentified
MKHNPSSKQNQRISRISETTLVIGADIAKHQHVARAFNYRGIEHGRRCLFQNDENGLLNLLAWAEAIKQEHGFTDVLLGVEPTGHYWFPLFHFLKQRGIEVVLVNPHHVRKSKELDDNLPTKNDIKDAKVVAKLVIDGRYTQPKLPEGVYADLRVLMNQRDRLCGDLHRVKGRIHNWLDRFFPEYRQVFKDWEGKASLVTLKHFPLPQDIVAAGEAAIVAVWKQNDIKRAVGPKRAELLCQKARKSIGLTEGAAAARHELAMYLEQYAMLCRQMEQLMELVAKLVEQIPGAAHMMSIPCIGLVTVAGFLAEVGDLSGYDHSQQIVRHAGLSLRENSSGLHKGKTTISKRGRFRLRALLFRAALTMVAKNPEFRALHLYFTTRRDNSLKKKQSIIAICNKLIRVLFELGRKRKDYDASKVLGPHREAQLPAAA

SEQ ID NO: 498730 - protein, 386 aa, unidentified
MQKFDDLSRSLTTLEPGGTLIAVIEMSLSSWLVAGIVPGVERQRLKKLAIDESALLKLLHRWREEAKKAGRRIERIAVAFEAGRDGFWLARWLKARGIEAYVIHASSIAVSREHRRAKTDRLDTELLKRSFLGWLRGERDHCKMVEIPTIKDEDAKRPNRERDNLIGERSRIINRMKAALVRLGIRGFNPKLKRAAARLDGLRTPEGEPIPPNTQAELRRDMERRRLVSDHIRQIEEARLERIEQAPSNGPHAIVRLLARVMGVGIETADMLVHEVLSRNMRDRRAVARYAGLTGSPDESGRKRREKGLARSGNARVRRGMIQLAWRFLLHQKDSALTKWFRSRTENARGTRKPMIVALARKLLIALWRLVRDGVVPDGVVLRPAQ

SEQ ID NO: 498731 - protein, 321 aa, unidentified
MSESYNVGIDVSMDRLDVEIRPGGRGFCVVNDTAGWIELVARLRQCAIVAIGLEPTGGYERGVVRALLAAGFSVRGINAKNLRQFARARGALAKNDRIDARLITEYVALMPTRAVQRNPVVERLAEIVTMRRQLCEEHVSIENQASHLEDAVLRRMAKRRLARIEADIALLGKRLAEHVAAEPVLARRFDLLCSMPGVGATLAYTLLALLPELGGIGRRQIAALVGLAPYDFDSGKSRGQRHIYGGRMPVRNVLYMAALAAFRFNPVLKAFHRRLVGAGKKPKLAIVAVMRKMIVALNAMLRDGTQWADRHSSGRHTVPAT

SEQ ID NO: 498732 - protein, 427 aa, unidentified
MSEIGSIQPEPEFAAFIGIDWADQKHIWCLQAAGSAKRETGELKHTPEAIESWVAHLYQRFAQRPIAVAVEQSRGALVFMLSKYEPLHLFPVPPQMASSMRQALYPSGAKDDPRDADLLLDLLLQHRNKLRRLSPDSEATRRVQNLVEERRKLVDEKTAQINRLTDHLKVYFPQMLEWFGRLDSDVACALLERWPALEELQKAAPASLRAFLRKHRCRDREQIEHRMEAIRQGIPAIHDRAVIEAKSAAVRVIVRVVRVLGEGIEDLDGQIEEAAAAHPDFFIFNSLPGAGPVMAPRLLAAFGSQRERYRSADELQSFSGIAPLTETSGKRKWVHFRWACPKFLRQSFHEWAGHSIAQSRWARAYYQQQRSRGNTHHEAVRALAFKWIRIVFRCWQDRVAYDENRYLGALVQRGSPLGGIVAMRKTL

SEQ ID NO: 498733 - protein, 408 aa, unidentified
METIFSVCCGLDVHQASVTACLRRVADEGTINLEKREFSTTVQGLTELSDWLAAAKCPVAAMESTGVYWKPVYHILSATIEVWVVNARDVKKRRGKKTDPKDAQWISELLAHGLIEPSFVPPPQIMALRDVVRMRTALVKTRTQVKNRVLGVLEDTNVKLASVVSDPFGVSSRKMMDALAKGDRDPKALSQLAKGVLRRKIPQLEAALEGTFTEHHALLIRLNLELIDHTNAQIAQLDQRIGELMEPMQKEAGLLESIPGVNHTAARTILSEIGLDMSRFGSPSRLASWTGICPGNNESAGKRKSGKTRKGNRYLKRVLAECSWAAGKTDTFLGRTFRRLQARIGGKKAAVAVGHKILVIVFHLLSEGTMYDDGRYNRLNPKQKERQFKRAISTLQQLGYQVNLIPAA

SEQ ID NO: 498734 - protein, 364 aa, unidentified
MLIIGCDYHPSFQQIAFVDTETGEVKEKRLVHREEAEKFYRDLAAEGRQVRVGMEASGHARWFERLVAELQFELWMGDASEIRRKRGRKQKTDRQDAQHILDLLLKNDFPPIWVPNWENRDLRQLLWHRHRMVQARTRIMNQLQAVALNEGLLCRKKLWRERGRQQLEAFRLAPWASRRRQDLLELLDRLNPTIAELSQAIEREVEKCPAAQQLMTHPGVGPLTALGFVLIIGDASRFQCGKQVASYLGLVPLEDSSGNRRRLGHITKQGSSMLRFLLVEAAQVTVRSLPEWRRKYAHLMMRRGRKTAKVAMARRLAIRLYWMMRQGWDYQQWSKFGSHAGQPGNRDGVQSNIEKLIGRPAPLS

SEQ ID NO: 498735 - protein, 344 aa, unidentified
MKYFAGLDVSVKETSICIVDETGKICRELKVASHPEDLLRALQDPALNLVRVGLEAGPLSQWLFSALAEAGLPVVCIETRHARAYLKAQINKTDRNDARGIAHMMRVNLFRPVHVKTLASQKQRALLTARKLLQGKAIAIENDIRGLLRNFGLKVGLAGAAKFEQRIQELVEGQSDLSEVMEVLLEARRKLREQFTKLHRKLLAIVRDDTVCRRLMTIPGVGAVTALAYRATIDVPARFRNSKAVGAVLGLAPALHQSGEMSRIGRISLCGDGMLRALLYEGAHTVITRSVKWSWLKAWAMNIAKNRGLKRAIVALARRLAVIMHRIWVDGTEFRWTKEKAASA

SEQ ID NO: 498736 - protein, 345 aa, unidentified
MAAVMIGVDPHKGSHTAVAISPAEEPLGELRVRASAGQAEQLLAWAVAWPQRTWAIEGAGGLGHLLAQQLLAAGEQVLDVQPKLGARVRLLATGAVNKNDPNDARSVAVAALRSPSRRPVQPDDHAAVLKVWAKRHRDLGRTQVVCRLHAVLCELVPGGVPKAITANHATRLLSSITPARAVQAARCELAAEFLDDLRRIDAQLLEAHKKLTTAVRASGTTLTDVFGVGPVVAATVIGAVHDVSRFPGPDHFAAYNGTAPIEVSSGPRKIYRLSRRGNRRLNHVIHMAAVTQIRYRHSPGRAYYDRKLAEGKTGKEALRSLKRQISDAIFTRLLADARRAATGPR

SEQ ID NO: 498737 - protein, 375 aa, unidentified
MKEKVRFLGLDVHAETIAVAIAEPDGEVRSLGTIANRAESIRKLIKKLGPAEQLRACYEAGPTGYVLYWQLVELGVDCAVIAPTLVPMKAGDRVKTDRRDAERLARSHRAGDLTAVWVPDAGSEALRDLVRAREAAKQDQLRARHRLAKFLLRSGQRPPSGVKAWTGLHMAWVRQIRFAQAAQESTLLDYLHEVEHMAERVKRLEQAIVDAIKLASPEMQAVIAGLQALRGVALISAVTIVAELGQISRFESARRLMGYSGAVPRENSSGQRTQRGSITKTGNAHPRRIAVESAWSYRLRPGIGPGLRKRQEGVPEEIKEIAWKAQHRLHKRYMKLSAAGKDQRKIITAVGRELLGFIWAIGIKAEAASKQQMAA

SEQ ID NO: 498738 - protein, 469 aa, unidentified
MIRGASKKSCRSEPFRGLRVTNPHVAGIDVHAKEHWVAVSPEDALPARVDQPAHLPRHVRKFGTCTADLEMLADWLQACGVTSVAMESTGVYWIALFELLERRGFEVYLVDPRQTRHAPGRPKTDVLDCQWIQRLHSYGLLTASFRPADQVVVLRSYLRQRQMLIGYAAQHIQHMQKALEQMNVKLTEVVGDIMGVTGLAIIKAILRGERHPRELAKLRDERCHHTEAEIARALYGNWRDEHLFALKQALASYEFYQRQVEECDGRLAAHLQTFADRSGGRRLPAKPKPGLRRSGNRPAFDVRQSLYRASGVDLTILEGIDDSTALVLLCELGMDMSPWPTVKRFVSWLGLCPQHQGSAGKIRSRHVRRGCNRAARALRLAAQGCHHAKNALGAFYRRLQARAGGAKAVVATARKIAERVYRLLKYGADYVRQGIEEYEAKYRERVLTNLARRANELGYELVPVAAATQ

SEQ ID NO: 498739 - protein, 341 aa, unidentified
MEKATIIGIDLAKRVFQVHAAAKDGRPVLRKKVSRAQLLGFLAKQPRAIVAMEACATAHEWGRAISGLGHDVRLVPPIYVKPFVRRQKNDAADAEAIAEAASRPTMRFVAVKTEEQQARSMIFRTRDLLVRQRTQLVNALRGHLAEHGIVAAQGLAKVKVLATAMRDTGSLHPLVHELGQRYLVHIARLDVEIAELDKRLRRPSKDDETAKRLQSMPGMGPITAAAIEAFAPPMATFKRGRDFAAWLGLVPRQHTTGGKPRLGRTSKMGQRDIRRLLIIGAMTVVRWAVRKGAAKGSWLARMLAQKPRLVVAIALANKMARSAWAMLSKGEEYRGSALAPA

SEQ ID NO: 498740 - protein, 312 aa, unidentified
MIAQSVHLGADIAKPTIELGCPRLAVPTSVPNTPAGFRALLKIVARSPSPIHVVCEATGYHHKAFVAALHEAGVVVSVVNPRLPRDFARARNKLAKTDKIDALLLADFGATMKPAPTPKPDAQMTLLDDLVTRRAQLVEDRARETTRLEQTTCAEALASLKLHVRHLDGQIKKLLARIAEVVAGDPALRAKVARLVEVQGVGVLTASALLAALPELGTLSKNEVTAMAGLAPFNRDSGAFRGTRSIRGGRWEVRRALYMAAPTASRFNPILKHVYQRLRAAGKAHHVALVAVMRKLLVYLNSILKKYAPSPI

SEQ ID NO: 498741 - protein, 355 aa, unidentified
MSQEKYIGMDVHQATISVAVRDVHGKLTMECVLETKAGTILEFVQGLSGTLAVTFEEGTSAAWLHDLLKPHVSRLVVCDPRKNALLKDGNKNDRVDARKLAELLRTNQVKPVYHGKHGTRALKELGRSYLTVTKDVTRVMNRIKSVYRSWAIPCAGTSVYTPRHRAEWLAQLVEPGVRIRAEHLYQQLDSLQPVRLEARRQLLLESRKHAAVELLRQIPSIGPIRAALLVALLQTPNRFRTKRQLWAYSGFAVEVHDSGEYRWVRGKLQRNRERITVRGLNDNHNKDVKNLFKSAAISASTRPGPLHDFYVARVQSGMRPTMARLTLARKIAAITLTMWKKGVSFDPKQLHRQAA

SEQ ID NO: 498742 - protein, 413 aa, unidentified
MRYTYVGIDSHKDTHTAVFIDCFFEKLGQLQFNNLPSSFDSFLQQANEFLLPDTTLMFGLEDISSYGRNLTVFLKNHGLQVKHVNSLLVARERKNQNTVQKTDSIDAECAARVLLSKFSELPDADTQDLFWVLRALVARRDALVKQRAMAKNQLHTFITQHYPDYRKFFVGIASNTALSFFMKYPSPHLLKHTTADELTAFLQDIGGAANYPPGFAKLLLASLQDTAVQHQEIRDTVIISVIRQLRYILEEIAELEEAMINFLPKFNCTLTSMTGIDTVTAARMLAYIGDIKKFTSSAKLARYAGVAPVSYSSGKKDTQHANKRGNRQLNTLFYNLAVRVCYAAGPSHKVMNSFFHGYYGRKISEGKTKAQALKCAQRRLVNIIWNMLANNEDYVNPPIFDLPDEVATLDEMA

SEQ ID NO: 498743 - protein, 320 aa, unidentified
MQKIALGLDISKQTIDAYFSGQEDFMRVMNNQAGIEKLIECIKSHQQQGKEIHACCEYTGVYYLPLASALHESGIKISVINPLSIKLYAEYRLRRTKTDKQDAKLIADYCEKENPPLWKPISEKRNTLKVLNRRIEQLNVLLNIESNRQDVSDTVIKSGIERILEAIKNEIESCKKAIQNLIDSDKELSHNQKLLQTISGVGKSTAAWLLSVLVDIDKFENSKKLISYLGLSPVIKDSGTSVRQAKISKMGDKKVRKALYYPARAACLRSKLWRPWFEQKIKQGKHPKQIYILMMCKIVKYAYAVIKTGQPFDENRHKSA

SEQ ID NO: 498744 - protein, 389 aa, unidentified
MNPTQGMDFTPGAGFMAASLELSKGSWKIALHDGKRDKPAIHTVSSEQAAKRLNDAAAVIEATKRKWGIPEHTRTVVSYEAGQDGFWIHRALSALGYEVLIVDPASIPVERQARRAKTDRLDAIKLVNCLLAWLRGERDRMHVIRVPDAEAEAQRHLARDRGELQKEIGQHRDRIRKLLRTVGCWDSVEGKFAKRLEQGQVRCQDGQPLPALMQARLERECARMALAETQLAALETSMIEALPKAVSGRIERLTLLKAIGRVGAFRLVLELYWRNFDNRRQVGSCVGLAPQPYDSGESRVDQGISKQGNRRVRALLIEMAWFWLRYQPNSALSKWFAQRTGGAGQNKRGKRIAIVAVARRLAIALWRYLKDGVIPEGAEFKVVAAPKAA

SEQ ID NO: 498745 - protein, 337 aa, unidentified
MNKITLIGIDTAKKVFHLVGVDRRNRIGLRKKVSRGKFLSTLAQLEASEVVMEACAASHHWGRRIRELGHQVRLIAPQHVKAYRRGKKNDYRDAEAIISASIAPRTQFVGIKTVGQQAEQALHRVRSRLLSQRNAAANGLRGLLGEYGLAVARGLKPLREGAGRFAQTEQAQTLGLVPLVHDVLAEMGSLEQRIEVYDRLIEERVRADPISRQLREELDGVGPLSASALRVKVADPRDFGNGRNFSAYLGFAPNHRGTGGTVKIGKLSRGHDRYLRQLLIHGARSVVSRIGDKSDSRSRWLRDLVTRRGFNIACVALAHKNARQAWAILARQGEWAS

SEQ ID NO: 498746 - protein, 317 aa, unidentified
MDRRIEPDRYVGIDVAKGQVTVHVRPDTTTFSCRTDAQGLADLLTRLRPLTPKLIVLEATGGYEATVAATLTAADLPVAVVNPRQTRKFAGALGRLAKSDAIDAADIAHFAEAIRPQPRPLPDEQTIRLRALLARRHQLVVMAGAEQQRHDRAETALARRSCAAMLRSLRVEIARIEHAIDKLITASPIFCAKQDLLKTIPGVGDVVARTFIAELPELGAVDRHKIAALVGLAPMNRDSGRMRGERHIKGGRPQIRSPLFAACLAVIQHNPPLRGFYQRLVAAGKAKRLALVAVMRKLVCIANAILRTQHPWAHAQS

SEQ ID NO: 498747 - protein, 362 aa, unidentified
MRIIGCDLHARQQTLAMLDPATGEVVHKTLTHEGNNVREFYSTLPGPVRVGIEATGSMKWFLQLMEELGIDCQVGHPATIRAAEPRRQKHDQRDAELLLKLLVENRFPSIWQPSQELLDLRGLLLHRHQWVRLRTRIQNALQAIALANGLRRGSSLWSQSGQRAIASLPLATHTAHRRSELQAMYARFEAEIEQLNQQVLEQAGQRPTAGLLMTHPGVGPITALATDVFLGDPKRFSDGKALASYIGIIPREHSSGGRQRLGGLSKQGNPLLRFLWCEAAVHAVRRDPELRRFYRRKLVQKGLGKARVAAARKLGIRLWIMLRDQIDYQEFCRRGQRQQRSGGACAGMPGERYGAKSHRLID

SEQ ID NO: 498748 - protein, 421 aa, unidentified
MDKERKWFVGIDWGSQEHVVSLCDEGGSKIGQRKFPHGGTGLTDMMDWLLKATGGEPGEVHVAIETPHGPIVEALLERGFNVYSINPKQLDRFRDRFTVAGAKDDSRDADVLADSLRTDMRAFRKLSIADPVIVELREWSRIDEELKVEHGRLTNRFKHQLWRYYPQMLELADDVGANWFLDLFEAVPTPEKTAKVREKTIARILKDNRIRRFDAAHVLSELRKPALAVAPGTIEAATARIRGLIERIRLINGQLTEAGQQLDRLCKQLSEPLANEDGETTPGQKTEQRDAAILDSLPGVARTILATLLAEATDTLQRKDYHALRAVCGSAPVTRRSGKSCRVVRRYACNRRLANAAYHWGQNAIQRDPTSRAKYDALRAKGHGHARALRSVVDRLLNVACAMLKSGTLFDPEFAGKRTTG

SEQ ID NO: 498749 - protein, 341 aa, unidentified
MMIIGCDFHPRFQQIAFVDRETGEYGERRLNHPEEAEQFYRSLFGRPVRIGVEATGNFRWFRHLMEELGHEFLLGDATAIRAACPRRQKTDKRDARHILNLLVEDRFPVIWQPSAENDEMRQLLLHRCRLVRMRTRVQNQLDSVAKNEGLLSSRVWSAKRRSQIEALPLPGWYGHRRADLLGLLEELNKRIKPLDEAVCKAAEGNPEACLLMTHPGVGPIVSLAYVLTIGDWKRFPRGKQVGSYLGLIPTEESSGNMRRLGQVSKQGSVLVRWLLVEAAVHAQRHDPSWHRQYVRLSMNKHHGVAKVAIAHKLAVRLYWMLRSGDDYSKVMERSSHAGQSV

SEQ ID NO: 498750 - protein, 364 aa, unidentified
MTQSTMTDKTTIGIDLGDKKSHICVLSGDGEVLERAEVPTTMAAMRRRFERCESLRIALEAGGQSCWVAELLKDLGHDVIVANPRKLRMIYQNDSKCDAVDAEQLARVARLDLKLLHPIQHRERSARADLNKARSRDLLVSMRTSMVNHIHGVLKSFGARTAKKSAALFHTWVEDKIPSELDGALRPLLVTLCTVNEQIKVLDKEILRLTKEVYPETQVLQQVDRVGPHTALRFILTIEDPSRIERSRDVGGYLGLVPKRKQSGKGDPEMRITKAGDNEVRRHLVQCAQQMLGPFGKDSDLRRWGLELAARGRKTAKKKAVIAVARKLAVLLHTLWRTSEVYEPLRNANRTSKKPGTAAATVPA

SEQ ID NO: 498751 - protein, 424 aa, unidentified
MKNSAARKLKQVPDGYLIIGIDPHKKRHAAVAITQDYSPRAKFKFDNTREGFEAMLHRVRTEMVESGCRGVMFAIETGGHYWRNVAYFLDEQGIPFRFINQFTLKRRREGKDLNRRKNDYRDSEVAAQLLCTGEFTESKLPKGVYAELRSAHNAYRRLVVERARITNLLKGLLDSLFPEFTLVFKDPCGLTALSVLSTCAIPSVIAGMAEDEFVAKIEERHQGHRLMRMKLRKLHYLARMSIGIDAGAPSVSAEISFLVEKLELICRQTRIMERTLAKLLDETEEGKYLLSIRGLSYIAVAGLLAELGCFRAYRSAKQMIKMAGSNPTESESAGKRRTRTPMSKRGRPVLRYCAWTSVIPMLRLNEEFRDWAKQMRERPAHANPLNGREIVGAALNKLLRLAFALVKNQTYYQAPKQDPELVAV

SEQ ID NO: 498752 - protein, 346 aa, unidentified
MLADDVAFVIGVDTHADTHTLALVEARTQRTSRSLTVAASRRGYRQALRLARRHAPGARVWALEGSGSYGAGLARFLGARGERLLEVERPRREGARGRLKSDALDAERAARQVVAGSAGALPRVAQDTQALRALLSTREGAVTACTAALNELRALIVTAPPELRERLQGLSEARLIGACVRLRPGRGDSERAALVLALRSLALRVRQLRAESQTLEAELARRVQLLAPELLARRGVGPISAAAVLVAWSAPGRLRSEAAFARLAGAAPVPASSGKVMRHRLDRGGDRRLNRALHTIVLSQRRVDAATKAYIARRVGEGKSEREATRCLKRYLARSLFRQLEAMPRT

SEQ ID NO: 498753 - protein, 409 aa, unidentified
MDIVPIYKRVIGLDVHQAQITGCAIIEQPDGSVTYEGREFGGFKRDRKALAEWARAIGPDVVVMESTGIYWKSPYAALEGVGIIAWVVNARHVKAVPGRKTDVADAQWLASLARAGLLRASFIAKADLRSLRHIARHRQKLGGMLASEKNRLHKLLTDAGIRLGVVVSDLHGQSARAMVKALIAGESVPAVLSLASKRLRASREDIFEALQAEEITPAHRFVLVEIMAHIEELESRMARFDAELLRSLEAAGYAAPLRLLQTLPGIDLMGAAMLLVEIGSDMSVFGSAQRLASWVGICPGNNESAGKRKSGRIRKGNAWVRRLLCEFAQAAGRSRCALKDKFQALNVRKGHKRSIVALGHKMLRTIYAMLSKNTHYVDKVVDYEALMVARNAPRWLQMLVKHGFVPAPV

SEQ ID NO: 498754 - protein, 403 aa, unidentified
MNSVGIDISKGRSTVAVMRPFGEVVISPFEVRHTDSELSELARQLKSLDGETRVVMEATGNYHTPVAKLLHDAGLYVSVVNAKLVHGYGNNDLRRVKTDKKDSVKLANYGLDRWLTLPRYIPEEDTRLLLKNCYRQYRQYSKVQTVLKNNLISLLDTVFPNANRLFSSPIRGDGSEKWVDFVAEFWHCRCVSEKSERAFTSKYLRWCRKHGYNFSEAKAHTIYAEASGHIGVMPKSETTKLLVEQAVAQLRATSTALAALKHEMQALTSMLPEYPVVMDMFGVGPTLGPQLIAEIGDVRRFYSKKALVAYAGLDAPPNDSGDVTGRHKSMSKVGASSLRRTLFLVMSVYLQNAPLDEPVYQFMDKKRAEGKPYRVYMMASANKFLRIYYATVKAYLESLELTA

SEQ ID NO: 498755 - protein, 389 aa, unidentified
MGEAIRATVAYLGIDVGKRSHSACGLGEDGEVAFRSDLENRPADIDRLLERAGAGALVVVDQKRNIGALVLARAFAHGNPCAYLPGYAERQARGMFPGVAKTDAIDAEVIARTARGMPGALRPLAEEPEGAASLRILSSQREFAAAARTRAKNRLRATLLEADPALERAVDPSRGWHVAPLAEFGSAAGCSAAGWRRFSAAARRAGAPAAGARAPWESMLASAGSGRALPAGEDVAVRMLARDVAALDADVAELEGLVADSLAGDEVYECLLTVPGIGPKTAAALVTSVDVSMFRGHDELASYCGVAPADSRSGTSVRSTSPQRGGNKQLKNLLIFSCNSLIGTDNRFGRYYDECRARGMRHNKALKAVARKRLKVIYAVMRDAVPYAA

SEQ ID NO: 498756 - protein, 408 aa, unidentified
MRIIGMDIHRAFAEVVALVDGKLRRIGRVDMRRDLLEAFARKLSKDDVVVVEATGNAAAVAAVLSPYVARVVIANPKQVRIIAHAKIKTDTIDAGVLAQLYASGFLPEVWIPDPATEALRRQVTRRNQIVKGRTRLKCIIQSILHAHLIPSCPATDLFGRKGRAWLAEQGVPEDERLAIDRHLREIDRLGEDLKVIERDLARQALSSAEAKQLMTVPGIDMVVSLAIISAIGDINRFASPQKLVSYLGLNPSVRQSGPGPAYHGRITKQGRGHARGMLVEAAWAAVRAPGPLRAFFLRVRARRGQHVAAVATARKLAVLVWHLLQKGESYAWARPALHARKLRDLELKSGTPARRGERGAAHAYNIKANREQERRWVEQAEKAYDRFVAGWTRKGPQVRTGAAKEERR

SEQ ID NO: 498757 - protein, 400 aa, unidentified
MTVMIGVDPHKGSHTAVAIDRAEVELAAIQVRSSSRQVEELLAWAGELGDRIWAVECAGGVGYLVAQQLVAAGDRVLDVPATLAARARLLGSGRSSKNDPNDAYSVAVASLRAPALPAVAPADNAAVLRLLAKRNKQLGSQRTRTACRLHALLVELVPGGISREITVNRAARLLESFTPTTPVEVTRHELAAEHLDDLRRLDDQLGALHKRMDDAVKASRTTVRELFGFGPVVSALAIGHTRDVRRFASRDRFAAYNGTAPIEVSSGGRLTHRLSRRGNRQLNHAIHMAAITQIRHRHSPGYAYYQRKLAEGKTSKEAIRALKRRISDALYERLVADAKRHAGPGGQAGATAEADAAGLEPRQPALQVSHSRTRTERRGRHANTRTTQAVRSHKPARTRI

SEQ ID NO: 498758 - protein, 315 aa, unidentified
MAMLVAQTKPVVGVDVAKNELVIYQDQSDRLEAIPNTKASISKWLRTLAGTVSIAVEATNTYHVLFADMAYEAGCTIYMIDGYQLSHYRKGVNVRAKTDALDARLLARYLKKEADELHPWVPPCPLYRQLLSLFRRRAALVQARTGLVQSWSNEPLLKTAFAAQINSMKRLEALVEKKIKDVLQRAELMGQVSRCMKVEGIGFLTAARLVTTFQRGEFSNANAFIAFLGLDLRVSKSGQSDGPRRLTKRGDPEARRLLHNAAMSGSRTAAWKPFYEEQRKRGFSTTQALVMLARKMARVVFALLKTQSEYRSKAA

SEQ ID NO: 498759 - protein, 348 aa, unidentified
MTITMIGLDTAKAVFQVHAVDKAGNVVIRRKIQRKDLITFFEKQEATTVVMEACGASHHWGRTLAVLGHDVKLIAPEAVKPFVKKGKKNDAADAAAICTAAHQAEVKFVPVKTMEQQAILAVHTARALLVKQQTMLANAVRSLASEFGLVVPKGIGNVEGLAEQVEEEKSLPEEARQVAKELKGRLSELVVHIGTLETKIVRHARNDARARRLATIPGIGPITASLIAATVADFSVFKNARQFAAWLGLVPRQHSTAGKTRLGRITKAGNSEIRRLLVLGATAMLKVAGQWNSVAGAWFRGVLERRPARLATVALANKTARIIWALMTHNEVYRPSGRSAQPQARAAV

SEQ ID NO: 498760 - protein, 345 aa, unidentified
MEPMYYIGLDVHKRKISYCVKDSGGKVYSEGSLSATRLDLDVWMKTLPQPWSAAMEATMFTGWIYDHLKPHAAALKVAHPLMLRAIAAAKKKNDRIDASKICDCLRCDFFPECYMASTAIRERRRTLRYRNLLVRQMVQMKIKISALLMEAGVSYNKQRLHKAGYFRELLATNPDIDEGLCSLLRLCRETVVRLQKTESAMVRSLERDSLLIDRVERLMTIPAVGPITALTWALEVGDVQRFSSIKKAISYCGLCGAERSSGNTVQRTPLSKQRNKHLQTTLIEAAKMAPRNSPELAMLYDKEKQKGNANRATLAVARKLVAYLVAVDRRQKEFLTVERENRTAA

SEQ ID NO: 498761 - protein, 434 aa, unidentified
MEEITDEPLYRDRVCGIDIGKAGLVATIRVPSDANPARRAAETRSFGTTRREVLALADWLRCWQVPAVVMESTGDYWKGPFYRLEAEGLECVLADAKQVKHLPGRPKRDPSDSRWLAACFERGAVTACFVATEEFRVIRLHTRYRRDLTEERTREKQRAEKLLESAAIKLSSVVTDLHGVTGRDIMDHLIAGETSPKVLAQLARARARRKIAELEAALEGAEFFTPAHAALLATMLDRIDHLHAEIARLTEMIEHLLAPHEEQLAQAESMPGWGRRSAQDALAETGTDMSRFPTPSHLASWAGRTPLDNSSGKRKGKAKSKKGNRYLAAVTGETAVAAGKTHTREGARYRRLARRRGKAKAQVALGNTQLKVYHALLSHPGTRYQDLGPDYYERQAGTRRQIAHHVGKLAALGFEVTLARLPEPDPTGADNQAA

SEQ ID NO: 498762 - protein, 400 aa, unidentified
MRTVFGIDVSKASSEVAIVINGEKIHGYTMPNDAIGFTRLLDDLKTVQKPEIIFEATGVYSHRLQAFLEENGYAYTQLNPLEAKKQLDSLRVRKTDKIDAETLAISQFVLNRKPTYIQEEVYQELRDLSRFYQNLTEDIVRTKNRLHKVLQVTFPEMENILSTPTREQYWNLVMTFPYKDFVLELSKDELLEGIRQSTSKRISDKRVAYLAQKLAALANQSYCAVKKNSPILEEVRYYAKELLRLSEQRQAVLEQMVELAQPLPEYEILLSIPGIAETTATSMIGELEDIRRFQSANQINAFIGIDLRHYESGNFLVKEHITKRGNPYARKILFKCIHNIAAASHTNHCHIEDFYEKRKRQSQTTSTKPHTIASIHRLIRTMYYLITHNKLYDYTSTQNR

SEQ ID NO: 498763 - protein, 346 aa, unidentified
MTNNIQFSSVCGIDIAKSVMQVYKISSDGVVSNKAVKRADFLNEFRNIPPALIGMEACGGSQHWARELQSLGHTVRLMPPKLVKPYVTGLKNDKNDARGIYTALVMGVREVPVKSAAIQDLALLQTMRTKRQREKVAKINHIRGILTEYGLIMGKSVNAFLAKTGSLIVELKERADVSPFIVSELNALFPKVKEAMAKIKELETNIESIAKTLKHYDLFQSAPGVGPITAATMLVLLCNPEVFKNGREFAAYIGLAPKSSGSGGKNFVTHIPKKYECNNEVRTLLVQCAHAICRSKHKSDWVSSILARKPKKVVIIAVANKLARQLWIMAKKGEKFERRFILAAAQ

SEQ ID NO: 498764 - protein, 427 aa, unidentified
MVRSIGMDVHRDFCEVAIAEAGAVRAAGRILTTPAALELFARSLAPTDEVAIEATANALAIARIIEPHVARVVLANPKAVREKSPRAKTDKVDAKTLARLLAVGFLDEVWTPDEAARARRRLISRRCALVRQRTREKNQVHAALQRNLIERPPMSDLFGVKGRAWLSVRVERLPLDERLSVEACLRQIDVVAGELAALDKIIAADALSDVDALRLMTLPGVSAVTAIALRGAIGDISRFRTPRHLVAYLGLDPRVRQSGNEPAKHGKISKQGPGEVRGLLVEAAWHAARTAGPLRAFHQRLAGRRGANIATVAVARKLVIIAWHLLSRGEKYAFMRPALYRQKIRRLGLMTGATRQQGKRLAEPSYLRASDPRRHAEDELVEAHEAAYRRLVADWQASRPSRKAGAGATPGRASQRPSKGKAARQAV

SEQ ID NO: 498765 - protein, 388 aa, unidentified
MQVIADRPEAPSAIRSDLGAIFVSMELSRSSWVITSLSPGAGEKMSKHSVPAGDICGLLARFSALKQKALARTGKTFPIIVMQEAGLDGFWIHRALQKEGIESHVVDPASIATSRRRRRAKTDRIDGEALLRALLAYKRGEPRVCAMVKAPTPEEEDRRRLCRERKVLIAERVSHVNRIKGLLFCQGVSGYQPLRRDRRRQLDELKTGDGRPLPNHLKAQISRELERLELLLGQIKAVEAERDALLDAQRIVATSPAAMLLDFNGIGPEFAAVLWSEGLFRNFDNRRQVASYAGLAPTPWQSGSIDREQGVSKSGNPRLRTTLIQLAWLWLRHQPQSALALWFEERVKRNGGRHKKSAIVALARKLLVALWKYVTAGVVIEGAAMKTA

SEQ ID NO: 498766 - protein, 326 aa, unidentified
MTASQVTDNSFVGIDVGKMSLDVQWHRGDGAQYANRPDAIASLVHRLQSGPRVTRIVMEPTGGFEKPLLEALRQAKLPVELVHTSRFKGYRALIGVKAKSDTSDARLLAAYAASPDEVRGYKAGRVEVSEDAVREELCELASRRDQLKRMIHAEGCRLGFTRHIVLRESIQAHLATLKAEDKQVLQMMRALVRQRDDLRRDQRLLRTVKGLGLVSTLTLIAAVPELGRLGNKQAAALIGVAPFVRQSGTMNAPARIHGGRAAVRHILYMAAITASRHNPVLKAFYERLIAKGKPPKLALVALMRRLVVFANAVLRSGQPWRGAVPT

SEQ ID NO: 498767 - protein, 430 aa, unidentified
MKSNTQNAKIEAITEKTLVLGIDVGSEMHYARAFDYRGIEYSKKPFKFSNTEAGFVTFKEWILDLKERHEKDKVVPGMEPTGHYWFNLGKFLQDNEMKPVLVNPHHVKKSKELDDNNPTKNDRKDPKVIAGLVREGRYMIPYLPDGVYADLRTASNIRFQLQAELTRIQNRISRWFNIYFPEYKTVYGKPDAKSGMLILKAAPLPEDILTLGIDGVNQIWRDAKLRAVGKARAKTLIEAAEHSVGSKEGAVSARMEIRMLLEDYESRNIRFQEVMTLIEGLVKQIPMAEKLLEIKGVGIKTVSGFLAEVGDISRFNTPKELQKLAGLALVESSSGKHKGETTISRRGRKRLRYLLFEVAMSLVAKNPEFRELHNYYTTRRLNPLKKMQSLMAIAAKLIRVFYAMLTKGVDYDPKKMVSDIKRPAVYLQAA

SEQ ID NO: 498768 - protein, 328 aa, unidentified
MFVVGCDVSKATLDFAWYDEELDRWFTLSNIPNTRAGFRKMLQWMHKVCAAELQDISLVIEATCVYHQPLAEYAYTAGVTVFVTNPARAAEHARSQNQLNKTDKLDAQGLQLYGRHLQNCHEYVPHCASVQALQALLSRLRQLDGDLLRERNRLEKTPFVQNSQSMSASLKRHIKYLEKEKTRIQAQIETVIEQHDRLRHVQKLLLSIIGIGPLTSQALLPLLYRDQFTDARQLAAYLGLTPVHKRSGTSLHKRGRLSGRGDRHLRAQLYMPAVCASRYNPAMRARYKELIDRGKAPKQALTAIMRKLVHVCYGVVKNDQDYKCPIAA

SEQ ID NO: 498769 - protein, 338 aa, unidentified
MKLYAGIDLHSSNNFLGIIDEEGKQLYSRRLKNNLGEVLHELLPYREFMDSIVIESTYNWYWLVDGLMKDGYKIHLANPSAMVQYSGLKHTDDKSDTFWLAEMNRLGIIPTGYIYPREERSVRDMLRRRFLFVKQRTAHILSLKSMIARETGLMMSADRIQKLGSAEIESLFSDQYLRTIALNNLTAIDVLGNMASAIEKEVLSHCKLRDEFKHLLTIPGVGKILAMMIMLEVGDIRRFKDAGNYSSYCRCVKSEKISNNKKKGENNRKNGNKYLSWAYMEAANYVIRYCPEAGAFYQRKMAKKNKIVARKALANKLARASYYIMRDCIEFNKDKLFS

SEQ ID NO: 498770 - protein, 365 aa, unidentified
MFTERTSVGLDVHARSVAAAAIDGDTGELFQAKLTPSYDHITSWLRDKPGPVAVAYEAGPTGFGLYRHLRAAGIRCEVAAPSKIQKPAGDRVKTDAKDAIHLARLLRLDEISPVAVPTVEQESARDLVRAREDCRGDLMRARHRLSKLLLRNGIVYYGGDAWTGKHDVWLRRDALPQLASRTGRATALTFDNDYEAVQATLARRKRLDTAIEEMAAESEFTPLVRRLGCLRGIGTLTGFALAVEIGDWHRFTGNSIGSFVGLVPTEHSSGESRSQGSITKTGNTHARRLLVEAAWHHKPRYVVGKTMRDRWDLAPAAARIRGDEGNRRLHERWVRFIARKKKNTIADVAVARELAGWCWSLAVLE

SEQ ID NO: 498771 - protein, 347 aa, unidentified
MEQIIRIGMDTSKHVFQLHGVNAGEEPVLRKAFRRKDMIAFFEKLPPTAVSIEACGASHHWARLLGSLGHEVKLIPPQYVKPYVKRGKNDAADAEALCEAMSRPTMRFVPAKSAEQQAGLMLMGVRDRLIRNRTQLANAIRGYAAEFGLSGAKGMAHVMPLLERIAADETLPTLARDLFAHQQGELVRLEAEIDALDTRLMAWHRADACGRRLAEIPTIGPIIATLLTMKTPAPGLFRSGRDFAAWIGLTPRDHSTAGKARLGIITRAGDEALRSALVVGATALLQQVRAGRSKHASPWLLELLKRKPPKLVAIALANKTARIAWKLMVTGERYRPRSAAQPIAQAA

SEQ ID NO: 498772 - protein, 426 aa, unidentified
MKVMHDRVAAIDVHKEMVKVAVRVPGAKRGSRKTDVLEFRTFYGVLQEMGRELRRRGVTHVVMEASGVYTEPVYYALAGLDFTEVMVINPAHAKALKGHKTDAKDAIRLLDLYECGLLSGSYIPAPDLKEVRDLARYRMKTVQARASEIQRLQKTLESAGIKLDSVVSDITGMSSTAMIEALIDGERRGEVLADLARGRLRTAGKMADLSMALAGRFTDHHAMMCRLHRDRIKMSGDAVADLDARIAPPVARYSREADLLKTLPGFGDVVAAGWLGAIGPAPHEHFATAQRLASWATVCPGNYMSAKKSKGGRTGDGGNYIKPLLVQAAWAAVRVPGRLQARYSRLVRRFGGPRSKGAVKRAIMAIAHTLLKIAYQVLKTGKPYEDLGAGFYASRESPQARQDYLIRQLQKLNPGSTITITPQEAA

SEQ ID NO: 498773 - protein, 347 aa, unidentified
MVIIGCDFHVGFQQVALLDAESGEVRELQLGHREQARQFYAGLRGAVRVGMEACGYSRWFERMLAEMGHELWVGDASQIRASARRKQKADRRDAQHLLGLLTEGRFPRIWVPSPEERDVRQLLLHRHSQVRERTRVKNQLQAMALNEGLRLKRKLWSQEGQRQLALLPLPPFQARWREELLARLEELDGQVKASDKLVEREAAQRPAVQLLRTHPGVGPVLGLAFVVTVGPVERFGRARQLASYFGLIPSEHSSGERRRLGRISKQGNPLLRFLLVEAGQSAVRKDPQLRQAYGRIARKRHRAVAKVAVARKLALRMYWMLRRQVGYPAVLEPGPVQASPSHSVVER

SEQ ID NO: 498774 - protein, 367 aa, unidentified
MSISKFVGLDVHKETIAVALADDGRTGEIRFYGTIPNTQDSIRRLVARLSSPDVALHFCYEAGGCGYGIHRQLVDLGAECSVIAPSVMPRKPADRIKTDRRDAMTLARLLRSGELTAIWVPDEAHEAIRDLIRGRRQAKHDLVAGRQMLLSFLLRHGRKFAGRSNWTKAHWRWLGEQAFDAPHQQFVFGESIRRIEEAQQRCDRLDAMLVEALPYWSLAPLVQALQALRGVGLIVAATLVAEIGDLGRFDTPKQLMGWLGLVPSEASSGARTRRGTITKTGNREARAMLVEAAWSYRLPAREERRYRARVEGLPDEVKSIAWKAQVRLCQRYRMLAASGKPLPKVITAIARELVGFVWDIGRRMQPA

SEQ ID NO: 498775 - protein, 405 aa, unidentified
MPINMQYERAFGLDLSKKTFHGCILDGPDLASRHFFTGEMGQQGKAKLAGRLCKGDLVLMEAGTASFSLARFLLENTEAEVVVLNPAKLYNIFNSSLKTDKSDSEKIVRIARNMPRDEWPVVSIPTKEEQAERSVVSLEVFLAQEITMLVNRLYALFNSMGHPFIKKSDLKTEESRLVLANRMLCEESLAIEQVIMLSDQIGHVTEQLEQCKQRLRDICLSHPKEALSLLSIPGIGLMTAASQIAFLGDGSRFDSPDSYVNYVGLSERRFDSGNKVSKGHISHMGNTCIRRNIIQAAWVASKSSKGNPLSRKYDDLRLRGKSKPVAAVAVAKKMIQLSYILVKSNGIYEFTKQQGLAAFRRRLQYHKLAELLDYLPEPIRMQMEEIDRTKRKEAAATTSRQKKLA

SEQ ID NO: 498776 - protein, 368 aa, unidentified
MGMLAERADHVIGVDTHRDGHAAAIVAAGTGAVLAQTTITADAAGYARLLRFARRRAEGARAWAIESSGSYGAGLAAFLLEHGEWVVEVDRPQRPARRNGAKSDALDAIRAAREALEREHLAQPRGRGEREAVRVLLTTRRGAVRARTQAINQLKALVVSAGEPLRRQLRSLSTDALVDRCARLQLRASHTAEQRATTLALRHTARRIRALDAEANQLESELARLIEQTIPDLLAEFGVGPISAAQLYCAWSHRGRLRNDGAFAMLAGSAPIPASSGQTIRHRLNRAGDRHLNYALHTIMLTRLRHDPATRAYAARRTADGKTPREIQRCLKRYLARHLFRILEATGPHPTPTRRLPRNRTRTIGPCS

SEQ ID NO: 498777 - protein, 348 aa, unidentified
MGVTIVGIDLAKNVFRLHGCNEQGRAVLRKQLTRGQLLAFVAQLPACTVAMEACASAHYWAREIEQLGHRVRLVNPRFVKPYVKANKNDASDAEAICEAASRPSMRFVPVKTAAQLEVQALHRVRQQLVKSRTALVNQVRGLLAEHGIVIPQGRAQLQRALARILEDADHRLSNIMREILSESSERLKFIEARLHQYELHIERLFRQDQRCRRLGEVEGVGPLIATALVAAVGNAADFKHGRELAAYLGLVPRHRATGGRTIMLGISKRGDRYLRSLLIHGARAALWAMARRGEQRNAWAGRLKLRRGTNVAAVALAHKNARVLWALLRSGQAYRAAPPSPRLVQAAG

SEQ ID NO: 498778 - protein, 317 aa, unidentified
METVQQPSITVHIGIDVAKATLQVDLQGKSRRFANTKAGHGALLAELPAGAFAVLEATGSYHLEVTSRLQAAGVPVAVANPARVRQFARARGTLAKTDPVDAALLSAFGTAFDPLPAPPRDPQRELLTELVNLRDLLVAEITRWGNLGEHQQAAAARKIAAAQAAGARKALAAVEKDIARLIDESASLAPVAAVLRGCQGVGPVTGAVLLAGMPELGRIGRRQAAALAGLAPCANDSGKHQGKRMTRGGRPRLKRALYLAALSALRHHPGLKATYQALRAKGKPAKVAIVAVARKLLVMLNARLKEYYQAASSCPAT

SEQ ID NO: 498779 - protein, 364 aa, unidentified
MYDSTTTVTVGLDVHARSVRLAAVRAEELLEERTLPYDEEAVERVLRRWPLVRCCYEAGPTGFGLYRYLVERGIDCLVVAPGLVPQRPGDRVKTDSRDARKLARLLAGGLLQPIHVPTAELEAARDLVRAREDARLDRMRDRHRLSKFCLRQGRVLPTSSWTVMRRKWLGEQRFEFAAQQITFDGYVHTVDLVDARIEQLERAVRETAGQEPWRALVARLRCLRGIDTLTALALVAEIGDFNRFRSAEEFMAFVGLVPSEHSSGEKRRQGSITKVGNSHVRRLLVESAWHARRRPKVGYELARRQRGQDAVAVERAWRCQQRLYQRWQRMAGRGKPQQKIVVACARELAGFVWAIATEQPLRNT

SEQ ID NO: 498780 - protein, 308 aa, unidentified
MIMQNYVGCDISKQWLDFFDETSGRLRRIDNQADAIAAYVAGLDPSRDFVVMEATGVHDRLLRHALAKAGVPFSRHNPAHTHHYAKSTRRRAKTDPLDARMLSDYGRRYHPETEPAPSEEVEQLQSLAGHRDHLVNMRATAKKHLAEAFNEIVIADLEETIAYLDTRIKALENLIAEVIRQNQDTARDHALMVSVPGVSKVGALSLLALLPELGKRSPKAIAALAGLAPFDNKSGKLTRRSQIQGGRSRVRRALYMAALTAIRTCDRFKTFYTALAARSGSKKLAIIAVARKLLVVLNAIIRDKKAFA

SEQ ID NO: 498781 - protein, 309 aa, unidentified
MDPIAVGIDVSKERLDVHVHPAGTVLSLSRDGAGLEELIGTLASVAPQLVAVEATGGFETVVVAALAAAGLPVVVVNPARVRAFASALGQRAKTDPLDAQVIAQFAAATKPPVRALPDAATQALADLVARRRQIIQMIVAEGQREKRAAPRAKRSIARLLKTLRRELSEIDADIEETVRGSPVWCEKEDLLASVPGVGSVTARTMLAELPELGSLNRRQIAALAGLAPFTRQSGKWRGKSFIGGGRASVRGALFMAAMTAMRRNPVLRAFHQRLRAAGKPKMVALIAVARKLLTILNAILRDKIRWQTA

SEQ ID NO: 498782 - protein, 367 aa, unidentified
MKEQENKRNKITIGLDLGDRRHRFCVLGEKGEVLEEGSVGNNRAALSELGGRYPEALVVMEAGCHSPWVSRHLEQAGCEVVVSNPRKTRAIYQHERKSDRRDALMLARIARMEPALLYPVRHGSEEAQQDLLRIKLRDSLVRARVALINSLRFTLKSLGYSIANPSTERFHKVIQSALPQSVAQVIAPSVQALEELTLRIKLLQREISDQARSKYPDTAWLEQIPGVGPITALYFVLKIEDPARFKRARDVGAFLGLCPRRDQSGENDPQLRISKRGDAYLRRLLVSSAHYILGPFAPPSALRQYGLALASGATARAKKRAVVAVARKLAVLLLTLWKNKSSYEAFPQRSSKEKMRTNDLERLRCIA

SEQ ID NO: 498783 - protein, 316 aa, unidentified
MSPQPYCVGLDVAQATLALAVRPTAETWQVAHDEAGISALVPQLQARAPTLSVLAATGGSHGAVTAARAPAGLPVVVVHPRQVRACAQAVGILAKTDRIDARVLAHCADAVRPAPRPRPEAATQELRALVRRRRQLIALLTPERHRLGTAPARIHGAIQRPIPWLEHQLTALDEDLHHTIEASPVWRVQEDLWRSIPGVGPVLSRTMVAQVPELGTLSHKQSAALIGVAPCNRESGTLRGRRTVYGGRAEVRAVLSMGALVATKHHPVIKAFSARLCAAGKAKKVALTACMHKLLTIMNAMVRDLKPWQPQEVAIA

SEQ ID NO: 498784 - protein, 409 aa, unidentified
MNPVVERGAGLDVHQATVVATVRIPDDRGGRQAITQTFGTTTVALLTLRDWLHAHGVTHVAMESTGVYWKPVYYILEDGFTLLLVNVQHLKLVPGRKSDVRDSEWIAQLLEWGLLQSSLVPPAPIRDLRDLTRYRKHQSQDRAREVNRLHRVLEDAGIKLSTVATDVMGVSGRAMLDALLQGTTDPEVLANLARGKLRKKLPALRQALLGRFRAHHGFLIGQILAKIDFLDEVIDQLTQEIDRLVIPFEPMLAQLDTIPGVDRKGAITILAETGGDMSHFPTPGHLCSWAAVCPGQNQSAGKRRSGKTRKGNRYLRTLAIESGLAAARAKDTSLQSRYSRVKRNRGHKKAVLAVGHQILEIAYFVMRDGIPYHELGRDYFDRQHRQRALRRHVRQLEALGYRVTLEPAA

SEQ ID NO: 498785 - protein, 325 aa, unidentified
MTNETREPVYVGIDVSKDSLEVALADKAASVRFVNDEQGVKALLEHLAGHNVAVVLLEATGGLEKRCAHALYLAGMTVVVANPRQAHEFAKSMGYLAKTDGIDARILSHFARTLHGSERFDKLQLKMATPQQEQLQALVTRRSQLVQMRVAESNRLNLAHALSAKSIQAVIKLLDKQIKTLDEDIGNRLKQHFAQKLKLLEGFKGIGDGTKAVLMAALPELGQLNRREIGKLVGVAPLNHDSGKMRGKRSVWGGRADVRSALYMAALSAVRFDPTIKAFYERLRAAGKPPKVALVACMRKILSILNAVIKSNTAWEQRCPQASTA

SEQ ID NO: 498786 - protein, 407 aa, unidentified
MGITCGIDWSESHHDVALIDEHGTVVARTRIDTGATGFHILLALIAEHGGSVDDTPIALETDKNLLVVALAKAGFTVYPINPRAVARYRERYGQAGGKSDPGDAAVLAHILRTDRHLHRPLPAVSEEGRAVKALARQHQEAIWALHQTVSRLRSVLLEFYPQALQAFPNLKHKAALTVLADAPTPAAGQRLTRGRVVALLRRSGRGNHPALVEQILTDLHTPALGQPPRVEEAYGHTVRGLVAIVIAMGQAVDDLETELAREFDQHPQAAILRSVPGLGPVLAARVLGEIGDDPARFDNPQGLRAYAGTAPVTIASGRLRYVKARKVRNKRFGDACHWWAYTMLTKSAGARAHYDRRRAAGDHHNAALRNLANKLLGRLWWCLVNNQPWDEHGAWPDHGHTENPTAA

SEQ ID NO: 498787 - protein, 313 aa, unidentified
MICGVDVSSKSLDARIGRDGATACFTNDPQGIAKLAEFCQCHKVHLVAMEATGGYEKRPFALLWAAGIQVAVVNPRAVRNFAQGMGLFEKTDRIDAGVIAWYAETKQCVAVSPASAQQQQLKAMVTRLRQLTELRAAQRNQRLLVTDKVVLKSFRKLLDLVQRQIRDLEVAIAGLIAADALWQKLDQSFRSIKGVADRTVARLMAEMPEIGTLSNKRISKLAGLAPLACDSGQWKGKRTVRGGRRTIREILFVVAAGVSRHNPDFRAFRERLAAAGKAKKVIRIALAHKLLVRLNAKARDVLQQFTPAAVLLP

SEQ ID NO: 498788 - protein, 337 aa, unidentified
MAKEKAVRWVGVDVSARWVDGSRAAADEPVSARQFANTPAGHGELASWLTQGGRRARVVLEATGLYSLDLALRLQRTARIEVMVINPRASKEFAGAWGQRARTDASAAQGLREYAARMPFMPWTPPGPQALALRTIMRRVVALIEARVQERNRLHALSATEAVPAVVRTDIRQHIRTLERRIARLEHEARALVEPAPALRAGFRHLCSVKGIGRRSALMILAEVAVLPGELTARQWVAHAGLDPRPIRSGTSVHPPVRMSKHGNVYMRRSLFMPALVAVRRNPAVQRFATELTARGKAPLQVLVAVMRKLLHAIYGMLKTDTDFAGEKFRRSAHAEG

SEQ ID NO: 498789 - protein, 344 aa, unidentified
MEYYVGLDVSLRSCALCIVDSKGKVHLERELPCEVAAIADCLEAFKHPVERVGFEAGALSQHLYFGLQSFGLDVVCMEARQVSAALSAMRNKTDKTDAKGIAQILRTGWFSPVHMKSREAHGLRALLSTRKALLKKTMDLANEVRGLLKIFGVRLPRTVKHGSFDALVRPMIEMDDVFAHAIIPLLDARTVLFQHYLELDRRVKRAASQDEVCMRMMTVPGVDPIAALTFKAAVDDPVRFKRSRTVAAHFGLTPRRFQSGEHDNPGRISKAGDRDVRATLYAAANALLMRTMAGSQIKSWGMRLMRTKGRRRAVVAVARKLAVLLHRMWVDGTEFRQEQVGGTA

SEQ ID NO: 498790 - protein, 389 aa, unidentified
MLLDHLSDGLTAIRTQFGAIFVSLELSRSNWLITSLSPGKGEKMSKHSVTAGDVAGLMKLFADFRRKAEARTGESYPIITIQEAGLDGFWLHRVLQQNGIESHVVDPASIATPRRRRRAKTDRLDGEALLRALLAYKRGEPRVCAMVVAPSPEEEDRRRLCRERQALIAERITHVNRIKGLLFAQGISDYVPLRRDRRSRLEALRTGDGRELPAHLKAQIGRELDRIELLLEQIEAVETERDALLAAARKPASEEAAPEVVTMLLALKGMGANFAAVLWSEAFYRSFSNRRQVAAYAGLAATPWQSGGIRHEQGVSKAGNPRLRTTMIQIAWLWIRHQPQSALTRWFKERSPQGRKRAIVALARKLLVALWKYVTQGVVIEGAVMKPAA

SEQ ID NO: 498791 - protein, 327 aa, unidentified
MKKNPAPVYVGMDVAKATLQVHLNGHQFEFKNDSKGHAQLSEKLANLPLPHVVCEATGGYERPMVEACHKAKILVSVLNPAHTLAASQAQGKRAKTDPCDAAALTDYGQRFQPAPTAAVPPAVREITELTLWLKQLIDNRAVVKTQAEHQVNAFVGQQHEALLAHYKSQIETVEKEIKKMVRAEAPFQQRVDCLTQIEGVGFRTALLALVFLPELGSMNRGGTAALAGLAPWTRDSGTMKGKRCIGGGRAQVRPVLYMAALSASRCNPVLALFYQTLKKREKPSKVALTAVMRKLVIHMNSELKKLAAKPVKGKVEKTKEIEKSLVK

SEQ ID NO: 498792 - protein, 373 aa, unidentified
MKENTSKTKKQKRVSGTKQDEAKESFAFYIGIDLGDKNCEVCVLDQQGDLAKGFRLAMKGADLEKYFGSIGRSRVAIEAGGQSRWVAEVIEGCGHQVFVANTRKVAYIHDSDAKNDPGDAYKLAELVFLKPRLLHPIQHRSMAAQVDLSWIRAREALVEARTQLVNTVRGLSKSFGVRLSKCATESFTARLADQVPATIRGAVAPLLEMIDHLNEQIDYYDRMERQIARERHPKYELLEKVNGVGVHTALSFMLTIGDPERFAKSRMVGCYLGLRPKQKESGESKPQLGITKAGDEYLRKTLVNCAHYILGPHGEDCDLRRYGQRIGERGGKNAKKRAVIAVARKLAVLLHRLWVSGEAYEPLRNSRKQKAAA

SEQ ID NO: 498793 - protein, 339 aa, unidentified
MKLYAAIDLHSNNSVLVILDERDRVVYERRLPNELPAILSQLQPHRKKIQGIAVESTYNWYWLVDGLMDAGYSVKLVNTAAVKIYDGMKYSGDEHDARHLAHLLRLGILPTGYIYPKEERAVRDLLRKRAQLVRYRTAQLLSIQNLVSRNTGHGIAAKDIRELDEGVVSELCGGDPTRALAVQSNLTVLRCLDEQIHRLERAVLEQAKLKPEFEKLLSVDGIGNILGMTIMYEAGDMERFAKVGRFASYGRCVNSSRWSNGKKKGEGNRKNGNKYLSWAFMEAANFAIRSNQHIRAFYQRKHAKTNRIVALKTVAHKLARACYHVLKDQVEFDLTRAFA

SEQ ID NO: 498794 - protein, 359 aa, unidentified
MQTQSNKIDFKGQNIYVGFDVHLKSWTVTIMTEKLTHKTFSQPPKPEVLNNYLLKNFPGGTYHSAYEAGFCGYWIHNKLIDFGINSIVVNPADIPTTGKEKVMKDDSRDSVKIARSLRNGDLKPIHVPTIKTLEERGLVRTRAMLVKDLTRYKNRIKSFLYFHGIEFPEVFSKTQTHWSNRFIKWLEDIEMTDTSGKSSLNALLEQSKHLRASVLQITKQIRDLAKTERYKIQQQLLCSMPGIGSLTAMIILTEIETINRFASFDQLCGFIGLVPSTNSSGENEIIGNITTRGHSALRGAIIESAWVAARLDPALNKSYHDYCRRMEPNKAIIRIARKLISRIRFVLKNNQPYVCSVVK

SEQ ID NO: 498795 - protein, 320 aa, unidentified
MSQNTTAIMNQNITSVYAGLDIAKASLQLHLQNRSYDLSNTSAGHAQLIKRLAAIPGAHVICEATGGYERAVVAALQAANLPVSIINPARVRQFARASGELAKTDPIDASMLTAFGFAFAPDPTPPRTAAEIKMAALVTRRAQLLELRVAETQRADTCAEPSLSKLFRSWLPQIEKQITKVETLIEKLLAEQTTLAHHVERLDEITGVGRITAVTVLANMPELGQLNRRQAAALAGLSPYNRDSGQWAGKRCITGGRNEVRRALYMAALSASRRNHHLKPFYDRLIAAGKPAKVALTAVMRKLIILMNHLLKNPSFSLAH

SEQ ID NO: 498796 - protein, 344 aa, unidentified
MEGYAGKQFVGIDLHRRCSVIVRTTGTGELLECVRILNDVDRLAAVMARAGEAPEVVLEATYGWYWAADALAAQGAVVHLAHPLGVKAFEYRRVKNDERDAADLADLLRMGRLPEAWIAPPATRELRELVRHRAKLVALRSHCKAEVHAVLANSGIQVVMTDLFGLAGTELLDGLALPAPSAARIASLRRLLDGIDFEIDLFAGLVRGRLARDGGYAAVQTIPGIGPTLGAVLVAEIGDITRFTAPEQLTCWAGLTPKHHESDTHVHRGSITKQGSRLVRWAVIESVQILPKTSHVGQIRDRIGAKRGRNIGTVAAARRQLQYVFYALRDGHVRALGTRSPQAA

SEQ ID NO: 498797 - protein, 482 aa, unidentified
MTFLTKDARRLDGARYFGIDLAKRETQLAVLDADGVQILQKRFATDREQFLLLANELREGDTVALEVTTNSTSIARLIRDNSNGARIIVSNPIKTKVIAQAKIKTDKIDARVLAELARVGYLPEVWLPDEDTEALRQFITDRTSLVRRRTECKNSVHSILHRNLVRQTKTDLFGTGGRLWLESIVAGTSADGLLIPELDRLRMGSLLNEIDRIDALVADLESVIASYIAVRPHLKEQLDRLLSITGVNLVVAAGLIATIGDVSRFPDKKKLAAYLGVVPSTYQSGDSSRNGRITKQGRAEARWLLIEAAEHLRKSPGPIRALFTRVAKKRGHNVAVVAVARKLIELVHHLLTHNEDYIYRLPRLTQEKRARVRFLARKKLGVEIKSAAAKSAGRTALYGTGVGIQGRKLKGDIAKQAASHAERLYQAIVEQRAARLKDPKAPLIAGTDLVFDPTRPNETDWERILTEATAKALEKIKSKNKN

SEQ ID NO: 498798 - protein, 352 aa, unidentified
MAKRTRVVTGGVDTHGRTHHAAVIDQHGRLLADAEFGAHTDGYRQLLRWLCRHGRLCSVGVEGTGTYGAGLTRFLLDHGVQVLEADRPNRKTRRQRGKSDPIDAEAAARAVLAGTATALPKRRDGIVEAIRVLRGVRAGAVKARTAAINQLKAVVVTAPAVVREPLDGRSTARQVAACARLRPVPTQLADPVQATKAALRSVAVRTLALEQEIKVADQRLRELVPKAAPRTLGLLAIGIEHAGQLLVTAGDNPDRLRGEAAFAHLCGAAPIPASSGRTQRHRLHRGGDRDANCALHLAVVVRMRYCPRTRAYVERRTKEGLSKPGIMRYVKRYLAREVYHAILADFEALHAT

SEQ ID NO: 498799 - protein, 405 aa, unidentified
MDILIERACGMDVHKDSITACTMTPEGKEIQTFSTKTVFLLQLIDWIKKHGCTHVAMESTGVFWKPIVNLLEAEDIDFLVVNAQHMKALPGRKTDVKDAEWIAQLLRHGLLKASFIPNRYQRELRELVRYRRSIIEERARQHNRIQKVLEGANIKLGSVVSDIMGVSSKDMLHAIAEGEEDPEKLASFARRTMKKKKDELELALRGYVNPHQRMMLKTILGHIDFLTEQIERLDQEVAQRVISDQEDIERLDSIPGIATRMAEQILAEIGTNIKEQFPSAAHLCSWAALVPGHNESAGKRKSSKGKKGNKYLKSALTEAAHSVGASKNYLGAMYRRTLARKGRKRAAVVVAHAMLRIAYYLLTRKEMYVDLGEDYFDKQKLGAIVRNSVRRLETLGYNVTISEVS

SEQ ID NO: 498800 - protein, 344 aa, unidentified
MDYYAGIDVSLEYSSVCVVDASGKVVREAKVVSEPEALIGWFGSLGLELARIGLEAGPLSQWLYAAMKQAGLAVELLETRHVSDAFKAMPVKSDRNDARKIAQLMRLGWFRPVHCKSTTAQEIRAMLTARKLVQSKLLDLENSLRGILRGFGLKVGKTTRTKFAGRIEELVKGHPNLQTIGQALLRARAVLLAEFNGFEKRVRAMSRLHDKARLLMSTPAVGPIVSLTFACAIDDPSRFTSSKQAGPHFGLTPKKYQSGETDYTGRISKHGDASVREALYEAAHIMLTKPIKGCSDLKSWAMRIARRAGTNKAKVALARKLAVIMLRMLKDNVPFNPAAKPATA

SEQ ID NO: 498801 - protein, 311 aa, unidentified
MTDHTIGVDISKSHLDAFRLEDGAAQRFENAAAGFRALVKWLGKAPVARIVFEPTGPYHKAFEAALAGTFPLVKVNPLQARRFVEAHGTRAKTDAVDAQMLARMGAAFGLVPPAPCSRETRVLKDLHVARTGLIKDRTRLRNRAQTQDIAVLKRQTKARLAQVERQIAELDAEIAARIEAEQTTARSRDILCSMPGIGAVTAAAMLTLMPEIGTLERKQVASLAGLAPITRQSGQWQGKSFIGGGRKPLRDALYMPALVAMRFNPDLKAKYTALRDAGKPAKVAIVAVMRKLIEMANALVKADRKWTPKTA

SEQ ID NO: 498802 - protein, 429 aa, unidentified
MEVMYERVAGLDVHKATIVACVRIHSGRQVKRECRTFSTTTDDLQALLSWLSEQRCTHVAMEATGVYWIPVWMILNDGDFDLIVANAAHVKNVPGRKTDLNDAMWLADLMACGLINGSFVPEEPLQELRSLMRSRKQLGREQTRHVQRMHKALIEANIRLDQVISDIMGASGRRIIEAMISGVRDPNQLAALASKRIKATAQELHDALHGRLTDHHRFLLKLHLGQYDALEAAIRDIDGAVDAQITRIDQQLKAAAGPGAKATPFRELIKLLCTIPGVSVLAAIMILAEIGRDMSRFPTAGHLVSWAGMCPGQNESAGKRKSTRLRKGDPWLKVTLVQCAWAAKRKKDSYYRAQFFRIQSRRGPQKAICAVAASILTAVYHILKDGTEHRDLGADYFNRRSAEAQTKRLVAQLGKLGYLVQLQPTAQAA

SEQ ID NO: 498803 - protein, 355 aa, unidentified
MSSEKYIGLDVHQATISAAVTDSQGKVIMESILETKASTLLEFLAGLRGSLFVTFEEGTWAAWLYDLLKPHVTEVLVCNPRKIPLHKQGNKSDQIDARKLAERLRLHDLKPVYHGENGIRMLRELARSYLTVVKDLSRVMNRLKALYRSWAIPCAGRDVYYRRHRSEWLDKIQEPGERCRAERLYQQLDMLQHLRQQARRELLVESRKHTITAKLRQIPSLGPIRSALAVALMQTPNRFRSKRQLWTYSGLGLETRDSGEYYVVKGQVRRRKKQATIRGLNKDHNHDPKGLFKGAATRASVKPGPFQEFYQRSLAKGIKPTMVRLTLARKIAAITLTLWKKGEDFDIAKLKSQAA

SEQ ID NO: 498804 - protein, 472 aa, unidentified
MKSKSSRKRNPVDPVAEEIPDAEHELEIERVAAIDVAKASGKVCVRLPGKTGRRFSRVWDVPARTGAVSELAEQLIESGVEKVTVESTSDYWRIWYYLLEAAGLDVQLVNARDVKNVPGRPKTDKLDAVWLAKLTEKGLLRPSFVPPAEIRQLRDYTRLRVDLTRERTRYWQRLEKLLEDALIKISAVASTLDTLSTRDMIEALIAGERDPGRLADLARGKMKAKRSELIAALDGRFDDHHGELARMLLDQIDTLTAQIATLTSRIEQLLAAMPDTRSRGDGGTGGDPDRPSTGHGVEPETAARFTDATLLTPVERLDEITGIGELNAQVVLAEVGLDMTRFPTPAHLVSWAKLCPRTIQSGPATRGGKTGRGNPYLKGALGEAAAAAARTDTFLGERYRRIVKRRGKLKALVAVARAILVVIWHLLANPEARFRDLGPDYHTQRIHTERKLRNHIAQLTAMGYRVTLEPAA

SEQ ID NO: 498805 - protein, 484 aa, unidentified
MKAKKPSMRVTSNRPANKSQPPLRPAGQMPVIHSHAAGIDVGATSHWVCVPEDAVLQEQSPVREFGAFTKDLDSLVEWLLKCGVKTVVMESTSVYWIPLFQKLEAAGLEVLLVNARHVRHVPGRKSDCKDCQWLQRLHSYGLLNGSFRPGDDICRLRTLMRHRDNLTRSGGAQVQHMQQALNQMNIHLHHAVSDLNGETGLRILDAILAGERDPKKLVELRDDQCSKSTPEELTAALEGDWREEHLFVLRQSLENYRHLLRQMEACDEELEKALAKVLVNPVGVPENERPPNPPAAQPKPGKKKKFRKLKSSTGLKRDLTAELTRICGVDLTKVIGLNVLGVLILISEIGVDMSRWRNAKAFCSWLGLCPGNKISGGKILSSRTVHVVNRVSILLRTVAPAVGRSDTWLGIFHRRMRARLGPAAANTATARKLACMVYHLLKYKEEYIGVDCLVYQEKIRKSRVIKLSKQAEELGFELIKKQAA

SEQ ID NO: 498806 - protein, 449 aa, unidentified
MSRPQVIDDQEHERIYERVAAIDVAKDTGMVCTRTPHPSRPGSQRATVWTVKARMGTVRTLGRQLARDGIEIVTLESTSDYWRIWFFVLEACGLAVQLVSAAQAKNLPGRPKTDKLDAMWLARLTEMGLLRASFVPPRAIRDLRDYTRARARLIHERTRCWQRLEKLLEGALIKLSSVASKLTTLSAQDMIKAMIAGQRDPETLAGLARRTMKAKHDALVEALDGMFDDHHGELAALLLDQIAALDATIAQLGARAAELAAAMPAAWGTDPDGTTGPGAGTGPDAPVLNAVTRLAEIPGLSPDLARAIIAETGLDMTRFPTAAHLVSWAGLCPSARQSGPRTRAGKKGRGDTWLRGALGQAAINAARTATFLGERYGRIARRRGKAKAQVAVARSILVIIWHLLADPAARFTDLGPGYYQARTDTDRKLRNHLRQIQALGFDVTLTKAG

SEQ ID NO: 498807 - protein, 334 aa, unidentified
MEQVTTVGIDLAKRVFALHGVDSAGRVVLRRTVKRDELVELVAGLSPCLIGMEAGSGAHEWARRFQAFGHTVRLMAAKFVTPYRRNGKNDGNDAEAICEAVGRPGMRFVPIKSAEQQAVLAVHRVRQGFVEERTSTINRIRGLLAEFGVVLPLRSESIRRHAREAAETLPDIARRPIQDLCAHLRELDARVLAYDREIERLARQSEAARRLMKIRGVGPLSALAIVATVGAARDFRSGRQFAAWLGLTPRQHSSGGKSRLGHITKRGDAYLRTLLVLGARSVLNTAMRHKDRISRWVLALQTRRGYHRALIAIANKNARIAWALLSRNQELRTA

SEQ ID NO: 498808 - protein, 389 aa, unidentified
MQGIATMLNCCCGIDVHKDMIEACIISGIDDAVIFRKQFSTFQSDLQEFVSWLYKNECYHIAMESTGVYWMPVYEAIEDFSPYYENILVINAHHFKNMPGRKSDVQDAEWIATLLRHGLLKGSFVPPRDIRDLREFSREYKNCKSEEVRCKNRIEKFLQHHGFKLSSVLKDITGASGMGILRKLAIKGSLNLCDVSSSLRGHTKHTSDEILCAVCGRLNTNERYLLDDLIDELTHIRRHIDKLVAKMQEISEPYSMQIAQMCSIPGIDTVSALLILAEIGNDLERNFKSPGFLSAWAGLKPRNDESAKKFKSRKILPGNTYLKSILVQSAWAAVASRKSSFHEWFWSRQARLGKKKAIIAVSRKILVLIYILIVRGDFYNPEIAFARKN

SEQ ID NO: 498809 - protein, 415 aa, unidentified
MKNHAELTHFAGLDWAKDHHDANILDGQGRVVARFRFAHSGPGWQQWREKIREYPALGVAIETSHGAAVEQLLASGVTVYPVHPQAARAYRQRQAPSGTKDDELDAWSLADALRMDGAHWRALSPQDAIIEELRLLCRDEEELIGQRTALVNQLQAALHEYYPAALEAFEDWTAPYAWAFVEAFPTPQRLVQSTVHRRRVFLHTHKLWRPGTAERRLEIFARADQFCGGEAVTRAKSRLAVALCGSLAALQLQLEGYRAAIEKLFADHPDHDVFGSLPGVGVTLGPRLLSGVGADREQYPEAQGLQCVAGTAPVSFASGQSRRVKIRWHCDRFLRHTVHLWAGCSLKSCAWAAAYYAAKRKEGMSHACALRCLAQRWLKILWKMWQTHTPYDPEYHARNQQRHGSWVLQLNPKTT

SEQ ID NO: 498810 - protein, 422 aa, unidentified
MLEETQDEQEIIERVAALDIGKAELVCCVRVPDPNGGSRRVQEVKSYSTMTRSLQVMADRLLDLGVTRVVMEATSDYWKPPFYLLEAHGFEVWLVNARDVKNLPGRPKTDRLDAVWLCKVAEHQMLRPSFIPPIPIRRLRDLTRYRIGLVSDQTREKNRVEKLLEDSQIKLSVVASDIFGVSGRDMMAALIAGERNPQVLAQMARTAMRTKIPQLEEAFVGHFSDHHSFLLTKMLARIDALDADIADLDTQIEAHLAPFADAVARLDEIPGIGVTAAAVIIAEVGVDMTRFPTPAHLSSWARFAPGVRESAGRKKGTGSTGHGDRYLARVLGEAAVGASKTNTFLGERYRRIARRRGKKKAIVAVGRSILVIVWHLLSEDTTRFHDLGPGYYDSRINPERKKRNHIRELEALGYKVTLEPAA

SEQ ID NO: 498811 - protein, 425 aa, unidentified
MNSNTNQKINQVSEKTLVIGIDIAKRTHYACAVDERGRVLQKSFPFSQTREGFDAFYERLLALRATHEKSDVLVGFEPTGHYWMNLAAYLRAHGIPFIMVNPHHVNRSKELDDNLQTKNDQKDALVIARLMRDGRFSYPRILEGVEAELRNGATLRAKIQEDVNALQNRMIRWLDRFFPEFTQVFKNFGKMAYAALEKTPLPMDIQGKTPEELLFLYRQVDGMKSPQLPKAKQLVEVAQSSIGLTEGLVMARIEIATLLDQYKLMQHQLDTLTEQLIELSKEMTDYEYLSSVPGIGDVTIVELLSEVGSLTQYEHPRQLIKLAGLTLRENSSGQHKGQKRISKRGRRKLRALLFRVMIPLIRHNEAFKQLHEYYTTRTVNPLRKKQSIVVLCGKLLKILHALCKKKVQFDKLQMMKDLYCLQEAA

SEQ ID NO: 498812 - protein, 335 aa, unidentified
MSLKLLAIDLGKRSFHCHGIDDDGVVISRKTSRAKLLETIQELGPETIAMEACASAHYWGRRFLADGHRVLLINPRFVKPFVKGSKNDAADAEGIYEAALRPTMRFVPVKSIDQQDLQSLHRARERVVCARTALINHMRGLLGEYGVILPQGAWRFLAQAQDAIAAAELSDLTRELFGDLLDELRSLDLRLDKLDQQLLRLCRTNEACRRLSKLPGVGPVIATALVAAVDDGRHFRSGRELAAWIGLVPRQYTTGGKPRLGGIGRRANHYLRRQMIHGARAVMFRLAKHDDRRSQWLKGLAARRGFNRAIVALANKTARIAWAVLTRKEDYLAAA

SEQ ID NO: 498813 - protein, 374 aa, unidentified
MLLPRQRFMLARGTKDNEHAMSQKFNSAIAVIGIDIGKNSFHVVGHDERGAIVLRQKWSRGQVEARFANLPPCLVGMEACVGAHHLSRKLNGLGHDARLMPAKYVRPYSKGQKNDFRDAEAIAEAVQRPTMKFVATKTADQLDLQALHRVRERLVSQRTGIINQIRAFLLERGVAVRQGLRFLRAELPRILATPPDVLSPRMVRIIEDLAGDWRRLDERVEGLSNEIGTIAHQDAGCERLMSVPGIGPIISSAMVAAIGAGDVFTKGRDFAAWLGLVPKQISTGDRTILGKISKRGNRYLRVLFVQAAWVVLIKPKVWERHGLKPWIEAARKRLHRNVLAIALANKLARIAWSVLARGRAFEVRKMDEAATQSA

SEQ ID NO: 498814 - protein, 344 aa, unidentified
MRILKQVAGIDVAQKELVVSLGRMHEDLTTEIYGCKTFRNSDKGFKELVAWVTRFTSAEVAVNYVMEATGVYHESLAYYLTDSGNRVSIVMPNKMSNYQKTLQIKTITDKTASQAIVSFGLEKKLDIWQKPKQIFRELRQLTRERGQLIDQRTVLKNQLHAEQSEAFPNQKSIDRMKSLIMVIDSQEKEIMKEIRELTKQDKEVCKAVALLCSIPGIALLTAAIIIAETNCFNLIRNKKQLVSFAGLDVREKESGTSVRAKPKISKKGNRHIRKAMHFPALTAIRHDERYKAIFERLVGKHGIKMKAAVAVQRKLLELTYIVFKTNKPYDKEYLKTPIVDKEAA

SEQ ID NO: 498815 - protein, 414 aa, unidentified
MQVTYEHCCGIDVHKETVVACVIVPDADGNPVKETRTFNTMTGDLRALAEWLKQKQCTHVAMESTGVYWKPVYNLMEGQFEILVVNAEHLKKVAGHKTDVADAEWIADLLRHGLLKGSFIPSAQQRAWRDLTRYRTTLTDDRTREVNRVQKVLEDANIKLASVASNVMGVSGRAMLEQLIQGKTDPATLAELAKGRLREKRELLEKALTGTFKPHHRFMLIQHLSHIDFLDEQIAKLDAELEEQMRPFQAELMRWDQIPGINLRVAQVLVAEIGTDLKQFEDAAYLASWAGMCPGNNESGGKRKSGRTRKGSKWLRRALVEAAHGAARTKDKYFKNQYHRLAGRRGKKRAIVAVGHSLLVTGYYLITRGRNYEDLGANYFDERNKEMVKRQAVKRLEKLGFAVELKPTVVPEPA

SEQ ID NO: 498816 - protein, 318 aa, unidentified
MQAQAAVVYVGIDISKASVDVDSYPVAQPACFTNDEPGRAAAASYLRGLQPSLIVVEATGGLETPLVGQLATAGLSVAVVNPRQARDFAKAIGVLAKTDRVDAQMLARFAQAVKPAVRPLKPEETLALEAILTRRRQIIEMITAESNRLSSAAPRIAKQIRQHIAWLEKRLDEADQDLDGMLRQSPVWQHKAQLMTSVPGVGRVTAVTLLAELPELGALPRREISALVGVCPYSRDSGKYRGRRTIWGGRAVVRATLYMAAIVASRHNPVIRAFYQKLVAAGKLKKVALVACMRKLLVILNAMLKHDTPWHHPAQSAA

SEQ ID NO: 498817 - protein, 428 aa, unidentified
MSNQEIIRRRQYCQIIKEINGSDQHLVVGIDVGKDKHHAFMGTATGISLYRKLIFENNLNGFSRLITTADQIKAQNGLTKVVFGLEPTGNYHKPLASHLIGCDRDVVLTAGQSVKNNRQVLNGRWDKNDTKDAANVADLVSRGRCLFYDVPSQEIVELRTLLSLRRRLKKEEHSLRMRIRNGLLAQYFPGLDQFYNACESESLAIVRWCLNPDKIASMEFDHFFKMVTRTRRGIAQKLRLEKIYQAAIDSVGCAMGPAAEFEAELLVEKINQVRGQLHDTEELIEEICLTFSEYSYLMTIPGFGPYVSAKVLAVIADPFRFDNRKQVIKLAGYDLCASRSGKTSDQAVPVISKNGNGEFRYVLYIAANVAASRTEHFRAYFTKMLQGRERERGIKTKMRVKLAVKMLVIAWTLMKKKEVFDPDHLNID

SEQ ID NO: 498818 - protein, 340 aa, unidentified
MNIKRIGLDLAKNVFQIHGVDHHEKVVLRKTLRRAHMMTFFSGLSPCLIGIEACGSSHYWARELTRMGHTVRIIPPKLVKPYLKGNKNDANDAAAICEAISRPGMRFVALKSEAQQTLQAEHRVRARIIRERTALCNEIRGLLSEFGLVLPVGINHVRKALPEILSQQEQWNDRFIRLLCELSEEMQMLDERISRHDRRLQQAARDDIRIKRLMEIEGFGPIVASALVAAVGDAKQFKNGREMSAFIGLVPRQHSSGGKERLGHISKRGDSYLRTLIIHGARAVLRFSAGKTDRRSLWLQSVAERRNNNIAVVALANKNIRIAWAILNRGEEYHGVKNAA

SEQ ID NO: 498819 - protein, 406 aa, unidentified
MSIYIGIDWSQDKHDVAFMNAAGAIIARLTIPHQPDGFGKLEATRKQLAVTATDCLVGLETAHNLLLDFLWDQGYQQIYVIPPGVVKSSRGRYGHSGARDDTLDAQLLADLLRTDRARLHPWRPDSQLTRQIRAQVGFISYLTHSANRTHNRLRAALLRYYPQALELFSGLMVPTTLAFIAAYNTPQALDALSYEAFVAFAHQQGYWNQQVLLACYARLQHTPLQASPATVAVYQDEAQILAQQLRELILTKRQVQRDINTLFALHPDQAIFSSLPGTGDFLAPALLAKLGDDRDRFPSAASLQALAGTCPVTVASGKHKRVIFRHACDAEFRQIAQQWARCSLRKSVWAVAYWQHIRPRSTSDHDAYRRLANRWLAVLWKLWQSREPYDEAYHLQQRRLRSQPVA

SEQ ID NO: 498820 - protein, 354 aa, unidentified
MQQVTQLDFSGQKIFAGIDVHKKSWKVSIRSEQMELRTFSQNPSAGELSTYLKRNYPSADYHVVYEAGFCGFSHQREFSNAGINCIVVNPADVPTTGKEKQRKSDTVDCRKLSQSLSKGDLTGIFIPCIEQQDDRDIIRTYNQTVKDQTRYKNRIQGWLHFQGITFGESEGRYWSNNFTNWLKNLSLSPSARTALDLKLQGYLQARSMVLAATRQVRILSRQARYKERIALIRTIPGVGEITALLFVTEVGDVNRFKSFDALCDYVGLVPNTHSTGDKEKVSGLTRRANHQLREKLIEASWTAVRTDPALTMPYNNYCKRMKKNNAIIRIAKKMLNRIRYVMKNECPYVIAVVK

SEQ ID NO: 498821 - protein, 349 aa, unidentified
MSQHLNSAVAVVGIDIGKNSFHVIGLDDRGAIVLRQKWSRGQIEARLANLPPCLIGMEACVGAHHLSRKLKAFGHDARLMPAKYVRPYSKGQKNDFRDAEAIAEAVQRPTMKFVATKTADQLDLQALHRVRERLVSQRTGIINQIRAFLLERGVAVRQGLRFLRAELPRILAAPPDVLSPRMVRLIKDLAEDWRRLDERIDRLSNEIAALAQHDAGCERLMSVPGIGPIISSAMVAAIGTGNAFSKGRDFAAWLGLVPKQISTGDRTILGKISKRGNRYLRVLFVQAAWVVLIKPMSWDRHGLKRWIEAAKKRLHRNVLAIALANKLARIAWGVLAGGRTFEASKLQIA

SEQ ID NO: 498822 - protein, 418 aa, unidentified
MRRVIGMDIHRTFAEVVFWEDGRLRWHGRVDMTRSGLEGFGRSLVKDDEVVLEATGNAMAVVRVLSPYVARVIMANPLQVKAIAHAHVKTDKIDAGVLASLHAAGFLPEVWLPDAETERRRRLVARRNQIVRHRTRVKNESHGILAAHLVPPCPHAELFNGPGRAWLARQALPDDERAAITRHLRELDRLGEDLAVLDREIAEATVDDPAVRRLLTIAGVNLTVAAGLVAAIGDIRRFSSPQQLVSYFGLNPRVRQSGLGLAQHGRISKIGRAHARALLVEAAWAAAKAPGPLHAFFLRIRARRGHQIAAVATARKMAVLVWHLLAKETDYLWARPALVAHKLRALELQAGRPMKKGNQRGPAYAYNVKALRNQEMAIAEQAERAYQHFVAQWQPNPTAKRRASSMVASSRGASRQPG

SEQ ID NO: 498823 - protein, 355 aa, unidentified
MDSTKYIGMDVHKETISIAVLNSSGKLVMETILETKASMLVQFVQGLRGNLHVTFEEGTWAAWLYDLLRPHVTKVVVCDPRKNALLKTGNKSDRIDARKLAELLRSNLLRPVYHGEHGVQSLKELSRSYLTSSGDLTRVMTRLKAVYRSWAIPCAGKQVYAPRYRSEWLGKITEAGVRRRAEFYYQQLDALRSLRLQVRRELLAESAKHKASKLLCQIPSIGPIRAAQLIAILQTPHRFRTKRQLWAYGGLGIETHSSADHRYVEGQLRPSKRPVSLRGLNRNHNHELKNIFKGAAIIAATKAGPFQEFYAALVAKGIRPEMARLTLARKIAAITLIVWKKGVCFDAQHLKPQTA

SEQ ID NO: 498824 - protein, 346 aa, unidentified
MSLMFFLGVDVSKKTLSVVLTDHKDKTLWSNKSIPNDEIGFKKLVQTVIKNVSKKAEGKEEYSIAAGMEATGVYGERLAYYLNGNSDDGRIITYVLNPAAVRAFGNSVKAPNKNDSADSQLIASYLSMAITKGQISPWNAPSPEVCALKELSRRRDDLIGLLESEHNRLEKLEYMQEPSEAIVENVKEHICYLTDSIRSLEKKIEDHIDDDPRIRDDIELLRSIPGIGEVTSVTLQGESYGLNNFTSVKGLVSFVGIAPSEHTSGTSVFKRPKISRRGNARIRHHLYMATLVATRVNPVIKEFYERLQNRGKCKKLALVACMRKMLHIIWGVIKNRKSFDPCYSLK

SEQ ID NO: 498825 - protein, 486 aa, unidentified
MLFVGDDWAEDHHDVEVVDEDGRVLARRRLPNGLDGIAVLHALIGEHLPEGWADWEPAQVAGMVKVGIETDRGPWVAALVAAGYEVFAINPMSVARYRERHSTSGAKSDSADAHVLAEIVRLDRAHHRPLAGDSDQGEAIKLTARSHQSLIWDRTRHVLRLRSALREFFPAALQAFPDLDAPDALELLRRAPDPDQAAQLSRSTISAALRRANRRDIDDKTTRLQAVLHAEPLRQPTVIQAAYAAIVTSEVAIIETLNTQISQLGEVVGAHFGRHRDAEIYASQPRLGAILASRVLGEFGDDPHRFVDAKARKNYAGTAPITRASGKKKIVLARYARNRRLGDALQQWALCSMRGSPGAKAYYQQLRDRNIGHQAALRRLANRLVGILHGCLKTGTTYDEHTAWDHHTKCPASRSWQGFGGWKCRGGGVGQAHVHVLGPVPGDGLVRPDLVVLDPVFLGVLGEHDGVVDLVDVEPLVLQGAEAAFA

SEQ ID NO: 498826 - protein, 347 aa, unidentified
MKFYTTLHKYYCGIDLHARLLYVCILDERGNKVLHQKIKADPNQLLKLLKPYIGQVVVGVECMHCWYWVSDFCHELKVDFILGHALYMKAIHGSKAKNDKIDSYKIASLMRGGNFPLAYNYPSEYRTTRDLLRRRTHFMRHGASIKAHVVNTDSQYNLPAQSLNLKNVSAREGLRHHYDDPVIQRMITFEMNILDCYIRELKHIESFIEKEARDDFPVLRNIIRTFPGIGQILALTILYEIGDIKRFASVQKFASYSRLVKCKAESAGKIYGTRGNKIGNGYLKWAFSEAAVLYLRGNDKAQRYLAKLQKRMSKGKALSALAHKIGRCIYFMLRNKQVFDEDKFLKG

SEQ ID NO: 498827 - protein, 343 aa, unidentified
MAKLNVIGVDLAKNVIQISVLSPSNRELRNSALTRRKFSEFLARQRPGLVAFEACATSHYWARVAQRHGHEVKIIPAKAVTPFRQGHKTDENDALAVAEAASRPNVKLAPLKTVEQQGMQAIQRSRELLVHERVSLSNHLRGLLMEFGIVIPQGLTALYRQLPEILEDGDNELPDVYRPTLNLLYRRLCDLREDLEQLNDELKILVQQHPVCRRLTALEGIGPVCSVLLYATLGTGEAFANGRQFSAYLGLTPKQFSSGGKVNLVGISKRVANRRLRAVLIQGARAYVYHMKEPKTAKDRWLWAIVERSGKCKAAVALANKNVRTAWAMLTQNTEYQRYPLAA

SEQ ID NO: 498828 - protein, 382 aa, unidentified
MCPIEACPARRMSPVRITREAEQMIMIGADSHKRSHTVVALDEVGRKVGQKTVVTDSEGHLQLLRWSRQFEEVEFALEDCRHLTRRLEGDLLAAGQRVIRVPTRLMADARRAGRERGKSDPIDAEAVALAALRHPDLPVASLDGSAREVKLLSDYRRDLVRQRTQLCNKIRWFLHELNPSLDVPSRGLRRRCVITRVEAELGRFDGIVARLAREHLARCAELNQQIAVLDRELNTLMKDLAPTLLTVPGCGVLSAAVLVGETAGVDRFKSKDTFARFTGTAPIPVWSGSSEGKVRLNRGGNRLTNTALHMIAITQSRGHGPGRAYIEKLQARGKTRTEAVRLLRRRISDAVFAALRTDAIHRSATPGNRTIVPPNTAIRTAA

SEQ ID NO: 498829 - protein, 338 aa, unidentified
MQTYAGIDLHSSNNFVGVINGKDKRLYGKRHSNRLEDVLRALDPFKESLKGVVVESTFNWYWLVDGLQENGYQVHLANPSAMKQYEGLKHTDDQWDSFWLAHMYRLNLLAEGYIYPKEHRAVRDLLRRRLLFVRQRTAQILSLQSMISRNLGFKMSNNEIKKLKPEDIEKLFDCANLVFMATNSWASIEFLKHIIKGIEKRVKSQVKMRKEFEMLHTIPGIGNILGLTIMLEVGNIGRFPAVGDYSSYCRCVESKRISNGKKKGENNKKNGNKYLAWAYVEAAQFCRRYCVKAQSFYQSKEAKTKPVVAIKALSNKLSRASYYIMRDQVAFDEDKLFC

SEQ ID NO: 498830 - protein, 386 aa, unidentified
MRTNNHTMKVITLYLGLDVHKDSITISIAEPGPKGEIRLFGTITNDMHALEKALIRIRKAHPNAQLEVAYEAGPCGFGIARRLKQLKVPCLVAAPSLIPKQPGSPFKTDKRDSRNLARLLRSGELTAVYVPEPTDEAIRDLCRARTDAVDDLRRCRLRLKSFLLRHDYRYQGKANWSQPHMRYLRELVLPHPAMKAILEEYLQGIDAAHQRVQRIEASMLTLLETWRLKPAVKALMAFRGFQLVAAMITVSELGDIHRFAHPRQLMTYLGLVSVEHSSGPKQHLGSISRCGNGHQRWLLTECAEHYLLPPKVSKELSCRQEGQPPEVRALSWKAQNRLHLRFTRLLGRRLQRNKAKVAIARELCGFIWALLRTQSCYAQPSATAAR

SEQ ID NO: 498831 - protein, 312 aa, unidentified
MTEHCYCGIDVAKDRLDVQVLPHRQRFSVDNSATGWAELVERLHALAIAAVGIEPSGGYERGIIRTLLAAGLSVRRINPSKLRQFARARGILAKNDRLDAQLIAEYVSIMPTRVVQRAAIAERLAEVVTMRRQLCDEHVAIENQAAHVEDAILRRLNKRRLARLKADIHLLDKRMAEIVAADALLAQRYELLTSMRGVGPTLAFTLIALLPELGQMSRKQIAALVGLAPYDFDSGKLKGHRCIYGGRMPVRNILYMAALSAARYNPVLKIFHNRLAATNKKPKVIIVAVMRKMITTLNAMVRDNAAWQPRTA

SEQ ID NO: 498832 - protein, 356 aa, unidentified
MSTIVSHQYAYVIGVDTHAATHTYAVVTNSGVHVDTQTFPTTKPGLRRALSWAGRRTDGDLDSLWVIEGIGSYGAELAKAVDTAGYEVVEAPRMSNKTRRGIGKTDPIDAFRIASAVLPLATDRLRKPRGHDDIQSALQILLTARDELARERTRAINALTALLRTIDLGIDARRALGMKIISQIASWRSRKEPISLAIARSEAIRLAQRVRQAHTEILQNDKQLSNLIAQSPAADLTNETGIGPVTAATMLVAWAYPGRLRNEAAFAALAGASPLPASSGNTVRYRLNRGGDRQLNRALNVIAMHRTIHDPETQAYVEKRRIEGKTDREIRRCLKRYLARRVYRHLNQAAHSAKRY

SEQ ID NO: 498833 - protein, 466 aa, unidentified
MSKSQNPTKEVIPIMKKRIYRRMPVNDFQPQSISAADLGGKLVFAIDVAKVDMVAALAGANGHVLHTISWKAPEENPRVLSILRGFRTAGLTVEAVMEPSGTYGDVLRHQLEQDGFPIFMISGKRTHDAKEIFDGVPSLHDAKAAAIIARLHADGSSTRQSDEIPERRQLKAALAILDLHQERYLQLVHRLESWLARHWPELPTLIELTSSSLMALLARIGGPVNVAASPEQAAKLLRGISHRLLPDDKIAAIIASANTSVGVPLVGLERDALMAIAADAYRAHRAFATARTTVAQLADTTPAATLTPVVGPTTAAAVFAEVGDARSFPCSRAFLKAMGLNLKEKSSGTVQGQIKITKRGPSRVRQLLWLAAFRWIQDDPIANAWYQRKKQRDGGRASRAAVALMRKLAKGLYHVGRGGTFDSSKLFDLRRLQLAGARFPKGDLPLHRLSVSCKSDVCLEAPCGAF

SEQ ID NO: 498834 - protein, 385 aa, unidentified
MSSRAAVEPAAAGRSIIYLGLDVHKDSITVAVLPAGAKTPTRVERLPNDLPKLKRWLERVAREGELRACYEASGAGYVLHRALRDWGYACEVIAPSLIPTRSGVQRKHDTRDAADLARLYRAGELTAVRIPSEADERVRDVVRCRETFQREILKSRHYILKFLARRGFVFREGTNWCTPHLKWLQHLTTDGSPLAPHDRLVYREYHALLLYKLQRRDELDRQIEQLAELPTLAPMVRQLQCFRGISLHSAMVLATEIVDWRRFQRPAQLACYLGLVSREDSSGDRQRLGSITKAGNSHCRHVLVQAAWSYRHRPQTSVDLARRQQGQPPAVITHAWKAQQRLHHRFNHLAYRKRPQIAVVAVARELVGFLWAVMQEVSPVAQHVA

SEQ ID NO: 498835 - protein, 323 aa, unidentified
MPSTYVGIDVAKATLQVHLNGHQIEFNNNSTGHAKLTKKLAQLTRPHVICEATGGYERPVVAVFHQDKILVSVLNPAHTLAAAKAQGMRAKSDCCDAEALTDYGQRYQPEPTVPVPQELREMTELALWLQQLIDQRAVAKTQAEHHDNAFVRHQHQELLAHYDEQIKTVEKEIKKRIQSQPEFQQRLDCLVEIQGVGFRTALMMLVLMPELGQMNRGGAAALAGLAPWTRDSGTMKGKRCIGGGRAQVRPVLYMSALCASRCNPVLAPFYAALKQRNKPSKLALTALMRKLVIYMNHKLKALATMPPAQETKNATKPKKALAN

SEQ ID NO: 498836 - protein, 384 aa, unidentified
MQRATNTATVSANTLHCALELSKKTWLLAIQFPDREQPSVYPVKGGDAGALMTKLIAARDRWAKVSGSPPSIVLCYEAGYDAFWLARFLKGHGIECLVLDPGSLEVNRRSRRVKTDRIDLKKLLRTLTAWCRGERHVCSIVRIPTIDEEDLRRSHRERSRLICERTAHINRIKGLLFAQGIRVGNISSKTLTLDKLVTGDGHRLPPRLAAEVEREIERLALVQKQIDKVECERDTAPAACKETEKKRHLLLQLKSIGPTNAALLSREVYYRHFDNQRQLGSFIGLTPSPFKSGDEEHCQGISRTGSGHVRAAMIEAAWLWVQHQPKSALTRWFNQRTAGQSKRVRKIMIVALARKLAIALWRFVELGLVPEGAILSPRVIAKAR

SEQ ID NO: 498837 - protein, 407 aa, unidentified
MDLVHPTCAGLDVHQQTVVACVRVGSGKTVTYAVRTFGTTTQELLALSDWLSTLGCTHVALESNGVYWKPVWHILDGHFELVLANAMHIRNIPGRKSDVNDATWIADLLAHGLIRSSFVPHEPIQELRDLTRTRKQLVREIAQHTLRIQKTLETANVKLTAVLADIMGGSGRAILQALVAGERNPDRLAALASDRVHASRADLVAALHGRVTAHHRFMLKLHLTQIEALETAVREVEARLGEALAPFRVAVDRLITMPGISETAARVIVAEIGFDMSRFPTAAHLVSWAGLCPRLHESAGKRLSTRIRSSNPWLKTTLVQAAWSAARKKDSYLRAQFLRLKSRRGPKKAVIAVAASMLTAAYYMLKDGVDYRDLGGDHFDRRDKAKLAKRLIARLHDLGLTVEVRAA

SEQ ID NO: 498838 - protein, 343 aa, unidentified
MSVRTIGLDLAKSIFQVHGVDAEGRAVLKRRIRRRDLLAFFEGLPACLVGMEACSSAHHWARELVVLGHDVRLIPPQYAKPYVKRNKTDAADAEAICEAVARPNMRFVPIKTRESQGVLSLHRARSLMVRQRTATSNAVRGLLSEFGIVAGKGLRRLGDLRRAMEDTSGTLLPPEARTALEGLFDHVEALTEKIEALERRILAWHRQSEASQRLTTAPGIGPITATALVAAIGDASQFASARHFAAWLGLTPRISASGGREHIGRISKGGDRYLRTLLIHGARAMVGTSFRRGVRPRPWLQALIARRPVNVAAVAVAHKTARALWAMLRRGEAYRHPAPVMAA

SEQ ID NO: 498839 - protein, 416 aa, unidentified
MKKGQDTRGYERYLALDIHREYILVGGWNEKKEWILTPRRVSIEKFPEWAKKNIREGDIVVLETTTNVWVVYDMVVPLASRVLVANAAEVWELAGARVKTDKEDIKRLLKLLVGGIVPEVWVPPMEVRELRAFISYRNRLVTTSTMIRNRLQSLLHKHNLLLSEAGLLDQTWWDAQKNISTLEKMQIRQELVLLQEVEKLKDAVDEELQRQSTSPTWGKQALQIMQLPGIGFVVAMTVLSAIGDISRFESAKQLVGYAGIGAGVHDSGKTHKEKKITKKGRRELRWALVEAAWRAVRMSPFWKEEYEKHLKRMRKPNQAIVVIARKLLIAIWHVLSKAETDIHASEEDLAYKMLLLSWSLSEDVRLGLTYKQFAKYALMKLGVETDITRFVRKNVPRRLAPREEVLARMTELSLTA

SEQ ID NO: 498840 - protein, 376 aa, unidentified
MRTFGTMTKELLALSDWLCANKCEAVAMESTGVYWRPIHNVLEGSGMELLLVNAKHFKAVKGRKTDMKDAEWLADLLRHGLLTGSFVPERGHRELRDVVRYRRGLIQDRAREANRIMKLLEGANIKLKSVISDVLGVSGRAMLELLAAGETDPGRIADGATTNLKAPREQLELAVEGLMSDDQRIMLVTQLHHVDFLTERIEVLNARIEERMHPFDEVITRLDGIPGIGRRGAEELIAEIGVDMSRFPSADHLCSWAKVCPGLNESAGKRANTSTGKGNRYLRSMLAEAAWAASKSRDTYLSSLFWRIAGRRGKKRAVIAVANSILRIVYYMLRDTTEFKDLGGAYFDERSFHAVTRSSVKRLERLGWEVHLVKVA

SEQ ID NO: 498841 - protein, 326 aa, unidentified
MEHELHYIGIDTAKEKLDVDVLRPDGRHRTKKFANTTKGHDELVSWLKGHKIDHAHICIEATGTYMEPVAECLYDAGYIVSVINPALGKAFAQSEGLRNKTDTVDARMLAEFCRQKRHAAWEAPHPLERALRALVVRHQALTDMHTQELNRTETAREVQRPSIDAHLLWLEAELKRLEKQIKDLTDDDPDMKHRRKLLESIPGIGEKTSAVLLAYIGLKDRFAHARQFAAFAGLTPRRYESGSSVRGASRMSKAGHVSLRRALYMPAMVATSKTEWGRAFRDRLAANGKKGKVILGAMMRKLAQVAYGVLKSGVPFNASRHNPVAA

SEQ ID NO: 498842 - protein, 455 aa, unidentified
MRKPQVIPDEDHEVVCERVAAVDVAKASGVVCLRTPDPQRPGRFVNRIWEDVPATRARIAELGGELLRCRVQMVTLESTSDYWRIWYYVLEGIGLAVQLVSASQAKNLKGRPKTDRLDAMWLARLTQWGMLRPSFVPPAAIRRVRDFTRARTDLVRERTRVLQRLEKLLEDAMVKITSVVTDGLKAKSSVAMVAALVAGERDPRTIADLAKGSLRGKRDQLAEALDGMFDSHHGVIARMLLDQVAFLDQRITAMEDQAIAALAQVEESWGVDATGETGPGRGTTPDSPVLAAAHRLAEIPGISVWLAIVIIAEIGLNMAVFPTPAHLVSWLGLCRSAAQSGTRHGKGRQKKGNSYARGAAGQAALAARGTATFLGERYRRIARRRGGAVAQVAVARSIMIIVWHLLNDPAARYRDLGPDWHARRTNRDKKIRTHIQGLKALGVTVAITDDEPQAA

SEQ ID NO: 498843 - protein, 387 aa, unidentified
MPQPNDLSRSLVPLDQDSTIIAVVEMSQSSWLVGGVLPGIERQPRKKLEPSPERLLALLHRWRDESVRAGRTITRIAVAFEAGRDGFWLARWLEARGVEAHVIHPSSVAVSREHRRAKTDRLDTELLKRGFLGWLRGERGHCSMARVPTIAEEDAKRPNRERECLVKERTRLVNRMKGTLARLGIRNFRPTLRNAAEHLAALSTPEGSPLPPNVAAELERDIARLRLVISQIKQLEEVRRQRLEEQPERGPHAMVRLLARVVGIGIETADMLVNEVLSRPLRDRRAVARYAGLTGAPDESGARRREQGLAKAGNARVRRGMIQLAWRFLRFQKNSALAQWYQARTADHRGATRKTMIVALARKLLIALWRFVTIGEPLDGVTLRPAS

SEQ ID NO: 498844 - protein, 318 aa, unidentified
MSTGNDFYGVDVAKAELVIARKGEPGICTIANEAGAIGLWLKTLPPGSTVAMESTGRYHRLLVELATASGCTGYVLNAKDVSFYAKALGGRSKTDKVDAHVIARFIAEHHEGLHPWEHAQPHAAEIWELLLRRADIVVHRASLRQTMRDAQAIAVAAKQFDDSFEGLLEAIDERIESLQRQDAQMAAASRRLQTVKGVGPQGGAMLAALLSRIPFANADALVAYSGLDPRAQDSGQKKGRRRLSKRGPPPLRRQAYLMAKAAARSKVFKPIYEALKARGFAATQALVIMARKLLRVAFAVWKSGKPFDESVIAPAAGA

SEQ ID NO: 498845 - protein, 412 aa, unidentified
MNAVGVDVSKGKSMVTIRRPFNETVAKPFEVRHTGSELKQLADYLKSLDGETRVVMEHTGRYYEQIAQYLHDAGLYVSAVNPKLIKDYGSGNSLRHVKTDKADAKKIAGYALDRWAELRQHTPMDTIRYQLKTLNRQCGLYTKTKTMMKNNLIALLDQTYPGVNALFDSPVREDGTQKWVDFAASFWHVDCVRGMSQAAFVQRYAKWCRQHRYQARVGRAESIYEGSKDLIAMLPKDAMTKLLIKQAIDALNAVSATLERLKAEMLKLASQLPEFPVVMAMHGVGDTLGPQLMAEIGDVARFAHRGAITSFAGVDPGANQSGTHEAKSVRTSKSGSPELRRALFLVMDCLIQTKPQDDPVYLFMDKKRAEGKPYLVYMTAGANKFLRIYYGRVREYLALLEEPSAPAPGEHI

SEQ ID NO: 498846 - protein, 397 aa, unidentified
MIGIDPHKGSHTAVAVTAAEEPLGKVRVRACPGQAGQLVAWAAAWPERIWAVEGAAGLGRLLAQQLIATGERVLDVQPKLAARVRLLHTENTGKSDPNDALSVAVAALRSTTRREVIADDHAMVLKVWAKRHRDLSRARNQAACRLHAVLCDLVPGGVADEITAGRAARILGQIRPAGPAAEARRELAAELLADIRHLDAQRREVKKKLATAVKASGTSLTEVFGVGPVIAATVIGDVVTVARFPTRDRFAAYNGTAPTEVSSGEKKIYRLSLRGNRRLNHAIHMAAITQISHAHSQGRAYYQRKLAEGKTCKEALRCLKRRISDAIYARLRADARTKSPGGQLGNHSVSRAARLTPRTPALRASHSRAQGQPTTPGKTHAAHAAARASAKKARRAT

SEQ ID NO: 498847 - protein, 315 aa, unidentified
MSDVPCFIGIDVANAQLDIAVRPSGERWAVPNDTSGVTMLVDQLQALSPTLIVLEATGGLERLVTSALATAGLPVVVVNPRQARDFARATGQLAKTDALDARALAHFADVIRPTPRPLPDARTQELRGLLGRRQQLIVMRTAEQNRLAGTSGRLQTDIAAHMTWLNAAIATLDDDLETLLRASPLWRDNDDLLQRAKGIGPVCARTLLLELPELGTLTRQQIAALVGVAPLNCDSGTLRGRRMIWGGRAHVRTVLYMGTLVATRFNPQIKVFYARLLAAGKVKKVALTACMHKLLTILNAMLKHRTPWQPQEVQS

SEQ ID NO: 498848 - protein, 348 aa, unidentified
MQNDTIGVDISKGHLDAHRLSDGATRRFTNDKSGHRAFVKWLAHGSVERVVFEPTGPYHRAFERALGVAGVPFAKVNPRQARRFAEAIGRLAKTDRVDAAMLARMGAMLELKRRPPRSDALLVLKELHLAREALVKDRTAAKNRRKVLTESLLKRQNTQRLEQINRQIAAIEAAILEQIRADPDLAQRFAILTSIPGVSAVTAFALLIEMPELGTLEAGQAASLAGLAPVARQSGRRTGRDFIRGGRAAVRQAVYMPALVAARFNPDMKAKYRQLIDAGKPAKVALTAVMRKLIVLANALLKPDLDTPSASQSRATGQTERCFAMKPNFMSTPSRSRPRPFLGCRAPP

SEQ ID NO: 498849 - protein, 307 aa, unidentified
MQGIGIDVSKATLDVAVHGHGTTHQFKNTPAGIKRLVAWLAAQAESRAVMEATGGYEEPALEACAQAGLWVARVNPRQARDFAKATGQLAKTDTLDARVLAEMAAVLHPRLRRHVPAPAWQAELKAWLVRRRQVIDTLQRSHQQSLTAPKAVRAAMRNSLAALRKELTTIDAHMRALTRQYATPALQSAKGLGPIFQSTALAMLPELGQLSRQQIAKLVGVAPLNRDSGQLQGKRMIYGGRATVRIALYMATLSAVRWEPALRDHYQQLRSRGKVAKVALVACMRKLLGIVNARRRDELREEGLLAG

SEQ ID NO: 498850 - protein, 354 aa, unidentified
MLMIGVDYHPSFQQIAFCDQDTGECGERRLTHSDGEAERFYRELKQRGVSVRVGMEATGYACWFERLLGELNYELWIGNAAEIQSKRVRKQKTDRNDAQLLLQLLLEDRFPRIWVPSPENRDLRQLLWHRHRLVQMRTRILNQLQALAMKEGWRWKKKLFSEQGRRELEKLVLAPWASRRRQELLSLLDQLNPIIGELTASAEQEARKRPEVVRLMTHPGVGALTALAFVLILGRPERFRCGKQIGSYVGMIPSEDSSGGRQRLGHISKQGNSLLRFLLVEAAQAAVRNNAEWKRRYIHLAMRRHKSIAKVAMGRRLGVRLYWMWRNGCEYSSSFEFGSYTGELGTGHGVSRTL

SEQ ID NO: 498851 - protein, 437 aa, unidentified
MRRKKKNANKSINLQVLPLVHPNAAGIDVGAKEHVVAVPCDRDPKPVRTFQAFTPNLHELAAWLKRCGIETVALESTGIYWISLYEILEQYGFEIRVVNARHVKHVPGRTKTDVLDCQWIQKLHSFGLLNGSFRPDQQIRKLRTYMRLRDNLVAASTQAVHHMQKALFEMNVQLSNVISDIVGQTGLRIIEAIITGQRDPMQLAALCSTRIKASRETVAKSLHGNWDEALLFALKAALETYRFSQTKIQECDGCVQQHLAQFESRAEAINSSQDSKAQLHRVCGVDLTKIPGIKEQSAQIIISEVGLDMTKWKTEKQFCSFLGLCPDNSISGGKVLHRATRKVYNRAADTLRLCAQSLTHSKSALGAKYRRLRARLGAPKAIVAMAHHLARLVYRMLRYGQNYVEQGIHQYELKFQLQRVKWLRKEAKSLNLQLVPA

SEQ ID NO: 498852 - protein, 371 aa, unidentified
MVKIAKYVGLDVHKDTIAVATCEGGPLASAKDEGILPHDLAKLRRKLLALAPAAHLHVVYEAGPTGFGLCRDLKAHGISCIIVAPNKVPLLPGPRIKTDKRDARYLAWQLRMGTLAGIALPDEELEALRDLIRAREDALHTRRRTRQQLGGLLLRHGERWPGKSTWGPKYLEWINSLRLGSEAQELAKQQYLGEVKHFDERIEMLTEQIERLANLLRDEHGELYRALQGLRGVSTIVAATLVCELGDLRRFGTASQLMSYVGMVPREHSSGARVWRGSITKAGNPHVRRVLIEGAWSGRLKPTTPERLKRRQQGLDQAVIDIAWKAQKRLYARYCRMRARGKPQNVAIVAMARELLGFIWSIGQQVGKKRA

SEQ ID NO: 498853 - protein, 339 aa, unidentified
MDEVSMIGLDLAKGVFQVHGVDTTGDTVIQRQLRRGQMIGFFAKLPPCLIGMEACATSHYWARELTALGHEVRLLPPAYVKPYVKRGRKNDATDAAAICEAMASKGMTFVPVKTPEQQAGLMLHRARRLLVTQRTMLANAVRSHLAEFGIVEAPGEAGLGRLIPLAVDAADPSLPVAAREALAMLAAQLKDAEIKIEALDREILAWHRAEDASRRLATIPGIGPVIASTIVATVGDPSRFRTGRDFAAWLGLVPSQHSSGGKSVLGPITKMGDRYLRSLLVLGATAMLRRKTSGYGPWLASLLARKPARQASVALANKMARIAWAILAHGGIYRKPAAA

SEQ ID NO: 498854 - protein, 412 aa, unidentified
MDVIVQRPAALDVHKEQVTACVRLPAADRSRSQEVREFKTTVGGLLVLHDWLQAHGVTQVAMEATGVYWKPVWAILEDDFECILVNARHVKQVPGRKTDVKDAEWLCQLLEAGLLQASFVPPKPIRELREFTRYRAAQIKERQREANRLHKALEPAGIKLDCVASDILGKSGRDMLDALCQGTTDPEVLAELARGRMRTQIPQLKEALQGRFDARRALLVGAILAHLDFLDEQIERLSDAIEEQLRPFQPAVELLRSLGGIETRSAQNIIAEIGTDMSIFPTADHLCSWAKQCPGNNQSAGKRKSGKSPKGPKWLDDTLKHVAMGAIRTNDSYLQAQYKRLKPRLGHGRALGAVKHSILYAIWHMLTNGELYRDLGGDYFRKRDPERQTKRLIAQLERLGHKVTLEALPEAA

SEQ ID NO: 498855 - protein, 344 aa, unidentified
MTKISTIGLDLAKNVFQVHGVDASGAVVLGRQLRRAAVEKFFAQLPPCLVGMEACGSAHQWARVISGYGHEVRLMPPAYVKPYVKRNKNDGRDAEAICEAVGRPTMRFVPVKSVEQQATLAVHGTRALLVRQRTMIANALRAALSELGIVAAQGYEGLRELMARLQEPSDEIPEMMRGALLLLAQHWQALDTDERVLERQIAKAARCDGEARRLMEVPGVGPIIASTVLAKVPDAKVFRSGRDFAAWIGLTGRDHGTGGKHRPGRISKQGDRVLRALLISGASAHLRQQKRRGINDPWLRELLARRPYKVAMVAFAAKTARIIWAMLVKGEHYRDRASAPAAAC

SEQ ID NO: 498856 - protein, 358 aa, unidentified
MKADNNSTSFFENVLLFIGIDVHKAKWVVTVRTYDLELKTFSMKPSAEELEKFLLKNYPGAEYRIVYECCFSGFWIYDYFSERGYKIIVTPTNRIYKDGSIIKTDTIDSRKLALQLSRELLREVIVPAKRIREYKYIFRIYDKQKMRQGQILRQIKAFLEQKNNPLKWQKWNKGLLEQLKSLEFEDKLFDLKFRSLLTEYEYIVSQIKDTEKIIERIKEDEELGKRISIIEKINGIGIISAVRMCLYLFDKKDRFESSEKLNHYLGLTPSERSSGNKVVRGRSGICGNKQLRSIIIQLAWMTVRKDGLLLDKFDRVYKKSGSKQKAIVASARKLMTKVYAAVRKDEDYRINIRTAAAA

SEQ ID NO: 498857 - protein, 312 aa, unidentified
MFIGIDVAKAQLAFACQPSAERGTVPNDDVGIRELVARCQALAPTLLVLEATGGYEAAVVAALATAGLPVVVANPRQVRDFAKATGRLAKTDALDAQVLALFAERVRPAPRPLPDDAVQALDALLTRRRQLVEMLTAERNRLLVARPAVRRDLQQHIRYLERRLREADDDLHTAVKTSPLWRVKDDLLQSVPGVGQVVSLTLLAELPELGRLSHKEIAALVGVAPLARDSGTLRGKRLVYGGRAPVRAALYMAALVASKCNPVIRTFYQRLRAAGKPAKVALTACMRKLLTILNAIARSGTPWRPERPLART

SEQ ID NO: 498858 - protein, 462 aa, unidentified
MPGREERDTSDKSRRQLEGLPVIRRRVAGIDLGSEQHWVCGPTVEGSAREVASFGATTAELIRLAEWLKARQVESVAMESTGVYWIARHEVLEGQGLQVLLVDTRQLARVPGRDKKTDPTDCEWIQRLHSCGLLRGSFRPEEAVCMLRTLVRDKANLVAESGDWLRRMQKSLDQMNVRVHWAVSDIAGATGMAILRAVAGGERDAQKLAKFRDARCSKTEQEIAEQLSGHWREDHVFSLQQALKMYDAVQERIAAYEQEILRKLGEMEREEPPEPTAPPLQNANKARMIKQRGQEAKRQALYRMSGVDATQIDAIGVETVEVVLSEYGPDLSRFPTEKQFVSHATLAPRVPRSGGKPVKKKKRNSASTRVAAALRMAALSLRHSQTALGAFYRRIARRRGADIAVFATARKLATLIYRLLRWGQPYVDEGAAAYENRYRQQRIRRLAATAKDLGYQLRPVSA

SEQ ID NO: 498859 - protein, 347 aa, unidentified
MATVMIGVDPHKGSHTAVAISPAEEPLGELRVRACAAQAQRLLAWAAAWPQRIWAIEGARGLGHLLAQQLLAAGEQVVDVQPKLGARVRLLATGAVNKNDPNDARSVAIAALRSPARRQVQPDDHAAVLKVWAKRHRDLGRMRTQVVCRLHAVLCELVPGGVSKAITAGQAARLLESITPSGAVEAARCELAAAFLDDLRRIDAQLREAKKKLDAAVRASGTSVTGIFGVGPVVAATVIGAVRNISRFPDRDHFAAYNGTAPIEVSSGPRKIYRLSRRGNRRLNHVIHMAAVTQIRYRHSDGRAYYERKLAEGKTPKEALRALKRRISDAIFARLQADARQAATGPR

SEQ ID NO: 498860 - protein, 350 aa, unidentified
MMIIGCDFHTRYQQIAMLDEATGELVERRLDHESGEAHAFYRDLQGPVRVGIEATGPIRWFERLLAELGHELWIGDSAKIRASEVRKQKTDERDARLILDLLLAKRFPKIWVPTPAERDLRQLLWHRHKLVCMRTMLGNQLHALALNEGLCRKKKLFTQKGRAELVHLGLAPWASRRREELLKLLDQLEPAITELDRAVMEEAHRRADAVLLMTHPGIGPVTSLAFVLAIGPITRFARSKKIASYLGLNPSEQSSGGRRRLGAISKQGNTMVRWLLIEAVYPAVRKDPALRQDYQRLKFRRGHAVAKVAIARKLAVRMYWMLRSGAEYARLVRRQGSPGATLVDASSSLG

SEQ ID NO: 498861 - protein, 336 aa, unidentified
MAEVTFPQLIQRACGIDVHLKVVVATIDGAGIQRETRSFKTFTSSLNELKEWLLSNGVTHVGMESTGVYWKPVYKVLEDSIPNVWIVNARHIKNVPGHKTDKMDSEWICKLLLAGLLKPSYIPPKEQRQLRDLTRYRNKLIQQIASEKNRMMRILEDCNIKLSSVVSNTSGTTATSLIDMLCEGKVLTLDDINSVYHGKLSASPEELLEACTGFVEEHHIYLLQMIRKDIDQTQTLVDDLSERIKKLLSKYENVLELLREIPGFSTKVVEDLVSEIGLDMSHFPSEKHLSSWAGLSPGNNESAGKKKRTNHSRKQTGKGGNHRSRMGCDPYKEYVF

SEQ ID NO: 498862 - protein, 345 aa, unidentified
MEHFAGLDVSVKETSVCIVDDTGKIVREVKVASEPDVLLPVLTNPAYRFKRIGLEAGPLSQWLFSALAEAGLPAICVETRHMRAALKAQINKTDRNDARGIAQMMRAGLYRPVHVKTLRSQKLRVLLIHRKLLQSKAIAVENDLRATLRNFGLKVGVVGTVKFEARIKELVENLFDLAVLVEPLLIVRRAIREQIGILHRRLLAIVRDDDVCRRLMTIPGVGPVVALTYRATVDVPTRFRNSKAVGAVFGLTPSKYQSGEIDRTGAISRCGDEMMRAMLYEAAHILLVRTTKWSWLRAWAMTIARRRGLKKAIVALARRLAVIMHRIWVDGTEFRWTREQAAAAA

SEQ ID NO: 498863 - protein, 402 aa, unidentified
MNCVGIDVSKGKSMIAVMRPFGEVVVSPFEVRHTASELSELARLLKNLDGETRVVMESTGNYHAPVAWLLHGAGFYVSVVNAMLVHDYGNNSLRRGKTDKKDAVKLANYGLDHWLTLPRYVPEEDTRLMLKTCYRQYQQYSKVQTMLKNNLISLLDTAFPDANRLFTSPPRADGSEKWVDFVATFWHCECVCGLSKKAFTAKYQKWCRKHGYNFSEDKALDIYASACRHFGVIPKTDTAKLLVEQAISQLQTTSSALAALKQEMQSLAASLPEYPVVMEMFGVGPTLGPQLIAEIGDVRRFHSKKALVAFAGIDAPPYQSGQIDVRSRSISKRGSASLRRTLFLVMGVLLQCAPMDEPVYQFMNKKRSEGKPYRVYMMASANKFLRIYYASVKAYLDSLEHD

SEQ ID NO: 498864 - protein, 443 aa, unidentified
MTRKQTMPVVHAHAAGIDVGSTTHYVAIGQHPEDVRSFGCYTEDLHALSKWLKEQGITSIAMESTGSYWKGLFQRLQHDGFEVLLVNGKHTRNVKGRKTDVLDCQWIQRLHSLGLLSGSFLPDTFTATLRQYVRQRDYLIEQQAAYIKKIEQALRQMNIRLDAALSDIVGQSGRAILEAILAGQRNATVLATLVDRRVRKTKEEIIRSLTGEWKEEYLFEMQLSYELYGVIQSKIAACDSRIEQLLTQSMQQKEVVEDVPTVKKKKNKHAPKMNLQYISTQLSGGVNLYQIEGVNDAMVLALLSETGLDLSKFPNARHFCSWLALAPNNKVSGGKTLSSKTAHHNNRLAQAFRRAANAIGNMKKGALNQFFRRIAYRYGRMAAITATARKLAVIVYNMVSKKEAYRYEETVVYTERLRRIQLKSIQKKIKAMNIKPEELHFTT

SEQ ID NO: 498865 - protein, 369 aa, unidentified
MEKDTIYVALDDSKRKLVVALLRPGATEPEEREIPKDPLHIQRLFRRLRREGPVQACYEAGVSGYDLYRQITACDVACQVIAPALTPRRPGQRIKTDRRDARKLVRLLRAGELTAIHVPDEAEEAARDLVRCREAVRRDVVRWRHRLLKLLDRHGRLWVAEKNWTQRHWSWIRAQHFELAALQRAFEATVFALEQARAGQAALDQEIAALADTAPYRDPVGWLRCFRGIGTLSAMVLLAEIVDFQRFRRPRELMAYLGLVPSEYSSGETHRRGALTKAGNTHARRVLVEAAWHYRHRPAVGRALASRSQAQPDEVVGQAWRAQQRLHRRYRHLIGHGKRPPVAVAAIARELVGFLWAAMTRRETRMQVA

SEQ ID NO: 498866 - protein, 410 aa, unidentified
MNDDFQLFVGIDWATVEHEVCALDPDGDKQRARAFRHSGDGLADLCAWLLERGRPSTIAVAIEVPHGAVVETLLERGFAVFSINPKQLDRFRDRFTLAGAKDDRRDALVLAHSLRTDRHLFRRLAQQPAKTIEIREWSRIHDELQSERGGVVNQMRAQLARYFPAFLELAPDPGEDWTIALFQLIPDHATALKTRPIRIAKVLKDHRIRRITSKEAIAMLRSTPVHSSPGTATAAIAHLRLLGERARLLNKQLKQCRSQLETLLLEMTEENESGNESEQRDTAIIQTMPGIGVIVASALLGEAAGPLRDRDYPALRALTGVAPVTKRSGKKCVVIRRTACHPRLRNAVYHWARVAAMNDELSKRRYAALRARGKSHGQALRCVGDRLLAVLCAMLRDQTDYRAPIPSAAA

SEQ ID NO: 498867 - protein, 349 aa, unidentified
MGEYIAFDSHKHYTFALREDQETGRTKERRIEHAPGAICAYLKDAAAGTPVAVETMGSWYWIVTEIEKAGLQPMLVHARKAKLMMGMINKTDKLDARGLNRLQRNGTLPAVWIPPAELRDLRELTRTRMVLVRQRTRLKNRLQATLEKYGLQVEGCSDVFGVGARRQWTRLWRLLPPQTRWTAQALLDQLDFVERQIKEFEERQRKLLAPTEERMLLTTLPGVGPILGAVMALEIGDVGRFLTDERLASYSGTTPRVQASGDKTRYGRLRPDVNRYLKWAFVEAANVAAWQSSRHPNRHVSLLYHRLRLRKGHAKAVGAVARHLAEAAYHVLRKKEPYRDPTLGRTSKA

SEQ ID NO: 498868 - protein, 409 aa, unidentified
MTYFVGLDWAAREHAVCVIDGRGAVVTRFTVTHTAAGMSQLTARLVKLAPAAELRIAIERPTGLVVDTLVEGKFAVVPIHPNVVKSARPRYSAAQGKTDLGDAYLLADLLRTDGHRFRTLVPLSDEIKALRGLVRVRDDLVGQRVAVANQLRGLLEQFWPGATEIFADIDSSIALEFLDRYPTPQSASGLGEKRMTTFMERHSYSGRRTAAELVQRLRSAAASVAGELEAEAKGECVRALVAVLRPLVAQLATLNAAIEHAVDAHPDGKIVTPLFRSGRICAAKLLAEIGDDRARFVSADHLAAESGVAPVTRESGKHRAVTFRWACNKHLRNAFNTLADTTRHTNPWARSIYQRARDRGHEHPHAIRILARAWCRVIWTCWQQRTPYDPMKHRAARPFTLRLVDQEAA

SEQ ID NO: 498869 - protein, 329 aa, unidentified
MTQLSSQPVSSQPVSPLFIGIDVAKDKLDLARSDTGELLTVSNDQAGIGRIVQILAAATPTRIVLESTGGLERPLLQALLDANLPVALVNPARVRHLAIGLGILAKTDAIDASVLTEFARMGNPRLAEKCSKNQTELDALITCRRQLTRARAEQSNCRFSTVSKTALQSIDAILKTLDKQIELLDKKIRKLIESDDDFKHLDKLLRSVPGVGPVLSSTLVAELPELGKTDRQRIGALVGVAPFNHDSGTLKGKRSIRGGRVQVRCVLYMATLAAIRFNPVLRKFSERLTRAGKAKKVIIVACMRKLLALLNVMLRDNLMWSELQVVKTA

SEQ ID NO: 498870 - protein, 309 aa, unidentified
MTAVGIDVSKSVLDVAVDGQSAVRRFPNTSAGVARLVRQLSQYEAVRIVVEATGGYEEAVLGACAQAGMWIARVNPRQARDFARATGQLAKTDGIDARMLAEMATVFHARLRRYEPREAWQDELRAWLRRRHQVMDAIQRQRQHMDMALPAIRTLANKTTVTLRKELTAIDNAMQTLLNAHVTPALQSAKGLGPIFQATALALLPELGHLSRQQIAKLVGVAPLNRDSGQTQGKRRIYGGRSPMRIALYMATLSAVRWDPRMREHYQQLRQRGKVAKVALVACMRKLLTIVNARRRDELQLATRCTQLA

SEQ ID NO: 498871 - protein, 352 aa, unidentified
MERRKSDLAVGQAIYIGVDLHRSSWHITIRTQEQVLHTETLPPQWAAFGKVLLRYGAGRCSVVYEAGYFGYSLHDLIIEAGARCIVTPPSLIPQESGNRVKTDKKDSDKMARLLARGDLKAVWVPNQELRHDRSVLRHRSQLIGARTRIQLQIKSHLYFHGVPFQTCNGKWSGRFVDSLRQIVWQSDAARAVFWEMLETYDFLNQKVLLATKTLRAMSLLPRYRERFLLLRSIPGVGLLTAMEVLLELGDVSRFSNAEKLAAYVGLTPTQHSSGDKIRLGHITGVGKGNLRGVLVEAGWTLIKKDGVMAAKYERIKARAGGKKAIVAVAHNLLLRIRRILLDGVPYSAGVVG

SEQ ID NO: 498872 - protein, 303 aa, unidentified
MEYIAFDAHKHYTLASVEKLHGGAVYEERIPHERGALRRFLGRCELGSPVAVEALGNWYWIVDEVEDAGFVPRLVHPRKAKLMVGMINKTDKLDARGLNRLQRAGTLPTVWIPPGELRDWRDLPRSRMVLVRQRTQLKNRIHATLAKYALTVPEVSDLFGRQGRKLLRERLCELPPQTAYATERLLEQVEALDRQVRLFEHQMGAVFEVTPEIELAMTLPGVGFILATVIVMEVGDVARFVSHEKLAAYAGTVPRVHASGGQGPLWPAAAGRQPLSQVGVCRSGQRHLSHAQAPPGSSCQPAL

SEQ ID NO: 498873 - protein, 343 aa, unidentified
MNATSKTVVGVDTAKQVFQLHWIDADTGEVFSKQLKRAKFLEYFMNKASCQIGMEACGGSQHWALRLQEMGHEVKLMPGKAVKAFVSGNKNDVADARAIWLAMQQPCVRAVAIKSEAQQAVLALHRMRQQLVKFLTMQSNGLRGLLGEYGEVMAVGRAALNRGMNDALARLAERLPAVLIDTLREQWGMLAKIDLQIVQIEQRLQAWLKQDRASRLIAEIPGVGLLTATAAVATMGDAKAFRSGREFAAWLGLVPAQTGTGGRVRLLGISKRGDTYLRTLLIHGARTVLTHAKEPGKWLQDIGKRRPPNVVTVALANKMARTIWALLAHDREYDKEHVSVRLT

SEQ ID NO: 498874 - protein, 319 aa, unidentified
MDVLGIDVGKRDLHAALLQEKRSASKSVPNSSAGIAQLQTWLKNRKAERVHVCLEATGGWSEEVAIALNEAGHIVSLVNPARIKAFAQSEMLRTKTDRIDAALIARFCRLHEPQPWTPPAPEIRILQGLVRREHSLIEMRVAEENRRDAPLVAPPVMASITAMLKQIDREMERVEREIEQLFKDYPTLRRQRELLISIPGIAETTAARILGEMPNITEFRDVKAVAAYAGLSPRHYQSGSIEYRSRLAKTGNAHLRRALFFPAITAIRHNPPIRDFAERLRARGKNKMTVVAAAMRKLLTLAYGVLKSGRPFDPAYGIA

SEQ ID NO: 498875 - protein, 340 aa, unidentified
MGIVGGLDVHRRQITFDYLNECTGEVRRGRAPAHRELLRRWLASEVTERPARFAVEACTGWRFVVEELTAAGIEVHLAEPADTAAARGPKRRAKTDRTDARHLRELLAGGRLPESWIPPEQVVEMRALLELFKDLREEHTGWVQRLHATLFHQGVAAAEGDLLAAGSRRRLEQGVGLSVAGHQAVLTALRVLDRLDAELVVLRRQIAAFARRQPGCRALQTRYGVGPITAVAIWAQLGDTRRFSASRKAVRHTGLDITVHSSDDKRAAGRLSRQGSPVLRWALFEAAKCAARPASPDYAYYSRVRQRAGAHRATLSVARKITRWAHHTLRALGDQAFAPV

SEQ ID NO: 498876 - protein, 362 aa, unidentified
MAKVRSWVGLDVHARSVLAVMIDGESGELRSRKLSGMTSEVVEFCCSLPGPARVAYEAGPTGYGLARALELAGVGCVVAAPGKIERPAADKIKTDQRDAERVLRLLMIDGLHAVRVPSSEEEALRDVVRAREAVRGDLMRARQRLSKLLLRHDLRYEDTASAWTIAHRAWLTKIDLGQRGAQLTLLEYLGAIDAIVIRRDALEKAIAELIPDSPWAQTVARLRCLRGIDTLSAVGLCAEIGDFARFQRAGRLMSYIGLVPSEDTSGEKRRQGAITKTGSRHARRLLVEAAWHYRRAPAKGQVLRRRQQGQPAPIIEISWQAQRRLHRVWQRLDTQRGKRRTIVAVAVARELAGFCWALANAD

SEQ ID NO: 498877 - protein, 461 aa, unidentified
MLVVAMPTSPSYWVEEERENAMAKVIIGVDPHKLSATIEVVERRERLLGSGRFSTDQAGYTAMRTFAKAWPERVWAVEGSNGAGRPLAQRLLEAGEHVVDVPAKLAARVRLFDTGHNRKTDARDAHSIAVVAVRTRTLRVLAADGELEGLRMLCDRREELTRLRVQTVNRLQRLLAELIPGQGQKDLTALQAKAILATVRPRDIAGKTRRRIAVEELADLVAVEAKMKKATAELKTIVLARGSRLMDIHGVGPVVAARILADVGDITRFADRNRFASWTGTAPLDASSGEQNRHRLSRAGNRRMNHMLHIAAVTQIRLDTEGRAYYSRKRAAGKKPLEAMRCLKRRLSDVVYRQLVADAERAAMTASSGEAGTGPGGHCGATQESSAVDLPPHIDTSDQPLPGPAHPTLPATKPHANPCAASAPRRSRRRAGAVKVERPTGRTTLTAPSAGAHSAAPKPTS

SEQ ID NO: 498878 - protein, 352 aa, unidentified
MIRACPWACEINSDSYWSDQAGLSRGQGPAWPARILEAGEFYHVKEELVYLGVDIAKSYLDAAIGSEKRRFANDAVGHRALIKWIKEIEGLVQVICEPSGGYERALIRALVGTQIRVSLVPANRVRQFARAAGILAKTDRIDAKVLCIFAEAMQPGTISGSQLEQEHLRELESQRRHLTHLLVMEQNRGARVSDVCVRRLNRTLINQIKKQIEQLDLLIKQHIEQSAELSAKAAKLTAITGVGARTAALLLAQMPELGKLNRREVAALVGVAPFNRDSGRMRGTRTIYGGRRPVRHGLYMAALVAARHNPILRAFYQRLRTAGKPAKVALTATMRKLLIVLNSALKSDLSYA

SEQ ID NO: 498879 - protein, 409 aa, unidentified
MDVIVERVAALDVHKASVTACVRVPAADGRDPHLAEFATTVRGLLGLRDWLAAHRVSQVVMEATGVYWKPVWHILEDDFELMLVNARHVKQVPGRKTDMSDAAWLCQLAEAGLLKANFVPPKPIRDLRQLTRYRKTQIAERQREAQRLHKALEDTNVKLDCVASDLLGASGRAMLDALVAGTTDPAILAELAKGRLRQKIPALREALEGRFSALHALLIGAILAHLDFLDEQIDRLSDAIEERIAPFEPTVRLLCSIPGVQQRTAEVIVAEIGPDMTVFPSARHLASWAGQCPGNDRSAGKQRSGRTRKGSRWLNAALKDAAMAAVRTRNSYLRALYERHRSRIGHGKALGAVKHSILVAAWHMLTTGELYSDLGADYYRRRDPAATTKRLVAQLERLGHTVTLQEAAA

SEQ ID NO: 498880 - protein, 551 aa, unidentified
MLIDEGLTGHRLSATDVTGGEHVLPDAEPTTGQDTLTLSEFTGICRLRTLDHGRRHGVDLRFNEVRSSAHRPPHYRFGGPAMGRPTSGVGMTVSPCRTHGLRGGVTGSGGIDRPLIRGMTTGFFGGREALRNVDVAIGAVPRPGEYDRRLHVIDTSDIGAFLGLDVGKGEHHATAVTPTGKKAFDKRLPNSEPKLREVFGKLKAKHGTVLVVVDQPASIGALPIAVARDMGCAVAYLPGLTMRRIADLYPGEAKTDARDAFVIADAARSMPHTLRSIELEEETVAELEMVVGFDDDLAGEATRISNRLRGLLTQIHPHLERVVGPRIQHPAVLKLLDQFGSPAQIRKAGRRRLINLIRPKAPRMAERLIDDIFTALDEQTVVVPGTDAAALIVPSLANSLQAVLDQRKLLAVRIEELLENHPLSKVLTSMPGIGVRTGARILIDVGDGTAFPSAAHLAAYAGLAPATRSSGSSIRGEQPSRRGNKQLKRAFFLSAFAALADPVSRAYYDKKIAQGKHHTQALLCLARRRADVLFAMLRDGTFYDPQPSPTG

SEQ ID NO: 498881 - protein, 343 aa, unidentified
MTHYVGLDVAQKLTAICVVDDSGRRQWRGQCTSDPEPIERTVRRHGGEDARIGIETGPMTPWLVHEVRGRGLAVTCLDARHARAALKMQINKTDQNDAEGLAQIMRTGWYRSVHVKSFASHRARALLGARAQLVGMTTRLSNHIRGVLKTFGMLPGAGRGLAFDRRVETLLADRAEVAPIVRPMLAAWRQLRQQTAAFDKAVRVLVKSNPICRHLMGVPGIGVLSVLAYVSMVEDPARFGRSRSVGAHLGLTPKQYQSGEIDRSGRISKCGDILARTLMYEAAVVLMTRVRRALGLKDWAQAIARRSGVGKARVALARKLAVILHSMWRSGEPFQWSEQPAAT

SEQ ID NO: 498882 - protein, 343 aa, unidentified
MEHFAGLDVSVKETSVCVVDDTGRIVRELKVASEPEALLAVLANPIYRFRRIGLEAGPLSQWLFSALAEGGLPVICVETRHIRAVLQAQINKTDRNDARGMAQMMRAGLYRPVHVKTLRSQKLRMLLTHRKLLQSKAIAIDNDLRGTLRNFGLKVGVVGASKLEARIRELVENLPDLAELVEPLLIVRRTLREQIGVLHGRLLAIVRTDDVCRRLMTVPGVGPVVALTYRATVDVPARFRNSKAVGAVFGLTPARYQSGEIDRSGAISRCGDEMMRAMLYEAAHIMLVRVAKWSWLKAWAMKIARHRGMKKATVALARRLAVILHRIWVDGSEFRWTRETAAA

SEQ ID NO: 498883 - protein, 448 aa, unidentified
MGKSNRSLSITHPNAAGIDIGASTHFVAVPDDRDPVPVQSFKCFTPDLHRLAKWLKACNIDTVAMESTGVYWIPLFQILEKHGFEILLVNARHVKNVPGRKTDVQDCQWLQQLHSFGLLRGSFRPNDAICVLRSYVRQRDNLIKSASTHVLRMQKCFSEMNVQLHRVISDITGVTGTSIIEAILSGERDPIKLAKFRNPHIKCKESELIDALTGDYREEHLFVLSQEYALYKTYQTKLAECDRAIETYYQQFEAQNASPKNLPALGKRHKRKQKNGPHYDLREVLYRVTGNDFTVIPGLDTLSIQNIIAEVGLDPTRWRTEKHFVSWLGLSPANKISGGKILSSRTRKVVNRAAIAFRIAANTLSRTQTGLGAFCRRLKGRLGAPKAITATARKIAILFYQMLRYNQSYVEKGVEYYEKRYENRVLRNLEKKAELMGYSLVKSEGAMA

SEQ ID NO: 498884 - protein, 392 aa, unidentified
MSQHFRFDASRSLTALEQDSTIVAVIEMSQTKWLVAALVPGVERQPLKKFDAQEEMLLKLLHRWRREAGQAGRNIERIVVAFEAGRDGFWLARWLRARDVEAYVIHPTSIAVSREHRRAKTDRLDTELLMRVFLGWLRGEKRHCSMVAIPTIEEEDARRPNRERQNLVIEQTRIINQIKAIFTRFGLRTLRPTMRKLAEGLEDLRTAEGTPLPQNTLSELRRHLARLRFVRDQIRAVEQERLRKLAVAPVAETKSPDAMVRLIARVFGAGIETADMLVNEIFSRHWRDRKAVARYAGLTGSPDESGSRRRERGLARAGNVRVRCGMIQLAWRFVRFQKNSALAQWFAARTADGRASTRKTMIVALARKLLIALWRLVTRGEVPQGVVLRPAS

SEQ ID NO: 498885 - protein, 327 aa, unidentified
MRQAKSLTEKAKTTVAFDVCKAALDVHIRVDGKAFQVPNTYEGFDQVALVLADYDVSLVLMESTGGYEDAAACYFQSVGYDVAVINPRHGRNFAMAMGKFAKTDRIDAAILADFAAVIDSRSDRARFIKPPTDEERKFLSQMVARRRQVVDLLSTEKQRLSHADDYAKQSINKVVAFIESQLDEINKDVSFYLKKNYSGLSKMLSEIPGIGELSVGLLVGDVPELGQIGNRQLSAVIGVAPFNHDSGKMRGKRCISGGRQNVRNVLFMGVMSATRYNPVIKAFYDRLINKGKPKRVAYIACVHKLLRIINAMVRDGTSFNPDLHAVS

SEQ ID NO: 498886 - protein, 300 aa, unidentified
MHKYNQIFGVDISKDVFDVVNSKGAYYQFSNDLIGFKAFAKKLTKETLVVMEATGYYHYCLAQYLYQQGYLVSVVNPLSVKRFIQMKLSKIKTDKSDAKAICEYSQFNEVPLYTAKDKSQAECLQLIRLIDIYLKQSTAIKNKLHGEKTLGIPSKVVYHSLNRSLKSIKKEIGVLENRLNALVKDHQQKQLTLLKSIPGMGTKTAIMLIVMTDGFNRFENSKQLCSYAGITPTIRHSGSSVRGKSRISKMGNQKMRNLLFLCSFSACKYNKGCKDLYERIVSKGKSKKLALIAVSNKLLK

SEQ ID NO: 498887 - protein, 309 aa, unidentified
MKEELVYLGVDIAKSYLDAAIGNEKRRFANDRVGHRELIKWIKQIKASVQVICESSGGYERALVQALVGAQLKVSLVQANRVRQFARAAGIFAKTDRIDAKVLCDFAEAMQPGTISASQLEQQHLRELESQRRHLTHLLVMEQNRAARVSDASVQRLNRTLINQIKKQIEQLDLLIKEHIEASPELLAKAQKLTAINGVGARTAALLLARMPELGQLNRREVAALVGVAPFNRDSGKMRGKRAIYGGRRPVRHGLYMAALVAARHNPILRGFYLRLRAAGKPAKVALTATMRKLLIPLNSALKPDLNYA

SEQ ID NO: 498888 - protein, 305 aa, unidentified
MISWVGIDISKSNLVVWVQPQKDGFEVPNTVEGFDALIARLAQYTVGRVLLEATGGYERRVMAALQQASYSVLRINPRRARAFAVAMGKNAKTDPIDAAVLADFAEALHASREKPISPEREALRELIQLREHFVQQRDDNKRRLQQAQLPAAIEAIKDHIRYLQTQIKQFGKAIDQSMRELDAEKANRLLSVKGIGTVATASLLVYLPELGDLDRREIAALAGIAPYNDDSGNHSGKRQIFGGRARVRRALYMSCWVVIRHQADFKARYKSLRERGKSAKVALIACMRILLIRLNAMLRDGTEWR

SEQ ID NO: 498889 - protein, 345 aa, unidentified
MEALIGIDPHKATNAVAAIDEHGELLEYAVFATNRSGLRSLERWGKRFPNRRWAVEGAGGLGCSVSQYLTASREKVVDVPAKLSSRIRLLSTGNARKNDRMDATYVALAALRNERLADVSEEEHAAVLRMLSERREDLIKERTRTLNRLHGLLRGLVPGGAGKNLSADKAARVLRGVRPQSGPARARRRLAADLIRDVRRLERQVRDLESRIREAVEEASTSLIGLFGVGPILAAKIIGRVGTVARFPGKAHFASYTGTAPIEASSGDVLRHRLSRAGNRQLNHALHMIAICQVRHVTEGRAYYRRKLAEGKSEREALRCLKRRISDAVFKQLRTDSEGLLSAST

SEQ ID NO: 498890 - protein, 338 aa, unidentified
MAQITTIGLDLAKNVFHAVCCDEHGKVIKKKMLRRSGLLTWFANLPQSLVGIEACASAHYWARELGAQGHQVKLIPPQYVKAFVRGNKNDYNDALAIAEAVVRPEMRFVAIKTPEQQDIQALHRLRERRLRDRTALCNQLRGLLAEYGIVFPRGVNVLRKRIPEILEDGENGLSDFFRNLLSRSYQQLTELDEHIDAYTQELETLSRRDDACQRLRTIPGYGPIISSAFYSAVGNGEAYRRGRDVSASLGIVPKQHSSGGKNVLLGISKRGDRYLRSLLIHGARAVVIQAANKDDALSRWINKIRATRGFNKAVVALANKLARIGWAILANNTVYQAG

SEQ ID NO: 498891 - protein, 346 aa, unidentified
MLYAGLDLSRKRLDFHLLDSEGATVEVGAAPPDVDGLLGLTRRLDRHREPIRAAIESMNGARFVHDRLELAGWQVEIADAQKVKGLAPLACKTDRIDAWVLAELTRRDLVPAIWLPDPMVRAERERARWRLHLVRHRSSLKQRVHAVLLTHGKPCPVSDLFGVRGRQLLARLGLPEPWQTTIEASLRLIDELDREIGDCERELRQLGADHRYVPHLLTVPGIGWVLAYTIAAEIGDIGRFASPRKLAGYTGLCPRVYQSGERDLRGPLAKQGPKYLRWALVEAATHACTAAVYRDRYQQTKARIGKQRGAKVAQIDLARRLAEAIWHMLSRDQPFAPKGATDPLAA

SEQ ID NO: 498892 - protein, 367 aa, unidentified
MKKGSTAAAMQSRNFSQQKLTLGMDLGDRNSWYCVLEEAGQIQQEQRVRTTAKALREVFGGMPRSRVALETGTHSPWISRLLTELGHEVIVAHARKVRLIGESRKKDDRRDAQTLARLARIDPELLCPVKHRSAQAQADLTVIRARAGLVRARTGLVNTARALAKSYGERLRGCNVRNMSPEKAEGLSPELQRALEPLLSAIEELSARIGQYNQRIEALAEASYPKVALLKQIKGVGTLIALTFLLTLEDPHRFRKSRDVGCYLGLQPGRRNSGQSEPQMHISKEGDPYLRTLLVQGAQHILGPFGVDCDLRRWGLKLAERGGRNGKKRAIVATARKLAVLLHHLWVSGEAYEPLHKSSRVTAVAAA

SEQ ID NO: 498893 - protein, 346 aa, unidentified
MEYIAMDVHKKYTWARVENEKGDKLYECKLSHSHGTIENFVKRWSAGSPTAVETVGNWYWVVDEIEAGGGQPQLVNARLAKLMMGCVNKSDKLDAKGMNRLQRAGTLPTVWIPPSSVRDARELPRTRMVLSRQRTQLKNRVHATLGKYGYTVEGASDAFGQKGRRIVAQLMAKLPPHTEQALGGVLDQLDHVCENLKWIEGKMIEVFAPCPQTTWLKSLPGVGDILAVVIWTEIGTIERFGRAEQLASYCGLVARENSSGGKIRFGAVRRDVNVYLKWAFVEAANSALLNAERCGYDHIGRLYQRIKTRRGHGKAKVAVARHLSEASFWMLKKGESYREPMSSTQR

SEQ ID NO: 498894 - protein, 473 aa, unidentified
MGKGSGNGTTRGDRRRNARRERLRALLPRDGAVIGIDLAEDKQALAVIDHDVRVLARKTVKVKAFRLGEALDWAVAQAKVKGFAAVTVACEPTGPRWLQVQRLCAERGLPLVCIQPLISHIAREQQDYTPHKTDESDCVMIARLAVELHCYIPEELDEAWAHLRHLGRRRAQLITAATASAQRIRDFLSVAWPTVTETCVQPLESKTWLAAVQLVTGRCGADPGKLAAMGPEAFTALVRSAVGSWGGKKAWGTICGRVFAALTDTEGVVAWSRRGLLRRCADELGDLQRTRAQLRAVEADMVMVLGELGLSRLGDIPGLTAVGAAAILAETGDPRRYDSSSSLVKHAGLAPSDNASGAFYGEAHISRRGRPGLRLTVWRAVWPMLRFNPVMAAKYQAMTSAADAAALAARTQDGARTRPATAAAAAARARRAKARVACAASLLRWIYTIVVHDTGWDPAAASGAAARHQAEAA

SEQ ID NO: 498895 - protein, 350 aa, unidentified
MNDTILAIDLGKFNSVFCWFEPDSRAQSFRTATTTPENLRRELLRQPVARVVFEACSQAGWAHDLCEELKLPALVASTTGAAWQWKHLKRKTDRDDALKLARLAAVGEVEGVPVPPRALRQWKSLIGLRKRLVSERVRAQNRIRGLLVSQGLSAPMGAKAWTELGLAGIGQFARPLADCPPAELWRGELHLLLERLRFLDTQTREVEARLDTLAASDSRVSLLTTVPGVGPRTAEVIAVHLFDARRFRGADEVSAYAGLIPRLYQSGETDRRGRITRRGPKLLRAALVECAWCSLRYNAWARDTWLRLQANGLSKKKAVVALARKLLVRCWAILRTGQPWRAPTPATAAV

SEQ ID NO: 498896 - protein, 350 aa, unidentified
MEQISRIGMDTSKHLFQLHGVDAAEKPVLRRTLRRRDMITFFERLAPTRVAIEACGASHHWARLLRGFGHEVQLIAPQLVKPYVKRGKNDAADAEALCEAMSRPTMRFVPVKTAEQQAALMLVKLRDRLIRNRTQLVNAIRGYAAEFGIAGAKGIAHVTTLLARLQADVTLPALARELFAMQAGEYAQVQAKIAVVEAKLLAWHRADPCSQRLAGVPGIGPIGATMLTMKTPAPEAFRSGRQFAAWIGLTPKDHSTAGKARPGVITRAGDEGLRSVLVVGATALIRRVREGRCRDGDRFAAWVGKLLERKPPKLVAVALANKLARVAWKLMITGEAYAVKPASTGAASAL

SEQ ID NO: 498897 - protein, 357 aa, unidentified
MSIVAHDRPFVIGVDAHARTHAIAILACPTGELLDERQFPATAAGLARAITWAAHRTGGDLEALWVIEGVGTYGARLARAATDAGYETVEAPRMNARANRGVGKSDPLDARRIAQAALPLLDTQLRRPRSDDGIRAALRVLIASRDHISNERTAAINALIALLRVTDLGLDARGTLNATQISSIAAWRSREEELSISVARNEATRLAKRVRAADRELSDVTRQMTELIQASPASGLLEQPGIGPVTAAIAYGAWSHPGRIRSEAAFASLAGVNPIPASSGNTVRHRINRGGDRRLNRALHMAVVTRMRMDPDTRAYVAKRTSQGRTLREIRRSLKRYLARQIYRHLNAAATTTPVAA

SEQ ID NO: 498898 - protein, 353 aa, unidentified
MAHPAPTRVTVGVDTHLDVHVAHAKDALGRRLDTHSIPTTPDGYRRLLAWARGFGEVQAWGVEGTGSYGAGLARWLRDQGQVVLEVNRPDRSARRRRGKSDPVDAEAAARTVQAGEAAALPKAGTGQVEMIRSLRVARATAMKARTQAINASKALLVTAPADLREQLRGLSATRLVRTAARLEPGPLTSPTAAAMLALRTLARRYQALSAEIETLTTELDRLTAKAAAPLVALFGVGPDSAGALLVAAGDNPNRLHSEAAFSMLCGSSPIEASSGKTIRHRLNRGGDRQANAALYRIVMVRLRHDPKTRDYMARRIKEGKSKREVIRCLKRYVAREVFAALQQVNLNEPAAVA

SEQ ID NO: 498899 - protein, 416 aa, unidentified
MNAVGIDVSSRKSTVAVLRPLGEVVCLPFDVTHDIAGLASLVEKLKALDGETRVVMEHTGRYYEAVEKALHEAGLFVCAVNPLLIKEYGANSLRRVKTDKADAVKIARYALDNWADLRDFTPMDAIRYDFKTLNRQFQLASKQRTASANNLIALLEQSFPGIRKCFDSPVRSDGTQKWVDFAHSFWHVDCVRKQPFAAFCERYRKWCKRHAYLFKLSNAEEVYALAKRAVVLTPKSKVVKVLVQEAANQLISISRSVEVYRAEMDRLAAMLPEYPVVMAMYGVGKSYGPQLMAEIGDVRRFERKQALIAFAGIDPMPNQSGDKNVRSNKSSKRGSPYLRKTLFNVIRTYLQCAPQDEPVFQFLNRKRAEGKPFYVYMLAAANKFLRRYYAKLRDYFASLDTLQPVAPIPTILKATL

SEQ ID NO: 498900 - protein, 316 aa, unidentified
MSQAEVFVGIDVAKARLDVALHPSGTIWTVPNSEAGIATLVAQLQEQPVTHIVLEATGGLELPLLGALGAAALPAVAVNPRQVRDFAKALGRLAKTDRLDAQVLALFAERVRPALRPLPDQATQALSALVARRRQLVEMLTAEKNRRGQAPPTIQADIATHIAWLEGRLERLDKELGQHLKQSPLWRAQDDLLQSVPGVGPVLSRTLLADLPEIGTLDRKQIAALVGVAPLNRDSGTLRGARTCGGGRAAVRAVLYMATVAATRCNPVIRAFYHRLCQAGKAKKVALTACMRKLLTILNAMLKHRTPWRAQVSQCA

SEQ ID NO: 498901 - protein, 376 aa, unidentified
MSRVAQRRIGKDLERPEWPPGAVIGGVDTHKHVHVAAVCDPLGRVLGTAEFPTTTAGFKALLRFLRKHGQLAAVGIEGTGCWGGGLARFLAARDVTVIEVDRPNRQARRRRGKSDTIDAEEAARSVIAGRARTTPKTGTGPVEMTRQLRVARRSAIKQRTQALLQLQALADTAPDELRDAIKPLRYAQLIETAARFRAGDMTTPTAAAKYAMGALARRIQHLDTEIEGLDAHLKAILTTAHPQLLAAHGVGPETAGALLVAAGDNPERLTSERSFAALCGASPVQASSGNTRRHRLNRGGDREANSALWRIVLVRMKTHPPTRAYVTRRTAEGISKRDIMRCLKRYVAREIYHHLNPTPPAARHLRLVLPEVLSTA

SEQ ID NO: 498902 - protein, 482 aa, unidentified
MKTRPSERAKKTTDDAKHVHWHEMNRKQRREMMREIQNEDISLEVVHPDAAGIDIGNESHYVAVPPGRDSLQVRRYGCTTDELKAMAAWLKLLGIRTVAMQSTGVYWIAVFDTLEAAGLEVYLVNARDTKNLPGRKSDVQESQWLMKLHTYGLLRNSFRPTQEIRMMRTYWRQRNDLVRAAASHIQRMQKALTQMNVQLANVLSDITGVTGQAIIKAILGGERDPHKLAAFRDCRVKASEEQIARYLEGNWQEDLLFLLKQEQEAYEFCQQQMAACDRQMEQYLQQRKEPNPDARLPEETRRCRLKKKIHNPQFNLRAELFRITGTDLTQIDGIDVLTAATILSEAGWDMSKFENDDHFVSWLRLCPNNRITGGKVIGKGRLPTNNRASIALRMAASSLRTSKTYLGAQFRRLRTKLGAPIAIKAMAAKLARLVYRMLRYGMKYVDRGAALYELKHRELQVKQLKWKAASLGYQVTPVPAAA

SEQ ID NO: 498903 - protein, 421 aa, unidentified
MNFTNPRAEKSRSQSKNNQETQFRISYTATGQELIYGYVPVGIDLAGRKFQVCFYNEDNELVNTTLDKYELKRFIADSHQKLLISMEGCTGSSYWANYAITHGHKAVVLDARAIKNRKAQKDDFNDAFFIREALFTKHQTCRIRTQEEIDLKSFYAQREQCIKSLNAVCSNVRQRLIAAGAYEYIVTDADSALVAIKCYKNQINNKADVGFSSLTLKTLDSFVEDINYLTQKIDSINQDIIDVKARESRVAKQLMSIPGIGPQLALLLSLDIADINRFKTARALQAYFGLFTAHSGSGGKIEMGKMSRNGDPVVKRMLYQAVLTLLHCGNKLQIAPRSEYIQRMYSRHTVAFKRGVICMCAKIIRVVFGVLHHGTAYDPQIDGSLGNKKARIHAYSNRCLNKVSADALLQEQYGYTEAALD

SEQ ID NO: 498904 - protein, 432 aa, unidentified
MHYLGIDVHKKVVAACLLDEDGQIVKRARFDLSAQRLSAFIGSLPHPCKVVLEATTNTWAVVDVLTPLVDEVVVSNPMRTKAIASAKIKCDRVDALVLAQLLRTDFLPRVWQPDAATRQARALAHRRSVLVRDRTRLKNRIHSLLAQRLIVAPACLFSYAARQWLAELSLPPCARGELDTLLVLLDTIEKEISQLQQPIDQLAWNDPAVRLLMTLPGVNVTVAQGLIAAIGDIDRFRTPAHLAAYLGLVPSTHQSAEHCYHGPITKHGNSQARWLLSEAAQCVASHPGPLGHFFRKLATRKHRNVAVIATARKLAEIAWHMLIKNEPYRYATPQATADKLARLRVSVTGCRRRSSTKGQPRSPYYGTADPSRPVKSLPEVLQSESLPAMQPLAPGEVRMLQDSHCLPWQQSLQQPSRRPGVRKARKPPHPSD

SEQ ID NO: 498905 - protein, 425 aa, unidentified
MNLLILKGVPMALKIVYKICCGIDVHKTFVVACIASTNDKGVTSYESHRFSTYTSGLKTLLQWLLNRNCKDVCMESTGKYRIPVYNILENDCSIVLAHPKYVKAIRGKKTDKKDAKWIADLFKHDLVVGSFMPPADIRQLRDLMRYRFKLTCFQSSEKNRLQNCLTVSNIQLGNVVSDTFGKSAQAILDKLLENPADTSFDLEPLVYKSLKKKLPELRDAIDGYITPEQVGKLKVIKAHYESLESRKAELEELILALAAPYQQELAILQTAPGIRSDFTAIGIISEIGTNMEAFPSAKHLCSWAGLTPTNNESAGKKKSVRVSKAGCYIKPLLVQCANAVVTSKKHPEIRNRYLRLKKRRGHKKAIIAIARMLLTALYHMLKNGENYNAELYRKSDLPPADWEITVEQAIIIARNQGYKIKSATA

SEQ ID NO: 498906 - protein, 344 aa, unidentified
MIIIGCDFHPSWQQIAWVDTETGEGGEKKLMHADGEAERFYRQQPERVLVGLESTGNSHWFVDLLAEMKHEVLVGDAAKIRASQVRKQKTDRRDAAHILELLLKNDFPRIWTPSRQERDQRQLLIHRYKLVTLRVRVKNELQHLAMNQGMQKRRSLWSQEGQKLLLDLPLQFWAGTRRKNLLELLKQMDQQITVLDRAVSQAAEQNEEAHLLMTQPGVGPITALAYVLTLGDVSRFPRGKQVASYLGLIPTEYSSAGKQRMGGISKQGNRFMRMLLVEAAQSVVRYDPQFRSEYLHRCHQKPKAVAKVAAARKLAVRLYWMLRTRTPYPEVVRIESSSRGPLAG

SEQ ID NO: 498907 - protein, 337 aa, unidentified
MTIVFVGIDLAKNVFALHGVDDAGKARLVRPAVRRDQLLEMVAKLPPCTIGIEACSGAHHWARQFMAFGHTVRLMAPQFVVPYRLSGKRGKNDKADAAAICEAVQRPNMRFVPVKTELAQARLAVHTVRQGLVAGRTATINRLRGVLSEFGQVMPLKAKTVRLEAATRAEALPQWAQTACMDLLAEIRRLDEQIAAYDQHIRLMAQADERSQRLMGMPGIGPTTASALLAAIGNGHDFASGRQVAAWLGLVPGQYSSGGKNRLGHITKAGDSYLRTLLILGARAALAAAGGKHDRISRWAQALAERRGYWKAVVAIAAKNARMAWAMLAKGEAFTPA

SEQ ID NO: 498908 - protein, 463 aa, unidentified
MSRQRQTPRQVKKDTLRKIKPLDELKIVHPHAAGLDIGATETWACVPASSSAEPVRAFSPFTADLRALADWLIACGVDTVAMESTGVYWIPIFEILEARGFKVFLVNSWHLRHVPGRKSDVLDCQWIQQLHSLGLLRGSFRPDAEMCALRSLLRHRAMLIEHRAPHILHIQKALLQMNLQLPAVLSDVMGETGQLIIRAIVAGERDPLKLARLRFPGCKSSEDEIAKALTGTWQAEHLFELQQALHLVDCYTQTLADCDAELARRFAAVKPRWNAPGDLPKLAEAKGGSRSKNQPAYPARAELYRITGVDLVALKGISASLAQTIISEVGTDMRRFPTEKHFCSWLGLVPHHEISGGKVLRNHTLKTNNRAGQAFRQAAACVIRSDSAFGAFYRRKRSQLGPMQAQVATAHKIARTVYHLLKDKTPYHDCGADTYEQKAKDRDLAHLRKKATQLGYTLTATDA

SEQ ID NO: 498909 - protein, 316 aa, unidentified
MIVGLDVHKKVCYGAVMDEKGKVAKQAKFTNDPEGVEAFMEGLTEAQVAMEAGYCWQPIYDALEDSGHDVRLAHPKEVKAIAKARVKTDKIDSQTLAHLLRADLLPESYVPPPDIRDLRDRVRRRAFLVNMRTMVKNRVHSEHAKRGVRLGVSLWTREGRALLRGLALEAVDQVLPVLDTLDDQIAVISRDLKRRCGEDPRARLLTTIPGVGYYTALLIVSEIGDVNRFPDSGKLCSYAGLVPTVRRSGGTTRHGGITKEGSRWLRWALTQAVHTHIRYETSLTRFYRRLAEKKPNQVAVMATARKMPGGGLLDAA

SEQ ID NO: 498910 - protein, 392 aa, unidentified
MIYVGIDVAKDKHDCFITNSDGEVLFKSFTILNNREGFEALFQRVESVSDDLTKVKVGLEATGHYSYNLLGFLLDKGLTTYVINPLHTNLYRKSLSLRKTKTDKVDSRIIATMMMSDMNLKSYSDTSYHNEELKSLTRYRFDKVKERAKLKSSVSRLICILFPELEKLVPTLHIASVYALLSEFPSADAVANAHLTRLSNLLSESSKGRYGKDTAVMFRDAARSSIGSHMPAKSLELKHTIKLIQELTAEIDEIEAAIKRIMDEEIQSPILTIPGISYRMGAMILAEIGDFSRFDSADKILAYAGMSPSTYQSGQLDNCYSHMEKRGSRYLRYALYNATKYVCHWDKSFGAYLEKKRSEGKHYNVAISHAAKKLVRLIFAMEKSGKAYLPTA

SEQ ID NO: 498911 - protein, 350 aa, unidentified
MFIIGCDFHSRFQQIAMLDSATGEVVERRLEHENGEAQKFYATLPSPARVGMEATCDAQWFARVLQDHHHELWIGDAAEIRAAMVRKQKTDSRDALHILDLLVTNRFPKIWVPSPEERDLRQLLRHRHKLVRFRTSVMNQLHALAMGQGLCRRKKLWAKVGRKELEGLTLDPWASLRREDLLQLLDQLDPRIDELDKAVIQSAESRSQAVCLMQQAGVGPVTALAFVLTIGPVSRFPNSKKVVSYLGLNPSEESSGGRQRLGAISKQGNPMLRCLLVEAAQTASRLDPELRRDYQRLKFRRGSGMAKVAIARKLAVRLYWKLRVAAQPVSSARMQGSPASPVVGKSLSAN

SEQ ID NO: 498912 - protein, 342 aa, unidentified
MIIATLGIDLAKSSFALHGVESSGKVELQKNVSRKKLPEVIVNLPLCLIGMEACTSAHYWARLFKQYGHEVKLMPPQYVKPYVKSNKNDSADAEAICEAVTRPNMRFVPIKTIEQQSIFAVHKARERLVSMKTGQSNQLRGILAEFGIIIPRGNASFNKQLSLILEDAENNLTLAVRSLIFQLKELIDNLTKRIGDLNKEIEHWHKECAASLRIAEIPGIGPMTATALVASIGDPHSFNNGQQVSAWIGLVPKQFSTGGKSVLLGINKRGDGYLRKLLVHGARAVVGHLKQQPNTFTHRWLSELLKRKHTNVAIVALANRNARIAWSLLANNQDYNPELLSA

SEQ ID NO: 498913 - protein, 335 aa, unidentified
MDIRYFIGVDISKATLDWAVFDGKSVILQSQSANSEAGIKTALKLIKALPGFKLAESVCCMEHTGIYNAHLLSHLHKINLPIWLESSLQIKKAGGLQRGKTDAIDAQRIAEYAFRFRDQVHLWQPPRPVIQKLAALSALRQRLILVRQQLQQPISEQQGFIDKALHKQLAKNCGASLNAIEADLANADEQINKLIEQDDRLKQLFEWITSVPGVGSATATEVIVATDEFKAISDPKKLACHAGVAPFEYKSGSSVRGKTRVSQHARLRLKSLFHLGSMSAIRMKGELQDYYQRKVKEGKNKMLVLNAVRNKLIHRVCSVVHRGQKYDKNYTLVLA

SEQ ID NO: 498914 - protein, 345 aa, unidentified
MKPVVRIGMDTSKSVFQLHGVDDAEEPVIRRQLRRREMIKFFETTPPTSIAIEACGSSHHWGRLLTSFGHEVRLIPPQYVKPYVKRGKNDAADAEALCEAVSRPSMRFVPIKSREQQAACMLMSVRERLVGVKSQLSNAIRSYAAEFGIIGPPGRQNVAALIKRTLEDDTLPQLAKELFGLQAKEYQAVESRLEEIEAKLMKWHRNDDVSRRIATIPGIGPIGSTMLSVKAPPAGNFASGRHFAAWLGLTPKDHSTGGRVRLGGITKAGDPSIRSTLIVGATALLRHVRKGRTKPSRWLAAMLERKPPKLVAVALANKFARIAWRLMISGGVYSRPGGPELSAAA

SEQ ID NO: 498915 - protein, 521 aa, unidentified
MSGPHTARRRKAPKGFVLQKPNGQLVARVRHAGPEHFGIVAVDCAKARSRYFLADFYGRTLLEPDTVHHNRGDLQAAIDRVRQAVTRHDLQDLVVAIERTGDYHRPVQSAFRQAGFETRLVHPLTSKQYRQPADPDNKTDDTDLAAIWRATTHGFGLLEPDWPELYVTIQLLRRQRRDLVDKAAVLQCQIREVLHAAMPGYAELFCHLWDDSPAPLVLARLTTSARAVRQAGVAGLQQLAARAGLRCRLETFHKILAWADQAPPDRGHSLQRRRQLVSLDDDRLDKTRQILALERDLAHLVVQTPYALLLAIPGINVVSVADLAGELGPLAFYLNANAITGRAGLMPSRYQSDQVDCASGPLRRRGNRRLRAVLMQTADNLVHCNHYFRARAAQWQRAGKDPRWLRVKVAKVFSRLAFALVAGRQLFPHPCCQPRHYPLLKLLDFHGEHGTDPRDLLRDLQALAELLPASRCREEHAALREQLDALLRRRGPQPLGDIIQVVLVRLAARMVQSTPAESAAP

SEQ ID NO: 498916 - protein, 401 aa, unidentified
MRNVSKNANVPQCRCYDAERMKGTSPSRAPRAVAGYGIKVPRWEVQSLINALVLWKGKSMPIVTVGIDLAKNVFAVHGVDASGKPALVRPSVARDKLLELIASLPPCLIGMEACSGAHHWAREFAKHGHSVRLMAPKFVAPYRLSGKRGKNDAADAAAICEAVTRPHMRFVPIKTIEQQGQLMVHRARQGFVEQRTATLNRIRGLLSELGIVLPLKAATVRRQALARLEELPGWANTVIGDLLSEVDRLDERIAQYDRHIALMARQSTQAQQLMQLAGIGETTATALISTVGGGHDFASGRSFSAWLGLVPGQYSSGGKQRLGRITKAGDSYLRSLLVMGARAVLAAAMNTRTPKQDSVSRWARSLAERRGYWRAVVAIAAKNARMCWAVLQRGEGFKMPA

SEQ ID NO: 498917 - protein, 355 aa, unidentified
MSSEKYIGLDVHQATISVAVMDSQGKIIMESILETKASTLLEFFAGLRGSLFVTFEEGTWAAWLYDLLKPHVTEVLVCNPRKIALVKQGNKSDKIDARKLAERLRLHDLKPVYHGETGVRMLRELARSYLTVVKDLSRVMNRLKALYRSWAIPCAGRDVYYTRHRSQWLEKISEAGTRRRTEQLYEQLDMLQHLRQQARRELLAESRKHAITAKLRQIPSLGPIRSALAVALIQTPHRFRSKRQLWTYSGLGLETRDSGEYHDVNGQVRRRKKQATIRGLNKDYNHDLKGLFKGAATRASVKPGPLQDFYQRSLAKGIKPTMVRLTLARKIAAITLTLWKKGEDFDINKLNSQAA

SEQ ID NO: 498918 - protein, 487 aa, unidentified
MHPRTTNIPTPTSDVRRFSFESAGVLALDNEYSGFAVLPAHYIAFAERKRARLWRSIYHLGSYDVKPLATHQFTAYVGIDWADTKHDVCLQVPGIESREFDCIAHQVADIDEWAQSLRQRFGAPIAIALELAKGPIVYALQKYDFFVLFPINPSTLAKYREAFKPSRAKDDPTDAELALDLLIRHPERFSSLQPQSPDMRTLLSLTEHRRELVADKTRFTNRLTNALKQYYPQALDWFDQRDTVLFCDFLTRWPTLTQVKRARPASLKAFFYAHNGRRAHVIGARLDAIKAATPLTQDLGVIAPCRLQALVLIEQLRTTLRAIERFDREIAELAPSLPDYCLFQDLPGAGPHLAPRLLAAFGEDRRRFQHAEELQKYAGIAPVTERSGKKCWVHWRWQCPTFVRQTFVEWAGQTINKSFCAAAYYRQQRDKGSSYQAAVRSLAFKWIRILYRCWQTNTPYDESRYLNALSKRGSPLLKNLELTAQNA

SEQ ID NO: 498919 - protein, 360 aa, unidentified
MAKARTLVGLDVHATKIVAAVLDVETGELQFFTLGGAVGQAAGLCAGLPRPVRAAYEAGPTGYGLARELAGRGVACVVAAPSKIPRASGDRVKTDRRDAELLVRLLLAGKLHAVRVPGPEEEAMRDLVRAREAVRVDLMRARHRLSKLLLRHGIRFDDGAAWTARHSAWLAGVTLPHAAAQATLLDARGAIDALAHRRGHLEREIVALLPNSQWAVQIGRLRCLRGIDTLSAVGLCAEIGDFERFAHAEQLMSYVGLVPCESTTGQQRRLGSITKTGSAHARRLLVEAAWHYRKLPAIGKALSDRQDAQPAEAVAVAWSAQRRLHRTWARLEARAKRRTIIAVAAARELAGFCWAITRIE

SEQ ID NO: 498920 - protein, 339 aa, unidentified
MDVSTIGLDLAKNVFQAHGADASGSVAYRKQLRRDKVLSFFASQPRCVVAMEACGGAHYWARAIGDLGHTVRLIPPAYVKPFVKRQKNDMADAEAICEAAQRPTMRFVTVKSKEQQASSAVFRVRDILVRQRTQLINSLRGHLAEYGLIVAQGPAHVAKLIEKTRDPESDLPEAARMVLLMLIEALGSLEDKIKQLDREIVRRTREDKDARRLTTIPGIGPITATALIALAPDATTFKKGRDFAAWLGLTPLQRSTGGKQKLGSTSKMGERTLRRLLIIGACAVVQQACKRGSQQKTWLARMLAHKPRMLVIVALANKLARIAWALMASGGTYRAPAAA

SEQ ID NO: 498921 - protein, 460 aa, unidentified
MRKPTEKQLSGMKRAGKSGFPLLNPDAAGIDVGAREHYVAVPADRDAQPVRCFGAFTEDLHRLAQWLLQCGIKTVAMEATGVYWIPLYQILESYGLAVKLVNARHVKHVPGRKSDVQDCQWLQQLESFGLLAGSFRPEAKICVLRSYMRQREMLIRQASRHVQQMQKALTQMNIKLHQVISDLSGDTGLRIVRAIVAGERDRLKLAALKDRRIKSAVGLIAKALEGDYRAEHLFALKQALELYDYHQRKIAECDAEIYKEMQTLETRGSAAPLAKHKPRSSHNPLGFASQAELYRIMGVDLTRIDGVNENTAQLILSELGLDICQTWPTEAQFTSWLGLCPNHEISGGKLLKRGTRKVVNRVANALRMCAQSLLNSKSALGAYARRMRARKDTPVAITATAHKLARLIYRTLKYGQAYVDVGSDNYEAKYKAAVVKSLQKRAQSLGYQLVSCQTPGAVVP

SEQ ID NO: 498922 - protein, 337 aa, unidentified
MKVTTISIDLAKAVFQVCGTNQAGAEVFNRQVRRNKLLETVIQFPDADVVMEACSGSNYWGRLFIKHGLTVKLIPPQHVKPFVRGNKNDRNDAFAISEASRRPNLTFTQPRSVAATDMAVLHRIRDRRQGSLTRLTNQIRGLLNEYGIVIPQGIEHLRRRIPLILEDADNELSQLMRSELHSLFDEWCMMESLIKQHDRAIEQFARADEQTTLLMTARGIGSITATALMSVMGSPANYKNGRHFASSLGLTPSEHSSGGKQKLGRITKRGNRYVRKLLVQCAMSHVRHLEGRTDNLSLWLKRLKERRGVQVAAIALANKLARISWAMLHKQQEFKLN

SEQ ID NO: 498923 - protein, 412 aa, unidentified
MYIVGIDIAKKTHMGGITDDKGKHIGKSFKIDNSVEGFENLLKKLAEINADISQFVFGMEATGHYWLNLYTWLCDRNFTVHVINPIQSDALRKLEIRQTKTDAIDSYLIADCIRLGKYCDTNLADDDMLALRDLTRQRFYLVDMTSDIKKKVIAMMDRIFPEYESLFSDMFGKTSRDLLKECTTPEEILALDTTHLAEILRKSSKGRFKQEKAEELQKTARNSFAVLLSSQTNSLLVKQMIEQIELLESQISEIEKIIEQLYSKFDCKLTKIPGMGITLAAVILSEIGDISRFPDPKQLTAFAGLDPVLKQSGMNKGLGYHMSKRGSPYLRRALWLAANSIKKWDPSFAYAYQKKIDSGKNKSQALGFISHKLLNVVFTVLKNNIDYVPIFPPDVDISKLAEKTLKNASSND

SEQ ID NO: 498924 - protein, 322 aa, unidentified
MEHELHYIGIDTAKEKLDVDVLRPDGRHRTKKFANTTKGHDELVSWLKGHKIDHAHICIEATGTYMEPVAECLYDAGYIVSVINPALGKAFAQSEGLRNKTDTVDARMLAEFCRQKRPAAWEAPHPLERALRALVVRHQALTDMHTQELNRTETAREVQRPSIDAHLLWLEAELKRLEKQIKDLTDDDPDMKHRRKLLESIPGIGEKTSAVLLAYIGLKDRFAHARQFAAFAGLTPRRYESGSSVRGTSRLSKAGHVSLRRPLYMPAMVATSKTEWGRALAANGKKGKVILGSIMRKLAQVAYGVLKSGVPFDASRHNPVAA

SEQ ID NO: 498925 - protein, 355 aa, unidentified
MIGEKYIGLDVHQATISVAVMDSKGKVVMESILETQAATILEFFAGLRGTLWVTFEEGTWAAWLYDLLKPHVAKLVVCNPRKNALLKHGNKSDKIDARKLADLLRLNDLEPVYHGETGVRMLRELARSYLTIVKDLSRVMNRLKALYRSWAIPCAGRDVYYTRHRSEWLGKIPEAGTRRRAEQLYQQLDMLQHLRQQARRELLAESRKHTITAKLRQIPSLGPIRSALAVALIQTPHRFRTKRQLWTYSGLGLETRDSGEYHYVQGQLRRRKKQVSIRGLNKDHNHDLKGLFKAAATRASVQPGPFQDFYQRSLAKGIKPTMARLTLARKIAAITLILWKKGENFDVAKLKSQAA

SEQ ID NO: 498926 - protein, 350 aa, unidentified
MIIIGCDYHPGFQQIAFVDTDTGELRERRLQHPEEAEQFYRDLAAPGMKVRVGVEASGHARWFERLLAELNFELWIGDAAEIRAKRVRKQKTDRQDAPHSLRLLLEDRFPQIWVPNGENRDLRQLLWHRHRLVQARTRIMKQLQAVALNEGLRCKKRLWRERGREQLESFKLAPWASRRRRDLLALLDRLNPTIAELTEAIEQEAEKCPEAQRLRTHPGVGRLTALAFVLIIGRAERFQCGKQIACYLGLVPLEDSSGDRRRLGHITKQGNSLLRFLLVEAAQVTVRSDQQWRSKYFHLAMRRGRKIAKVAMARRLAIQMYWMMRKEWDYEQVKKFGSHAGQPGNPHGVQ

SEQ ID NO: 498927 - protein, 339 aa, unidentified
MGLYGAFDLHANSSFHAVIDQDGRRVFHKKLSNDPELILEVLRPHKNDMVGIVVESTYNWYWMVDALMEADYTVHLANPSAIQKYVGLKHADDRHDAFWLAELLRLGILPEGYIYPKEHRPIRDLLRKRGHLVRLRTSLILSLQGIISRNCALKINVNTIKRITEDHVTPLLSGHEDLQLSGIVSKEAIDFLTRKIRHIETVIQAKFRLEKPFLYLESVPGLGKILSLTITLETGPIDRFPKVGNYVSYCRKVPSTWLSNNKVKGKGNKKNGNKYLAWAYSEAAELARRYNPAARAYYNRKMAKTNRMVAHSALAHKLARAAYYVMRDQVPFDHEKLFA

SEQ ID NO: 498928 - protein, 479 aa, unidentified
MSRQPEKPSKVNAKRGLRRKTRKKRMDLENRPLLEPNAAGIDIGAREMFVAVPPDRNAHPVQVFDTFTEDLHRLANWLQACGVTTVAMESTGVYWIPLYDILEERGLKPCLVNARHMKNVPGRRTDWHECQWLQYLHSVGLLRGAFRPEADVCAMRILVRHRGELVQAASQHVQHMHKALTQMNVQIQHVISDITGRTGLAIVEAILAGQRDPAELAKLRDSRIWASEDTIRKSLVGNWRKEHLFTLKQSLQLYRTYQQQTVECDQEIEKLLGEFEPRVDPNEKPLPPDRKRNRSDKKRRKKNGNPETGFDLRTEAYRLYGIDVTQIPGLETIALPLFSEVGRDLSRFPTAAHFASWLGLCPDNDISGGRVLWKGIRKVKNRAGQMFRLAAHSLHRNLTPLGNYLRRMKAKLGPAAATTATAHKIAVIFYTMVTKQAEYDDTIWATRDADRQKRFEARLKRQAQLLGYQLVPIQTRPAA

SEQ ID NO: 498929 - protein, 340 aa, unidentified
MSSVALHGGLDLHGDNVFCTLMDGARRIVFERRFPNDLATIREALDPYRKRIQALAVESTYNWYWLVDGLQGLNYPVKLANPARMQENIGLKHADDKTDARFIARQLVNGTLPEGYIYPVETRGIRDILRRRMRLVHARSGEWISLESLIARHTGRDMGVKELKGCELSEVLAGQPHALTMAHASYRHIEFLDKEIKALEKAVMEELPDREDYTRLMTVPGIGLVLARTILLETGPITRFKEAGNYASYCRAVKAEHTTNGKKKGECNGKSGNKYLAWAYVEAANYAVKYSPEIRAWFQRKHTRSGKRVIALKALANKLSKACYFILRDGKDFDVKRLVG

SEQ ID NO: 498930 - protein, 348 aa, unidentified
MIVLGADTHKSSHTIAAVDTSTGQVLGDKTVAVGARGFAALVLWARGLDGERVWALEDCRHVSGALERFLICRGERVVRVSTRLMAGTRRSSRERGKSDQIDAVSVARAALAAGIETLPTAALAGPELDIRLLVDHRERLVRTRVALNNTLQWNLHDLWPELTLPGGALFSKKWTTKIARRLARAEQTMRVRIARDELRRMRELTQAIKALQAEITVLVTEIAPQLVAEPGCGPLTAAKLVGEIAGAERFTSDAKLARAAGIAPIPASSGRTDRHRLDRGGNRQINAAIHRMAVTRARCDPETHDYIARKRSEGKTQRDAIRCLKRHLARRIWHLLQPPPPTLKASIS

SEQ ID NO: 498931 - protein, 412 aa, unidentified
MKRIRDKVAGLDVHRDSVVACTRVVQPDREVVVEKASFSTMAKGLVDLAAWLEAAGVETVAMEATGVYWRPVYYALEGLFPELWLCNAQHVRNVPGRKSDLSDAEWLADVAAHGMVRPSFVPPPDIRAVRELTRYRKTQVDARVKEIQRLEKTLQDAGIKLTSVASSVWLQSTRAMIEALIDGERDPVVLAQMAKSVLRAKIPQLEEAFSGRFGAHHGFLCRQIIDHLDHLDASVARLTDEIARRLAPFEPAITLLTSIPGVSRTTAEVLVAEMGPDMGRWPTAGHLCAWAGVAPASHESAGKKRPAGHRAGAPWLRRALIEAAKAASRTRGTYLHAQYARIARRRGANKATLAVANSILAVAWHLLSTGAPYSDPGGDYFERRTDPVREAKRLQRRIEALGFSVTIEEHAA

SEQ ID NO: 498932 - protein, 361 aa, unidentified
MPTEALRADFRSKIAIGTSSGPEWLNELKVRITREGSTKMTKRTTICAGIDTGKRKLDVAIEGRREQLQVENTPDGHQVLLAWLRQHRVKRVGIEASGGYEQPVVSELRRNRFVVVVFQPAQVRAYAKFHLQRAKNDKIDAALIAACTAAVRKIHAAPDARFLPFAEQLTMIDQIGEDIARLKTRIESCRNARINELWQQDIARLEQREKAELKSLVASIREHPDLAKKLELIHSVDGIGLPTAVAILVRMPEIGGITREQAVALAGLAPYDDDSGDQVGVRHIAGGRKRLRRALYTASLPASFRWNRQLIQLYQRLTAAGKEHKRALVACARKMLIFANIVVARGTPWCDEPPVRSSSVS

SEQ ID NO: 498933 - protein, 417 aa, unidentified
MKAWTELTHFAALDWADDHHDLVVVDAQGKVALELTFAHNAEGWQQAQQALAAWPGLPVAIETSAGPAVDQLLQRGFVVYPIMPKAAARYRERKRPTGSKDDRHDAWSLADALRTDGHGWSALSPLDPLTGELRALCRDEITLIEQRTALVNQLQAALKEYYPAAVEAFEDWTAPCSWAFVLAFPTPKALAAAGKRKWEKFLHTHKLWRPQTSSQRMEIFARATAFSGGEAITAAKSLLAQSLARLLQTLEQQLANYRARIQALFDQHPDHDLFGSLPGAGAKLAPRLLAELAGADWSQLSQVQARAGTAPVTYESGKIKRVKIRRACTHPLRATLHLWADLSRHYSAWAAAFYRAHRDKGQSHACALRCLAHRWLEIIGAMSRTHSTYNPEHHLRQIQKHGSYVLKLINSPDPKPL

SEQ ID NO: 498934 - protein, 342 aa, unidentified
MKYIGLDAHSATCSMAVLNEEGKVTNHMKRPTSADALIEALSRVSGPKHLAVEESSVAQWISIVLEPYVTELTVCDPRENDWISRSDHANDYTSAVKLARLLRGGYLKAVRHPGRQMARLRRMFLHYYDLNHQITRFKNKVKTFFHQAGIHPRGGAVYRRDERGRWLERLTGWKGLLRRASDCLTLVDTLEEMKSGVRDRMVRAARRADAQAYRTLRSVPGVGPVVATGYMATIVTPDRFSRKNKLWSYAGLANIHRESGESVSREGASNEGNKVLKWVVTQHHRAAVQASWGDGPCRFARKSARLRQRGVDRAAARRNLCRTLLSVVRGVWRKGETYRERQ

SEQ ID NO: 498935 - protein, 391 aa, unidentified
MSMYFIGIDISKYKHDCCIISAADQKVVSKVTIKNNKAGFDELLTIINSLSNPENIRIGFESTAHYALNLELFLENSLLTFMEVNPVLISEYKKSKTLRRTKTDSVDCESIARWLMTVEYKPHSKGFYHAYSLKSLTRLRDKLIRQRSFYLVKITNVLDHTFPEFKPFFNERLSKTALYLLENYGSAEKMARMNSASYEKLRSLSRGKFSPQQFLQLKELAANTVGVSNSIFDVELNSLLSLYKSLVKEIDAIEKEINKLIEEVHPHYMSIPGIGPLSAAVIYSEYGDISNFANPGQMLAFAGIEPGINESGTESHGGRMVKRGSSQLRYTLINCCLPLIRFDMTFATYYAKKRGEGKPHRLAITHVAKKLIRVIYALERQDIDFNAQKLR

SEQ ID NO: 498936 - protein, 411 aa, unidentified
MPKIVYPICCGIDVHKSFVVACIATTDQSLVTTYSKTKRFSTFTNDLRRLAGWLSENNCRDVCMESTGKYWVPVWNILEPTCNLVLAHPKYTKAIKGKKTDKRDAKWIADVFKHDMVNGSFIPPADIRQLRDLVRYHFKLTSCTTSEKNRAQNCLTVSNIKLDDVFSDVFGKSASEITTRLLEDNQPFDVTPYVSKKCKTPLPEIQAAVDGMLCVQQAEKLRIIRSHMDSLALCKANLESEILAVAEKFLPQINLVSTVPGIGDFSAVAIIGEISTDMSVFPTSRHLCSWAGLAPLNDNSAGKKKTTRISRAGAYIKPLLVQCALAAIASKKHPEVRNRYNAIKKRRGHKKAIIAIARMLLTAIFNILKKNEPYNAELYRQSDKPPAHREVSVEQAIFILQRQGYLVTAAS

SEQ ID NO: 498937 - protein, 322 aa, unidentified
MNIFELGIDVAKAKLDCALRLPEGKIRSKVVENTPDGFQALRVWLNKQGVVALHVCMEATGTYWEAVAEFLASLEAVTVSVVNPAQIKAFGASRMVRTKTDKADAKLIAEFCAERHPAPWQPPAPAEQALRALVLRLDALQGMRTQESNRLDVARPAVKEGITKHLDWLDKEIKLILQVIRDHIDSDPTLRDKQRLLDSVPGLGERTIAVLLAFYGSPERFGNARQAVAFAGLDPRQHESGSSVHGKPRLSKVGHTFLRKALYMPAMVTLYRTTWGKLFRSRLAASGKPPMLIIGAMMRKLIHVAFGVLKSGKPFDPTLHGA

SEQ ID NO: 498938 - protein, 356 aa, unidentified
MSQKLNSIVAVIGIDIGKNSFHIVGQDRGGALVLRQKWSRGQVEARLANLPPSLIGMEACSGAHHLSRKLQALGHDARLMPAKYVRPYSKGEKNDYRDAEAIAEAVQRPTMKFVATKTAEQLDLQALHRVRERLVSQRTGIINQIRAFLLERGIAVRQGLHFLRAELPGILAKRTDVLSPRMLRVIEDLAGDWRRLDERIESLSGEIDALARHDKGCERLMTVPGIGPIISSAIVAAIGTGDAFSKGRDFGAWLGLVPKQMSTGDRTILGSISRRGNRYLRKLFVQAAWVVLVKLGPEQWERYGLKSWIEAAKKRLHHNVLAIALANKLARIAWAVLHKGRAFECVKTNATASRPV

SEQ ID NO: 498939 - protein, 400 aa, unidentified
MHPKMKHVYVGIDIHRETHTAVIINCFGDKLGEITFLNKPSDFSKLLKEVKKHTPEGITPAFGLENVVDSGRALAVFLTGKNHIVKYVNANLTYSERKNQPMLHKTDSHDGLCVARVLLNRLGELPDVDLNDSFWAMSQLTKRRAALVKANVGLKNQLQSHIIHHYPSYKKYFHLFDCKTALAFWEKYPSPQALKDVTPEDLGAFLFKHSHRYYSIDKAKEILAFIDKDGDTQNSHQENRDFIVKSIVKQIKYTKELIQEIEKEITVILPSFGYKLESMKGINTVMAAEFISEIGDIQRFSSPDKLAKYSGIAPVSYSSGQTDRLLSNRLGDRRLHQLFFLLAVTVTSGRQKLNNEIFYNYYKKKLSEGKTTKQALKSVMRRLVNIIYHMMKDKTAYRQP

SEQ ID NO: 498940 - protein, 344 aa, unidentified
MYVGLDVHKDFCQAAFLDVDGKLVKEERFENTVSGLEELAQATIDCEVVMESSTSSMHVYDALSQTCKVKVAHPSKVKAIASARIKTDKIDARILAHLLRADLIPESFVPCIAHRQARLLVRQRASLVGMKTQIKNKIHALLAREGLKNPFKDSFGKKTILFLRSVDIGEAQRTSLNSLLTVLDALDKEVKQSDKDIRCYASDDKYAKLIITHTGVGALTALAVSSEICDITRFESHKKLCSYLGLVPSVYQSGFTDRKGHITKQGNTLIRSLLIQCAWSASKYSPRFKRKYNKLRKKTGSQKAIVAIARTIAVDMYFMLVRNEEYKEPKNERKGGKPVPLLGR

SEQ ID NO: 498941 - protein, 359 aa, unidentified
MSTQSKPFSFKGQKIFVGLDVHLRSWSVTVLSEQAVLKKFTQDPSPAALNKFLTNTYPDAEYYSVYEAGFCGFWIHWELHNLGINNIVVNPADVPTMAGERLRKTDAVDSGKLARSLRSGELKGIYVPDSITTEIRSLIRLRDSLTKDQTRHKNRIKAHLRYLGIDIPEEFCRPGRTWTNRFVLWLKSLELETAYGKKTLDLLIAQYEDLRGQQLKMMKELRILSMTDRFDEPLRFLMSVPGIGQLAGLTILSEVDDISRFKDAAHFASFVGLVPMCYSSGEHEGTGNITVRRHAKLRWLIVEAAWIASRKDPVLSAAYVEYYRSMKPSKAIIKIARRLVNRIYFVMKHQQPYVNCYVS

SEQ ID NO: 498942 - protein, 358 aa, unidentified
MADKVTEAAVVGGVDTHKDLHVAAVVDQNNKVLGTQYFATTRQGYRQMLAWMTSFGALKRIGVECTGTYGSGLLRYLQNAGLEVLEVTAPDRMERRKRGKSDTIDAECAAHAAFSGIRTVTPKTRNGMIESLRVLKTCRKTAISARRVALQIIQSNIISAPDELREQLRNMTRMQLIRTLGSWRPDASEYRNVTNVYRISLKSLARRYLELHDEIADLDVMIAAIVDELAPELIKRNAIGYESASQLLITAGDNPQRLRSESGFAALCGVSPVPVSSGKMNRYRLNRGGDRAANSALHIIAIGRLRTDDKTKEYVARRVAEGHTKMEAIRCLKRYISREVYTLLRNQNRQVNSIPIMA

SEQ ID NO: 498943 - protein, 379 aa, unidentified
MKKDNKSVTGVKNLKAPKSEKKKVEEEAVTIGIDLGDKSSRYCVLNAGGEVTGERSVATTKTGMAQAFGALKRSRIALEVGTHSAWVSRLLSGFGHEVIVANARQVKLISASSQKDDKFDARTLARLARVDPQLLRPIRHRSEKAQMDLMRIRVRAALVETRTSLVNTARGLVKALGERLPQCDADQMGVKQAQGLPKEWQEELKPLLEEVESLTEKIKASEAQLEQIARTEYPETELLKQVKGVGPLIALTYVLTVEDPQRFEKSRDMGCYVGLRPKRRDSGESRPQLGITKEGDGYLRKMLVQGAHCILSRRGPDTDLKRWGLKLAERGGKNAKKRAVVAVARKLAVLLHCLWVTGEVYEPLRNSNAGADVSSPAAA

SEQ ID NO: 498944 - protein, 351 aa, unidentified
MTMVGGFDVHRKQITFDYVDDDGLVRVGEIRPATRTTLRHWLSEHCPAGDAEFALEGCTGWRYVVDELATAGVVAHLGDPAEVATLRGPKKRAKTDRADARLLRTLLLEGRFPESWIPPAHVVEVRTLGRLYCTLMDERRAWQQRIHAQLFHQGCPPIRALLSVAGRDALAQAELSAAGRQYVDTALRRIDELTVEIGPVRGQLVSFARRQVACQALQARQYGVGWLCAAIMWAEIGDARRFSSSDQLVRFAGLDVTVYSSADKRSPGHLSRQGSPELRWATFEAAKCAARHGSPEHAYYQRLATKHDGHNGKNPTLAVERKILRRSYHTLRELGDAALAMPVPEEQGVAA

SEQ ID NO: 498945 - protein, 415 aa, unidentified
MFKIIRSKCCGLDVHKTWIYACIGIADSSSRVDYKQARFSSFSKGLKQLSEWLAKYDCTEVCMESSGKYWIPVFNVLETTCDVTLAHPKYTKPQKGNKTDRKDAMWICDLFMCGMIKRSFIPPADIRELRELIRYRTKLTNMITGEKNRALNCLTVSNLKLDDVFTDVFGKSSSSIIRFMLDNPGVYFDVTPFIHGRCKTPVEEIQAAVDGAMSPAHAVKLRECMSHIDQLESHKRMVEQDILRLSAPYGDELALIRTVPGFDKNPMTAITILSEIGADISVFPSAKHLVSWAGCCPRNDQSAKKIKSARISRAGVYLKPLLVQVANALIKSKHHPEFKERYRKLKARRGHKKAIIAICRMLLTAIWNILSKAEPYSPAGYLSDHQVTEVKTLTQKQALNLLKSRGYVITDEEPA

SEQ ID NO: 498946 - protein, 380 aa, unidentified
MKKFITHIGMDTDSRGFDIAIAEGFGSNNSEVRSWGRIPATLAAVDKLIKQLRKQGYQELRFIYEAGPCGYGIYRHLQGKEGIVCVVVAPSKIPRQPGERVKTNRRDALKLARLDRAGDLEAIYVPSEEDEAMRDLSRGRAAAVEAATRVKQQLKSLLLRHGIKYPGKGESWSGDYRKWLRGLQLPHEAQAYVLAEGLVALDEAEARVTRLTERIRELLPGWRLQPVVAALQALRGVALVTAVEMVAEVGDLTRFSNPREVMGYLGLVPMEDSTGDKRRQGSITKTGNGHARRSLVESAWAYARPPRVTRALKQRQQGLSREVIEISWRAQVRLCGRYRRLSARGKNKKKIIVAIARELCAFMWAIAVITSGQQLPARAA

SEQ ID NO: 498947 - protein, 412 aa, unidentified
MSSLPEQIPDAEHELVVECVCAIDVAKASGKVCTRTPDPRRPGRRGSTVWDVSATTAAITDLGEQLVAAGIEKITVESTSDYWRIWFYLLESAGLTVQLVNARDVKNVPGRPKTDKLDAVWLAKLTEKGLLRPSFVPPQPIRQLRDYTRLRIDLTRERTRYWQRLEKLLEDALIKVSSVASSLGTLSVRDMLEALIAGERDPRRLAGLARGAMKAKHSALVEALTGRFDDHHAELARMLLDQIDTLNAQIARLTIRIDDLVVTSIDEPGDTVPADGQVAARGGSGLTVIERLDEIPGVGRGAAQIILAEVGPDMTVFPTAAHLVSWAKLCPRTIQSGPIQRGGRTGKGNPISRECSARPPPQPPRRTPSSANATKHLPSQNDPAPQATPDAIACQSPSAFSGQGVEHCSRVT

SEQ ID NO: 498948 - protein, 474 aa, unidentified
MGKGSGGGVSRSDRRRNARRERLRGLLPRDGAVVGIDLGEGKQALCVIDHDVRVVWRKTARVRAHELGGVLDEAVEAARAAGFSRVTVACEPTGPRWMQVQRLCGERGLGLVCVQPLVSHIARVQEDYTAHKRDEPDSVLIARLAAELHCYVPEELGETWAFLRGLGRRREGLAAGATASVLRVRSFLSVAWPSAVTAAAAPFDSVTWLACVQVVTERCGADPARLAALGEEEFLALVTERARAWGASRADKRIARKVLAVLDDPDAVGWSRRGLFRRVADELGDLRRYRAQLRAVEADMAGVLAGELGLARLGDIPGLTLAGAAVILAEAGDPRRYETSSSLVKHAGLSPADNSSGASEGRSRISRRGRPGLRTAAWRAVWPLLVHNPVMAAKYQALVAPAEAAARSAARARPGSARAAQAQRTVRSARARARVACAASLLRWIYFMTVHDAGWDPAAASGGRLDPAPRAEAA

SEQ ID NO: 498949 - protein, 413 aa, unidentified
MMKLKYSICCGLDVHKNVIVATIVITNADGISEYKQKSFSTFNSDIRKFHNWLIENNCYYVCMESTGKYWIPIFNYLENDIEVCLTHPKYVKAIKGKKTDKKDSKWIADLYKFDLVRCSFIPPKDFRQLREIARYRFKLVCMKSSEKNRIQNCMTVSNVGIASVLSDPFGKTATEIMSYLLTHTSDSIDERAVRKLIKKGAKAKSDEIIEAIRGYNIESDQAKKLELARIHLEYLDGMITQSEVELYVRMKPYYKFVELVSTIVLAETGVDMGIFDDAKHLCSWCGLSPTNNESAGKKKSVRISKAGDYLKPMMVQCALAAIKSKKQPYFAIKYGRVKKRRGHKKAIIAIARMMIVCIYHMVSEEKPFNPIDYEELMSPKNQIERVILNENNVFAYLESLGYDSSKLVKRNDN

SEQ ID NO: 498950 - protein, 342 aa, unidentified
MGQVTTIGLDIAKSVFQVHGIDANGEVVLRRRLTRARLLPVFTKLTPCLVGIEACATSHYWARELRKLGHDVRLMPPSYVKAYVKRQKNDTADAEAICEAVTRPTMRFVEVKSPEQQSIMVVHGTRVMLMRQRIQLSNAIRGHMAEFGVVAPVGRQGLLTLTVILHDEADDRVPVEARHCLQMLAAQLRLVNAQILENDRRIRLSARATDVGRRLMGIPGVGPVLASAFVATVPDPHAFRSGRNLAAWIGLVPRQNSSGGKERLGGITKQGNRYLRQLLFVGAMAVIRYAERHGTRRPWLVRLLARRTTKVAAAALANKTARMVWAIMTSGQPYREPELRTA

SEQ ID NO: 498951 - protein, 349 aa, unidentified
MAEQRLSYTGARIDVGIDVHKETYTVTCLCQRQIVKTATVPADPARLAESLPRWFPEARLFTAYEAGFSGFVLHRALTTAGITNIVVNPASVAVAANDKVKTDRRDAKKLARDLADGRLRGIYVPTEAEELARLLPRTRAQLVAHRATLTRQIKAKLHQFGRIPPTSRRLMSSRYLREIAAWELPTELRVSLTLLADQWRFATRQLLEVRRLLREQAKGQVALETVYRSVPGVGEVVARTLATALGDMTRFANERALFSYPGLTPSEYSSGTAIRRGHISRQGVSRLRHGLVETAWRALPRDPILQAMLDRIAATRGKQRAIVAIARRLIGRLRACFRHGTTYAVGTVG

SEQ ID NO: 498952 - protein, 316 aa, unidentified
MQEKECFVGIDVAGKELETAMLPEAKTRKWPNTEEGIDSLVASLKALSPTLIVVEATGGLECPCAAALATHGLAVAVVNPRHVRDFAKATGKLAKTDAIDAIIIARFGEAVRPKVREIQDAQMRGLKALAIRRRQIIQMITAEKNRLARASDWPRKDIQEHIDWLQRRLDDVDNELQDTIKKSPMWREKDALLRSVPGVGKILSLTLLSQLPELGTLNRRQIAALVGIAPLNRDSGQFRGKRSVWGGRAKIRSALYMATLVATRCNETIRQFYVRLCAAGKPHKVALTACMRKLLTILNAMIRDLTRWSYASPAQT

SEQ ID NO: 498953 - protein, 341 aa, unidentified
MSIVAVGIDLAKNVFALHGVDETGKVVLRRPSVKRDQLLEFFASLPPCLVGMEACSGAHDWARKLKALGHDARMMAPKLVAPYRDGGKRKKNDAVDAEAICEAVQRKKMRFVPIKSEEQQSRLAVHTARDGYVAQRTATINRIRGLLTEVGIVMPKKAETVRKLACQHLEDLPGYLNQVVNDLLDELGRLDQRVASYDVMIREMARQDSRSKRLMQINGIGEVTASAIVALVGNGHDFKNARQFAAWLGLVPRQYGTGGKVQLGRITKVGDPYLRKLLVMGARAVLNAAEGKADRMSTWALQVKERRGYGKALVAIAAKNARIAWAMLSKGQDFRQALKEA

SEQ ID NO: 498954 - protein, 404 aa, unidentified
MERVYVGIDWADDHHDVYVTDDGTKALNSFRIAHSYEGMEKLRKQLGKLSDKPDNILVAIESHHGLLIYALLEAGYTVYPINPKAMDRYRDRYRMSSSKSDPQDAMVLANILRTDLHLYKPLPKEMIADARLRELTRAHKSLGQQKVKLMNQLTTQLKSYYPVALHLFAKLDQEITLAFLEHYPTPQKASTASLQDLQKFFHEQGYSCPGKIPFIHQSLQQPALRAPSDMGDIHTTIVLSIIPVLRSLVIEIEKLAGEVIKEFNQNPGRDIFSSLPTGEITAARLSGELGNDGARYPTREYLQTAAGTSPVTRRSGKTILVFFRWQCNKHLRDAFQNLARDSVVKCNWAREYFTRQLALGHKPSRAYRALANRWAAIIWKMLQDSKRFDKARLEKEVARTLPIA

SEQ ID NO: 498955 - protein, 349 aa, unidentified
MILVGCDLHTRKQQVAVLNTDTGELRDQELSHIGDDVEHFYAALSPPVTVGIESTGYSLWFHALLQRLGHTLLVGEAAKIRAMVVRKTKTDRRDARHLRDLLKDDRFPVVWIPDPLTRDLRALIKHRLRLVRIRTMVKNGLHAIALNQRLALGPSLWSRQGLAQLRALVLLPHTRRRRDDSLELMQWLNGHIDALDLHVATAAAADPDARRLMTHPGVGPLTALATVLVLGPVGRFPGSKHVVSYIGLAPAVNASADKYRLGPISKQGSALLRWVLGQAAPLATRGDADLKRIYFAVLRRRGRPKAKVALARRLLIRLYVMLRDHIDYDEFCRRGRAQRRGLELAGTPV

SEQ ID NO: 498956 - protein, 447 aa, unidentified
MAPRKRAATQAAISLTHPNAAGIDIGSAAHFVAVPPERDDESVREFASFTADLHRLADWLDACAVDTVAMESTGVYWIPLYELLQSRGFTVLLVNARHVKNVSGRKSDVLDCQWLQQLMSFGLLHGAFRPADQVCVLRSLSRQRTMLLRSQGRFVQHMQKALTQMNIQLANVISDVAGETGQKILRAIVAGERDGLALARLKNSRIRASEDEIAQSLQGSWRAEHLFALKQALDAFDFCGTQLAECDAQIQAQLQALHVREDEPAQGKKRGRARNAPKFDLRTQLFQMCGVDLTRIDGIDVTTALVVLSEVGADMSKFPSDKHFASWLGLCPGTKITGGKVMSGKTKRCANRAAQALRLAAAALRSSQSALGAYYRRMCARMDKPKAVTAAAHKLARLIYAMLTRGQEYTDQGQDYFEERYRQRVLHNLAQKAKAMGMQLVPSQNTA

SEQ ID NO: 498957 - protein, 308 aa, unidentified
MESAVYVGIDVSKDRLDIHVRPSGEQFVASGDDKMLVERLRGLDPRLIVLEATGGLQVKAAGLLAAAGLPVAVVNPRQVRDFAKSIGQLAKTDRLDAAAIAHFAEAIRPEPRPLPDEAQRGLVALIERRRELVALRVAERNRLRELHSSWVRKDLEASLADLAARIEAIDAEIERHVKASPIWRSQENLLKSVPGVGDVVARSLVAELPELGTLNRREIAALVGLAPYANDSGQFRGKRSIRGGRSTVRTVLYMAALSASRSNPAIAAMYKRLCAAGKAPKVALTACMRKLLVILNAILRDQRPWQHA

SEQ ID NO: 498958 - protein, 376 aa, unidentified
MGYHSEAFVGIDTSKLRNAVAIADAGRGGEVRFLGEIENTPAATAKLVRKLAAKYKRLTFCYEAGPTGYGLHRQIKGLGFECTVVAPSLIPKRPGDKVKTNRRDALSLAKLLRADELTAVWVPDGRHEAMRDLTRARETAMLDLRTKRQHVSAFLLRLGRPYPESRKTWTKAHMSWIASQTLEHPQQRLVLEEMMLAIRQAQERLQRLEQAIAAAVGEWSLAPLVTALMAMRGLDLIAATTLLAEIGDLSRFRTPTELMAYLGLVPSEVSSGDTIKRGPITKAGNRRARRMLVECSWSYQHPPRVGQAKQPKVDAAPPAVREIAWKAQCRLYRRYRTLIRNGKLKTVAIVAIARELAGFIWAVARVVTSTRFAAAA

SEQ ID NO: 498959 - protein, 469 aa, unidentified
MSKLSRRQSQASPAAQAEVRPFEGLARIQPHAAGVDIGAHEIVVCVPGPDETQIVRTFGTYPADLESLAAWLKEHAVETIAMESTGVYWIPVFELLEQHNVRCCLINSATTKRMPGRKSDVNDAQWIQTLHSYGLLSDSFRPDADLIALRTLLRHRAQLIQHRSPHILHMQQALVQMNLQLSQVLSDVTGETGLNIIRAIVAGERDPHKLAALRNSRCHKSEEDEIALALTGTWREEHLFVLQQSLALFDFYTQQIAACDAEIERTYSAIRPDWGSDQPALTPLQHKPRSHSKNQPQDVQGREHLYRIVGVDLLAVPGLSASLAQTIVAEVGSSLERFPSAKHFCSWLGLAPHNDISGGKVLRSYRLKNHNRAGQAFIQAAAALIRSDTVFGACYRRLKRRLGPAQALVATAHKLARLVYKMLKEKVPYEHTTAQEEEARLRDREIAYLKQKAAKLGLILTDTERTVVS

SEQ ID NO: 498960 - protein, 469 aa, unidentified
MRKNNINSSKQKVKKAISIKLPKHLDHINQMAAGIDVGSASHFVAVPEGCATESVREFKSFTADLYELAAWLKECKVTTVAMESTGVYWIPLYELLEQKGFDVKLVDARHVKNVSGRKTDVMDCQWLQQLHTYGLLQGAFRPDEQICELRAYLRQRSMLIQHMAQNIQHMQKSLSQMNIQLHNVITDITGETGMNIIRAIVSGERDSTILADYRHYNCKNSLETIKKSLEGNYRNEHIFTLKQALELYDIYQDKIKACDIEIEEKLLSFESKSQKDKKDNEPEVKKPNTYTKNKLSFDASSHLARITGVDLTAIPGIEASTALKIISEIGLDLTRWKDSKQFASWLGLCPGNKISGGKILSGKTKRTGNYASSILRMAASTLHRSNTAIGAFFRRMKSRLGTPKAITAVAHKLAVIVFNMLKNGTEYIESGQDYYEEQYKDRIIKNLRNRAESLGFELVSMQNVEPALL

SEQ ID NO: 498961 - protein, 355 aa, unidentified
MPVHYGRISSSKVSVKKLVRQFESKYPGATLHVVYEAGACGYWIYRLITSLGHCCYVVAPSLIPKKPGERIKTDRRDALKLVRSLKSEDLSPIYVPEPEDEAMRDLSRAREAAMKDLKEAKYQLKALLLRNNIRYEGTANWSKKHLRWLSELILPHPAQQIVLQEQLQTIEERIRRLERLDNELTHHVHQWRYYPVVKAVQAMRGVRLLVAVGVVAELGDLNRFDHPRKLMAYLGLVPSEQSSGGKRHLGAITKAGNGRARRLLIEGAHSYRYPANVSTELQLRQEGLPKDIVDIAWKAQLRLCKRYQRMSKKGKHYNLIITAIAREMAAYIWAIAKEVVLTPVNPKLRLSRVPA

SEQ ID NO: 498962 - protein, 372 aa, unidentified
MKDDSVIFIGLDTSKLKIAVAIADGRRNGEVRYFGDISSEPASVASMVNKLSKRGAKLHFCYEAGPTGYGLCRQIVELGHNCVVVAPSLVPRRAGDRVKTNRRDAMSLARLHRAGELTAVWVPDEGHEAIRDLVRAREAAGDALKQARQQLQSFLLRHGRIYTGRKPWTRAHTRWLTCQAFDHPAHHILLAEYCQAIEDAGVRLDRLTKLVVETAASWSMAPVVAAYQAMRGVAFMTAVTFVVEIGDVRRFDNPRQLMAYLGLVPSESSTGERVKRGRITKAGNTRARRVLIEGAWTYRFPARVSSRIQARLEDLPRTVREIAWKGQVRLCARYRKLMAAGKPKVVAVTAVAREMAAFLWAIGQEVAPTAKI

SEQ ID NO: 498963 - protein, 343 aa, unidentified
MEYYVGLDVSLKQTSICVVDQTGSVVREGVVDSDPEAISVYVRSKAPDAVRIGLETGPTSTWLWTELKQLGLPVICIDARHAKAVLKMQINKSDRNDAIGIARIMQTGWFKEVHVKDIDSHSVRALLASRALLVKIKRDLENHVRGLLKNLGLVIGRAKFNVFAVRAEELIEGRPELIAAIRPLLEARTAVEQQVSELDRKVMKLARHDAQVRRFMTVPGVGPITALAFKATIDDPARFARSRSVGAYVGLTSRRHASGEVDWTGRISKCGDAMLRSYLFEAAGVLLTRVPKWSAVKAWGVRLAKRNGLRKAKVAVARKLAVILHRMWIDGTEFNWSKQEIAA

SEQ ID NO: 498964 - protein, 357 aa, unidentified
MTRISAGVDVSKNRSTVCIMGQDGKFIMRPFLVWHSTEELDFLADTLKRLNGEVRVIMESTSVYQYPIALQLKERGLFISIVNAYKVKKFANTDFRGGKTDKKDSRTIASYGISYWDKLVEWQIPKDTYFNLDLLNRTYMNAKKHRQIILQELQHYIDCAMPGMDKELHSLNLNTKKDFMLDFVEKFWHRDEIVNMTEAEFTEVFTAWAKEKGYRPGKGKAAKIYAIAKSCIPYYPANPTVKTILQCIVDKLSGVNRTLVTIVTQMIEEAKKLPEYQIVREMPGVGDPLAARFFGSAGDIRRFKNSKALVAYAGIDSPPDESGDLSSTHRHITKKGSKVFRDTGYEIMMALRSQKRT

SEQ ID NO: 498965 - protein, 337 aa, unidentified
MRSIGVDLHSNSLTACYLSQAGAEQLATWGLSDLTKFLATLRPDDQVAVEATGNTRWFSQQLQPHVRRVVIVDPNQFEVIRRSVRKTDKHDARALAQFLQKDLLPGARLRSELAAEITSLAETRDKLVKLRTTFVNKLHALHRGRGVPSRKSEFLSEKGLRRALERDWGVTTRVEVEVIVSQLRAVRDSLKRLDAQLAASGAQLKGHTGLVSIKGIGPRAAAILLSVIGEVADFASEERLASYFGIVPRVSNSNETVRHGRITKRGSKLGRTCLVQCTLVAIRYSDYLRQFYERLKAKKGAGKAIIATARKFLGIIYRTLKNNWVFADFPNFVLAED

SEQ ID NO: 498966 - protein, 371 aa, unidentified
MDDTTKYVGLDVSKDKIAVAVADEGRSKPRYVGMIDYTVEAIRKLMKKLGEPELLQVCYEAGPTGYGLYRLLKSMDIECEVIAPSLIPQKPGERVKTDKRDAIKLATLYRAGELTPIYVPTENDEALRDLVRAREDVKEDELRAKHRLTKFLLRNEIHPPKGTRTWTAKYWDWLDSLKFERSASRVTFQEYLQQLKEYQQRLKILESEMEEQAKESVHAPMIQTLMTLRGIALITATSLVAEVGSFSRFQTPKQFMAYTGLVPSESSSGLTRNLGEITKTGNRHVRRLLIEAAWSYRYQPAVKGELKKRQKGHPTNVLGVSWKAQNRLHKKYFRLLGRGKESGKAIAAVARELAGFIWAISREADGDVQTT

SEQ ID NO: 498967 - protein, 415 aa, unidentified
MKVVFPTCCGVDVHKTFLVATIITTPADSLQPNYQKKRFSTFNSDLNRFADWLHGNHYLDVCMESTGKYWVPVFNILEKRGIRVVIANPKWVKAVKGNKDDTKDSKWIGDLFRIGLVKSSFIPDLNIRILREFTRYRYKLVSMKSSEKNRFQNAFTVCNVALDSVVSDMFGKSATAITDYLTSDESFDAEHCVSLLQRSLKKKAEQVLESIEGFSIADEQKARIKIIREHHDFIEEMIATVDTRVNEMVAKYEGNINLLCTIPGIDRRSAITIISEIGTDMGQFGSSKRLCCWAGLTPGNNESAGKKKSVRISRAGVYLKPALVQVAHAAVKDNDHPYYKLKYERIAKRRGKKRAIIAIARMILTAVYSMFCTGEVWNPVDLYKVDMPGCLKEQQLAKAIKQATRFLEKQGLSVA

SEQ ID NO: 498968 - protein, 340 aa, unidentified
MLRQRKRRVKTLAHEGNVVREFYGALEGRVVVGREGIGAMQWFLELLEELGIEHRVGHPAKIRAQETRKQKHDRRDASLLLTLLREDRFPEIWMPSTEQRDLRTLLRDRDQWVRMRSRVQHTLQAIALNHALRQGRALWSAEGQSALQALPLPPYTAQRRSELLGLYGQLQKRIQKLDKEVESQARQRSQSRRLMTHPGVGPVTALATEVFLGDPSRFTSGNQVASYIGMIPCERTSGKRQRLGKLTKEGNKLLRYLWTEATLHAVENDAELKRFYRRKLVQKGMGKARIAAARKLGIRLWIMLRDQIDYQEFCRRGLLLRQKGKAHAGMPDFQHGPAMQ

SEQ ID NO: 498969 - protein, 420 aa, unidentified
MHMHGVRAQELTSRSVGVALDRLVAVPVDVGKSTAMAMVVDFSGRRLAAPFEFALDRVGVGRFAARVREVLPGEAALVRVGVEACGHYHRPLVASKVLPEAWQLVELNPAWVSAQRRVNGSGRTKTDPIDLVAIADLLLAGRGYEVVVGDEALVELGAWVAHRRRRVEVRSGLKNQLTGQVDRCFPGLGATLSSVLGTKIGRLVVTEFADPQRLAALGVARFRSFAARRDVRVNVALAERLVAAARHALPTPDAVVARQVLTADLALLAGLDDQIAEVDERITTLVPATVYGVLTSGPGWGPVRAASYAAGVGDPTRWPSHRQVYRAAGLNPSQYESAGRRRDSGISREGSVPLRRAILDLGVGLWHQDPAARAYATGLRERGKPGAIITCALGRRANKIAFAMVRDQTLYDPACWTEQE

SEQ ID NO: 498970 - protein, 321 aa, unidentified
MPMLAECIDAVIGVDTHRDTHHAEIAHPSGAVIAACSIPSTSVGYAQLLAWARGHAPGPRLVISIEGTRSYGAGLARAATAAGLMVTECEQPTRKTRRGKGKSDPIDAHLAVLAALQLDTAKLAIPRADGDREALRILLCARAELTTTATGQANRLRALLRDGDDHDRDLARGRLTSTTLAALARRRLPAAASRAQAVRHREIRRLVQALRDATRALKDNNAELDAIVSDLAPGLTSRPGIGPVTAAQAIVSFSHPGRCRHDAAFARLAGTSPLEASSGQTTRHRLNRGGDRALNKAIHILATTRMRSDPTTRAYITRRRG

SEQ ID NO: 498971 - protein, 339 aa, unidentified
MKLTTVGVDIAKSVMQLYYIDAETGEIVNKPVKRVAFLEHFANRSPCLIGMEACGGSQHWARKLTAMGHQVKLMPGKFVKAFVMGNKNDAADARAIWMAVQQPGKSVAVKTETQQAVLGLHRMREQLVKFRTMQTNSLRGLLTEYGEVMGKGRTALDKAIPGVLERLVDRLPTILINTLREQWNGLVELDKQIAQIERRLQTWMKEDKACKAIAAIPGVGLLTATAAVATMGDAKTFRSGREFAAWIGLVPAQTGSGGKVQLLGISRRGDTYLRTLLIHGARSVLFHAKEPGPWIEQLKNRRPLNVVVVAQANKTARIIWAILAHDRPYEKGYVSVKPV

SEQ ID NO: 498972 - protein, 430 aa, unidentified
MNGSNVIRLQEFCQFKKVIRGSTDYLIVGLDIAKERHNAFFGTATGRTLHKGMFFDNTYEGFQKLLIQTDALKVQYGLRKVVFGLEPTANYHKPLGEYLIKGGYLVVLVSAAATVKNRELMDGRWDKHDAKDSANVADLIAQGKCLYYDCPGEDLRSLRGLLSLKKRLKKEEHGLRVRIRNQLLAQYFPEMDQHFGSIASLNVVQRCLDRSRIAIMEYDEFCRTVAPGKVNMAQQRRLTQIWRVAKQSIGCCVGEAVSVEAQIMVMGLHRVREMIKTVEDKIEDICLKFPEYSFLLMIPGFGPDVSAKVLAAIGNPERFTNGKQVLKMAGFDLCASRSGKTSNSATPVISKHGKSDLRYALYQAAMSSSLTNKDFMAYHTNKIRGREREKGIGTKMRVKLAAKLLIISWTLMKKKEPFDPGYLHRLEKAA

SEQ ID NO: 498973 - protein, 414 aa, unidentified
MALKIVYPICCGIDVHKTFVVACIASTIKGVTTYKRHRFSTYTKGLNELSQWLCENNCKDVCMESTGKYWIPVFNVLEASCNITLAHPKYVKAIRGKKTDKKDAKWIADLFKHDLVAGSFMPPLEIRQLRDLMRYRFKLTNFMSSEKNRLQNCLTVSNIQLGNVVSDTFGKSSMNIIDKILGNPLDTTFDIEPLIHGSMKKKLSDLELAIDGYITPEQADKLKVMKQHYEDLQSRKADLEKIILSLAASYTEEMNLILTVPSFKNIFSAIAVVSEIGVNMDVFPTAKHLCSWAGLTPTNNESAGKKKSVRISRAGCYIKPLLVQCATAVVKSEKHPEIRNRYLKLKKRRGHKRALIAIARMLLTAIYNILKKKEPYNPNLYKKADVLPVNREITVEQALLLAKSQGFRIITVAT

SEQ ID NO: 498974 - protein, 343 aa, unidentified
MKLSYVGVDLAKNVFQLHGVDRSGKAVWRRRLRRHQWLAALMKAADTSCVIGMEACTGAHHWARQLQAHGYTVKLIPPQFVKPYVKSNKNDAHDAAAICEAMSRPHMRFVAVKSVAQQDIQATHRIRTELREQRNAKSNQIRGLLAEYGLVAPQTLLALRAAIPDWLEDAENGLTDYFRSLLHSLWGDLLALDERIKELDQKIEQLANGNEVTRRLQRLRGVGPMTATALVATVGTGEQYRKGRQMAAALGLTPRQNSSGDKQRLLGISKRGDAYLRTLLIHGARAVVSQARHRDDRLSCWVTEIAKRSHPNVAAVALANKTARMAWAMLRDKTDYDPALAAR

SEQ ID NO: 498975 - protein, 342 aa, unidentified
MLKNKIMKNCQFVVGIDVSKKTLDICLLVLFNAADCHYYHTTNSLKGYLRLLTWLKARKVSLKEGLFLLEHTGIYSLIVCLFLKKQSLNYSLIPGVVLKKSLGICRGKSDKKDAYAIARYGYLYREDINLQILKEDQILKLQILFSQRKRFVSALKALLSPVKEMEEMGMEDLAKQAIQNQQIVVAELKTAIKKAETQMLNLIEEDVELNKQYNLCTSIPGVGMQLATYLLIVTHAFSRFSDSRKLASYAGVAPFPYQSGTSIKGKNKTSPMGDKALKALLHMGALNVIQHDNQIKIYYTRKRAEGKNAMLVLNAVKNKLLARVLATVNRGTPFVQLAQHIS

SEQ ID NO: 498976 - protein, 342 aa, unidentified
MTYYAGIDVSLEYSSVCVVDGAGKIIREQRIASEPEALIAWFRGLGFGLERIGLEAGPMSQWLHAAMRAAGLAVELLETRHVRDAFKAMPVKSDRNDARGIAQLMRLGWFRPVHCKSMAAQEMRALLTARKLVQSKLLDVQMSLRGLLRGFGLKVGATTPSRFAGRIRDLVEGNATLEVIAAALLVVHETMRRELAGFEKRVRSIARSDGRVRLLMSTPGVGAIVALTYVAAIDDPARFKSSKGVGAHFGLTPKKYQSGETDITGRISKIGDEGVRTALYEAGHIILTQPLKGCTALKSWAMRLAKRAGMRKAKVALARKLAVIMHRMLVDGTLFANVAVAA

SEQ ID NO: 498977 - protein, 315 aa, unidentified
MFVGIDVSKDWFDAAWQAEGQLRTQQFAYTDEGIEQLMEQMPPEAVCVMEATGTYHARLALKLFEAGRGVSVVNPLVIKRYGQMKLLRVKSDRADAQLILGYAQQERPALWQPASEQVQELQQAHGWLNDLIGQRVRLLNRQHAVSHRAKPSAFVVGQMAAQLQQLNERIDECERHLEVLVKKSFAELYERLLTIPSIGAKTALELIIVTDGFTRFEDVKQLGAYIGVSPTTLRSGSSVKGKGSIAKLGQGRMRQLLYLCTWTAKNCNPACKKLHQRLKAQGKPAKVINIALAHKLLRQAHAVATKNVRFSAEMA

SEQ ID NO: 498978 - protein, 337 aa, unidentified
MKTTETMFETFVGIDVSKLTLDVTILKPQVQKLCHRVFDNSDEGYLKLKNWLSIHHGVIFARTLFCLEHTGLYTRSIDRFLRERKAYVWMESSLHIKKSLGLTRGKNDKIDSQRIAEYAYRFSDKASIRNHCTPVIQILRDLLTTRDRLNKSLKSIAVSINELKRVDLKQAINLETFQLAAIRGLKTSIKEVEEAMFETVENDKQLKIHCDLAISIPGVGKILAIKLMVYTQVFTRFESVRQLACYCGVAPFEHRSGTSINGKTGVSKFANMDLKSTLHLASLSAIQYNPDMKAYYQRKVNEGKSKMSVINAVRNKLLSRIIAVINRQTPYVILSQA

SEQ ID NO: 498979 - protein, 410 aa, unidentified
MTHEQSAPQRFVGLDVHKHYLVAVAVDPDKNEVMPPRRVQLSNLDEWVRKNLTPQDAVVLEMTTNTFHLYDELLPHVQSVTVVHPPHVALITRAQVMTDKIAARTLARLHAARLLPPVWVPPTEVRDHRALVAQRAKMMRLSTQARNRLHAVLHRHHILPPGGELFTADKHAWWLALDISILERARVQSDLATLQFAWAQVALLEQAMVALASQDERSVLLLQLPGVGLITAMTLLAAIGDIARFPTAGHLVGYAGLGGRVHDSGQTHSSGRITKAASRDSRAAMVEAAHTACRTHPHWQAELARLEPRLGKNKAIVAIARKLLVVVWHVLANGEADRYAQLPSGSEFVARKLLQHAYRLGREHRKGQSTGEYTRAQLDRLGVGVDLETVAWGKRTIPLPPSRLKEAAKD

SEQ ID NO: 498980 - protein, 317 aa, unidentified
MSVANEVFVGIDVSKAELEVCWLPQLGRLQVARDEGGLVRLVERLKALGPSLVVLEASGGYEMPVAMALAGASLPCVVVNARQVRDFAKASGKLAKTDRIDAQVIAEFAQAIRPQVRALPDAAAAHLIALVARRRQLVEMLTAEQNRLALSHAAVREDLKQNIAWLKSRLQDLDGELARAVRSSPLWRESDKLMQQVPGVGRVVSVVLLALLPELGRLSPKKIAALVGVCPFNRESGRWNGKRAIFGGRAGVRSVLYMAIVSAIRWNPLIKTFYQRLLAAGKPKKLAMTACMRKLLVILNAMMRDRADWNPNGALAT

SEQ ID NO: 498981 - protein, 415 aa, unidentified
MRVIRKRCLGLDLHKKQITAHLRVDRGSSQEPEELDIRYGTMPDQLKRLREWVVEHQVTDVVMEATSVYWMHVYELLEGVTTPAVVNAAQVKKVPGRKTDMSDAQWLSELHAHGLLRLSFIPPKEIRELRAVTRYRTKLVAIRTAAKNRTIKLVEMAGVKLSSVVSSSFGKTGRAILDALCEEVRPDAAKIATLAKGSLREKVSELERAVRHPLSAPQRDLLKMHLHTYDSVDAQVAATELKLNQLAQPYSAQIALLDPIPGINPLSAITLLAETGIDMSVYRDERHLSSLSGLAPGNAISADKRRKVSVRAGNRHLKRILVQIAWAASRKKDSFQRLRFMRLQTRIGRNKAIVAVARQILVLVYHVLSTGQPYLERGTAFYDRANKEKVIARYTKRLAQLGFLVQLTKKDEPTE

SEQ ID NO: 498982 - protein, 347 aa, unidentified
MLNITRVGVDIAKSVFHVHGVDRQDRVQWRGKYARGKWLAALVKRVPVGAEIGMEACASAHYWARELQQRGYRVRLIAAQFVKPYVKSNKNDSVDAEAICEAMSRPQMRFVAVKTVAQQDMQAAHRIREELVGQRTAKANQIRGLVGEYGLIAPKGIQQLRRALPAWLEDAENGLSDAFRVLLADLAGDLRHLDDRVAALTAEIERRARQDPVAQRLLTLRGVGPLVASALAGALGDGRAFRRGRDFAASLGLTPRQHSTGGRDRLLGISKRGDSYLRKLLVHGARAVLRHADGRDDGLSRWLLALAARKHVNVAVVALANKTARIAWALTRQETAYDPALAAATAA

SEQ ID NO: 498983 - protein, 482 aa, unidentified
MKPKQQGETRKAPCRPTQGHWHQMNRKQRREMMRRIQSENLSLEVVHPDAAGIDIGNESHYVAVPPTRDSEPVRRFGCTTAELKSMADWLKQCRIRTVAMQSTGVYWIAVFDILEEAGFEVYLVNARETKNLPGRKSDVQESQWLMKLHTYGLLRNSFRPSQEIRTMRTYWRQRNDLVQAAARHIHRIQKALTQMNVQLANVLTDVSGLTGQAIIKAILAGERDPHKLAAFRDPRVKATEEEIARSLEGNWQEDLVFVLKQEQDAYEFCQKQMAECDRRLQDYLKQRKDRSAGADLPEEKRKTRLKNKKGNKPQFDLRRELFRMTGADLTRIDGIDVMTAMTIISEAGWDMSKWKTEGHFVSWLRLCPDNKISGDKLIGKGRLPSNNRVTIALKMAASSLRTSHSYLGAQFRRLKTRLGAPVAIKAMAAKLARLVYRMLSHGMQFIDRGADFYEAQHRHRQIHALKWKAARLGFQIIEAPAA

SEQ ID NO: 498984 - protein, 366 aa, unidentified
MKKVSTVAAKPSRNISQQRLTIGLDLGDRNSWYCVVDEAGQIQLEQRVRTNAKALQEVFGAMPRCRIALEIGTHSPWISRLLSELGHEVIVANARKVRLIGESRKKDDRLDAQTLARLARIDPQLLYPVKHRSAQAQADLMMIRARAGLVRARTGLVNTARGLAKSYGERLRGCNVRNMNPEKAEGLSPELQGALEPLLNAIESLSERIVEYNDRIENLAQESYPQVALLKQIKGVGTLIALTFLLTLEDPHRFQKSRDVGCYLGLQPGRRNSGQREPQLHISKEGDPYLRTLLVQGAQHILGPFGIDCDLRRWGLKLAERGGRNGKKRAIVATARKLAVLLHHLWVSGEVYEPLRNSRRTTAAAA

SEQ ID NO: 498985 - protein, 347 aa, unidentified
MTQYKRIGIDTSKAVFTLHGIDQRDQPTLRINLRRSQMITFFRKLPPTEVAMEACCGAHYWARELTALGHAVLLIPPQYVKPYVKRGKNDRNDAAAICEAAGRPGMHFVPAKSLSQQARGMVLKVRDTLIGQRTLLVNTLRGHASEFGVVAGKGVGRVGSLLAAIEQDATIPAEARDMIALLGQQIEHLNKKIKALEATLNATHKTNAVSQRLATIPGLGPVTALTLATEIDPAAFASGRHMAAWIGLTPKEHSTGGKQRLVGISRAGNERLRSLLVVCATSVIKAATMPASKQMTGWLRGLLQRKPRKVAAVALANKIARVAWAVMTYGTVYRRSPTDSEVSFYAA

SEQ ID NO: 498986 - protein, 349 aa, unidentified
MVTIGVDPHKKTHSAVAVDAVGAALAARTEPAKRDGFGGLLAWARGLCDAKRVWVIEDCRHVSGALERFLLDHGEIVVRLPPRLMAGARQSVRERGKSDPIDALAVARAALREGIDTLPAARLAGVELEIRQLAVHRQRLVDARTRLINELRWQLHDLWPEWEIPKRVLIGAGWQAQVARRLKRAEPTARVRIARDEIRRIRDLTRTINELHHELAALVAQVAPQLLTEHGLGALTAAKLLGEIAGIDRFTSDAQLARLAGCAPIPASSGRTDRHRLDRGGNRQLNHAIHTLALSKIRHDPQTAAYIAKQRHNGKTNREAIRCLKRHLIRRVYNLLRDPDQAPTTLCLT

SEQ ID NO: 498987 - protein, 315 aa, unidentified
MYYLGIDVSKKTIDCCLISDSIFYERRFDNTEDGFRRLDDWIQEYTAEAVHCCCEATGIYHEAIAAHLRQKHTVSIVNPSKIKGFREAEQTRTKTDRQDARLIAEYCRRMQPQAWQPPTEEQEYLQAITDYIARLKQQRATEQTKHQTAPDTIRHHIQTTIDHLNRLIATVQNELKDFYRQNPAYNEKKNRLKTIDGIGESAASALLAKLTRYDFANQNQFAAYLGLDPKIKDSGTSVKGKPRISKQGQKSARKALYMPALVAYRMNAFPAFTARLKARGKPPKLIIVAIMRKLAVIAYQLYKTGKDYDRSRYRN

SEQ ID NO: 498988 - protein, 438 aa, unidentified
MSNKVIFNLDDLFISVGIDVGADFSWMSIALPNQQFVGKPYKILHNSIDSLTTAVSKIKEAEELYSLESRIFLESTGIYHYPLFCYLRDKGFNCSVINPIITKNSTNINIRKVHNDRFDSKKAALVGLKPDLKVSLIPSDLALNCRNLCREYYDLMDNRSAYVNKLQGELRMAFPQYLGIFSKVTINTSLTLLETYTSPSAFLEADKQEIIDIIRSTARFGLTYAQNKYNAIIQAATDANQFGYIIDSNIKRIRLYISFIRKYDEEINSILESLHELVDANEDADFVKQIHLIETFKGAGFLSAVSIMGEIGDFSAFSKPKQLFAYFGLDPAVKQSGKFEGTKVQMSKRGSAIARRVIHTLTLQSISISRNGEAKNPVLREYYLKKCDSKPKLVAMGAVSHKVCNMIFAILRDNKPFEIITPQEHIKQYNASKCDMAA

SEQ ID NO: 498989 - protein, 301 aa, unidentified
MRSMYYIGLDVHKKTISYCVKDGSGQIHAYGAIPATRLDLDRWMKTLPQPWTAAMEATIFTAWIYDHLLPHAAALKVAHPLMLRAIAAAKKKNDRIDAHKIADCLRCDFLPECYMASTEIRKRRRTLRYRNLLVRQAVQMKNKIAGLLMEAGVSYNKQKLHKVGYFCELLATNKDIDDGLQPLLRLCRETLVRLGKTESALVRSLGRDPLLVERVERLMTIPAVGPITALTWVLEVGDVRRFSSIKKAISYCGLCGAEKSSAEAIKRTPLSKQRNKHLQSVLIEAAKLAPRRSPDLVLTGL

SEQ ID NO: 498990 - protein, 474 aa, unidentified
MLMMPGTFKGKVYQKGKHMQTYYLGIDVSKGYADFVILDVCKKTVEPNFQLDDTFDGHSKLYEILSRFLQEHPEGMLSAAVESTGGYENNWLHSLMKFQATLSIRSARLNPLGVNANSKASLNRLITDKISARNVAEYMIAHPEKISYRQEDYFGSMRKLWGFFNMLTKQKTQLLNQLEFLLYSANPEVMVYCKEKIPYWMLEILKRYPTAQKLSEAMPESLAAIPYVSSRRAQGLIDNAKRSVASTSDTVTEELIVDTVGQIAHLKKILQMQEKKMSALCSLPEVALLKSFKGIGITSAIGLLIEIQAIERFASVKKLAAFFGLHPVFKSSGDSAGGFHMSKQGRKEPRRILFMVAMASISSNPHIRGIYEEHTQRGMKGMAALGLCMHKILRIIYGMLKHNRPYDPLIDLTNRAKMSQEEKATAKDKNRRYQELDIKAPISRRQRKNRMEKEPSHSDNLTKCGIMAPSPSHS

SEQ ID NO: 498991 - protein, 351 aa, unidentified
MQIIGIDVSKDTLYVALAESKDARNDKVIASHKFANNETGFKLFVDWMKKKKADAGTVCLMEATGVYHEHLADWLHRHGVTVVIELPNKIKHYAKCLNVKTKNDKVDAGVIARYGLHNAWTPWHPMTESLYQMRALLRQVQSMTKERTRCKNQLHALMHSAHAPGTVVGNLMDIIANYDRLIESYHDEVVRLAKENEAFYARVEMVCTIKGVRAITVLTVLCETDGFQLCQSARQAVSYAGLDVSEYQSGTILKDKRISKKGNARIRHALYLPAMVAGTTGGPMSLMNLYKRVKQKHPTAKKVAIVAVERKLLMLIYTLWKKQEPFDPEKDGKPPIHNAYKSTQAVGSQNQ

SEQ ID NO: 498992 - protein, 365 aa, unidentified
MKQVYGCDGHKTYSVFVAMDEAGQRGPAVRVEHDRAQFHRFLKTLPSGSPIALESIGSWYWMVEEMEQAGHVPFLTHRRKAKLMMGMINKSDKLDAGGLAQLLHNGTLPKVWIPPGELRDQRELPRMRMAMARVRTMLKNRIHADLAKYAIYIEEVSDIFGVRGRALVEQHLAVLPPYTRQAVQTQLALLDQVEEQIRLTEKRIKAVIKETAAMQLLMTLPGFGPILSIVVAVEVGDVNRFARPEKLASYGGTVPRLEQSGKRRVHGPVRPDVNRYLKWALIEAANMVVLNQRSWPDRHVVRLYRRIRERRGHAKAVVAVARHLAEATYWVLKKGEPYREPTQHQLLSSTRKEARASHESLRLVH

SEQ ID NO: 498993 - protein, 341 aa, unidentified
MKRTTKYVALDVHQATTSASVREESGRVIARSVLPTDGAAITEFVRGMRGAVHVALEEGTQAQWLHDLLAPLVDRVVVCDRRGAPRQGNKADQVDADQLSEQLRRGGLRAVYHGSVDRTTLKELTRTYRNLVEDATRVMLRLKALFRARGIPASGKRVYHPRARAQWLAQLQDPGARLRAEALYAELDVLRTLRPRAKAAMVTEARRDPAWPVLRTIPFFGSVRVALLLATMQTPWRFRTKRNLWAYAGLAVVTRSSARPPLTRGLNRNHNRVLKDVFKGAATAATARPGPLQDFYHSVIARGTREELARLTLTRKLAALTLRLWKKGERYDPTKLTTPAR

SEQ ID NO: 498994 - protein, 390 aa, unidentified
MFEHFVGVDVSKDSFSFNVTDLKEKTLEKGSCGMNHEGFKNFFSIISKFGNVSVGLESTATYHQPLLFALLAREIPTYLITPFLVKNFARSCSLRNTKTDTIDARIISVFLGKNYTGLRPVSASDGNGLREIARLRESISKKSVAAKIRLKQLVTTTFPELVKEHDIFTVSMITLLEEFPSAEAIRKASLKKIEKVLNSKTKGRNPKLNAEQIKALAAKSVGVCKPMLEKTVLHIIRELNFLTDELKKCDKELIEAVSVYSHEDFEILTSIPGIGKLTAAQFIAEIGNINRFETVKQLTAYAGTDPGISQSGNSLVQKRISKRGNSSVRRIGFLTALHLISMNKVFKEYYDKKIRENMNGKKAVIAVFNKFLRCVFSMLKNKKTFSFNYS

SEQ ID NO: 498995 - protein, 310 aa, unidentified
MVVMAAQETPSRVVGIDVSKATLDVAVVPSGEQWQVSNDARGIGQLVEQLQQLGPERIVLEATAAYEVPVVAALGSVGLPVVVVNPRQVRQFARSIGQLAKTDVLDAHVLARFGAAVQPQVRPLPDAATRELAALLARRRQLVEMHTAETNRLAKAHERVRPSIRELLRFLDKRIAELDRELHDQLRASPLWREKENLLRSIPGVGRVLSATLLAELPELGTLGHKQVAALVGVAPLNRDSGQWRGKRTIWGGRAVVRAVLYMATTVGVRHNPSLRALFERLMAAGKHRQAALVACMHSENGVEQCSAPI

SEQ ID NO: 498996 - protein, 365 aa, unidentified
MNKCHLNTELSSHEGTRCQFNGGTGAIKLGIDVHQDFYVVVMQEGGANPKPPQRFWKQAFLHWVAKLARSGSEVHAVYEACGFGFTLQRQLSALSIRCYVVCPQKLDEQNRRVKTDGLDAKALVLKLDRFVEGNRSALALVRVPTQEEEQKRAIHRQREQLVKVRKQLEAQGRSLMVNHGFEPVKSWWKQRTFAALQLPAWMKELLLANTQPLLLALQEKIGALTVQLQSAADPKQPRGLGLMTSVIIDREIGDWNRFNNRRQIASYTGLCPGEYSSGNTRLQSCVTKHGNPRLRAALVELAWRLVRFQPNYKPIFKWRRLLAKGAFATGAARKKAIAAVARQLAVDLWRVRTGRCKAQALGLFI

SEQ ID NO: 498997 - protein, 347 aa, unidentified
MNQITRIGMDTSKYIFQVHGVDASEQPVLRKRLGRKQMLGFFAELPPTVIGMEACGSSHYWARELKQLGHEVKLIAPQHVKPYVTRNKNDGRDAEGLCEAMSRPTMRFVAVKTPEQQAALMLAGLREQMIARRTQISNAIRGYAAEFGITVAQGLNQIEPLLARLAQDESVPELARDLFALQGRDYAQLQMELKAIEARLMAWHRANADSRRLAKIPAIGPIGATTLVMKTTDPGAFASGRHFAAWIGLTPKDHSTAGNTRHGKITRAGDERLRSVLVAGATAVIQQAKQGRGHPSPWLIALLKRKPPKLAAAALANKTARIAWKLMVTGESYDGARMSKAPLIAAT

SEQ ID NO: 498998 - protein, 413 aa, unidentified
MEVLYPRCAGLDVHKATVVAAVRLATTGRVAREVRTFATTTAGLLELAAWLAENGCTHVAMEATGIYWRPVWHILAEHGFALVLANAAQVKNVPGRKTDVGDATWLAELLAHGLVRASFVPDAPTAELRSLLRTRKQLVRERAGHVLRLQKTLEDANVKLDGVVADLLGQSGRAMLEALVAGETDPGRLAALAHPRLAATPERLREALRGRVTAHHRFLLRLHLDQVDALDAAVARVDREVEAHLAPFRAAADLLTSIPGVGALAARVIVAEIGLDMGRFPSAGHLVSWAGLCPRSDESAGKRRSNRLRKGAPWLKTTLVQCAWAASRKKASYLQAQYHRLRARRGPKKAVCAVAASILTAAYHMLKDGTVYADLGPDHFDRRVKEVQARRLVRRLADLGYAVELAPLEPAPA

SEQ ID NO: 498999 - protein, 408 aa, unidentified
MSTPDEVEIWIGLDVGKEDHFADVLDDDGESLFARSVANNEADLVAVIERASKHGTPGLVIDQPGSIAQLAIAVANQHEVPVAYVPGLVMRRAADLYPGESKTDRRDAFVIADTGRTRRRSIHWLDAGNDELLEQLRVLNGFDIDLAADLTRLTNRLRDSLVSVSPALERAVGSRLHQAGVRDLLAKFPTPAALRAAGRARINTAVKKRSPRVAAKVVDAVTAALDAQSVTMPAEQAVGRVIAELAVELDRIHARRDALAAEIEEVFLAHPFGQVLVTLPGIGPRTGARILAEIGDGTRFANGSKLASYAGLAPVTRQSGTSIRGESQSRRGNHRLKNAMFLAAFVSLRSTESKAFYDRKRAEGKKHNAAVICLARRRCNVILAMLRNLEPYRAPEIPPDLEAAQIAA

SEQ ID NO: 499000 - protein, 415 aa, unidentified
MALKIVYKICCGIDVHKTFVVACIASTDSKGVTTYEHHRFSTYTKGLKDLLQWLLKHNCKDVCMESTGKYWIPVYNVLENDCSIVLAHPKYVKAIRGKKTDKRDAKWIADLFKHDLVAGSFMPPADIRQLRDLMRYRFKLTCFMSSEKNRLQNCLTVSNIQLGNVVSDTFGKSAQAILDTLLENPADTSFDLEPLVYKSLKKKLPELRDAIDGYITPEQAGKLKVIKAHYENLESRKAELEELILALAAPYQQELAILQTAPGIRSDFTAIGIISEIGTNMEAFPSAKHVCSWAGLTPTNNESAGKKKSVRVSKAGCYIKPLLVQCANAVVTSKKHPEIRNRYLRIKKRRGHKKAIIAIARMLLTALYHMLKNGENYNAELYRKSDLLSVDREITVEQAIIIARKQGYKIKSATA

SEQ ID NO: 499001 - protein, 326 aa, unidentified
MNSVRMHIGVDVGKSSLDVCFPDGKKEHLKNNKPGRARIIHAAKKLGAIVCFEATGIYEEDLANECLAAEVRAVRLDAWKTRQYAKSRGRIEKTDRLDSEMIRDFASSLEEGKLPFVKPRSAAHSLIKEYAKIRENLMKARVVVSSQLEFVRDKSARRNIIAIAERIEREIARLEDECGKAVDEDERMNSLSRRFLEVKGVGPCLVRAIFAECPDIGSFSKKGIAKFCGKAPIASKSCTVEKQSRMRRGRQGLRQAFHMAALSASKHNHVLRGTYRRLIANGKPKMVALGAVGRHLAILLNNIAKYPDFKIRHEPEDGKRKLHATC

SEQ ID NO: 499002 - protein, 350 aa, unidentified
MNHVAIDLGGRESQICMRGADGTIVEEKRHATRSLEALMKQWPPSRVIVETSAEAFHIAEAAKAAGHEVRVVPATLVKTLGVGARGIKTDQRDARALSEVSCRIDLPSVHIPTPASRELKSICGAREGLVEVRTKLINNVHGWLRAQLWRIRSGASMSFHERVRAHAQSLSVELPAHVARNLEVIELTTAQIRAADAQLRELVKTDATCRALTTVPGVGIVTAARFHAAIDDVSRFGSAHGVQSYFGLTPGEHSSSERQRRTGITKAGPEAPRRMLVQSAWAALRSYPNDPMVKWATTIAERRGKYIAIVALARKIAGIMFALWRDGTTYQPERSATRKTTATAGSSASM

SEQ ID NO: 499003 - protein, 361 aa, unidentified
MFTERTSVGLDVHARSVVAAAIDGGTGEVFRKRLTPGNDDVIGWVRSLPGPSAAVYEAGPTGFGLARAFTTAGIRCEVAAPSKIQRPAGDRVKTDARDAMLLARLLRLDDIVSVTVPSVAREAARDLVRAREDVRGDLMRARHRVSKLLLRQGIVYYGGHAWTGTHLVWLRKQHFDAPGLQLAFDAGHEAVLQAEARRNRLDKAIEAMAADSEYTPVVHRLGCLRGIATLTAFGLAVEIGDWDRLTGSSIGAYLGLVPTESSSGQSRSQGSITKTGNTHARRLLVEAGWQHLKPYRTPGARMKARWELAPAAARARGHAGNQRLHQRWLHFTERKKDPVIANVAIARELAGWCWSLAVMDP

SEQ ID NO: 499004 - protein, 365 aa, unidentified
MTSVPSAAEVIHLGMDTSVNEIVAGVLRPGEEMPVVDRIPNDEESIRRLIGRFPDRRLLSACYEAGPGGYELHRLLTSMGVACDVVAPSLVPKGASDKVKTDRRDSVRLTLMHRAGLLTPVRVPSPAEEAVRDLVRARGDLLDDRKRMQQRLNAMLLRHGRIWRGAKWTYAHRVWVDRQVFDEPALAEALALYRGGLEAREAELAAAGAGLAAWAGRDPLAAPVARLGGYRGIAQLTGLTLAAEVVDWRRFASARAFMGFAGLIPTEYSSGSRSRRGHITKAGPEAVRTALIEAAWAYRYRPAIGVTLKRRQAGLPPETLARSWKAQQRLHAKYKKMTARGKPAGVAVVAVARELAGFVWAEMTS

SEQ ID NO: 499005 - protein, 384 aa, unidentified
MQALTVDTPTAGHCGTIFVTIELSQKTWLVTLHSPDRDRISRHHLAGGDHAGLLALMESIRARAAVKLGAAPKVVSCYEAGYDGFWLHRLLMAAGITNHVFDPSSIAVDQRARRVKTDRIDGERMLRTLMAYLRGEPRVVRIVRVPTPEQEDARRASRERGRLTKEQTAHTTRIKALLRLLGMAVGNPRRHDWLTWLVQQRDWQGQAVPPQIMAEIKREHARLMLVREQLDALAQAPVDLTPAAAQMAQRSELLLRLKSLGPAFATTLTNEVFYKDFRNRREVASYFGLTPSPWQSGGIDRDQGISKAGNPRARCAAIEMAWLWLRHQPDSNLTQEHRRRTLDASKRIKRVAIVALARKLIVALWRYLTTGLVPEGARLKTAEV

SEQ ID NO: 499006 - protein, 352 aa, unidentified
MRRPKHQVTREEDLFVGIDIHKHRWHVTIRTVDLELFSASIPGTWEALQRVLARYAGYQLQAVYEAGYFGFRLHDRLVAHGIPCLVTPPSLVPQEYGNRVKTDRRDSSKLAHLLAKGMLKRVWVPSEEELYHRQVIRRRRQLVRDRVRTQSRIKAELRFYGIHLEEPRGRWTQGYFETLRRFRFGNRWMQESFKRLLEQYEFLSAQIDKQTQLLRELSETALYRERVEILQSIPGIGLISAMELLLELQDVSRFRRAEQLAAYVGLTPSQYSSADKVRMGRITGIGKNTLRSLLVEASWTLIRKDQAMREKYDRIKIRSGGKRAIVAIARTLLLRMRRMLLDKQAYALDLAA

SEQ ID NO: 499007 - protein, 370 aa, unidentified
MKMSVGVDLRKTQFTVCCLSEDRRVQESGIYPTTDHGYRAFIMKMSNWDKECYEVTAAVESTGNTRYFRNRLLKAGIEVRIVNNLKFKVVNESVKKSDKHDSRTLAEFLGKDMSPESILCSQESEDIRRILKSRPILVKALVSLKNQVHGLLLGYGIESRRGQLQSRKDRQRILTGLADHRSYGNAAQAAQPLLGSIDQIASEAKALERVLSDLVSEDEDVALLQTIPGVGLTTVATIRAYTNGINRYESDKKYSAHAGLVPWVQNSNKTIRYGHITKRGPVELRTAFVQMVMGVLRLQNKTDGYWVMSKHRAMKEHKGIGKSIITTARKMSTIVYAILKTRQPFDPLRMLPEPKYVEMSKVSRCYALVV

SEQ ID NO: 499008 - protein, 346 aa, unidentified
MKSMHYVGLDVHKKTIAFCIKDAKGKRVAQGEVAATRPALTQWLATLPQPWEGALEATLFTGWIYDFLKPHAAALKVAHPAMLKAIACAKKKNDQVDAEKICDLLRVGLLPECYMASAEIRELRRLLRYRNLVVAQAVRMKNKIAGLLMEVGAQYCKEKLHRKGYFNELLESGLREVPESVREMLRLSRNQLEIFTAIQKRLLDGLEKHPLLKQRVARLMTADAVGLITALTWALEVGDPARFGSLRRAISYCGLCSAQDQSAGKDKRGPISKMRNAHLQTILIEAAKLAPRFYPRLAALRERELARGNKNRATLAVARRIVAYLLAVDKSGKTFEQREPAQAQVA

SEQ ID NO: 499009 - protein, 348 aa, unidentified
MPIVTADTPTVIGGVDTHQDLHVAAVISGDGNVLGSESFSTTRAGYRAMLRWFRSYGELARVGVEATGSYGAGITRHLALSGVPVLEVTGPDHSLRRAKGKDDSLDAIAAAQAALTGQRVQVAKDRSGAVEALRVLRTTRKTAIKCRRATLQQLHNTIVASPDEVRDQVRNLTRMQLLRTCASGRPDTLSYRDPVVATRIALKSLARRVLDLNDEVADLDRLIEPLVEELGSTLTQLQGVGPNSAGEFIVAAGDNPDRLRSEAGFAMLCGACPIPASSGKTQRHRLNRGGNRQANSALHIVVLSRMRKDPRTKEYVERRLNEGRTKREIMRCLKRYVAREIYHAIITT

SEQ ID NO: 499010 - protein, 464 aa, unidentified
MKRKSLKMKIINPYCAGIDVGSRSHFVAIGQGAEEVKEFGVYAVDLQELSTWLLQNSITSVAMESTGNYWQNLYIELISKGIKVVLANGKFTKSMNRKKTDVMDCQWIQKLHSLGLLNSSFLPDNKTEILRTLCRHRQNMIEMKADTSNKMQKFLKLLNFRLDVVVRDVTGLTGIKIIEQICKGNLDPEFLAEFRHYNCRKSKEEIAKALVSNKREDYLFGLKQEYERYLFYLHKIDQCDKRIARYLKNMTKNSKGKPQEKPYKRINKNGIKGIDLNIVSYHYFGGIDLFQIPGVSHSTILALMSEIGVEGFKKFPTAKHFASWLRLAPNNKISGGKTLSHRVPKGSNRLKIALRNAANAVGNLKDTHLSRFFKKIAFKKGRQKAITATARKIAIIIYNMIVKQQPYNPPEQYLFLDQKRKQIAHIRSKIAKFGINPDEIGIFSRPEYEAKYRLNMSVVNQGVT

SEQ ID NO: 499011 - protein, 391 aa, unidentified
MSLYFVGIDISKYKHDCCIISAADQQIVSKFTVKNDKDGFEHLLTTLNSLSNPEDIKIGFESTAHYALNLELFLENAHHSFMEVNPVLIKEYKKSTTLRRTKTDSVDCESIARWLMTVEYKPHSKGFYHSYSLKSLTRLRDRLIRQRSFYLVKITNVLDHTFPEFKPFFNERLSKTAIYLLENYGSAEKMAHMNSASYDKLRCASRGKFSIQQFLRLKELAANTVGVNNSIFDIELNSLLTLYNSLCKEIKTLEAEITKLIEEVHPHYMSIPGIGPISAAVIYAEYGDISNFSNPGQMLAFAGIEPGINDSGTESHGGRMVKHGSSQLRYVLLNACLPLIRFDITFATYYAKKRAEGKKHRVAITHVAKKLIRVIYALERQDVDFNVQKLR

SEQ ID NO: 499012 - protein, 388 aa, unidentified
MIQVDDLSRSLIAFEQISTLVIVVELSQSSWLAAGVVPGIERRPLKKLDPDPTALLHLVEGWRDRATKAGRTVTRTVLAFESGRDGFWLARWLRVRGVETFVMHSTSVAVSREPRRAKTDRLDTEMLIRVFLGWLRGEPRHCKMVAIPTLEEEDARRPSRERENLVGERTRIINRMKAALVRLGIRGFKPGLLTAPQKLDALRTPEETPIPPNMLDEMRRDMARLAWVREQINAIEQARLERLERAPATGRHAMVRMLARVIGVGVETADMLVQEVLSRNLRDRRAVARYAGLTGSPDESGSKRREQGLSKAGNARVRRGLIQLAWRFLRFQKDSALAQWCRGRTEDVAGKRKRTMIVALARKLLIALWRLVTIGEIPVGVALRTAVA

SEQ ID NO: 499013 - protein, 374 aa, unidentified
MKDSTSTVVTKARTAVQVRKQIVDWKRVMTVGIDVGDRFSHYCAIDTGGKIVIRGRITTTAGAFELEFAKVPHTTIAIEAGTHSAWIARLLTRLGHEVIVANPRKLRLIYESQHKNDGVDAEYLARVARLDRKLLGAIEHRSELGQAHLQIIRARDTLVRARVRLIHHIRAAIKSSGKTVPAYSAEAFHKRIRDAVPALLQDALLPLIDLIEQLTARIRTYDRQVERLAEDRYPETEVLTQVTGVGPLTALAFILTIEDHSRFRRSRTVGAWLGLAPGQHDSGQSQPQQHITKEGDPYLRRLLVGSAQYILGPFGRDCDLRRYGLAIAARGGKNARKRAAVAVARKLAVLLHHLWRTLEVYDPDHNTQRLRPAA

SEQ ID NO: 499014 - protein, 395 aa, unidentified
MRHILSFDIAKGKSVYCFIDELRNVIIDASLIEHKKDEFDLLFNKVKNYSNLIVIMESTSIYHLPVETYFRSKGIETIIINPKLVKQFKDTLNKSKTDKLDCFKIARCFLGTIDDFYQKQDEYFMYNPLARQYWSLIEGQTRLKNRYRQLIDIVFPEFALIFNDLYDDLALNFIHDFPHPVLFVNRRIDYLMNYLKEKNGTTQAYRFKNKVLKMKELASNSLCFVAFDSYQVQNLVQVIEMIQYHKSEINKIKNQLINEMKDKKLFKIINSIPGFGEFSTALFLAEVGDITRFDDKYQFISFIGIDSVTSQSGVSAYHGPISKTGCKFGRTILFNIITTILQISAHSDKTNPIYLFFRKKQSEGKHHYKCIIACSTKLCKIIYKLCSSDCLYENK

SEQ ID NO: 499015 - protein, 423 aa, unidentified
MSTNQSPPIAGVDVSKEDSTFAIIDSNNQPIDSFAMLHNLKDIKQTIQRLHDLETQLGKTIVIVMEATSHYSKILASILLQAGFVVVILNPIRSHAIRNATQNRKLKSEKTDAFSIALAYRLKATEPVKTPKPERIQLRALCRDYWNLKSVITSYRQKLKSLQEQFFLLFEKAFNNPFSNTAFALAVSYPTPQALLAESESVLMAKVKKLSRKGETWAKTLVNKLRFYATLSLSLPLNCGDERMQSFFRIIQTLEQEAKMILRQIKSLVQNDPEYQLLLSIPGIGPIIAATILGEIGDFSWFKISKQLVAFSGIDPSVYETGKFRGTRQKMSKRGSNYLRYVIYLATLQAVSKTVNGRVRNPVLRARYEQKKAEGKKPRVALGACMHTMVAYIFATLRDRQPFQIRTPEEHREWFMNNRIRVA

SEQ ID NO: 499016 - protein, 368 aa, unidentified
MRIIGCDLHARQQTLAMLDTTTGEVVKITLKHEGDSVREFYSRLPRPVRVGIEATGSMQWFLNLMEELEIECLVGHPAEIRAAEPRKQKHDRRDADLILKLLTENRFPAIWLPSKELQDLRSLLRHRHQWVRMRTRIQNALQSIALANGLRRGPSLWSRDGQSRIASLPLAPHTAYRRSELQAMYEKFEAEIEKLNQRVQEQACGRPGARLLMTHPGVGPVTALATDVFLGDPARFADSKALASYAGMIPREYSSGGRQRLGGLSKQGNPLLRFLWGEAGAHAVRRDPELQRFYRRKLVQKGLGKASVAVARKLGIRLWIMLRDQIEYHEFCRRGQKQQKSSGACAGMPETRYGAKRHRPVDKATRLP

SEQ ID NO: 499017 - protein, 315 aa, unidentified
MKSVTQEFYAGIDVSSEWLDIASPDKKTFRTPNTEEGIRKVISQLPQGAAISMESSGAYERLAARMLKKAGFTVFVFNPYSTRQLSLARGKKAKTDALDAQNLAEAGKILPAPVVKTDDQMALASLSRHIQELKSDCSDMKRRLKAPDASEAVKSSLKKLILALSQEIESLEAEFEKQVKSSSLKTNYELLLSIPNFGKVTARLLVCEMTSDTAFLTRSKIASYAGLAPMDFSSGKREGLRRIRRGNSRLKAALYMPALQSIRRAAWAKDLYSRLRSRGRGHQCAIVAVMRKILTQAASVLRRGEPWTEKPPQRN

SEQ ID NO: 499018 - protein, 321 aa, unidentified
MQGKVHANAMPAVYAGIDVCKERLDIYLHPAGERFSVANDAGGWRCLRRRLALLPVAMAALEATSKYHRAVHRRLHCAGIPVALVNPLRARLFAEACGMLAKTDAIDARMLAWMSVRLELAESPPAAEEVEALQELVRTRAAAVGERVALANRLESCALAVLRRELQSRLRGLDRHLGRLDRLIATHVATHPDLARRYAIVRSIPGIGPVTATELLANLDVVGRVDGKQVTALAGLAPFARDSGDAQGLRHIGRGRPHLRKALYMAALAAARCNPDLKRFHQRLKENGKPPKVAITAVMRKLLILANTLIAQNRQWSPNPA

SEQ ID NO: 499019 - protein, 369 aa, unidentified
MIGVDTHTDTHSACLVSAVGSVLAECTAPASPVGYRQLVDWAKDEQQSRGLAEPVWVLEGSRSHGTGLARFLTAAQQRVLEATRPLRPSRRPGGKSDSKDALLAARSALAATHHGQPRVDGPREALRTLLVVRASAITARTDAINQLKSLILQAPDELRDRLRSLTSAAQIAACRRLRAPAAPPRSILKSTPGLVLDDAEHRTRVASMRRLANRIWTLTGEIDDAQTELVDLTQALAPGLLDEIGIGPITTAQILVSWSHPKRLRNEAAFAALAGVSPIDASSGRQQRHRLNRNGDRALNQALHTIAVTRERCHPATKDYIARRLDQGSTRREARRMVKRYLARHIYRHLEAAAAAEPAEPTSIPELAA

SEQ ID NO: 499020 - protein, 460 aa, unidentified
MRSPSSRASSQGQSSPPAGSLGIVHPHAAGIDIGSEKHYVAVSADRDPEPVRCFGCLTPDLQAMAQWLKACAVTTVALESTGVYWIPVMQVLEENGLEVYLVDARQAKNLPGRKTDVKDCQWLQELHAHGMRTRAFRPADAICVLRSYWRHRKDLVEMAAMQIQLMQKSLEQMNLQLHKVLSDITGVTGLKILRAIVAGQRDPVVLAQMRHPLVHSSEETIAKALTGDWRAEHLFTLRQALELYDTYQQKIQDCDREIEAYMKTLGSRGDPQDLPQSPAARRRKNQTHFDLRTRLYEVTGVDLTSLPGLDAMTAQTVLSECGLDLSRFATEKHYSSWLGLCPNHQITGGKIRRRRTRKVRHRAAQALRLAAQSLHKSKTALGAYYRRMRGRLGPAKAITATAHKLAILVYRMLKYGMEYVEQGQQAYEKQYQQRTRQLLLKRAKQMGYALVDLASGEVVS

SEQ ID NO: 499021 - protein, 391 aa, unidentified
MYSDGSKHSSFSVPNNRNGAKIIVDRVTSVLLLQDIPQVVIGMEATSVYGDNLMRFLRESGSLGRFERSLHMLNPKQVKKFRDAYSDLPKNDHVDSYVIADHLRFGRINKEVYMDDYKYQALKMYTRARHQLVQELTREKQRFLNTVFISFSGLTQEKIFSNKFGATSMALIEEFSSLDELAYMSTDELVDYIRKKGKNHFENPEEIAEAVRRAAKNSYRPPQVIADAAKQMLAISMNTIRLLQKQIKEYDKAIEKMLEAFPQTLTSVKGIGNIYAAGIIAEIGDINRFPSQASLAKYAGLVWTQHQSSDFEAEDKRMIQGGNHHLKYYLCEAANALRRCDPEFKRFYALKYKEANKHNHKRALALTARKLVRLVYTLLKTNRLYIPPEEY

SEQ ID NO: 499022 - protein, 336 aa, unidentified
MKYSGIDLHSNNSVVTVTDEEDRVVAEKRLPNDLSKILGLLMPWREEMAGVVVESTFNWYWLVDGLQAAGFKVHLANTTAIKKYAGLKHSGDETDARYLAHLLRLGILPTGTILPPAQRAVRDLARKRMQLVRSRTTHILAVENITARQQGARISSNQVKRLTAETVDQMALPEDVALAIKTNVAVITTLSAQIDLLEKRLQERIGERAEYGLLTSVPGVGQVLATTILLETGPIERFAAAGNFASYARCVDSVRTSNGKKKGEGNTRNGNKYLAWAFVEAANFALRYSEAKRFYERKRAKTNNVVAIKALAHKLARACFHILNERKPFDVTRCFA

SEQ ID NO: 499023 - protein, 343 aa, unidentified
MDHYAGIDVSLEYSSVCVVDANGKIVREGKVASEPEALIAWLRSAGLSLTRIGLEAGPLSQWLFAGMREAGLAVELLETRHVRDAFKAMPVKSDRNDARGIAQLMRLGWFRPVHCKSKTAQETRALLTARKLVQSKLHDVEASLRGILRGFGLKVGATTSRRFAARIKELVAGHPTLEVVAEALLAAHAVLLREFNGFERRMRTMARHDAKAQLLMSTPGVGAIVGLTVASAIDDPARFKSSKQVGAHFGMTPKKYQSGETDYTGRISKNGDKGVRTALFEAAHIILTKPVKGSALKSWAMRLAKRAGMKKAKVALARKLAIIMHRMLVDGTTFDFAAAATAA

SEQ ID NO: 499024 - protein, 423 aa, unidentified
MTKLTSTPAGAVLVAIDMSKSRQEVLIERPEGGRRRRMTVMATKEDYDGFVEQLAAIGRPIIVGFEETGNYHRTLAHRLLTAGFELRLISSVALARTREALHNGWDKNDPKDAQVILHMLRIGATQRYVDPLAAGINDLQELSKTHETISRMKTQTWHRILTHYLPLYFPEIARFAGNSRSDWFLALLERFPTPATITALDREAFSAAAWPLIGRKVSKARLINDIYETAFASTALPVPENSAAITMFRMVIAQGRSLIHQRDEIERLAHTRLADDVDYQLLRNIPGIGPINALTILAEAGDLRRFNHHRQFLKFCGLDLATCQSGTFRGRTRLSKYGNARLRRTFWMAAQVAARQRDNSFRDKLGRYTAGHADDADRRRKAMTALTAKMARVAHAVVKTGTEYRPFLERSDARWKDPSLQVP

SEQ ID NO: 499025 - protein, 321 aa, unidentified
MAKHTTICAGIDTGKRKLDVAIDGSSKQLQVENTAEGHEALLTWLRQHRVKRIGIEASGGYEQPVVAELRRKGFVVVVFQPAQVRAYAKFHLQRAKNDKIDAAIIAACTAAVRKIHAAPDPRLLPFAEQLTMIDQIGEDIARLKNRIESCRNETINKLWQEDIARLEQRERAALKALVAAIRKHPDLAKRLALISSVDGIGLPTAVAILVRLPEIGQITREQAVALAGLAPYDDDSGDRSGVRHIEGGRKRLRRALYTASLAASFRWNPQLIQLYQRLTAAGKEHKPALVACARKMLIFANTVVARGTPWCGEPPGSLPAS

SEQ ID NO: 499026 - protein, 441 aa, unidentified
MKATATALEQLFQCARETAPEDEPLVVVMEPTGMAWFPVAVFCQRQGVQVYLVNSQQVADLRRYYRKHAKSDRIDARVLARLPMVSPEKLHALELISAAKLACQRGCKEQDRLIDLTTAIHNRLRAIDRFAWPGLEQVLPDNASTLTRWFREHWYDPSRVIALGASGLQQAWQESGPKSAEMPPSEEWAAELVQLAQEVLALYGSEAEFLDYAYLQAEVTREQALLAMLEEEHKRLQLKTVRRLYRQLHPSRNLESLYGVGQDGAAVYFSFIGNPERFPDHAAFRGWSGMIPRSSQSGASEAKGLHISQAGPDLVKKFSFMGAETARQWDPQIAAIYYDQIVRHGKHHTQALCACATHLLDRIWTILKEDRPYELRDVDGTPVTARQARQIIDLRYTVPKEVRQRNNQRTRRTRREQQAEKQHKRESRPSGVRGKSETSSG

SEQ ID NO: 499027 - protein, 352 aa, unidentified
MNTVVSQCAGIDCAKKDFWVTFSTCDTDRTIEHRLTHRFLMNDPGLKAFVKWIEKSYDKSIPFSLVLEATGVYHEKLLNLLYDLKYKVVLVHPKRAKDFSKTVHVKKVTDKIASKYLATMGLEKKLEPWVKPEKIFRNLKVLTRESSKLQEKIAMVKNELEAEEYRQDENSRTVKRLKAELKLLKKQKLEVVEEIKDLINNDETVKGKAEKLMSIKGVGIHTTSVVIAETDGFSKVNNKRQLVSYSGYDVMNQESGTSVNTPARISKRGNRRIRKAMHMAALASVRHGSNKELFVRIVGKTGIKMKGVVAAQRKLLVLMYTLWKTDSYFDPTYIVKKKGDITSPEELDHVRS

SEQ ID NO: 499028 - protein, 351 aa, unidentified
MMIIGVDYHPSVQAIAFLIEETGECGEQELKHSDGQAEKFYRDLKQRGISVRVGMEATGYSRWFERLLAELGFEVWMGDPAEIKAKRVKKQKYDREDARLLLRLMRENNFPQIWVPGPENRDLRQLLWHRHRLVQMRTRIMNQLQALAMNEGYRWKKKLFSEQGRAQLEKLALAPWASRRRQELLELLDRMNPTIEELTAAAEQEVKKRPEALRLMTHPGVGPLTALAYVLIIGTPKRFHCGKQIGTYVGMIPSEDSSAGKQRLGHISKQGNSLLRFLLVEAAQAAARSNAEWRRRYTHLAMRRNKSIAKVAMGRKLGVRLYWMWRNGCAYSPSFEFGSYVGQLGTGHGVK

SEQ ID NO: 499029 - protein, 341 aa, unidentified
MTVIIGIDPHKAIHAVCAIDDKETELARLRVRSGKRQAVQLLGWAQGFEQRVWAIESAGGLGYLLGQQLVGAGENVVDVPATLSSRVRVLATGRSNKNDPNDAYAVAIAALRAPALAAVRSEDHVSVLRMLAKAHLDTSRAKNRAACRLHAIVADLVAGGIGNEVVVSQAETLLASVEASSVVQRQRLELASEALADVRRLDMQLKTSKRRLEVAVAASGTTLVDIFGVGPVIAAMLIGYSGDIRRFPTAGHYAAYNGTAPIELSSGGRTVHRLSRRGNRTLNHAIHLATVTQIRHRDSEGRVYYDAKIAAGKTKREALRALKRRVSDRVYQRMIADARSR

SEQ ID NO: 499030 - protein, 355 aa, unidentified
MTEIRRLVTGGVDAHADSHHAVALDEQGRLLGDAVFATTARGYRELLAWLEGFGQVRLVGVESTGAYAAGLVRFLSVRAVAVVEVNQPHAHTRRRRGKSDPVDAEAAARKALAGEATVVPKLSSGIVESIRQLRVAREGAVKARTAALNQLSVLLVTAPGELRQQLAARKTNRGKVSLCLRLRPDPARVHEPLQAAKLALRSVAERARELDGQISLLDKHLAPLVAAAAPRTTSLLGISTQHGGQLLVSAGENIERLSSEGAFARLCGASPIPASSGRTTRHRLNRGGDRKANRALYLIAVCRLRNCARTRAYAERRIAEGLSKKEIIRCLKRYIAREVYHTLRADLAALTHPPT

SEQ ID NO: 499031 - protein, 304 aa, unidentified
MFGIGIDVSKATLDVAVHEQQFRQFSNDKRGVQRLIQWLKQWPTKQVVLEASGGYEVAALDALHAAGLPMVRINPARARRFAQGTGRAAKTDRLDAEVLAQMAHLLSLTRYTPPAPWQRRLAEFAQCRRQLVQMRVSEIQRLRQLGEPTLIAMKQRHIDELSKDIKELDSAINEQLSAQPAWKNIGTLKGVGPVLATTLACELPELGTLNGKAIAALVGIAPMNRESGTWKGQRRISGGRAVVREALYMAALTAIRYEPRLRDFYATLKSKGKASKVALVAVMRKMLVILNARKRDAEALMASD

SEQ ID NO: 499032 - protein, 389 aa, unidentified
MYFVGIDISKYKHDCCIISAVDQQIVSKFTITNDKDGFEQLLISLNSLSNPEDIKIGFESTAHYALNLELFLENANHSFMEVNPVLIKEYKKSTTLRRTKTDSVDCESIARWLMTVEYKPHSKGFYHAYSLKSLTRLRDRLIRQRSFYLVKITNVLDHTFPEFKPFFNERLSKTAIYLLENYGSAEKMAHMNSVSYDKLRCISRGKFSIQQFLRLKELAANTVGVNNSIFDIELNSLLTLYNSLCKEIKNLEAEITRLIEEVHPHYMSIPGIGPISAAVIYAEYGDISNFSNPSQMLAFAGIEPGINDSGTESHGGRMVKHGSSQLRYVLLNACLPLIRFDLTFATYYAKKRAEGKKHRVAITHVAKKLIRVIYALERQDVDFNAQKLR

SEQ ID NO: 499033 - protein, 344 aa, unidentified
MKRFIGVDLHKQSFTACYLKESGERVIQSYPLRKLDDFKKTLTPEDELALEACNNSLYFLGQVRDHIHVAHLIDPGQFKVISTSAKKTDEKDAELLALYLSKGLLPLARQMDGHRARLKSLVGTRDRLVKASTMLKNKVHNILSAQGQILKATELKSQVGLNRVREMAKDNLTHLELNLLVDQIKSLEESIKTIEEELKKPENQLPGHANLASIKGIGQVGAAALSSVIGNIGDFEDASHLASYLGLVPRVSQSGDRQIYGHITKRGSKTGRSVLVQCTWVAIRYSPRLKAYYAKLRSKKSAGKAIIATARKFLGIIYFTLKHQIIWEDFPNGIIKSQGQLQAA

SEQ ID NO: 499034 - protein, 363 aa, unidentified
MTRKRLSGNHLLDFIGVDEKTPVWIGLDVHKKSYHVALRRADGVCQSWVSAADPIVLAQQLSAISQRISLIVYEAGPTGYCLERVLKANGYKVAVVAPSRIPRPVTNQAKTDKLDCLKLAEYAAKGMIEAITTPTEQEGAERNVLRRRNQLVDSTRKTKQRIKSFLLFHGIEEEYGLRYWNQSAKTKLSKLPLQSDLKFILKSLLRQLSYEEEELARITNRLARIAKRSQHWEVVKNLKTVPGVGDIVACAFRTELFRPERFRRAEEVCSFLGLAPAIRQSGEKRQGGWLMRSGQKRLKSLLIEAAWMWRAKDPWARKKYQTHLSRCGITQKAITALARRLAVILWRLSVENRAYVMLQVDSV

SEQ ID NO: 499035 - protein, 343 aa, unidentified
MEGYAGQQFVGIDLHRRRSVIVRTTERGDPLETVRITNDVDSLTKVMARAGVSPEVVLEATYGWYWAADALADVGASVHLAHPLGVKAFAYRRVKNDVRDATDLADLLRMGRLPEAWIAPPVTRELRELVRHRAKLVGIRSGCKCEVHAVLAKCGVQVLMSDLFAPTGIGLLERLDAPAPYLARVGSLRRLIDDLDVEIDLFARLIRGRLVTDPGYRAVQTIPGIGPVLAAVFVAEIGDVHRFPGPAQLASWAGLTPKHHESDTHVHRGRITKQGSRLVRWAAIESVQALGPGTGAGRLKRRVGDRRGRNIGKTAAARQQLTYVYYAMRDGHVRSLHRSRVAA

SEQ ID NO: 499036 - protein, 354 aa, unidentified
MKPEDGQTEVILGVDTHLNVHVGVVIDAVGRMKGTLSIETTPDGYEQLLTWARSFGRLTRAGIEGTSSYGAGLTRFLEKHGIAIIEINRPNRSRRRNRGKSDPTDAENAARAVLANDATGAPKAQSGMAEALRTLSVARRSAVKAKTQAVNQLRALLISAPSFIRDAALKVKPEHCVAACAALSEDDEKSPVLASLKMTLRLLAKRWNALHEELRELDKQLTRLTKLAAPRLLGRFGVGPQTAATLLVTAGDNPTRLRNEAALAALCGVSPLEASSGKTSRHRLNRGGQRQANNALWTIAMVRMRSDARTREYVARRTGEGLSKKEIHRCLKRYIVRELYPLILADLADSARAA

SEQ ID NO: 499037 - protein, 337 aa, unidentified
MQITTIGLDIAKHVFQLIACDVRGKVVKKKRLRRGQVLRYFAQLPRVLIGMEGCASAHYWGRELSAQGHEVALLPARYVKGYVRGNKNDYNDALAIAEAVRCSEMRRIPIKTAAQQDVQALHRLREGQIKGRTAHANRVRGLLAEYGIIVPQGLASLRRRIPEILEDGDNGLSPMFRELLAQSWDQLHALDEQIVEYDRRVRAHSRADEHCRRLQTVPGYGPIVASVFAAYVGDGRGYRRGRDVSASVGLVPGQYGTGGKTVLLSISKRGDRYVRCLLVHGARSVVRAAVHKDDPLSRWINQLRERRGVNKATVALANKMARIGWAVIRTQRDYQPV

SEQ ID NO: 499038 - protein, 289 aa, unidentified
MIIIGCDYHPAFQQIAFVDTDTGELQERRLLHREEAEKFYRSLAVQEMKVRVGMEASGHARWFEGLLAELNFELWIGDAAEIRTKRVRKQKTDRQDAQLILRLMMEDRFPRIWVPSWENRDLRQLLWHRHRMVQARTRIMNQLQAVALNEGLRCKKRLWRETGREQLESFRLAPWASRRRSDLLELLDRLNPTITDLTQTIEQEVEKCPEAQRLMTYPGVGPLTALAFVLIIGRADRFQCGKQIASYLGLVPLEESSGNRRRLGHITKSALQHRVIDWASRSSSPRSSK

SEQ ID NO: 499039 - protein, 324 aa, unidentified
MVLGIDISKASFDVVLLTDEQSKGLHKVFPNTPRGFEELKAWLARRGAEQLHACLESTGSYGVPLAEHLVADGYTVSVVNPRRIKHYAKSRLSRNKTDKQDAFVIARFCLKEQPEPWVPSAPEVKQLQALVRRLEDLKDLKQQEENRLEATLDGAVKDSVESMIAYLNEQISAVEAAIDDHIDRYPSLKRDAELLESIPGIGRITARKLLAEITFAHFGSARELASFVGLTPKQNLSGTSLRGRGRLSKIGSSNLRKALYFPAVNARRFNPVIQSFCKNLLDKGKPMMVVVCAAMRKLLHLAFGVIKSGKPFDVAHLTTSSLTA

SEQ ID NO: 499040 - protein, 375 aa, unidentified
MRPDRSVPPAGHPKVTPVKYVGIDVHKKMCQAAILEEDGKLLDEIRFANTPEEIEEFAGKLSTFHDEVRAVVESTGNLWIQIHDRLETHGFEVALSNPAKTRLIAEAKVKTDKVDARTLAALLRADMLPTCYVPGEELRSRRELLRHRLNLVKNRTEVKNRIHGLLDKHGLRMPGTTAFSKENIAWLRGLSLGFMDDAILRSDLAVLEAVDGQVTLIEEKIAVLAVEDRRVRLLMTMTGVGYFTAMLVVSEVGDVGRFRGDKEFASWMGLVPSVHQSGERTRIGGVSGPGNKRLRWALVECAQTAVRHDARLGGMFERVSRRRGSGCAVVAVAHEMARIMYFMLVRGEPYRGENRGLTERKLKSMSKKAFDGLRN

SEQ ID NO: 499041 - protein, 254 aa, unidentified
MTVYIGIDIARKKFDAAELCDGAYRCKTFENTPAGFTALYDWLKAGSIPDIHVCLEATGNYGTALATFLYEKNLKVSVVNPARIKGFAASELTRTKTDKADSRLIARFCKAAQPDPWRPVPAPVRKLQALVRRIGALNGMLRMECNRRENADIDAQESVERMINHLKMELESVRRAIKEHISNVPELKKQNDLLLSIPGIGTVSASLILSFMASKEFTKAKEVTAFLGLNPRHHQSGTSVRVKWHTEIWPPEQR

SEQ ID NO: 499042 - protein, 343 aa, unidentified
MGEVSTIGLDVAKSVFQVHGVDDTGAVVMRKRVSRPKVLEFFGGLSPCLVGIEACPSAHYWSRELQALGHTVKLMPPNYVKAYLKRGKNDANDAAAICEAVTRPSMRFVPIKTQEQQTGLMLHRTRQLLVRQRTMLSNAIRGHMAELGIISAKGRNGTAELLQIIGDVADDRIPPVARFCLDLLARHYLTLNTEISSIDKRVHAWHRSCEESRRLEEIPGVGPIVATALVAEIGDWGAFRSGRSLAAWIGLVPKQHSTGGKERLGSITKQGNRYLRWLLVVGAMAVIRYARQHGTKRLWLARLMERRPPKVAAVALANKIARMAWAMMVRDERFTEAKLLSAS

SEQ ID NO: 499043 - protein, 348 aa, unidentified
MKVTTSGIDVAKSVFQVHGVDERGDVALRRQIRRSQVLLFFSRLEPCLIGMEACASSHYWARKLTALGHTVRLMAPQFVKPYRKNDKNDGNDAEAICEALQRPSMRFVPVKSPEQQAELAVHRIRRRLMGQRTALINQLRGLLAEYGVVLPQGANHVRSKLPALLEEGSESLPPLAVELFRDLYEELVQLEQRIGVCDRRVERLYRGNPVCQRLGELEGIGALTATAFVATVAHAAQFKNGRQCAAWLGLVPKQDSTGGKTRLLGISKRGDVYLRTLLVHGARSAMRHTPKGNDPKSRWVEQLRKRRGENIAAVALAAKHARILWALMVRGEGSSPSASHVVEPQPTL

SEQ ID NO: 499044 - protein, 347 aa, unidentified
MKQIAVVGIDLAKNIFQVHGTDATGHAVLTKKLSRSQVIEFFAKLTPCLIGMEACSSAHYWGRRLAEMGHTVRLMPPQYVKPYVKTNKNDARDAEAICEAVTRPNMRFVPIKSEQQQAVLVLHRIRGGIIKQRTALANQIRGLLAEFGVIVPQGFKQLNIRLIQLLSEPNSTLPVNLRQTFSSLFQELVNLTKRTKEFDKQIETHLQTSQECRRVLQIEGVGPLTATAIVASVGDIRNFKSARQFAAWLGLVPRQNSSGGKTQLLGISKRGDTYLRWLLVHGARAALSYAKRADKLTDWQQAMLQRKTLNKVVVAMAHRTARRIWAVLAKDCAYDPSYPQRSATATR

SEQ ID NO: 499045 - protein, 391 aa, unidentified
MTKPKTKTVNDFSRCLDPLDMDATVIAVIEMSQSSWLVAGIVPGVERQPLKKLAISEHGLLNLLNRWRAEAEKQGHRITRIAVAFEAGHDGFWLARWLAAQGVEAHVIHASSVAVTREHRRAKTDRLDTELLKRGFLGWLRGERGHCKMVAVPTLAEEDAKRPSRDRETLVGEASRIITRVKSAFVRLGIRGFNPKLKAAATRLETLRTPEGEPIPPNTLAALKRDLERHRIVKQQIREIEQTRLDVLKQAPEKGPHAMVLLLARVIGVGVETADMLVREVLSRTMRDRRAVGRYAGLTGSPDESGAKRRDKGLARSGNARVRHGMIQLAWRFLLFQKDSALAQWYRQRTADAPSMRKTLIVALARKLLIALWRLARDGVVPEGVRMRPAA

SEQ ID NO: 499046 - protein, 344 aa, unidentified
MKIKLLGIDLAKNVFQLCALNQANKVLFNRTVRRAQLRSTIAKLEPTIIAMEACSSAHYWGRSFETMGHTVLLVPAQHVTPFVRGGKSDARDALAICEAAQRPNIHLVPIKTVEQQDIQLLHRLRQRQVQHSTALANQIRSLGREYGVIFPAGIKPLISHLPEALEDGSNELSPVARHALADQYQCLLDTRQAMGAFLLQIEQLAAQYPAYDDLQILPGIGPMTASAYIAAIGNGRQFKRGRQVGAWLGLAPRQYGTGGELKLGGITKSGDRHLRTLMIHGARAVITRGLKTRPELAQWVQPIIDRQGFNKGVVALANKLARISWVIVTTGEPFDMKQAFKPAS

SEQ ID NO: 499047 - protein, 388 aa, unidentified
MIYVGIDIAKLNHFAAAISSEGGILIEPFKFSNDYDGFYLLLSKLAPLDQDSIIIGLESTAHYGDNLVRFLISKDFKVCVLNPLSTSAMRKNNVRKTKTDKVDTFVIAKTLMLQDPLRFISLKDLDYIELKELGRFRQKTVKQRTRLKIQLTSYMDQVFPELQHFFKSGVHQNSVYTLLKEAPTPNDIASMHMTHLTHLLQTASHGHFGKDTARGLRILAQKSVGIHDSSLSIQITQTIEQIELLDSQLFHTELEMANLVTCLHSVIMTLPGIGTTNGGMILGEIGDIHRFPTPGKLLAFAGLDPSVYQSGNFQAKKTRMSKRGSRVLRYALVNAAHNVVKNNATFKAYYDAKRAEGRTHYNALGHCAGKLVRVIWKMLTDEVEFNLE

SEQ ID NO: 499048 - protein, 401 aa, unidentified
MLPVLARSAIEELIMEANVCNREPSLSNSVEEAAIFVSIELSRARWLVTSLSPNTSKISRHFVPGGDAAELLRLLSELRAKAERRINAGVRIICIQEIGFDGFWIHRVLESNGIESHVVESASIAVSRRHRRAKTDAIDGELLLRTLMAFKRGEPRVCAMVVVPTPEDEDRRRLSRERKTMVKERIEHINRIKGLMASQGIVGFEPMRSKSRDLLDNLRTGDGRPLPERMKAEITRELKRLELLRKQIAEIEAERDALLRPCETTEPSPGAQLLKLRGIGPEFASVVWQEGLYRQFANRRQLAAYAGLAPSPWQSGDMNKEQGIAKSGNPRLRTTMIEAAWLWLRHQPKSALTLWFQNRVKGDRGRHRRIAIVALARKLLIALWRFATLGEIPEGATLKIA

SEQ ID NO: 499049 - protein, 362 aa, unidentified
MNRNTGMSAGQIIGTLNGLQVMGLDIAKHVFQLHTVDMGTGEIANVQIKRAKVLEYFVNKPKSLIAIEACGGAHHWARELTALGHTVRLLHAKIVRPFVSGNKTDATDARAIWLAVQQPGVKFVGIKTAAQQATLTLHRQRELLMKMRTMQTNALRGLLYEFGATFAQGRKALFKDIERALEELSTQLPQMVRDSLREQVGRIKEMGDAMLEIEKRLALQLKADPQMQRIAQIPGIGLLTTTAAIATMGEASAFKSGREFCAWLGLVPSQTGTGGKVRLGGISKRGDTYVRTLLIHGARSVLSHAKEPSPWLQQIKERRPANVVIVAQAAKMARTIWAVTAKEQSYQRGFQSLRPSAAMHAA

SEQ ID NO: 499050 - protein, 371 aa, unidentified
MSESSKNLYVGLDVHKDSIAVAYAPEDRGAEVVSLGSVGTRQCDIDKLLRRLQAKGATLTFAYEAGPCGYWLFRYLARQGFACQVVAPSLIPRKAGDRVKTDRRDAITLARLLRSGDLSALYVPGIEDEALRDLSRGRDDAMQDLKRSKRRLKSFLLRQDIRYEGRASWNAAHLRWLAQVVCPTPPQQIVFQEYVRAVSEEQERVQRVERELHEAVKGWRLYPVVEAIQALRGVELTGAVILLTELGDLTRFDSPRQLMSYLGLTPSEYSSGARRQQGGITKAGNSHARRALVEGAWAYRYPAKVSRHLQLRLEKLPAEVQAISWKAQVRLCRRYRQLTARGKHVNQVVVAIAREMAAFAWAIARLVPIAA

SEQ ID NO: 499051 - protein, 404 aa, unidentified
MDLVYLRCAGLDVHPRSVSACARIVVEGRVSQEVRTFGTSTRELTELADWLAVCGCTHVAMESTGVYWKPVWHVLEGRFELVLANAMYVRNIPGRKSDVKDAVWIADLLAHGLLRSSFVPPERVQELRDLTRTRKQLVREMTRHTQRIQKTLEDANVKLTEVISNVLGTSGRAIVRALIAGESDPEKLVDLTGGRLKAPRATLVDALRGRITEHHRFMLQMHLEQVEHLERAIRDVEARADQAPFRAATELLMTMPGVSEVTARVILAEIGDDMTRFPTAGNLVSWAGLCPRLDESAGRRRSNRTRRGAPWFKTVLVQAARAAANKRDCYPRAQYLRLKARRGPNKAVLAVAASMLTAAYHMLKYGVEYHDLGPNHFDRDKDAQAQRLLRRLKALGVEVILKAA

SEQ ID NO: 499052 - protein, 321 aa, unidentified
MAQTCSKLESHAVVVGIDVSKDHLDAAQYPSGDLIETSNDTKGLRTLLRWIGRQHAVHVVFEATGPFHRQLESHLAKAGIPFSRINPRHARKFAEATGKLAKTDRVDAMMLARMGALLEPRTSTICNELQSALQELAAGRRNLTRDRTALLNRQQNLQLSLLKRLTRYRLRQIEAQIATIDQAISELISTDESLSRKRTILVSIPGIGEATAAMLIADIPELGTMENGQVAALAGLAPVTRQSGKWQGKSFIRGGRIHVRNALYMPALVAMRHNPDLRSIYLNLTNKGKHAKVALTALMRRLVILANVLLRNNRLWEARHT

SEQ ID NO: 499053 - protein, 333 aa, unidentified
MVYAAIDIRKRILQAAVLDPDTGELVHERLAASREVLSDWAMRWQTRLGVVALEATTGWRWAARELERRGLDVRLCDPGQARALGGSKRRPKTDRLDATWLVRLLAKEMLPLAWLPPAEIEQLRDRTRSRHALAKDRTRWAQRLHALLTHAGWPCSRSRLLTSPGRQWASALGLPEPTRASVEAMLTMINAIGDQIELIDREPRQRARSDPRPQALCTIFGVGPVLASHILAEVGDATRCRRARQLVRVAGLDPVVSESADTRRRGQLSKQGSPELRRALVEAAHHACRPRSPDHPLYLTVKSQRGSQRATLTIARKLPRRAYHLLNQPEHAA

SEQ ID NO: 499054 - protein, 323 aa, unidentified
MTYIGIDISKDSFVAAFPTVSGYQTQTYPNTVKGIRKFIGSLSVTEHHCVMEATGNYGFLLLYLLDRQGIAASMVNPKQIKHFSRMMMAVTKTDPKDACMIAMYGEKMNPPIYKMPSETVMLLKQKKTIIRQLKKQLTASRNLRSSLVVLPFQDKNGMKALDKTISFLASQIESLESELTDLASSEFDRQVKLLTSIKGIGITLATALIVATGGFSYFNNAKQVSRFIGICPTYQQSGTSVHIKGGINRNGDASLRSLLYVASWSALRGNTTCKECYTRLKANGKPSKVALIAVANKLVRQAFAVIKSDTPYVDGFVSTQQTK

SEQ ID NO: 499055 - protein, 345 aa, unidentified
MQPMYYIGLDVHKQKISYCVKDSSGKIYAEGWIPATRFDLDRWMKTLPQPWSAAMEATMFSGWIYDHLKPHAAELKVAHPLMLRAIAAAKKKNDRIDANKICDCLRCDFLPECYMAPTAIRERRRTLRYRSLLVRQMVQMKIKISTLLMEAGVSYNKQKLHKAGYFRELLANNLDIDESLRELLRQCREMVVRLGKMESALIHSLQQDRLLVERVERLMSIPAIGPITALTWALEIGEVQRLSSIKKAISYCGLCGDEQRSANTAQRTPLSKQRNKHLQTTLIEAAKMAPRYSPTLALLYDREKQKGNANRATLAVARKLVAYLIAVDRGQTHFLVLDRATCAAA

SEQ ID NO: 499056 - protein, 307 aa, unidentified
MTQNYIGVDLSKDWLDIFDPRTGHVRVPNTAPRIRTWLRDLGPGDLPVLEATSGCDGHILREAGCANRPVCRLNPLHAWHFAQSLNLPKTDRVDAAMLARLGAERGLAPSAPLDAERAELAELGGRRDQLKRMETQEKNRLGKAVSSTVRADIRASLRLLARRIARIEAAIAGFLKRHPESARAVALLETIPGVGRVASVTLIAAMPELGGCDRRAIASLGGLAPKARESGKWRGHRAVGAGRRRVRRALYMAALSALRHGSFCAGFVRGLRDRGKPGKVIAIAVARKLLTVANAILRDQTPFKAPT

SEQ ID NO: 499057 - protein, 278 aa, unidentified
MTLYAAIDLHSNNNYLCVIDGKDKRLLEAKFDNDASLVIQALKPFKRRLMAVAIESTFNWYWLADALMEAGFEVQLVNTAKVIQYEGLKRTDDRYDAYFLAHLMRLGILPTGYIYPVEQRGLRDLLRRRMRLVQDRTRYINSLNTQYQRQTGQHLSCNKINSKLFRLPVVGDLNVQLAMKANLNMSKALKVQIKLLEKSIMSQVKECSEFNLLKTTNGIGDVLAETILLETGDINRFNSPGNYASYCRCVDSCKSSNGKKKGVGNRKKWQQIFGMGLY

SEQ ID NO: 499058 - protein, 408 aa, unidentified
MHAGSHVVAGVDTHKDTHFAAVITVTGQQVGAAEFPATESGYRALTEFITCHGPLLRAGVEGTNAYGAGLSRHLREVGVPVVEVLRPARQLRRMRGKSDQIDAYAAAQIALADVDTVTAKTSAGTVEAIRVTFAARRSAIKAHSEVITQIKSLLVTAPEPVRAEYRHLATGRLISMLANSRPRVGDDEVAARTRVALKRLATRCRQLDAEIDSHDTDLHDLVSQVNPGILQVHGIAATTAAQLLITAGDNPDRIGSEAAFAMLCGAAPIPASSGKTSRHRLNRGGDRHANSALHQIAKVRLGTDPDTRAYAARLTAAGKSKKDILRCLKRAIARQVFHLITNPPVIEHSDDLRPARQALGLTLANVADALGCSIMKISQLERGTIRDVRFLRHYRAWLTATPELQLAA

SEQ ID NO: 499059 - protein, 318 aa, unidentified
MSHGYDKYVGIDVAKESLDVSGLTAGSPSEFENTAAGRAKLLSLLPPAGACLLVAEATGGYERDLVAEVVAAGHHIAVVNPRQVRDFAKAIGLLAKTDRIDAGVIARFGEATRPTPQGFSEQQEQLRELIVRRRQLVDHRTAEKNRCEQAHSTLVRNSVRKSIEGIDKDLKRIDRAIIQLVESNDDWRGRYERLKSVPGVGAQTAATLMAELPELGRLNRQQVAALVGVAPFNRDSGQFRGRRTIWGGRATVRSGLYMAAISAKKHNPVIRAFAARLLAKGKPPKVVLTACMRKLLVILNAMLRSDEMWGPRLATLTQ

SEQ ID NO: 499060 - protein, 394 aa, unidentified
MRLWVGFDVGKAFHWVCVLDDEGEVLLSRRVEAEERDIETCCEEIAALGRSDERLVATDLLGGPATLLEAVLLGRGERLFHLPGIAVNRARDGYRGESKSDARDARVIADQIRMRWRSLQEVRPREDAAAELRTLVAHRRSLVEDQARVITRLRALLLEVFPGLEAALDLSTDRALLATTRVATPSAARRLGASRLARWLKDRGIRRSEELAGKVVEAAKVQRRELPAAETKAALVSEMAAEVLRTRGRVATVDTRLEELMAAKPEAAVVRSMPGMGPLFTAEFLSEVGDSSRFASADALAAAAGLVPATRQSGDGSFQRRARRGNRRLKNLLYRSAFSCTVHHAPSRIYYLRKRAEGKAHHRAVIALARRRVNVLWAMLRDGELYRDPVAEAA

SEQ ID NO: 499061 - protein, 375 aa, unidentified
MKETLRFLGLDVHAETIAVAIAEPDGSVRSLGTIANRAESIRKLVKKLGPAERLKACYEAGPTGYVLYWQLAELGVLCEVIAPTLMPAKPGDRVKTDRRDAERLARSHRSGDLTPVWVPDEGSESLRDLVRAREAAKQDQMRARHRLSKFLLRTGQRPAPGVKSWTLAYMAWVKQIRYTQPARESTRLDYLHEVEHMAERVMRLEQAITEAVKQASPQIQQVVRGLQAMRGIAQISAVTIAAELGNISRFESARQLMGYSGAVPSENSSGQRTRRGNITKTGNAHLRRIAVEAAWSYRLRPCLGPALRKRQEGVSEEIKEIAWKAQHRLHKRTMRMLAAGKEQRKTVIAVGRELLGFIWAIGVKAEAATIQQRTA

SEQ ID NO: 499062 - protein, 425 aa, unidentified
MAVFCGIDWAEGHHDIALIDGDGKLIAKRRIQETLDGFAELTAMLAEAGDSDEAPIPVAIETPRGLLVAAMRVTGRPIYPINPLAVARYRGRTSVSGKKSDHVDAMALANILRTDAHLHRMLPDDSALARSVTVLARGYQDAVWRRTKLVQELRARLLEYYPGFLAAFGSGSGSGSGLSTTGLAGADARAVLAIAPSPAEGAAVSKARVETALRRGGRQRRIATLAASIGAALRVPQLRQEPLVEQAMRVETLALLGVLNAVCDSVDQLTGAVSAAFSKHPDHAIITSFPGLADISGAIVLAEIGDDRARFADDRALQAFAGSAPVTRASGKSRTVVRRRTKNNRLAAIGYCWAFTAAARPSPAREHYLRRREHGDGHPAALRHLFNRMLGQLHHCLQTRRVYDPVKAFPHTVTTPEPEHAAAAA

SEQ ID NO: 499063 - protein, 379 aa, unidentified
MEGFNSFYNTIVELMQKSELEEALVGIEPTGHYWFDLGQFMGEKSIKFVMVNPHHVHKTKELDDNSPSKNDRKDPRVIAGLVRDGRYFYSYMPTGVYAELRNASNRRFVLVEEQTRAKNRLQKWIAVYFPEYKGIYTHIDAKGGLLVLKQAPTPEEIVKLGEEGIIKIWKDAKLRRNGNKKALKILNAAMRSIGLRTGLTEARMEIQDLIEDYELQTKRLERVNDLIKELCQQIRYADKLLEIKGIGITTVAGFIAEVGDITRFDSTKELQKLAGLELVADSSGKHNGKTKISKRGRKRLRYLLFEAAISVVGKNEEFKEIHRYYTTREKNPLKKMQSLIAVACKLIRVFHVILTKGVSYDASKMLEGIRHPGEQLKAA

SEQ ID NO: 499064 - protein, 438 aa, unidentified
MCDGSVTVFFQQAKGGITVKIVYPICCGVDVHKTFLVATIITTREITPHYARKRFSTFNNSILQFKQWLLTNNCLDVCMESTGKYWIPVYNLLEDSIRVTVANPKWVRAVKGNKDDVKDSKWIGDLFRLGLVPGSYIPPRPIRELREYTRYRSKLVSCRSSEKNRFQNSWTVCNVALDAVVSDMFGKSAASITDYLLTTDSFDPQHCISLLQRSLKKKADQVVASIEGYQMSNSQKERALLVRSHLDFVDQAIDSLDQKLNVMAAPYENTVLLLGTIPGVDRSSAITIISEIGTDMTQFGSSKRLCCWAGLTPGNNESAGKKKSVRITRAGVYLKPALVQVAHAAVKSNKSSYYKTKYERICKRRGKKRAIIAIARMILTAIYHMFTTGEVFNPSDLYKIDMPQEMLLKQQEKAVKQALKLLTSLGLIQSADISVPVA

SEQ ID NO: 499065 - protein, 339 aa, unidentified
MNRNVVGLDLAKNVFHLFMLQDGKSVKKKLKRSELTAFVAQLPPSVIAMEACGGAHHWARTFQGLGHEVMLLNARYVKAFVVGNKNDFNDAEGIFTAASQSNPHKRTVAVKSIEQQDMAMLHGLRRGKVDERTALVNRLRGHLSERGIVLPPGVRQLRKQLPSLLEDAANNLSPLVRRVLNQQYQDLKALDEAIDALDREIKVVCQQHALSKRLLAIPGIGPLTAVLATADVGDGKGYASSRDYAASLGVVPGQHSSGDKQVLLGISKRGNRSLRTLLIHGARAVLKYCGDKSDPLSLWLQRLIERRGFNKAAVALANKNARIIWALATGGGEYQPRMA

SEQ ID NO: 499066 - protein, 535 aa, unidentified
MPRKLQGPLAGTSRERENGKGKPATPVPLWPSRPSESLALGPDQKGRALCHEHAKQNFGLHPRAPSLPLCNQRVQEEGDQAVGINGGNVVEVGPDEADHLLERAAAIDVAKASGKVCVRLPHPRIAGRRETRVWDVVATTNAIMALADELVGLGVERVVLESTSDYWRPFFYLFEAGGLVVWLVCSRDVKNVPGRPKTDKLDALWLCKLNERGMLRPSFVPPVEIRHLRDYTRLRADLVADRCRYVQRIEKLLEDALIKVSTVASDILGKSGRAMLEALIAGERRPAVLADMALGKMRAKRAALVEALTGRFDAHHAELARVLLDQVDALTAKIDQLTARAGELIAVMTAAQAPVPVPAGGPGLGSTGTCPVPLPVLERLDEVTGIGLAAAQAIVAEVGLDMAQFPTPARLVSWAKLSPRTVQSGARTSSGNTGKGDPYLRRVLSEAAASAGRTDTFLGERYRRLVRRRGKQRALVAVARSILVIVWHLLDDPMARFADLGPNYYEKRMDKGRRTRDLIRQLQALGHQVSLSPAA

SEQ ID NO: 499067 - protein, 332 aa, unidentified
MGLVSTVGIDLAKNVFSVHGVDERGAVIVRRTLSRLKLSELIAQLPPCLIGMEACSGAHDWARRFASFGHTVRLMAPKFVAPYRKGGKNDGNDAEAICEAVARPNMRFVPIKSVEQQSDLSLHRVRQGFVDERTATLNRLRGLLAEFGYVIPVRAVEMRRRVPELLEKLPTRVAACLRDLLEHAAALEAKALVYEREIKNHARLNPLARRAQTRLGIGPLTASAIVATVGNGHDFKNGRQFAAWLGLVPRQYSTGGKSRLGHITKRGDPYLRTLLVMGARSVLQRAASLTDPLSRWALAVRERRGYHRACIAIAAKNARVAWALLAKETAAA

SEQ ID NO: 499068 - protein, 333 aa, unidentified
MEHVAIDLGGSQSQVCIRTSDGQLLVEQRCRTRDLPAYLAKRPPSRVIVETCAEAFGIADSALTAGHQVRVVPATLVRALGVGSRGVKTDRRDAQILSEVSCRIDLPSVHIPSKQSRERKTQCGLRDALVSSRTQLINTVRGWLRADGRRPKSGEAASFAKRVRALCGAAIPGFIDRQLQTIEFVSTQIRAADRELERMAKQDSVCRRLMTVPGVGWLTALRFVATIDQIERFADGHRVAAYIGLVPGENSSSERQRRTGITKAGAPSLRWTLVQAAWSARRARRKDAMQRWAEEIERRRGKRIAAVALARKLASILYAIWRDGSVYEHERQS

SEQ ID NO: 499069 - protein, 326 aa, unidentified
MEQQTFSHSVGIDVGKRELVACVRCSQSGITEPPAAFPNSSIGFRKIIVYLEKYNVGNDVPILFESTGPYHWQAARTLADKGFFVKVANPIHTKQIARLSIRKRKTDKVDAANLAFLASQNYGYQFVETEEMVKKKALIRHYWKLRMTATNLLCHERYLKNYRNISVASVSKSIVKRCEIIKKQIIKEWSKGNDVKYLDSIPGITPFLAATILSELLPLSRFQKMDQIVAYAGLDPSVKQTGGKPGRHGAISKRGSATLREALWLAAFGSFQRQPTRTLYLRYKERGMHHNTILCILGRKILRISVALLKKRRVFDPKFMSVDKSD

SEQ ID NO: 499070 - protein, 353 aa, unidentified
MKRPKDKLIAGLDLHSNNVMIGVVNQDGKRVAHRKLECDLKQVTGFLAPLKPQLQSMAVEATFNWYWLVDGLRGQGYSIDLANPAKIEQYSGIKHVDDKDDAFHLADLQRLNILPKAHVYDPELRPVRDLLRRRSSLVHQRTALLLSFKSLYVRTTGQALDLSDAKKMEPKEAPKLYQHPANQLIAQVQAEHIQGLDKSIRRIEQAVLGCAREIPMYEKLLTIPGIGRILGMTITMEVGDIKRFRTDGDFASYCRMVDARRLSNGKCKAANNQKCGNKYLSWAFVEASNFARRYDEHCRRWYDRKAARTSKVLATKALGCKLAKAAWHLMAKQCHYDEKRMFPELAAKPMNKS

SEQ ID NO: 499071 - protein, 338 aa, unidentified
MIKYIGMDAHSSICVFSVVDENGTEVNQAKIATNGLLLIEYLRSIKGVKKLVFEECELSAWLFGILYGEVDELIVCNPTRNQQYKKAKTDKLDAQNLARLLRGGFLTPVYHDGSKTEHLRALMSGYQDIADTGVSIKNRYKSLFRKAGLPAWGTKLYDDSSLLEDLPRPDQRFVGHSFYRLLEALEKEREQYIGAIKKLGRIFPEIKLLKGIPGIGDIQAAKIVSQVISAQRFKDKHKFRSYCGLVRHRMESGGHVYGSRRGWGNRILKCVFKMAAKSVLTGENELRAYYDELRAKGTSDKSARSAVSRKLAAIAIGILKTRRPYDETLILRRAEQAG

SEQ ID NO: 499072 - protein, 323 aa, unidentified
MPLVVGIDVAKHSFDLAIDLANGKHRTKAKLSNDAKGFQALQAWLRTHAQPDSWIVMEATGTYHEALAEFVHGQGYRVCVLNPAQTALYARSQLTRVKTDRSDAKLIASYGARHQEQLRPWQPDPPALKQLKALVRRRGDLQQMLQMERNRLEVAGSAVRDSLQTHIADLQVRIAEIEQAIEDHIDQDPTLRGQRELLVSIDGIADTSAALMLAELGDVTRFADTAAVTAFAGLNPRLQESGKRQGQVCISRTGSPRLRAGLYMPALVAMTHNPVIRALKQRLRERGKAGKQIVCAAMRKLLHIVYGVLKSNTAFDPNKALAR

SEQ ID NO: 499073 - protein, 456 aa, unidentified
METNPQATPAEPEFAAFLAIDWADQKHDWMLRSAAGGRVEQGQLEHTPEAIQAWAAQLRQRFGGQPIAVCLEQSRGALIYQLSVYPELVLYPVHPQTVAHYRRAWHPSGAKDDPLDTELLLEILEKHRGHLRPLVPDSQPTRKLRLLVELRRHLVDERTRHSNQLTDQLKQYFPQVLRWFHEPTSGVVGALLNQWPTLQQLQQQEPASLRAFLRQHHVHGPQHVDQLLGQIRQAVPATRDPAIVEASVLAVRAQLRLLAGLRESITELDRQIRQVTAAHPDYPIFASLPAAGQALEPRLLVLFGSDRNRYHSAAEVATFSGIAPVQQKSGRQWLVRFRRSCPKFLRQTLHEWAGHTLAQCAWARAFYDAKRAAGLEHHAAVRALAYKWVRILYRCWKDRLPYQEELYLAALRRHGSPLARPEKTAENPAPEPAGERSEEYQFKKVAGFWKFSPATP

SEQ ID NO: 499074 - protein, 399 aa, unidentified
MRASSWNQISIGLRVAILPRWALSVAGKFYGMARPSFSVSATLLGTLRGEERTMSIAMLGIDLGKNSCSVAGLDETGRVILRRRLTRDSVVRLAAKLPACVVAMEACCGAHHLGRVLREQGHEVRLMSPEYVQPYVKAQKNDERDAEAIAEAATRPTMRFVELKTEAQLDAQILHRARTRLVGQRTALINQLRAVLLERGVVVAKGRRRLEEYLLELLDGTGKPPAFLSPRTCLLIQDMRLEWRELDRRIEALTAEFVARAREDAAARRLATIPGFGALNATALVAAIGTGETFRRARDLAAWLGLVPRQATTGGKPRLLGITKRGNTYLRTLLIHGARAALPSLSASSSPMGEWLRGLMGRAHKNKVVVALAGKLARIAWAILRSGDRYAKEGRPAMV

SEQ ID NO: 499075 - protein, 405 aa, unidentified
MAVVMIGVDPHKRSHTAVALGADEAVLGQVRVRASAAQAQRLLEWAAAWPERTWAVEGAGGLGHLLAQELVAAGEPVLDVQPKLAARVRLLAAGAVNKNDPNDARSVAIAALRSPSCLPVRPDDHAAVLKIWAKRHRDLSRTRNQVACRLHATLCELVPGGLNAEIYADQAARILAGAEPRGAVAQARAELAAELVADLRRVDALLRETKKKLAVAVRASGTSLTEVFGVGPVIAATVIGDVRDVSRFASPDRFAACNGTAPIEVSSGNRIIYRLSMRGNRRLNHAIHMAAITQIRYQHSDGRAHYDKKKAEGKTPKEALRALKRQISDAIYKRLKADAARAAAADAQGPGGHAGNDSVASAAGSHPERRLFGQATPGPAPTLRPPVHQREKATSHARKKTARTT

SEQ ID NO: 499076 - protein, 407 aa, unidentified
MEAGINQTTKCEDKHMNTDKYVGLDVHKVDTQVVIADEGRTGEVRHYGKISSDLHAMERLVAKLGGPGVTLHFAYEAGPTGFVLYRWFQRHGIDCIVVAPTKIPQAKGVRQKTNRRDAEQLARSLRAGDLTAIHVPDEIDEAFRDLTRARSHASRDVKRAKQRLKSFLLRQGYHYSGNANWTEAHRRYLRELVMPSPVLKAVLEEYLLAITAAEERLQRMENLVTTEAPKWRLYPAVQALMCLRGFDLIAASLLVAEINDVRRFAHPRGLMAYLGLVPHEFSTGDDRRLGAITKAGNAQARWLLVEAVQHASLPPKVSEHLARRQEGQPEVYRKISWSMQNRLYKRHWHLTNRRLMPAKVKVALARELCGFVWDLLRQVPLPKIKTPVSRSATRRPTRTSKADVVSC

SEQ ID NO: 499077 - protein, 388 aa, unidentified
MVGQSVVKIAVDPHKRINAVVVVDAAGSVLGRSTFAQSTTGFADLMTFARRWPRREWAIEGATGVGKNIAQRLVAKGETVFDVPSKKSSLVRAFSATSGRKSDDVDAYSVALASLHSDLLRVRVDERAETLRLLSNRRDELVGLRTQAVCRLHRELQILIPGGASRALTAAKAKTLLASVRPRDEVGKVRKALAQDQLADLVAIDKRLKDIGAQIKSVVADTRTSVTDVRGVGPVVAAIVLGEVRDVSRFPTKHHFASYNGTAPTTWGSAGDARPCVNLHGNRRLNHAMHIAAIVQLRFDCEGRRYYLRKIADGKTPKEARRCLKRRISDAIYHQLVADAQAAERGPGGQMGATTKISAADPAPTVDSSIKPQPGPHKKSNPAAPIAS

SEQ ID NO: 499078 - protein, 496 aa, unidentified
MKVAGHAPPRYEYATRSLDDRLKSFERGWALESTTYTQMLSFRRLHYKGYRRLQQACSPIFRKETKNMPSPIPDVVAWVGLDWADQEHQGRLQAVGSSQVESFVLPQRPEALQGWVSQLRTRFPFGRVAIAVEQSRGALVYALMTYDFLVLYPVPPKTSADYRKAFFSSGAKSDPEDADLLLELVRCHADRLRAWQPDDARTRQIQMLSEQRRKLVDDRTRLTNRLTTWLKASFPQALEWAGELGTARACEFLTRWPSLAALQQARRSQVRQFYLHHGGKVASLESSLDKIHQARPLTSDPAVLQVSALMVRLLAQQLSALWSTLQELDQAIAPLFAQHPDQALWDSFPGAGPVLAPRLLAAFGADRQRYHEAREVQQFSGIAPVTAKSGKSCWVHWRWACPKFLRQSFHEFAAHSRRWSPWARAYYEQQIEKGAEHHAAVRALAFKWIRILYRCWKDRTPYDEQRYVRALRRRGSPLVKRLQTQAALSAAPGGTL

SEQ ID NO: 499079 - protein, 341 aa, unidentified
MDEYIGLDVSMKETAVSIRRAGERIWRGKCASDPSIVAELIRKRAPSVKRVVFETGPLSVWFYHSLRVEGLPAICIDARHAKAALNMATNKTDANDADGLAQLAEVGFFREVRVKGFDSMLTRTLVAARTRLVRITTELSNQIRGVMKTFGLLVPAGKGSTFEKNVRSLLADQDKLASIVLPMLEAWRGIRVRAAELGRQLVRDARQSRSCRILMSIPGIGAITATSFTTAIEEPDNFRKSRSVGAWIGLTTRRYQSGEVDYDGHISRRGDRSLRGLLYEAAAVILTRSSTHSTLRTWGLQLRERIGFKRAAVAVARKLAVIMHTMLKTGELFNPNAGAVA

SEQ ID NO: 499080 - protein, 349 aa, unidentified
MTIVEDRPVITGGVDTHADLHVAAAQDPIGGLLAVQEFPATAAGYASLLGWLGGFGDIALVGVEGTGSYGAGLARHLAAAGIRVVEVDRADRQDRHRAGKSDPLDAVSAARAAQSGRASGAPKGRDGAVEAIRALMVAKRSARAERTQAINQARALIVTGPDELRARFAGHRPAQLVEAIASLRPRPGDVPGYATRVALRELGRRAQFLDAQLDRLDELIGPLVTARAPGLLALHGVGPDTAALLLIAAGDHPERLRSESSWAHLCGAAPIPASSGKVSRHRLNRGGDRQANHALWRIVITRLGSRPGHPATRAYVERRTKEGLSKKEIIRCLKRYVAREVYHQLRAGA

SEQ ID NO: 499081 - protein, 337 aa, unidentified
MTTISMLAVDLSKGSFQVCAVGPDGTVLYNRALSRSRFAALLADQPACVVAMEACATSHHWGRVAQKSGHEVRLVPAVYVKPFVKRQKNDRADAEAIAEAAARPRMRFVAVKSAETQGRAVAFRTHQCLVRQRTQLINALRGHLAEFGVVAPKGPANLKVLEEALADAVADLPVAVRAMGTIYLDQIAGLTQVIERLADELETASRTDTDLRRLCTIPGIGPVTAGAVAAFAPDLDTFASGRNFAAWLGLVPRQRSTGGKAKLGSVSKMGQTDIRRLLIVGAMSVIRWVVRKGGSANRWLATLVTRKPKMVAAVALANKMARMIWAVTTKQEDYRMA

SEQ ID NO: 499082 - protein, 455 aa, unidentified
MTRTTTRDRPELKPVNVGAAAIDIGSTMHMAAVDPACADTPVRAFGTFTQDLHELADWFKVCGVTSVAMESTGVYWIPAYEILEQHGFEVILVNARYAKNVPGRKTDVSDAAWLCQLHSYGLLRGSFRPDAEIATLRAYLRQRERLVEYAAAHIQHMQKALMEMNLQLHHVVSDITGATGMRIIRAIVAGERNPDVLATYRDVRCHSSIETIRAALVGNDRDEHVFALTQSLELYDTYQAKMLDCDRKLESLITALTNKGAKPAGKLLGPRVKTKQVNTPSFDVRAALYGVLGVDLTEIHGLGPSLALKLIGECGTDLRAWPSAKHFTSWLCLAPGNKISGGKVLSSRTRRSSSRAAALLRLAATSIGRSDTALGAFYRRLSSRVGKAKAVTATARKIAVHFYNTLRHGMTYRDQGADHYEEQYRSRVLANLKRRAKSLGFVLQAVPCDAEVAVS

SEQ ID NO: 499083 - protein, 364 aa, unidentified
MDTHKKDHKVALHYPNSEEVVRFVVKNNAQDIKRMVNKIKKQSPANIEFCYEAGVCGFTLKRRIEALGCKCMVIAPSLTPIKPGDHIKTDRRDAIKLLTMFKAGLLTEVHAPDPQQEAAREVTRCRQTAQENLKRIRHQLLKLLTRHGYVYADGNHWTQKHFTWLRNLEFDQPLLADVFDNYFTQMNHCLQRLTSLDKQVKILAESNSYKKIVGFLRCFHGIDTLTAITIITEIFDFGRFSSPGQLMSYLGLTCSEDSSGQKQRKGSITKAGNKRVRRLLVETAWHYRHPCKLSKTLKTRRKNQPQWVIDIADNAGRRLRKRYRHLTNNGKMPCKATVAVARELAGFIWAVFNEYQIRNKEKAA

SEQ ID NO: 499084 - protein, 549 aa, unidentified
MMGHNKTIGIADASAVAESDCRPIVLRECDIMREASDIAVAAAPLHSGADCPIVRLSSARPMYNGRVGAGVRDDVLPRQDFTSFPPKPPPCPGKGERDMARQSNRFDEVRRYVAGVDLAGSADHYVCGPRKDDGTHDIEHFGTTTNELLRMAAWMKERKVESAAMESTSVYWIPVYDMLESAGIEVVLVDTRTVKMVPGRKSDVKDCQWLQRLHSCGLLHGAFRPPEMFNAVRSVIREKGNLLQMRTQAIQSIQKSLDQMNIRLHHAVSDIDGMTGMKILGAIVSGERDPRRLAALRDWRCKKSEDEIAEELTGNWREEHLFNLKQAYETLCFLDGRIADYDAQVRAMYAKIAASFPPVDPPPDGDGRKPKDKEDAKAKADLARICGGFDMTKINGIGYDSAAAILSELGPKLDAFPTESHFVSYVGVAPALGKSAGKNVSTRKKHKNTSRVGLILRMAASTLSRSESSLGARYQCVRSRTCSRTAIKDVAREMAKRIYRGIKHGQTYIDEGERAYMERTRERTIKAMKKKISKLGISAEELGIFAVAV

SEQ ID NO: 499085 - protein, 408 aa, unidentified
MTVVGIDVSKGKSMVAAMKPGGELVTTPYEVKHSDIELSRFALDVLCMEPDTRVVMEATGRYHEPVAALLHSEGIFVSVLNPLLIKQSGAGSLRKVKSDPKDALKIAKYGLDNWSTLREYTPMEAIRQQLKLCARQCDLYSKNIVMLTNNLISLSDKTFPGVNELFSSPEKENGHLKWVDFYRTFWHCDCINRMSPDAFEERYKKWCKRKGYHFSADAADALYAASCGLYTTLPRDNNAKLLVTVATDQLIALRENQSKLETEMLNLCKQLPEYETVMAMYGVGKSTGPHLMAELGDIRRFPHRSSIVAFAGVDPGVVGSGKMQLSSVATSKRGSPQLRKALFQVVSAYVKRKPENEAVYQFYAKKRDEGKPYYVCTTAAANKFLRIYYARVKECLNAAESATQAEEG

SEQ ID NO: 499086 - protein, 310 aa, unidentified
MEQTTVVGIDVSKDRLDVHVLPSEEAWAVPRDAEGLAELCRRLQGLSGVIALEATGGYENIVAASLSSAGLPLVVVNPAQVRAYAKALGQRAKSDPIDACVIARFAQATKPVVRPLPDQATQMLAHLLARRRQIVEMMVSESQRLRRTDVPRVRKSIERLLTTLKRELGDIDHDIDDTVRGSPVWREKEDLLASVPGIGRIIARTMVADLPELGTLGRKQIGALAGLAPFVRQSGRWKGHAHIGGGRPTVRTALFLGAQIAKRCNPVLKAFYVRLIAAGKSKMAATIAVAHKLLIILNAILRDKKPWQTA

SEQ ID NO: 499087 - protein, 440 aa, unidentified
MVWKLGLDIELRAVAVARQCGRGVIGPAVKWSREQLLQWVKEKRARGEAVHTVYESCGFGYTLHEQLSAAGANSLVSTPMRLNLERRRKNDRLDARELCVRLSRYLDGQSHELRPIRIPSRCEQQRRELGRQREFWKREVRRLENHGRALRIEHEHETLEAGWAGPRKWKRLAPQCSQFVREQLTPVVAQIRSAKAQLERLSEQIESLVKKEQIPTGLGALTVSLIEGEVCQWERFAHRKAVGSYTGCCPSEHSSGPIQRFGAIDRHGNKHLRVLLVEAVWRLLRWQPHWHARQKYLLKLRHGAKKKIAVALARQLAIDLWRWRTGRASAQELGWSLPTFPLSEQPKPALVFTKPQPPRQSVPQGGTLLDAAADPKGSSLRMGAFHPQALPQVQARHHGRRSPLATARIGAGDREKPPHVNGKPPIAEQTDPWEKPQKQK

SEQ ID NO: 499088 - protein, 359 aa, unidentified
MMIVGCDFHPKWQQVAVLDSETGEVEERKLLNGDSEAERFYRQLTQPARVGIEACGNCQWFLELLQRLGHEVWVGDAAQIRASYVRKQKTDRRDAAHILKLLVENRFPRLWMPSAAERDLRQLLIHRHKLVEIRTRVKTGLQHLAMNRGLQKQRALWSKRGMSDFQNLSLEGWSLKRRDDLLHLLSELDVQVGELDTAVEEAARADKRARLLMTQPGVGPITALAFAVTIGDVSRFKDSGRVSSYLGLIPSEHSSGGKQRLGHITKQGNRFVRMLLVEAVQTTCRLDEGFKKEYAARCHHKPNGVAKVAAARKLAVRLYWMLKTNTSYPEIAHVESSSEVALAGNRHTDDLIERSRTRR

SEQ ID NO: 499089 - protein, 412 aa, unidentified
MTETNQFAAHVGLDWADKKHDVCVQFKNGERVFHVIEHTAEALDAWLTELHQKVKGRIAIALELKKGPVVYALQKYPFITVFPVHALSLARYRQAFSPSGAKDDPQDAELALELMLRYPQKIKAIEPDNADIRLLQQLVEQRRQLVEDKRRFVNRIINTLKQYYPQPLEWFSHRGSLLLCELIIRWPSLQQLKRARRDTIRNFLNAKGGRAMALTEQRVVSIDNAIPLTTDPSVIEANALMATALATQIKVVSEIIKTYDERIETLFDTLPDAGLFKSLPGMGPCMGPRMLAALGDNRDRFNSAEEIQNYAGIAPVTERSGQKSWVHWRWQCAKFVRQTFVEWAAKTVNSSYWARLYYQGQRDKGKSHQSAIRALAFKWIRIIYRCWKTRTRYDEVKYLLALEARHSPLLRP

SEQ ID NO: 499090 - protein, 357 aa, unidentified
METAYDGRQIVGMDLHRRRSVLVRMTEDGRRLGMARIANSPAELRAEIARAGKSPKVVLEATYGWYWAADTLAAAGAEVHLAHPLGVKAFSYRRVKNDERDAADLAGLLRMGRLPEAWIAPPEVREPRELTRYRHKLVHLRTSCKDQVHAVLAKIGVPVTCTDIFGKAGLAWLDQLSLPQPYAGKVTSLQQLTAELTAEITMLGEVTADLLAGDRGYQVIQQLPGIGPVLAAVITAEIGDVTRFRTAAQLCSWAGLTPRHRESDIKVTRGHVTKQGSRLLRWALIEAIQRAPADSAAGAVKAGIIARRGKEARNIAKVAAARRLLTLVFYGLRDGQIRCLPRSAAAPPVTQPPARAA

SEQ ID NO: 499091 - protein, 461 aa, unidentified
MRKPKRSATSKQDKAGKLPAIQANVAGIDIGSREMYVCGPAQGKGQREMRVFATTTGQIQACVAWLKQQKVQSVAMESTGVYWIPVLEIMEGSGLETLLVDTRPLSRVPGRKTDAEDCQWIQTLHSHGLLQSSYRPSEEIGQLRSIVRQKAVLVREQADWVRRMHKCLDQMNVRVHHAVSDTQGVTGMAILRAIAGGERDPGKLAKLRDPGCRRSEREIAEFLTGHWRSDHLFNLEQSLLMYDRIGERIAAYEKEIQQRMERLTPPERKDAEAAPLANREKRKAMKRRDQEGKRQKLYRMVGADLTTIDGVGVETAEVIVSEYGVDVSKFATEKEFVSHLKLIPHRPVSGGKVLNKRRPPQQSTRSAGALRNAATAVRNSRSALGAYFRRMARRKDSSIAVFATARKIATLVYRMLRWGQKYVDIGQDAYEQQYQAVRLRGIITTAAQLGYRLVKQETASA

SEQ ID NO: 499092 - protein, 347 aa, unidentified
MLACVGAEGLNGPPQWGNLLSTLATASQRQHDDPENQPITEASYTNSLTFPWLTKHGVETHVIQPSSVPVDRRARRAKSDGIDAELLLRTLLAWLRAEPRVCSMVPIPDEADEDARRLVRERSELIKERIKLVNRIGAMLATLGVAEYNPMKRNRRQRLEELRTALGERLPTHARAKVARMLDRLELVLEQIAELERQRDAVLDEDRPDKAGEMIQQLAGLRGIGVQSATVLVREGFVRAFANGKALGSYAGLTATPYSSGGVEREQGIGKAGNARLRTMMVELAWIWQRYQPDSAQVRWFRDRISSTGRRMRKVMVVALARKRLIALWRFATHGVVPEGAVMKPAS

SEQ ID NO: 499093 - protein, 457 aa, unidentified
MSASTGAMRHRRRPGKNGGGAVDNEYQFYVGIDWASEAHQVCVLDPARRIVSERSFAHAGDAVAAFAEWLNELAGDDPGGVAVAIEIPRGAVVETLVERGFHVYAINPKQLDRFRDRHSIAGAKDDRRDAFVLGDSLRTDRDCFRRVCLDDPLVIQLRELSRVDEDLGRENNQLANRLREQLHRFYVQALKLCPAADEPWLWSLLELAPSPAATHGLRIKRVEQLLRGHRIRRVTAAEVLAALRAPALHVAPGVVEATTEHIALLLPRLRLVHHQRQRCRERLEALLDQLQATPQEGPKQREHRDVEILRSLPGVGRLVAATVLAEASWALAQRNYHALRAHAGIAPITKPSGHHHVVLMRNACNGRLRNALYHWARVAAIGDPASKPTTPQCADVAIHTPARSAPSAINFSAFLSPCSKTIRSTMPQNAALDPHLHPRRKSRERLDYSWGVHPRSI

SEQ ID NO: 499094 - protein, 356 aa, unidentified
MAEVTRWVGIDWAYRRAAWCALGAGGEIVEEGAVAADEDGLARLVLCLGTDVRACVEMMSGAIWVRDRLAAAGWQVQVAHARKVRDIAPLACKTDKVDARVLAELCRRDLVPELWIASLADRELRERLRRRLHLVRLRSSAKNRIFGLLTQWGLRISLERLRAADAIELLEARGVPAVWRDSIAEALAVIDLLDRRIAPIERELRPFAAADPRVLLLDTIPGIGELLGLTIASEIGDVARFGSARKLVGYAGLAPRVNQSGDRSRTGALSKAGSRTLRWAAIEAAQHGWRESNPWHRLYVDVAKRQGKNPAKSAVARKVLIAAWHVLSRDQPFKPAARTTGDQAPVSASSSSFLAA

SEQ ID NO: 499095 - protein, 532 aa, unidentified
MARKRNSRKTRTNGPARLGKPNGIIQPRVEKVGPQRFGIVAIDCAKARSKWMLCDFYGKVLVPPTEVEHARTQMQLATVQFKEACEQHGIRDAVVAVEMTGTYHRPIQRAFRAAGCETRLVHPFASKHYRLPAHGDNKTDDHDLEGIFRAAVNGFGLLEPTWNETYLQLQLFARHRRDLVNKRAKLQCQIRQYLERCLPGYGALFPSDDLWTRPVAMSIARRATSAEAISQARVPGVTRWLREDKLRFQARTVEKIVAWSANAADADPLAAHVSRVWHTLHDDWRSKTERIVTLERELAGILVKTPYLLLLSMPGINVVSAAELAGEMGPIEHYAHARAVTGRAGLFPSRYQSDEVDRADGPLARLRNARLRAAWMRVADNLIKWNSHYRGKFQLWKQRRVDSRDIRCRIANRVVRPVFQMVSGRKLYRHPSRLDRGYVMDKLLTFHREHQTPPHEIVRDLELAAEQIPKRDRLEEAVPLQTTYARCRRSRRKGPQEIGTLLVAVLARLGVSGLELEIEAQDPIANVSDTST

SEQ ID NO: 499096 - protein, 350 aa, unidentified
MFNYKDKNIFVGIDVHKKTYSLTVVMDQEVIKKTTLEARPIKLACYLNKHFSGANIFSAYEAGFSGFSLHRYLVENGIHNIVVHAASIEIAARERVKTDRRDSQKIAIQLASGRLKSVHIPEIEREDKRLVSRYRETLAKEKSKKSNQIKSFLYRIGKMPYENESRITEKWINKMLSQEYSTEQYFCLFELCNQWKDLKERIKNVEKKFAEQAEQELDLETIYRSVPGIGPIAARVLANELGDMKQFQNEGRLFSYTGLTPREYSSGEHRRLGHISRQGKPILRKILVQSAWRAISTDKNLGEIYHNMHPRVGAKRAIVGIARRLVGRIRSCINNKEHYKINQERVQMTA

SEQ ID NO: 499097 - protein, 408 aa, unidentified
MNPLFVGIDVSSRNNVAYLMKPDGSKHSSFSVQNNLGGAKILSERIVSALEAVQLSDVVIGLEATSIYGDSLVYALREDGSLGRFQRKIHVLNPKQVRKFKEAYPDLPKNDWVDAFVIADHLRFGRIAKEVYMDDYRYQALRTLTRSRFDIIQNLTREKQRFANYLFLKCSGIAQAKDIQNTSATTIALMERFETVDDLANADLDELTAFIAETGRGRFADPDAAAKAVQAAARGSYRLPKTVNDTVNQAMAVSIASMRALKEQVKVLDKAIEQQFEIIPNTLTSIPGIGKVYSAGIIAEIGDIHRFDSQASVAKFAGLVWHRNQSGDFEAEHSQMIKSGNRYLRYYLLEAANSVRRCDSEFRRYYDLKFKEVNKYQHKRALALTARKLVRLVFRLLKDNRLYIPPED

SEQ ID NO: 499098 - protein, 321 aa, unidentified
MTKSTKIYGVDISKDVFDVMDEQGVHQKFSNDPGGFKSFMKTVEKNGLVVMEATGYYHYRLAQFLYRKSISVSVVNPLQVKRFIQMKLSKIKTDKSDARAICEYGQKNDVPLYNALNESQAECLQLFRLLDNYLKQRTAIKNKLHGEEVLGRPSRVVYHSLNRSLKHLDKEIDQLESRLLTLVKKEQQQQLTHLKSIPGLGTKTALFLIVITDGFSKFETASQLCSYVGITPTIRVSGSRIRGKSRISKKGNKKLRNLVFLCAFSACKHNKGCKELYDRLVDKGKSKKLALIAVANKLLKQAFAVAKSGRPYDENYRSQLA

SEQ ID NO: 499099 - protein, 369 aa, unidentified
MEQVTTIGLDLAKAVFQVHGVDAAGGVMVRRSLRRKQVLAFFAKLPRCLVGMEACATAHYWARELAKLGHDVRLIPPAYAKAYVRRNKNDAADAAAICEAVSRPSMRFVAIKTEAQQASAGIHKVREMLVKQRTMLINTLRGLMAEFGIVVAEGPRHVGELVAILADPADARIPAPLHDGLMAIVESLRGLEQRIARVEKQIVGGGRDNATCRHLITIPGYGPILSSAMAAMIVNPAAFTSARHFAASLGLVPRQDGTGGKVKLGPISKRGNGYLRRLLVNGAMSVLCSKRAKDDPWLVKLLETKQRKVVACALANKMARIGWAVMIRQEGFRRRPQDQPRPDRPQSGAVLAAVKTATRAPSAVACGQS

SEQ ID NO: 499100 - protein, 343 aa, unidentified
MYYIGLDVHKRTISYCVKDGAGHVHQEGKIGSTRRELDSWIKTLPQPRTIAMEATIFTGWIYDHLLPHAEKVKVAHALMLRAIAAAKKKNDKIDAGKIADCLRCDFLPECHMVSTEIRDRRRTLRYRNLVLKQMVQMKNRVSGLLMETGVSYNKQRLHKLGYFTELISSNDEVSESIRPLLKLSRETIVRSQKLDYALVSSLERDPLLAERLKRLRTIPGVGPITALTWALEIGDVSRFQSIKQAISYCGLCSAERSSADKLVRMPISKQRNKHIQQTLVEAAKLAPRYSHELALVYERERQRGNKNRATLAVARKMVAYMLAVERRKQDFVPAEQLGGTAAA

SEQ ID NO: 499101 - protein, 361 aa, unidentified
MSESMALVGLDVHKSRTVAAVLDRVTGELRMERLRGAPERVVPAFLEELDRPVEAVYEAGPTGFVLAREAEQRGLDIRVVAPGSIPRAPGDRVKTDRRDAKRLARLFAAGELRFAFVPSEADERFRDLVRCVDDVRRDLMRARHRLSKFLLRRGVRWQGKTWTQPHERWLCTLHFEDPLSQAVFVDYLAAVQGLAQRRKTLGSVLEGAVPNSSHAETIKRLRCFRSIDTLTAAGLCAEVGDFTRFAKPALLSGFLGIVPSEYTSDEKRTQGQITKAGPTNARRLLVEAAHNYRHRPAIGENLKARQLGQDPRVAQIAWRCQQRLHQRWMHLGGKRGKPTGKVAIAVARELAAFCWEAATLN

SEQ ID NO: 499102 - protein, 350 aa, unidentified
MDSITTIGLDIAKNVFQLHGVDEGGVVILRRSLRRGQMLAFFGNLPPCLIGMEACATAHHWARALMALGHEVRQIPPAYVKPYLRRQKNDAADAAAICEAVTRPSMRFVPVKSEEQQAKLMLHSARELLVSQRTALINALRGHFAEFGIVVAQGARNARLLVAVIHDESNPDLSCSARVALLPLASALIDIEAQIASLSKAILVAHRSNDVSVRPATIPGIGPIVASSLAASIADPGVFKSGREFAAYLGLVPRQHSTGGKPRLGRITKMGNRRLRKLLVVGAHAALYSIKSGKTNTPLADWARTLLAKKPFKLVAVALANKMARIAWVVMTRNTIYQPMFRGTASQGAS

SEQ ID NO: 499103 - protein, 474 aa, unidentified
MLHSVFKNTSVDLKGLLASYEPGEILYVPIDVAKYNHSSMVINLFGEVIVPKFDFPYNNHGIQFLAKKLSTAQKQTHARKLFVALESTGHYHENLVFAITQLGFDVCVINPGDSKNERDNIHAKTDAIDLAAIAKVIMSNKGKRSYMPDCIYYNLRRSSRTHRQLTQQETSIKNIITMLVDKTFNGLWNPENSIFSEKWGKGSLLFVENYSTPQQALRLGARRLADFFRKHNTKLTMDTAMKIIQLAKNTPARPPEMMESDIKALKANIQVLKSLSSAILEQRKQMVKFLLQTPGTYLLSIPGIGAIYASDFTAEVGDIHRFAYAGQVISLAGTAPGKHQSGQLEKTNLRTSHKGRSLLRMTANQIALSLDNHCPEYHDYYSNKLYQYKDTPGKAKTATANRFIKLAFSMMSKETIYHPRAIPLMDEKDYHDYYQSVWDKMKDQLKPYLSDGIPVDNYLTRIQHQLEEKYGIIP

SEQ ID NO: 499104 - protein, 344 aa, unidentified
MLTTNVIAIDLAKNVLQICYISVHGELLFNKAFSRQKAKEFIINAKPSIVAMEGCCGCHYWGQLAQEHGHDVRIINPKKVKGYLEGHKTDHNDALAIANSAIQIGIKYSRPKSLEQQSMQSLESSRRFLSRSVVSLGQHIRGTLLGYGIANPRGEKGLKASVREILDNQSSVPTNVVSVLSMLWEQYKQLKAQLIAFEKEKNALTRQIEPCKRLMEIEGVGETTASMLYTTLGDGKQFKNGRQASAFVGLTPKQHSSGGKVFMIGIDKCGGVKELRSLLYLGAMSYVGRLPDEPRTQKDAWLIKIIQRIGFKKACIALANKIVRTAWAMLRHETAYKPILLNTD

SEQ ID NO: 499105 - protein, 349 aa, unidentified
MNATTAAIDLAKNVFQVVLVDANYRVLEQHRLTRAQFERFFDNRKVSRIVMEACGSAHHWARVFGARGIEAILLPAMYVRAYVRRSKTDAADALALLEALRCADIVAVKVKSVEQQSLQALHRTRSLWMGTRTSRINALRGFCRELGLHVPIGARTGLEAMGRAVADEQSPITPLLRPIMLQLLDEIRLLETRVAQLERQLAQLARESHACKLLMSIPGIGLLTATAILAATAGSVAHFKSARHFASWFGLTPKENSSGTMRRMGRISKMGDRYLRMLLTHGARSVLRAAKVAQLKGIELIGLRHWALALQARSNHNKSACALANKMARICYAVLRDQTPFGQPAARLA

SEQ ID NO: 499106 - protein, 357 aa, unidentified
MKYIGCDFHPSFQVIAMLDTETGELCERRLLHTEEARTFYGELSGPVVVGVEASGNTQWFESLLASYGHQLWMGDAAAIRRQDGRKQKHDGRDARLILTLMEQGRFPKIWIPTVAERDLRQLLIHRQHLVRMRTRVKNQLQHIALNQGWQKKRKLWSEAGLELLRKLELEPWARQRRDTLLEMLAELEGRIQPLNQAVEKEARACPAARRLATHPGGGPVISLATALTMGDVGRFANSRSWVSYLGLNPSEQSSGQRRRLGAISKQGNPFLRYLLVEGAASAARGDKSLARMYARLKAKKHHGVAKIAVARKLAVRLYWMARTNKPYPEVVRTQGSQSHPVAERRAVQLNRPPASRQ

SEQ ID NO: 499107 - protein, 399 aa, unidentified
MVNIGVDLHKTQLTVCVRHGGEETFAEYPADTEGYESFLERAAAWRQRGETVRAGVESTGNTRYFKTRIEEAGIEVKTINTLKMKVVNESVKKTDKHDAATIAEFLEKDMLPESRLCSRESEQLRRLLKVRTSLVKTETVIKNQIHALLLAEGLEDVKPGALQSKKGRKETLDALNQCLNGLAVQPLIEMTDRLEEDVNGIEKRVRALAKGDRTVEPLMTIPGCGEICAWTIRAYTDDIGRFASPKKYASFAGLAPWVQNSNETVRHGKITKRGPKELRAALVQVVMGLRRMKAKTIAWRMAQRYDILKQSKGSGKAIIATARKIAVMIWHMLTRGEAFNLGEAADPQLTKKAEAMRKSGQQNDGEARVEKQEKPAKGACIKKAVKKTGVAREKRKKAG

SEQ ID NO: 499108 - protein, 342 aa, unidentified
MKFYCGIDLSARDCHVCVIDEQLKIVVQQKLRNELVKICQLLGPYKAKLKIVAESTFNWYWLIDGLQAEGFDVVLAHTLGLYLITGAKVKTDRRDAYSLAKLLLVGAVPVAYIYPVETRPVRDLLRRRMHLVQVRAGEYGSLRRLLLRQGILSSKQQEIKTATEAELEQWFEHPLVRLHASQELRRIELYSQQIGELEKTILALAQTAPSYELLLQLPGVGQTIALTILYEVGELTRFANVKVFSSYCRVVPGIAQSGNVSRRGRASKQGNHYLKAAFSQAAVHAVRCYPKVRRYYERQLKRHRGRGRQMICYNIIAHKLAQAAFHVLKEQTEYREELLFGR

SEQ ID NO: 499109 - protein, 402 aa, unidentified
MTFVVGLDWASQVHAVCVLDATGQVCWQGRAEHSANGLAELQRQLARFGPPTSLPIAIERPSGLVVDTLMDAGHPVVPIHPNALKASRPRYSAAGSKSDPGDAFILGDLLRTDGHRFRPLQPLSDETRALRALVRGRDDLVATRVALANQLRALLDRFWPGAAAIFADIATPIALAFLSRYPTPHSAARLGEKRLARFLVQHAYCGRRPVLELLARLRAAPIAHTGELEVEASGEVVRTLVAVLLPLVAQIQQLSAAIAAALPQHPDGPLLQSFPRSGSVNAAQILAELGDDRTRFPTDEQLAAEGGVAPVTHESGKHRGVAFRWACNKRLRQALTTFADNSRHGSPWAAAIYVAARRRGCRHPHAIRILARAWIRVLWRCWHDRRPYDVMLHCAAQRVAAA

SEQ ID NO: 499110 - protein, 318 aa, unidentified
MNSNYKVESTEPVSYVSLDVSKARLDYAIAGQRCRQVPNTAAGIATLITAIQPLPGVRVVCEATGGYERRLLEQMHQARVPVCRLQPGRVRHFARAEGTLAKTDRIDVGVIYRYACSMHPRVEKPPLPEVTALRELLDYRRQLVEQGTETTNRLESAGATLQGLLLAQREQQAAALAKADELVKQHLRAHPALLAKAERMQQLQGVGPVLATTLLAYLPELGEEDDKRIAALVGVAPHAQDSGESFRPRHVRGGRIEVRNVLYMAAVSASQHNPVLSAFYQRLRAAGKPANVCLLAVMRKMIVVLNRMIKNPHFTLVS

SEQ ID NO: 499111 - protein, 409 aa, unidentified
MMKQNIIFGIDVSSKSSTVCVVIDRIKQGETFKITNDSFGYQDLLDRLNQYLITPLVVFEATGVYSLSLQAFLEDYHIKYLKLNPLKAKKLMDNNLRHNKTDKVDAYRLALIQFNAPQKLRAPQPKEYHELQNASRYYEELTQALIINKNQLHRNLQSTFPQIESILSTSSGRVYWTIVSLFPHAQYVLNHNESQVFQSLLAISGIGRQRAHYLTTRLYALARQAYPYDNESSITIRAIQRNIANLLSLSAERDNVINYMEKLAMQANARSLTIYESIPGIAKTTAVRLVAELGDLSRFDTSAQIDAFVGIDPGRYQSGEKDSHLGITKHGNHLARKILYRTITQMETVKATQPCHITDYYDKKKRSSNSRGYKKIAIASVHKLIRTMFALIKHDQLYDYNVATHNQRL

SEQ ID NO: 499112 - protein, 342 aa, unidentified
MEISTIGLDIAKNVFQVHGIDAAEKVVVRKQVRRGQVLGFFEALPPCLIGMEACATAHYWARELTRLGHRVRLMPAKDVKAYVKRNKNDAADAEAICEAVRRPTMRFVQIKSVEQQGRLMLHRARDLLLRQRTQVINALRAHLAELGIVAAQGREGIKELLKIIANEEDARLPVDAQASLIVLAAELQAMQTMIGSIDKRIMAQHRSSEASRRLESIPGIGVTGAAAITATVPDPKVFRSGRDFAAWIGLVPRQDSTGGKQKLGPISKRGDRYLRRILVVGACAVLRYARQQPQKYPWLTQLLSRKPFKVVAVALANKMARIAWALLAKGGTYRAPALAAAV

SEQ ID NO: 499113 - protein, 414 aa, unidentified
MEVVYARVAAIDVGKKEIAVTVRVPGQRRGTRTQQTRKFRTFYQVLRQMVGWLLEQQVTHVAMEATGVYWKPVFHALCEANTLEVVLVNARHVKNVPGRKTDVKDSEWLAQLLECGLLRGSFIPPPQIAAIRELTRYRKKTIQARTRELQRLTKVLEDAGVKIDSVASSITTVSARDMIEALIAGERDPRALADLARGTMRSKIPDLTMACAGRFGEHHALLARMHLDHIDHLTGMIDQLDQRIEQILDPFARQLSLLRTIPGIGDRAAQVLIAELGVDMSRFPTAAHLASWAGLCPGNNESAGKHKSGRTRKGNAEVRDVLTECAWAAGKTRTYVDAQFHRFHRRFGKKGGGKAAIAGAHTLIVIVWHVLHDQSAYRELGHDYFTRHDRPEAAKRRLIHNLEALGYHVQLTAA

SEQ ID NO: 499114 - protein, 420 aa, unidentified
MDRVVADIIHPIACGLDVHSAVIAACLVRPGPQGGPHYEERSFSTNLRGLRELRDWLVGHGCQAVGMEATGVYWIPVFAVLEGHVPMVVGNPNHMRNLRGHKTDRKDAKWIAGLIRHGLIRPSFVPTAEFREARELTRCRRQLINTRTGIRNEVTRLLAHQGIPLGADGLLANIFGVSGMGILEALAEGRDIQKELPKLLHRSVKHKQELLSAALEAGLGAVARKLLAIHLGRLEAAEEDLQKVEALIAAQLAPYKDRLDLLMTIPGISYLSACVILAELGVDMTRWPTHRHLAAWGGVAPGCRESGGKAHRAATRKGNPFVCTTMVECAGAAVMKKDGHLAGKYRHLCARTGSKMKARVAIARKLLVIVYHVLSTLKPYEEPKPQMASKQAKQRAIKKHVRELQKLGQDVQISPILTSA

SEQ ID NO: 499115 - protein, 359 aa, unidentified
MNNKNTTSTKQYDTIKLGIDAHAKWYYVARQVDGATPQPVQKMDFDGLLHFVAKQQRLAREIHTCYEAGAFGYYLHRKLVAMGVQNLLVQPQDWDERGKGVKTDRIDALALCQRLDRYVRGNRKAFSVVRVPSEEEERERALSRQRQQLVRERQRLQGMGRSLLAMHGIHVSGKWWKGKTWATIRSEAPAWVMERLRVFIKLIEPVEAEERKLTEEVQEAGRQRRIPKGVGPLSFEVLRREVGDWSRFNNRRQVSSYTGLCPREHSSGGKRRGGSVSKSGNPRVRAMLVEMVWRMIRWQPGYHALRKWMSVLGDASRSAAVRKKAIVAVARQLAVDLWRLFTGQTTAENLGLIYLPEAA

SEQ ID NO: 499116 - protein, 439 aa, unidentified
MKVMYERVAGIDVHKDMVKVAIRSPGGKPWTRKTEILEFRTFYGVLQHMAAELRKRGVTHVVMEASGVYTEPVYYALCEQDFEQVAVINPAHAKALRGHKTDAGDCARLAELSGCGLLRGSCIPAPELKEVRDLTRYRMKTVQARTSEIQRLSKALEPAGIKLGSVASDITGKSATAMIEALTGGERRGRVLADLAIGRMRTAGKLADLSQALAGRFTEHHALLCRPHRDRIAGFSAAVADLDERIAGKAARWQREADLLTTVPGFGDVVARAWLGEIGPAPHACFSSHEKLASRVTLCPGNNISARKRKHGRTGDAGTYIKPMLIQAARAAIRTRGRLQARYSRLVRRFGGDKNPGAKKKAITAIAHTLLKIACQVLKSGTPCQEPGADFYTRRESPEQRRAYLERQLRKLHPGCTITITISPPEPPGRAALTGTAVA

SEQ ID NO: 499117 - protein, 451 aa, unidentified
MSRPQVIDDEEHERVHERVAAIDVAKDSGMVCTRAPHPSRPGARRSTVWTVKARMGAVRKLGRQLARDGIEIVTLESTSDYWRIWFFVLEACGLAVQLVNAAQARNLPGRPKTDKLDAMWLARLTELGLLRASFVPPKAIRDLRDYTRLRTRLVQERTRCWQRLEKLLEGALVKVSSVASKLTTVSAQDMIKAMIAGERNPEVLAGLARGRMKAKHDDLVEALDGMFDDHHGELASLLLDQVAFLGQRITWLTTRITAAAAAMPAAWGVDGDGTTGPDAGTGPDAAVLPAVARLAEIPGVSPDVARAVIAETGLDMSRFPTAAHLVSWAGLCPSARQSGPRTRAGKKGQGDTWLRGALGQAATAAAGTATFLGERYTRIARRRGKAKAQVAVARSILVIIWHLLKNPEARFTDLGYGYYQARTDKDKKIKNHLRQIEALLGHPITITPKTA

SEQ ID NO: 499118 - protein, 304 aa, unidentified
MQAPRHIGIDLHRDKFTCCVRWENGRNYLTDWKLADLPAFVKKLRPSDEIAVEVTGNTRLFRDAVAPHVKRVVAVDPNQFKVISHSVKKTDPNDARNLALYVAKDLLPEVRMKDKTRAQLASLTQTRDTLVKLRTALKNKINNILSAHGHHLEKEALSSAKTLNEILVVRFDPMVKLELEVMVEEIRSLNQRIAKLEKAIADEGKLAAYFGIVPRVSKSNETEHTGRITKRGSKLGRTALVQCALIAQRYSPYLKRYYEKLKARRGTGKAIIALARKLLGIIYRTLKNKWVFEDSPNFVLAEAA

SEQ ID NO: 499119 - protein, 404 aa, unidentified
MSVHAAPVTSSTIVVAIDVGKTSALLSATDGARRRVLGPVEFAMTRSGLGAIVHRVSAVVPAFAQVKVGVEAAGHYHRPVLDYGWPPEWEVLELNPAHVAEQRRVAGRRRVKTDVIDLEAVTELVLAGRGRVITEREVCIGELAAWVIHRSQRIATRSATKNQLLGQLDRAFPGLTRALPDVLGTKIGRLVAAEFADPARLSALGVNRLIRFAAARDIQLRRPVAERLVTAARDALPTRDGSVARRVLATDLGLLADLDTQIADAEGELAALLPASPYSTLSSVPGWGVVRISNYAASLGDPDRWPGPRQIYRASGLSPMQYESAGKRRDGRISREGSVALRRALIDLGLGLWLTEPSAKAYAAELKSRGKPGGIIGCALAHRATRIAYALVRDHTIYNPSRWV

SEQ ID NO: 499120 - protein, 346 aa, unidentified
MEITTVGLDLAKKVFQVHGINSAGEVSVRKTLRRSQVRRFFEQLEPCLVGIEACGTSHYWAREITKLGHEVRLMPPAYVKPYVKRGKTDASDAEAICEAVTRPTMRYVAIKSADQQAALALHRTRDLFVKQRTQLVNMIRGLLAEFGIEIGRGIEQALKLAKRIASGEVPEIPVLAAKVIAGLAWQVLDLQARLGEIEHELLAWHRSNDVAKRLATIPGIGTVGATALAASVTDPHQFRSGRQFAAWLGLTPLQHSSGGKERLGRISKMGDKYLRRLLVVGMTSLIRRAKYKPEAVDPWLADLLSRKPARLVTVALANKAARVVWAIMVRGGVYRRPAGAGVMAPV

SEQ ID NO: 499121 - protein, 449 aa, unidentified
MSDIPTSSIQPEFVALIGIDWGDKKHAWALQAGDSTKIEKGEIEHTPEAIQQWAAELRRRFPSGRLAVALEQSRGPLVFALSKYEHLTLFPIHPSSAAEYRKVFRPSGAKSDGPDAVLHWDMLARHRDKLRPLNPDTPETRALQLLTEDRRQLVNERTRYSNRLTANLKSSYPQLLQWFDDLYAPVTLDFLEQWPTLEELQKAKPGVWSKFFQEHRCRDAKNQQLLAAIPTAVTATTDFAVVTAGRAGVCAAVRLLRNLNQAIQEYDRQIDQLAKGHPDFALFQSLPGAGKVLVPRLIAAFGTQRDRYQRAAEIQQYSGIAPVTEASGQQRWVHWRWSCPKFLRQTFHEWAAQSIAQCDWAAAYYRVQREDKNKSHHAAVRSLAYKWIRIAFRCWKDRQLYDGSKYELALKTRAKATPEPKQPSSFPLPLRWISCAGFQKLAEKNGENT

SEQ ID NO: 499122 - protein, 404 aa, unidentified
MIFVGDDWSEDHHDVCLMDQAGKRLASRRLPEGLTGIRQLHELIAEHAEDPDQVVIGIETDRGLWAGALAAAGYQVFAVNPLAVARYRDRHHVSGGKSDASDAKLLADLVRTDRHNHRPIAGDSLDAEAIKVLARAHQSLIWARTRHTNAMRSALREYYPAALLAFEDLAHGDALGVLGRAPTPEQGAHLDLPAIQSALKRGGRKRNIAARARQIRAALRSEQLAAPAPVAAAFGATTRAAVGIIVELNRQIAELEAELATHFEAHPDADIYRSLPGLGVILGARVLGEFGDDPNRYTSAKSRRNYAGTSPLTVASGKKRAVLARHVRNRRLYDAIDHWALCALTSSPGARAYYDHHRAAGDVHHQALRALGNRLVGILHGCLRHHTTYSEHTAWAHRQITQAA

SEQ ID NO: 499123 - protein, 428 aa, unidentified
MDQVNRNRLEEFRQLRQEVRHSEEYLIVGIDIAKDRHHAFFGTATGRTLLRRLVFSNDHEGFRKLLDQAEALRVRHGLKKVVYGMEPTANYHKPLGEYLITQGRTVVLVSGVTVKRNRESLDGRWDKHDAKDSANVADLISQGKCLYYEHPSAELRGLRGLLSLKRRLKKQEHGYRVRIRNHLIAQYFPEMDREYERLGAEGLSIVRWCFPPSQMTELDVDPFIERVTSRRIRLEKRRRLEEVWERAGESIGCDGVPGVEHEAKVMVEGLRQVREMIKETEDKIEELCEQFPEYKYLLTIPGFGPDLSARVLGAIGEADRFQNGKQVLKLAGLDLSADRSGKDSDKAIPEISKRGKADLRYALYQAALIASTKNQDFMLYYARKLEGRQKEKGIQTKMWVKLSAKMLLIAWTLMKKKEAFDPAYLNAE

SEQ ID NO: 499124 - protein, 343 aa, unidentified
MEYYVGLDVSLKQTSICVVDQTGSVVREGVVDSDPEAISVYVRSKAPGAVRIGLETGPTSTWLWTELKRFGLPVICIDARHAKAVLKMQINKNDRNDAIGIARIMQTGWFKEVHVKDIDSHSVRALLASRALLVKIKRDLENHVRGLLKNLGLVIGRATFNVFAARAEELIEGRPDLVAAVRPLLEARNAVEQQVSELDRKVMKLARLDAQVQRFMTVPGVGPITALAFKATIDDPARFARSRSVGAYVGLTSRRHASGEIDWSGRISKCGDAMLRSYLFEAAGVLLTRVPKWSTVKAWGMRLAKRNGLRKAKVAVARKLAVILHRMWIDGTEFNWSKKEIAA

SEQ ID NO: 499125 - protein, 336 aa, unidentified
MLYVGLDVHSRQSSLCILNAGGGVVNRFDVKGPRAAVVDRLRQLDQPFSLCYEASCGYGHLYESIRPLAAHVAVAHPGKLRLIYRSKRKNDRVDAEKLAKLLLLDMVPQVHVPNVDVRAWRSLIQLRQRLLALRVKAKNQIRAVLREHDIAAPRWLWSVKALAWLATLELHPSAMLRLELNIEELKSLKVKMNRVEKELAVYADRHPAVTLLMTIPGVGIRTAETFVAWVDDISRFRRTRQLGAYFGLVPCQDASADKNRLGHITRDGPPVMRKLITEAAWTAIKKCPAFKRFFQRIMAQKADRRKIAIVATAHRLIRVMGAMMRSGTAYDANYKG

SEQ ID NO: 499126 - protein, 361 aa, unidentified
MKRVQSNKLDFSGQNIYVGIDVHLKSWSVAILSEYSALKRFSQSPEPEALHKYLVSNYPGANYFSVYEAGFCGFWIHEKLTGLGITNIVVHPADVPTMSKEKLRKTDAVDCNKLARELRSGSLEGIYVPKASVLEIRSLIRTRSMIVKDSTRTKNRIKSLLRFHGVDIPEEFTRSPIGRWSKRFLAWLHSIELSTEYGKKTLELHIEQFVRLRNMLLQETRAIREISRKAPFEKPMRLLTSVPGIGVTTAATLMVELDDIVRFKNADHLASFIGLVPMCHSSGESNGTGDITVRRHFMLRCLLVEAAWIAIRKDPAMTVAYTEYRRRMNPQKSIIKIARRLVNRIYYVLKHEKEYIPCVVE

SEQ ID NO: 499127 - protein, 354 aa, unidentified
MSQQLSTTIAVIGVDIGKNSFHIVGLDQRGAIVLRQKWSRGQVESRFANMPPCLIGMEACVGAHHLSRKLKGLGHDARLMPAKYVRPYSKGQKNDFRDAEAIAEAVQRPTMKFVATKTADQLDLQALHRVRERLVSQRTGIINQIRAFLLERGIAVRQGQRFLRAELPRILAAPPDVLSPRMVHVIEDLAGDWRRLDERIEGLSGEIEAIARRDAGCERLMSVPGIGPIISSAMVAAIGNGDAFAKGRDFAAWLGLVPKQISTGDRTILGKISKRGNRYLRVLFVQAAWVVLIKPKSWERHGLKPWLEAAKKRLHHNVLAIALANKLARIAWSVLARGRSFEARMTNEANSQPA

SEQ ID NO: 499128 - protein, 300 aa, unidentified
MEQFAGLDVSVNETSVCIMDETGKIVREVKVASEPDALLTVLKNRTYHFKRIGLEAGPLSQWLYSALAEAELPVVCVETRHMQAVLKAQINKTDRNDARGIAQMMRVGLYRPVHVKTLRSQKLRMLLTHRKLMLSKAIAIENDLRGTLRNFGLKVGMVGTVKFEARIKELIENLPDLAVLVEPLLVVRRVLREQIGILHRRLLVIVRDDAVCRRLMTVPGVGPVVALTYRATVDVPARFRNSKAVGAVFGLTPSKYQSGEINRTGAISKCGDEMMRVMLYEAAQVMLTRTNKWPGSRPGR

SEQ ID NO: 499129 - protein, 392 aa, unidentified
MLYVGIDVAKSKHDCCIIDSDGSILSDALSISNSLDGFELLCSTILSHLQDDDLDNVKIGLESTDHYSTNITNYLYAKGFQITTLNPLATNLFRKAHTLRKTKTDKTDAMVIASMLFTDESKSYSPVSYQIQELKSLTRHRYRMIGYRSKLKLSITRLIDIIFPELPSEVWSIHQNSSYQLLLECPTPEAIETCHLTKLSNILKRASKGHYGKDKALALKSLASKSIGSNNRSLAFELKQTIRLIQSVQHEINELELQIKIVVDELNSPLMTIPGISYTLASVIIAEIGDIERFSSPAKLLAFAGMEPSTYQSGNYKATNTPMVKRGSTYLRWAIMQAARTVSMRDITFANYLHKKRCEGKHYCVAINHVGKKLTRVIYYLMMTNTAFVSQT

SEQ ID NO: 499130 - protein, 348 aa, unidentified
MNILAMDIGKCKTVVCFYNSNTGEHKFDKVKTTPQDIHDLVAEQQPDRVVFEICSVAGWVYDIVKALGIEVQVANPNTQAWRWKNVKRKNDREDALKLAQLSAMNQLPMVHIPKRQIRQKRALIRYRQSLVKRVTQIKNNIRAILDKEGYSMPAGKSGWTNKSIEQLNQRALLLEECDFDNLWRGQLNVELQMLEATNKCLMEVTAKLDKQTKSNKQIQLLQTIPGVGPRLAETVVAFLDEPGRFATGKQVGCYAGLTPKQYQSGSMDRQGRISGQGNKLLRALLVEVSWLGLRHNSWMRETYNRLLRGSPSRKKIAITAVARKLLVRCWAMLRDEQPWRNEVSSEVA

SEQ ID NO: 499131 - protein, 355 aa, unidentified
MNDAKYIGLDVHQATISVAVLDSAGNLVVEAILETKAETILQFIHGLRGSLHVTFEEGTCAAWLHDLLKPHVTQVLVCDPRKNALIKAGNKSDRIDARKLADLLYLNKLNPVYHGETGIRPLKELARSYLALTRDTTRVMNRLKALYRSWAIPCAGQRVYAPRDRSEWLAKITEAGVRRRAEIYYQQLDALRSLREQVRHDLLAEGRKHSAMTLLRQIPSIGPIRAVLLIALLQTPHRFRTKRQLWAYCGLALKTSTSGEYRIVEGRLKRSKKFLAIRGLNANHNHDLKNIFKGAATRAAAVPGPFQEFHAGLVARGMKPTMARLTLARKIAAITLIVWKKGVRFDAEHLKPQAA

SEQ ID NO: 499132 - protein, 430 aa, unidentified
MGLIVPTTTHPEREDQPLPYEWFVGIDWGSQQHQVYVLDRDRRRVGERVVDHDGASLARLADWLWTLSAGQPQRVAVAIEVPRGAIVDGLLERGFHLFALHPKQLDRFRDRHSVAGAKDDRRDAFVLADSVRTDQPSFRRLQLDAPQLLLLRELSRAEETLLEEFRRSANRLRDQLHRLYPQMLQLCSAADAPWLWDLLDLAPTPAHAALLSAEQVQRVLKAHRLRRITAPEVLACLQAPALPVAPGAAEAAQAHCGFLLPCLRVLAEQLRACGQQVDALLRPMADEPGAGERPSDVAIVLSLPGVGRKMTAWLFAEAAQPLAERDYQVLRTHSGIAPVTKQSGKRRLVVMRRGCNPRLRHALYHMARVAMQRDAHFSSVYTALRAKGQRHGQALRTISDRLLRILVAMLRNGTCYDASRIRRESVVQMG

SEQ ID NO: 499133 - protein, 312 aa, unidentified
MNRIICGVDVSKDWLDAQIRPGAVFQRFCNDASGIAELLALCRAHGVTLVVMEASGGYERAAFLLLWEMGMACALANARSVRSFADAMGILEKTDRIDAGVIAAYAEVKKLRPTPAPKAAQLRLSALVARLSQITGDLVVNKQRRHVVRDDETRQSLDEVIALLVRQSRKLEGEIASLIDDDPLWACLDKAFRTVKGVASRTVARLMAELPEIGHVSNKAIAKLSGLAPMANDSGNRTGRRHVRDGRAGPRSILFLVAAIAARYNQNLADFQQRLQSQGKPKMVIRIALARKLLVILNAKARDARREFENAT

SEQ ID NO: 499134 - protein, 362 aa, unidentified
MVVTVGIDVHKDTHCAVAVDAAGRQLGRDRTFRAIDAGHRQLLRWVLTEFGREVEFAVEDCRQFSNRLERSLLAAAQTVIRVPPKLMALTRQNTRTRGKSDPLDAVNIARAAVREPGVPRAEHPHASRDVKLLVDHREDLVGSGTAIQNRLRWLLHELDPRIDPEPRQLDSMRELDRVRDRVAALPVTTETATVIRIALEQFGDIRQLTVRARELEKELVLLVQQQAPQLLDLPGCGVLTAAKLIGETANPCRFRSEACFAMHAGVAPIPASSGRTQRHRLARGGNRHLNAALHRIAVTQARLDCPGRDYYQRRKTKHQDSTIEVLRVMKRKIARIVYQLLNTPTTTAAACQPVAARHRSNT

SEQ ID NO: 499135 - protein, 384 aa, unidentified
MQASHVSTPIKSNVSTIFVAIELSQRSWLVTMHCPDKDKISHHKLEGGDHAGLLTLIERMRERAARTLGAVPAVVSCYEAGYDGFWLHRLLMAAGITNHVFDPASIAVDQRARRVKTDRIDGEKMLRTLMAYLRGEPRVVRIVRVPTPEQEDARRASRERDRLTKEQTAHTTRIKALLRLLGMAVGNPRRHDWLTWLVKQRDWQGQAVPPQIMAEIKREHTRLMRVREQLDALAQTAANLTPAAAQMAQRSELLLRLKSLGPAFTTTLTNEVFYKDFRNRREVASYVGLTPSPWQSGGIDRDQGISKAGNPRARCAAIEMAWLWLRHQPDSKLTQEYRRRTLDAGKRIKRVAIVALARKLIVALWRYLTTGLVPEGAMLKTAEV

SEQ ID NO: 499136 - protein, 348 aa, unidentified
MTTMVEDTRAITGGVDTHTDLHVAAALDSIGGLLGVQEFPATAAGYAELLSWLRSFGNLALAGVEGTGSYGAGLARYLAAAGVRVVEVDRADRQDRHRQGKSDPLDAVSAARAAQSGRASGAPRGRDGAVEAIRALMVAKRSARQERTQAVNQARALIVTGPEELRARFARRSPAQLIEAIAALRPRPGDVPGYATRVALRELGRRARFLDGQLDRLDELIGPLVTERAPGLLALHGVGPDTAALLLVAAGDHPERLRSESSWAHLCGVAPIPASSGKTAGRYRLNRGGDRQANSALWRIVMVRLSSHEATRAYADRRGKEGLSKKEIIRCLKRYVAREVYRQLRAES

SEQ ID NO: 499137 - protein, 450 aa, unidentified
MSTNAKQKTDLQLAVIHPNSAAIDVGSMMMMVSYTDKEGKLCLLEVDAFTDNLHELAKTLQAAGVIRVAMEATGVYWMALYEILERYELKVIIVNPRHFKNVDAQKTDVKDCQWLHQLHAHGLLRASYIAPELSRELRSYLHERDILQNQKSDVLNRIHRILTQMNIKVQHLINDIEGVSGMRLLHGIANGKTNPEELLSQININRLKAGKEDLIKSLKGDFKKQYISILRNLLKSYSFFKDQMKSYELLIEEVLQKMLPRDEHGNKPSIEAKKTYVRKNEYSINLKQYLNHIAGIDLTKIDGLDEKTLIVIIAVVGIDMSKWPSAEHFVSWLNLSARPKITGGKLIGHQKRFTNNPATQAFRMAAQALWHNKGPLGQMYRRLAAKKGSKKAIKAVARKLAVIFYNMVKNKTDFNPSKLSFDSEKQKAIKLKYLTSEAAKYGFILQKQAG

SEQ ID NO: 499138 - protein, 339 aa, unidentified
MKYTPVGVDIAKHLIQVHFINEHTGEVVDKQLRSKDFLTFFSNREPCLIGMEACGGSQHWARELEKLGHKVRLLQARFVKAFVMGNKNDVMDARAIWMAVQQPGKAIAVKTEEQQSVLVLHRSRRQLVKFRTAQINALHGTLLEFGETIHKGRAALDRELPAALERMKAKLPPYLITVLEDQYNRLSELDSLIDGLEKQLNSVARQSETCKRLMEIPGVGPLIATAAVATMGEASAFKSGREFAAYVGLVPKQTGSGGKVRLLGISKRGDTYLRTLFIHGARAAALLTKEPGPWITELKKRRPTSVAIVAMANKLARTVWAIAAHDRKYDKNHVSIRPY

SEQ ID NO: 499139 - protein, 360 aa, unidentified
MNKDKYVGLDTDQATIIGRVDDAKGNFVMESTIETSASSIRQFFKGLDGTIHVGFEEGTQAAWLYDVIRPLVAEVVVCDPRRNKLIQSGNKSDRIDAAKLARLLRLGDLHAVYHGERGTRGLKELVHGYESLVADTTRTKNRLKAVFRSQAIRCRGELVYSHQERKQWLGKLDTAALGARASILYEQLDSLTKLRDKAYKAMTTEARRHPAYKRLKKVTGLGEVRTAQIIAVVCSPYRFRTKRQFWPYCGLAVVTKSSSEYEIVDGQRRRKRNKQAQTRGLNQNYNRTLKAVFKGAAATAIERPPFKQYRQRLIDKGIRPELALLTVARKIAAITLTIWKKGEEFDPERVNQAVPGTGKE

SEQ ID NO: 499140 - protein, 355 aa, unidentified
MLSTKYIGMDVHRESISFAVMNSAGKLVMECVIETKSSMILQFIDGLRGNLHLTFEEGTWAAWLYDLLKPRVTKLVVCDPRKNKSMREGNQSDKIDARRLAELLRLDHLSPVYHGEHGLRTLKELVRSYLTITKDVGRVMTRVKAIYRSWGIPCTGKQVYARCHRAEWLAKINELGVRRRAEFYYQQLDALRVLRQQVRQDLLAESKKQPVWKRLCQIPSIGPIRSAVLLGILQTPHRFRTKRQLWTYSGLAVETHSSADHRYVNGQLQRAKKQVLVRGLNSNCNHDLKNLFKGAAIVASSKPGPFEEFYAALVAKGMRPEMARLTLARKIATIVLIVWKRGVSFDAQHLKPQTA

SEQ ID NO: 499141 - protein, 353 aa, unidentified
MKCDKYIGMDVHQATTVVVVLDATGKLVLETIIATEAAALIRFLQSLSGPLHVTVEESTPAAWLYDVMRGFVAEVIVCDPRRNKLLTEGSKGDKPDARKLAELLRVGMLRPVYHGHQATRALKEVVRGYETVSSDVQRTMTRIKAMFRGSGIPTSGRCVYQPQQRQQWLELLTEPGRRQRVQWLYEQLDQLRPLRRQVKQTMLQEARKHRAVGLLRSIPQLGPVRATLIVATLDTPHRFRTRHQLWSYSGLAVVTHTSAEYEMKEGRLVRSRKPIATRGLNRNCNRRMKEVFIGAATGGSQTEPYRSYMQALQSRGIRKEMARLTLARKIAAIALVIWKKGEKFDLQKLNWTT

SEQ ID NO: 499142 - protein, 347 aa, unidentified
MRKIAYLAMDVHARNCVLGDMDGNGNFRGNRSFITRENNIIKVIKAIKAKKKHLIMEAGPLSNWAAQLANDHVTRVIICDPRENALIYKSSQKRDKVDTKKMCRLLRLGEFKEVYRPENDQRAIFKAAVQHYLDLRDQLSALKNKIKAMYRQWGVIDVFTDSVYSTSGRDKFLNQLTQRPIYLQLKRLYDLMDHTAAIKQDAEKSMIAIGRSYPEIKEFKKMPGVGPIGAHTFDAYIQTPHRFAKTSRLWRYCRLGITDCSSDGKPLGYKRLDKSGVNELKALSYRAFISAMKSDNEVKRFYLNSLQRTHDKKHARLNTQRKILSVMLSIWKKGTVYRAELFLDPSI

SEQ ID NO: 499143 - protein, 400 aa, unidentified
MNHQQPCIAIDVSKGNSHVCGFTKAGYPYQKVLKITHNQKGFETLSELYHMINRDTQQVPVFIFEATGIYHRPLKNFLETRHYPFIEASPLLAAKHRKNSTIRSAKTDARDTQALARLFYDVDFQLNRISDETFYELRQCHRYYTQLTEILVKCKVHFNEKLDILFPEFRNEVTQSVYANYYLELLKKYPHPDLLAKARVDTIQNLLVKHGKRASSSRKNAEHLKEFSQKCWSGSSPTSVDTMILVNYIEQIQQYQQQRDNVIKQMISLGKDYQLYQQLQSIPGIGRTIAICLIAELGDLSNFDSRKQLLAYAGLDPVISQSGQRDGKGLSISKKGNKHLRRLLFLVVTSSVHISQDHPIQQFYQKKRQNLPNKAALIASSDKLLRTIFRMSQTGENYLF

SEQ ID NO: 499144 - protein, 374 aa, unidentified
MTDHNEAYVAFDSSKLRHAVAIAEGGRTGEVRFLGEIENSETATVKLVKKLASKHRDLTFCYEAGPTGYELYRLIKHLGHDCVVVAPSLIPKKPGDRVKTNRRDALSLAKLLRADELTAVWVPDARHEAMRDLTRAREAAVDDLGSKRRRVLSLLLRLGRHYPGKRTWTQAHMNWLASQKIAHAEQRIAFEEMLLAAREAQARIARLEQAIRAALPDWSLAQLVTALMALRGFDLVAATALLAEIGELSRFATPRELMGYLGLVPSEHSTGDKIKRAGITKAGNRRARRILVECSWSYRHPPRLGKEKLAKVAAAPRAVQEIAWKAQSRLCARFRALTRRGKRPTVAVTAIARELSGFIWAVNRQISASPVAAM

SEQ ID NO: 499145 - protein, 358 aa, unidentified
MRKKNNELDFTNQIIFIGIDVHKKQWSITINISGQQIKTFSMNPKPEELNKYLRKNYPGGKYRSVYEAGFCGYWIDRQLQSLGIENIVVNPGDVPTSNKEKSRKTDRIDSRKLARELSGENLTCIYIPTKEQEAARTLSRLRIQLTKDQTRVKNRIKSLLNFIGVHLPENIEVKHWSGMFIKYLHSLDFDQQELKQTLEQLLKQLSALREQLSDVLKLLRSMINQNEKKQKTIAQLMTVPGIGFITAVTLYTEIMEINRFRSFDHLSSYVGLAPSIYSSGQKEMVLGLSQRQNTNLRNILIEAAWIASRKDPVMTMTFGRLIKRMKKQAAIIRISKKLLRRIMHVWKQKEDYVFAVVQ

SEQ ID NO: 499146 - protein, 341 aa, unidentified
MQNVTLVGIDLGKHFFHLHGQDKAGKAVFRKKLSRKQLIEFMATFHSCTVAMEACAGAHWMARKLSEFNHVVKLISPQFVRPFVKSNKNDFVDAEAICEAAARPSMRFVTPKTESQQTLAALHRVRQALVRDRVSTTNQMHGFLLEFGVSLPVGHAVVKRLSVVLAEHQLPPRLVAILERLHAHFKYLTEQIGEIEKELDRQLAEDPIGQRLLTIPGVGPITASLLASELGDGKQYRHGRDFAAAVGLVPRQFSTGGKANLLGISKRGDKNIRYLLVQCARAFMLRLDKQSGRVADWVRTLLTRRHSSVVACALASKLARIAWAIVSCNTVFESQPSAPVL

SEQ ID NO: 499147 - protein, 370 aa, unidentified
MLDTTTFVGLDVHARSIKAVSLDVMTGEVRAATFGYDAGAVAEWVRSVDPGARCVYESGVTGFDLQKRLSGLGVDCVVGAVSKMIKPSADRRRKNDRNDAEFLARMLSVGNVVEVWVPDDECEAARDLTRALEDARDDLSRSKQRLSKFLLRHGLVFDERTPTGRRKGNWTRAHWSWIESIRFAEGADEEVLAYYVDAVRRAAEEKARLEGLVEGEARKPRWRRRVDALRCLKGVDTATAADLVFEAGEFSRFRNARSFAAWVGLTPSEHSSGESDRRGAITKAGNRHLRKTLVEAAWHYLTCSGRPKDLAKGQAPDPAARRHAAKGVRRLVERREALLARGVHGNKANVATARELACWVWAVGLMAEES

SEQ ID NO: 499148 - protein, 428 aa, unidentified
MIPAVIERCAGIDVHKKFVMVCALLGPAQANPEPKIRRFGTYNAELEQLLDWLQELNCMHVVMESTGPYWKPVFNVLEEAGVQTTLANPQQVKNLRGHKTDMKDCQWLAHLLRHGMIRPSYIPPRPIRELRDLTRRRKQLVRNGAMERNRVQKLLEEANVKLGNVLSDVFGASGQEMLFALVQGEASAEQIAQLAKQRARKKIPQIQAALEGHRMNQTQRDLISQCMSHMAFLEQQIEEVDQQIQDKIRNFGLSQSYALLQTVPGMKKEAAATVLAEVGATVEAFSTPAKLSSWAGVCPGNNESAGKRKSTRTTKGNPYLRDMLLECAWASSHRKNSQMQHRYQRLQLRKGYKRAIVAVAHALIQAVYYVLSTRQPFVDTAEPTRSPATVHRLIRHHTRRLRKLNCWLERRAQTAQTSTFHKPQVTSG

SEQ ID NO: 499149 - protein, 330 aa, unidentified
MKTNPQPVYVGVDIAKATFQVHVQGRQSEFDNAPTGHTKLCKQLLALAGAQVICEATGGYERPLVTALQLAKIPVAVVNPAQVRAAARAQGQRAKTDRIDAAMLTDYGQRYQPRLTPPITPSQRTLADLALWLKQLIAGQTVAKIQAEHHDDAFVCQQHRVLIKHYQSQIEKVEAKLQALLAQDQVLRQRVECLDAIAGVGTRTALLVLAHMPELGQMNRQQVAALAGLAPWTRESGTMKGIRCIGGGRGEVRRILYMSALSAARRNPVLREVYQRLITKGKRPKVALTAVMRRLLVYMNHLLKLLATQSEPNQPGTPTDKKITENSCKN

SEQ ID NO: 499150 - protein, 335 aa, unidentified
MQRNPKDHARLDTDSQSSVDTPVAAAKPRKIDGLRLIALLKFGKALLLIATSYGVHRLLDAALVERLQALAPVLVVLEATGGYETVVASALGAARLPLAVVNPRWIRDFARATGKLAKTDRIDAAAIAHFAEAVRPPVRPIADAEAQALGELVARRRQVIEMIVAEGNRRRMASQRRVIRAIERHLAVLQAELSELDGDIDDAIRNSPLWQADADLLASVPGVGPATLRTLIAELPELGRLTRRKIAALVGVAPINRDSGTLRGRRTIAGGRPAVRSALYMAALVASRKNPVIAPHYDKLRAAGKTGKQALTACMRKLIVILNAILRDRKPWQSA

SEQ ID NO: 499151 - protein, 308 aa, unidentified
MIKYHKHIGIDIGKYNFVVGIEGIKDTKEYENTSSGIFEFINDNKDILANSLTVVETTGGYELELLYSLCERGYVVHRADARKVKNFIRSYGNSAKTDKLDAKALGLYGKERADKLEVFKPESKQNIQLFRLVQRRNDLKQMLVAEKNRLQQANTDKFVKNSCINMIDVLSNQITEITNQVEVIISSDQLLKAKHEILKEINGIGNIVAFELLILLPELGKLTRRQIVSLAGLAPKANDSGKYQGYRKVGHGRAGVKPILFLAAMSARNSKTSGLRLFYERLINNGKKKMVALTALMRKIIVIARERS

SEQ ID NO: 499152 - protein, 355 aa, unidentified
MSQEKYIGMDVHQATISVAVMDAKGKLIMECVLETKAATILEFIQGLRGTLAVTFEEGTSAAWLHDLLNPHVNRLVVCDPRKNALLKDGNKNDRVDAQKLAELLRTNQVKPVYHGKHGTRALKELGRSYLTITKDVTRVMNRIKSVYRSWAIPCAGTSVYTRRHRAEWLAKLVEPGVRIRAEHLYQQLDSLQPLRLEVRRQLLLESHKHAAVKLLRQVPAIGPIRAALLVALLQTPHRFRTKRQLWAYSGFAVEVHDSGEYRWVRGKLQRNRERITVRGLNDNHNKEVKSLFKAAAISASIRPGPLHDFYVARVESGMRPTMARLTLARKIAAITLTMWKKGVSFDPKQLHRQAA

SEQ ID NO: 499153 - protein, 330 aa, unidentified
MYLGIDTHTRYAQVAVVDDDGNLQDELRIPNDKLEQLAEQYAGSDAVIEATGNYRPIYEVLDEHLNVTLANPSKNRLIADATVKTDRLDAKRLAHMLRSGMLAESYVPTDEIRELRDLVRTRKGLVDERTAEKNRVRAVLKRTDNAYDSELFGPNGREFLAELSLSTADRTIIEAHLSVIDEYDTQIEWLEDEIEQHVLESAAAQRLLSIPGVGQFTAAVVVAEVGEIDRFDSDNALVSYAGLDPVVHQSGEKEIHGSISKEGSAQMRWALVQAAHTAVRCDDYFGNFYTRLKRRKNHQVAIVATARKMLVSIYYMLTRKEVYDPPEVSA

SEQ ID NO: 499154 - protein, 340 aa, unidentified
MTASASQPASPTTIVTSSPEGVLPALYVGIDVSKDSFVVHLRPAGTSRTFQQTPAGLDQVIAWLQPQGVKLMVLEATGGYERKLALALLDAGLPTSVVNPRQSHHAAKVLNRLDKSDHSDAEVLSWMAEHLGPALATRPTKEALELQDLMARRTQLIQMRTAETNRRQQAHHEAARRSIDKIVKTLNGELAKIDAAIAKLIDADDTWRRTAELVQSTIGVAVGTSNMLIAELPELGRLNREKIAALAGLAPRLDQSGTRDGNRHIQGGRSSVRTALYMATLSAIRHNPVIKEYYVHLRAKGKVFKVAITACMRKLLNILNALVKHDTPWRDLLAPTAATT

SEQ ID NO: 499155 - protein, 339 aa, unidentified
MNRIVVGVGIAKRVFQLHWVEPESGEIVALQLKREKFLEHFANRAHCLIGMEACGGSQHWARSLQKLGHEVKLLSGRMVKPFVVGNKNDVADARGIWMAVQQPGIKAVAIKSEEQQAVLALHRMREQLVKFRTAQINGLRGLVMEYGEVMPQGRAGIKRDIPGALGRLADRLPAMVIETLREQYARLSELDEEIGQIERRLRHWQREDCATQRIAAIPGVGLLSATAAVATMGDAKAFKSGREFAAWLGLVPGQSGTGGRVRLLGISKRGDKYLRTLLIHGARAVLTHSKSPPEWLSELIKRRPKNVAVVAMANKMARTIWALTAHERAYQSGYVSRAA

SEQ ID NO: 499156 - protein, 357 aa, unidentified
MNTITIGVDLAKSVFAVCTVDAAGRVLARQEFKREAFGRWLAQVPAGTVVAMEACSGAHHWARRSLEHGLEPRIMAAQFVTPFRKARATKNDHADAEAIATAARQGNMRFVPVKDVDQQAWLSWHRVREGYKVESLAIGNRIRGLLAEFGVIVAQGDLALRRRLADLDAQIGLPAEFRELLRDLADHWKQLRVRLDACDARIEAHAREDERCVRLRAIIGIGSITADAAVATVGNAREFKQGRQMAAWLGLIPTQHSSGGHARLGGISCRGDAYLRTLLIQGARSSLQRAKAVATEKATPEQLWIRTLDGRMPFGKVIVAIANKHARQLWAMLAHDVDYDPHARLNHPMHQRAAHAA

SEQ ID NO: 499157 - protein, 415 aa, unidentified
MKVVFPTCCGVDVHKRFLVATIITSPTDSLQPHYQKKRFSTFNSDLNRLADWLHKNECLDVCMESTGKYWVPVFNILEMRGIRVVIANPKWVKAVKGNKDDTKDSKWIGDLFRIGLVKSSFIPDKNIRILREFTRYRYKLISMRSSEKNRFQNAFTVCNVALDSVVSDMFGKSATAITDYLTSNEPFDAEHCVSLLQRSLKKKADAVLESIEGYSITDEQKLRISIIREHLDHIVDLIDKMDDCINTLVSEYEGQINLLCTIPGVRRDTAITIISEVGVDMSQFGSSKRFCCWAGLTPGNNESAGKKKSVRISRAGVYLKPALVEVAHAAVKDKANPYYALKYERIAKRRGKKRAIIAIARMILTAIYEMLSTGEVWNPVDLYKVDMPTHLKEKQLAKAVKQAIRFLETQGLKVS

SEQ ID NO: 499158 - protein, 437 aa, unidentified
MRTSPNEYVLAFDFSLDTLDVALADPDGNWIIPHQAYDNNLPGFRGLKQDVLAHLSNLDEARLTTAGESTALLWWHAFYQISTDPDFAPYNPSLALLNPLYVKNFRRAQPEEDKIDPKDARLVGTYYRTMGVKHYHTFDPRYLPLRQLSRAYFRLTHTLAAQKSFALTLLYLLGSEYRRIKPFSDNFGVTSAHILTQYPDIAAISAIPLDPLAEILDTISRGHLEDARHSARKLHQVAKNSYPLPDFLAPTVHTVFGMTLDHVRFLEHQQKTYERLIETELEHLPEAALALAEPGLGPILVAGCLAEIQDTRRFTTGRKFDRKKKRWRERTYRDGQAGVARLAGLWWPRNSSGRFEGDDRHLARERDPYLRYWFVQAAYSLKRNRGDYATYYQRKHDEVPKHQHKHALILTARKAVRLIFALLHKGQMARLEERAAT

SEQ ID NO: 499159 - protein, 356 aa, unidentified
MNTTHYIGFDVHKKTISFCVKTAAGEIVEEGSVPAQRSVLRQWASARPQPWRGALEATLFSGWIYDTLKPYGEQLEMAHPAKMKAISAGKKKSDRIDARTIADLLRCNLLPACYVAPPRIRELRRLLRYRSLVVSEAVRMKNKMAGLLMETGALYVKEKLHRKKYFASLLEELEEVPESVIDLLRLSRGALEMFESTQQRLVRELLADSELAQRVQRLMSIPAVGEITALTWALEVGDPQRFRSGSDAMSYCGLTAALKSSAGKQQRGPISKQRNHWLQTTLIEAAKLAPRWNPQLAALHARELERGHRNRATLAVARKLVSYLLAVDKSGQSFQLRALLPEDRAEEERTQKIKTA

SEQ ID NO: 499160 - protein, 359 aa, unidentified
MSSKTNTKYVGMDVHKNTISVAVLNTDGKLTMESVIATEREAILDFVQGLAGTVHLTFEEGTYSSWLYPLLVRRVAKLIVCNPRKNALLKSGNHNDRVDAKKLAELLRLGHLSSVYHADHGLQTLKELGRAYTTLTEDTTRIMGRLKALYRGQAIPSDGHKLYSRRRRTEWLQRLPAQPKGLRARAERLFEQLDAVQKIRCQARAELLAESRRQPARPILRSIPFLGPIWTALLLARLQTPHRFRTKRQLWTYSGLGLETHSSGDYRFVEGQLQRRQKPVFVKGLNFHHQHELKRIFKNVATAASARPGPWREFYLRLIDHMEPDMARLTLARKIAAVTLAVWKKGERFDPQHLNRQAA

SEQ ID NO: 499161 - protein, 355 aa, unidentified
MDPQQPAPEQHYAGLDVSLDTTAVCVIDDKGAVLWRGKCASTPEAIRDALHKHAPALVRVGLEAGQLSNWLTHGLRGMRLPVICVDARHAKAALKLQLNKTDANDALGLAQIVRTGWYREVAVKSMDAHTLRLLLVARAQLVSQRQTLANTVRGLLKTFGHRIARCSGGVFAARVREAAEGNHALLAVVEPLLAAWQALREQVAVLDRQTLARAKADTTACRLMSVPGVGVVVALAYMAVIDDPARFKRSSSVGAYVGLTPKRHQSGEEDWTGHISRCGDSLLRAYLFEAAAVLLQRHPRACALKSWGLALAKRVGMRRAKVAVARKLAVLLHSLWRSGEAFRWPEPAAVSAVAA

SEQ ID NO: 499162 - protein, 339 aa, unidentified
MSAFYAGMDVSDLTTAICVIDAKGLPIFEGSVETKPKSIQTALKPYRKMLKAVAQESGSKASWLHKELSKARFPVVCIDARLAAANLANLRNKTDKNDARAIAQIVRTGWFAPAYVKSDEAFRMRLLLTHRKTIMRSATRIQITLRMSLKLFGALLIGRKGKLSVDWGGRTPDSQVLLITRTMLRARDMLRTEVDQIDRSIEKIASKDRVCRRFMTVPGVGPLTAMAFRWGVDDPDRFKSSRSVASHFGLTPRRRQSGQYDYSGRISKMGDVSVRTALYEAAAAMLNVSRSQCALRQWGLRLKEIRGNRYACVAVARKLAVILHRMWITGRDFDPRAQL

SEQ ID NO: 499163 - protein, 357 aa, unidentified
MSSIPRPRAGQHDLDDGETVVLGVDTHKDRHVAAVLTTRGALVDVSPFPTTASGYRQLLAWARRHGNLYRAGVEGTSCYGAALTRFLLRQGIAVVEVNWPDKAVRRRRGKTDAIDAEHAARAVLAGTATAQAKTTDGPVEMIRMFRLARASALKARTQAINQLKAVLVNADPQLRTSMAGLGPKTMLRRCVALPDDTRPDDVSSATAHTLALLAKRILALTTDIDQLQQHIENVIQQHWPQLLQRTGIGPDNAAALLITAGDNPHRFTSEAAFVALCGASPVEASSGNSQRRRLNRGGDRQANAALYRIVISRLHTDPATRAYRDRRLTEGKTKREIIRCLKRYVAREIFGLLATTR

SEQ ID NO: 499164 - protein, 357 aa, unidentified
MTSIPDPLRRRITVGVDTHKSTHVAVALDQVGGLIEHAAFPADRAGYTQLEQWALGLGERVEFGIEGTGSYGAGLTSALRRGGHHVIEVNRPARQIRHLRGKDDTIDAENAARTVLSGAATAVPKAAEGTVEMIRQVKIAKDTAIKSRSQAIITLKTVLVNAPGELREELEPLGDKQLIEQCRELRYESMDRPLDSARYTLRALADRYHALGQEARRHDRVLATLTERAAPAFTSLFGVGEDSAAELLLVVGDNPERITSEAALAKLCGTCPIPASSGKTTRHRLNRGGHRQANAALHRILIVRMRFHEPTISYVTRRTADGKTKKEIMRCLKRFLIREIYQTIVAPRKTENICIAP

SEQ ID NO: 499165 - protein, 373 aa, unidentified
MDNFDAYVGLDVHKDTIAVAFAEGERSGEVCSLGSIPNETTAINRMVKKLAVRFEAISFAYEAGPCGYGLHRHLIGLGHVCDVVAPSRTPVQPGKRRMKNDTIDALNLARLHRAGELTYIWTPDATHEAMQDLVKARRISSHQVRKARQRISCFLLKHGRRYERKKWGHRHRVWLADLQFGHVATQFALQSYLNEEEQAVDRRAQIDGQIENLMSDWVLAPIVRELTALRGLDIVIAAAVVAAVGDFARFENPRRLMSYFGLVPGEFSSGSSIRPRGITKAGSSDVRALLFEAAWLYRLKPKVGQWSLVRQKDLSQAAKDIAWKAQLRLYGRYQRLTQIRHKRSQVAVTAVARELVGFIWAIARNAEGEMAVR

SEQ ID NO: 499166 - protein, 419 aa, unidentified
MSKSNTAKQLAQVQPGTLHAGVDLALEKNVAIVINEKAERLDHFSFPQDRGGYDYFLRRLEGLRQKYQASEVVVAMEPSNYFWKLLAKELEEKRITYHLVNAYTVKKHREGDQLDRSKDDQRDAGQIAELSRNGKYTETHLQKGAYEDLRQYATLHDQSVQGIRRERQVLWGLVGQVFPELSRVFKNLIGETSQALLMTCTSAVIIRQLSAEDFIAQVRAAYSGKNLSVSKLRRVHQLAATSIGVTEGLGAIQLAVQVHLAELQTFQKQLKWVTTAMTTCLATLPEAPYLLSVKSLGAVSAAIFMAEVGDPKRYQSAAQWVKLAGIQPAPNTSGKKQRSPTPMSHQGRARLRTMLYYTCLRLIQHDDHFAQLYSNLQRRQKNQLTKMQAIGVLMNKLLHILWALIQNQTLYNPSFAQSI

SEQ ID NO: 499167 - protein, 392 aa, unidentified
MIYVGIDVAKDKHDCFITNSDGEVLFKSFSISNNHEGFETLFQRIVSVSDDLAKVKVGLEATGHYSYNLLGFLLDKGLTTFVINPLHTNLYRKSLSLRKTKTDKVDSRTIATMMMSDMNLKSYSDTSYHNEELKSLTRYRFDKVKERAKLKSSVSRLVCILFPELEKLVPTLHMASVYALLSEFPSADAIANAHLTRLSNLLSESSKGRYGKDTAVMFREAARSSIGSHMPAKSLELTHTIRLIHELTAEIDEIEAAIKQIMDEEIHSPILTIPGISYRMGAMIIAEIGDFSRFDSADKILAYAGMSPSTYQSGQLDNCYSHMEKRGSRYLRYALYNATKYVCHWDESFAVYLEKKRSEGKHYNVALSHATKKLVRLIFAMERSGRTYMPAT

SEQ ID NO: 499168 - protein, 344 aa, unidentified
MAQVTTAQVTTVGIDIAKNVVCIHGVDAHGHVVVQKRLARQKVLPFMAQLPPCLLGMEASGGAHYWAREFTQLGHTVKLMSPQFVKPYVQSQKNDPNDAAGICEAVERPRMRGVPVKSITQQDVQALHRIRERQITARTAFINQIRGLLTEYGIVIPQRASQVRHKLPLVLEDAENGLTATAREWLHALAEELQALDQRIAATDQQIERVFEADEACQRLAQLPGIGPLTATALVAAVGDATAFKNGRQFAAWLGLVPRQHSTGGKTPLLGMTKRGNCYLRTLLIHGARAVLRVVDRKTDARSRWLQGVKARRGMNCASVAQANKTARVAWALLAKGDRYRHAA

SEQ ID NO: 499169 - protein, 309 aa, unidentified
MKEELVYLGIDIAKSYLDAAIRKEKRRFSNDTIGHRQLINWVKQMNTSVQVICESSGGYERRLVQALAGAQLKVSLVQANRVRQFARAAGILAKTDRIDAEVLCEFGKVMRPQTVTAATLEQEHLRELESQRRHLTRLLVMEQNRGARISDVSVQRLNRSLINQIKKQIEKLDLLIKQDIEQSPRLSAKAEKLTSIKGVGSRTAALLLAQLPELGELNRREIAALVGVAPFNRDSGKMRGKRAIYGGRRPVRHGLYMAALVAAQHNPLLRQFYLRLRAAGKPAKLALTATMRKLLIALNSALKPDLSYA

SEQ ID NO: 499170 - protein, 338 aa, unidentified
MMTTISMLAIDLAKGSFQVCAIGLDGAVLYNRVLSRTRLTNLLAEQSACVVAMEACATSHYWGRVAQSHGHEVRLVPAVYVKPFVKRQKNDKADAEAIAEAASRPTMRFVAVKSAETQGRAVAFRTHQCLVRQRTQLINALRGHLAEFGLVAPKGPASLKVLENALADPASDVPGHVREMGAIYVEQIARLTEVIGRLAEELEAASRTDTQLRRLCTIPGIGPVTAGAVAAFAPDLATFDSGRNFAAWLGLVPKQRSTGGKTRLGSVSKMGQTDIRRLLIVGAMSVIRWVVRKGGSANRWLAALVMRKPKMVAAVALANKMARMIWALTTKEQDYRMA

SEQ ID NO: 499171 - protein, 454 aa, unidentified
MKKKNVKMEIINPHAAGIDVGSRSFLVAIGQAKDEVKEFGVYNEDIQLIIAWFLANGIKTVAMESTGTYWQNLFSALQAAGFQVLLCNGKFTKNMYDKKTDVQDSQWIQKLHTLGLLKGSFLPDGATEQLRTYCRHRTNLLEQAADTTRKMQKYLRLLNLRLDIVVRDVTGLTGLSIIKAICDGESVPEKLACLRHGNCHKSEQEIAKALQSNGRKDYLFSLNHEYETYQHFQHKIEECDKEIEKMLHDQINSDDEKKQHFIEKKIHKRINKNTPKNIDMNLMAYQYFEGVDLLAIEGVSHSTVLTLMSEVGNDGIGKFKTAKQFVSWLRLSPNTKKTGGKVISSRIPKGSNRLKIALRNAANVIGNLKDSPLSNFFKRIAFRKGRTAAVSATARKLGVIIWNMLVNKVPYKPITDYEFLDQKRKRKVREMKKLIAKFDIKNDELGFAMASNPC

SEQ ID NO: 499172 - protein, 461 aa, unidentified
MSKKKPAGKRKGSAPEKVDWKALEVVHPEAAGIDVGGSEHWVAISPDRDPEPVRRFGCFTVDLREMARWLMDKGVRSVAMQSTGVYWMPVFEVLEEHGLKVYLVNARHTKNLPGRKSDVQECQWLLKLHAFGLLNNSFQPTNEIRIARTLWRHRGNLVAEAGSAIQRMQKALIEMNIQLANVLSDLSGVSGMKIIGAILKGERDAWELAALVRPEVKATPEDIAKSLEGNWREELLFILEQEVELYRFYQKKIVDCDLQLRQHLESFGSTVDVQAQPLGPKPKGKKGSRNAPQFDLRTELYRITGIDWAQINGIDVLTAQTVIAEAGADLSAFPNEKQFASWLGLCPTNEQSGGKILTRRTRKVVNRATVAFRNAAATLLRSQSYLGAQYRRLRTRLGAPKAITAMARKLACLFYRLLKYGQQYVDKGTEYYEARYREQQIRSLAKRAQKLGLQLVIPKTA

SEQ ID NO: 499173 - protein, 360 aa, unidentified
MKIVGCDFHPSWQQVAVFDPETGEIAELKLLNGDGEAERFYRELEAPALIGIEACGNSQWFIELAEQLGHVVWVGDAAQIRASYVRKQKTDRRDAGHILKLLMESRFPRLWTPTAAQRDLRQLLIHRHKLVEIRTRVKNGLQHLALNRGFPKQSSRLCGVRGRAYMEKLPLTGWTARRREDLLKLLAELDKHLGELDDAVQRAADEHPQARLLMTQPGVGPITSLAFVLTIGDVSRFKHSNQVASYLGLIPREHSSGGKQRLGSISKQGNRFMRQLLVESVQTVNRLDEGFRKQYAARCHHKAKGVAKVAAARKLAVRLYWMLRQNVGYPEIARIESSPRVALRGESHLETVNGRSRIQQ

SEQ ID NO: 499174 - protein, 345 aa, unidentified
MHIASIGIDLGKNTFHLVALGEGSKVLVRKKFSRTQLLAHTANLPPSLIGLEACCGAHFLGAALREQGHEARLIPAQFVKPYRKSNKNDFIDAEAIAEAVTKQNMRFVPIKTEEQLDVQAVHRVRDRLVQRRTALINEIRGFLLERGITFPTQPIHLRKNLPRLVEDCEQNLSPRLRWLLDRLWQEWKQTEIDIENVTDELERIGAEDERCRRLRQIPGFGPLISTAMVAAIGKGAAFRRGRDFAAWVGVVPRQYSTGGKQRLFGMSKRGNVYLRRMLIHGARAVLFRIQYDTAGLGQWVHRLSQPVPRNKVVVAIANKLARIAWAVLSGGRDYRHQPLQQVAAA

SEQ ID NO: 499175 - protein, 460 aa, unidentified
MRGKRRGRPRRKHLQMQVVNPNAAGIDIGSAVHYVAVPPDRDPEPVRSFKCFTADLNALADWLDECGIETVAMESTSVYWIPLYQVLETRGFEVVLVNARHVKNVPGRKSDVLDCQWLWQLHTYGLLRGSFRPEDRICVLRSYTRQRDNLIKSAGAHIQRMQKALEQMNIQLHKVITDITGVTGMRIIEAILDGERDPVKLAQLKHRNNRSSHETIAKSLEGDWREEHLFSLRQEFELYGIFRQKIAECDRKIEACLSSFESKVDPDHKPLPPYKHGNKKPHGNQPDLDLRNPLYRMIGVDLIAIDGFDVLTVQDIISEVGLDMSKWPTDNHFASWLGLCPNNKVTGGRVKDSRSKKVVNRASCAFRMAAQAAGKSHSALGGYHRRMKSRLGPAKANTALAHKLSRIFYRMVRYGTKYVDPGLHYYEQKYRQRVLNNLKRRARLLGYELIQNPELRPAVS

SEQ ID NO: 499176 - protein, 349 aa, unidentified
MLIIGCDFHSRFQQIAMVDTDTGELIECRLDHSGEAQKFYAGLQKPVRVGMEATGYGQWFERMLAKLGYELWIGDAAEIRAAMVRKQKTDSRDALHILDLLLANRFPRIWIPSPGERDLRQLLRHRHKMVCLRTSVRNQLQALAMGQGVYRKRKLWAAGGRTELEGLALDPWASRRRQELLDILDRLDPCLAELDRAVAKEAEQRPATCYLMEQPGVGPVTALMFVLTIGPVERFRGSKQVVSYLGLNPRESSSGGRQRLGAISKQGNSMARFLLVEAAQTAARYDEEIRRDYQRLKFRRGTAVAKVAIARKLAVRLYWKLRKLSSPTPPARMQGSSEHPVVGASLSSN

SEQ ID NO: 499177 - protein, 427 aa, unidentified
MPYRIAGIDVHKRMLAVVVSEVEIDGEYDFERRQFDSNPAQLQLLAAWLVEQQVEEVVMESTAQYWKPVWGALERYWKPICQKREGARPMSGTLHLAQAQSNRARRGRKNDFADAERLLKRLVSNELILSFVPDPEQRLWRTLMRSKYQLKCNQVQLHNRLEALLEEAHIKLSSLISDLLGLSGRRILKALAQGETDPASLAALGDRRLRATKEQLSDALGACQELNPVYRRLVKMAMEEWNLLERQFGQLDQQMADLLRPHQDQVKRLAEMPGLGVDSAQQIIAEVGATAATFPSAGELSSWVGACPGDHQSAGVSRSHRSPKGNRHMRRILNQAANAAVKYKGSVFEILYRRYVTRLGHNQTIGVMAHRLCRLIWMILHQGVRYEERGPALNNKSKQYRAARMIRELRSLGYRVEPSGSQTAVLA

SEQ ID NO: 499178 - protein, 408 aa, unidentified
MNPLYVGIDVSSKSNVVYLMLPDGKKHSNFSVPNSQDGSTQMIKRILSVLTSHSLDTVIIGLEATSVYGDNLVYFLREDAILAPYNRKIHVLNPKQVKKFKDSYNDLPKNDYIDSFIIADCLRFGRINNEVYVSDYRYKALQNLTRARFYAVQNLTKEKQRFINVLFKKYSTMTQEKVFSNTFSTTAFAVYQEIESAEALANMDLQELTDFIIEKGKNRFPDPDAVAKAIQKAARSSYRLPKTINDSVNQVLSISITSMKALEAQIKEFDKAIEAEIQLLPNVLTSIPGIGPVISAGIIAEIGDINRFPNQAKLGKYAGLAWKQHQSGDFDSEHTRLIQSGNRFLKYYLYEGAFSLVRCDTEYSNFYHSKYKEVNRFQHKRALALTARKFTRLVFQLLKDNRLYRAAE

SEQ ID NO: 499179 - protein, 366 aa, unidentified
MAVIELSLSSWLVAGVVPGVERQPLKKLEPDEAGLLQLLQRWRNEAAKSGCTIDRVAVAYEAGRDGFWLARWLRGQGIDVHVIHSASVAVSREHRRAKTDRLDTAMLLRVFMGWLRGERGHCGMVSVPTIEEEDAKRPHRERENLVGERTRIINRMKAALVRLGIRGFKPELRRAPKKLDGLCTPEGLPIPPNTLEEIRRDLARLAMVREQIEVIEQARLVRIEQAPETGPNAMVRLLASIVGVGVETADMLVQEVLSRNLRDRRAVARYAGLTGSPDESGSKRREKGLAKAGNARVRRGLVQLAWRFLLFQKGSALAQWYRVRTGAQGVRKTVLIVALARKLLIALWRMVTTGEVPHGVVLRAVA

SEQ ID NO: 499180 - protein, 377 aa, unidentified
MSDTITLVKAADKLFIGMDLHKNTSTFAVKDKEGKLINSAKILTDKNDITRYINSLKRNGGNKELSLAVEPVSQWYYYADLIENLGVDVHLAHPMEVKAIAHAHIKTDKIDAGVLADLLRTNFLPEAYFAPAEVRGWKEQCRFRASIMNLRTQTKNKIHAILFKHSLRHNFSDLFGKGGRRWLASLELKEPFKTNLDKYLNLVDYLTGEIDYAEERITNTVINCPQAKLLISIPGISYCSALTIMGEVGDIERFISVKHLQSYAGLIPSTYNSGDKQIHGRITKRGSKWLRWIMIEAAYHQINCKRIPGFGSYYNTLKKRKGSKTAAVATARKLLAVVWRLLKDNRPYEVTDPRCWKSRPIASNLSSVSPVISMTAD

SEQ ID NO: 499181 - protein, 320 aa, unidentified
MAEKAVLGIDISKATFDVFLKAGDESHAGQFDNSVAGFKQLKKWLKSRKTGRVHACMEATGAYGVKLCHFLHSEGHEVSVVNPLRVKRYGESDLRRNKTDKSDARLIADFCLNKKTSLWEPPSEEVLYLQSLTRRIESLQKMRSMESNRMETAPEQVKGSIERIISSIDEEIRELEKLIKKHFDDHPDLRHKKDLLESIPGIGGKSARVLLSEILFERFESARQVAAQAGLTPSREQSGTTLDKTRISKIGNPRIRRALLFPAMTAIKHNAVVRSFAARLERNGLTPMQVVCASKRKLLHIAFGVIKNDRPFDPNFAQVA

SEQ ID NO: 499182 - protein, 407 aa, unidentified
MFACCAGLDVHKKTVVACVMVSSDDGQVQKHAQTFGTMTPDLLALGDWLKGLGVTHVAMESSGVYWRPIYQLIEDLFKLLVVNATHIKRMPGRKTDMTDAEWLAELLRHGLLAPSFVPPRPQRELRELTRHRTSLMEKRSQAVNELHRTLEGTNLKLTSVATDITGVSAMLMLQSLLSGQETDPKTLADLAIGKLRRKIPDLEKALQGKVLEHHKLILAQLLADIDLFDEQAEAVSALIEQRLSQQRELIGRLDEIPGINRRNAEVLLAELGTDMNRFPSDRHAAAWAGLCPSNKESGGRRYAARSRQGNKPLKRALTESGLAAGKTKDTYLGAQYRRIGARRGKKRAALAVGHSILRIAYHIIKEGTTYYDLGPNYFDRRNQASVTRRLVKRLEGLGYTVELKKVA

SEQ ID NO: 499183 - protein, 367 aa, unidentified
MTQVTTYVGIDAHKKDLFIAMLIGTQPTPVTWTVPNQPSAVRRLMRKLEREAPGPVRACYEAGPCGYALQRQLTTPRVSCQVIAPALVPRKPGERVKTNRRDARKLAELLRAGLLTDVRPPTPEEEAVRDLCRARDDARADLQRCRHRLGKLLLRRGLHFNGRNWTRAHRQWIDGLPWAQPAERVVVEDYLLAIDQVEARLRELDARLTDIAQAEPYREPVAWLRCFRGIDTLTAILILAELHDFRRFQSPRALMAYVGLVPGEDSSGEKHRRGRITRTGNALVRRLLVETAWHYQHRPTVGVALTRRRKGQPGRVIAIADKAQQRLCRRFRKLAAEHKPAPKIAVAIARELAGFLWAALQLPGVAN

SEQ ID NO: 499184 - protein, 344 aa, unidentified
MSLTIGLDIAKHIFQVHAVNDSGEPVVRRKLRRSEVLAFFAKLEPGVIGIEACGTAHYWGRALSELGHEVKLMAPHYVKPYVKRSKTDAADAEAICEAVERPTMRFVPIKTTEQQAIQMVHRARSMLVRQRTMLVNAIRSHLAEFGLVTGLGLAKTAALVAEVLKAGEDECPIPEVARTVVRCLTQQVGLLDKQIRRLDVELLAWHRSNAASKLLASIPGVGIVTATAIAATVPDPAYFESGRAFAAWLGLTPRANSSGGKDRLGRITKMGSQYIRTLLVVGATAVVRSARIKDGSWLSEWARSLLEKKPARLVTVALANKMARVAWAVLTRGQQFRPSLVAAG

SEQ ID NO: 499185 - protein, 394 aa, unidentified
MILVGIDIGKNKHTFSIIDKNSGEILLSPSDFSNNLKAFLFLIRKLSSYTKSELLIGMEDTGHYHFALLKYLLDKRYTVALINPTTTDLTRKLQGGITKNDHLDSLTICDVISSNHRNKPYRVTKLNRFDLYEQKQLTRHHHNLKEELNTYKNRLQKCIDIVFPEFNSLFHSKYGIVYMNILKTFSSAKAIANADIRSIRKCFEFKGQGKRISLSAEQLKLTAKSSIGIPSVAEEIQIRHLVSQIELLEKQLSEIDKRIEEFSLKNNSPILTIPGISHFSGTSIIAELRDVCNYTKASQIIKFVGVAPYHYESSQFTAQHTAITKKGSKYLRKTLYQIILPVISNNEVFYAYYTKKLNEGKGHRCAQGHCIRKLLRVIYHLLSTRQPFNSKLLV

SEQ ID NO: 499186 - protein, 418 aa, unidentified
MNTDWTQHVYFAALDWASDHHDILVLDRQGAVQAEFRFAHTADGWAEFTLKMQPFTGAPITLETSSGPAVDQLLQRGWAVYPVAPSAAARYRERKVPSGTKTDRHDTWALADALRTDGHAWRPLRPQDEATATLRALCRDEIALIEQRTALVNQLQAALREYYPAALAAFDDWTAPYAWALLLQFPTPAQLQAAGQRKWEKFLHTHQLWRPQTVAARLELFAHAHALPASPAVTAAKSLLAVSLAKILVTLQSQLDEYRRRITEAFRQHPDHDVFGSLPGAKATLGPRLLAEVGGVREEYPDADALLCQAGVSPVSYQSGKVNKCRLRRACNKILRATVHLWANSSRLTCAWAQAYYQMKRDEGQSHASALRCLGKRWLKILWRLWQNHEAYNEAKYLAQLQKRGALTWTKLQTPQTV

SEQ ID NO: 499187 - protein, 327 aa, unidentified
MSDAIVGSDVSKKTLDANCARGRRKQSRIFANSPEGWKLVLSWLKAMGSKQAHVCMEATGRHSLGMALALHEAGHVVSVVNPAQIRDFTRTKLGRNKTDKVDAALIREYAELFKPKPWVPPSPAMRRLCELQTVRAGIVNNRAEWNNRIGSGLDDSTATRLAAATIEHFTSQLEAIDRVIGETIDQDAELRGRRELLLSVIGVGETLAALLMAEMPEPGVLRRSSEMVAYAGLNPSHHRSGSSIDRPTRISKIGNATLRSSLYMPALSAMRFNPAVAALVARLKSAGRLKPKQIVVAAMRKLLVLCFGVLKTGKRFDPAIAMSAEPK

SEQ ID NO: 499188 - protein, 411 aa, unidentified
MIEKQFAAHIGLDWADEKHDYCLGLASSQTLEYGIFEHTPALIEQWALALKDRFKDRPIAVCLELKSGPIVSCLSKYDFIHLFFVAPQALANYRKVFTQSGAKDDPSDAFLQFDYLTKHFSDCQEVTFDRQDTRILEQLTEHRKSFVNEKVKLTNKITTALKAYYPLALAIFTDLDTSIFCDFIERWPNLSKLKKARRSTLETFFKSHRSGRVDLINRRIALINTAIALTDDDAVIKPYQRYLLGLISSLKPLLETIKAYDTEITVIFEQHEDRDIFASFPGTGDILAPRLLAAFGSDRNVFSSADEVNRCAGIAPVIERSGKKIWIHWRFKCHKFLRQTFIEWTNQTIKYSFWARAFYDEKRAQGKSHQATIRALAFKWIRIMFRCWKNHTAYDEATYLFALEKRNNKMA

SEQ ID NO: 499189 - protein, 318 aa, unidentified
MNDTNSITHVGVDISKETLDCWKPAPKNDRGAFASFPNTKAGVAALLRWLPHDAHLAAEATGGYERLLRAAAHGSATRFSLLNPASVRSFARAQGLRAKTDRLDSELIARHARALNPPPEPKPDPRLLELDELCTLRQSLVEERKASLCRLAQASHPCARLSLKALLKAFDSQIASLERQIDSLCASSAGISQTRKTLMTLPGVGKVISAAIIAWLPELGSLSRKQVAALVGLAPYANESGKKKGRRSIRGGRAKLRCTLYMAAVSIARTKSCLNAQYNSLRDRGKPVKVARIAILRKLLIRANTICKPLSSFSYASA

SEQ ID NO: 499190 - protein, 316 aa, unidentified
MSVPAIQTSRFLGCDVGKAEIAVFDSVSGLTYSIANEPEALSGFASGLDPTCFVVCEATGGYENNLLAALLAANVPAHRADARKVKAFIRSFGILGKTDAIDAKALARYAKDRQADLPSWRARDRERLRLHALVMARRDLIKDRLAYANRRDAPTAETTRPYFEALIESFEAQLVAIETDIQTLIDTCEPIAASVKTLTQIPGVGRKTAAALLALMPELGTTDRRKIAALAGLAPHPLQSGNEERYRRTRGGRPEVKRVLFMAALSARKHNPSLKAFFERLVQNGKKPLAAITAIMRKLVTIANAKLKAETLAQLS

SEQ ID NO: 499191 - protein, 411 aa, unidentified
MKLLVGLDVSSQKLDVCMLQSDKKVLCQTTVDNNLFGADLIKNNILNYTNSCDYESIEIGLESTSVYSFHPAMFFLEDNTLKSMNTHIHVINPKRVHKFKAMFDEDKTDKMDAYRIADYLRGEFHTTNLIKSEQYVALQKLTRTRHQLIKQLVASKQHFIENLYYKCNTLSAEIDTNIFGKTMMEIITDEDGMDAFAEMPLKDLEAFLTEKSKGRFSNPESLAKAIQKAIRNSYRLGEILSGSVDLILGTYANIIRTLQKQIKILDKSISDVFSSLPEAQSLLSIPRIGPVFAAGILAEVGQIERFDDQAKLAKYAGLSWPKYQSGAFTAENTSMRRTGNHYLRYYLVEAANSVRTHIPEYRKYYAKKVAEVPKFKHKRALVLTARKFVRLVDALLRNHQLYSPERECAKI

SEQ ID NO: 499192 - protein, 395 aa, unidentified
MGWLVLGSRPAGDRGVRSDSKEVWEHRPKSECPSRANGRGSTETEVHALMKVLIGVDPHKGSVAVAAVDEASGELLERASFPQDRAGLRSLERWAKRFPERRWAVENASGLGRHLAGRLASSGESVVDVPPKLSARVRVLSSGNARKNDGLDALATALAASRNERLAAVDPEIGSEVLRLLSERREDLVAERTRALNRLHGLVRDLLPGGVAGTLSAPRAARILRGIRPQGASARLRRRLASEVLRDVRTLDRKIADLNERIEAEVEASGTTLTEIFGVGPILAARIIGTVGDVVRFPTKAHFASYCGTAPVEASSGEVVRHRLSLSGNRKLNYALHMVAVCQARSDVRGGIYYRKKLAEGKSRKEALRCLKRRVSDAVFRSLMADLQTTSRDAA

SEQ ID NO: 499193 - protein, 338 aa, unidentified
MAKMPIAVLGIDLGKNSCSVAGLDISGAVVLRRRMTRESLVAFASKLPACIVAMEACCGAHFLGRTFAAQGHTVRLMSPEYVQPYVKSQKTDDRDAEAIAEAATRPTMRLVTLKSEAQLDLQVLHRARERLVAARTRLTNQLRAVLLERGVILPKRRAPLRHRLHELMAGELPISPRVIRLLQDLHDEWTSLDERIRAYDDELAALTREDQQARQLATIPGIGVINATALLAAVGDGSAFAKGRDLAAWLGLTPRQHSTGGKTKLLGISKRGNKYLRTQLIHGARAALVHFAKTSTRIGAWIRQLLIRAHPNVVVVALAAKLARIVWAVLRHGRAFEH

SEQ ID NO: 499194 - protein, 486 aa, unidentified
MERFLNRIRNRAEPRLSTNEDEDMSKAPKGARRKSGKEKPDVLEGLPPLNLNAAGIDVGNAEHMVAVPPGRDAQPVQSFGSFTADVHRMGRWLKACRVDTVVMQATGVYWVALYQILETYDLDVKVVNARYTKTLPGRKTDVLECQWLQKLHTFGLLNNSFLPNEETRVLRTYFRQRENLVAAAGTCMQHIQKALTEMNVQLANVLSDLSGATGMAILRALLRGERDPQRLAKLKNQRVQASREEIARSLEGNWREELLFVVEQSLAMYDTYHEKIAVCDQRIAAHLKTMEAKVDVEAQPIPEARRGKWPRKHQPRYNLRGELYRVTGVDLTQMDGLDVLTAQTVISEVGVDMSPWRTEHHFSSWLGLCPDNRISGGKVLKRGTRQVVNRAATALRLAAQSLWRSQSALGGNFRRLRARLGAPKAITAMAHKLARLLYRMLKYGQAYVDKGIAYYEEKYRQHQVKWLQKQAAALNLQLVPSTGVVS

SEQ ID NO: 499195 - protein, 416 aa, unidentified
MNAVGIDVSSRKSTVAVLRPLGEVVCLPFDVTHDIAVLASLAEKLKAIDGETRVVMEHTGRYYEAVAKALHEAGFFVCAVNPLFIKEYGANSLRRVKTDKADAIKIARYALDNWADLRDFTPMDAIRYDLKTLNRQFQLASKQRTASANNLIALLEQSFPGIRKCFDSPVRSDGTQKWVDFAHSFWHVDCVRKQPFPAFCERYRKWCKRHAYLFKLSNAEEVYALAKRAVVLTPKAKVVKVLVQEAANQLISISRSVEVYRAEMDRLAAMLPEYPVVMAMYGVGKSYGPQLMAEIGDVRRFERKQALVAFAGIDPMPNQSGDKNVRSNKSSKRGSPYLRKTLFNVIRTYLQCAPQDEPVFQFLNRKRAEGKPFYVYMLAAANKFLRRYYAKLRDYFASLDTLQPVAPIPTILKATL

SEQ ID NO: 499196 - protein, 394 aa, unidentified
MAVMIGIDPHKGSHTAVAVGAAEEPLGKIRIRACPAQAEQLVAWAAGWPERTWAVEGAPGLGRLLGQQLVAAGERVLDVQPKLAARVRLLHTGNTGKSDPNDALSVAVAALRSMANREVTADDHATVLKVWAKRHRDLSRAYNQVACRLHAVLCELVPGGVPEEITAGRAEKILAQTRPAGAAGQARRELAAELLADLRHLDGQRREVKKKLAAAVKASGTTVTSVFGVGPVIAATIIGDVVTVARFPTRDHFAAYNGTAPVEVSSGEKKIYRLSLRGNRRLNHAIHMAAITQISHAHSNGRAYYQRKIAEGKTHKEALRCLKRRISDAIYARLRADARAAGLGGQPGNLSSSRAAGSHPGHRLFGQATARPETSLRAARTPGTHVQDMVRARP

SEQ ID NO: 499197 - protein, 368 aa, unidentified
MSNYVTAIGLDVHARSIKACALNPMTGEVSRASFGYDPASVAEWALGFESPKAVYESGVTGFHLCRALRALGLDCAVGAVSKMQRPAADRGRKTDRRDAEFLARLLACRNVVEVRVPDERTEAARDLSRALADARDDLQRAKQRMSKFLLRHGHVFDELTPTGRRRGNWTRAYWRWADSIEFGEPDDDAAYEHYRDCVRRCEEARDALARKVAESAGRPEWKPVVDALRCVKGIDIATAFLLACEMGDPARFPNAPSFASWCGLAPSEHSSGESASRGGITRAGNAHVRSALVESAWHVPMSSRDPKPLAPGQEVAPAVRRHTTKCNRRLIERREAMAAAGKRPCVANCATAREMACWVWAIARMATA

SEQ ID NO: 499198 - protein, 367 aa, unidentified
MKKVSTVATKRSKNFSQPTLTIGLDLGDRNSWYCVLDEGGQIQLEQRVRTSAKALQEVFGAMPRSRIALETGTHSPWISRLLSELGHEVIVANARKVRLIGESRKKDDRLDAQTLARLARIDPQLLCPVKHRSAQAQADLTVIRARAGLVRARTGLVNTARGVAKSYGERLRGCNVRNMNPEKAEGLSPELQRALEPLLSAIEELSERIAEYNDRIEVLAQESYPQVALLKQIKGVGTLIALTFLLTLEDPHRFGKSRDVGCYLGLQPGRRNSGQSEPQMHISKEGDPYLRTLLVQGAQHILGPFGVDCDLRRWGLKLAERGGRNAKKRAIVATARKLAVLLHHLWVSAEVYEPLHNSHPTTVAAAA

SEQ ID NO: 499199 - protein, 356 aa, unidentified
MSRDIKYIGMDVHKEATVIAVLNGSGKLVMESIVETKASSILQFIHGLRGELHVTWEEGSWAAWLYDLLQPQVQHIVVCNPRRNAFLKEGSKSDKVDARKLADLLRTGMLRPVYHGENGLRTLRELGRSYQTISKDLTRVMNRLKALYRGWGIPCAGTQVYAARAREEWMSKIPQAGVRRRAELLYQQLDGLQALRRNVRPEFLAESRKHKAAKLLRQIPCIGPIRAAKLIALMQTPHRFRSKRQLRTYSGLGIETHDSAQFRFVGGQLQRSKKPQQIRGLNRNHNHEMKEIFKSAATRGSCGRGPFHDFYTGWLAKGMKPEMARLTLARKIAAITLTLWKKEERFDAEQLKTQAA

SEQ ID NO: 499200 - protein, 399 aa, unidentified
MFCGWDWGSTLHGVCLLDEDGATIKTWMVKHTEEDLSALFTELAQLGEPGLMPVAIERGEGLVVGLIARAGHPVLMVEPTAFKAARPRWGAAGAKSDAADAFMLADYARTDGHRLRRVEPLAQATRELAALVRARTSLVEARTAASNQLWAALAEHWPGAALVFQKLTSQIALAFLADYPTPQAAALLGEGRMRQFCRRHSYRGGKSPAELMSRLRAAPASANPIAEKVLEAIVRSQVAQIGLLNVEIRGLERKTADALAAHPKTALLKTLPRVATVSLAALIAEIGPLLQRCENPEQVAAMCGAAPVTRASGKSRTVGFRYTANKPARVAITSFADNSRHSSAWAGDCYRRARARGARHPHAVRILARGWVRVIWACWTTDTPYDPARHRGEQRLAAA

SEQ ID NO: 499201 - protein, 342 aa, unidentified
MDITTIGIDLAKNSFALVGMNKHGKIVFRKTLTRNKLLAFIAQCPPCLIGMEACSGAHYWGREFTKLGHRIGIIAAKFVEPFRKGAKNDNNDAEAICEAVLRPNIWFVPIKSPDQQAVLCIHRVRQGLVRDRTSMMNQLRGLLSEFGIIMPKGRYPAQAAIAGILEEAENSLPMIARRVIDNLWQRIKQANEQIEGYNRELAQLVKESTVARQIMTIPGVGAQTASGVVASVADPRMFKNSRQFSAWLGLVPRQYTTSGKIKLGRITKRGDQYLRTCLVHGARAVVAKLGDKQDWVSCWIRALIERRGYLRAVVALAARNARLIWTLMVKQEDYRAMPMAVS

SEQ ID NO: 499202 - protein, 339 aa, unidentified
MFYVGLDVSVARTAVCIMDAAGQVVREQSVASTPEAIAAAIRASGKEVERVGLEAGINSAWIARGLIEAKLPVVVIDATHAAAALKTGFRNKTDKNDARGIADLMRVNKFRAVSVKSVAAQRDRALLTVREQLRRQSLDARNVIWSILQVEGLKPPKLTSPAFQALVVQSLDDEALAPLLRPLVAVVEHLDSQVAGLDKEIARRAKASAACKRLMTVPGVGPLVALTYAAGVDDPARFSDSRTVGAHFGLTPRRFQSGEIDWSGGISRAGDAGVRRALYQAANVLIHHSRGWCALKSWAVRVAKRRGLGKAKVALARKLAVVLQKMWTTGEDYRLKAAA

SEQ ID NO: 499203 - protein, 357 aa, unidentified
MYIVGIDIGKNHHEGSIVSPEGKQIGRSLRFATTHKGADSLMSFIFKNIGNSPCVFGMEATGHYWYPIYSFLKAKGYTIYVINPIQSDSLRKMYIRQTKNDSIDSFLIAEVIRFGQFTTTSMADENILAMRQLCRYRDSVISSRTEIKLRISTIMEQIFPEYEKQFSSLWLSTSMGILEKYLTPENIENAPIDELFEIIKDKSHNKLTMKKAISIREAAADTFGIKIAQDAFSFQLKQLIDRMNFLDKQIEALDCQILEYYEKFDCYLHTIPGIGMIAAATILAEIGDINRFKSSSALVAFAGIDPTVRQSGEFSNTHNHMSKRGSPYLRHAIFLAATTCSFHNSPCLLYTSDAADE

SEQ ID NO: 499204 - protein, 307 aa, unidentified
MEKIVYVGLDVHADTIAVAIADDGRNREIRFHGVIENTADSVLGLTKRLVAANTQPIFCYEAGPCGYGMHRLLTKLGFDCAVVSPAMIPRRAGDRIKTDRRDAEMLARLWRAGELTPVWTPDEEQEAMRDLIRTRKQSLDALKIAKQQLQSFLLRHGLRYNRPTYWTKIHWRWVNELRKFRFPHQQLAFEELKRTIRQIEERIAALDQAIKDAVKDWRFGALVDALRSLHGVNTIIAATLAAEIGDINRFDNPRQLMAWLGLVPSEHSSGSTVRRGRITKTGNALARTMMVEASCRIDTHLEKDILF

SEQ ID NO: 499205 - protein, 518 aa, unidentified
MARPRYSKKPRGFLVQKPLGQFTDRVQAVGPEHFGVVAIDCAKARSKFLLCDFYGNVLIEPTPVEHTQSELRAACDRVRSAMGVHALTDIVVAIERTGTYHRPVQDAFRRAHFETRLVHPFASKQFRQPADPDNKTDDADLGGIFRAAVNGFGLLQPLWPDVYLELQQLSRQRRDLVCKTTILRCQIKETLHQLMPGYAELFRDHFFDTPVALPLARVTGSAQAVLDAGLNGLRQRVPQGLHYRMATLARILDWAGTAAPSQNPWQLLREQLDHLADDFLQKAKEIRGLEQRLAHLLVMTPYVQLLALPGICVVSSGELAAEMGPIEHYADGNRITGRAGLCPSRYQSDQVDSHGPLRRRANRRLRAALLRIADNLIRHNHHYRARAERWQRQNKDPRWIRVKVSKSFSRLVFVMLTGRCLVQHPACQPRHSICDKLLGFHCERKTDIQCALTDIDRLGAQLSGRTQQEERQMLQNQLDDPRCRRHRGPQAIGKIIPLVLARLGIRIVQSQTEGEDPN

SEQ ID NO: 499206 - protein, 346 aa, unidentified
MKYNNSKNTITVLGIDLAKQSFQLHGVDKNSIVMLTKKLTRKKLSQFIAQLSPCLIGIEACSGSNYWVRVFERYGHTVRMIAPQFVKPFVKSNKNDTADAEAICEAVQRSSMRFVPAKSVEQQDIQSLHRIRNQAVARRTAQANQIRGLLMEYGIIIPKGISYIRKEIPCILEDATNELTDVFRVLLSELYDEMVHLDERIEMLENKLKIVCKENENCQRLLTIPGVGLLSATALVAAIGDISVFKNGRELAAWLGLVPRQHSTGGKPTLLGISKRGDTYLRTLLIHGGRTVVRVAEKYQDKRNQWINKLDQRRGKNITAVAVANKNARIAWALLSNKTTFQTSMI

SEQ ID NO: 499207 - protein, 401 aa, unidentified
MNAVGIDVSKGKSMVCVMRSFGEVVLEPFEVLHTAQNLNDLARKLKALDGETRIVLEATGNYHKPVAFVLHNAGLFVSVVNPVLIHDYDNNSLRRVKTDKKDAVKIANYTLDKWTRLRQYLPEDEARLALKNCYRQYQQAVAIRTMLKNNLISSLDLTFPDANNLFSSPAKSNGCEKWVDFIGEFWHSGCVSSLSADAFAKKYLKWCQKHRYNFTRSKSDEIYSCAVNATSLPKSPTSKLLIQQQVAQLKAVSKSVAAFQQEMLRLSQQLPEFDTVMEMYGVGPSLGPQLMAEIGDVRRFSSKKSLIAFAGIEPQPNDSGKIVGNDKGISKVGSAVLRRTLFLIMTVILQTQPQDEPVFQFMNKKRSEGKPYKVYMMASANKFLRIYYARVKAVMDSECSQ

SEQ ID NO: 499208 - protein, 361 aa, unidentified
MPTQSNNLNFVGQNIYAGFDVHLKSWEVTIQSENVTLRTFTMPPKPEVLSNYLHTHYPGASYLSAYEAGFSGLWAHYQLCNLGIKNIVVNPSDIPGTQKDRLQKEDKRDSRKIANALRNGSLTPIYTPSESTLDDRSLLRMRKALTRDLVRSKARIKSKLYFYGIEFPEEFIDISKHWTKKFLNWLESITMKEESGRLAFKYMIDEARAQRELLKDVTKDIRRLSKSDKYKQSAQLLRSIPGVGLISTMFLLTEIEDIKRFPCSERFASFIGLIPMTKSSGTKEKVGKITVRGHDELRSIFVEGAWVAIRLDPALLMTYQNLVKRMEPNNAIIRIARKLANRTYAVMKYNKPYEYNKTDNL

SEQ ID NO: 499209 - protein, 371 aa, unidentified
MLYLAIDQHSKQITVCVRNADGDTVLRRQVSTRREKIEAFFQQLTEMDADFVAILEVCGFNDWLIAELHKWKCHEVVLIHPEKPSKKKTDRRDARKLADLLWLNRERLAAGEPVHGLRRVYIVNQHERENRQLTALRKNLGQLRTRTLNKIHRLLNRHNLMWDYPTKTFQTQAGRRWLEKLELPEIDRLEMDVQLQAWKTWDAQIAQIDEKIAARASEPIPGEIFSATQILMTAPGVSHYSGLTLASRIGPIERFPRPRSLANYFGLTPGCRNSGNDQDRLGSITKEGSKIARFILGQLVLHFLKRDPKMRSWYRRIKMRRGSKIARVAVMRRITTIFWHMLTYQEPYTIGGPPPRLREQQASPTKRSEAA

SEQ ID NO: 499210 - protein, 509 aa, unidentified
MKTKRSKAKKGAAKKTITVPCAEGAEELAVLRPDAGGIDCGAEAHYVSVPPDRVAAGQPSVRCFSAFTEGLDALVDWLKVCRVNTVAMESTGIYWIPLYQKLEAAAIEVYLVNARHVRHVPGRKSDVQDPQWLRQLHRFGLLNASFRPEDLVCRIRSLHRHRDNLVSASGSEIQHMQKALQQMNLHLHHVVSDITGETGLRIIDAMLAGQHDPKELVKLRDRRCSKSTPKQMQAGLVGDYRAEHLFVLKQSLEAHRFYQARIGECDCEIEPLLQELAKKVEAASARLKLDQPESREASTPEVQPPVMSKLKRELREEEKARQEAKAAKRKRKPKANEPRIELTGLLERICGVDLTQVVGLNVATVLLIVSEIGVDMSKWRNAKAFCSWLGLCPANKISGGKVLDSRTRQVVNRVADALRLASQSVGRTDTCLGIFYRRKKAHLGAPKATTATARKLACLIYHLLKTKKAYQEPDPALYQQRLHKSALNKLQRQAAALGYTLLPTTPVAA

SEQ ID NO: 499211 - protein, 330 aa, unidentified
MRHEGTLPFREIAHMITLSLDPHPGSHTVVAMDPNGVSLGSITVPNTPEGLFQLHQFAVPFSIRRWAIEGAGNHFIAAFVSQLLEQSETVYSIPPSLTSQYRSRRGRKKNDMVDAENVGRALLANPQLTPLHSIEQQRKLQELTRAQRRLSEQLKANRSALQELMAESPVRQIIHEVIAILLKQLSALEKQIEAAIHAVMPSLLKLPGVGPIVAGVLLAETGDPRRFASPHHFASYCGAAPVERGSGQNRRMQINPGGNRRLNWALHIVAMVRLRIDGGRSKRLCDKAQLRGKTKRSALRLLKTYIARELFRILQQTTVGPTGRIILAPQ

SEQ ID NO: 499212 - protein, 340 aa, unidentified
MTIATIGIDLAKNVFAVHGVDQNGKTVLVKSRVTRAALPGLIAGLPPCVIGMEACSGAHYWARLFRQYGHEPRLMAAKFVSPYRMAGKSGKNDAADAQAICEAVRRPHMRFVPVKDESQQAMQCLHRTRQGFIEEKTATYNRLRGLISEFGIIAPQSTDALRHMISAQKNSLPLQVQQCVDDLLEHVARIEANIAEYDRILSRMARTDHRSQRLMELKGVGPTTACALVASIGNAHDFKNGRQLAAWLGLTPSQYSSGGKSKLGRITKAGDSYLRTLLVQGARSVLIGAEKRTDSFSRWVCSLVERRGYWRAVVAIAAKNARLCWASLHYGDDFRLYSAS

SEQ ID NO: 499213 - protein, 339 aa, unidentified
MNKINTIGVDLAKNVFHLCIQDNKGHILKKIKLGRSQFKHFLGTTPVSRIVYESCATSHYWVRIAARYGHQARLIHPAYVKPYLKTNKNDFNDAEAICEADSRPTMRYVSAKTIEQQDIQLLHRIRQRQVQQRTALVNQIRGQLLEYGIAIPKGISRVRSQLAGILEDGENELTSQARMLFDGLRQELCDLDKRIRNADKRITQLANAHPICQRLMAIPGIGPMTATALISVIGNANNFKNGREFSAWLGLVPIQYSTGGQQRLLGISKRGDGYLRVLLVQGALSAITRCKGRTDSQLLWARQLHTKKGLQKAAVALANKMARIVWSVMAKDHDYVPVI

SEQ ID NO: 499214 - protein, 344 aa, unidentified
MEAIVTIGLDIAKSVFQVHGVDANGAVVVRRRLTRAKVLSFFERLPPCLVGLEACATAHYWGRELRKLGHDVRLMPPSYVKPYVKRQKNDAADAEAICEAVTRPSMHFVEIKSPEQQSIMSLHRVRQMLMRQRTQISNAIRGHLGEFGRVAPIGRNGLAQLIAIVADENDNTLPDDVRAAVAMLAVQLRIVNDQILELDRRVRASARATDVGRRLLEVPGVGPVLASALVATVPDASAFKSGRNLAAWIGLVPRQNSSGGKERLGGITKQGNRYLRQMLVVGALAVIRYAQRHGTRRPWLVHLLARRTTKIAAVALANKTARMIWAIMATGERYREPSPASVAV

SEQ ID NO: 499215 - protein, 314 aa, unidentified
MYHYIGIDVSKKVLNIFDGKKDLIFDNKENLSSFKKYLKKRYSDFSCLVILFEATGIYSYHLKAFCADHDIKAYIINPQASHNFAKSLGTRSKTDTTDARTIWAYHKLISDKDIRIPKVDPVLITLSGYLASYRLTLKQRLSLANHLEGVKDKTLYRLLKKELERLCKLEQELLIRMDAYIKEYPKLNEDYRRLLSISGVGRKTAISLLTLFHTYPDTNRNQITALIGLDPVQRQSGTSVHGRSRISKHGNQMMRKCLYMPTLVSIQYNHKIKVFYERLVLKHKPKKVAVIACMRKLLLIAHAIYKNKTVYVPG

SEQ ID NO: 499216 - protein, 313 aa, unidentified
MSKSFVGIDVSKNVLDVAFSDGRVLQVSNDEAGFAALRQELAGKVPGLVLMEATRGLERSIAAELSAAGIPLRIMNARHVRHFAKATGALAKTDRLDAQALVQFAQALRPEPRSIQPEHMQALQALIVRRRQLLEMLMMEKNRLHTAHRGVRADLRSSIRGLEKRLKGVDEDIDGALQGCGALREKIELLESVPGIARVTAVNLVATLPELGTLNRREISALAGVAPFNRDSGQSHGRRSIWGGRALARSALYMAALVGARHNPVLRTFYQRLRQAGKPSKVALVACMRKLLVILNTMLKQQRPWSPQFTHPA

SEQ ID NO: 499217 - protein, 337 aa, unidentified
MIHVGVDLHQAFCYMTALDSTGRSLKAGPVENKPAALRKWLKGFSEPVTVAVEACSFWPAFKEAIETEVSQIHLVHPQRVKAIASAKLKNDRVDSATLAHLLRCDLLPAAWMADRETRERRQRVRLRISLGQHRAALKNQVHAILHQHGKRSEWSDVFGKQGRAWLKKLELPPAARAAMNTYCALIDEVSGHIEKQQREIAKMAKADPRAKWLATIPGIGVYSAMILLSEIGEVQRFSNAKALFSYAGLVPWVRESAGKKSRGGISRCGSPRLRWVMVEAAHTAIRCSPAAKSYFERIGKRKHRHVARVALARKLLGAAYAMLRDGACFDESIFAAV

SEQ ID NO: 499218 - protein, 388 aa, unidentified
MTQTLTAASKPVALDYDNTLVVAIEVSNVRWVLAAQVPGLPRLKAKRSVEPTAEALRAAINGYRNRAREAGRMVERVIAVYEASWSGFWLARWLERGGIEIHTIQPSSVPVDRRARRAKSDGIDAELLLRTLLAWLRGEPRVCSMVPIPDEADEDARRFIRERAELVAERVSLVNRIAAVLATLGVRDYNPLLRNRRGRLDELRTALGTALPPQARAKIVRMIDRLELVQAQVAELDQERDAVLEDRAPDKAAKMIQQLATLRGVGVQSATVLVREAFVREFPNGKALGSYAGLTATPYSSGGAEREQGISKAGNRRLRTVMVELAWLWHRYQPGSVQVSWFRERANAAGRRARKVMIVAMARKLLIALWRFATQGVIPEGAVLKPAA

SEQ ID NO: 499219 - protein, 352 aa, unidentified
MPMLAECIDAVIGVDTHRDTHHAEIAHPSGAVIAACSIPSTSTGYAQLLAWASEHAPGPRLVISIEGTRSYGAGLARAAAAAGLMVTECEQPTRKTRRGKGKSDPIDAHLAVLAALQLDTAKLAIPRVDGDREALRILLCARAELTTTATGQANRLRALLRDGDDHDRDLARGRLTSTTLAALARRRLPGDASRAQAVRHREIRRLAQALRDATRALKDNNAELDAIVSDLAPGLTSRPGIGPVTAAQAIVSFSHPGRCRHDAAFARLAGTSPIEASSGQTTRHRLNRGGDRALNKAIHIIATTRMRSDPATRAYITRRRAQGKSDREIRRCLKRYITRQLYRALTAAMTPA

SEQ ID NO: 499220 - protein, 400 aa, unidentified
MELSQYHTQKGDLMIYVGIDIAKLNHFASAISSDGEIMLQPFKFTNDYDGFHLLVQKLDSLDSDSIIIGLESTAHYGNNLVEFLVKHNYKVCVINPIQTSTMRKNNIRKTKTDKVDTYIIAKTLMMNPHRFFSQHDLSIMHLKDLGRFRMKLIKKRTQGKIQLTSYVDQAFPELQYFFKSGIHQKSVYAVLKEAPSTTNIASMHLTHLSHLLEVSSHGHFKKDIATELRILAQKSVGCNDSSISTQITQTIQLIELLDSQVHDVESEMELIVNSLDSVIMTIPGIGFINGGMILGEIGDITRFSNPSKVLAFSGLDPAVYQSGNFNASHTKMSKRGSRPLRYALINAAHNVVRNNKTFKDYYEQKISEGKSHYNALGHCAGKLVRIIYKMLTDNVPFNLD

SEQ ID NO: 499221 - protein, 350 aa, unidentified
MLHAGLDLSRNRIDVCLLAVGGELVAQFATPSDGDGVAGLARRVLKFGEPVQGVIESMTGARFVHDTLERFGWDVLIADAQKVKGLAPLACKTDKIDARVLAVLSERDLVPGIWLPGPGVRCLREQARFRMHLVNHKSTLKNRIHSTLITFGLPCPVTDLFGVAGRQLLDRLALPQPWRGTVDASIELIDHLERQIATINQELRAGGADHPYIPLLLTVPGIGWVLAFTIAAEIGDIRRFPSAKKLCGYTGLCPRVIQSGERDRRGPLTKQGPKYLRWAMLEATMHALRHPVYAERYQRNKKRLGKQRGAKVAQVDVARKLTEAIWHMLTRNEPFAPTTAAGDAAFRLAA

SEQ ID NO: 499222 - protein, 334 aa, unidentified
MENCGIDVAVKSSSVCILDKRGAVLLEQVVSSNEVGLASVLKGRRRMRCVLEAGPLAEWISELLEQMGHEAVVIDARKATGVIRTKKKTDRLDARNLARMGKTGWYTKVHRKSAQARVMRTFLQARQGLVRTALAQGSRIRGLLRAHGIKLGEVKESQFASEVKRLACEKNQELWEMLEPLVEVRRQALRASEQMRRRMVREASEGSIVCRLMTVPGVGPLTANAFVATIDDPKRFRSSDQVAAYLGLVPSVAQSGEVEIHGHITREGDGMLRSYLVEAAHVLLTRKRGTCRLKQWGLKLAKKKGHGKARVAVARKLAALLHHLWITGESYRAA

SEQ ID NO: 499223 - protein, 442 aa, unidentified
MARKPSKQRFTVVHPDCAAIDVGGREHFVAVDPRHENPVQSFTSFTDDLLKMANWLESLGIKVVAMESTGVYWIPIYEILSERGFEVYLVNARATRQITGRKSDVLDCQWIWQLMTHGLLRGAFRPDDLTCCVRSLVRQRASKVKDQAQTLNRMQKAMSQMNIQLANVISDISGVTGMKILRAICAGERDPVQLAELTDRRIKAGKEAVARSLHGNWRREHLHALTQELAAYDFLEQQIADCDDAIKAALEQLPVLQNKPEPSNKPLRSPHRNGAQQTELHQTLWKVLGVDLTAIPTIGVDTALVLAGEIGTDLSRFPSSQHFCSWLGLAPPTRISGGHRLAGGGPKIVNRAAQALKQAASNARNDKGFIGASHRARLTRMDTSCAIKATAHQLARLVYNLLTKKQAYVEQGLEEFETRSQDRQVRALLRKARKLGYQLVAA

SEQ ID NO: 499224 - protein, 401 aa, unidentified
MKTVLSVDVAKNKSMIMLMNSDGEIFIDTKEINHNLEDFERVKEEIKEINPQNLTVFMESTGTYHLPVERYFKENGFNTLVINSLTTKNNYDTIRKTKTDKKDCYRLAKLFFVNEVEYHDLSKKDLYANLKAMTRQYFYLLQNNVSCKNRYKRLINICFPELEKIFKSTRIYDDTALNFIKEFPHAEIVKEKRIDALYNNLYKTNGRNLNFYKKLATTIKTASINSYPGVDKEHEDVKNLSYMAKIVQNNNNIINELREKMIETAKQFPYYKIINSFYGIGDTLTAEILGELGDITRFDSPKEIIAFCGLDPTIKQSGKSINVKGAISKRENKYERYILFNCSQMVVKLGASNYPEHPVYIYYQNKKAEGKHYYESLTACSTKILRMLYSMCKNNKQFLEN

SEQ ID NO: 499225 - protein, 401 aa, unidentified
MVSDFRKGRYNLMKIYVGIDIAKLNHFAAAISSDGEIIIEPFKFTNDADGFQLLVSKLESFDKNSLIIGLESTAHYGDNLVRYLVTELYQVCVLNPIKTCQMRKNNVRKTKTDKVDTYVIAKTLMIQDNLRFVSFFDLDMMDLKALGRFRQKTIKQRTRLKIQLTTYVDQVFPEIQYFFKSGLHQHAVYALLKEAPSPKEIASMHMTHLANLLKVNSHGHFTKEQAKELRVLAQKSVGANDSAISIQITQTIQQIELLDSQLEKIEAEMTDIMKFNDSVIMTIPGIGYINGGMILGEIGDIHRFSNPNKLLAFAGLDPSVYQSGNFQAKTTRMSKRGSRVLRYALVNAAWNVVRNNATFKAYYDAKRAEGRSHYNALGHCSGKLVRVIWKMLTDNVEFNLK

SEQ ID NO: 499226 - protein, 395 aa, unidentified
MNKIVHYLGLDVHKDSIAVSIAPQNSTEVRRYGIIGGTLGAVDNLLKKLSKPGLELRLVYEAGPCGFVLCRHLRSKGIHCDLVCPSLIPRKASDRVKTDRRDADQLARLYRAGELTPINVPDQEDEAIRDLIRARTAAVHDQRRARNRLKGFLLRLGFRYTGKTSWNDAHKRYLSGLLMPRPAQQIAFQEYIHAIDDATERVARLNTAVLDALPSWKWEPVVRAFMTLRGLQELSAMTLIAEAGDLSRFENPRSLMHFFGLTPSEHSSGDKRVQGGITKGGNAHCRHVMTEAAWHYRLKPLVSEAMQKRQEHQSKEVRLIAWKAQQRLHKRFKQLAVRKKSVVAVTAVARELVGFVWAIACQVKPAQRPAAPEVIRTCQGKVYQLNPHTKMTKKK

SEQ ID NO: 499227 - protein, 343 aa, unidentified
MQVIIGIDPHKASHTAVAVSGDEDELARLKVRASRGQVDQLLTWAAPFPSRTWAIEGAEGLGFLLAQQLVTAGETVVDVPATLAARTRVLGTGRSNKNDPNDAMSVAVTALRTRDLRRVRSVGNSEVLRLLSKRNLDIGRQRSRTVSRLHALLVELAPGGIAREINVSNASAFLAGIAAATAVEQIRYDLANDLLDDIRRLDDQLKESHKRIGAAVAASSTTVTELFGVGPMTAAILIGNTGDIRRFRNRDHFAAYIGTAPVEFSSGGRTAHRLSRRGNRTLNAAIHMAAVTQLRHKHSDGRAYFERKVAEGKTKREALRSLKRHVSNAVYRQLLADANRLGR

SEQ ID NO: 499228 - protein, 350 aa, unidentified
MLIIGCDYHPGFQQIAYVDTETGELQERRLRHPEEAEKFYRDLWERKLRVRVGMEASGHARWFERLLAELSFELWIGDAAEIKAKRVRKQKTDRQDAQHILKLLLKDDFPKIWVPSWENRDLRQLLWHRHRMVQTRTRIMNQLQAVAINEGVRYKKRLWRDAGRKQLESLRLAQWASRRRQDLLEVLDRINPTIAELTQAIENEAEKCCEARRLMTHPGVGALTAVAFVLIIGEAHRFDCGKQIAAYLGLVPEEDSSGERRRLGHISKQGNSLLRFLLVEAAQATARSDGRWRNQFFHLAQRRGRKIAKVAMARRLAVRLYWMWRRGWDYEQLQSFGSRAGQPGYPHGVQ

SEQ ID NO: 499229 - protein, 365 aa, unidentified
MGYATILGLDLGKFKSVCCVMDAATGGHGFETIGTTPAALHELLVRHAGAAPAAVLLVVETCDAAGWVHDLAAALGVAVTVVHTQGDERWRWRKVKRKTDRDDALKLARLARLGELPQPPVYVPSPRRRQWRRLVLHRRSVVTRRTQSRNGIRSIYSQQGLPLARGNKQWTRAGVAQLEADARAVDACAADDLWRGRLHAELQLMAAADAQLKALDRRLDGLASDEPRVALLQTVRGVGPRLSEAVVLHVGDDPRRFRSGDQVANYAGLVPKPLQSGETCRLGHITRRGPALLRSLLVESAWMVWRLNDWAKAFVEKVSRGGRGRRKLAIVALARKLLILLWGMLKTNKPFREPKAETPKAAAMA

SEQ ID NO: 499230 - protein, 373 aa, unidentified
MPKYSTAFGMDVHLRSTTVCALDADTGEAVTRRFPGNPWGEIAGWMDGFPGPSLAAYESGYLGFAPQRELAGLGVECVVAAVSKIPRSAADSASKNDRNDAARMAKAILAHDISPAWVPSPEVEGIRDLAGAYDGATARLATAKQRLLAFLARRGFVYGGTTPAGNPRKYWTYDFLRWLDKVRPEDDGGVRALAALRNEVEAAAEARADLLSEYRAAVDAGPIAAEVAALQSIKGCAFALAAAFSAEVGDFTRFRSGRQVTAYFGLAPSQRSSGGSVRLGGISGAGNALVRKLAVEGSWCYAAARHQPKLMPRDTGVPLEIRMHGSKGSERLLRRREGMLARGMPAAKANAATAAELVRWLWALGMMCREGAE

SEQ ID NO: 499231 - protein, 318 aa, unidentified
MNSPFFIGVDVSKATLDSAQESDAACVQIENELPAIRRWLKRLPAHSYIGVESTGSYHRALVREAIAAGHVVFLLNTRDLSHYARAVGRRAKTDRLDAQLIARYLSREHMNLHPYRLPSEIQAQIDALVNRRHTTVVALTMLRQSFSTLTVKPSKLASAQRAMNTLIDQLDQELQTLVSTDPVLEPIATRLDTITGFGPLLSNTMANALTRHPFKHADAFIAYVGYDPRVRDSGQHRGRRFLSKRGPAELRRLLYVAAMSACKTTLWRPFYERYRARGLSSTATLVILARKLARIAFSIVKHGTAFRPELIESACAKP

SEQ ID NO: 499232 - protein, 347 aa, unidentified
MKHYAGIDVSLEYASVCVVDASGKIVREGKVASEPVTLITWLGSLGVNLERIGLEAGPLSQWLYGALREAGLAVELLETRHVKTALSTMPVKTDRNDARGIAQLMRLGWFRPVHCKSMAAQEVRALLTARKLVQSKLYDIEMSLRGILRGFGLKVGPTTSPSFAARINHLVDGQTSLEVVAAALLSLHAVALREFKSLEKSVRQISRADARVRLLMSTPGVGPLVALTYVAAIDDPARFPSSKSVGAHFGLTPKKYQSGETDVSGRISKMGDGSVRTALYEAAHVILTRPIKGGALKSWAMKLARRAGMMKAKVALARKLAVVLHRMWVDAIKFDADKASGCVRVAA

SEQ ID NO: 499233 - protein, 420 aa, unidentified
MKVVYSTCCGVDVHKTFLVATIIKTTKGVQPSYQKKRFSTFNSDIRHFKQWLLDNSCFDVCMESTGKYWIPVFNLLEDKINVTIANPKWVKAVKGNKDDTKDSKWIGDLFRLGLVPGSFIPCKDIRILREYTRYRFKLTCCKRSEKNRFQNAFTVCNVALDAVVTDMFGKSASSITDYLITSDEFDPETCKSFLQKSLKKKADSIIESIEGYQMTSSQKERMLMVRSHLDFVQQSIDSLDSKLDELIAPYENAVSLLCTIPGVDRTSAITIISEIGTDMSQFNSSKRLCCWAGLTPGNNESAGKKKSTKITRAGVYLKPALVQCAHAAVKSSTSPYYKNKYERISKRRGKKRAIIAIARMILTAIYQMLSNGETWNPCDLYKIDMPQEMQDKQKTKAIKQALKLLVSEGVISPESASVAI

SEQ ID NO: 499234 - protein, 406 aa, unidentified
MIFVGVDWAEAHHDVYVEDEDGKRLGGGRLPEGVEGIARFHDLVGDHVEEPGEVVIGIETDRGLFVTALVAAGYVVFAVNPMSTSRYRDRHSTSGAKSDPGDAKVLADMVRTDRHNHRPVAADSETVQVVKVLARAHQTMVWSRKRQTNLLRSTLREFYPAALVAFDDLASGDALEVLRMAPTPELGQTLSLSKIAAALRRGGRQRRIEDRAAEIQSALRAEQLAAPATVSSAMGASVSASVAVIATMVVQIATLAEELEAGFEQHPDAKVVRSLPGLGTILGARVLGEFGDEPNRYCSAKSRKNYAGTSPITRASGTKRVVLARYARNHRLADAIYMWAFAALSTSPGARALYDSRRAAGDTHHAALRALGNRLVGILHGCLETHTVYDESIAWGHRTAPLADVA

SEQ ID NO: 499235 - protein, 331 aa, unidentified
MNYSHFVGLDVGKKTFDASLMSADEKELSHKSFDNTPTGIQSLLDWIAGYHLSLSKLLFCAENMGSYITELSVSSVSMGFSLALVCPLTIKKSIGLQRGKNDRIDAKRIANYAVLHYRKLELYKLPDKDLVRLRGWIIIRDNLVKQKVSSIKLLETFSWMAKLADVTESISFLEEQLKSIKERILEVEEDMEQLIAASTSLYTNYLLLRSIKGIGIINAIVLLCVTDNFQRFDNPRKFACYCGVAPFEHTSGISIRGKTQTSSLANKEVKVYLTRAAITAISWDPQMKAYYKRKIAEGKHKASVINAVRAKIIARSFAVIRRQTPFVTLAV

SEQ ID NO: 499236 - protein, 438 aa, unidentified
MANYAGVDWAADKHDVLVANEAGEELLAVTFAHDEHGLRALCRALVRHKVLLVAIERPDGLLVERLLDAGLRVLALHPNQVAACRARFRVSGGKSDRFDAFVLCELARTDHHRFRVLEPDSDQTKALQALTRAREDLVHARVALSNQLRAELERFWPGPIGLFSDLDSPISLAFLARYPSPADARALGPKRLAAFLASQHYSGGQKPEQLLVKLRKAPEGRVGEQEHAARRALVGALVAALTPIVAQIKALDRRIATALREHPDGEIFRSLFKDSQTTAAILLAEIGDCRGRYPHRDALAGDAGQAAVAIESGRRKTASFRWGCNKRLRAAFCTLADSTRHWHPWAQARYQAAIARGHDHPRALRTLGRAWCRIVWRCWHDRVPYDPARHRGLQQHITVVIPTTSGPVVDHAATERMAAGLPTAVTASTDNIEVTATQ

SEQ ID NO: 499237 - protein, 420 aa, unidentified
MNTSYFVAGIDVHKSMLAVVITDAAREGEFQFQKRKFGTTASQLRDLRQWLTEHQVRVAVMESTAQYWKPVWQELEGRCQLQLAQAHSNRAPKGRKRDFADAERLLRRHIAGELIVSFVPDAEQRLWRTMTRAKHQLTRDRVRMHNQIESLLEEGRIKLSGWVSDLFGVSSRRMLRALAAGEADPAKLAALADRSLRATQEQLQDALSEASRMGALHREILGLFLARLDLIEEQMQTLDRNVAKALQAHHEAVQRLAEIPGFGIASAQQVIAEVGPTAASFPTPEQLSSWVGTCPGREESAEVSKSNRSPKGNRMMRRVLTQVANAAVKSKGSVFQILYRKMVVRLGHNKTIWAIAHRLCRLTWKILHLKVRYVEYGSRPNPQAVQKRANKLIKQLRSLGYQVQIQPVALQGTTPQAVTS

SEQ ID NO: 499238 - protein, 342 aa, unidentified
MDYYAGIDVSLEASSVCVIDGSGKIVREAKIFSAPEALILFFRSLGFAVTRVGLEAGPLSQWLYAGLEQAGFAVELLETRHVRDAFKAMAVKTDRKDARGIAQLLRLGWFKPVHCKSSAAQEVRALLTARKLVQSKLYDVEMSLRGILRGFGLKIGPATPKRFAGRVGELTRDHPALKAIAKALIAVHEVLLRELCVFEKQVRMLARSDKRVRLLMTTPGVGAIVALTYVSAIDDPGRFSSSKRVGAHFGLTPKKYQSGETDIAGRISKTGDAGVRAVLFEAAHIILTRPLKAGALKSWALKLSRRAGMKKAKVALARKLAVILHRMWRDETAFDAAEASAA

SEQ ID NO: 499239 - protein, 337 aa, unidentified
MRQIKFFIGTDVSKEWLDMCIISEGEVIHRQQIKNKEAAIRKWLKQTLKQYGYLMENSLFTMEFTGIYNHHLLEVLHQAGANIWLIPGLEINASRGLQRSKNDKDDAKLIAEYAMKNLKKVRLWKKPRTVLKQLAALLMMREKLMTSKHQYETTLKEYKSFSTKEEYLIIKDYSGSMLKTIRQELKTIEHQIKDIIKGDERLKELNEYITSVDGVGIITSANTIVETNEFLDIAEAKKFSNHSGVVPHKDDSGKKIKKPRVSHKANKKMKKLLHLAAMSVIRKKGELKDYYERKIAEGKNKMSVLNAIRNKLVLRIFACVNNKRKYEKNYVYSLANP

SEQ ID NO: 499240 - protein, 322 aa, unidentified
MDGYVGVDVSKDRLDVLLIRDAQREGQHFTNSPTGYAKLQQWLSRRLSAQQVHVCLEATGQYSEGVAEFLHAQGYKVSVVNPARIAGYAHSQLRRNKTDKLDAELIAEFCRTQQPEAWSPPPPEIRHLQTLVRHLEDLTSAHTQVKNRLAVPQQSSPVLEHWQGQLALLDQQIEATKQAIAQHIDQHPKLKADKDLLRSIAGLGITSIAKLLAECRDLSSFSVRQLVAFAGLNPRQHRSGSSVAKRPVLSRTGSASLRAALYMPALSAMRHNPVLRAFAQRLRARGVVGKPLVCAVMRKLLHLVVGVLKSGQPFDPNWSTAS

SEQ ID NO: 499241 - protein, 348 aa, unidentified
MEQLIRIGMDTSKSVFQLHGVNAAEEIILRRKLRRKDMVTFFEKLSPTVVAIEACGASHHWARLLTSFGHEVKLIAAQLVKPYVKRGKNDAADAEALCEAMSRPTMRFVPVKTADQQAVLMLMGVRDRLIRNQTQLSNAIRGFAAEFGLTAARGIDHLGRLLDRLQADNSLPLLARELFATHAGEYKQLQAKIAEVDAKLAAWQKTEPHCNRLAKIPGIAAVGAALLVMKTPAPERFASGRQFAAWIGLTPRDHSTAGKVRHGGITRAGDEGLRSVLVAGATAVVRHVAAGTSKNAFAPWVEQLLKRTAPKLVAVALANKMARIAWKLMITGQNYAGKTAPVAMVITA

SEQ ID NO: 499242 - protein, 368 aa, unidentified
MSVQNTTYERSTLVNDEKYIGLDVHQATIVVAVMDSTGKLVMESILETKAATILQFFAGLRGTLAVTFEEGTWSAWLYDLLHSRVDKLVVCNPRKNALLKDGNKSDRIDARKLADLLRGNQLKPVYHGETGVRMLRELSRSYLTIVKDLSRVMNRLKAVYRSWAIPCAGRDVYYRRHRAQWLAKIREAGVRRRAERLYEQLDMLQHLRQQARRELLAESRKHAITAKLRQIPYLGPIRVALAVALIQTPHRFRTKRQLWAYSGLALETRTSAEYRFVEGQVRRSKKLLSIRGLNKDHNHDLKGLFKGAATMASVRPGPFQDFYQAALAKGIKPTMARLTLARKIAAITLTLWKKGENFDAEKLKSQAA

SEQ ID NO: 499243 - protein, 399 aa, unidentified
MVNVGVDLHKTQFTTCVKKNGFESFNKFSTEEEGYQLFLSQVKKWQERGEEVRVGVESTGNTRYFKNRMEDAGVEVKVINPLKMKVVNESVKKTDKHDAATIAEFLEKDMLPLSQLCSRESEQIRRFLKVRTMLVKTVTLIKNQIHALLLSEGLPDVKSSALQSKKGRKETLNALNQCINGLVAQPLIEMIDHLEEQINSIEKQIRVFVKGDKTVELLMTIPGCGEICAWTIRAYTDDIKRFSNPKKYVSFAGLAPWVQNSNEIIRHGKITKRGPKELRTALVQVVMGLRRMKAKTFTWHMIKRYDFIKQSKGSGKAIIATARKIAVMIWHILTREEVFKLERMTDPKLVKKSEAMRKTMGDKTEEPQIEIQEKPVKVQKSKKVIKKPGVASRKKKKVG

SEQ ID NO: 499244 - protein, 412 aa, unidentified
MDVMYPRCCGLDVHKKTVAACLIISTEGPEPVKEIRTFRTMTADLLALADWLQEAGCTHVAMESTGVYWRPVYNLLEGQCELLVVNAQHIKTVPGRKTDVKDAAWIAELLRHGLLRGSFIPSKPQRQLRELTRYRSTLVQDHARTLNRLQAVLEDANLKLASVVTDIYGVSARAMLAAILSGERDVETLADLARGRLRAKRAQLKEALEGRVTAHHSFLLTEHLSTLEYLDEAIARVSGEIDQRLTAEQEAIALLDTIPGVGQRAAASLIAEIGTDMGRFPSAKHLASWAGMCPGNHESGGKRLSGKTRKGNRWLRQILVEIAQVASKTKNTYLAAQYKRLAARRGKKRALIAVGHTVLIIAYTLLTRRQPYQDLGAVYFDQREQQRVERRLVQRLERLGYEVSLQPRALAS

SEQ ID NO: 499245 - protein, 520 aa, unidentified
MSTTGSRKHRSSRPTPSSLSKPRGVLHPRVQQFGPDHFGIVCFDCAKARSKFLLADFYGRVIIPPTIVAHNRTDLDAAVAQVRQAFDNAQLRDGLVAIERTGRYHRIVQRSFAAAGFETRILHPFATKQYRQPVDPGNKTDDTDLAAIHRATVTGCALVEATRDEAWTTLLLLVRQRRDLVRKGAALNCQIRDHLEAALPGFAACFDKLWDSAIPWHLLEHFPGAEQLREAGMTTICHSLTRAGIRFQRRSVEAVLDWAGQAAAGDVAADRHRLIALAYYRDRLQKSLEIQALEREIVGRLVQTPYVLLLSFPGINVVSATEFAGEAGPIDHYVNSKSITGRAGLRPSRYQSDKVDKVNGPLVRHCNRSLRAAILCIADNLILCNHHFQALANQWAAQGKDPRHTRVKIAVRFCRIAFQMVAGRQVFHHPCIQGRHYILDKLTAFHREHGTDMTELLRDLQAAADQVPAREHAAEAKPLAEELQRIQDGRRRGPQPLGDILPMVLARLGVGVVQSEESGE

SEQ ID NO: 499246 - protein, 391 aa, unidentified
MICVGIDIAKDKHDCCILDSDGTVRADCFTIPNNMDGFKQLLQTIRDCTKKSDKIKVGLEATGHYSYNILGFLLDNGLANYVINPLHTNLYRKSLSLRKTKTDRVDARTIATMLLSDVDLKSYTDTAYHNEELKSLTRYRFEKVRERAKLKQSVSRLVTILFPELEKLVPSLHGASVYALLSEYPGAKQISEVHLTKLTNLLVTASKGHYGKEKATLIRETARASIGSVMPAKSLELKHTIKLIQELTSEINEIEDSIQKIIDELNPPILSIPGMGVNSAAVILAEIGDFSNFSSPDKILAYAGCSPSTYQSGKLTNCYAHMEKRGSRYLRYALYNTTKYVCHWNPVFAEYLAKKRAEGKHYNVALSHSMKKLVRLIYALQKSGKTYLAAA

SEQ ID NO: 499247 - protein, 376 aa, unidentified
MNESTVYVGLDVHKETIAVAVAHAGRGEPEYHGEVLHTPQGIAKLLKQLSPHGEVLDVCYEAGPCGYGLYRELVGRGHRCTVVAPALIPRKAGVRLKTDRRDALLLARLHRAGELTAVWVPDAEQEAIRDLSRAREDMKAIELKARQRLGAFLLRHGQVYREGASRWTQAHWRWLAAVRMPSVVQQLVLQEYLEAVKEAQRRVAGLEEQLRQVVADWSLRPVVEGLMALRGVSLIAAVTILAELGDLSRFDSPRELMGYLGLIPSEHSSGGSRRQGGITRTGNGHARRVLVEAAWNYRFPARKTRVIEQRAERTAVAVQANAWAAQKRLCARYQALLQAGKQKPQVTTAVARELAGFLWAIACEVLGKPHGSKALA

SEQ ID NO: 499248 - protein, 423 aa, unidentified
MSSRPTTSAWQRLEAFAGFDWGHGSHHVIVLDRDGDRRLAMKFDHDAAGWERLATKLRELVGEDLSVVAVAIETRVGPAVEKLLELGCTVYPMNPKAASRYRDRKAPSGTKDDELDGWSFADAVRMDGRDWRAMAPEDPHTQQLRLMTRDESRLIQHRTALVASLREALHEYYPAALQAFDDWTMPATWAFVRRFPTPEKLAAAGKRGWDRFLHAHRLFRPETYDRRIACFRGARAFCGKHPVTEAKSLLALSLIAQLQAVEKQLKVYRERIDRLFDPHPRRAIFDSLPGLGEKLAPRLLGECAEARKRFDDVQGLACHAGVAPVRFQSGQMSITRMRRACNKPLRQTMHLWANASRTKSAWAGVYYDRKRAEGKSHACALRCLASRWIRILWKLLETGMPYDESRHLRSQIKHGSWVLEQRP

SEQ ID NO: 499249 - protein, 315 aa, unidentified
MTKQLLPVNAGVDVSKDKLDLYLLERDLALSVPNDEQSIASLLKRLARYRLERIVVEATGRLEHAFVSAAIAKGLPVVVVPPLKVRRFAEAAGQLAKTDAIDARLIARFAAALKPTTRPVTDANSKLIKDLVVRRRQLTSLRTTEKNRRGVMPEALKPSIDRIIASLDREIASLEQLIQDAVEQHAAWRHKRDLLTSMPGIGPSVASTLIGDLPELGSLSRRQIAALTGVAPFNRDSGTFRGKRRIRGGRAHSRTALFLSAMVAIRYNPDIKRFYERLLQTGKHKKVALTACIRKIVTALNAMLRDDKPWHSSFA

SEQ ID NO: 499250 - protein, 388 aa, unidentified
MPQSNDLSRSLAAFDRDRTLIAVIEMSQSNWLVAGLVPGLERRPLKKLSPDEDALLKLVQRWRNEAAQAGREITRIVIAYEAGRDGFWLARWLRRRGIEAYVIHPSSVAVSREHRRAKTDRLDTELLMRAVLGWLRGEKRHCSMAAIPTIEDEDAKRPSREHEKLVGDRTRLVNRMKAMLARFGIRTFKPTLRKAEERLDRLRTAEGTPLPENTRAELRRDMMRLRMVREQIKEIEQERLRKLTAAPAEKGPPTMVRFIARIIGIGIETADMLVSEILSRGLRDSKAVARYAGLTGAPDESGRRRREKGLAKAGNARVRRGMIQLAWRLLIFQKDSALAQWYRARTANARGATRKRMIVALARKLLIALWRMATTGEIPEGISLRAAT

SEQ ID NO: 499251 - protein, 422 aa, unidentified
MKTPSEIAFTAFIGIDWADAKHDICIQAAGTERREFSQLSHKVEAIEDWAQSLYQRFGGPIAVALELSKGPLVYALQKYDFIVIFPVNPSTLAKYREAFTPSRAKDDPTDAELVLDLILRHADRFTPLNPQSVEMRTLVSLVEQRRRLVDDRVRTTNRLRDTLKQYYPQPLEWFDRIDTPLFCDFIERWPTLVQVKRARRTTLQSFFHQHNMRRTDLLEARLTSIKAASPLTLDAAVITPHRLQALVLVDLLRVTLAAIKRFDEEIAELAPQHPDYELFSPLPGAGPSLAPRLLVAFGEQRDRFKNAAELQKYAGIAPVTERSGNKHWVHWRWQCPTFLRQTFVEWAAQTINKSYWAGLYYRQQRDKGCNHQAAVRALAFKWIRILYRCWQTKTPYNEALYLKALKRRGSPLLNQVETAISA

SEQ ID NO: 499252 - protein, 344 aa, unidentified
MHITTLGIDLAKNVFQLHGVDARGRAVLSRRVKRSQLLDAVASLPPCVIGMEAGGSAHHWGRTFEPLGHTVKLMHPKYVKPYVKTNKNDGRDAEAICEAVSRPTMRFVSIKTVEQADLQAVHRTRLLFVKHRTAVINQIRGLLAEYGLVIAPSPGKVRPALVRFLDDAASGLTAFARETFSELYAQLTELDARIERVTQRVERVFLAHPVCRKLAAVPGIGPLTATALVATVGRPQAFHNGRHLAAWLGLVPRQYSSGGKARLGGISKRGSRYVRTLLIHGARAVVQRAERRTDTQGRWLCAIKHRKGTNVAAVALANKNARVIWALLAHDAAYRPPASVPAGS

SEQ ID NO: 499253 - protein, 330 aa, unidentified
MFTERTSVGLDVHARSVAAAAIDGVTGELFQTKLTPSHEHIISWVQDLPGPVAVTYEAGPTGLDLCRALSAAGVRCEVAAPSKLQKPSGDRIKTDAKDAVHLAKLLRLDQITGVAIPRVDQEAARDLVRAREDCRGDLMRARHRLSKLLLRHGIVYYGGKAWTGKHDMWLCHDAAAQLTSRATRLAFDSDYETVLATKARRDRLDVAIGEMAADSEFTPLVHRLGCLRGISTLTGFALAVEIGDWHRFTGNTIGSFVGLVPSEHSSGSSRMQGSITKTGNTHVRRLLVEAAWHHRTRYTAGKTMRDRWDLAPAAARVRGDEGNRRLHQRW

SEQ ID NO: 499254 - protein, 337 aa, unidentified
MPTLTIGLDIAKNVFQVHGVDRRGTPVMQGKLRRADVLKFFSKLKPSLVGIEACHGSHYWARKLTFLGHTVRLLPTQYVKPFRVGGKNDANDAAAICAAVSRPGIHPVPIKSAEQQSLQSVHRMRERLIHERTAKSNQIRSMFAEEGFIFPTGIPQLRQGIVALVNDCDARITLLLRRLGSMYLEQLAALQQWVEELATEITEIFKRNEGCRRLATVPGIGPLVATALFSSVGDPSQFKNGRQFAAWLGLTPTQRSGGGKSRLGGITKRGDTYLRTLLVQGARAVMRFVNRRDDRHSRWIKAVMQRRHMSVAAIALANKTARIAWAILTSNDSFKVV

SEQ ID NO: 499255 - protein, 409 aa, unidentified
MRLFVGLDVSSFDMKGCILDQEGSKVDTFTVSNDLPGATVLKERILGLAKGRKVESVKIGLESTSVYSFHPSMFLHYDEDLKVFDTQVFVINPKQIANFKKSYSDMNKTDEIDAFVIADYVRFGRNQMSIVKESQYVALQQLTRSRYHLVKMMTKEKQHFLQHLNFKCSNFSHEVDSSAFGNAMMDLFLERYSLEELAQMPLDELAAFLQEHGKNRFSDPDKVATSIQRAVRSSYRLDKVVEDSMDLLLGTSIELIRSFQKQIKEIDKAITRLMTGLSQTLETIPGIGPVYAAGIIAEIGQIERFEDESKIAKYAGLYWRKHQSGRFTAEDTSLSRQGNEYLRYYLVEAANSVRRQIPEYREFYQKKCLEVPKHQHKRALVLTARKLVRLVDALLRKRQVFAQERCVKI

SEQ ID NO: 499256 - protein, 430 aa, unidentified
MKSNTQNAKIEAITEKTLVLGIDVGSEMHYARAFDYRGIEYSKKPFKFSNTEAGFATFKEWVLDLKERHEKDKVVPGMEPTGHYWFNLGKFLQDNEMKPVLVNPHHVKKSKELDDNNPTKNDRKDPKVIAGLVREGRYMIPYLPEGVYADLRTASNIRFQLQAELTRIQNRISRWFNIYFPEYKTVYGKPDAKSGMLILKAAPLPEDILTLGIDGVNQIWRDAKLRAVGKARAKTLIEAAEHSVGSKEGAVSARMEIRMLLEDYESRNTRLQEVMVLIEELVRKIPMAEKLLEIKGVGIRTVSGFLAEVGDISHFNNPKELQKLAGLALVENSSGKHKGETTISRRGRKRLRYLLFEVAMSLVSKNQEFRELHNYYTTRRLNPLKKMQSLMAIAAKLIRVFYAMLTKGVDYDPKKMVSDIKRPAVYLQAA

SEQ ID NO: 499257 - protein, 469 aa, unidentified
MFGKAEKMRDSDQRKNKADSTKQITGLPVVQHKVAGIDLGSERHWVCAPTLEEGGREVADFGATTCELIRMAKWLNARKIESVAMESTGVYWIAPHEVLEAEGLKVMLVDTRQLARVPGRDKKSDPFDCEWIQRLHSCGLLMGSFRPKEAVCMLRTLVRDKGNLVAEAGDWLRRMQKSLDQMNVRVHRAVSDIDGVTGMAILRAIVDGERDARQLAKLRHWRCHKSEEEIAEQLSGHWREDHLFSLRQGLKMYDAIQERITDYEKEILQKLAEMERDECRGQEVPKSKNPKKGRAIQSQGAEPMRQALYRMSGVDLTGIDAIGVETVQVVLSEYGPDLSRFPSEKQFVSHVTLAPHKPTSAGKPVKKKKRNSASTRVAAALRMAASSLRHSETALGAYYRHIARRIGGDVAVFATARKLATIIYRLLRWGQPYVDEGAQTYEQRYRENRIKSLTARAKELGYQLTPTTA

SEQ ID NO: 499258 - protein, 419 aa, unidentified
MIKKETNSFERVIGLDCHPDTFTAAVVRGQTPAEALTGQVFNKVPMAQLQSWAEKHTTAQDRLVLEASGNSFHVVRSLASIERQALVLESCQLGKLKEAHANNDKISAVRIAKAYLAGTAKTVWVPDLKTQERRDWFHAHEKATRRTTQMQNRIRSYLSDNGVRLKKGTRLAQPNPSVETLIGQAKPWSVRQWQIIEGLLMELRHADEQRRFWRSAIAQEVLSDPDLLSIVRLCGVRDLIAFALGAIIGDINRFARPGSLVKYIGLNPAFDDSGQGQWHGGIGGHGRKDLRSLLIQSAQAILRSKDPLAQWGKRLAARKGSAKLAVAALARRLAVAVWYLMKGQWSRLQEIDQRLAIKVSRIISQMGTEALKKTGKTRQALRDEGYQSLKSGKVYVLEPDKKFTPKRKTNSLAAEYGLE

SEQ ID NO: 499259 - protein, 398 aa, unidentified
MTRKNTLKSLPTDTDFRVVGLDLAKSDVSVAAIPVDDNTPSLVDRMTYADLLDWAGKISPTLFAMEPCNGYSLLCLQLENLGHEIKVISGWTVSMWINTHLSGQKTDLNDAIALARLAVSDAELTPIRHKSITEIRIQTVQAVRQQLMSQRSKSIVSFKALAQQWGIPCAAGHRNLKKLRESIEAKVDLITRPVANAMLFLLDAVKSLDRQIGQLNQTLQELVMSDERGRLLQSVLGVGTQISARVITVVGNIERFNSPRSLVAYVGVAPRNFITGHKNLTKKKHGNCPDLSHKGQGKISRRGDKLLRSLFIQGAACLYMQFCKDQLPECQLKRWILKQLASQKPYGKLIVSLAAKLIRIVWAVLTYGEKFNIQKAGMTRSMWSEMALETPLNKEVPA

SEQ ID NO: 499260 - protein, 281 aa, unidentified
MDNFYFIGVDVSKKKLDFCVLFEGKVLREEQVSNHQQAVARLIGELKNDLEMDNEQFLICAEHTGQYTFPLVCACKSVECKLWLENPSQIKYSSGMQRGKNDKVDAKRIAIYASRFGDKVKYYDRPTEEIERLKQLERERALYVTDLAKYKGQMYDQKDFMPAALYRKKTKRMKGLIQELQAAIDAITAEMEKIIGSTEVLARQMELLMSIDGVGKVVALNVIIETEAFSRFDNPRKFCCHAGVAPFSYTSGSSQHSKNKVSHRANKNIKKLLHMAGQPYR

SEQ ID NO: 499261 - protein, 312 aa, unidentified
MTDITIGADISKDHIDLHSLPDGRSLTVANDRKGFAAIVRWIGTKGVERIVYEPTGACHKAFERFMMVQRLPLSKVNPRLARRFAEATGRLAKTDRIDAGLLARYGALLAPRILRANTQIHNDLKELHVARLALIKDRTAAKNRAKNVSNLLLKRQNVDRLRQIERQMKAVDEAIMSLIGADVSLKARFDILVSIPGVSQITAFTLLIEMPELGELDEKAVAALSGLAPMSRQSGRWTGRAFIAGGRAIVRHALYMPALVACRFNPQLKTKYEELTKAGKPPKVAITAVMRKLIVLANALLRKNQKWQPKPA

SEQ ID NO: 499262 - protein, 408 aa, unidentified
MKITCGIDWAEAHHDVAVLDAGGQVLGRRKIDTGVTGFGELMSLLAEHTDDPRSVPVAIETDKNLIVVALQAAGLTVFPINPRAVARYRERHGQSGKKSDPGDAALLADVLRTDGHQHRPLPTISNAGLAVKALARQHQEAIWALHQTNNRLRSVLLEFYPQALQAFPNLKHKAAVAVLAAAPTPELGAKLTARKLVALLHGCGRRNDTALVEQVLADLKTPALRQSAPVEAALGHTVVGLLGVISAMQAAVGQLEQALATEFDKHPMAPVLRSAPGLGPILAARVLAEVGDDPTRFASAGGLRAFAGTAPVTRASGKSRRVLARRVRNKRLGDACHWWAFATLTKSAGARAHYDRRRAAGDRHNAALRNLANKLIGRLWWCLHNHRPWDEQTAWNTTTAATLTSRAA

SEQ ID NO: 499263 - protein, 414 aa, unidentified
MFYIGIDWSTESHAVTLLGASGEVLESLVIENRLAGFLTLLETIRKHLRKLEPAATSDSVSFAIEDQNQRLTDFLLAQNFQGHLIEPSRMKGYRLRYRSSGNKTDPDDSFILADVLYRDHDQLPRMAPDSEVIRTLKTLLRDREGFVRDSTRLTNRLTACLRQYYPEALGFFDDVAGKTVLDFIAAFPDFAAASRLSRGEVKRFLVEHHCHREAQLERILNVLGSSPTPVPIVVVQTKRQQALAIIQQLRAVQAAVADYAAEIERLGKENDEVQRFRGLPGGGPITGAALSTLFGEDRSRFTSAMSVQSLAGTAPKTIQSGQFRTACFRFGCNRFYRMLLQQLALGALRRSAWAKQYYRGKRKEGKTHQHALRCLANLLLKIAFAIWRDRTEYSEDRHLAQIMRHRLRPTSNSV

SEQ ID NO: 499264 - protein, 420 aa, unidentified
MEVVHARCAGLDVHKKTVVACVLRSGPDGLAEPETRTFSTMLGALEVLAAWLTEAGVTHIVLEATGVYWKPVYNVLEGEARWRVLVVNPEHVKAISGRKTDRADAQRLAFLLRHDLVQGSFIPERAQRELRELTRARTALIRERARAVQRLEKVLEGANIKLAVVVSDLLGVSGQKMLDAALQGVSDPDELAGLAHPRLLPKRDLLVEALRGRLSRPLRFLVQQHLDHWRELDLRIGAFDTEIAEQLRPFEELLTRLDAIPGVGQRTAEVILTEVGTDVATFPSARHLAAWAGLSPGNRQSGGRRQAARTRHGNPWLKGALTEAAWAASRCHDGYLPAQYRRLAGRRGRKRALVAVAHSLVTIIYHLLADGSEYRDLGTHYFVERDRARAEQRALITLRTLGYQVTLTPNPAKDPAPEVA

SEQ ID NO: 499265 - protein, 354 aa, unidentified
MSNKSTSIVATMGIDIGKNSFHVVGLDEHGAIVLRQKWSRSQIEVRLANMPPCLVGMEACVGAHHLSRKLQSQGHDARLMPAKYVRPYSKGQKNDFRDAEAIAEAVQRPTMKFVATKTAEQLDLQALHRVRERLVSQRTGIINQIRAFLLERGLAVRQGLRFLRTELPIILAKRTDVLSPRMMRIIEDLAGDWRRLDERIEGLSAEITALARQDVACARLMTVPGIGPIISSAMVAAIGNGGAFSKGRDFGAWLGLVPKQISTGDRTILGKTSRQGNRYLRVLFVQAAWVVLVKITDWDRYGLKTWIEAAKKRMHHNVLAIALANKLARIAWAVLNKERNFECVRTAATSSRPA

SEQ ID NO: 499266 - protein, 373 aa, unidentified
MGDHSEVYVGIDSAKSRLAVAIAEGGRGGEVRYFGEIDNTPAAVRRLVKKLSGKHARATFCYEAGPTGYGLYRLIRELGHECLVAAPSLIPKKSGNRVKNNRRDAESLAKLMRAGELTAVWVPDERHEAMRDLTRARGTAAVDLRIKRQQVMALLLRLGRHYGRETTWGKTYWKWLASQKFEHAEQRITFEEMLLAVRQAEERLDRLDVAIRAALPDWSLAPVATALMALRGIDMVTATGLLAEIGDLTRFRTPRELMGYLGLVPSERSTGDQVRRGPITKAGNRRARRLLVESAWHYRHPPRVGQAKQARVEAAPRSVREIAWKAQLRLYARYRALMRNGKLKTVAITAMARELAGFIWAIGRETAPPVQGN

SEQ ID NO: 499267 - protein, 389 aa, unidentified
MLLDHPSDGPAAIHTQFGAIFVSLELSRSNWLITSLSPGKGEKMSKHSVTAGDVPELLKLFADLKRKAEVRTGQSYPIITIQEAGLDGFWLHRVLQQEGIESHVVDPASIATPRRRRRAKTDRLDGETLLRALLAYKRGEPRVCAMVVAPSPEAEDRRRLCRERRTLIAERIRHVNRIKGLLFAQGISDYAPKRRDRRARLEALRTGDGRQLPSHLKAQIGRELDRLELLLKQIKAVEAGQEALLAAARTPASEQAVPAPVTMLLALKGMGANFAAVLWSEAFYRQFANRRQVAAYAGLAATPWQSGGIRHEQGVSKAGNPRLRTTMIQFAWLWIRHQPQSALTRWFKERSQQGRKRAIVALARKLLVALWKHVTQGVVIEGAVMKPTA

SEQ ID NO: 499268 - protein, 365 aa, unidentified
MKKTSTRAAASNKNLQEKLTIGLDLGDRSSWYCVLDERGEVVSEQKVSTTPKAMREAFATMPRSRMALETGTHSPWVSRLLEELGHEVIVAHARNVRLIGESRRKDDRLDARTLARLARIDPELLSPVKHRSRQAQADLMVIRARASLVRARTGLVNAARGLTKSYGERIRGCNPRNMDAEKAEALSPELQAALGPLLAALEALSERIAEYNRQIESMAQQRYPQTALLKQVKGVGTLIALTYMLTLEDPHRFRKSRDAGCYAGLQPGRRNSGDSQPQMHISKEGNPYLRTLLVQGAHHILGPFGADSDLRRWGLKLAERGGKNGKKRAVIATARKLAVLLHRLWVSGEVYEPLRGVDRMAAAVA

SEQ ID NO: 499269 - protein, 340 aa, unidentified
MNTITTIGLDLAKRVFQVHGLDQDGQTVLRKQVRRGQVLKFFATISPCLVGMEACGSAHHWARELQAQGHEVRLIPPQYVRPFLKTNKHDAADAEAIAEALVRPTMRFTPIKSADQQAVLMLHRSRELLVKQRTMFINAIRGHCSELGMIASQGASRVNDLIAIIEDPEDTRFPGVAREALSVLITQLQAVKDAIRTLERKLQTWHRSQQASQRLTTIPGVGVITATALVATIGDGSQFKSGRHLSAWLGLVPRQHSSGGKSRLGRISKRGDGYLRRLLVHGSRAVLRWQRGAPKKPSPWIGELLTRRPTNVVLVAMANKTARTVWAMMRDQQTFTAVVR

SEQ ID NO: 499270 - protein, 322 aa, unidentified
MDGTIVEQGVIRATRQSLNHWVAERTTPWIGAMEATLFTGWIYDHLLPHAEELKVAHPEMLKAITASKKKNDAADAEKIADLLRCNLLPECYMAPEEQRELRRILRYRNFLVREAVKMKTKTASLLMEVGAEYSKAKLHGTKYFQELLGNLDYVPESVLSLLQMTRSNMECFQKMQKSLLGALRSDPQIRERVELLLSIPGIGEVTALTWVLEIGEVSRFNRIGQAVSYCGLCSAQKESAGKNYRGPISKKRNKHLQTVLIEAAKLAPRWNPQLAAVHERELTKGNRNRATLAVARKLVAYMFAVDKKQRKFIPREPLAEAA

SEQ ID NO: 499271 - protein, 337 aa, unidentified
MGTLEVFVGLDYHQSGVQVCILNRQGEQLANRLCANDSVAIGQVVQQFSAKVQAAIEACCGAADLAEELMQQWGWSVDLAHPGFVSRMKQNPDKTDFSDARLLADLERVGYLPRVWLAPEEVRELRRLVRYRQQLAQERRNLKLRLGAMLREQRVPKPNATPWTKKWLRWLQSEAPLSAESRWIVTQQLRRLQQVEADIVTVEERLEQQTAQDDIVQALRREKGVGLVTAVTLRAEIGRFDRFRSGKQLARFCGLSPRNASSGERQADAGLIKAGNPQLRGVLIELAHRLMRYSPRWRELATTLRGKGKAGSVVAAAVANRWVRALHHQMQPAALAA

SEQ ID NO: 499272 - protein, 347 aa, unidentified
MKYAGVDLHKKTITVCVVVKENESRVVLVRRRFDCRETEKIRAFFEQLGPFQVVVEATASYEWFFQLIEDLADRLVLAHPKRLRIIAESSHKTDRIDAQILAEFLAMDFIPEAYRPSPRTREHRTLTRHRHWLQGRITSIKTKIRAKIANYNADIRHLFTQAGLAHLESLALSGADRFEVKHLLTELELFQKQLKEAEAELREFAKTAPAAEREARAVLKTMPNLGPVTTDVVLSELGDWRRFRSAKRVASFAGLDPGYRESAGKGKQLHITKEGSKLLRWSMIELAWRMTYKLARWKKIFIQLCRKTGSRKKAIVAVARRLLTVIFAMLRDGTAYQFAATNAETAA

SEQ ID NO: 499273 - protein, 403 aa, unidentified
MRFIGIDVHRDFCEVCVLDGKSGEEQRRRIATRPTELEAFARELDRGDVVALETSSPATAVARALEPRAGRVMVIDPRRLVRAGARAKTDRLDARTLARLLAAGVLTEIWTPDEATRALRRLVSRRAAVVRARTRLKNEVHAVLARNLCPRPPVSDAFGKAGRRWLASLELPEEEQLTVRGCLRQIDALEADVGELEVALAKRLNGSRELRRLLSVPGINLVVAATFLAYVGDIRRFPSPKHLVGYLGLDPRVNQSGNEVARGGRISKQGAAEVRHVLSEAAWRGARVPGPLRGFYERIRVRRGPQIAITATARKLAVLVWHLLTREQDYAFAMPSTTQRKRRALELLAGAPAHHGRPGPEGPCRPAAALREREREIALAAEHAYQRMLADWQRQPARSAVRT

SEQ ID NO: 499274 - protein, 458 aa, unidentified
MKRNRSKAKIDRMMPMVNPNAAAIDIGATMHMAAVRADRTPEPVRSFGTFTIDLHRLVDWFKECGVETVVMESTSVYWIPIFELLDARGFTVFLVNARDAKHVPGRKTDVSDAQWLQRLHSYGLLRASFRPKGQIAELRAYVRQRERLLEYAASHIQHMQKALTEMNVQLHHVVADITGATGLRIVRAILAGERDPKVLTRLRDYRCHSSAETIEKALTGTYRAEHLFALEQALALYDAYREKASACDARIEAVLKELSIGRGHSSNSLPSSGRDRSDQANALAFDARTLLFALLGKDITQINGLGPYLSLKLIAECGDDLSAWPSAKHFTSWLGLAPSNKISGGKILSSRTRRCGSRASALLRLAAVSVGRTDTALGAFFRRLSARIGKAKAVTATARKIAVLFYNAVRHGMEYVDPGASYYETRYRTRAVNNLHRRAKAFGFVLQPMEPAPGVAVS

SEQ ID NO: 499275 - protein, 391 aa, unidentified
MIYVGIDVAKDKHDCFITNSDGEVLFKAFTITNNLDGFNDLYQKIETVMKDITKVKVGLEATGHYSYNLLGYLIDKGLPTYVINPLHTNLYRKSLSLRQTKTDKVDARTIVSILMSDVNLKSYSDISYHNEELKSLTRYRFDKVKERAKLKSSVSRLICILFPELEKLVPTLHMASVYALLSEFPGAKQVANAHLTRLTNLLSEASKGRYSKDTAITFRDAARTSIGSNMPAKSLELKHTIKLIKELDSEIDEIENEIKIIMDEINSPILSIPGINYRMGAMIIAEIGDFSRFDSPDKILAYAGFSPSTYQSGHLYGAYAHMEKRGSRYLRYALYNAAKYVCHWDPTFTAYLAKKRAEGKHYNVAISHAVKKLIRVIYHLEKTNQQYIKAS

SEQ ID NO: 499276 - protein, 355 aa, unidentified
MTSTKYIGLDVHKESISIAVMNSIGKFVMESVIETKASTILQFIDGLRGDVRVTFEEGTWAAWLYDLLKPHVTEVVVCNPRKAALLKDGSKGDRIDARKLAELLYMNKLATVYHGEHGLRTMKELARSYLTITKDLTRVMNRLKALYRSWGIPCAGNEVYDPRHRAEWLGKISEAGVRRRAEHYYQQLDVLRLLRQEVRRDLLVEAKKHKPWKLLRQIPGIGPIRAALLIALLQTPHRFRTKRQLWNYSGLGLETHDSAQYRVREGQLQRSKKPVTLRGLNKNHNHDLKAIFKGAALRASSAAGPLRDFYEALLAKGRKPTMAHLTLARKIAAITLIVWKKEVRFDANYLKPQAA

SEQ ID NO: 499277 - protein, 350 aa, unidentified
MSEIIRIGIDTSKSVFVLHGVDGTERPALRKKLRRRDLVDFLAKLKPTRIGIEACGAAHHWGRTFQALGHEAVLLPTQLVKPYIARNKNDSADAEGICEAMSRPRMRFVPIKTAEQQAAQMLIGLRDRLVRQRTQVSNAIRGYAAEFGLVAAKGLDKIEPLLARIADAPDLPDLAKELFALHSQEYVQLKLRLRQIEAKLMAWHRHNELSRRLAEIPAIGPIGACALAIKVTDPGAFRCGRDFAAWLGLTPKDHSTAGKQRLGAITRAGDEMLRSVLVVGATAVIQQARRQRGKATPWLIDLIKRKPPKLAAVALANKTARIAWKLMVSGERYDPHHQGRGRLDEGNGQT

SEQ ID NO: 499278 - protein, 341 aa, unidentified
MDKELYFGVDVSKKTLDLAYYDGEAIDWKNAHIQVSNDDAGFKKIGSWVAKVGKDFATFLFCMEYTGLYNQNFRLWLESKEYIYGMVEPRKMHRFEPDLDDDQRSLDRIKTDELDAFRIAIYCEQNHKKILRNPSKLPSPVYFKLKRLLAERKQNTKQSVLYKQQLHDICAYDTDLSVERKKLLLKNMQENQKAIDKEIDSYMNEDTSIRKNYNLLTSIPGIGRIIALETIVLTENFTAISNPRKYACYIGIAPFKKESGTSVRKKTGVSKKGFSEAKADLSIAVLSAIRNNPSIRDYWIRKRKEKCGGIVLNAVKFKLVLRMFAVIKRGTPYVETDAYKN

SEQ ID NO: 499279 - protein, 444 aa, unidentified
MTPKQTLPVIHPHAAGIDVGSTTHYVAIGQQSEDVRSFGCYTEDLHVLSNWLQSQGITTIAMESTGSYWKGLFQRLQQDGFEVLLVNGKHTRNVKGRKSDVLDCQWIQRLHSLGLLSGSFLPDSFTATLRQYVRQRDYLIEQQAAYIKKIEQALRQMNIRLDAALSDIVGQSGKAILEAILAGERNASVLATLVNWRVKKTKEEIIRSLTGEWKEEYLFEMQLGYELYGVIQSKIALCDSRIEQLLTESMQHKEVVEDVSTVRKKKNKNAPKMDLQHISTQLSGGVNLYHIEGVSDVMVLTLLSETGLDLSKFPSAKHFCSWLALCPNNKVSRGKTLSSKTAHHNNRLAQAFRRAANAIGNIKKGALNQFFRRIAYKYGRMAAITATARKLAVIIYNMLMRKEAYRYEETVVYSERLRKIQLKSMQKKIFALNIKPEELHFVTC

SEQ ID NO: 499280 - protein, 302 aa, unidentified
MGVDIAKSYLDAAIGNEKRRFANERIGHRELIKWVKQLKVPVQVICESSGGYERGLVRELVGAQLKVSLVQANRVRQFARAAGILAKTDRIDAKLLCDFAEAMQPGTISASQLEQEHLRELESQRRHLTHLLVMEQNRAARASDRCVRRLNRTLLGQIKKQIAKLDLLIKEYIETSPELSAKAQKLTAINGVGARTAALLLAQMPELGQLNRREVAALVGVAPFNRDSGKMRGKRSIYGGRRPVRHGIYMAALVAAHHNPILRAFYLRLRVAGKPAKLALTATMRKLLIVLNSALKPDLNYS

SEQ ID NO: 499281 - protein, 432 aa, unidentified
MICAAIERCAGIDIGKNWLAVCVMVGPLAGEPRVEIRAFGTITAELERLRQWLQQEGVTHVVMESTGSYWKPVFNVLEDSVQVYLANAQEVKNRKGHKTDKKDSWWLAHLLRHAMIRPSFVPSRGLRELRDFTRRRRKMIGVATSERNRVEKILQDANVKLSSALSDIFGVSGQLMLEALLAGQAKPEEIAQLAQGAAKRKIPEIIAALEGHRMSDHHRQMIRYSLEHLRFLEDHILQLDEQIVAKIAALGYTRPWELLQTVPGVQANSAASVLAEVGPDMGQFGSEKHLSSWAGVCPGNNRSAGKNKSSKTTKGNRWLRAALTECAWAASRKKDCFLKEKFWRLATKKQRKPPAIMALAHTVLVLSYQVLKTGQPYQERELPVLDEKQKNRIIWHHVKRLGKLGIRVRSLDLRKHLPGKGAKENKEVVSKN

SEQ ID NO: 499282 - protein, 350 aa, unidentified
MMRYVGVDVGKTRCRAALMNKQGTIEQEFFFENNPQGIEHLTTLLTSDDQVVMESTANLWQNLYDALDHRNIKVILANPMKTKAIASAKVKTDKVDARILAHLLRADLVAESYVPPQHLREMRALMRHRLSLLKMRTMVKNKVHALTDKYGYRCEFSDMFGTSGLKWLRSVEMGELDLLILENHLLHIESIDQQMDKVDEAIKERACEDEDVRLLLSLPGVDVRTALLLKSEIGPIDRFENYKKLVSWAGMAPRVHQSGNVLWNGPISKCGSGILRWAMVEAAWGAVRWDVKLGEFYERVKARRGSQKAIVAVANKMLKIVWVMLVRREPYSGVNLVRYEKKLNRVGFDM

SEQ ID NO: 499283 - protein, 424 aa, unidentified
MKVTYQTCCGVDVHKSFLVATIVKTTGGIEPSYQKERFSTFNNSILEFKQWLLDNDCHDVCMESTGKYWVPVFNLLEDDINVVIANPKWVKAVKGNKDDTKDSKWIGDLFRLGLVKGSYIPCKKVRILREYTRYRYKLVSCRSSEKNRYQNALTVCNAALDSVVSDIFGKSSTSIIDYLLEQSGSSINHEEIASKLLRSLKSKEDAVIESVEGYQMTDAQKYRMRLVRAHMDYITAEINDVDKMIENMISSNTDFENAVQFLCTIPGVKRDSAITIISEIGTDMSQFSSSRRLCCWAGLTPGSNESAGKKKSVRITRAGVYLKPALVQCAHAAVKSDKSPYYKKKYESLVKRRGKKRAIIAIARMILTAIYQMLSTGEQWNPSDLYKIDMPVALVEKQKAKAIKQARKLLQREGLLPPDEPLAS

SEQ ID NO: 499284 - protein, 354 aa, unidentified
MKRTTKYVALDVHQATTVASVREQSGRVIARSVLPTDGPALVEFFRGMRGSVHVAFEEGTQAQWLHALLAPLAARVIVCDRRGEHRRGNKADRVDADEFSSRLLRGDLRPVYHAGQGRASLRELTRAYRIVVEDSTRAMLRLKAIFRGRAIRTPGTRVYQPEHREEWLAKLPDRGTRFRAEILFAQLDLLRELRPKAKAAMLAEARKDPAWPVLLAIPFFGPVRVSILLATMQTPWRFRSKRNLWAYAGLAVVTESSADHLIVAGRAVRRRRKPLTRGLNKNHNRALKEVFKSTATAAIGRPGPLQDFYGSMVARGMREDMARLTLARKIAALTLRLWKTGETYDPKQLTLQQT

SEQ ID NO: 499285 - protein, 357 aa, unidentified
MNSSKNISFTDSHFFVGFDAHLKNWKVTIRFNGIELKTLSMNPSSVELFNYLKKNYPGGIYHIVYEAGFCGFWALRKFRELGIDCIVVNPADVPTSNKEKVNKNDPIDSRKLARELENKSLKGIYIPDIFHEELRHLMRLRFRIVQNQTRVKNRIKGLLHTQGFTIPLNFTGNSRWSASFFQWLKEINLNTDAGNFTLSNLILQLQQLREHNKNVLRQLREQAKQKHIAPVIKALLSVPGVGFITAMSPYTEIVDMKRFNNQEQLAAFVGLVPSTRSSDETIYNNGISFRRNKFLRPIMVEAAWTAVKTDPAITMKYRELTKRMKPQDAIIRIAKKLLQRIRHVWLNREDYVYSLVA

SEQ ID NO: 499286 - protein, 376 aa, unidentified
MNDHSEAYVGLDTSKLRHAVAVADGGRGGEIRFYGEIENTPAATAKLVRKLAAKYERLTFCYEAGPTGYGTYRQITSLGFECVVAAPSLIPKRPGDRVKTNRLDAMSLAKQSRSGDLTAVWVPNEGHEAMRDLTRARETAMLDSRTKRQHVSAFLLRLDRPYPERKKTWTKVHMSWIASQKLDYPQHRIVLEEMMLAVRQAQERLDRLEQAIADAVPDWSLAPVVTALMAMRGLDLISAATILAEIGDPSRFQTPLALMDYLGLVPSEHSTGDEVRRGPITKAGNRRARRMLVECSWSYQYPPRVGRAKQPKVDAAPPAVREIAWKAQHRLYRRYRALIRKGKRKTVAIVAIAREFAGFIWAVARATTTARAAVAS

SEQ ID NO: 499287 - protein, 387 aa, unidentified
MPQPNDLSRSLVALDQNTTIIAVVELSQSSWLVAGVLPGIERQPCKKLDPSPERLLAVLHRWRDEAVRAGRTITRIALAFEAGRDGFWLARWLEARGVEAHVIHPSSVAVSREHRRAKTDRLDTELLKRGFLGWLRGERGHCSMARVPTIAEEDAKRPNRERECLVGERTRIVNRIKSTLARLGIRNFKPTLRKAAERLAAVQTPEGMPLPPNTLAELQRDMARLGLVVSQIRQIEDARQKRLEQQHETGPHAMVRLLARIVGVGVETADMLVHEVLSRPMRDRRAVARYAGLTGSPDESGAQRREQGLARAGNTRVRRGMIQLAWRFLMFQKESALALWYRARTAGSRTGTRKTMIVALARKLVIALWRFVTTGEPLEGVVLRPAS

SEQ ID NO: 499288 - protein, 347 aa, unidentified
MRYLSQTAASYVGVDLHARTLFVCVLDAAGTVRLARNLPAQPEPFLAAVAPFRPDLLVGCECMHCWYWLADTCREHHIPFALGHAWAMKAIHGSKTKSDRQDAEAIARLLRGGNFPLAYAYPKERRGLRDLLRTRLRLVRQRAELYGHIHTVRRQLNRPAVGSDVKYKSKRDAAAEDIPDVHARRGVEARLNLLGPLDTEIRRLERDLEVAAQEHYPSELAVLQTIPGVGPIISLTILLEIDTVTRFDSRQQFCSYARLITPKQESGGKFVGVGNSRSGNAWLKWAFSEAAVLSAQKDERMKKCLAKLQSRHGSGKGLSIFAHKLGRVVYHLLHSKNVFDVERFTRH

SEQ ID NO: 499289 - protein, 342 aa, unidentified
MATVTLIGLDIGKHSFHLIGHDLAGHPVLKRQFTRTQLITFLAQHPACRIVMEACCGAHWLARKLASFGHTVQLIAPQYIRPFVTGNKNDFLDAQAICEAASRPTMRYVAVKSVAQQAISAVHRLREARIAERVQTANQIHALLLEFGIALPVGERGIKQASALLADADHELPISVGKVLQRQVAHYRELQEMIAELDAELTTVAKTEDVARRLMTIPGIGPITASQLSADAGNAKGYGNARDFAASLGLVPRQHSTGGKPKLLGISKRGDKQLRRLLVQCARVIMLNAERWTSAMAVWTVQLMRRRHSNIVACALANKLARVVWAILAKGGEYHPQPRALS

SEQ ID NO: 499290 - protein, 340 aa, unidentified
MKKRYIGIDLHRNRFTCCIRLDNDRTYVTEWALEALARLVKKLRATDEVAVEITSNTRLFHEAVLPHVARVVVGDTNQFRVISQSVKKTDPNDARLLSLYLSKDLLPEVRMKDKDLAQLASLTQTRDTLVKQRSALKNKVNNILSARGLNLAKEALSSEKKLAEVLGLPFDEIVRIELRVIVEQIRGLNKSIAELEKTIGEEGSKLEGHKGLSSIKGIGKITGAILLSVIGDVNDFADEGRLASYFGIVPRVSNSNQTERSGRIHKRGTKLGRTALVQSALIAANYSPYLKRFYEQVKARKGAGKAIIALAHKFLGIIYRTLKNKWVFEDFPNFVLAEES

SEQ ID NO: 499291 - protein, 389 aa, unidentified
MQSMRLPSRRLLDAVREGRPLESEFSDVMKEGLPETAYVTWSRPKEVPQMGVYTGLDLSRKRLDWYACRVDGTVVDAGAVTPDLDGLAWLVHRLGDGDVLAVIETMNGARFVHDRLELAGWDVRIADAQRARALAPLACKTDRIEAQVLAELARRDLVPEVWLPDPRVRGERERARFRLHLVKHRTMLKNRINQTLVAHGLGRPTRHLFGPKGRAVFERLPLPEPWQGTLRASLVLIDSLDEQIDELERELRALGADHPYVPLLRTAPGIAWILAYTIASEIGDINRFPTPRKLIGYTGLCPRVYQSGETDRRGALAKNGPNYLRWALIEAAHTAGRTSHYRPIIERMRDRHGRRRGSAIASVEIARRLSEAIWWMLTRNQPFAPAGAL

SEQ ID NO: 499292 - protein, 390 aa, unidentified
MKCQTIDQASASATAALDYDSTMIGALELSSKKWVFAVQLPGSRKHTRHTVQPNGPALETLLEKLKANGALSGRPISRVIMTHEAGRDGFWLVRFLQRRGVEVHVMQASSLPVDRRARRAKTDVIDAEMLLRTLLAWLRGEPRVCSMVPIPSEADEEARRAHREREDLLCERRSLLNRIDGILATLGVVGFKGLRRDRRKQLDDLRQPDGAKVPATAHSRIERLVERLELVMAQLATVEAARDAVIEKETPANTSERMIRDLSRVCGIGVESATLLVREAFCRNFANRRALGSYAGLTATPFASGSMAREQGISKDGNRRLRACLVELAWLWLRYQRESGLAQWFCARVNGAKGRVAKIMIVALARKLLIALWRFAKDGVIPEGATMKAA

SEQ ID NO: 499293 - protein, 473 aa, unidentified
MIKSVGIDLAGIGEHKVRCLDEKAQMCDGFSFETTTAGLAKLEERVFSDGSNPVITFEPTGLAWLPVAVYLKARHPDSRLVRVQAQKVVALRKYLNRSSKSDKIDSLTLAKMPFIDPEKLEEIYFPPGKIYAIQRLARQRKRLENEISGRKRRIGAIVDGYFPGIRSAFSDPWSAHARAFLRSRLNPLTVARAGEKALHTFLARTRKHCRLEASIESHGIYLACREAATLYKASSSVETVDGDFFSALQDEVSRELRLMEMEEAESATIAKRLDLLYLEIHPSDNLRTIPGVGDITAPIFLATIGDPARFRNQSSFANYCGIVPGASQSAGSEAKGLRMTKAGPAIMRWALFQAGGIGRAHDPQIAGVYYREMVHNGKNHMQAMGAVMSHLSARILAVLREDKPYDLRDMDGRPVSREEAQKIILTKYQVPEEIRRERRRRKITGNPGLRKKLGEMLVPRVREAAKAPQPVVT

SEQ ID NO: 499294 - protein, 410 aa, unidentified
MQTLVERGCGLDVHQATVVACLLIVLKNGRVHKQMRTFGTTTRELLTLRDWLLSEGCTHVAMESTGVYWKPVYAILEGALEIVVANAQHVKKVPGRKTDVKDAEWIADLLCHGLLRPSFVPPKPIRELRDLMRYRRKLTESQAAERNRLLKLLETTNIKLASVASDVFGVSGRLMLEALAQGKATPQEMAELAKGLLRKKIPELEPALEGRLEEHHRFLLELQLRRLEAGEEDLAALQQCIQEKLKPYAKQLALLDEIPGVDWTVAAVIIAELGVDMSVFGSASQLASWAGVCPGNNESAGKRRSSRVPKGNVYLKTALVEAANAATRAKGTYLRDKFFRLKARRGYKRALVAVAHKILVAIYHMLSQEVCYNDLGDLYLDRLNKHHLTRNLVHRLERLGYTVTLEQKAA

SEQ ID NO: 499295 - protein, 319 aa, unidentified
MSEIVVRVGLDVSKDQLEAYVHPGGARLSVTNDRTGHRQLLAWLAQQGVAIVGAEASGGYERDVLETVAESGLVALRLNPLRVRRFAEARGRLAKNDRADAQTIALFMTSCPDERAVIPPDAARERLGEHLLVRVQTLDAVAALENQLEHLRDRGLRAALRARAEGLRRAVARLDQRIAELIAAAPNLDAMAACLRSVPGVGPVLSATVLALLPELGRLSRRQIAALAGVAPFDDDSGNRNGRRRIHGGRAALRKVLYMAALVAKRRNPTIRTFALRLAGKKPKVIIVACMRKLLTILNAVARDQVMWHNTQIVPCPHS

SEQ ID NO: 499296 - protein, 386 aa, unidentified
MTQPNDLSQSRIPFCQESTLIVVVDMSQSSWLVAGIVPGIERHPLKKLDPDEEALLQLIQRWRDEGVKVGRPITRIALAFEAGRDGFWLARWLRMRGIESYVIHSTSVAVPREHRRAKTDRLDSELLKRVFIGWLRGEPDHCRMVAIPTLEEEDAKRPNRERENLIGERTRIVNRMKGCLARLGIRNFKSTLRKASELLATLSTPEGRPVPPNTLAELRRDMARLRFIMDQIQEIERTRLQGLKQSPEKGPHAMVRLLARVIGVGIETADMLVHEVLSRNLRDRRAVARYAGLTGSPDESGRKRREKGLAKAGNSRVRRGMIQLAWRFLMFQKDSSLARWYRARTEGAPSTRKTMIVALARKLLIALWRLVTTGELPVGVTLRPVA

SEQ ID NO: 499297 - protein, 417 aa, unidentified
MSLTPEPVVPVIAGRVCAGIDWASIDHAVCILDGQGAVLERFFVVHDAAGLKTLVRRLLKAGVEEVGIERSDGPVVDALLQAELAVLVIAPGQLKNLRSRYGSAGNKDDRFDAYVLADVARTDRARLRPLVRDSAATTAMRTTVRARRDLVEHRVAAANQLRAHLQLVFPAAAGLFAAIDSAINLTFLERFTTQTHADWLSPTRLASWLSKSAYSGRTSAAVLHTRLLAAPRGTTGTDAEVHALTTNAYIALLRTLNTQIGALEDNLAAQLTSHPDTHIFASLPRVKTLRTARLLAEIGDARGRFPTADSLAALAGVAPSTRQSGKVKTVTFRWGANKQLRDALCDFAGDSRHDNPWAADLYTRAIARGHDHPHAVRILGRAWAHIIWACWHNNLSYDPSQHRALQNILANTTAQAA

SEQ ID NO: 499298 - protein, 389 aa, unidentified
MLYVGIDIAKEIHEASLINDQGKLQGRSIRFSNTQTDFKRFLEWLPKETLEMAMEATGHYWLPLYDFLKGWGYEVTVLNPLQTEAHRRGQIRKTKTDKRDSFIIADLLRTKVISPSYIPDEWIHQLREITRFRFGLVDSICDLKRQILCVLDKVFPEFESLFSNVFIKSAQALLKEGTMPEEIAGMDLTELTAILNSSSHGRFGLAKAQDVQSRASSSVGISYLKDSAKVQLRCLMAHLEFLQSQIEEVDECIQDLMSQRESFLTTIPGISQTLAATITAEIGDIDRFESPEKLAAFAGIDPTVYNSGKFTGTRMVMSKRGSPYLRRALWMASASARRFDPELAAFFQRKIAEGKHYNTALGAVCRRLLNRVYSILKERRPYQPKSVSL

SEQ ID NO: 499299 - protein, 412 aa, unidentified
MTVTNQFAAHVGLDWADKKHDVCVQFKNGERVFDVIEHTAEALDAWLTELHQKVKGRIAIALELKKGPVVYALQKYPFITVFPVHALSLARYRQAFSPSGAKDDPQDAELALELMLRYPQKIKAIEPDNADIRLLQQLVEQRRQLVEDKRRFVNRIINTLKQYYLQPLEWFSHRGSLLLCELIIRWPSLQQLKRARRDTIRNFLNAKGGRAMALTEQRVASIDNAIPLTTDPSVIEANALMAAALATQIKVVSEIIKTYDERIETLFDTLPDAGLFKSLPGMGPCMGPRMLAALGDNRDRFNSAEEIQNYAGIAPVTERSGQKSWVHWRWQCAKFVRQTFVEWAAKTVNSSYWAKLYYQGLREKGKSHQSAIRALAFKWIRIIYRCWKARTCYDEAKYLLALEARHSPLLKP

SEQ ID NO: 499300 - protein, 349 aa, unidentified
MNYYAGLDVSLEETAICVVDGSGLIVKEVRAASEPEALIAALKSIDVPLERIGLEACSLTAWLHDGLWGAGLPAICIETRQANAAMKTMPNKTDRNDARALAQIMRTGWFRAVHVKSRQSRLWRSLLVARRTLVNERRAIENVVRAVLREAGLKLGRPSCAAFAGRVRELAGDDPTVRPVVEPLLAVLATMLGQLARLTKQALAITRREEVCRRLMSVPGVGPITALAFRATIDRPERFRRSRDVGAHLGLTPTRYQSGETDIVGRISRCGDELTRTALYEAAHSLLVRSRKWSALRAWGMKIAKARGMARARVAVARKLAVILHRMWSDRTAFRFGREPAAVAVLAVA

SEQ ID NO: 499301 - protein, 391 aa, unidentified
MVCVGIDVAKDKHDCCILDSDGMVRADCFTIPNNMDGFKQLLQTIRNCTKKSDKIKVGLEATGHYSYNILGFLLDNGLPTYVINPLHTNLYRKSLSLRKTKTDRVDARTIATMLLSDVDLKSYTDTAYHNEELKSLTRYRFDKVRERAKLKQSVSRLVTILFPELEKLVPSLHIASVYALLSEYPGAKQISEIHLTKLTNLLATASKGRYGKDKAIQIRDAARTSIGSVMPAKFLELKHTIKLIRELTSEIDEIEVSIQKIMDELNPPILSIPGVGIQSAAMILAEIGDFSNFESPDKILAYAGCSPSTYQSGKLTNCYAHMEKRGSRYLRYALYNATKYVCYWNPVFAEYLAKKRAEGKHYNVALSHAMKKLVRLIYALQKSGKTYLTAA

SEQ ID NO: 499302 - protein, 443 aa, unidentified
MQILYSRCCGLDVHKASISACILVYQDGGEPEVRRRTFSTFTQDLIRLKMWLTSSKVSQVALESTGVYGKPVWNILEHGSLQLMLVNPQHFHAIPGCKTDPKDSRWLAELLSYGLLRPSFVPPQPIRELRDLTRYRVHLKQDRNRIHNRIHKVLEDANIKLDCVATDILGVSGRRMIDGIVEGRYSAEWLADRARSRLREKLPSLRLALKGRVTDHHRLMLRELLGDLDAVDSKIRRLEQEIIARAEPHANLMARLCTIPGIDMVTAWTLLAEIGVDMAPFPDADHLASWAGLCPGLKESAGKRMSGRTRKGDRYLRRALCQAAWAVSRTKDNYLAALFYRIAGRQGLKKATIAVAHQLLRIAYHIIRDGGSYRELGGNYFDRLHPERTRNRLVRRLENLGLEVTVQPLQAGAEGVSLRPPFRPACRSAGRTTRKVWATAARR

SEQ ID NO: 499303 - protein, 339 aa, unidentified
MYYTGIDLHKHTSYLTTVDSNGVIIKQANLKNNNFDILNYFSALGDNHLATVETTGGWYWINDLLKEQNIELILAHAKYVKAIAYAKVKTDKVDSQILAQLLRMNFIPEAYKIDDNIRPLRDTLRARLRLSQKRTSALNFMNRMLEKFNITDQSLLPDSYQFQFQQFREQAMFLEEQMLALEKSLYPSLIPNEDIQRLLWIPGIGKMNAFTIMLEVGDVNRFESENNFFSYCRLVPKASNSAGKTRQKTTPKDGNRYLKLAFSDAAVHAIQHYPVIRKYNNTLLRKKNKQIARAIISKEIAGIVYYVLKNKTDFNNRFKGQELEHTKSLQWPRVISPDV

SEQ ID NO: 499304 - protein, 387 aa, unidentified
MNYVGIDIAKQTHYASIMNSDGKTLAEPFPFTNDHAGFQKLLKHLSAFSQDDVLIGMESTAHYAENLTSFLFTRGFNICIINPIQTSSLRKSNIRKTKTDSVDTYLIIKALTLNHYRLFTERDYDSLQLKNLCRFRQKLMKARTKVKIQLVTYVDLLFPELQYFFKSGIHGKACYELLKTQPNPDRIAKMHLTRLTNLLSKSSKGHFKQSHAVQLKELASHSVGIKNDTLSLQILQSIQQIEMYTAQLTEVEASIHEIMDKIDSVIKTIPGIGCLNGAMIIGEIGDISRFEKPCQLLAYAGLDPSVHQSGNFNATRTRMSKRGSKLLRYALINAAWQTTLVNKTFKDYYDLKVSQGRRHYNALGHVAHKLVRVIHKMMTDNVEFNLA

SEQ ID NO: 499305 - protein, 350 aa, unidentified
MIILGVDAHKRTHTFVVVDEGGRKLAERTVSATEEGHVEALAWARRWDDRRFAVEDCRPVTRRLEADLLAAGETVVRVPTKLMAGARRSGRTPGKSDPIDALAVARAAIREPDLPIAHLDGATRELRLLVDHREDLVAERTRIQSRLRWHVHELFPGLEIAPASLGRHRHIAALEARLVDATGTVAEIARELLKRCRELTLRANELERQIGRLVRVLAPTLLGLPGCGGLSAAKIVGEVAGVLRFRSKATFARWNGTAPIPVWSGNADRHRLNRGGNRQVNAALHRIAITQQRGVGSGRDYVQRRLRAGNTKTEALRVLRRRISDEVFRRLSVDEQRRATTTPNAIPLAA

SEQ ID NO: 499306 - protein, 342 aa, unidentified
MKSTTIAVDLAKNVFQIAVSHHPGKVAESHRLSRSQFLRFLAERQPALVLMEACGTAHFWGRKAEEFGHRAVLLPPGHVRPYVRRNKTDQTDTKGLLEAHRNEDIHPVPVKSVVQQTLAALHRLRSAWMADRTARINLVRGLLRELGLTIPIGARHVLPRAWAVLDAPDSELPAPLRLTLGAALREIGDFETRVAEVEKQLRLLAAEMPVVKRLQSIPGIGLLTATALAAFIGDVQRFASCRRFASFLGLTPRERSSGLTRRLGRISKRGDIYLRMLLIHGARSVLLAAKRAKRPDRLRAWVLHLQATRGHNKAAVALANKMARIVWAVWRHETSYQSQPAA

SEQ ID NO: 499307 - protein, 345 aa, unidentified
MKIIGCDFHPSFQQIAICDLETGELQERKLSHADGQAERFYQELGESALIGIEATGNCQWFLDLVQRLGHEVRVGDAAKIRASYVRKQSTDKRDAGHILKLLLEKRFPQLWTPSAAMRDQRQLLRHRDKLVEIRTKVKNSLQHLAMNRGMQKKSRLWTRQGMEQFQQLAMPGWAGTRREDLLQLLKELNGQIEPLDQAVKQAAEQHPQAQLLMTQPGVGPVTALAFVLTVGDVRRFAGSKQLTSYLGLVPSEHSSGSKRWLGAITKQGNRFLRKLLVEAAQTTVRKDEGFRKEYQHRCRRRPKGVAKVAAARKLAVRLYWMLRSNVGYPEIVHIESNPRVPLGEV

SEQ ID NO: 499308 - protein, 357 aa, unidentified
MIIIGADYHPGFQQIAFVDTETGDCGERPLQHREEAEKFYRELAAQGKKVRVGMEASGHARWFERLLAELNFELWIGDAAEIRTKRVRKQKTDREDARLLLRLLMEERFPRVWVPSGENRDLRQLLWHRHRMVQARTRIMNQLQAVALNEGLRCKKRLWREQGRQQLESFRLAPWASRRRHDLLQLLDRLNPTIAELSQAIEQEVQKWPEAQRLMTHPGVGPLTALAFVLIIGEADRFRCGKQIASYLGLVPLEESSGNRRRLGHITKQGSSMLRFLLVEAAQVTARSIPEWRSKYCHLMLRRGRKIAKVAMARRLAVRLYWMWRKQWDYEQVKKFGSHAGQLGHRDGVHVEHRVID

SEQ ID NO: 499309 - protein, 438 aa, unidentified
MSNKVIFNLDELFISVGIDVGADFSWMSIALPNQQFVGKPYKILHNSIDSLTTAVSKIKEAEELYSLESRIFLESTGIYHYPLFCYLRDKGFNCSVINPIITKNSTNINIRKVHNDRFDSKKAALVGLKPDLKVSLMPSDLALNCRNLCREYYDLMDNRSAYVNKLQGELRIAFPQYLGIFSKVTINTSLTLLETYTSPSAFLKADKQEIIDIIKSTARFGLTYAQNKYNAIIQAATDANQFGYIIDSNIKRIRLYIRFIRKYDEEINSILESLHELVDANEDSDFVKQIHLIETFKGAGFLSAVSIMGEIGDFSAFSKPKQLFAYFGLDPAVKQSGKFEGTKVQMSKRGSAIARRVIHTLTLQSISISRNREAKNPVLREYYLKKCDSKPKLVAMGAVSHKVCNMIFAILRDNKPFKIIALQEHIKQYNSAKCDIAA

SEQ ID NO: 499310 - protein, 345 aa, unidentified
MENMYYIGLDVHKKTISYCVKDGSGRVYAEAEIPATRLNLDMWMKTLPQPWTAAMEATIFTAWIYDHLKPHAAAVKVAHPLMLRAIAAAKKKNDRIDAHKIADCLRCNFLSECYMASTEIRERRRTLRYRNLLVRQAVQMKNKIAVLLMEAGVSYNKQKLHKVGYFRELLATNPDIDEGLKPLLRLCRETVVRLGKTESALVRSLQRDSLLMERVERLMTIPAVGPITALTWALEVGDVQRFSSIKKAISYCGLCGAENSSANIIKRTPLSKQRNKHLQTTLIEAAKMAPRNSPELAMIYDREKQKGNANRATLAVARKLVAYLVAVDRRQKDFLIVERENRTAA

SEQ ID NO: 499311 - protein, 454 aa, unidentified
MASKRKKDRKKTNNAVLPVMRPDAAGIDIGATEIFVAVPADRAAENVRSFPTFTQDLYAAAEWLRQCGVKTVAMESTGVYWIPLFQILEERDFEVCLVNARHVKNVPGRRTDVSDCQWLQFLHSVGLLRASYRPEQEICAIRSLLRHRESLVQMAATHVNHMQKALDQMNLQLHHVISDIVGQTGLAIVDAILEGERDPSALAKLRNERIKASEEVIAKSLVGDYRAEHLFTLRQSLAAYRSYRKMIDDCDREIRRYLEEFKPPEPPLASEADNSKPSMKSPSPEAVLRSELHRVIGIDLTKIPGIRTGIAQTLFGEIGPDFTKFRSASAFASWMGLCPDNDISGGKVLWVGTRKVKCRAALALRMAAQSLHHSKSALGDFYRRMRAKLGAPKAITATAHKLARIIFHLVTTSQEFDDSKFAANQLRYQKHQETKLRAKAKSMGFELIPLEQAG

SEQ ID NO: 499312 - protein, 334 aa, unidentified
MKTKVAVLSKKSVMDKIKHFYGVDISKSFFDVVDQNGSHDQFSNDSKGFKSFLKAIQRDSLIVMEATGYYHYRLAQHLYEKGIKVSVVNPLSVKRFIQMKLSKVKTDKSDAKAICEYAQANEVPLYTARNAVQAECLQLLSLQDLYMKQRTAVKNKIHGEKALGTPSKVVSRSLNRMLKQIEKELTQIETKLEFLIRETQKDQLEHLTSIPGMGKKTAMLLIVLTDGFTSFENARQLCCYSGLTPTIRQSGTSVRGRSRISKVGNRKLRNLLFMCSFTACRTNKACRELYERIVEKGKSKKLALIAVCNKLLKQAFAIAKSGTCYQENYMSKLA

SEQ ID NO: 499313 - protein, 360 aa, unidentified
MTEATTTSVKITIGIDLGDRVSHYCVLDAEGRVLEEGKLRTEPDGFRQRFGQSAAARIAIEAGTHSPWVSSLLEEAGHEVLVANPRKLRLIYDGDNKHDRLDAEQLARVARMDPRLLSPIEHRGRQCRADLAVLRARDALVRSRTRLVCHVRGCLKSFGGRLPQCSTRTLPTRGLERISEELRPALVPVLRMIQLLTSWIGGYDKRIERLACERYPETETLRQVNGVGPVTSLAFVLTLEDPRRFRRSRMVGAYLGLRPKHDQSGERSAELRITKAGDRDLRRLLVQSAQYMLGPFGKDSDLRRHGLRIAAHGGKVAKRRAVVAVARKLAVLLHRLWLTGEVYEPLRNTNRRKTPVTAAS

SEQ ID NO: 499314 - protein, 370 aa, unidentified
MEQSTEAFVGIDTAKNKHALAIADLGREGEVRYLGEIDSAPAAVERMIRKLAGRYGKLYFCYEAGPTGYGLYRQVRALGHDCIVVAPSLVPKRPGERVKTNRRDAVTLARLLRAGDLTPVWVPDTVHEAVRDLVRAHAAASQDLRRKHQQLLSFLLRHGRIYSGRKHWTKPHLRWLAQQKFDHPAQQIVFQDAVDTIEDAATRLRRLDEQLAAIVPSWSMAPVVEAYQAMRGVSFAVAVTFVAEIGDLQRFDNPRQLMAFLGLVPSERSTGERVRRGGLTLAGNKRARRVLIEGAWSYRHPARVSQTLQARLEGLPKAVRAIAWKAQIRLCARYRRLTAAGKKRPVVIAAIAREMAAFLWAIAQHVAPTA

SEQ ID NO: 499315 - protein, 351 aa, unidentified
MRFYKEQHQFYIGIDLHARTMYICVMNHDGMVVYHKNMPSTPASLDHVVGQFGTDIVIGVECIFTWYWIADFCTDRSIAFALGHALYMKAIHGGKSKNDRIDSEKIAAMLRGGMFPIAFVYPKAMRATRDLLRRREYFVHHRAELFAHIENTNYQYNFNTTLKTTKMKSATYRNTLPGAFNDPLAQKSIRADMFLADVFHTLIQGIEKDIQEIALFHDPLSLELLKSIPGIGSTLALVILYEIQDIQRFPAVGNFISYARLVKPAHESAGKRVSGGNSKIGNGHLKWAFSEAAVFFLKNNEQGQAWHQKLVARYGKAKALSLIAQKIGRTVYFILKHKEPYNAVKFFKDGM

SEQ ID NO: 499316 - protein, 425 aa, unidentified
MKITQNLREIKLNQVLDVAVDVHKDTLNFFFSIAGKEYRDECPNHTRSIEKRLSSYHGIAQEHGINRFRLICEPTGSYQNKLLRTARRQGHVTCLVNAESVYKFRVVETNDTGKTDTKDPKVIATLGQLNKVIRHRMLNEDYLVLRKLGRTYDELESEITSLRCRIDKLLIELFCDFSFTKDFLYGTSGKVLIDRFGCNPYRIIDSGYEAFSATMRQAVPRIRRESLQRLWQDAESSVLNELPAAYRDVLEEQFRDLVAAFRNRETRMEQIVEQMKIVLQCIRDDDPRIPPPTAGVISEKNLARLLAETGPISDFRNWRQLMRYGGLNIRMRQSGKYTGKNRISKKGSPLLRKVLNHIVLPLVRQNCLCGEYYHRKREVDKMPGTKAMTIVARHFLRKFYGWYKSGAAFDEKRFFASEAEYLKAA

SEQ ID NO: 499317 - protein, 384 aa, unidentified
MNYVGVDIHKKYSVLCAVDERGRKLREARVEGNAPFGFAQFFSGLGGPSKAVVEACWNWGLIYDELEELEGIEEVVLAHPYKTRLIADAQIKTDRLDAYALSTLLRGNLVARAHVPRRETRMRKNLLRQRLYWARLRTMLRNRIHALLDRQRDLELPQCSDIFGMRGLSFLRRLELPETDAALLREQLALHDLIAQQMKAQEKRIGLEFGSEAMHQQLLSVPGIGPTLAAVIACEVDSIERFSSAEKLCAYAGVVPTTHSSGGKTSHGQLLPFCNKWLRWALIEASWVAIGCSPYFGALYKQHRARGKKANSAVLIVARRMCRIIWQLLHEKRDFEKRPLRPNFNFPRLLRSETDGSHGRKALTSASWVRMENRGSHYYHAGQP

SEQ ID NO: 499318 - protein, 405 aa, unidentified
MPINMQYERAFGLDLSKKTFHGCILDGPDLGSRHFFTGEMGQQGKAKLAGRLCKGDLVLMEAGTASFSLARFLLENTESEVVVLNPAKLYNIFNSTLKTDKADSEKIAKIARTMPRDEWPTVSIPTREEQAERSVVSLEVFLAQEITMLVNRLYALFNSMGHPFVKKSDLKTEESRLALANRLLCEDSLAIEQAVMLSDQIGNVTGQLEQCKQRLRDICLSHPKEALSLLSIPGIGLMTAASQIAFLGDGSRFDSPDSYVNYVGLSERRFDSGTKVSKGHISHMGNKCIRRNIIQAAWATSKTTKCNPLSERYEHLRLRGKSKPVAAVAVAKKMIQLSYILVKSNGIYEFTKQQGLAAFRRRLQYHKLAELLDYLPEPIRMEMEEIDRTKRKEAAATTSRQKKFA

SEQ ID NO: 499319 - protein, 377 aa, unidentified
MHSENIAAYVGLDVHKETLAVAIAAPERLGEVRYYGTINNEAQAVRRLFQKLQGLYGNILSCYEAGPCGFGLYHQLTAMNIKCQVIAPSRIPKSPTDRIKNDHRDAISLARLLRAGELTPVWIPDLTHEAMRDLIRARAAAKRDSRVARQRILSMLLRTDKHYAGKHWTGKHRTWLANQSFSQPSQQIAFQHYCQSLEQIEDRILQLDQEISRLLPEWSLCNLVCQLQALKGVGQLIAMTLVAELGDFSRFSNPKQLMAFLGLVPGEYSSGNSIRPRGITKVGNSELRRLLYEAAWSYRTPAKVGAWLIYYRPDSVTQYSKDIAWKAQQRLCSRYRSLTAKGKKSQVAITAVARELTGFMWDIALAAQSSFSQQKQN

SEQ ID NO: 499320 - protein, 459 aa, unidentified
MSKQRNQKNRRRQFKVTSLPPHLQHINVNAAGIDVGAEQHMVAVPEGRDEVAVREFGTFTAELEAIADWLAQCGVTTVAMESTGVYWIPLFELLERRGFEVKLVDARHVKNVTGRKSDVLDCQWLQQLHTYGLLPAAFRPTDEICVLRSYLRQKEMLIQAAAQHIQHMQKALQQMNLLLHNVVSDITGVTGMKIIKAIIAGERNPQVLATHRDGRCHSSSQTITQSLVGNYRDEHLFALRQAVELYETYQSKIADCEAAIVAQLNRYPDTTDDDPPPAAKPGNARTCIRGGVDVRQILFKKAGVDLFAVPGLAADTLLTASSEVGFDMSPWKTVKHFTSWLHLCPGTRISGGKILSKRIKRNANRAAQAFRMAAANLGRTQTALGAFYRRIKARRGGQQAVTATAHKIARIYYTMLTQGTEYVELGQQAYEQKYQARRLAHLQRQAKILGFQLVPCPAT

SEQ ID NO: 499321 - protein, 371 aa, unidentified
MNDITKYVGLDVSKEKIAVAVAEEGRSKPRYVGMIDYKVEAIRKLMKKLGEPEQLQVCYEAGPTGYGFYRLLKSMDIECEVIAPSLIPKKPGERVKTDKRDSLKLATLYRAGELTPIYVPSEDDEALRDLVRAREDVKEDELRAKHRLTKFLLRNEVNPPQGTRKWTKKYWDWLNSLKFERSASRIAFQEYLQQLKEFQQRLKILEQEIEEQAKEGVHAPMIQTLMTLRGVAVITATSLVAEIGSFERFRTPKQFMAYTGLVPSESSSGELRRLGNITKTGNRHVRRLLIESAWSYRYQPAVKGELKKRQQEQPTNILGISWKAQNRLHKKYYRLLGRGKESGKAITAIARELAGFIWAIAHEANYEARVD

SEQ ID NO: 499322 - protein, 334 aa, unidentified
MKYIGLDIHKKDTQASVLDEKGKFVHGERIRTDVKDIGHFFEKIERMNDDDLSVVIEATGFYFWIYDVIVERGHQAKVVHPTRVKPLMRARTKNDRNDALMLAELLRMGCLEGIYVPDREVREMRELTRHRESLVRKKGDLKREIISALDQRGVKVPEEHRTNFSQKYNDWLRSLNDMIVSDKLDVLELVINKIKGIEQVIEERYGQDDDVKLMMTVPGVGLVTAAVIKAEIGDIARFSSPEKLAAYVGVSPTTYQSGEKEWGGPTRRGNNRAKHVLIEATLFHYHFCRDSKISSYYERKRDSIGRKKAVVASSRKLLEAMYFMVTRKESFHAH

SEQ ID NO: 499323 - protein, 327 aa, unidentified
MKKLLPVGIDVSAKELVVASDRHREARFDNDPAGHKKLIRVLTKGGRGARVVLEATGVYSLDLAFALHRSARIEVMVANPRAVANFAKAYLQRSKTDPLDATVLLEFARRMPFTRWVPPAPEHLDLRALSRRIAALVKILQQEKNRLHAASQSIEMTALVREDVDANIGHLAKRIECLRDQALAAIGKHEPLREAFEHLISIKGIADASAISILGELVVLPADMTVRQWVAHAGLDPRHVESGSSIHKPARISKAGNKYLRAALYMPALVAIQHEPNVAAFYDKLVASGKTKMQAIIAVMRKLLHAIFGMLKYGADFDGRKFYAINA

SEQ ID NO: 499324 - protein, 360 aa, unidentified
MAKAKPVHSSPVVGGVDTHKDLHVAAVVDQNNRILGSEFFSTTRQGYRQMLAWMASFGTVERIGVECTGSYGAGLLRYLQSAKIEVLEVTAPDKMERRKRGKSDTIDAESAAHAAFSRIRTVTPKTRSGMIEALRVLKVCRKTAVAARRIALQMIQMNIVSAPDELRDQIRHLTRMQLIRTLASWRPDVTAYRHVQDAYRIALKSLARRYLELHDEIADLDVMITSIVDELAPELIKRKAVGYECASQLLITAGDNPQRLNSESGFAALCGVSPVPVSSGKTNRHRLNRGGDRAANSALHIIAIGRLRTDARTQEYVAKRVAEGHSKMEALRCLKRYISREVYTLLRNKNRQINSTQIIT

SEQ ID NO: 499325 - protein, 372 aa, unidentified
MSESSKILYVGLDVHKESIAVAYAPDDRGAEVVSLGAIGTRQSDIDKLIRKLQSKGAATLVFVYEAGPSGYGLYRYLTGKGFACHVVAPSLIPRKAGDRVKTDRRDAMTLARLMRSGDLSAIYVPGVEDEALRDLSRGRDDAMQDLKRSKRRLKSFLLRQDIRYEGRASWNAAHLRWLAHVVCPTPPQQIVFQEYLRAVTEQQERRERLERELHEAVKGWRLYPVVEAIQALRGVELTGAVILMTELGDITRFDTPQQLMSYLGLTPSEYSSGERRRQGGITKAGNSHARRALVEGAWAYRYPAKVSRHLQLRLEKLPAEVQAISWKAQVRLCKRYRQLTARGKHVNQVVVAIAREMAAFAWAIARLVPQAS

SEQ ID NO: 499326 - protein, 364 aa, unidentified
MNTISAAAGLVGVDLAKTVFSICGVDGRGRVLRRQDLRREAFELWLSQLAAGTVVAMEACSGAHHWARRCQAYNLQPLIMAAQFVTPFRKGRKTKNDQADAEAIATAARQGNMRFVPVKDVDQQVRLSWHRVREGYKTESLAIGNRIRGLLAEFGVIVAQSDTALRRLLADLDTQRGLPAEFKELLRDLADHWKQLRVHHDTCDARIEAHARADSRCVRLRGIVGIGPITADAVVATVGNAREFTQGRQMSAWLGLVPIQHSSGGHARLGGISCRGDAYLRTLLIQGARSSLQRAKAVATEKATPEQLWIRTLDGRMPFGKVIVAVANKHARQIWAILAHDVDYDAHACLNDPMHRQTHEVYAA

SEQ ID NO: 499327 - protein, 344 aa, unidentified
MTTNDGEVIGGVDTHGQTHHAAVVSAATGKLLGDEEFPATAKGYRLLLRWLQTFGTVAKVGVEGTGSYGAGLCRFLSAEQIPVVEVNRPNRQGRRMHGKSDPIDAIAAARAVLAEAATALPKVRTGAVEAIRILRATRAGAVKARKAAINQMHSLLFGAPDELRAALAGLDRAALVVRCARLRVDTTKQIADPAAAAKIALRRLARRVQMLDAELAETDEQITDLVGKTAPATSAIYGVGPQIAAQLLTTAGENPQRIRSEAALARLCGVAPIPASSGNTTRHRLHRGGDRQANSAIYLICRRSLSSGAQKSRPEYSGAATCRAWGPGGGRNGRERVLATRGSD

SEQ ID NO: 499328 - protein, 413 aa, unidentified
MSKHTYRSKKVNEIDWDQLRGKWAGQSLVFAVDVAKETQYALLANQGQTESVLLRWGHLGESVALIGELSRFGTAVDVVMESSGTYGDSLRHLCRQAGFAVHLASAKRVHDAQEVFDGVPSLHDPKSAFLVAKLHLEGLTKPWPELGDREREMNALRREYEMHQSQYERCQNRLEAGLSRHWPEVLQLLPLDSVALEQLLKAHGSPAEVAADGDGAAGEMRRTGGHFLEEGKILAVIASAGATLGEPCTGAERRYLAALACELEHSRLHMRGARRALESMVAADGKLAEMARTVGCLTTAVLLSLHLDPRHFANPRAFQKALGLNLKEKSSGKHKGQLKLTKRGSSMARKYLYFAALRLIRRDPVVARWYEGKKDPKAKLKAVIAFVRKLALGLWHVARGDKFDASRLLSVGA

SEQ ID NO: 499329 - protein, 346 aa, unidentified
MEQVTYVGLDVHQNSITAVWGRKQEPTRWRRIQNTEEERKRLVQDLGTGGVWAVYEASGCGFGLHDELREQGWKVSVVAPTHLARSMKEQKTKTDLRDATKLQGLLMSHGELQTPLTTVWVPPVKIREDRELVRRRLKVAENLSRVKTGIGSLLRMHGIQKPEDLKTAWTQKHVAWVKGLSQHAEELAWTVRTALASQVRELEFYRGEIDELDAQIEKLQQEEGYATAAGKMREIPGVGRLTAMTFLVELGDVKRFKNRRQLASYLGLTPNCYESGEASDRKGHISRMGPARIRKVLNQAALCLLRLDPTWKPWYDQLSRRRGTKRAIVATMRRLGIAMWQKARTA

SEQ ID NO: 499330 - protein, 414 aa, unidentified
MNRMTDPYRNVTGGVDTHADIHVAAAVCSTSHQLLGCAEFPTSPAGYVKLLAWLCSFGLLDAVGIEGTGTYGAGLARFLTAEGVPLIEVDRPDRAARRLHGKSDPVDAEAAARAVLSGRASGTPKTRDGIIEAIRVHQVVYRSAVRDRTAAINQFHAVIISGPADIRQFLEQMPLKQRFERARRWRDRNADDVACHATRQALRELALRIQLLDAQAARTEAELDVLTDLAAPALRDLVGVGIHTAARLLVTAGDNPQRLHSEAAFAHLCGVAPIRASSGKTNRHRLNRGGDRSANHALWTIVMSRRTCDQRTIDYVARRTTEGLSSREITRCLKRYIAREVHRAITRPLPLSPRGAVLRELRTQADLPLRIVAEQFATTPNRLSRIERGLTRDPALQTRIHAWLTRPETVQIAA

SEQ ID NO: 499331 - protein, 338 aa, unidentified
MGKVTTIGLDLAKRVFHVVGCDARGKVVSKRMLRRGQVLAYFAHLERCRVALETCAGAHYWGRELAALGFEVRLIPAQYVKPYVRGNKNDYNDALAIAEAAGRGEMRFVALKSAAQQDLQALHRLRQGCVASRTQLCNRIRGLVGEYGLVAPTGIAALRRRLPEWLEDGENGLSVQFRRLLARSYAQLQALEAEIAFYDAELARYTRQDVACQRLQTIPGFGPVVASVFRSQLGQGEAFRRGRDVSAALGLVPRQHSSGGKDTLLGISKRGDGYLRSLLVHGARAVVARAKHKTDRLSRWINRIRAERGYNKAVVALANKLARIGWAVLAHDTVYRAG

SEQ ID NO: 499332 - protein, 318 aa, unidentified
MSEAHFIGIDVSGSTLEVASSERTATWQAKNDAAGIDKLVAELVELGPALVVLEATGGYEFDAACALQVAGLDVAVVNPRQARDFARATGVLAKTDSVDARALAAFARMLHQHPRRDRFIKPLADAQRQRLTALVQRRRQLVDILIAERQRIRRAHPCAQASLSSSIDFMQAQIGGVEKELAEHIALHHADLAAALTSVRGVGPATVAALIGGLPELGVLCRRGIAALVGVAPLNRDSGQMRGHRAVWGGRADVRKALYMAALASVRHNPTMAAHYARMVAAGKRKKVALVAVMHKLLTILNAIAKSGRHWDDSMHQA

SEQ ID NO: 499333 - protein, 436 aa, unidentified
MDQVIIGVDPHKLSVTIEARDSREVLRSTGRFGTDTAGYRQLLRAARQWPQRVWAVEGANGIGRPVAQRLLADGERVLDVPAKLAARARVSGTGQGRKTDATDAHAIVMVALRDTGLRELSSDPELMVLRLLCDRRDEISRARAQALNRMHRLFLELVPGGAPVKKSTSQYKSLLARVRPRDLAGKTRRRMAAEELADLARYDAKLKTMKAELKATVQARGSRLMDIHGIGPAGAARILADVGDVARFPDRNHFASWTGTAPIDASSGEHTRHRLSRAGNRRLNHVLYMAGIVQLRNDTPGRAYYRRKVQQSKTSMEAMRCLRRRLSDVVYRQLVADAARTAALDQAGPGGHSGTTLKSSATDLTPDIGSSDQPFPGPAPSTLPPPPPARNPARPGTGAIPRRRAGGASVERPTGRTTLTPTSAGAHSKGLPDPPP

SEQ ID NO: 499334 - protein, 419 aa, unidentified
MSQSTLTKKLASVKPGTLFVGVDLALDRNVAVVMDERAKRLDRFRFDNSLEGYNYFHRRLRTVKEKHQAPAVLVGMEPTNYFWKLLATDLEARQVSYRLVNPYTVKKHREGDQLDRSKDDPRDAFVIADLLRTGKYTETRLLHGQYAELRQYVTLRERLLRDIRRQKTLVNNIAGQLFPELSREFKDLNGQTALALLSSHAATIVIQQLPLDTFINDVRSVFRGKRLMVSKLRRAHALAHNSVGLKDGVQALQLALDHYIETLVHLRRQLVQTEETLIEVFLALPEAKYMLSVPGLGAIAAATILSEIGDPSHYRQAKQLIKLAGIQPVPDASGRKSRSKTPMSHKGRPRLRTALFFAVMRLVQFDEAFARQYRHLQTRDKNPLCKMQALGVLMNKLLRILWALMRKHTLYVPDFQATI

SEQ ID NO: 499335 - protein, 340 aa, unidentified
MTAYAALDVSMDKTAICVIDAGGNILLEAVTISDPEAIAHCLAPYSAELELVGFEAGPLSEWLFRGLQDAGIEPVLMETRQVRAALSAMVMKTDRNDARGMAQLLRSGWFRPVHVKTIPAREQRTLLAARSTLMRRQKDIENSVRGLLKGFGLRLGRLLRGRWDDAVRDIVSGNATLASIMEPLLVVRQVLRAQLAVLDGQVRDIVRTDAVCRRLMTAPGVGAIVALTYRAAVDNPARFRSSKSVGPCFGLTPRKYQSGEIDRNGGISRAGDPAVRVALFEAAHVLMTRVAKWSKIKAWAMNIAKRRSAKRAKVALARKLGIILHRMWVDEADFRYGQPA

SEQ ID NO: 499336 - protein, 339 aa, unidentified
MRLYTGFDLHSTNSYVGIIDEDGKKVWKKKLRNDPNLILAALRKFKSDIAGVVVESTYNWYWVVDLLIEEGYQVHLANPSRIQQYSGLKHADDEHDAFWLAEMLRLKILPEGYIYPKEQRPLRDLLRKRGHFVKLRTSLITSLQNILARNIGKKMNTNHLKALTKDWVAPLLAGNDDLSLAGKVSKDAIDTFSRQINVIESVVEKKLALRKPYEFLMSMPGVGRVLALTIMMETGPIDRFPKVGNYVSYCRKVPAARYSNEKKKGAGNRKNGNKYLSWAYAEAAEFARRFDPKARSYYDRKSRRTNAPIAYNALANKLSRAAYYIMRDGVLFMPEKMFT

SEQ ID NO: 499337 - protein, 340 aa, unidentified
MSEVSTVGIDLAKSVFQVHGADASGGVVFRKKLRRDQVLPFFSTLPRCIVAMEACASAHYWARELAAVGHETRLISPAYVKPFVKRQKNDMADAEAICEAVQRPTMRFVQGKSAEAQASAVVFRTRDLLVRQRTQLINALRGHLNEFGYIVRQGVGHVGKLVEIVADPASDLPAVARPVLAVVAQGLQALQEQIALLDRENASRAKADAVAKRLMTIPGVGPVTATALVALAPAASTFRRGRDFAAWLGLVPRQHSSGGKERLGRTTKMGERSLRRLLILGASSATKVAARKPEKATAWLAGMLARKPRMLVTVAFANKMARIVWALMAHGGTYRAPAAA

SEQ ID NO: 499338 - protein, 316 aa, unidentified
MQERGVNVGVDVSKDRLDVHVEPSGERWSCEQTPEAHEALADRLAELKPQRIVLEATGGLESAVVAVLGARGLPVVVVNPRQVRDFAKAMGRLAKTDPIDAEGLALFGERVQPPLRPLPDAASAELDALVSRRRQLVEMLTMEKNHLHSARSPQVRASIQTIIAALQAQLSDVDRDLRQAVQDSPLWRAKADLLRSVPGVGKVLSTTLVADLPELGTLGPKALAALVGVAPLNRDSGKQRGKRSIWGGRAPVRSALYMGALVATKHNPILRVFYARLRARGKPAKVALVACMRKLLAILNAMIRDNQPWRPMATAA

SEQ ID NO: 499339 - protein, 411 aa, unidentified
MLKIVYPICCGMDVHKSFVVACIATTNDHGVTNYKSKRFSTFTGDLRRCADWLSENNCKDVCMESTGKYWIPIYNILEHTCNIVLAHPKYVKAIRGKKTDKRDAKWIADIFKHDLVSGSFIPPADIRQLRDLVRYHWKLTNFNVGEKNRAQNCLTVSNIKLDDVFSDVFGKAASAITTRLLESNEPFDVKPYLTKNIKKPIEQIQAAVDGEMCAEQAEKLRIIRSHMDSLELCKLNLESLILSTAEKYIPQLNLVMTAPGIQSFAAIGIISEIGVDMSVFPTSKHLCSWAGLTPQNNESAGKKKTTRISRAGAYIKPLLVQCALCAIRTKQFPEVRNRYLALKKRRGHKKAIIAIARMLLTAIYNILKKNEPYNAELYTRSNNPPTHRTVSVDEAIFILQRQGYLVTPATS

SEQ ID NO: 499340 - protein, 313 aa, unidentified
MIIALRYVGIDISKKHLDIFDEADGVPRRIANATQAITQQVARWQCDALVVFEATGIYDLALREALRQAGIQFARINPARARDFARASGLLAKTDPIDARMLAAFARAMQPAPEQVADPARGALARLAKRRDQLVLMRAQEKNRRSEADDRAMAERIGRLIEVLDSEIAEIEADISALIKAEAQIADDAKLMRSLPGVGPVACMQLIAQMPELGRVGPKQLAALAGLAPFNVDSGTFRGKRKIAGGRKRVRDALYMAALNAVRRADPFKAFYARLRQAGKPAKLALVAVARKLLTVLNAMMRDRKPYLQTKPT

SEQ ID NO: 499341 - protein, 441 aa, unidentified
MEKAVKFEEIHANGAGIDIGSREIFVSIDGEQVVKFGTFTSDYHLCCKYLKENGIASAAMEATGVYWMSLYAMLEQYGIKVCLVHPREVQQVKGRKTDVKDSQWIQKLYSAGILRESIVAEGLYKELRILSRERMDLVEMGSTYVNKMQKYLELMNIKLRNVISQIHGASGLRIIRAIIDGERDPQKLACLCHERIQKKKMEDVIKSLEGTYHQSYIMLLKENLRLWDEHQQSIRNVERQIAELLEKLNQNNRHIEVTSSSKPARHHNPQIKDLHKTMVQINGGVNLTSVAGINDSTMLRLAGEVGTDMSRFPTVKQFVSWLGLSPKNKQSGKMKKGLKCTSNNAGLIFRQSAQSLMNSKDSAIGVFIKRLKGRKGAPIAIKAGARKIAIAFYNALTMGIDYVEQGAKQYAVQLEQREMRLLQKLAVKHKLYLVDYNGVAM

SEQ ID NO: 499342 - protein, 343 aa, unidentified
MSEISTIGLDLAKNVFQVHAVDPLGGVVLRRQLRRGAVEKFFAQLAPCTVGMEACGSAHHWARVVGRYGHQVRLMPPAYVKPYVKRNKNDGRDAEAICEAVGRPTMRFVPVKSVEQQATLAVHGTRALLVRQRTMAANALRAALSEIGIVAAQGLKGLRELMATLEAPSGEIPEMMRGALLVLARHWQTLDADERALERQIAKAARADHEARRLMEVPGVGPIIASTVLAKVPDAKVFRSGRDFAAWIGLTGRDHGTGGKHRPGRISKQGDRILRALFISGASAHLRQQKARGVSDPWLRELLARRPYKVAMVAFAAKTARIIWAMLVKGEVYRDRASASAAA

SEQ ID NO: 499343 - protein, 361 aa, unidentified
MQSTTIIAFDQHAATTVAAVLLPQHRTPALHSLSSDIPTIQRFVARVKRQGAVSCCYEAGPCGFELQRALTARQIPCDVIAPALIPRRAGDRIKTDRRDAGQLAVLYRAGALTAIHIPSEEEEAARDLLRCREDIRADLLRARHRLSKFLLRHGRRFTATKKQWSKRHDAWLRAQTWSLCALDQTHRAYLRAVDEVVARLRDVEVQLHDLLTLEPLRPRVQRLRCFRGIDDLTALTIAAELGDPRRFASAPRLMAYVGLVPSERSSGTKRAQGGITKTGNAHLRRVLIESAWHYRHHPFVSAGLRTRQRGAPATVIAHAWTAQQRLHRRYARFAARGKRKQHIVTAVARELTGFVWGVLTQ

SEQ ID NO: 499344 - protein, 348 aa, unidentified
MPNYNQPHQFYAGVDLHARSMFVHVLSAKGKTVFERDLPAEPDAFLDAVRPFRKNLVVGCECMFAWYWLADLCEDQRIPFVLGHALAMKHIHGGKAKSDKIDASKLANMLRGGMFPLAYVYPRAKRQTRDLLRRRSFFVRQRAQLITHIVNTNSQFNLPPFAKKLSYAANRSEEIAERFPDPSTRLMIGADLRLIDAYDAQIATLERHLLQSAKVDDPVTFGFLRTIPGIGPILGLILLYEIDRISRFPEAGNFLSYSRLVRCAHESGGKVKGFGGKKIGNAHLKWAFSEAACLMLRTCLPVKSWMQRQEQKRGKRKALSVLEAKIGRTVYHLWNKQQAFDAKKFLHA

SEQ ID NO: 499345 - protein, 341 aa, unidentified
MSKVTIYVGLDYHKDSIQVCVMDPSGKILANRPSPNQAEALVKLVASFGDDVRAAIEACSGAANLADELATKHGWIINLAHPGYVARMKQTPDKTDWADARVIADLVRVGYLPRVWLAPEDVRQLRAVTRYRQQLANRRRNAKLRVSALLRETRVVESKDRRWGRAWMDWLRTTEGLGSEGRWVADRLIEEIQDIADAILVVEVRLTRITAEDPVVSQLVLLAGVGLVTAWYLRAEVGRFDRFTTGKQLARYCGLSPRNASSGQRQADAGLIKAGNEHLRATIIEAAHRLIRCDPRWKALAGSMRRAGKPACVVAAAVGNRWVRWLFHQVEGGPITLKKVA

SEQ ID NO: 499346 - protein, 368 aa, unidentified
MEEVRAFVGLDVHKETISVAVADAGRAGEVRHIGTIENSPTAIGKLARGLVRRHGALEFVYEAGSCGYNVQRQLAAMGITCRVCAPSLTPRKPGERIKNDRRDAIALARLHRAGELTYVWVPDAMHEALRDLVRARHAACQDVRRDRIRIQAFLLRCDLRFEGKPWSTRHRKWLCNRQFAHPAQQIAFQTYLNALEHDEARKAEVEGQIREMLAASPWARQMQALQALKGVGPVVAATIIAEVGDFSRFAHPRQLVAYFGLAPGEHSSGGTVRPRGITKAGSSIARTVLCEAAWNYRTTPKVGQWMKERCPPVPQDIHALAWKAQLRLHKTYKKLTARGKRSVVATAAVARELLGFVWSIGQRVPLGA

SEQ ID NO: 499347 - protein, 406 aa, unidentified
MNQYFAGFDWASRTHAVCVVDQQGGAVDRFEVNHDAAGLAELRRRLKRFGSDGPVPIAIERPSGLIVDALVEAGHPVFPIHPNAVKAMRPRYRSHGAKSDASDAYLLADALRTDGHRFRALAPQSDAIRALRALVRGRDDLVATRVELANQLRSLLESFWPGAVAIFADIDSPIALAFVQRYPTPQCAARLGERRLAAFLAQHSYCGRRPAAELLERLRAAPQGLAAELEADAKGEIVRSLATVLERLVQQISSITSRIEHEVAQLDDGRVIMSFPRAGRICAAQILAELGDVRERFPSDALLAAEAGVAPLTYESGKTRAVTFRWACNHRLRQAVTCMADNSRHDSPWAAHVYANARARGCDHPHAVRILGRAWLRVLWRAWTDRNPYDPALHRALKSLPPVPTG

SEQ ID NO: 499348 - protein, 418 aa, unidentified
MRNSWTPYKFTFGGTRMYNAVGIDVSKGKSTVAVLQPAGVIIRKPFNINHTSSELDELAKYIGSLEGETRVVLECTGRYHEPVVKTLSEAGLFVSAVNPHLIKNFGNNSIRKVKSDPADAKKIARYTLDNWIELRQYSSMDNTRTQLKTLNSQFSFFMKQKVAAKANLIALLDNTYPGVNKLFNSPVRDDGSEKWVDYAYSFWHVDCVRKIGLKTFTERYQAFCKKHHYNFQPAKPAELFLASKDLIAVFPKEASYKLLIQQSIQQLNLASSHVEELRSKMNELASTLPEYATVMGMYGVGKTFGPQLIAEIGDISNFSHREALTAFAGVDPGVDQSGTHNSKSNKASKCGSNHLRKTLFQIMSTLLQTAPEDDKVYQFLVKKRAEGKPYYVYMTAGANKFLRIYYGKVKECIRNLEQ

SEQ ID NO: 499349 - protein, 376 aa, unidentified
MMIATTRPEMSVNEPRLYVACELGKKEWKLAMTSGFGVAPWLRTVASRDWGGVERALAQGRARFGLPAAAPVVSCYEAGRDGFWIHRALLQRGIRNRVVDSASIEVNRRARRTKTDRLDALKLVMMLVRVCWGERRVWSEVHVPSVAAEAARQVSRERTALTQEQTRLSNQVKGWLATWGAALPRHRPSGWWTVVRDWAGAALPVEVQARLARAEARRAVLEGQIAALEDQQQAAVTAAAPASALRQLVRLKGIATTSASVLLDEGLEWRAFRNRRQIGGLLGFAPTPYDSGESAREQGISRAGNARLQAISIQLAWNWVRWQPHSALTQWYQANFGKGKRARRIGIVAVARKLVIALWRYVTIGVVPERAILKVA

SEQ ID NO: 499350 - protein, 326 aa, unidentified
MKTFLGVYVSKAKLDVALLLSTNKFRSKAFANDVQGFNSLVQWLQATAPGGFQAVHVCMEATGSYHEALACLLHDQGVRVSVVNPLLVKRFAESNRQRNKTDGEDAKCLAMFCQSHTPDPWEAPSLGVRALQALVARLDALQVMRQAECNRLSVAHASVQTSVRSVITDLDKAIAQIKAQIARTIDDDPDLKLRAGLLQSVPGLGEKTIPPLLAYIGRPERFKSVKSLIAYASLTPMIRQSGTSLDKRRGTHPLGHQDLKRLLYFPALVAGRYNPLVAVFWARLKAQNKPGKVIVVACMHKLLAIAYGVLRSGKPFDVNHKGSVKT

SEQ ID NO: 499351 - protein, 411 aa, unidentified
METTYQVVGIDVHKSMLAVVVADAAAEGEFQFERRKFGTTESELRRLAQWLTERNAREAVMESTALYWRPVWQQLEGQCDLYLAQAQSNRAPRGRKRDFADAERLLRRHVAGELILSFVPGPEQRLWRTMTRAKHQLTRDRVRIHNQLESLLEDGRIKLSGCVSDLLGLSSRRMLKALAEGERDAARLASLADPKLRATPEQLQDALYAAPTLSTLHRQILGLFLSRLELIEHQIEVLDKSVGQALLAHQDAVLRLAEVPGYGVDSAQQVIAEVGPAAATFPSPEQLSSWVGTCPGREESAEISKNNRSPKGNRMMRRVLNQVAHAAVKTKGSVFQALYRRLVIRLGHNKAIWAIAHRLCRLTWKILHQGVRYLELGTRSNSKTTKARANKLIRELRSLGYQVQLSQMPTP

SEQ ID NO: 499352 - protein, 350 aa, unidentified
MTSMTSTRAVVTVGVDTHSDTHHAAVIDEVGRPLADASFPTTPAGYRRMLAWAQEHGDVRSFGVEGTGAYGAGLARHLRAAGQTVIEVDRPDRKTRRMQGKSDPIDAYAAAAAVLSGTASGIPKTRDGLVEAIRTLRVARRSAIKARTQAINQLKAVLLTGPADLRQALTGQSSRELLATCRRLRSSERPTDAADPVIAAAKLTLRRLARRIAALTEEIDELDAELRPLVTQASPALMEVYGVGTHVAGQLLVTAGDNPGRLHSEAAFAQLCGTAPLPASSGRTTRHRLNRAGDRHANNALHTIALVRLSSHPPTQAYAARRRAEGLSNLEILRCLKRYIAREIHHVLVA

SEQ ID NO: 499353 - protein, 331 aa, unidentified
MNSTHSGPQTPPHTVLGVDISKACFDAVLLLDSGQRRASRFDNNPTGFGQLQRWLEAMHVGSVHVGLEATGRYGLALACWLHEHHHWTSVLNPYRVKAYGTASGKRNKTDRADAELIAEFVQSQRPPAWQPPSQEQARLQALVRRLEDVQRLLHAEKNRLTQAAPAVAGSIQRLVRLLTAEVQTLLKHIRQCLDQDSMLQRQSRLLCSIPGVAWLSAARVLAELPPPQQLRQARRAAALAGLHPRRHESGSSVRQASRLSKQGRRPLRAALYMPALVARWRNPLLKAFADRLATKGKSKKAVICAVMRKLLHIIFGILKHEKPFDPNYATA

SEQ ID NO: 499354 - protein, 387 aa, unidentified
MTSRVRPHDGPHTLNVVFTRIQLGPKEAVMRIIGCDLHTRQQTIAMFDTETKEVTEITLNHQGDAVRQFYGALPRPVQVGIEATGAMFWFLQLLQELDIPCLVGHPAAIRKAETRKQKHDRRDAALLLRLQVEKRFPTIWMPSAEQRDLRHLLLHRHQLVSMRSRVQHALQSLALSHGLRLGPRLWNRSGVQALSSLPLAPHTTRRRNTLQRLQQHLDQHVLQLDQRVAQQASQRPASRLLMTHPGVGPVTALATEVFLGDAQRFPCGKALASYVGMIPGEHSSGGRRQRLGALSKQGNPFLRFLWVEATLHAVKKDAALRRFYRRKLLQKGLGKARVAAARKLGIRLWIMLREHIDYTEFCRRGQQRKSGGAYAEMPAKDFGPVSA

SEQ ID NO: 499355 - protein, 410 aa, unidentified
MDMLYPHCAGLDVHKDSVVACVRHAGPGGRPREEVRTFGTTTSNLLALGDWLAAEGVTHAAMESTGVYWKPVWNLLEGRLALMLVNAHHVKQVPGRKTDVKDCQWIAQLLQHGLLKPSFVPGRPQRELRDLTRQRAQLVADRARVSNRIQKVLEDANVKLGSVASDVLGASGRDMLRALIEGNADPAAMAELARFRMRKKIPQLREALSGKVTDHHRFMLRQLLGQVEHLDRQVAVFDARVEEVMSPLEKEAVRKLDELPGVEARSAQVIVAEVGTDMARFPSDAHLASWAGLCPGNNESAGRRRTGKTNRGNPWLRATLCQCALAAGRKKGSYYSAQYRRIAARRGRKRAAIAVAHSQLVTVYHLLGGEGAYRDLGAEHFDRLRPGRLKHSLVSRLQNMGYKVTLEPAA

SEQ ID NO: 499356 - protein, 325 aa, unidentified
MTSLPNSTSKPIAVGIDVAKHTIEVALGVQNPTLSLSNDADGVDALLARLHTQPITVVVMEATGGYESALACALQAAGYGVAVINPRQARDFARALGQLAKTDRIDAHILAQLGEVIERHPERDKFVKPLPTAEQQRLAALVARRRQLVGMLVAERNRLPQAHANTRRSLQTIIQALTQELARIDDAMAEYIQAHFAELSQLLDSVKGVGPTTISTLIAEVPELGQLSRREIGALIGVVPLNRDSGQMRGQRTIFGGRARVRHVLYMAALAAKRYNPVIKVFYARLLAAGKPKKVALVACMRKLLTILNAMVKAGKPWDPSLHQT

SEQ ID NO: 499357 - protein, 338 aa, unidentified
MTVVMGLDQHRAQITAEWLDTETGEVSRARVMPADRDGVRRFLSRFAGQQLEVALEATTGWRFVVEEVVAVGAEAHLAEPAETSALRGNKQRAKTDRADARHLRELLMAGRLPESYIAPEHLLDLRARVRLRHSLVDQRGEWQQRIHAVLYHHGHPARDGLLRSANRAWLERIVLPDTAREQVTVALAMIDALDTQEAPITAELRRYARRQPGCRALMGLYGVGELTAVAILAELGDPRRFSSSRQAVRYAGLDITVHQSDRRRAPGHLSRQGPPALRWALYEAAQAARRPGSPDRAYYDQAAERLGGNRACLALARKLLKRSYHVLRELGDQALAPA

SEQ ID NO: 499358 - protein, 356 aa, unidentified
MNSIAVVSMDIHKRFSKAVAMSAEGEIVEEGRIAHGDHRLMQAYFSRFAPGTPVVMEATFNWPWVADLAEDSGLDPHLAHPPRLREYAKGLAKTDRKDAIFQGKLWLAKEVFPESYRAPAAVRQMRALFRLRLLWVRMRTMMKNNVHGQLLKLGLVLSQEATDLFSLKGRQVLAGLELKDEDRAELERKLSVIDSLSEHIQELDGEINAVLKQDEHAAILMSLPGIGQQIAYAILAEVGEFSRFPNGRALASYAGLLPVPRQSGGRERERRTTSGCNRFLKWAFLEAVSGATRSSRHFKSLHARVRARNRQRPGKARVAVARELAELAHLLVTRDVRYEERPMMPKHKQRTQSQTR

SEQ ID NO: 499359 - protein, 430 aa, unidentified
MDEANRNRLEEFRQLRKEIRHSEEYLIVGMDIAKDRHYAFFGTAMGKTLLKRIVFSNDHEGFRRLLDQTEALRVQHGLKKVVYGMEPTANYHKPLGEYLINLGRTVVLVSGVTVARNRESLDGRWDKHDGKDSANVADLISQGKCLYYEHPLAELRGLRGLLSLKRRLKKQEHGYRVRIRNHLIAQYYPEMDRDYERLGAEGLSIVRWCLAASEIAQLDVGPFIERVTSRRITMEKRRRLEEIWEKAAGSIGCEEVPGVDHEAKMMVEGLRQIREMIKETEQKIEELCKAFPEYEYLLTIPGFGPDVSAKVLGAVGDPDRFQNGKQVLKMGGLDLSADRSGKDSDKAIPQISKRGKADLRYALYQAALIASLKNRDVMIYYTNKIRGREREKGIHTKMRVKLAAKLLVIAWTLMRKKEPFNPAYLKAELN

SEQ ID NO: 499360 - protein, 388 aa, unidentified
MIYLGIDIAKLNHFASALSSDGEILIEPFQFSNDNDGFHLLLSKLEGLDKDSIIIGLESTAHYGNNLVRYLVAKNYKVCVLNPLQTSSMRKNNIRKTKTDKVDTFIICKTLMMQDSFRFVSYYDLDLMDLKSLGRFRQKTIKQRTRLKIQLTAYVDEVFPELQYFFKSGLHQKTVYALLKEAPTPEAIASMHMTHLAHLLKSHSHGHFDKEMAQQLRVLAQKSVGANDSALSIQITHTISQIELLNDQLKKIENEMTEIMKFNDSVIMTIPGIGYVNGGMILGEIGDIHRFSNPNKLLAYAGLDPSVYQSGNFQAKKTRMSKRGSKTLRYALINAAHNVVKNNPTFRAYYDAKRAEGRAHYNALGHCAGKLVRVIWKMLSDEVEFNLE

SEQ ID NO: 499361 - protein, 452 aa, unidentified
MRRSNFAGVDWASEKHDVLIADEAGEELLAATFAHDEAGLRALCRTLVRYEVALVAIERPDGLLVERLLDAGLRVLALHPNQVAAARPRFRASGGKSDRFDSFVLCELARTDSHRFRVLEPDSDLTKALRALCRGREDLVQTRVALANQLRGELERFWSGPIGLFKELDSPISLAFLKRYPSPIEARTLGEKRIAAFLASQHYSGRKQPCQLLTKLRSAPEGRAGSAELATRRALVLALVAALEPLVTQIKALERQIATAVREHPDGEIFLSLFRDPKSVITAAELLGEIGDCRGRYPTADALAGDAGQAAVAIESGKRKVACFRWACNKRLRDAFCTLADSTRHWHPWAADHYARALARGHDHQRAIRTLGRAWCRVVWRCWQDRTPYDPARHHGLQQHVLVTIPTSSGSLPDTAATQRMLGAAVTRQGGPQGPSATRLTASQHPLIHSGG

SEQ ID NO: 499362 - protein, 410 aa, unidentified
MIGLDVSRSVAEIAYLENGLLRAGGRVGLRRDELERFAAKLKPDDHVVLEATGNTIAIAKVLTSHVGRVIVANPLQVRLIAEARVKTDKIDASILAQLYASGFLPEVWIPDEATQAMRRQVSRRAQIVRQRTRLKNEIHAVLAAHLIERCPATDLFGKKGRAWLSLQPLPTDERIGIDQRLHELDRLAENLQEIERVLAQSAIQDDRLRKLLTITGINTTVAIGLLSAIGDVARFRSPEKLVSYFGLNPSVYQSGLQPAKHGHISKRGRSYARAMLVEAAWAAAQTAGPVRAFFLRVRERRGQQIAAVATARKLAIIVWRVLTHNEAFAWDRPALTARKTRELELQAGMPAARRGSRKGSVAAYNLKSVRDLERAVGEQAEQAYQRLFSRWKQARPQGAVRAPWPPIRTP

SEQ ID NO: 499363 - protein, 482 aa, unidentified
MKKNNIYQNQSQQLLSLFEQAGNNAKVMCVPIDYAKKDHVVMFCNGYGDILRKPFSVKNSPQGVDYLTDQVMRSCRQRGISQKHVFFGGEQVGAFADNFVSTLRSRGWVVAGVNAYEAKTQRENLQASTDRLDLMGIAKSLLNRRANCAPAQSGIYLNMRTLVRHRRKLVEITTEVKNRIHSVVDRLFPGFLNESKSGITPFSKSSLWLMKERFSAPQIRRRRRTSLIEALRQRGTKKPEDTADRLQQYASQVLNPPQDHVHMLQLSLAQHVKHFCCLQEGIDQLETEIALNLAQTQGAFLTSVRGIGIVLAAGVSAEIGNPFEQKPLNNLVSYSGIIPRVKQTGGPQGKTKTGKVARRCNRILKDYVVRSASHLGLYGPTDLKSDYQRRQAAEQHADFGMARRYLRMAMCLMRTSQIYLPSRLRKADSHIQDRADYYVMSWPQLRDKWQKSGALQTAFNADQPLGQWRKIVQQFYGIKLTL

SEQ ID NO: 499364 - protein, 345 aa, unidentified
MENMYYIGLDVHKKTISYCVKDGGGRIYAEAEIPATRLGLDMWMKTLPQPWTAAMEATIFTAWIYDHIKPHAVAVKVAHPLMLRAIAAAKKKNDHIDAHKIADCLRCDFLPECYMASTEIRERRRTLRYRNLLVRQAVQMKNKIAVLLMEAGVSYNKQKLHKVGYFRELLATNPDIDEGLKPLLRLCRETVVRLGKTESALVRSLQRDSLLMERVERLMTIPAVGPITALTWALEVGDVQRFSSIKKAISYCGLCGAENSSANIIKRTPLSKQRNKHLQTTLIEAAKMAPRNSPELAMIYDREKQKGNANRATLAVARKLVAYLVAVDRRQKDFLIVERENRTAA

SEQ ID NO: 499365 - protein, 428 aa, unidentified
MTNRLKVGLDICQERNDVCIQDSDGEILVAHRPFPNNWPGYQELRQSLLATLEAHSCQGIDLAGEATGPFWFHTFRLLAQDSLLADRDLHLYLFNPKLVHGFRQALPPEDKDDIKDPQLVADYLRFSHPQHPWSCQSKYLALQRLTRHHCHLAHTLAREKTYFLSLLYLKASEYSHLKPFSDLFGKTSTTILQNYATIGELAAIPLDELTELLDRLGKRRFPDPADNARKLLRVAQDSYPMPLELLVPINFALHQLLEEIACLEKLLAASHQNLAAALQDFPTAQALQAWNGLGPVCTGGIIAEIQDPQRFVAGRKYDRQSHTMRPKTLWDGQAAVAKFAGLWWPQKQSGNFAAEERHLCTQGNVYLRYYLIEGANSLRRHTAEYAAYYERKYAESSKHHHWRALVLTARKLIRPVFMLLMKPLTDWH

SEQ ID NO: 499366 - protein, 379 aa, unidentified
MEQVITFVGLDTHKETITAALAVGGRDGEVRSLGRIANRPAAIERLARDLAQRYGRLRFSYEAGPCGYGLYRQLHRLGHECIVAAPALIPRRPGDRIKTDRRDSLKLARQDRAGELTAVWVPDVEDEAMRDLVRARAAAVAAVTRVRQQLQGLLLRNGVVYEGQTRWTRRHRSWLAGLRFEPPAQQIVLDEYRRAHAEAEARRDRLTAALERLMAGWKRAPLVGALQAMRGVALVTAATLVAEIGDFRRFSHPRQLMAYLGQVPSENSSGPRVRRGGITKAGNGRVRRVLTEAAWTYLAKPRRSVALEQRRGGLPPAVRAIADKAETRLATRFRHLLAAGKQRPLAVTAVAREMIGFLWAIAHAIEPATGNSPLDASAA

SEQ ID NO: 499367 - protein, 409 aa, unidentified
MDQLIERCCGLDVHRDTVVACVRGPGPNGRRQHEVRTFGTTAVELLALRDWLEAHAVTDVAMESTGVYWKPVFYVLEEAFTCLLVNAAHIKQVPGRKTDVKDCMWIAQCLEHGLLRGSFVPPAPIRELRDLTRHRKVLIQERTRAANRLHKLLEDAGIKLASVATNILGVSGRAMLAALVHGTTDPAVLADLARGKLRKKLPALRQALAGRFRPHHAFLVSQLLAHVDYLDEAITTMSEEVEGRLAPFAAQLTQLDTIPGINTRTAEVIIAELGVDMSCFPSDRHLAGWAGICPGNNESAGKHQSGKTRKGNRWLRMTLIEAAGAAIRTKDSALGARYRRVMRHRGHKKAVVAVAHAMLRAVYHLLAEGTTYREPGADYYDRHHTHRVTRRAIQLLERQGYRVVLEPAA

SEQ ID NO: 499368 - protein, 408 aa, unidentified
MLEVKVERCAGIDVHKKFVMVCVMIGLAHQKPETEVRRFGTSVPELERLRAWLMEKGCTEVVMESTGSYWKPVFNILEGSVQVNLANAEKVKALRGKKTDPMDCRWLASLLRHGLVRPSFIPPRDIRELRDLTRRRRTLMREGASERNRVQKILEDANVKIGNVLTDVFGMSGQAMLEALLENKLSAEEMANLAQGRLRRKIPQIVEALEGHAMSDHHRLLLRQILKHMAFIEDMVEELDKEIWEKLRPYERQIELACSIPGIGRDAAASILAETGMDMSDDGPFGSCHHLASWSGICPGNNESGGKRKSGRTRKANRWLRATLAQTAWAGIAKKDSAFRSRYFRLKPRRGPQRAATAVGHAQLIAVYWVLRNAEPYQEQVRTMDDHRRAAIIRHHLKRLNDLGYKPA

SEQ ID NO: 499369 - protein, 358 aa, unidentified
MDYYAGIDVSLELASVCIVDANGKIVKETKVESCPDALVAFFNDLRLPMAQIGLEAGTLSQWLHAGLKQAGFETVLLETRHVKAALSAMTVKTDRKDARGIAQLLRMGWFRPVHPKSVRSQEVRALLVARKLLQNKLKDLELSIRGILRGFGLKVGEVTRKKFESRIRQLVTGHAMLERIADAMLSARAGLLIQFNKLDKSVRQIARYDKVCLQLMTVPSVGPLTAITYKSAIDDPQRIKKSKSAGPLFGLTPRKYQSGETDVTGGITRVGDEMVRTALYEAANSLLSPKTRFSALKRWGLEVAQRRGLKRAKVAVARKLAVILHRMWVDGTPFRWSKADGAHTDPSRAKTSGSGSCR

SEQ ID NO: 499370 - protein, 387 aa, unidentified
MSPTIAACRPAAVDYERTLILSIEVSNQSWVLAAQVPGLPHTKAKRTVDPEAEALMAAIAGYRSRAAAMGRSIGRVIAVYEAGWSGFWLARWLTRHNVEVYVIQPSSVPVDRRMRRAKSDGIDAELLLRTLLAWLRGEPRVCSMVPVPDEADEDARRCIRERTELISERVGLTNRIGAVLATLGVTDYNPLLRNRHHRLAELRTGLGEPLPPNAHAKIARLLARLELVLAQIAELERERDAVVETETPDHASKMIQQLISLRGIGVQSATVLVREAFVRRFANGKALGSYAGLTSSPYSSGGIDREQGIGKGGNRRLRTVMVELAWLWTRYQPAAAQVCWFRERVGSTGRRVRKIMVVALARKLLIALWRFVIDGVVPEGAVLKPAA

SEQ ID NO: 499371 - protein, 339 aa, unidentified
MYAATIGLDIAKNVFQVYGANAAGDPLFNRRVSRAAILDFFSKLPPCVVAMESCSTAHYWGRSISALGHQVRLIHPAYVKPFVNRDKTDANDAEAIHEALFRRSMRFVPLKSTSHQASTMLFKTRALLVRQRVRAVNALRAHIAELGIVARPGTSNVSSLISIVRDRQSKSLPPSAITALKIIARQIDTLTKDIESLEKTLKGQAKEDDEMRRLMTIPGLGPMTATAIKAFVPDIGVFKSARHFASWTGLTPKSFSSGESITIGGITKMGNADLRSLLVTGAMSVIRNTKTDDNKSWTASLKRRRPFKVAAIALANKNARTIWAILTKGGSYETAPTRA

SEQ ID NO: 499372 - protein, 457 aa, unidentified
MARKRKHGTKSPPGPLMIHPDAAGIDIGATEIFVAVPTARDENPVRSFPTFTQDLNGLADWLHCCGIKTVAMESTGVYWIPLFQILEARGFEVCLVNAHHAKNVPGRRTDVSDCQWLQYLHSVGLLRASFRPAQEICAVRTLLRHREGLVQMASGQVQHMQKALDQMNLQIHHVLSDITGVTGLAIVDAILDGERDPLVLAKLRDWRVRASEEIVAKSLVGDYRREHLFTLRQSLVAYRQCQQLIAECDQEIQGGLETLPSKTDVMQAPLPPAKPATKKRKAGAPDYDLRAQHYRILGVDLTQVPGISSLIVHTVLTEVGPDFSKFRSASAFASWLGLCPDNDISGGKVLWVGTRKVNNRAAKAFRLAAYTLHHSHSALGDHYRRMRAKLGSPQAITATAHKLARITHHLITTGQAYDESAFAKDEARYKKRAEVRLKAQARALGFQLVPAENGLVP

SEQ ID NO: 499373 - protein, 409 aa, unidentified
MERVIERCAGLDVHKDTVAACVRVPGPGRRREQEIKTFGTTTGDLLALRDWLEAHGVTHVAMESTGVYWKPVFYILEEAFTCLLVNAAHIKQVPGRKTDVQDCAWIAQLLECGLLRGSFVPPAPIRELRDLTRYRKVLIQERTREANRLHKVLQDAGVKLASVATDILGVSGRAMLEALVQGTTDPAVLAELARGKLRAKLPALRAALAGRFRAHHAFLVSQLLAHLDYLEEAIQTLSARIEEVIAPFAAEVARLDTIHGVNRHTAEVLIAELGVDMAVFPSDRHAASWVGLCPGNHESAGKHRSGKTRKGNRWLRMALTEAALGAIRTKNSALAARYRRLVRHRGHKKAVIAVAHAILRTAYHLLARQTAYQDLGTDYFDRRHAERVRRRAVALLERQGYRVALERAA

SEQ ID NO: 499374 - protein, 413 aa, unidentified
MDHATPLSVPDPTGISGDCATLFVSLELSRSTWVATSLALGSRKMSKHTLVGGDARKLLDLLGRLKSRAEQRMAAPVKIVAIQEVGLDGFWIHRLLEANGVESHVVDPASIAVPRRHRRAKTDAIDGETLLRTLMAWQRGEPRVCAMTVPPSPSEEDRRRVSRERAMLLRERIRHTNRIRGLLFGQGISNYNPLHKNRREDLEELRTGDDRPVPAHLKAEILREIDRLELVLRQITEVEAERDKILRSAPANSPAELLMQLKGIGPEFAGVLYLEGLFRHFENRWQLAVYAGLAPSPWKSGSVDHEQGISKAAYHNDRTCLDVGEMPARQCSQLLVPPVRWLRARADPPHLDRSTRPQAAHCPLEIYQPWRDPGGCYREASLRHPGRRKHYRVPRGLISPVGSGRADRHRQWL

SEQ ID NO: 499375 - protein, 391 aa, unidentified
MVCVGIDVAKDKHDCCILDSDGMVRADCFTIPNNMDGFKQLLQTIRNCTQKSDKIKVGLEATGHYSYNILGFLLDKDLAVYVMNPLHTNLYRKSLSLRKTKTDRVDARTIATMLLSDVDLKSYTDTAYHNEELKSLTRYRFDKVQECAKLKQSVSRLATILFPELEGLVSSIHGTSIYALLGEYPGAKQISEVHLTKLTNLLTTASKGRYGKEKAIQIREAARASIGSVMPAKSLELKHTIKLIQELASEINEIEDSIQKIIDELNPPILSIPGMGVNSAAVILAEIGDFSNFSSPDKILAYAGCSPSTYQSGKLTNCYAHMEKRGSRYLRHALYNATKYVCYWNPVFAEYLAKKRAEGKHYNVALSHAMKKLVRLIYALQKSGKAYLAAA

SEQ ID NO: 499376 - protein, 347 aa, unidentified
MTIVENHTQITGGVDTHLDFHVAAAVDANGGVLGVETFATRGAGYAQLVTWLQRFGPIERVGVEGTGSYGTGLTRHLRSEGIAVVEVDRPNRQARRRHGKSDTVDAIAAARAALTRTATGQAKHRDGNVEAIRVLMVARRSAVDERIAILNQIRHLIVCAPDPIRQRFHGLPSAALLNQTSSLRPRDHGDVVDYTTLITLRELGRRAKNLHDENLRLNKLLRPLIRQTAPGLLDVYGVGYDTAAKLLVAAGDNPERLRSEAAWAHMCGVAPIEASSGKTQRHRLNRGGNRQANSAIYHIMLTRLRYDQRTRDYLARRSSEGKTTGEICRMLRRYIAREIYKQLPRPT

SEQ ID NO: 499377 - protein, 400 aa, unidentified
MISVGIDISKGKSTVCIMKPYGEVIRTPYEIKHTEKDLSDLADIILDFDEESRVTLEATGAYHLPVLSYLKQKGIFVAVINPLMMKKYSSLTLRKGKTDKIDSIKISNYGIDNWFHLNDYCVSDVLYDELNTLCRQYNQYVAIKIKCKVNLANLLDKTMPGITNLLRNNDYIGKYKLNSFVKEYWHYDNITKKSENQFIQSYLKWAKREGYHANEAKAKSIYTLAKESITTLSSQMKSTKMLVIEATRVFKEVEKTIRMILLQMQELAKKLDEYNVVRAMPGVGDVLAPRLIGSIGDIRRFHNGKALIAYAGIDAPPFESGNFKGTRQKISKRGSAYLRKTGYEIMTSLNAIKPIEDSVVYDYMLKKESEGKAKKVAKIAGLNKFLRIYYARVKEVYSKV

SEQ ID NO: 499378 - protein, 429 aa, unidentified
MKKRNFKKKQESVTFKTLVVGIDIAKHNQWARFVDCRGIEHGKALKFENNKNGFHTILTRIYEMCKEEGFNNVIVGMEPTGHYWKALANFLLKQAKITVVLVNPYHTKKSKELDDNSQTKSDKKDALVIAKLVKDGRYFETYLPHDVYAELRGLTTTRISLNKRKKSIKNTITAVLDEYFPELTKVFKHPFSGKASMQVLRVCPIPKRILELGEDGVLTEIKKAVKKTVGRKKAHQLVETAKESIGVDYGENAALFKIRQLMEELDLVIRQLDELEKEMESALRETGLSEYLLSIPGAGVVSMASCLGELGNPLRFEDARQMSRMAGYNLIEDSSGTNKSGTCISKRGRKNLRCVLYQMSLTMVATNREMKELYNYLKTRKDNPLKKVQALVVIGKKILTLIFTLSTKKECYNLEKVFGEVRKSQLKAA

SEQ ID NO: 499379 - protein, 411 aa, unidentified
MAVVNVGIDWGTKVLAVCAVDEEGKRLFEEEITRSGDAIERMVRRVLAEAEGDPSQVFVALELPRASVIEAFLARGAHVFSINPKQVDRFRDRHTVAGAKDDALDAYVLADALRTDRKLFRALEPEEEALVILRERSRACDDLTRQVKATASQIQAVLQRYYPELAGLGRWHEEPWLWALFELAPTPQKLRKLHPKKVERHLEKSRIQRKGVHQSLQRARETKPLPTSKAVTKACAERIQRLLPILRAAHHERRQCQSDLRQLVHELASVEEDDEPSDMAILLSFPGIGYRVAAVLRAEAWMAIGDRDSQALRRLSGTAPVSKRSGGRSKRPQVSMRRACHTRISNAVRYWASVAIQHDDRAAALYQACRARGHNYSRALRTVADRLLPVLIAALRNRTLYRPQLRRHSVA

SEQ ID NO: 499380 - protein, 378 aa, unidentified
MSTVIYIGIDVHKDTYTLSSFLFSTNRVFGQSTIANSSNLVKKYVEKIQKEYPGSDVLCGYEAGPTGYGLYRDLERYGIPCVIMAPTTLPKASGDRVKNDRLDAQLLSKQLAFGTYSAVYVPTTKDEAVKNFTRLRNTRKIALKKAKQNLLAFLLLVGDCYPDGSYWTLKHYAWLRRQVFGDQVDQQTFNEYLQEVIDQQEKVNRYDEKIEEMAAQDGYREQVARLRCFRGIETHTALSLVTEIGDFSRFAQAPQFSAFLGLVPSEDSSGKRERRGAITKAGNSRLRLLLIEAANSTLRSRTYGKKSKRLLARQKGQDPDVIAYADRANRRLHKVQDRLISRGVVPNKAKVAAARELSCFIWGMMTGNIEGRTAQAAR

SEQ ID NO: 499381 - protein, 435 aa, unidentified
MEQVIIGVDPHKLSATIEVVDKRERLLGSGRFPTDKTGYAAMRSYVKEWPNRVWAVEGANGAGRPLAQRLVEAGQHVVDVPAKLAARVRLFDTGHNRKTDALDAHSIAIVAVRTKGLRVLAADGELEALRMLTDRRDELAHLRVQTVNRLQRLLSELFPGQRKKDLSALQAKAMLSTVRPRDIAGKTRRRMAAEELADLVVVDAKLKKIKAELKAMVIARGSTLLQIHGIGPYGAARTLADVGDITRFADRNRFASWTGTAPLDASSGEQIRHRLSRAGNRRMNHVLHMAAIVQLRHDTQGRAYFRRKVAAGKTRMEALRALKRRLSDVLYRRLVADAQTIESALEQAGPGGHFGATQESSAVDLSPNVDTSDKPLPGPATSEVTPAATDGPGPSSAPFPTPCPSADPQPRSSAFCLTVARTGAPSTGGNWPLLT

SEQ ID NO: 499382 - protein, 346 aa, unidentified
MNFYKGQHKFYCGIDLHARKMYLCILDEKGDVKLHRNMDTDREAFLEAIAPYREDVVVAVECMFAWYWIADLCQKEGISFVLGHALYMKAIHGGKAKNDKIDSQKIAVLLRGGMIPQSYVYPEKMRATRDLMRRRNHLMRKRAELLAHIQNTNSQYNLDETFGCIAVPSKRGNIVGSFNDPSVKKSMEVNLKVIETYDAALDDLKKTILKLAQYHDPVSYALLDSIYGIGKIGALTLLYEIEDIRRFPRVQDFVSYARLVKCAHESNGKKYGNGGSKIGNAHLKWAFSEAAVLFLRGNEPGKKYYERLTRKHGKGKALSILAHKLGRAVYFILKNKEAFDMQKFLR

SEQ ID NO: 499383 - protein, 359 aa, unidentified
MSEVTRGFIARVGVDLAKRVIQVHAVDATGQVVVAKALPRDGFMPWCAQLPPGTLIAMEACSGAHHWTCKLRALGLDARMMAAHFVTPYRMQGKGGKNDANDAAAVCEAASRPSMRFVPLKTPAQQAMLAIHRLREGYKEERTACINRIRGLLTEFGLVFAQRPEVLRRDLSDVLEDATNELPALLRMALRQARLHWLELECHMAWCDERIEAHVRTDEQAKAAAQLCGVGPVTASALVAMVGDFKQFRSGNQFGAWLGLVPRQNSSGGKATLGQITKRGDDYLRTLLIQGAKAAMVHAKKRSDRISLWLVSLIDRIGRQKAVVAMANKNARILWAVLTKGTAYDPNHVSINPGLPTTV

SEQ ID NO: 499384 - protein, 347 aa, unidentified
MRFYNNQHNYYCGIDLHARLLYVCILDSLGNKVLHKKIDADPDALLELITPYQDNIIIGVECMHCWYWVSDLCLDYAFDFVLGHALYMKAIHGGKTKNDRIDSFKIASLLRGGHFPIAYVYPRAMRATRDLLRRRTKIMRHGADLKAHVANTFSQYNQQSHNVQLRYPCAREQVRNQFDEPSINRSIDMDLNVIAFYTKELASVEHIIEKTAKQHSAQDYTLIQTVPGIGRILALTILYEIGNIERFPSVQNFASYSRLVKCKAESAGKQKGTNGNKIGNAYLKWAFSEAAVLYLRSNEPAKKYIQRLQKRMSKAKALSALAHKLGRCVYFMLRDKTVFDEKRFLPQ

SEQ ID NO: 499385 - protein, 358 aa, unidentified
MQSKVKKINFNGQDIYVGIDVHLKNWVVTIIGSNIIYKTFSMDPEAKKLSNYLKNTFPNANYYSVYEAGFCGYSVHRDLSLNGIKNIIVNPADVPTTDKDKRQKEDRRDSRKLAKSLSSGELEGIHILGEQMEGLRSLVRYRSKVIGEIVKYKNRIKSILKQYGIKAPKELDKGSKYWSAKYIKWLKTIKTLTPEGTFVLEETIGTLEQHRKQRLKINKELRRLSTEPKYKKVINLLISVPGIGMITAFVILSEIETITRFKNLDKLCSYVGLIPTTNSSGEKERSGKITRRSNKLLRKCIIESAWVAIRQDPALLQKYGELKKRMKPNMAIIRIAKKLLNRIRYVLKNEQEYEKSIV

SEQ ID NO: 499386 - protein, 349 aa, unidentified
MTDQRISYCGRIVDLGIDVHKETYTVTCVCNKQIVKTATVQADPAALAASLPRWFPGATLYSVYEAGFSAFVLHRVLTTAGITNIIVNPASVAVAANDKVKTDRRDSKKLAIDLADGRLRGIYVPTEAEELARLLPRTRAQLVAHRATITRQIKAKLHQFGLITPASRRLMSSRYLREIAAWELPPELRVSLTLLADQWRFATRQLLEVRRLLREQARAQVALETVYRSVPGVGEVVARTLATELGDMTRFANERALFSYTGLTPSEYSSGTSIRRGHISRQGVSRLRHVLVETAWRALPRDPILQAMFERIAATRGKQRAIVAIARRLIGRIRACFRHGTTYAVGTVG

SEQ ID NO: 499387 - protein, 339 aa, unidentified
MNVTTMGVDLAKNIFQVHGADAPGRCVFSEQLSRAKRAPFMANVPPCLIGMEACSGAHYWARRFQALGHEVRLMNPQFVKAYVKSNKNDRNDAEAACEAVTRPSMRFVAVKSVAQQDRQALHRVRERLIGHRTALVNQTRGLLAEYGIVVGKQIAVLRRRLPEILEDGENELTPDARMLFAELYEELLELDRRITPLSERIKCEANEDELCQRLQALEGVGPMIASAATATVGDARVFRNGRQFAASLGLVPRQYSTGGKTRLGAISKRGDKYLRKLLIQGATIDVYHAAHKQTPRARWIQGLVTRCGKQKAAVAVANKNARVIWALMARGETYRASAN

SEQ ID NO: 499388 - protein, 361 aa, unidentified
MSTQITACPKLYIGLDIHKKTWTVSIQTDLFYHKTYSMPSKSSDLYDYLEKNFPNSEVSLVYEAGCCGFSVARYFLNLGWNVLVVNPADVKTGDKQKYQKTDSLDARNLSNQLKLGTLIGINIPTEAEDQFTSLSRHRTQVTKKLRQTKSHIKSLLLFHGIEVPEQYDNSNWSNGFIEWLENLKFSTVCGDLALQGKIRMFKFIKSEYLEIANQMRAYCRKEHKTDYNLLRSIPGIGGYLAAVIIAECGDLRRFNTEGQFASFVGIVPGMYNSGGGEKCLGITPRSRSQLRSYLIEAAWIAIRKDAEMQAYYRKHQGKNVKTIIVKVAHKMTRRILSVIKKQTPYQINVNLKLEENEKQTA

SEQ ID NO: 499389 - protein, 429 aa, unidentified
MQNESTPDARGPVFCGVDTHADSHWLCVLDWRGRKVLSRQFPADAAGYEALAGAIAAAGEPACVAMEGTSSYGAGLTRHLASLGMPVREALSPARMQRRRPGQGKCDEADAERAARAAMSGSRLGTPKSQYGWVDGVRCMLAARSGAVKARTSAINTARSLLTTAPEGLRSRFRGMGGPRLMEELPSVRAEGALGAALGALADLWAAARDAALDMELAIEASLEENCPALLAMYGCGPVSAAKLAVAAGDNPGRLRSEASFAAICGACPIPASSGKTVRHRLNRGGDRQANSALHEIARQRVMRDPETAEYAERARGRGKSDREVMRCLKRYVAREAYRALMRPHEIRRPEDASELVAARRAAKVSQVRAASILGTSEKYISMLERGQRELKPIRRAYEAWVEAGLPLDWDRQAFEAERKMDSKKHLAK

SEQ ID NO: 499390 - protein, 413 aa, unidentified
MKDRTITAVGIDVSKGKSTIAVRRPGGEVVLTPFQVEHDAAGLSALVKTLRSIGGDIRVVMEHTGMYWRPIALALKEAGFFVSVVNAMLIHDFSDNSLRKIKTDKADSMKIANYALSFWAELRDYSPEDETRQMLKMQNRLYLRTKKSSVILRNGLISLLDQTFPGVNMLFDSQPKRSNGHFKWVDFVKRFWHKDCVAGISLAAFSDAYRKWCARSGYRFSQSDAEKFHTAARNAVATFPKNDSTKLLIAQAVDSLNAVYDALYILRGEMLRLASMLPEFDVVMAMQGAGEVTGPQLIAEIGDVRRFTHKGALVAFAGMDAPPFQSGTFDSKSRRISKRGSPHLRKTLFMVASTILQHSDPDNPIFQFMDKKRAEGKHFYVYMVAGAAKFLRVYYARVKAHLTALDSGANTAA

SEQ ID NO: 499391 - protein, 339 aa, unidentified
MQNYYVGIDLHSTNCYIGIVDQDGKRIYGQRVLNDLSRIIATLNPFKEKIKSIAVESTFNWYWLVDGLMDEGYNLHLANVCAMKQYEGIKHTDDQSDAFWLADMLRLNILPTGHIYPKQQRPIRDLLRRRLQLVHHRTALLMSMTSMIQNCTSINLNRYDKKNLTHHEITGLLDHPYQVMSANSINNVVLEIDENINKIEKEINTKVRLTQRYKKLNSVWGIGEILATTIMLETGDIRRFKDVGNYASYCRCVPTIKLSNGKIKGRGNKKCGNQYLAWAYLEAAYCMQRAYPKAKQWFLRKLNKKGRFVAIKALASKIARACYLIMKNNIEFDSSKLFA

SEQ ID NO: 499392 - protein, 473 aa, unidentified
MARTARRPRARQHHKRRSSRGRSAPLAQMNLNAAGIDVGATEHWVAVPEDRDEEPVRRFGAFTADLYVLAEWLRQCQIETVVMESTGVYWIALFEVLEERGFDVKLVDAHYARQVPGRKTDVKDCQWLQELHTYGLLRGAFRPEDQICVLRSYLRQRSMLVAMASRAVQHMQKALEQMNLKLPEVVSDINGKTGMEIIHAILAGERDPQRLASHRDRRCKHDQATIAKALEGHWRAEHLFALQQALEQYEFLQQQLRACETQIEGCLQTFVTHVEVEPPQPTPARQRRARPRQAPSFDVHGYLHAMTGVDLTQIDGIDALTALKVISEIGLDMTRWPTSKHFASWLGLCPGNKLSGGKRYRMRSKPTANRAASALRLAAQGLVNSHSALGAYYRRMRARLGAPKAITATAHKLARLVYSMLRYGTAYVDAGQQAYEQKYRDRVLTNLQRKARVFGYQLVHVADPGSAQAAATL

SEQ ID NO: 499393 - protein, 346 aa, unidentified
MEYFAGLDASLETINICIVDHDGNVLLERKVDAEPDAIVAVLESFGRPFKRIGLEAGPTSSWLYSGLRSAGYPAICLECRHVKAGLSAMRNKTDRNDARGIAHLVRLGWFRQVFVKSDEAQRVRMLLVNREQLLNKLQDVENSLRGSLRVFGLRIGRVTKRSFEARVLELIEDTPRLLAITEPMLRVRQTLLEAFAHLDRLAQQLARQDPVCRRLMTVPGVGVVVALTYRTGIDAPERFARSRNVGAHFGLTPRRYSSGQTDYDGRISRCGDEMVRTALYQAANVLLHHGRWSSLRAWAMRIAKRSSAKAAKVALARRLSVIMHRMWVDGTDFHWSAAKSSTATAA

SEQ ID NO: 499394 - protein, 346 aa, unidentified
MPPTECLVTIGVDSHKELHVAVAVDQLGRRLGAITVATTPRGFGQLERWAQRWGTIQRFGIEGTGSYAAGLARWLQARGHQVVEVNRPNRQTRRRQGKSDPIDAEAAARAALAGHGLVWPKTADGTVEMLRVLRMARRSAMKARTQTAQQLDSLVVTAPDQLRAQLRRLSLEQLVPVAAGLRPGELVGPLAATKLALRTLARRHQSLSAELARLDHQIAKLTATTAPRLLARGGVGPQVATALLVAAGDNPARLRSDAAFAMLCGAAPIPASSGKVIRHRLNRGGDRQANNALWTIAVCRMSYDPRTIAYVQRRTQEGKSKLEIIRCLKRYIAREVHRDLQAALLT

SEQ ID NO: 499395 - protein, 433 aa, unidentified
MLKLNYMSTLFVGIDVSSKTNAVYAMDFEENKYISSSFGNNQPGADKLVNMIAECMHKHKNLNTILIVLESTSVYSVHISNFLSASEVLMPYKPYVFCVNPKATANYRKSYIGMEKTDPTDAYLIADFARVGRTKKLEPWRGGQFIALKRLTRHRMHLSECITREKTYMVSNLYLKFSELQLLEGDDKPFGSLYGATSSAVLTEFLSPQEIIDMPEEELLTFLAGKSRNRISDLSKTSELLRKAARDSYRLDKCMYEPLSISLASSFNCIHAYQKEIKLIEQAIEKCINGMNPNALLILQSIPGIGPIWASGILSEIGDITVFHSSDALAKYAGLYWPKGDSGDFTSEDNKMSKAGNPYLRCYLGEAANSIRKHIPEYADFYARKYAEVTKHQHKRALALTSRKFVRLVFGLLVKNQLYTGEKLDTEYNIESN

SEQ ID NO: 499396 - protein, 323 aa, unidentified
MNVVGFDVGKDHLDGALVNRSAIAKQRYHVPNTGLAVSKLLKEISANHAKLTVGCEATGPYHLILLKACLELGLPIKVLNPLMTKQYTRSSIRGRKTDNDDALAIARLVLRGEGAQASLSTLAPAKYYVRLATKIVQQKQALDLQQKFLERVGEQPADGLFAPALEVLDDLVTSLRQLAGVKTDRKMLQLLTSIVGIGPVVATSICAEVGSIERFPSSRQLIAYAGLDPKVKQSGLTLKRNTKLTKRGSPELRRAIFLAANTARRYDPELRDYYKKKRDQGKAYTPATIAVAQKLCARIYAVLTRGTPYIKTSSDTSRTLETT

SEQ ID NO: 499397 - protein, 411 aa, unidentified
MGTTEPSPSSAPLARQLYAGVDIGKASHWVCLLDDQGRVLLSRKVANDEGDLTAVIEKATSYGAEVTWAVDIVDTLSVLLLTLLTVAGQEVRYVAGQVVNTMSTAYVGEGKTDAKDAFVIAETARVRRGLPVVTSASDSSQELMLLTTRRADLVADRVRMLNRLRSLLTSVAPALERAFEYGTHKGAMVLLTGYPTPQRLTRIGQTRLTRWLRARGVRSCALVAARAIEAARAQQVRLPGEDVAAALVVELAADILALDERLKTLEAQLATAFRAHPHARAIESMPGFGPVLGAMLLTAVGDLSSYPDPGHLAAAAGLVPVPKDSGRRVGNVHKPRRYSRPLRHALYLSALSSLRTEGVNRDHYQKKRDAGRTHKQALIALARRRVDVLWALIRDHRTYTTQPPLRTPAAA

SEQ ID NO: 499398 - protein, 374 aa, unidentified
MHYLGIDVSKASHECVILDANGEAINKSFTVQSSKDDFAKLVKKLSELNIPKNDLVAGLEATGNLWENIYGYLKEQGFKVILLNPYQTSKFHQVSLKKAKTDAIDAVVIAGLLRSGCASGSYIPDDNIQSLRDIIRLKDGYLKDIKDYKRKAYSLLGLVFPEFLNLVKDPFNISSTEILLKYQTAYDFKNLKPKDLLKVARGYQGNNYDEAWADKIISSAKDSIYSGKASKARSLVLKSLISNIKYLKEQIEMLENEIQNLLKPQGTQSNSDVDNLLTIPGVGPKTVAVFLAEAGDIKRFSRCKDFIGFAGLYPEIEQSGSSLNKARLTIKGSRILRHALYMASVASLIHNPYPLRAFTETRSRRVRAPNRRSL

SEQ ID NO: 499399 - protein, 321 aa, unidentified
MNKNATVPKYVGVDVAKATLQVHLQGHQIEFENTASGHIQLCNKLRALTEPHVVCEATGGYEAAMAQAFHDANITVSVVNPAHVRAAAKAQGKRAKTDPLDAASLTDYGQRFQPAPTPQVAALQRQIRHLVLWLKQLIDAMAVAKAQAEHQLDAFVKQQHAQLLTHYHQQIKLTEQKVKTLLAQDHALQQRVDCLMEIEGVGLRTALMVLAYMPELGTINRGQAAALAGLAPWTRDSGTMKGKRCIGGGRAEIRPVLYMSSLSSIRYNSILKAFYKGLRERNKPGKVALTAVMRKLLVYMNYKLKHLQSPLAEQKLQTPKL

SEQ ID NO: 499400 - protein, 338 aa, unidentified
MRLYCGIDLHSNNSMISLIDEADRVVSEKRLDNNLDAIEHHLQPFQDDISGVVVESTYNWYWLVDGLMEKGYPVHLANTLAIQQYNGLKYTNDATDARFLAHLLRLNILPTGYIYPKAMRHIRDLLRRRLLLVKQRTAQLLSLQSLIGRHTGERLSCLKMKQLKQDALAHHFGSAPALFGAQQNHQLMQQLDTQIEEVETFVLARCQDSAQYSLLTSTPGIGKILGMTILLETGPIDRFQNVGNYSSYARCVPSEKISNGKAKGKGNTKNGNRYLAMAFVEAAHYASIWEPTIKRYYQRKCKKVPVMVAKKTVANKLTRACYHMLKNGTVFDVARAFG

SEQ ID NO: 499401 - protein, 304 aa, unidentified
MRIIGCDLHTRQETIAMVDTETGEVVEKTLQHEGEKVREFYSALPRPVQVGIEATGSMLWFLNLMEELGIDSQVGHPAKIRAAEPRKQKHDRRDADLLLKLLMENRFPSLWMPSKELRDLRALLCHRHQWVRTRTRVQNALQAMALTNGLRRGKSLWSQEGQHAIASLPLGPHAAHRRTALQALYRELDADINALDKRVLEQALERPEARRLMTHPGVGPVTALATDVFLGDPVRFEEAKALASYVGMIPSEYSSAGRQRLGGLSKQGNPLLRFLWCEAAIHAVRRDPLLQRFYRRKLVQKGDG

SEQ ID NO: 499402 - protein, 320 aa, unidentified
MSALSVVVGIDVAKASVDVAVLGAELHARQFDNEADGHSLLAAALTPLQPTLVVLEATGGYEAALVCALQAAGLPVAVVNPKQARDFARAMGRLAKTDRIDAQALAEFAAVLARRPDLPRLVQPLPDALQRELSALVTRRRQLLTMLGSERLRLPLATPTVRPSIEVMIHAIKAQLDEIEGQMTRHVDAHFAALDTLLRSAKGIGPIASATLIATLPELGRLNRRAISALVGVAPIANDSGTSRGRRRIQGGRFEVRRVLYMATLTASTRNPTIRAYYQRLIAAGKLPKVALVACMRKLLTTLNAMVRTGTHWMSSVQLA

SEQ ID NO: 499403 - protein, 471 aa, unidentified
MERINLDAAGIDSGSASRFVAVPEDRDDQPVREFAAYSADLYRLADWLTTCGVRTVAMESTGVYWIPLFQVLEERGFEVRWVDARRVKNVSGRKSDVADCQWLQQLHTYGLLMSAFRPDDETCVLRAYMRQRDGLVLQAAQHIQHMQKALELMNVKLTEVLSYVTGTTGMAIIDDILAGKRDPKQLAKHRHPRCKNDEATIAKALTGHYRAEHVFALRQAVIGECAAEIERFLEQHGPRDDGRIPPPPEPPPRASKNGLGFDAYAHLFRLAGVDLTAIPGLSTTSVLTILAETGVDARRWRSGKAFASWLGLCPNNRVSGGKVLSSRSQPCVNRAARVFRMAAYGLHHAKSALGAYHRRMQAKLGAPKAITATDKLACLFYSMLATNEVLRRHRPRSLRAPLPSQKAHRSRARCQAARLQARPRPGHLNRLFFGSAGTGRPRLVGTALLCAFDPSGREPATGVRSRAPRAA

SEQ ID NO: 499404 - protein, 409 aa, unidentified
MDTMYPCCCGLDIHKESVAACIRRGGISPREQVRTFGTTTAALLELGDWLAGEGVTHVAMESTGVYWKPVWNLLEGRFELLLANAQHMRNVPGRKTDVKDCQWIAQLMQHGLLKASFVPPPAQRSLRDLTRQRTQLIGDRARVVNRVQKVLEDANIKLASVASDVLGKSGREMIEAMIAGVSDAQSMAELARGQLRKKMPGLKAALEGKVSDHHRFMLKQLLRQVDDLDRQVGAFDRQIVKVMSPLEKKAIKRLDDVPGIDVRSAQVIIAEIGTDMGRFASAGHLASWAGLCPGNHQSAGKRKSGRTNPGNRWLRVMLCQCAWAAGRTKASYFSAQYKRLAARRGRKRAAIAVAHSLLGVVYHLMQGRTYQDLGPNYFDKFAGDRLKRNLVARLNQMGYNVQLEKKDAA

SEQ ID NO: 499405 - protein, 421 aa, unidentified
MEETSDLSELAWRVAALDLGKATLTACVRVPHADKPGRRCQEVREYRTTTRALLTLAADLRGHGVTLVAMEATSDYWKPVFYLLEAEGFTCWLLNARHVKNVPGRPKTDKLDAIWLAKVVERGMCSPSLVQPRDIRRLRDLTRYRRTLIRQRTAEKQRVEKLLEDAQIKLSAVVSDIFGMSGRAMLEAMIGGERNPRTLAQLAIGRMRAKLVVLEEALTGHFDDHHAFICRMMLDRIDDITRQAAELTARIEEQIAPFADAAARLDEIPGVGRTGAQELIAEIGVDMTRFPDAAHLVSWAKFAPIDKNSAGKKKTASTGKGNPWLGATIGEIVSAAARTDTFLAERYQRIARRRGKRRAIVAVGNSVLTIIWHLLADPEASYRDLGPGYYESRISAQRRQRNLIRQLERLTGQKVALQPAA

SEQ ID NO: 499406 - protein, 430 aa, unidentified
MTKRSSTPADAVLVAIDMSKHRQEVLIERPEGGRRRRMTVMATKADYDRLAADLADIGRPVIVGFEATGNYHRTLAHRLLSAGFELRLISSVALARTREALHNGWDKNDSKDAQVILHMLQIGATQRYVDPLAAGINDLQEMSKTHEAISKAKTQTWHRILTHYLPLYFPEIERFAGNSRSDWFLALLERFPTPTSMTALSQEAFTREAWSLVGRKVSKARLINDIYETACASVALPIGEDSVSIAMFRMVIAQARSLIRQRDEIERTAHALLSENRDYQLLRMIPGIGPINALTILAEAGDLRRFAHHRQFLKFCGLDLATCQSGTFRGRTKLSKYGNARLRRTFWMATQVAIRQRDNSFRDKLGRYVAGHANDPDRRRKAMTALTAKMARVAHAVIKTGTEYRPFLERADTRWKDPSLCSREGATATL

SEQ ID NO: 499407 - protein, 350 aa, unidentified
MRRPKEKLIAGLDLHSNNVMIGVINQDGKRITHRKLDCDLKQVTEFLKPLKPQLQSLAVESTFNWYWLVDGLRGQGYSIDLANPAKIEQYNGIKHVDDKDDAFHLADLQRLNILPKAHVYDPELRPVRDLLRRRAGLVHQRTALLLSFKSLYARTTGKALDLADAKKMEPKEAPKLYKHPANQLIAQVQAEHIQALDKSISRIEKAVLACAREIRLYEKLLTIPGIGKILGMTITMEVGDIKRFKTDGDFASYCRTVDARRLSNGKCKAENNQKCGNKYLSWAFVEAANFARRYCEHCRRWYDRKAAKTSKVIATKALACKLAKAAWHVMDGETDYDATRMFPELATKKK

SEQ ID NO: 499408 - protein, 357 aa, unidentified
MRIIGVDLHARQQTIAMLDTETGELVEKTLEHEAEKVREFYSALPGPVWVGIEATGSMQWFLKLMEDLGIDCQVGNPAKIRAAEPRQQKHDRRDAALLLKLQVENRFPSIWMPSTELRDLRALLKHRHQWVRMRTRVQNALQAIALSHGLRRGKSLWSQTGQHAITSLPLAPHTAHRRTELQALYRQLDEQISKLEERITDQAWQRPGARRLMTHPGVGPITALATEVFLGDPARFTDGKALASYVGMIPSEYSSGGQQRLGGLSKQGNPLLRFLWCEAAIHAVRRDPELKRFYRRKLQQKGLGKARVAAARKLGIRLWIMLRDQIDYQEFCRRGQMRQKSGGARAGIPEEGRGPAV

SEQ ID NO: 499409 - protein, 319 aa, unidentified
MQNLKNNIAKVWVGVDVAKDYLDIHINPTDKSMRIANTRDGLKGLLSKVSSLKVGQIVLEASGGYEQRAKKILQKAGHRVWIVDPKRIKAFKDSKGIKVKTDAIDAKMIALFAAQERPKHKQIWSSEKSLQLRALTKRRITLISMTTNEKKRLQQEDDQICMRSIKRVINNLEKEIESVDKMQQAMLKKDAMLQKKADIMQTMIGIGPTTAYALVSLAPELGQIGNKQVSALIGVAPYTKQSGKYINHATVAGGRFMARKTLYMAALTASRSNPVLRSFYNRLRAKGKKPKVALVAVMHKIVVTLNAMLMKETSWINYA

SEQ ID NO: 499410 - protein, 388 aa, unidentified
MQVAADRTDASTAIQTDLPAIFASLELSRSTWLITSLSPGAGEKISKHSIRAGDVAGLLVRLAQLKEKARGRTGRDFPIIAIQEAGLDGFWIHRVLQSEGIESHVVDAASILTSRRRRRAKTDGIDGETLVRTLLAYKRGEPRVCAMVKAPTPEEEDRRRICRERKTLVGERVEHVNRIKGLLFAQGVSDYEPLKRNRRARLEELKTGDGRPLPAHLKAQISRELDRLELVLPQLKAVEAERDALLKPVSEGCPAPAAMLAQLKGMGPEFTAILWSEGLFRSFSNRRQLAAYAGLAPTPWQSGSVAHEQGVSKAGNPRLRTTMIQLAWLWLRHQPTSALSVWFQERVQSNGGKMRKTTIVALARKLLVALWKYSTSGVVIEGAVMKAI

SEQ ID NO: 499411 - protein, 319 aa, unidentified
MAENDPVVVGIDVAKDKVDACIRVLALRQTCPATAQGHRKLVAWLRKHKVSLAVMEASGGYEREWRKVLHKAGIEARIVDPKRVRNFALSAGQLAKNDAIDAEMIAWFAETFNEAPSQTHDAAHEELVALVKARIGLVELKTRLQSQDAHAAPGQVRKAHARILKSLAAEIEKLEAAIAARIKATADFAERAEIIESVPGFAETTSANLVAAMPELGHVSDRIAAALIGLAPYDDDSGRRRGERHIKGGRRWIRNAIYMPCLGAATQNNPVIKAFYDRLIAKGKAPKVALVACMRKLIIILNTLIARRQKWDPGRHVLT

SEQ ID NO: 499412 - protein, 356 aa, unidentified
MVVVVGIDVHKDTHCAVAVDEVGRQRGPARTFRTTDAGHLQLLRWARGEQQGEQQGEQVVFAVEDCRHLTTRLERALLAAGARVLRVPPKLMAGARQSARTRGKSDPIDALAIARAALREPNLPVAEHTHASRELKLLVDHREDLVAQRTRLQNRLRWHLHELDPALDPTKRGLDRAHELDRVQQALHAMPTGTVRRISLELVEDIRALTQRVNALEHELRDLVGDQAPGLLDLPGCGVLTAAKLLGETANPQRFRSEACFAMHAGVAPIPASSGRTNRHRLARGGNRQLNTALHRIAVTQIRLDGPGRAYYQRRREQGDTAMEALRALKRRLARVVFNLLRPTNDTAAEPQPRAA

SEQ ID NO: 499413 - protein, 332 aa, unidentified
MFLGIDIHKRYAQVAVMDEAGEIVEEVRVENANLDDLAQQYAGAEAAIEATSNYYHIHDTLSEHLDVTVAHPEKLNLISDTDKKTDRVDAKELARLCRLNSVPESYVPTDEIREARALVRGRQKLVENRTEYANKIHGLLSDHGITRKVKPLSVKGREFLRELSLPDPWNELLASYLEIVETLTDEIERLDEAIEERAGSLKETQLLMTIPGVSYYSALMIYAELGEIDRFDRDKEVVSYVGLNPVIRESGDSRFEGGISKRGSGRMRWILVQCAQTAVHTCNDEYLRRFYDRLAGKKSSQEAIVATARKLLVSIYHMLDRREVYNPPGVSA

SEQ ID NO: 499414 - protein, 449 aa, unidentified
MSRPQVIDDQEHERIYERVAAIDVAKDTGMVCTRTPHPSRPGARRATVWTVKARMGTVRALGRRLRRDGIEIVTLESTSDYWRIWFFVLEACGLAVQLVSASQAKNLPGRPKTDKLDAMWLARLTEMGLLRASFVPPKAIRDLRDYTRARARLIHERTRCWQRLEKLLEGALVKLSSVASKLTTLSAQDMIKAMIAGQRDPEVLAGLARRTMKAKHDALVEALDGMFDDHHGELAALLLDQIAALDAKIAQLGDRAAELAAAMPGAWGTDADGTTGPGAGTGPDAPVLNAVARLAEIPGLSEDLARTIIAETGLDMSRLPTAAHLVSWAGLCPSARQSGPRTRAGKKGRGDTWLRGALGQAANNAARTATFLGERHGRIARRRGKAKAQVAVARSILVIIWHLLKDPAARFTDLGPGYYQARTDVDRKLRNHLRQIQALGFTVTLTKAG

SEQ ID NO: 499415 - protein, 339 aa, unidentified
MSPRLAGPLCFQWAGVERIANTREAVAAWLERVAPGLIACQPTGGYERTLIAAARERGIAYLRVHPNDVVAFRKSRGVKAKTDAIDARLILAFVCDKAARAELPTSLIGDDRLQALAARRRQLVDALQAERCRLDAAALPAVRASLEAVIAVLRQSLETLEAELAEAIAAHPQTAELAKLLQTIFGIGPVAAITLIADLPELGRLSAKQIAALVGLAPHTKRSGKTRYRETTGLGRPGVRRVLFNAVRAAVRHPSLFKDFYHRLVTDNRRPGKVALTAVMRKIRITANAVARDRQPWRGRPAAGTLCRPHAEQTAHRAGRVKAAAAPRAVARSASLEAA

SEQ ID NO: 499416 - protein, 394 aa, unidentified
MIYAGVDIAKTDHVIGAVDERGAEMCRPMPFKNTEAGLERAVAWLEGLAGSPSDVVVGMEATGHYWMACYSFLVARGYSVAVINPMQVKAVRKLKKLDKVKNDRIDAWLIAETLRIGQYDETRLATDEVASLRSLSRYLQSLRGMAAELKTQCVCLMDAHFPEYAGIFSDMFGAGSRAVLSKSPLPFELARRRADSLARDIAEASRRGGKSAGYAARIKAAARSSIGVRLGQEAASFQVKSLIRQIEFADSECAKVEARVRALLDEVEPLVLTIPGVSYATGAQIVSEIGDVSRFRNASALVSYAGLNSSVSQSGQFDSGGGPIPKHGSPYLRRALWLAANRARQCDPGLRAFYDKKRAEGKPHRVAVTAVARKLCHIVFAVMRDQVPYDPGRE

SEQ ID NO: 499417 - protein, 310 aa, unidentified
MEAIYVGVDVSKDRLDVAVRPSGEAFVVTRDGKGLNELVERLQGMAPTLIAVEATGGFETIVAAAIAGANLPLAVVNPAQVRHFAQAVGQRAKSDPIDAAIIARFAEAVKPEPRPVPDADARLLMELVSRRTQIIEMLVAERQREKRADAVRVRKSLARHIATLEKELPVIDRDIDTLVRGSPVWREKEDLLTTMPGIGNTLARTCLAQIPELGSLDRRKIASLVGVAPFTRQSGRWRGKSMIAGGRAAPRAAVFMAALTASRCNPVLRAFYRGLLARGKPKMVALIAVARKVLTILNAMLRDKKQWQPA

SEQ ID NO: 499418 - protein, 290 aa, unidentified
MLTIGVDAHKRSHMAVAVDAAGREVSRWRGANSVEGWGQGAAWAAALDSDVRWGVAGAWNYGRGLAQQLVAAGATVDAVNPRWTAQGRRRARRTDKNDRLDAQAVALLVWREATALPLVSADDETAVLDLLITEREAAIAEVTRLRNQAHQLLLQLDPGYTARLPRLRTTAGTRALETDTTADAHPLQQQRAAAVRRLAQRLRLALEQARDLARQIRALAAPRFAPLARICGSELLTAAALAGILGPGRRFATAAQLAAYAGVAPLEASSAERVRHRLNRGGNRRLNAIL

SEQ ID NO: 499419 - protein, 341 aa, unidentified
MRTLYVGMDIHKNFIQAAAMDQAGNIIKEQQFKSDAKEIKRFIKTLKVKNIQAAIEATCTWYHVYETLDALGVKTTLVNMRRTKTIAESKVKTDKLDAKTIAHCLRTGFIATAYIPPKTIMEQRTILRHRMSLRKEITRYKNKIHAILIRNGIQHSDYSDLFGPRGMRFLRSVTLPDSEHYSLTSYLNIIETLLHEKTQTAENIETLCKNNPQAMLLTSIPGISYYSAMIILTEIGEIHRFPHPKKLCSYAGLVPRTIQSGDHVYHGRILKECNQNLKWILDQCTHIHTRHCPNSSITRLFYRVENKKGRNKAIVAASRKLLTCIWYMLMKNETFKYSNDD

SEQ ID NO: 499420 - protein, 347 aa, unidentified
MRFSTKQHPFYCGIDLHARTMDVCILDQAGETLVHRNMTATPEALLKAIAPYRDQVVLGAACLLTWSWLADLCAAHGIPFVLGHALSMKAMHGGKAKHDTIDAHTIAVLLRGGLLPQASVSPAEMRATRDLLRRRMPLARQRGALLAHVHNTNSQYHLPAIGTKIAYKANRDGVAERCAAPAVQQSIAVDLALITYDDELLRDVELSLVKTAKHHDAHTRSLRHTVPGLGTILRLVLLYDMHDGERVPRVQDFASSCRLVKCARESAGKRSGTSGAKIGHAHLQWAFSEAAVLCLRAHPAAQQLLARLAQQHGTGTALTILAPPLARAVYDMWKRQTAFDLHQCLHA

SEQ ID NO: 499421 - protein, 365 aa, unidentified
MQKISTVESCGKRVFKKQLTVGLDLGDRYSVYCVLDEAGEMVLEQKLPTTPEAMKKIFGGMPRSRVAMETGTHSPWVSRALAALGHEVIVAHAQKVRLIAKSRRKDDRLDARTLARLARIDPQLLSPVQHRSAQAQLHLAEIRARAALVSSRTALVNTARGLVKSYGERLRKCNTQQVRREITGELSPELREALKPLLREVESLTERIQEYDRRIAIMGKEKYPETALLKQVKGVGDLIATTYVLTIEDAHRFRKSRDAGCFVGLQPGRRNSGESEPQMRISKEGDEYLRTLLVQGAHYILGPFGEDSDLRRWGQKLAARGGKNAKKRAVVAVARKLAVLLHRLWVSGEVYEPLRNSQKAMNAAA

SEQ ID NO: 499422 - protein, 320 aa, unidentified
MSQVVIGVDIAKKKFDVASLSDGKYKHKTFTNDEQGFANFVSWLLTLFINDKPLICMEATGAYSIPLADFMVSQGYPVSVVNPAKIKAFAKSELSRAKTDKADAKLIARYAFTMHPPLWTPPPQNIRVLQALVRRVEHLLEMIQMERNRLDTTTANITDSITTVLATLEAELEATRKAIHDHIDNNPELKRRRDLLITIPGIGETSIAHLLVVLSDHHGFLTAKQAVAYAGLAPALRESGQWTGKTHLAKSGDPALRKALYMPALVAWRHNPLLRIFCQRLKANGKNGKAIACAAMRKLIHLSFAILKSGKPFDPLFALK

SEQ ID NO: 499423 - protein, 350 aa, unidentified
MIIIGCDYHPGFQQIAFVDTETGECGEQRLEHREEAEKFYRDLGAQGGAVRLGMEASGHARWFERLLGELRFELWIGDAAEIRTKRVRKQKTDRQDAELILRLLLEDRFPQIWVPSGENRDLRQLLWHRHRMVQARTRVMNQLQAVALNEGLRCKKRLWRDAGREQLESFALAPWASRRRRDLLELLDRLTPTIAELTQAIEQEVEKCPEAQRLQTHPGVGALTALAFVLIIGRADRFQCGKQIASYLGLVPLEESSGQRRRLGHITKQGNSLLRFLLVEAAQVTVRSDQEWRSKFFHLAMRRGRKIAKVAMARRLAVRLYWMWRKGWNYEQMKKFGSHAGQPGHRDGVR

SEQ ID NO: 499424 - protein, 460 aa, unidentified
MNRKQRREMARKIQSEDLSLEVVHPDAAGIDIGNESHYVAVPSTRDSQPVHRFGCTTAELKAMAAWLKQCRIRTIALQSTGVYWIAVYDILEEAGLEVYLVNARETKNLPGRKSDVQESQWLMKLHTYGLLRNSFRPSQEIRTMRTYWRQRSDLVRSAGRHIQRMQKALTQMNIQLANVLSDVSGMTGQAIVKAILAGERDPYQLAALRNWRVKASEEEIARSLEGNWQNDLLFVLQQEQEGYEFCQKQIAECDQRLQQFLQQLDDRSHGTILPEEKRKERLRKKKKGNAPQFDLRAELFRMTGTDLTQIDGIDVTTTMTILSEAGWDMSKWKTEHHFVSWLRLCPDNKISGDRIIGKGRLPTNNRVTNALRMAASTLRLSNTYLGAQFRRLRTKLGAPVAIKAMAAKLARLVYRMLRYGMQFIDRGAEFYDAQHRKLQINYLKRKAANLGFQIIEAPAA

SEQ ID NO: 499425 - protein, 371 aa, unidentified
MKLVQSKAGKDDSMAKLSKTSPVVGGVDTHKDLHVAAVVDQNDQVLGTQSFATTRQGYKLMLAWMLSFGNLQRIGVECTGSYGAGLLRYMQAAGVDVLEVSAPDKLDRRRRGKNDDFDAESAAHAAYEKRRTVTPRSRDGMVESLRVLKVCRKTAVQARRIALQIIQTTIVCAPDRLRDTLRKMTRMQLIRTLAAWRPDLTAFRDIEEAYRIALKSLARRYLELHDEVAELDIMIQAIVTDLAPELIARNSIGLNSAAQLLLTAGDNPQRLQSEASFAALCGVSPVPASSGKTTRHRLNRGGDRAANSALHIIAIGRLRLDTKTQEYVARRVAPGHSKLEAIRCLKRYIAREVFNIIARRHKQINQAQIAA

SEQ ID NO: 499426 - protein, 308 aa, unidentified
MHYLYYVGLDVSKETFDASLVAFEDANEMAHRKFANSRKGICSCLHWVEKRHGIRLVDVIFCAEDMGSYISEMAVCASDRTLNFNFSLISPLVIKYSMGIARGKTDRVDARRIAEYAITHYRKIALYLPAEKELCQLRTWLILRAHLAKQRVAKLVLLEKLDYKEKFADVSIQRSMLQEEIAYAETHMKTIEREMKELITADSNICRNYKLLTSIKGVGPITAIVMLCSTLNFTKITDHRKFACYCGLAPFEHSSGTSVRGGCHTSSMANRDIKVQLNRSALIAIRCDPQLKAFTNAKRLKVNINSAS

SEQ ID NO: 499427 - protein, 391 aa, unidentified
MINIGIDVGKFKHCASVMDDKTGEILIKPFFFNNDQKGFDLFYSRTKQYIHRKHAVGMEDTGHYMINLTDFLLDKKFTVKFINPRSTCLRRKELGMSAKNDRKDSILIAEMLSEKKFWRSVTRTTQATDKLREITRLYHQLQEQQNEDMNRLQRALDIVFPEVNKLSWTRYSKAYMHFLAKYPTAASIASEDIRNLRNALKTDGRGRQCKITAEDIKEAAKCSVGEDNIAVALEVPSIIAIINTRKQQIENLENKIEEFSLKLNSPIISIPGISHITGMTIIAEIGDIHDFSDAAHLISYAGMEPLVHQSGKYDAAHMPISKHGSRYLRKALYQAVFTVCKYCPIFNAYYTKKRNQGKTHRCAQGHCVRKLLRVIYKLLANNITFDENLVK

SEQ ID NO: 499428 - protein, 339 aa, unidentified
MTIVMGLDQHRGQITGEWIDTETGEVQRTRVVPADRAAVGKFLQRFRGKQLEVALEATTGWRFVVEELRRVGAVAHLAEPAETAGLRGPKKRAKGDRADARHLRELLMIGRLPESWIPPDHVLDLRGRVRLRHTLSEQRSEWQQRIQATLYHHGCPQRRQLMVGDGREWLAAQPLPRAAREQVTVALGMIDSLEAQLAPLDKELRAYARRQVGCKALMAHYGIGELTAVTILAELGDCTRFSSSRQAVRYAGLDITVYQSDRHRAPGHISRQGPPALRWALYEAAQVARRGERSPDREYYLAAKERVGGNRACLSVARKLLKRSYHTLRELGEEALAPA

SEQ ID NO: 499429 - protein, 466 aa, unidentified
MEKYYLGCDVSKGYCDFVILDQSKKVSEANFQLDDTPEGHMELCRIIHNFTLYHTDSMIYVGLESTGGYENNWYELFRKIQGIYNLQVARLNPLGVHNYAKAGLNRIGTDKISARNVAEYLIVHEEKVAYNQEDYYGALRRQWKFVRFLKKQKVGLLNQLESLLYNTHPHILTYCRAGMPEWVLRVAEKYPAVSCLAGADAEAVAEIPYVTLKRAEELIGAARKSIAAATDPITGQLVRTVAQQILQVGNTIKEQEKLMMNSCKIPEIDLLKSFTGIGNFSALGLMLEIGTVDRFRSVKALASYFGLHPVYKESGDGIGGVRMSKMGRKEPRWILFMVATCAIVKNEMIRELYLEYLEKGKTKMQAIGIMMHKILRIIYGMLKNHNPYDPEIDRANRNKPVEQVMVQRTGKARRFQVQDHQAPISRRQNKKRKEQAESQNDNIIKNGIITPAQEKDNKILEEIPMR

SEQ ID NO: 499430 - protein, 367 aa, unidentified
MKKISTVATQQSRKMSEPELTIGLDLGDRSSWCCVLDEAGAIVREQKLGTTPKAMKEVFGAVPRSRIALETGMHSPWVSRLLSQLGHEVIVAHARNVRLIGESRKKDDRIDAQTLARLARIDPQLLSPVKHRSAKAQADLTVIRARAGLVRARTALVNTARGLAKSYGERLRGCNVRNMNAEKAQGLSPELRTALEPLLAGIESLSERIRECNEGIERLARESYPEVAQLKQVKGVGTLIALTFLLTLEDAHRFRQSRDVGCYLGLQPGRRNSGQSEPQMHISKEGDPYLRTLLVQGAHHILGPFGADSDLRRWGLKLAERGGKSGKKRAIIAVARKLAVLLHHLWVSGEVYQPLRLSKLRAMPAAA

SEQ ID NO: 499431 - protein, 353 aa, unidentified
MQYIGCDFHPSFQMIAQLDKKTGELVRRRLGHGEGQGEVQRFYQALPGSWVVGVEATGNTYWFERLLEKLGHQMWMGDAGKIRQQDGRKQKHDKRDARLILRLLLEERFPRIWIPSVAERDLRQLLLHRWHLVRMRARIKNQLQHIALNQGLQKKSKLWTKAGLEQLRKLELEPWARQRRDELLEMLEQMVERIEPLDQAVEQAAAAQPRTSRLQTHPGVGPVIALATVLTMGEVGRFPDSRSWVSYLGLNSSEKSSGEKRWLGAISKQGNPFLRHLLVEGASSAARGDKDLGRVYARLKARKHHGVAKVAVARKLAVRLYWMERTEKSYPEVVRMQGSLSHPVVSSHGRDLE

SEQ ID NO: 499432 - protein, 338 aa, unidentified
MALYCGIDLHSTNCWIAVVEDGRQVIKEKRIGNDLTSILEFLEPHRPELEGIAVESTFNWYWLVDSLMDAGYKVHLTNTWAAKQYEGLKYADDRHDARWLAHLLWLGILPEGYIYPKEERGVRDLLRRRTFLVHKRTSFVLAMKGAFACRTGMNVRSDDIKKWTAEDVGLHIEDPLASLGITCLLGPMDALNEQIKMLEKEALKRGRLRDEFERLTTVWGIGKILGLTIMYEVGAIERFAKVGNFASYCRCVKSDWLTNGKRKGSGNSRNGNPYLSWAFSEASHFSVMHHKRAKKYVQRKRAKTNGIVAIRALAHKLARASYYVMKDQVDFEPERLFA

SEQ ID NO: 499433 - protein, 346 aa, unidentified
MNETTTIGLDIAKQVFQVHGVAVDGTVTVKRQLRRSEVIRFFDKLPRCRVGLEACGGAHFWARELTVLGHDVRLIPASYVKPYVKRGKTDAIDAEAICEAISRPTMRFVPIKTVDCQAGVMLLKTRHLLVKQRTQSINSLRGHLSELGIIAARGTGKVETLIAIIRDKTDERIPAVARRALEMLAEQVEALVRRIATLENEIVSEVRRDDTMRRLATIPGVGPITAATIVALVPDPGAFNSGRHFAAWIGLTPKMHSTGGKERLGRISKMGNPVLRSLLVVGATAVSRHARRGATVSPWLTGLLARRPAKVAAIALANKMARVIWALLTKGGVFTRRPATAAQHAA

SEQ ID NO: 499434 - protein, 410 aa, unidentified
MDVVYERCCGLDIHKQLVVACLIVPGAAGQPVKEVRSFGAMTADLLELADWLAGAGCTHVAMESTGVYWKPIYNLLEGQFELLLVNPKHFRAVPGRKTDVRDAEWLADLLRHGLLRASFVPARPERELRELTRYRTALVRERSDEVNRVHKTLEGANIKLGSVASDLMGRSGRRILTALAAGQTDPAQLADLAQDKLRKKLPELERALRGRMGAHQRFLLAQQLGHLEFLEHAIEQVSAEIAERLRPFEADLTRLETIPGVGRRVAEILVAEIGTDMSRFASAGHLASWAGMCPGQNESAGKRKSGRTRKGSPWLRSVLVEAAHGAARSKGTYLGAQARRLKPRLGWKKTMVAVGHSILVRAYYLLERGTTYEEPGADYFVEHDRDALQRRHVRGLERLGYRVTLDQEVA

SEQ ID NO: 499435 - protein, 307 aa, unidentified
MTTKNYIAIDIAKDSLAVASDSFKGSFPYTDSGLSKLLKKIKVLDFPMVVCEATGGYESKLMSLLFKQEIPVALVNPSRVRNFARSEGTKAKTDPIDAQMLLRFAKSKDLRPTPAPSEQQQSLQALMDRRSQLTESLAREKNRLQKSPQSVHKSIEKMIAFIEKELKALEGQIQKIIESDEEMNQQNLTMQQVSGIGATTAWSILAYLGEINSLSRNQLVALAGVAPYNKDSGKFKGKRRIEGGRAKVRKCLYMAAQSAAVHNPHIKAYVDGLRARGKPYKCAIVAAMRKLLIHLQSLLKNPQKALA

SEQ ID NO: 499436 - protein, 405 aa, unidentified
MDIIIEKGCGLDVHKETVVACIMGAGMKEEIRTYTSMTHDLLRLKGWLQEAGITHVAMESTGVYWKPVFNILEDCFEVILVNARHVKNVAGRKTDVRGSEWLCRLLRSGLLRGSFIPPRGIRDLRDLTRYKRKLIQAIVAEKQRVEKVLEDANIKLSSIASDTFGVSGKRIIEELIKGKLGAEEMAELSKGRLRPKRDHLKEALVGEVREHHKFMIKVSLKHIRAMEKILLGIQKKIREKIERDYKEEDELLQTIPGVKENASTIIAEIGVEMDVFPDEMHLSSWAGMSPGNNESAGKKKPGSTTYGNKCLKAILIEFGWVASRMKGTYLRSKYHSLVGRRGKKRTLAALGHKILIMCYHILKYKRPYKELGEDYLDKRRKDRITRSYIKRLNHLGDEVILQEAA

SEQ ID NO: 499437 - protein, 429 aa, unidentified
MAVVMIGVDPHKASHTAVAISAAEEPVGQLRVRASAVQAERLLGWAQAWPERAWAVEGAGGIGHLLAQQLLSAGERVLDVPPKLAARVRLLATGDVNKNDPNDARSVAVAALRSAGVREVRRDDHAAVLKVWSKRHQDLGQARTQVACRLHQVLCELIPGGVPGQITSGQAGQILASITPAGAVEAARWELAAHLTEDLRGIDTRIRQTRKKTAAAVAAAGTSLTGLFGVGPVIAAAVIGDVRHVSRFPDRDHFAAYNGTAPVEVSSGGRKVYRLSRRGNRRLNHAIHMAAVTQIRYRHSPGRAYYDKKLAEGKTGKEALRCLKRQISDAIFACLQADAQRAATAAAKSPGGQPGNHSSSRAAGSNPEHRRFGQATPGPATHPTAPAAPAAFPAPLPSRASRRTGQGPGAARPRGGAAKASLKRPPASR

SEQ ID NO: 499438 - protein, 341 aa, unidentified
MEHITTIGLDIAKHVFHAHGADAAGKVLLRKRLTRAKLLGFFATQPPCVVAMEACAGSHYWAREIGKLGHTVRLIPPSYVKPFVKRQKNDAADAEAICEAAQRPSMRFVPVKDEEQQANGVVFRARDLLVHQRTQCINALRGHLSEYGYVVPQNITHAASLIAHVEDPNCALPDNARTILKILIGTFTALETQIKELDAKINRRSKEDPIAQRLMTIPGIGPITATAIIALVPAAAGFRAGRDFAAWLGLTPLQKSTGGKQKLGAVSKRGERTIRRLLILGASAVIRQACRRGAPAGSWLAQMLPRKPKMLVTVALANKMARVVWALLVRGGVYRAPAVAA

SEQ ID NO: 499439 - protein, 326 aa, unidentified
MTDVVGIDVSKAKLDCLWLRDHTTLKVKTKVMANDNKGHQALCQWLPKTLKLEPAQILVVMEATGIYHEQLALTLHDAGFRVAVVNPAHIKAYAHSLGNTHKTDKQDSLIIARFGAERDPALWQPEPLEIRELKALIARLEALEVDYQRESNRLEKAELRPASQTVLDSIHTMLSELEKAKRRIEEDIDDHIDRHPGLKHDKALLESIPGVGKVVSRLMLSVIHSRDFTGAKQVAAYLGLIPTQVESGVFRGRSALSKRGPASVRAKLYMAAGCASQYNPDVSAMKERLLANGKNRMQTIGAAMRKLVHICFGVIKNQTEYRPQTV

SEQ ID NO: 499440 - protein, 411 aa, unidentified
METTYQVVGIDVHKSMLAVVVADAAAEGEFQFERRKFGTTESELRQLAQWLAERNVREAVMESTALYWRPVWQQLEGQCDLYLAQAQSNRAPRGRKRDFADAERLLRRHVAGELILSFVPGPEQRLWRTMTRAKHQLTRDRVRIHNQLESLLEDGRIKLSGCVSDLLGLSSRRMLKALAEGERDAARLASLADPKLRATPEQLQDALYAAPTLSTLHRQILGLFLSRLELIEHQIEVLDKSVGQALLAHQDAVLRLAEVPGYGVDSAQQVIAEVGPAAATFPSPEQLSSWVGTCPGREESAEISKNNRSPKGNRMMRRVLNQVAHAAVKTKGSVFQALYRRLVIRLGHNKAIWAIAHRLCRLTWKILHQGVRYVELGTRSNSRTIKARANKLIRELRSLGYQVQLSQMATP

SEQ ID NO: 499441 - protein, 343 aa, unidentified
MQTITTIGLDIAKSVFQVHGVDAEGNVVIRRQLKRRYVLGFFQKLPPCLIGIEACASSHHWSRELQGLGHTVRLMPPAYVKPYVKRHKNDAIDAEAICEAVARPNMRFVATKTPEQQSGLVLHRTRHLFIRQQTAVINSIRAHLAEFGLVAPVGRNGVEQLLSVAADSNDKRLPEVARACVVALGAQLQTLKAQILQFDRLIMAWHRSSEASRRLDDIPGVGPALATALVASVADPKVFRSGRDFSAWIGLVPKQNSSGGKDRLGHISKRGDRYLRSLFTTGALAVIRYAKIHGTKHRPWLTALLARRPTKVAAIALANKIARIAWAMMARGERYKQPAALAA

SEQ ID NO: 499442 - protein, 400 aa, unidentified
MRAVFGIDVSKASSEVAILVNGEKVHGYTISNDAIGFARLLGDLRTVHKPEIIFEATGVYSRRLPTFLEDNGYAYTRLNPLEAKKQLDSLRVRKTDQIDAEKLAQSQFVLNRKPTYVQEEVYQNLRDLSRFYQNLTEDIVRAKNRLHKVLQVTFPELENILSTPSGEQYWNLVIAFPCKDFVLDLSKDELSESIRQSTSKRISDKRVAYLAEKLIALANQSYCAVKKTSPMLEEVRYYTKELLRLSEQRQAVLDEMVELAQPLPEYDILLSIPGIAETTATSIIGELGDIRRFQSANQINAFIGIDLRHYESGNFLAKEHITKRGNPYARKILFKCIHNIASASHTNPCHIADFYEKRKRQSQTTSTKPHTIASIHRLIRTMYYLIMHNKLYDYASTQNR

SEQ ID NO: 499443 - protein, 387 aa, unidentified
MTNKTLQTNDTQPVRLLVALELSLKTWRLAMAVAGEPKKRFKTIAGGDYVALGQAVEDSQAKWGMGVETPVVFCYEAGRDGFYPYRQLTAAGHTVWVIDSASIEVSRRKRRAKSDGIDADKLLGLLQRYAGGEKSALRVVRVPSAAVEDLRMLPREREMLLKERQRLRNRIESALFGQGYRAMPKTAKRLAAWLQERTDLGDYLKSRLDREVARLALVEEQLREVEIRQAQAIKTEGGSASAAGEVLSIAQALQGLVGIGLMGAWVLACELLGWRDFHNRREVGGALGLTPTPYSSGEDQREPGISKAGNRRARSLLIELAWLWLRYQPDSALSRWYRTRFAGGGKRQRRIGIVALARRLAVALSRYVKTGAVPEGAKLKPIPLAAD

SEQ ID NO: 499444 - protein, 312 aa, unidentified
MISNTIGIDVSKDSLDAHRLADGKSRQFTNTISGLKALLRWLDEAPADLVAFEPTGSYHRKLELTLARAGKPYAKINPLRARRFAEGCGTLAKSDRIDAGILARMAALLDLKPEPRNHENIIELRELNAARVALIKDRTAAKNRQKQLTQQLLKRQNIDRLAQIKRQLDAIEKAIAELFEDDPDLQRRLQILISIPGISKITAFTMLIEMPELGTLEGRKAASLAGLAPMTRQSGRWTGRAHIRGGRANLRQALYMPAMVAARFNAALKSKYQALIAAGKPGKVAITAIMRRLVIIANALLRDNRTWTSEAP

SEQ ID NO: 499445 - protein, 349 aa, unidentified
MKPTANHAGRVHTLGIDLAKQTFSLHGVDGHGKSVFSKTVSRAKLLEHLQQLPPCTIAMEACSGAHHWARCVQAMGHSARIMAPRFVAPYRKGGKNDGNDAEAICEASSRPSMRFVPVKSAEQQAMLCLHRVRSALIKDRTAMLNQLRGLLSEFGIVMAKGRYPAQAALVEILDDDHNGIPPLARRLLRDVHQRLLMLNEQLLGYDRELEHHAKQCPHAQRLMSIPGIGAITATALVASIGDPGLFKNGRQFAAWLGLVPRQFSTGGVTRLGRITKQGDKYLRMLLIHGTRAVLATLKDKRDKLSQWTRALIERRGYKRATVALAAKNARIVWAVLSHKTEYTARLAAS

SEQ ID NO: 499446 - protein, 338 aa, unidentified
MPFYGGIDLHANNSVVVLLNEQDQVIYQRRLANHLPTILEPLALYQADITGVVVESTYNWYWLVDGLMEAGYRVHLANPAAIQQYRGLKYTDDHSDARWLAHLLRLGVLPEGYIYPKAERAVRDVLRKRAHLVRQQTANVLSLQNLIVRNTGVRLSAKRIHALTVEDLERLLSVPEHVLAVTSSLVVVHCLAQQIKTLEEMVQKRLKHTAAYAQLQTVAGIGPILAQTIVLETGQVGRFPSVGNYASYCRCVGSTKISNGKRKGQGNVNNGNPYLEWASMEAAQFAIRFSPTVQRFYQRKQVKSHLMIARKAVAHKLARACYYIMRDLVPFDVHKAFG

SEQ ID NO: 499447 - protein, 425 aa, unidentified
MKIVYPICCGIDVHKSFLVATIVSVTELRTLKYKKERFSTFNKDLQRLKHWLMENNCYDVCMESTGKYWVPVLNVLEPELRVVIVNPKWVKAINGNKDDVKNSKWIGELFCFGLVRSSFVPEKPIRILREFTRYRYKLVNMRSSEKNRFQNGFTVCNIALDSVVSDMFGKSASRITDYLLSDENPDAAHCVTFLHRSLKKKAVAVVESIDGFQLTEEQKFRMLQVRQHMEYLDSAIEAIDRKLEEMASPYAAAIKFLCTIPGMKHDSAVTVISEIGTDMSQFGSSKRLCSWAVQTPGNNQSAGKKKSVKITRADVYIKPMLVQVAHAAVKCISQPYYKVKYESIARRRGKKRAIIAIARMILTAIYHMFCTGEVFNPTDLRQIDMLKELKKKNVANAIRLLKQQGCSSRKLHGSFLRIGAKVVKV

SEQ ID NO: 499448 - protein, 349 aa, unidentified
MRRLFCGIDLHSNNLVAGIMDQAGTRVAHKKIDTNLTKVDDFLKPFKQELVKVAVESTFNWYWLVDGLRAKEYPAVLANPAKIEQYSGLKHADDTNDAFFLADLCRLDILPTGYIYDPKLRPVRDLLRRRLNLVRQRTALILSFKSLYTRTTGEQMTLARVKGLEVKEGAEIYKHPANQLIAELQLQHIDQFNQSIERIEKTVLKVAKHLPYYPKLKTLPGVGIILGLTITMEVGEIKRFAEAGNFASYCRAVDSQCISNERKKGENNRKCGNKYLAWAFVEGANFAKRFDENCRKWYDRKAARKGSIIATKALACKLAKAAWFLMAEGTDYDASRVFPEVLAAKGKSK

SEQ ID NO: 499449 - protein, 306 aa, unidentified
MSPHPIIGIDIAKDSLQIDDGTCRRVVRNHPAALRRWLRGLPAQTQLICEPTGGYERMVLRLAHQAGLPASLVNARQVRAFAHGVGRLEKTDRLDAAVLRHYGQCVQPRPLPPPDPAWLRLQQWTRTRAHYAGLRQAEHNRLELLEDPALRQLTEAQCAHWDQLLLGLDAQIEAHVAAHPALQDRVQTLCLVCGVGPQTALTLVAEFPELGRLTPRAAAKLAGLAPLSHDSGQWQGRRHVAHGRASVRRALFQAALVAARHNEHLRPFYLRLRAHGKPPKVALIAVARKLLIFLNRTLREPAPPPA

SEQ ID NO: 499450 - protein, 426 aa, unidentified
MTATHSIAPTLLVAIDISKHRHEVLIGIPGKTRRRRLTVMNTLEDFQRLSAALASYDLPVRIGFEATGNYHRTLAHHLGRAGFDLKLVSSVALARTREALHNSWDKNDPKDAQVILHMLEIGAVQFFHDPLAAGTSDIQELSKTHEIVSRSKTELWHRILTHYLPLYFPEAERFHRSARTDWFLAFLEKYPSPHMISAMGRDAFIADAWDVVGRKVSKEQLLSDVYATAAGSVGLPVHPDSDAVRMFRLVLAEGRSLVRRRDEIEARAVELLSDLPDYQLLTTIPGIGPINAMTILAEAGDLRRFRHHRQFLKFCGMDLATVQSGMFRGQSRISKYGNARLRRTLWMAGQTAVLKRTNSFRDKFERYISKDRHNAHLRRKAYTAIAAKMARTVHAVVNHGEPYRPFFEGVSPGGRTSLRRAVEAAC

SEQ ID NO: 499451 - protein, 429 aa, unidentified
MQNESTPDARGPVFCGVDTHADSHWLCVLDWRGRRVLSRRFPADAAGYEALAGAIAAAGEPACVAMEGTSSYGAGLTRHLASLGMPVREALSPARMQRRRPGQGKCDEADAERAARAAMSGSRLGTPKSQDGWVDGVRCMLAARSGAVKARTSAINTARSLLTTAPEGLRSRFRGMGGPRLMEELPSVRSEGALGAALGALADLWAAARDAALDMERAIEASLEENCPALLAMYGCGPVSAAKLAVAAGDNPGRLRSEASFAAICGACPIPASSGKTVRHRLNRGGDRQANSALHEIARQRVMRDPETAEYAERARARGKSDREVMRCLKRYVAREAYRALMHPHEIRRPADASELVAARRAAKVSQVRAASILGTSEKYISMLERGQRELKPIRRAYEAWVEAGLPLNWDRQAFEAERKMDSKKHLAK

SEQ ID NO: 499452 - protein, 408 aa, unidentified
MKVLNRRCAGLDVHKDEVVACVRLAARGKPSHEVRRFATTTRGLLQLADWLEVSGVTHVAMEATGVYWKPVWHVLEERFQLVLANAAHVRNVPGRKSDVNDATWIADLMAHGLIRASFVPPAPIQELRDLTRTRKQLSREIVQHMQRIQKVLEDANIKLSSLISDVLGASGRRILKALIAGESDAAALAALGGSGLKCSRQELKHGLEGRITAHHRFLIGQHLRMIEELEAVLVAFDARIKAALAPFRDAAERLTSLPGISDIAAQVIIAEIGADMTPFPTAGHLLSWAGLTPRLDESAGKRRSTRVKKGAPWLKPLLVQCAFAATRAKNSYLQAQFLRLKARRGPKKAAIAVAASILTAVYHMLRDGTFYTDLGPHHFARHDKTRAAMRLVRRIKDLGYDVEIKAAA

SEQ ID NO: 499453 - protein, 410 aa, unidentified
MEVLHQRCAGLDVHKKTVVAAVRLVEGNKVITEVRTFATTTAGLLALADWLTQNGCMHVAMEATGVYWKPVWHVLSDGEIELVLANAAHVKNVPGRKTDVSDAAWLAELLAHGLIRASFVPDGQTQELRALLRTRKQLVRERSRHVQRIHKVLEDANIKIDAELSDMLGKSGRAMLNAIVAGETDPVRLAALAHPNVKAPQAKLAEALRGRVTHHHRFLLQLHLQQIDGLDTALGTMDGEIEANLTPFRSAVEIVSTHPGISTLSAQAIVSEIGTDMSRFATAGHLLSWSGLCPRNDESAGRRRSNRLRKGAQWLKTTLVQCAQAAKNKKGSYCQAQYLRLRSRRGPQKAICAVAASILTAIYHMLKNGTVYQDLGADHFNRRSKITQTQRLVKRLEHLGYAVEIQPLAA

SEQ ID NO: 499454 - protein, 385 aa, unidentified
MAPPRMPEAVIGLDVGKSSHWACVATRDGEILLSAPVANREDDLDSLFGRFPDALVVVDQSRNIGALALARARAAGMSAAYLPGLAAHGAARLFAGDAKTDERDAMVIAKTALGIPDALLPVGDPGPTVAAARALAAQRNFLTCENTRSKNRLRSILLESCPAFEALVDLSDGPQLRLMASLGGAWSVADAGPRRAAALTRGAARGKIEALVRSTTSSTRPDASVVAAEDRAVRLLARRISENSAEIEAITAEISALLEGDDTYRCLLTVPGIGPKTASELAISIDIEDFPSHDRLASYCGLAPRNRQSGTSISSVTASRQGNKRLKNLLIFSCNCLTRTEGRWGDYYARCRERGMPHGKALKALARKRLKVIYAIMRDRVPYAA

SEQ ID NO: 499455 - protein, 340 aa, unidentified
MKHIGMDVHSTTTDACVRNGSGVVVLQRRIRTTQNELIDFVSSIQGQKRVVIEEDQMADWVTRLLQPHVDEVIRSQPQYNKLISGSEDKCDKMDAKALSELLYLNRVKAVHHPEMKYRILREAVRAYWVASRDLTRAKNRLKGWYLFNGLYENGRSIYSVRNRSAHLKAMQQEGRNTELAKLLYEQMDACRQLKAKHIQMLRKTARPVKDLVKLVMTMPAIGPISGYTLVSLLEDGWRIPNKRKLWRYAGLSLRRYESRDFGMKGASKSGNRLLKRVAMSAAITIVARGESNGLLALWEKDIRQNVSPKRARRNLARKIVVIAQHLLRSKQEYIDERIKV

SEQ ID NO: 499456 - protein, 368 aa, unidentified
MQQTLYVGMDVHKETISVSVAEEGRGGEVRFLGSIPNQPPDIAKLAKKLSKGGIELQFCYEAGCCGYVIHRQLADLGHDCAVVAPSKIPRKPGERVKTDRRDSEKLAILHRSGDLTPVWVPDETHEAMRDLVRARLDASGHLTRARQQLLAFLLRHGRGYTTGKNWTQRHRAWLASQTFDQPAHQIVFQDYVEAVWTAQERRDALMERITAMVPQWSLGPLVEALRGLRGLDMISAATFVAAVGDLSRFETPRMLMSYLGLVPSEHSSGDRIYRGGITKAGNREARRMLIEAAWSYQYPARIAQEKAEVLVRLPKPVRDIAWKAQTRLCRRFRAMHTRGKKPTVVTAAIARELSGFVWAIGQEVRTAA

SEQ ID NO: 499457 - protein, 430 aa, unidentified
MTKRSSTPADAVLVAIDMSKHRQEVLIERPEGGRRRRMTVMATKADYDRLAYDLADIGRPIIVGFEATGNYHRTLAHRLLAAGFELRLISSVALARTREALHNGWDKNDSKDAQVILHMLRIGATQRYVDPLAAGINDLQEMSKTHEAISKAKTQTWHRILTHYLPLYFPEIERFAGNSRSDWFLALLERFPTPASMTALGQEDFAREAWTLVGRKVSKARLLNDIYETACASIALPVEEDSVSIAMFRMVIAQARSLIRQRDEIERTAHAILSDNRDYQLLRMIPGIGPINALTILAEAGDLRRFNHHRQFLKFCGLDLATCQSGTFRGRTKLSKYGNARLRRTFWMATQVAIRQRDNSFRDKLGRYVAGYGNDPDRRRKAMTALTAKMARVAHAVIKTGAEYRPFVERADTRWKDPSLSCREGATATL

SEQ ID NO: 499458 - protein, 346 aa, unidentified
MSLFVGLDISLKKTSICILDAQGVSIFQGTALSEPAAIMEKLSRWREDIVLVGIEACPLSEWLHAALTTSGYDARCLETRHTQRFLSTRPNKTDRNDAHGIATMLRLGHFKPVHVKSREAQLLRALLTGRRQVMDAMLRIENTIRGLLRVQGMKIGVVHRNRYSERVMVLCEDDPAVLVAVAPLLAARDTMRDQLRKLDLSVARQARHDPICALFMSIPGIGPITALAYKATIDDPQRFAKSKSVPAHLGLTPKVYQSGEIDRSGRISKSGDHLLRHLLTKAAASMLMRTSKWCALKHWGVKLAGKIGMGKAVVAVARKMAIIMHAMWLTGEVFRFGSGEPVPNTP

SEQ ID NO: 499459 - protein, 342 aa, unidentified
MAGIDLHSNNLVCALIDGEGNRLGQRRLPCQISEVNEYLKPYQERLEVVAVESTFNWYWLVDGLKALNYPVVLANPAGIQQYQGIKRVDDKCEAFFLAELCRLNILPTGWICEPETRAVRDLLRRRSLLVRNRTSLILSFKSLHARNTGQSMPLTRIRAMSQEEVGALYEHWADDLAARLEFELIEHFDASVKAIEKEVLQTVALWPAYRYLQTISGIGEILGMTIALETGDIGRFASAGDYASYARCVDSKRETNGKKKGRNNSKCGNKYLGWAFVEAAQFARRFNLQCRQFYDRKCAQTNNIVAIKALACKLAKAAYCVMKEQTPFNLEKVFPHMKIKSE

SEQ ID NO: 499460 - protein, 344 aa, unidentified
MDISVLGIDLGKNVCSVVGLDASGAVVMRRKVRRETLIALAEKLPPCVVGMEACCGAHHLGRVFAAHGHDVRLMSPEYVRPYIKAQKNDDRDAEGIAEAATRPTMRFVELKSQDQLDMQTLHRSRDRLVGERTALINQLRAILMERGMVAPQGKRKLEQFLAVLMDEQGGAGLSPRMIVLVADARTQWAELDRRIAAFDAELVRWVKENEEARRLTTIPGVGAIVASALVAAVGRAESFDRGRDLAAWLGLVPRQFTTGGKPKLLGISKRGNKYLRKQLIHGARAALPYVAERDTPLGRWAKGLMNRAHRNVAVVAFANKLARIAWAVLRRGERFAVTGMPVAA

SEQ ID NO: 499461 - protein, 384 aa, unidentified
MRPAAPSGDLAGDSLSVMRAKPVRPQSLELVGEQMVNAQRTPSSNRVTRTVANVMNVHPQGREAVAAPRANAGIDVSKDWLDVAWADRTERLANDAAGMESLTVLLRQQEVDLIVLEATGGYEKAAAAALQAAGLAVAVVNPRQARDFAKAMGVLAKTDKVDAKVLRSFADVLARHEKRSQFLHQVPDEKRAELAALVTRRRQLVEMHTMEVQRMAMTHAKRARKSLNNVILFLDQQLAEIDRELDQFTKDHFQDLRKLLSSAKGVGPVTTSTILAALPEIGRLDRRAIGCLVGVVPLARDSGKKRGQRSCWGGRSQVRHALYMATISAITHNPAIRTFHQRLVAKGKPPKVALIACLRKLLTILNAMVRDGTAWNPALHVKTA

SEQ ID NO: 499462 - protein, 401 aa, unidentified
MSTRQARIWVGIDAGKGHHWAVALDADGETLFSTKVINDEAQILALIETAGERADEVRWAVDISGRASTLLLALLVAHDQNVVYVPGRTVNRMSGAYQGEGKTDAKDARIIADQARMRPKGFAVLDTPPELVSTLRVLTNHRADLIADRVRLINRLRDLLVGICPALERAFDYSAAKGPVVMLTEYQTPAALRRVGVKRLTTWLERRKVRGAGTVAAKAVEAAQSQQIALPGEKRAAKLVRDLAHQLLALDERIKDNDREIRETFRGDDRAEIIESMPGMGPILGAEFVAIVSDLSGYRDAGRLASHAGLAPAARDSGRRTGNHHRPKRYNRRLRHIFYMAAQTAMMRPGPSRDYYLRKRSEGLIHTQALLALARRRVDVLWAMLRDKRLFTSAPPVTQAA

SEQ ID NO: 499463 - protein, 461 aa, unidentified
MNKKRPTGKQKRSVPKRVDWKALEVVHPDAAGIDVGGNEHWVAISPDRDPEPVRRFGCFTADLHEMGRWLVEKGVRSVAMQSTGVYWMPVFEILEQQGLEVYLVNAQHTKNVPGRKSDVQECQWLLKLHAFGLLNNSFQPTDEIRIARTLWRQRGNLVAEASTTIQRMQKALTEMNVQLGNVLSDLSGMSGMAIIGAILQGERDPWKLAALVAPEVKATPEDIVKSLEGNWREELLFVLRQHVELYRIYQEKITDCDLQLRKHLESLGAKVDLEAHPIGPRPKGKKNSRNAPGFDLRAELYRITGIDWSQINGIDVLTAQTVVAEAGADLSAFPSEKQFASWLGLCPTNEQSGGRILNRRTRKVVNRATVAFRSAAVTLLRSQSYLGAQYRRLRTRLGAPKAITAMARKLACLFYRLIKHGQQYVDKGTEYYESRYREQQVRSLAKRAQKLGLQLVIPKTA

SEQ ID NO: 499464 - protein, 343 aa, unidentified
MEYYVGLDVSLKQTSICVVDQTGSVVREGVVDSDPEAISVFVRSKAPEAVRVGLETGPTSTWLWTELKRLGLPVICIDARHAKAVLRMQINKSDRNDAIGIARIMQTGWFKEVHVKDIDSHSVRALLASRALLVKIKRDLENHVRGLLKNLGLVIGRATFNVFAVRAEELIEDRPDLVAAVRPLLEARNAVEQQVSELDRKVMKLARRDAQVQRFMTVPGVGPITALAFKATIDDPARFARSRSVGAYVGLTSRRHASGEIDWSGRISKCGDVMLRSYLFEAAGVLLTRVPKWSTVKAWGTRLAKRNGLRKAKVAVARKLAVILHRMWIDGTEFNWSKKEIAA

SEQ ID NO: 499465 - protein, 332 aa, unidentified
MDIAKHVFQVHGVDAAGAVVVRRKLRRDDVVGFFKPLPPCLIGIEACATGHHWARVLLALGHEVRLMPASYVKPYVKRQKNDAADAEAICEAVARPTMRFVPVKSEEQQSVLMLHRVRELLIRQRTMLVNALRGHLAEFGIVTRQGIVGVGMLIALVEDDGQNLIPPLARSALLSLIGQLREVHEKITEMDRQIHGWHRSNELSRRLETIPGVGPITASAIAATVTDASLFKSGRQLAAWIGLVPRQNSSGGKDRLGRISKQGDPYLRRLLVVGAHAVLRFSRKARVPPIRWAAELLAKKPYNVVAVALANKMARIIWALMTTGRRFEAAAL

SEQ ID NO: 499466 - protein, 478 aa, unidentified
MKKPEEDSLQQQQETKTKRRRRNKGMCLEDRPVLEPNAAGIDVGAREMFVAVPPGRSENPVRIFATFTEDLHRLTDWLVQCGITTAVMESTGVYWIPLFEILEQRGIRPCLVNARHMKNVPGRRTDWHECQWLQFLHSVGLLRAAFRPEQHICAVRTVLRHRNELLQAASQHVLHIHKALTQMNLQIHHVISDITGVTGLAIVDAILAGQRNATELAQLRDPRMKVNTETIRKSLEGNWRSEHLFTLGQSRDLYRIYQQQVVKCDLEIEEMLQQFEPRADPAERPLPPDRKLNRDGRKKRKKNGHPHPEFDLRTETYKLFGVDVTQIPGLDENALPLFSEVGRDMSRWPTAAHFVSWLALCPDNDISGGRVLWRGARRIKNRAGHLFRLAAFSLHHSPTPLGNYLRRMKAKLGPKAATMATAHKIALIFYTMVKNQVEYDKTIWATRDSQREKRLEAKIKRQAKQLGYELVPIVPKAA

SEQ ID NO: 499467 - protein, 387 aa, unidentified
MAQVNDLSRSLTAFDPISTLVVVVEMSKASWLVSGVVPGVERQPLKKLEPDATALLRLIERWRNEAVRAGRPISRIALAYEAGRDGFWLARWLIARGIEAHVIHSASVAVSRERKRAKTDRLDAAMLMRVFLGWLRGERGHCGMVAIPTMEEEDARRPSRERESLVDERSRITNRMKSALARLGIRGFKPHLRKAPERLAGLRTAEGTGLPANIIEEFRRDMARLALVREQISSIEKTRAERLERAPDTGPHAMVRLLARVIGIGIETADMLVREILSRKLRDRRAVARYAGLTGSPDESGLKRREKGLAKAGNARVRRGLIQLAWRFLVFQKDSALARWYRTRTEGPSGARKTTMIVALARKLLIALWRLVTTGEVPDGVELRPAA

SEQ ID NO: 499468 - protein, 411 aa, unidentified
MKRVYDNCCGIDVHKKLIVACFKQGSEQEVREFGATTRELLELCRWLKDGDCEMVAMESTASFWKPLYNILEASELDAIIVNARHMKNVPGRKTDVNDAEWIADLLQHGLIQASYIPDKDQRELRELVRYRKSLVGERTRELNRLQKMLEGANIKLSGTVSNINGKSARAILEHVLTGESFDDAKYDEMYENNVISHRLKASKEEIIDDLNGVMSALQRRMMKELLIHLDELNIHIRNLDDEINNFMKPEAKTASVALQEMPGIGETSAQAILAVIGTDMSRFPTAGHLASWAGLCPGNNESAGKRKTGRTTKGNCLLRETLITCAHAAILKKDTYFYAQFQRISAHRGKKRAYVAVAHSMLTAIYHMLKDGVVFKDLGADYYNQFNRERKINACLRKLERLGYRAEIAAT

SEQ ID NO: 499469 - protein, 410 aa, unidentified
MPNYEVYVGIDWATRSHQVCITDAGGQRLGESTVAHSGTGLDEFVAELTRHGPDPTRIAVALEVPRGAIVDTLLERGFHVFALNPKQLDRFRDRHTVAGAKDDRRDAWVLADALRTDGAAFRRLNPEDPRLLQLRELSRVHDELVQEHSRLTNRLREQLWRFFPQALALCPAADEPWLWSLLEEAPTPARAQRFTRAALRALLARQRIRRFTGDALYTALQERSLRVAPGTIEAASEHLALLLPRVRLVHEQQRRCERRLDGLLAELATPARQDEQQEHRDVTILRSLPGVGRVVAATMLAEASRPLAARDYQTLRAHAGVAPVTRQSGKGRFVAMRRSCNGRLRGALFHWARNSVRLDAHCRAHYARLRQRHGHARALRGVADRLLGVLVAMLTSRTLYDPARRHAAPA

SEQ ID NO: 499470 - protein, 355 aa, unidentified
MLYLGIDQHARQLTISLRNEEGDVLLARQVSTQPDKINAFFEYLTRECLQGDESFVSVVEVCGFNDWLIRMLRDYHCHKVILIQPEERKRQKTDRRDAAALSELLWVNRDRLLAGKPVHGLRQVDIASTTDQENRRLTTLRKDASRGRTRLINRIKHIFRRHNLQWEMPTKTFPTQAAIAWLKQLVLPEIDQLEMNYLLIDLELAQQRMRELEEKLAERCGNSEAATLLVSMPGVSHYTATALACRVGRVKRFARSRSLANYWGLTPGCRNSGESNQRLGSITKAGSSMARWLLAQVAYQALKKDPKLREWFKRIKRRRGSSIARVAVMRKLATIIWHMLSKRKTYAACRTLATD

SEQ ID NO: 499471 - protein, 351 aa, unidentified
MLILGVEYHPSEQYSALADTETAECGERRLNHSAGEAEKFYRNLQQRAASVRVGMEATGYSRWFERLLAELGSELWIGDAAEIKTKRVRKQKTDPNHARLLLQLLLEDNFPRIWVPSPENRDLRQLLWHRHRMLQMRTRIRNPLQALAMNQGQRRKKKLWNEPGRAPLEKLPLAVWASRRRTDLLELLDRMNPPIEGLSAAIEREARKWPEVLRLMTHPSVGPLTALAFVLIIGTVERFKCGKQIGSYVGLIPCEDSSAGHQRLGHITKQGSSLLRFLLGEAAQAAARCDADWRRRYLHLALRRQRNIAKVAMARRLGVRFYWMWRKGWEYSEWVKFGSHAGQLGTGDGVQ

SEQ ID NO: 499472 - protein, 427 aa, unidentified
MFTAAFASLTKMNFNKLLSGNITKYQKEGFIMISVGIDVSKGKSTVCIMKPCGEILESPFDIGHTADELDSLISLIKSFDEETRVVMEDTGHYHLPVATYLSSHNIFVCCVNALRMKKFCSQSIRRAKTDKIDSIKIASFGITYWNELVKAYPSNVIYDELKFLARQYYQVTGMLVKSKVNFSNLLDQVMPKINDVLSNQGENHKLTEFVSRYIHFQNILDMGEMKFTSDYCKWAKKKGYRLNERKAAEILALAQNGIPTLPNSQSVKIAVSEAVKLIHSIEESRNTILAQMQDFCNTLPEYSVVKEMDCIGDTLAPRIIAEIGDVRRFKNKHSLIAYAGIDAPPYQSGAFHASERHISKRGNSYLRKTGYEIMQSLIKHKPADNAVYDFIQKKRSEGKCGKEAMIAGLNKFLRVYYGKVMEFYSEH

SEQ ID NO: 499473 - protein, 338 aa, unidentified
MSSQSSSLPAGLARVQVGIDAAIVADHHVCVRVVDVDGRVDVQRLRVSPTLAGLATLSKRVAAYPGVVAVAEPTSMTWLALSVALSNAGAELALVGTRHSARLRGAISGKNTFDVIDADVLARAGVVFDLTPLRLPSAAQLALRRSCMRRGAAVVDANRYQRRLLSLARWAFPDVWNAFAGSLPTARAVLTRWPHLSQLANARRPALTAVVAEHTRGVADVPARAEAIRTQARAWESFWADRLDLDALAFDVTEHLGDLQVAEARVARATQIATQYWGRLHGDDAVLNSVPGMGPVTAPTVRAFLGDGTWFAAAKQAASYVGLTPSNWSSGTVTIQGP

SEQ ID NO: 499474 - protein, 345 aa, unidentified
MESMYYIGLDVHKKTISYCVKDRSGQIHREGAIPATRVGLDLWMKTLPQPWTAAMEATLFTGWIYDHLLPHAVALKVAHPLMLRAIAAAKKKNDRIDANKIADGLRCDFLPECYMASTEIRERRRTLRYRNLLVRQAVQLKNKISGLLMEAGVSYNKQKLHKVGYFRELLATNQEIGEGLRPLLRICRETLVRLQKTESALVRSLEHDPLLAERVERLMTIPAVGPITALTWVLEIGDVKRFSSIKKAISYCGLCGAENSSANMIKRTPLSKQRNKHLQSVLIEAAKLAPRRSSGLALVYDRERQKGNANRATLAVARKLVAYLVAVDRRQKEFLTVERENRTAA

SEQ ID NO: 499475 - protein, 416 aa, unidentified
MDAIVERCAGLDVHLDTVVACVSYGKLDIKPKKEVKTFSTTTKGLLELLDFINQKECTHVAMESTGIYWKPVWNILESGAFDLIVENAKKIKNVPGRKTDVKDAEWIASLLRGGLIEKSFVPPERIRDLRDLTRLRKEWLGEVNRKKNRIHKVLQDANIKISSVLSDVFGETGKSILNQIIGNQCITEEFIYSLYEGRGKSKLKSTLMEMYEALNGKIRGHHVILLGMHNSNIVFLEKQINELEKEIDILLQKERDSLELLETIPGISKISASSIIAEIGTSMDVFKTEKHISSWAGLCPKNNESAGKKKRSGIKSWNNWLRSMLCECAWSATKKKDSRFKNKYWSMVPRMGRKKALIAIANMMLRLIYHLLKTKSTYKELEIQYFIDKEKRREDRIIKELKSKGYLVEKDSLQMA

SEQ ID NO: 499476 - protein, 384 aa, unidentified
MVDTASTARDDARAYCLIAIELSKTSWVVGVQTPLSGKTSQYRLTGGDWEGLLKLIERVRRQVGRELSRPVEMISCYEAGYDGFWLHRLLTAAGVHNHVLDPASLLVNRRARRAKTDRIDVERMLRALNRHLRGEPDACSVVRVPSVEQEDARRLHRERHRLIQERVQHINRIKGLCATQGIYDYEPLRSDREAQLENLRTGDGRALPARLEAEITRELQRLELVLEMIVGIEAERDAIVKEAAPQHLHADRIKALVRLKSIGMEFATTLVGEVLYRSFDNRRQLGSYVGLTPSPYSSGSTDRDQGISKAGNPKARSTMIELSWMWLRHQPDSTLSIWFRERVGDLKGRPRRIAIVAFARKLLVALWRYLETGLVPAGAVFKTR

SEQ ID NO: 499477 - protein, 438 aa, unidentified
MGSNYAGVDWASEKHDLLVADETGEAILAATFAHDERGLIALCKALVRLRVELVAIERPDGLLIERLLDAGLRVMAIHPNQVAAARPRFRTSGGKSDRFDAFVLCELARTDNHRFRVLVPDGDQTKGLRALTRAREDLVATRVALANQLRTELERYWPGAAAIFKDVDSPISLAFIKRYPSPGDARGLGSQRLGWFLARHAYSGGKQPEQLIKKLRSAPDGRAGEQEIEARRQIVLALVTAIEPLVAKISELTSEIGHCLRAHPDGHIFLSLFKGKSVITAAELLAEIGDCRDRYPTADALAADAGMSPVAIESGKRKVAAFRYGCDKRLRDAFGVLADTTRRWHPWAGDHYARAIQRGHDHPRAIRTLGRAWCRVLWRCWQDGVAYDPVKHRGLQHHITVTIPTVSGPVVDQAATERMASGFPATNPSHSDKMTAAP

SEQ ID NO: 499478 - protein, 360 aa, unidentified
MAKPSLASLEQFVCGFEGQPFWIGIDVHKQSYSFALRRSDQRCLTWVGPANPKAVVDQIQRLGIAVAAIAYEAGPTGFPLARELQAAGLPVIVAAPSRIPRSVTTGAKCDRLDCLKLADYAAKGMIKAIAIPTPEEEARRALMRRRHSLVDAIRRCRQRIKSQLLFLGLPEPAELAHWSHGAADALLALAMEPSARLVLESHLRELAFQKIELRTVEGQLHQTVMTSEQRQQISCLQTVPGVGPTVATTFALELFRTKRFQRAEEVASYLGLAPMVRHSGGKTPSGRLVPAGQTRLRSLLVEAAWIWKSKDPFAAELYNRLLSRSGLAQKAITAVARRLAIILWRLAVEQRPYRFSTQTP

SEQ ID NO: 499479 - protein, 352 aa, unidentified
MMIIGCDFHPRFQQIACLDTKTGECNERRLMHTGEAERFYRSFAGCQVRVGVEATGNFAWFRRLLGELGHELMLGDATAIRASNPRSQKTDKRDARHILRLLVEERFPVVWQPGVENERLRQLLLHRSSLVRMRTRMENQLDSVGKNEGLVESRRWTAKRRSAVEGLKLDGWYGERRRDLLALLDGLEERIKPLDQAVRTAAEADPEARLLMTHPGVGPVVSLAYVLTIGDWQRFPRGKQVGSYLGLIPCEDSSGDKRRLGHISKQGNPMLRWLLVQAATIAQKYDADWHRQYVRLSMAKHHGVAKLAIAHKLAVRLYWMLRSGQDYKQIVERGSHAGQSACPNGCGKKPRT

SEQ ID NO: 499480 - protein, 347 aa, unidentified
MNSTIKQVVGIDVAQKELVVSLGRMSSNWTPEIYASKVFPNSEKGFLSLKEWVTKFTDSQVEVRYVMEATGVYHQRLAFFFHQQGALVSVILPNKISNYFRTLEVKTITDKTASEAITRFGLERKLDSWNCPDPSFKKLQQLTRERDQIVQERTLVKNQLHAEEAEAQPNKSSVSRAKKRLALLDKQEKEIQEEIKVAVKQNEELHKSVKLLCSIPGIGLLTAATVLGETNGFELIRNKRQLTSYAGLDVVEKQSGTSVKGKPKISKKGNRHLRKAMHLPALTAIRHDERFKAVFVRLVSKHGVKMKAAVAVQRKLLELTYTIFKTQKRFDKNHFKQVTETSSTVAV

SEQ ID NO: 499481 - protein, 370 aa, unidentified
MRYIGIDVHKKLCYACIKDRDGNVLGELTFPNKSHGIDMLLEAIDGRKAKAVIESTSNLWLRLYLSLEEEGVEVLLANPKKTKAIAEARLKNDKVDANTLADLLRAGLVAPCYVPPAEVRELRGLIRHRMNLVRDRTRVKNRIHALLDKYELEGFSGTDLFGKAGMMWLRSITDELSRVDRLVLDAELRHVELLTQLLDEVEVKIAGESVASEDVRLLMTIPGVDYYIAMLFISEIGDIGRFSNANKLVSWLGLAPRVRQSGGTSYNGRITKEGSPRVRWALVQSACSAVRWDEHFNGKYRRIMKRRGNGKAIVAVAREIAVAMYHMLTRGEAYRFSGEAFVSGKLKRLERKVRSADRIQGNAPSGMLSS

SEQ ID NO: 499482 - protein, 420 aa, unidentified
MTTSDSTPAAAVLIAIDIAKVRNEVLIEAPGHKRRRRLLVLNTRAEHDHLIEVLQAYGRPVVCAFEATGNYHRPIAWRLAEAGLRCGLVSSLALARTREALHNSWDKNDPKDAQVMLHMLRIQATQVYHDPLRAGINDVQELSKTHEAIARAKTEIQHRILTHYLPLYSPEIDRFRGNSRSDWFFAFLHAFPTPASITALTKEEFVTGAWDVVGRKVSKTQILMDIYETARSSIGLPLPLDAPAIRMFRMVIDEARSLIRQRNEIEAQADELLRHSQDYQLLRQIPGIGPINALTIIAEAGDLRRFGHHRQFLKFCGLDLSTQQSGQYRGQTRLSKFGNARLRRTLWIAGQVAIRQRENGFRHKFERYIARDRDNPDLRRKAMTAITAKMARVVHAVVKGGSDYRPFVEGRVPGGRTSVS

SEQ ID NO: 499483 - protein, 455 aa, unidentified
MYLPYWKWIPIRKELVLMTSNIVFNSDDLFISVGIDVGADFSWMSIALPNQQFVGKPYKIIHNCMESLESAVFKIKEAEKLYSLEIRIFLESTGIYHYPLFCYLRDKGFNCSVINPIITKNSTNINIRKVHNDRFDSKKAALVGLKPDLKVSIMPSELALNCRNLCREYYSLMDSRSAYVNKLQGELRMAFPQYIGVFSKVTVNTSLSLLETYTSPKAFIEADEQEVIGIIKSTARFGLIYAKDKYNAIIKAANDANKFGCISCSNIIRIRLYISFIRKYDEEISRLLETMKQLVKANEDTEFVRQLKLIETFKGAGVLSAISLMSEIGDFSAFKKPKQLFAYFGLDPAVKQSGKFEGTKVKMSKRGSAIARRVIHVLTLQSISPARNGNAKNPVLREYYLKKCESKPKLVAMGAVSHKVCNMIFAILRDGKPFEIITPQEHIRQYNSSKSNTAA

SEQ ID NO: 499484 - protein, 341 aa, unidentified
MDVSVLGIDLGKNSCSVVGLDATGKVVVRRRMRRDTVITYAETLPAYVVAMEACCGAHHMGRALARQGHSVRLMSPEYVRPYVKAQKNDDRDAEAIAEAATRPTMWFVELKTEEQLDMQTLHRIRDQLVGDRTSLMNQIRSLLLERGYIVPQGSAKLAVRLGEMLDGDEPVLGSRIHRLVGDMRLRWIALDDRIADLNAEFTEAARSDERTRRLLTIPGIGALNATALVAAVGDARTFGRGRDLAAWFGLVPRQATTGGKPRLLGITKRGSRYLRKNLIQGARASLPTMSKSDTRLGAWLRGLLSRSHHNTVVVALAAKMARIVWALLRHERTYDPVAQAA

SEQ ID NO: 499485 - protein, 482 aa, unidentified
MKKRNIYQNQSQELLSLFEAAGSSAKVMCVPMDYAKKDHLAMFCNGHGDILRKPFSVKNSPEGIEYLIDQVTRSCRRRGIKKEHVFLGGEDANSFAENFVSTLRFKGWLVAGVNAHDAKKQRVNLQASTDRIDLMGIATMLLNCRANCCPAASGIYRNLRTLVRHRRKLVVMLTEVKNRAHGIVDRLFPGFLNENKSGIVAFTQSSLYLMENRFSPKQIRRRRRQKLIEILKRFGTSKAQETALKLQQYAATVLHTPDEYIDTLQISLAQHVKHIRCLKESIVVLEKEIAVNLAQTQGAFLTTVRGIGIVLAAGVSAEIGDPYEQRPLNNVVSYSGIIPRVKQTGGVDGKTYTGHVAKRCNRILKDYVVKSAYHLGLHGPQDLMTDYKRRDASGQHADFGIGRRYLRMGMSLMRTSQIYLPPRLRRADTAPEERAGYYLTSWPYLKEKWKKVGALEAAFAENRPLGLWRQIAQELYDITLKL

SEQ ID NO: 499486 - protein, 310 aa, unidentified
MESIITVGIDVAKDRLDVAVRPGGEAFTVERNAAGLAQLCGKLGPLAPRIIALEATGGFETVAVAALAAAGLPVVVVNPVQIRAFAKAIGQRAKTDPIDADVIAHFAEATGIQPRPLPDEATRLLADLVARRRQIIDMIGAERQREKRATPRAKKSIARLVKALEKELTSVNTDIDDAVRGSPAWRDKEDLLSSVPGVGPTIARTLIAELPELGTLDRKRIAALAGLAPFTRQSGKWRGKSFIGGGRTAVRTALFMGAMVAKKHNPILKAFFDRLVAAGKPKMVALIAVARKLLTILNAILRDSRPWQNA

SEQ ID NO: 499487 - protein, 335 aa, unidentified
MSRYVGVDLHRRRSRVVILDEAGGLVSSRQVVNDPVGLVDAVGEAGSDAEVVLEATWGWYWAADVLAEAGFGVHLAHPLAIGGYRNRRVKNDERDATLLADLLRMGSLPEGWIAPPQLRELRELVRYRHKLSQLRAGLKSQIHAVLGKEGVIPSLSELWGPAGATWLDEQQLGEAYATRIASLRRLIGRYDTEVTRLDRLVHGWLRDDTGYRAIQHLDGVGPVLAGVFVAEIGDVTRFSSPKRLSSWAGLTPRHRESDTKVVRGPITKQGSPLVRWAAIEAVARYRGGAPIKATYQRIAARKGNKIARVAAARKLLTLVFYGMRDGEIRCLNEAA

SEQ ID NO: 499488 - protein, 322 aa, unidentified
MSLTVLGIDIAKQKFDVALLADGKTKHKSCKNSVEGFEALSLWLEKQGVQKVRACMEATGNYGEELAIYLHEAGHTVSMVNPARIKGFAQSELIRTKTDKLDAGLIARFCLAMKPEAWIPPAPEIRSLRALVRRVDSLIDMRSQEKNRMSTAHESVTILIKEHIAYLDQEIEKIRKQIDDLIKRNPHLKQKKDLLDSIPGLGKATIPHLLAELNDLEKFRHVREMVAFIGLAPKETISGSSIKGKPRLCKIGHARLRKALYMPALVSIQCNPVMIAFYNRLKERGKNGKVIVCAIMRKLVHVIFGVLKSGKKYDPNYKPTFA

SEQ ID NO: 499489 - protein, 387 aa, unidentified
MQSVISATAVATTAHANNITLFASLELSKSKWVVTINSPGSEKFSKHVVEGGDGACLLDLLSRSRAKAEQRYGVQVKAIVIQEAGLDGFWIHRLLLANGIESHVVDAASIAVDRRHRRAKTDAIDGETLLRTLMAWARGERRVCSMVRAPSPEDEDRRRLTRERGTLLKERIQHTNRVRGLLSGQGIGDYNPLRRDRFERLEALRTGDGRELPPMLKAEIRRELDRIALVTTQLAAVERARDALIRTDAEERNNPAALLLKLKGLGPEFASLLWLESLFRSFGNRRQVAAYSGLAPSPWQSGGVERDQGISKSGNRRLRKTMIELAWFWLRHQPDSALSRWFQARVGAAKGRIRRIAIVALARKLLVALWRYATQGVVPEGAVFKAA

SEQ ID NO: 499490 - protein, 414 aa, unidentified
MSYKIAGIDVHKRVLMVVVMDASTPEEKPERRRFTTMASDLRRLSCWLREQGVEEAVMESTAQYWRTVWLELEPYLRLQLAQAFSNRAPRGRKHDFKDAERLVRRLIANELILSFVPGGEQRTWRNLTRMKTQLRRDRVRLQNQMECLLEEMRIKLSIVVSDLLGASGLRILRALAQGETDPKKLALLGDDQLKCSEEQLVEALTGRPQPMHREMLGLQLERLQLIDRQIEKLNGLVAQAMKPHQEAVIRLAEVPGLGVDSAQQVIAEVGVQASTFTSAAEFASWVGTCPGKEESAEENHSSRSAKGNKYLRRVLNQSAHAAVRKKGSHFQALFRRLLPRLGYMSAIWAIAHRLCRLIWKILHEGVRYIEQGSESDPKVREHRARTLARALHKLGYDVALTLINPATAEKAMQT

SEQ ID NO: 499491 - protein, 474 aa, unidentified
MNNKGKKKKNQVVVANIFEQQEILTKAELIKSQLMASTWRELETNGKFDKNDKLSFISDDMLILGCDIGSETHYIRAIDTRGRELSKSAFAFANDQEGFQSALDWATRHAAANEKTQIVMGLEPTGHYWFCLATWMIANGVSVVQVNPYAVKQTKEIEDNSQLKDDRKDPKLIANLVKDGNFGMPYLPEGIYADMRRLVMFRDQLTEDRIRCLNRLHREMKIYFPEYKDAFGKVDGVFCLEILKVAPFPEDLLALGVKGIEQVWHNAKLRGRGYSRAQTIIDCAETSVGLKDGANASKLAVKWFVERILELDEQLSDIEEQLNEKCKEIPYATNILEISGVGEHILSGILAEMGDISRFDDVKEIQKLAGMGLVACSSGKHEGKTKISHRGRKRLRYWLFQAAKSAVAHAEEFKKLHTYYTTRPDNPLQKMQSLIVIACKILRVIYAILNKGGTYDPKKLLSDIKRNTKEVQAA

SEQ ID NO: 499492 - protein, 449 aa, unidentified
MSSRASRQKRKPSAMERINVDAAGIDIGASSHFVAVPEDRDERPVREFAAYTADLYQLADWLKACGIKTVAMESTGVYWIPLFQVLEERGFEVRLVDARRVKNVSGRKTDVSDCQWLQQLHTYGLLSSAFRPDDDTCVLRSYMRQRDGLVIQAGQHIQHMQKALELMNVKLTEVLADVSGQTGMAIIDDILAGQRDPMVLAKHRHTRCKHDEATIARALTGHYRAEHLFALRQAVALYRQCQDLLRECDTEIESFLEERGPKDDGTPTPPERTSARSKNALGFDAHGHLFRLVGVDLTAIPGLSTASVLALLAETGPTMDRWRNSKAFASWLGLCPNNRVSGGKVLASKSKQCVNRAARIFRMAAYGLHHAKSALGAFYRRMRSKLGAPKAITATAHKLARLFYSMLKTKKSFADIGQDAYDRTYNQRRLKGLTKVAEQLGFKLVPSSG

SEQ ID NO: 499493 - protein, 318 aa, unidentified
MTHTTQTTALYVGIDVSQKTLTIAIYPTDEVWTTDNTCEHHTALVQHLAHLPIQRVLLESSGGYEKAVVSALQQAGLPVVVVPAQRARYFAKSMRGDLKTDRADARMLAYFACCYPVQPVAPCSPVQAELKELWARREQLVQQMEREKKRLQTVQSEAVRASLERMLAVLKEEIAQIEARVEELIASDAALSQKAALLQTAVGVGRVVAYGLVAELPELGQVSHRAIAALAGLAPVRCESGDWVGRARVRGGRARVRRLLYQAAVVASTHDRRWRAVYEGLLGCGKAKKVALCAVARRLLVVLNAMVRDGRAYERVQE

SEQ ID NO: 499494 - protein, 338 aa, unidentified
MFIIGIDPHKGSDTAAVLDHSECVIGELRVVADRRQRERLLRFAADFTPRMWAIESASGLGALLAQQLVAVGETVVDVPPTLSARVRLLDAGCTDKTDPHDARAAAIVALRHGRLRQVSALDHTAVLRLLADRHHDLTGLRTQAVCRLHALVCGLTPGGAGRLLSASQAGRVLRGVRGVGPVELERKRIALELVGDVRRFDNQLLALNERIVEAVLASGTTVTDIHGIGPLGAAILLGHTGDIGRFPTGGHFARYTGTAPIAASSGPTQRHRLNPGGNRQLNRALHVAAVTQIRNDTPGRGYYRRKLNEGKSRKQALRALKRQIAKTVYRHLAADPHR

SEQ ID NO: 499495 - protein, 394 aa, unidentified
MNRIVYIGMDVHTSNYTLCSLDPGYGVKKDNYFAEVQFTNNFVTNVVNYVSNLKKKLKDCEFVCGYEAGCLGYSTYKDLTKAGIKCVIMAPSTMAVQKGGKKVKNDRRDARVIAQCLAYQTYKEVYVLSEHDEAVRGYLRMRDSHKKELKRIKQQIIAFCTGHGLFSPTKSNWTVAHLKWLKGLKFNDPVEQEIINEYLSSYTYLCDKIKAMDVRIEVLASEKQYCENVKKLRCIKGIETNVALTLLAEIGDFNRFSKPTDFAAYLGLIPGEQSSGDKVRGTGITKAGNSTLRQKLTEAAKGYWRGRIGMKSATFKKFEKELPKEVTEYALKANTRLQRKFFNMTHVKGKNMNVAASACAREMACFVWGLITNHYDKAPAVPKTDEELLDLNLG

SEQ ID NO: 499496 - protein, 342 aa, unidentified
MQQSIFVGLDLGSSRCHQTIINADGLVIRSRSVPTSEQHLRNAFADLQGDVHVHAEASELSIWVRSIINPLVSRFVISHPRSLAWIAKDSVKDDAVDARKLAELLRLNRVHEVYYEECADRRSFKLLVVHHEQLSREQARLKSKIKARLRTLGIIRKDARLFSEAGQIELFASITDPLIEQMFRQSFAVLNQMLTSLAEAKTAMIGFSRSLPEVRLLQSAPGVGQITACRFVAYVQTPQRFSNKRKLWRYARLGITRRESNGKRLSHPHLDAAGVGSLKDCSRKIFEAARRTKTDNSFKCFYQQSLDTTKNAVHARLSTQRKILATLRAMWQANQPYRNDGG

SEQ ID NO: 499497 - protein, 376 aa, unidentified
MPQLNDLSRSLVILEQDATLIAVIEMGQSNWLVAGIVPGVERSPLKKLAVDESALLKLLNRWREEAEKAGEAGRDGFWLTRWLRARGIEAHVIHASSVAVSREHRRAKTDRLDTELLKRAFLGWLRGERDHCKMVAIPTLAQEDAKRPNRERESLVGEQSRIVNRMKAALARLGIRGFNPKLKKAVERLDGLRTPEGEPIPPNTLAELKHDMERRRLVRSQIRDIEGTRLERLAQAPGDGPHVMVRLLARVVGVGVETADMLVQEVLSRNLRDRRAVARYGGLTGSPDESGKKRREKGLARSGNARVRRGMIQLAWRFLMFQKDSALAHWFYARTKNAPQTRKTMIVALARKLLIALWRLAREGAIPEGIVLRPAL

SEQ ID NO: 499498 - protein, 348 aa, unidentified
MTKARHFIGIDLHKTVVQVCVLDTRGEVSEEFRVRLGTEADGQEVLRRLTRWKTTGRFVVEALGLNRWLVNACQQAGFNMVVADPVKLSLKRLGKKTDRHDARELARRLWVGDVARYACRYYPSDEEYGVRKVLRVRHQLVGIRQQVSNQIRALLNAYLLPSPGTALYAAASLRTLASLELPTADLRLCLQTLAATLHQLQDSIEGLSKQIRHRAKATPVQALETQLPSVGPQTALTLHSELGDLRRFDNAKQVCAYAGLVPRVANSGDTQHHGRLTKRGNPELRWIVSEWAVRLLAFDPHARAWARSRLGRMHQNKVRMALARRLLAGVYVSQTRGEAFSLERCLAL

SEQ ID NO: 499499 - protein, 388 aa, unidentified
MSSIEHTSEEQAAVRNELSAIFVSLELSRSTWLVTSLSPGGGEKMSKHQVRSGDVAGLLARFSQLQAKCKARTGQSYRLVVIHEAGLDGFWIDRTFKNVGIESHIVDPASIATSRRRRRVKTDRVDGEALVRALLAYKRGEPRVCAMVKAPTPEQEDRRQMSRERRCLIAERVEHVNRIKGLLFAQGVTDYEPAWRDRRQRLETLRTGDGRPLPVCLKQRLSRELDRLELVLEQIRTVEAQRDALLALQAEAPQSPPAILQRLRGIGPESAMVLWSEGLFRHFANRRQLASYAGLAPTPWQSGSVAREQGVSKAGNARVRTTMIQLSWLWLRHQPKSVLTLWFQERVKARGGRNRRIMIVALARKLLVGLWRLVTTGIIPEGATLRAA

SEQ ID NO: 499500 - protein, 340 aa, unidentified
MSKESVSSHVTVYAGIDVSAATLAVADQREDRTGFEQRQLANSAMGHKQLIGWLLKCGGIVRVSLEATGIYSLDVALALDLAENIEVAVLNPKIANRFAQTLRRSKTDPADAVALAEYSRRMPFVAWQRPGRIELELRAISRHIVTLTDEHTRLSNRLHAAEASDTTPRCVRQDLKHSIDALKKRIVRLRKAALALVEQNETLAMKFKQLIEIPGIAEASALQLLGELAPLDPQMTARQWVAHSGLDPAHQVSGSSVHKPSRISRHGNRYLRRALYMPALVGVRFDPHMKAFYLQLQVRHKTKLQALMAVARKLLHAIYGIFKSRTHYDGRKLFPQLGVA

SEQ ID NO: 499501 - protein, 439 aa, unidentified
MILIREVADAPVIMGISKSAGLKFPCGEVRIVNPLFVGIDVSSKSNVAYLMNPDGSKHSIFSVQNNLGGAKLLSERIVSALSSMRLNDVVIGLEATSIYGNSLVYALREDGSLGRFQRKIHVLNPKQVKKFKESYPDLPKNDFVDAFVIADHLRFGRIAKEVYMDDYRYQALRTLTRARFDVIQNLTREKQRFANYLFLKCSGMAQDKNIPNTSATTIALMEHFETVDDLANADLDELTAFIAKTGRGRFADPDVVAKAIQTAAKGSYRLPKTVNDTVNQAMSVSIASMRALKEQVKVLDKAIEQQFEIIPNTLTSIPGIGKVYSAGIIAEIGDIHRFNSQASVAKFAGLVWHKNQSGGFEAEHSQMIKSGNRYLRYYLLEAANSVRRCDSEFRRYYDLKFKEVNKFQHKRALVLTARKLVRLVFRLLKDNRLYIPPEG

SEQ ID NO: 499502 - protein, 479 aa, unidentified
MKQEYRRCCGIDVHKKSVSVCVLPPEGQQGVVKREKFRTFLRDLKRLRAWLKSCKVTEVAMESTGQYWRPLWNVLEDAIPRLVLLNPAHVKGLAGRKTDKRDAEWLARLQEREQLRGSFIPPLEIRELRELTRTRVHWLEDCNRIKNRIAQVCEAGNIKISSVASDLFGRSGRRMLAALVEGKRDAGWMADYARGKLRSRRDQLQMALEGTLSEHQRDLLDRLLGQLNRLETEIAQLTRDIEERVAQYGEAIARLIGIPGIDRISAWTILAEIGTDMSVFPDARRLASWAALCPGNRESGGKQMSGKTRKGNVYLRRILCQAAWAATNQHGSYLGTLYRRIRGRRGHQKAIMAVAHQLLTIIFHMLRDGRPYQELGSGYYDQQRKPEITRRLVERLEKLGYQVTLEVPLTPEEAPQQAPAPTEIGTAPLLKRKRGRPCKCADRGIACLHKQRSSAGDSGDGEAPGNSEINPETPTQAAS

SEQ ID NO: 499503 - protein, 412 aa, unidentified
MEVLYPRCCGLDVHKSSITACVLIAQSGKPLKHIRRFGCTTRELRELVVWLQGFGVEHVAMESTGVYWKPVWNVLESHFQIVLANAQHIKAVPGRKTDTKDCQWIAELLQHGLLRGSFIPPLVIRDLRDLTRARTSLSQEHSRIASRIQKVLEDANLKLASVASNTLGKSGRAILAAIIGGEQSCERLADLALGHLRAKIPQLQAALEGQVRDHHRFLLQSLLRQLYFIETEIELLDARLDQLGQQHLDLAEALNRWVTVPGVDRVAAWSFIAEMGADVSQFPTAAHLASWAGVCPGNNESAGKRISSKIRKGSPWLRRMACQSAWAAARTKNTYLSAQFKKLAARRGRKCAIIAVAHSILVIGYHLQRKRCAYTDLGSNYFDRLHAEGLKRYLVKRLESLGHSVTLQPRIA

SEQ ID NO: 499504 - protein, 368 aa, unidentified
MKKKNSVSMAVVNAHAAGIDVGSRQHYVAVGQEPQDVRTFNVYTKDHHALIEWLQQKEIVTVALESTGTYWQTLFSSLQTAGFEVVLSNNYIKDPQRKTDTKDARWLQKMHTLGLLKHSFIPSADVARLRSYHRHRSNIVAAATAHTQHMQKALRLMNLRLDVVLSDITGLSGTKIIEAILSGETSGEALSKLAHNRVKKSKQEIADSLQGDWKEEQLYILQDEWTMYKNCQQRMISCDQKIEALLKTMIHKTPPIPRQEPITTKPVKEKNKHSKNAPNFDAAALSRDYFGVDLLRIEGVASNTVLTFIAEVGSDIYKFPTMKNFTSWLRLAPNNKKTGDKVFSSRTPKGKSIMANAFRVAANTVAQR

SEQ ID NO: 499505 - protein, 549 aa, unidentified
MGLVKEIDSPSAGSWPVVPVEGNWWARVQSATRLLARGWHRITHKRGSGQLLLLVVSGSCWAGASWDVSRGSSRVGERVRCSLAGGVGVLFVFSEGRTLVSIQSSDPPRLVRVGIDAAVVAQHEVCIRSTDAAGRVEVDRFRVPPTLAGLRSLTDRLAVTPGVLAVTEPTSMTWLGLSVALADAGCGLSLLGARHAARLRGAISGKSKSDVIDADVLARAGEVFDLHPLRRVDPGQLALRRACVRRGSAVIDGNRYLRRLISLARWAFPDVWNGFRGSLPTAIAVLERWPQLAQLATARRSALTGVVALHTRGVADVPARVETIRSAAGAWAGFWDGHLDLDALAFDVSEHLTDMADAKARTERATAAAQRHWRQLYGDDELLLSVPGMGPVTGCVVRGFLADGHLFSSAKAAASYAGLNPSTWSSGTVSQPSRAITKEGPAVLRLALFQAANAARRQDPQMAGFYYRLMTQQRHCHTQACVAVARKLMERTWTVLTRGEPYQLRDFDGRPVSHLEAKKMIKEKCTVPDHIRAAARARSAATNRAKLTR

SEQ ID NO: 499506 - protein, 494 aa, unidentified
MRMASSSPASRRNAKNALKLKKQTRERAATATSPVEMEKLEPVHRRAAGIDIGSAENYVAVPPETVAPGESSARVFGVFSEQQDALVEWLRSCQISTVAMEATGVYWLTLYDKLEAAGIEVYLVDPHGVKAVPGRKSDWLDCQWLQKLHTYGLLQRAFRPDAPIRRLRTLTRQRTGLVCAAASQQQQMEKALVCLNLQLGLVISDLVGETGISIIRAILLGERDPKVLVERYRSVRCTKASIGEMKQALQGTYNDEDLFVLQQCVDTWDFVQEQVRECDGKIELALAAIPTARAVERKAPPLPVPAAAEQPKKKANGTQGKNAPVKDFTPILRRICGVDLTQVMGLNLLSVLMLLGEIGTDMSRWRSAQAFCSWLGLCPGAKISGGKVLSRRTRKVTNRAATILRLAAVAVGRTDTWIGLFYRRMKARKGGPKAVTATARKLACIVYHMLKFQEEFMALDMEKYVAHAQAHRLRYLKREAEKLGYELVEAEQVA

SEQ ID NO: 499507 - protein, 331 aa, unidentified
MQTLQTLHVVQLGIDVAKRKLDCALRMPEGKLRHKVVENTPGFAALHLWLDKQHVVAQDITIHACMEATGIYWEAVAEFLAALDRVIVSVINPAQIKAFGISQMVRTKTDKADAKLIAQFCFERQPAPWQAPPPAERTLRALVMRLDALTKMHTQEINRLEVARPAIAADISAHIQWIDEAIKRLTQAIKQHIDNDPTLQNKQRLLDSVPGLGERTIAILLAFYATWDRFGNARQAVAFAGLDPRQHESGSSVKGAPHMSKVGHSALRKALYMPAIVALYKTMWGKRFYARLAANGKPPMVIIGAMMRKLIHVAFGVLKSGKTFDPTLHGA

SEQ ID NO: 499508 - protein, 345 aa, unidentified
MKTIMIGLDLAKSVFQVHGVDGAGQMVIRRQLKRVQIEKFFAKLEPAVVGMEACGGAHHWGRKLQALGHEVRLMPAAYVKPYVKRNKTDGRDAEAICEAMQRPTMRFVAVKRPEQQAMMAVHRTRAIFVRQRTMLANALRAAFAEFGVVTPIGITGLEALMALLPEPEAVPVEAHGALAMLARQWQALDGDIKALEQQIVQSVRADEAARRIMAIPGVGPITASAVRAAVPDMKQFRSGRGFAAWLGLTPRQNNSASTRRSGGISKQGQRDIRCLLILGASSHLRHEQVRKRMKAPTDPWLAGLLARRPVKVAAVAQAAKAARIIWALLAKDRCYCAPGHLQHAA

SEQ ID NO: 499509 - protein, 337 aa, unidentified
MSIMRIGLDLAKNVFEIYGIDTLEKPVLKKTIKRTELLTFFCQLEPCEVGMESCGGAHYWARELEKFGHKIKMMAPQFVAPYRKGSKNDQNDAQAICEAAGRPNMRFIPVKNEQQQAVLALHRVRSLLVGERTAQVNQIRGLLLEFGVAMPQGRDKVRAQLPWLLEDAENGLPLLLRELLFSQYQRLCELDKQILESDRKIDTIAKQDEKALRLMKLEGIGPITATAMIASVGDIREFQNGRQFAAWLGLVPRQWSSGGKNRLGRITKRGDVYLRTLLVHGARAVIRFAENKEDRKSLWIKDVKARRGFNKAAVALAAKHARIVWSMLINNTEYRVA

SEQ ID NO: 499510 - protein, 387 aa, unidentified
MLQVNDLSRSLVAFDPISTLMVVVEMSKASWLVRSVVPGVERQPLKKLEPDATALLRLIERWRSEAVRAGRPISRVALAYEAGRDGFWLARWLIARGIEAHVIHSASVAVSRERKRAKTDRLDTAMLMRVFLGWLRGERGHCGMVAIPTMEEEDARRPSRERESLVNERSRIVNRMKSALARLGIRGFKAHLRKAPERLAGLRTPEGTGLPANMIEEFRRDMARLALVREQISSIEKTRAERLEQAPDTGPHAMVRLLARVIGIGIETADMLVREILSRNLRDRRALARYAGLTGSPDESGLKSREKGLAKAGNARVRRGLIQLAWRFLMFQKDSALAQWYRTRTEGPSGARKTTMIVALARKLLIALWRLVTTGEVPDGVELRPAA

SEQ ID NO: 499511 - protein, 335 aa, unidentified
MRDIGVDLHKTSFQCCYLKENGTEFKKYYISELEEFTKGLRQTDRIAVESTGNSRWFSNQVKDKVSEVIVVNPGQFKVIVNSSKKTDKADAELLAFYLSKGMLPEVVMKDEYSSQIKSLCNTRDKLVKLRTSLKNKIHNILLSHGIISKREDFSSEKGLQKAQSYALGEVAEVELDVIVAQIRHLNEGIKKLDREIESKGKQLKGYNNITSIKGIGPKSGTILLSVIGDIDRFTSQKALDSYFGIVPRVRNSNDTIHHGHITKQGSKIGRTTLVQCTLVAIRYSPYLRDFYLRLKAKKGSGKAIIATARKLLGIIYQTLKNDWIFEDFPNFVLQS

SEQ ID NO: 499512 - protein, 424 aa, unidentified
MKNCNKQNEKIELVDEKTLVIGVDIGSYDEYARAFTCRKQELSKKPLHFYNTAEGFKTFKDWAVNIMKANGLEKIIVGMEPTSIYWEALATYCKDNGMILVHVNPAAVHKSKELDDNDPSKNDRKDPKVIAGLVADGRYQFPYMPEEEYAELRELSNLRIRTQESLTQCKNRLSRWYSRYFPEFKGAYKNVVSKTAMMILDLYPLPEDIVTLGVEGILQIWRSKKVRGAGERKARKLYEAARNSIGRKEAASIARIEFKSIKEDLDRYQERLDEIEKKADEILPKIKNVDKLFEIKGVGKATVLTFLSEVGEISRFDNPKEIQKLAGYAIVTNESCKHQGEKRISYRGRKRLRWVLYQTALSVIAKNAEFRQIHAYYTTRTNNPLKGIQSVVAVACKIIRIFYKILTDGVSYDGTKMTQDIVHA

SEQ ID NO: 499513 - protein, 386 aa, unidentified
MHHVTNIPSPEQTGTGADYAILFVSLELSRSTWVATSLAPASKKMSKHTLVGGNGRDLLDLLARLKARAEQRIAAAVKVVTIHEIGLDGFWVHRLLDANGIESHVVDPASIAVPRRHRRAKTDTIDGETLLRTLMAWQRGEPRVCAMTVPPTPSEEDHRRVSREREALLRERIRHTNRVRGLLFGQGINNYNPLHKNRRERLKELQTGDGRPLPARLKAEILREIDRLELVLRQISEVEAERDEMLRSAEASSPAALLMRIRGIGTEFATVLYLEGLFRHFENRRQLAAYAGLAPSPWKSGSIDHEQGISKAGNPRLRTTMIELAWMWVRYQPDSALSRWFRDRVGSERGRTRRISIVALARKLLIALSRYVTHGEIPAGAVMKAV

SEQ ID NO: 499514 - protein, 403 aa, unidentified
MNSVGIDISKGRSTIAVMRPFGEVVISPFEVRHTGSELSKLARQLKSLDGETRVVMEATGNYHASVAKLLHDAGQYVSVVNAKLVHDYGNNELRRVKTDRKDAVKLANYGLDRWLTLTRYVPEEDTRLLLKNCYRQYRQYSKVQTVLKNNLISLLDTVCPNVNRLFSSPIRGDGSEKWVDFVAEFWHCRCVSEKSERAFTSKYLRWCRKHGYNFREAKAHTIYAEASGHIGVMPKSETTKLLVEQAVAQLRATSTALAALKHEMQSLASMLPEYPVVMDLFGVGPTLDPQLIAEIGDVRRFYSKKALVAYAGLDAPPNDSGDVTGRHKSMSKIGASSLRRTLFLVMSVYLQTAPLDEPVYPFMDRKRAEGKLYRVYMMASANKFLRIYYATVKAYLESLEHTA

SEQ ID NO: 499515 - protein, 340 aa, unidentified
MDSSSKNYLGIDVSKPWFDVSFIAVVNHVKQAMITERFDNSIEGMKLFKTWLKTHAISLDENTLLVIENTGVYHRLIWSFCSKHNLPLHIGNAAHIKWSLGITRGKSDVIDSKRLCTYCCKQAEDLKATPVLNPVFMKLKDLMSSRSRLVAQLYSTKNYIKEIQCTNDKALLSMLDKAHKAAIDGIKKSIGQIETLINKIIVEDAAITANYELIKSVPGIGHLTAVYIICCTNNFANKVSGKQLASYAGVVPFEHSSGISIKGKNRVHKMANKELKKMLHLCALTAIKYYPEFKQYFERKKAEGKNGMLVLNAIRNKLILRVVAVVNNQQPYVDNHKIAA

SEQ ID NO: 499516 - protein, 419 aa, unidentified
MLKIVYPVCCGIDVHKKFIVATIASTNDCGITSYKTKRFSTFTKSLREFADWLRIYSCFHVCMESTGKYWIPVYNILENNFAVTLAHPKYVRAIRGKKTDKKDSVWIADLHKHGLVLASFIPPRSIRQLRDLLRYRYKLVCMKSSEKNRFHNSLTVSNIMLDNVVSDSFGKSASAIIKHLLDNPLDTDFDPVPLLHRSMLKKQDDIRLSIDGVVSDEQAEKISICLQHHDHIESCIARIDAYVENISSIFSKEIGLISSVPGIRTFSATVIISEIGVDMSVFHSAKHLCSWAGLTPQNNESAGKKKSVRVSRAGVYLKPLLVQCANAAIKDKNCSRFRNRYESIKRRRGHKRAIIAIARMLLTVIYHIIAKSVPFDSSIYEQPSSNHSPQSVTFSVEQAIKFLTDSGFSVLPRSVVTAA

SEQ ID NO: 499517 - protein, 368 aa, unidentified
MSSVRQRRDRIYLGLDVHKDSISAGILGEYDDTVDVDKIFHDEDSVRRLIRRFPDPRSLRVCYEAGPTGYGLFHLLSSMGVRCEVVAPSLVPKGSGDRIKTDRRDARRLARLHRAGELTAIRVPTPAEEAVRDLCRARADLLDDQRRARQRLLALLLRHGQVYRGGTYWTIAHEQWLSARRFTEAAVQTTFDHYRAVLTERDATLAAVSADLLPWRDREPFADAAHRLGAYRGVAELGALTIASEVGDWRRFPRAQTFMGFTGLVPSEYSSGASVRRGHITKAGNEHLRTQLVESAWAYQHRPAVGVGLRTRQRDVSPRTVARSWAAQQRLSARFRRLCARKNVKTVVATAIARELAGFLWAEMTATA

SEQ ID NO: 499518 - protein, 283 aa, unidentified
MEKAYDGRQVVGMDLHRRRSVLVRMAEDGRRLGMARFTNSPEELRAQIARAGKSPKVVLEATYGWYWAADALAAAGAEVHLAHPLGVKAFSYRRVKNDERDAADLADLLRMGRLPEAWIAPPRVRELRELTRYRHKLVGLRTSCKTQVHAVLGKLGIPVGYSDVFGKAGSAWLDELTLPQPSAGKVTSLRQLAGQLTTEIAMLSRVIADLLADDRGYQVIQQLPGIGPVLAAVIIAEIGEVTRFRNAGQLCSWAGLTPRHRESDTKVSRGHVTKQGSRMLRWR

SEQ ID NO: 499519 - protein, 369 aa, unidentified
MQQPTTLFVGLDVHKDSISVAYAAGGPEPARFLGPIGTRQCDLDKLIRRLHSKASRLVFAYEAGPCGYVLYRYLTAKGFDCRVVAPSLIPKRPGDKVKNDRRDAVELARLLRSGDLTSVYVPTVEDEAIRDLCRARDATRVTLRSAKLRLRSFLLRLGLHYTGKANWGAAHRRYLAKVVCPTSTQQVVFQECILAVDEQVERLGRIEQELLDLAPSWRLYPVVEALQAMRGVQWVVAITVVAELGDLTRFDNPRQLAAFVGLIPSEHSSGTTRRLGGITKTGNSRARRVLIEGAWAYRYPAKVSAHIQARTEGLPKTVQDIGWKAQVRLCKRFRRLSSRGKNANVIVTAIAREMLAFMWAIAREVPITV

SEQ ID NO: 499520 - protein, 334 aa, unidentified
MEEAPSSSSNFAFSLGIDVGKANLELALRSKEDIVERTTVPNDSEGHSTLVDWLSKQGASPEETRVCMEASGDFEEAIAQHLYDNGYRVSVVNPRRIKGYASSQLQRTKTDAADASLIARFGQREDPRPWEPASAAESRLQELTRARQALQKEKTRTQNRLDEAEDEAVQKAHQNLLDEIKRQIEDLEEEIEERVEENSELNDQCSLLETIPGVGLQTAAIVVSELGSPEQFESARQAAAYAGLVPRHRKSGTSIRGKPRMSKVGNGRLRRAMYFPAMTALRFNSAVKAFGDRLKERGKEKMVVIGAAMRKLLHICYGVLKSGRPFDPSLHPGT

SEQ ID NO: 499521 - protein, 445 aa, unidentified
MHYKRLLTLIDSVSSYLSVGLDVGADFTWMSIALPNGSFIGKPFKILHSDPKSRDLAVAKIKEAQETYSLKSRCFLESTGIYHIPLLCFLRDKGFDCSVINPIVTKNSTNINIRKLHNDKFDSKKAALVGLNVSLKTSILPDKSVVDLRNLVRDYYYFKDLQSAVALKLAAELKVSFPAYAKVFSKITTQSSLKLLSAYPLAKDMLAASKDDIVEIIRSTARFGEAYALRKYNAIIAAAQDAAVFGRALPSNAVRIRLYIDTYQEYQKHLDALLKALHETVDRLQDTLVYDQICLLQSLRGIGFLSAVVLIAEMGDFKLFSSPKKLYAYFGLDPAVKQSGKLNGDKVHMSKRGSSLARRVLHMAALNNVKVDKRSGTPVNPVVYDYYARKCSSKKKPVAMGAVMHKICNIIFAMLRDNKPFEVIPPEEHCRRFAAEHPDKIRKAA

SEQ ID NO: 499522 - protein, 340 aa, unidentified
MQITTVGLDLAKSVFQAHGVDEAGGTVLVKRLHRKQMLPFFSKLPPCLIGMEACGTAHHWARTLAAMGHEVRLIPPSYVKAYVKRGKSDALDAEAICEAVQRPTMRFVPVKTVAQQSILMTHRARSLLVRQRTMVANALRAHLAELGFVANPGIANLAKLAQQALSGESSLPSYARTTLDILIRQILVFTDEIAALDQQLLAWHADSEASRRLSAIPGLGIVTATAVAATVTDPEQFRSGRQFAAWLGLTPQQCSTGGKTQLGGISKQGDRYLRRLLVVGATAVIRHTKDKATPLANWIRKLLEKKPFRLVSVALANKLARIAWVVLTRKEAYRAHEMIA

SEQ ID NO: 499523 - protein, 345 aa, unidentified
MDQISRIGMDTSKHIFQLHGVNAAEEPVLRKKLRRKEMFAFLEKLAPTVIAIEACGASHHCARLLQSFGHSVKLIAPQLVKPYVKRGKNDAADAEALCEAMSRPTMRFVPVKTAEQQAALMLVGVRDRLIRNRTQLSNAIRGYAGEFGLTAARGKAHLAPLLERIHADESLPGLARELFAAQAEEYAQLQAQIDKVDARLMAWHRADECSRRLTKIPGVGPIGAVLLTVKTPEPGLFRSGRQFAAWIGLTPKDHSTAGKVRLGGITRAGDEGLRSVLVVGATTVIQHAQRGGRPSPWLTGLIKRKSPKLAAVALANKMARIAWKLMITGENYAATAAPATLAGAA

SEQ ID NO: 499524 - protein, 341 aa, unidentified
MKKSLFIGIDFSKKTFDVSIIHSNCLQSVDYQQFENSKEGCISLLKWVKELTDESIECWQFCGEHTGLYSIFLSEYLVKQGLHIWLENPLQIKQSTGIKRDKNDKIDSRDIALYAYRFQDKAIQYQLPAKALKSLELLLSFRERLLSNKQTLLVSASEIRRVLQRDSTARFIYEQSQKDIERINKEIKEVEKRMLEQVESDEQLYENYTLVSSIKGVALINTVAILVATRNFTRFENSRQFACYSGMAPFGRQSGTSVNSKPRVSNLANKKIKVLLTQAAKCAVNYDPNIRKYYERKLQEGKDNWLILNNIRNKMIHRIFAIVRNKQFYQVDYRNSLDKIA

SEQ ID NO: 499525 - protein, 378 aa, unidentified
MTSENTVHVAIELSFSSWLVAVRLPGAEKSRPHRLKGGDTTALLALIAELRSCASTNLGRAVDVACCFEAGRDGVWLHRLLTAHGIAAYVLEPTSILVNRRARRAKTDRLDAEGMLRVLAAWLAGDRQMCSMVRVPTPEEEDAKRPHREREHLVQERLRIENRIEALLFTQGIRGRPSLRSWGRDMVELRTGDGRALPSLLRTELDRLRRRLVLVLELIRELEAERAAAIAAAADDAMVQKIIALQRIRGIGPNFAAVLVREVLYRSFANRRQLASYVGITPMPYQSGGVDRDRSISRAGNPRARTTLIQLAWLWLRYQPGSTLATWFRERVGTLQGRTRRIAIVAMARKLLIALWRYVETGVIPDGVEIRAHSEVTA

SEQ ID NO: 499526 - protein, 386 aa, unidentified
MFYLGIDQHRKQLTINLRNEAGDVVTRRQVSTRREKIEAFWAELAELTTGEGGYIAMVEVCGFNDWLLAALAAQASCQRILLVQAESRAKHKTDRRDASRLAELLWTNRERLLTGKKVQQLRVIQPPNALDAEARQLTALMRRTTKQRTRTINAIHHVLLKHNRQQDFPTKSIQTKKARKWLKQLELPAIDRLEMDQLLEQWALWDQQREQLKHEIEACHARHPTAPLLTSLPGCGVMSSLALACRIGDVRRFPRPGSLANYFGLTPGCRNSGEAQQRLGSITKQGSSLARFILGQQALQLMKRGGPLRRWYKQIKNRRGSKIARVALMRRTVTIIWHMLSHEEPYRPLRTPSARESSSARVTSARARQKGAAPSVLTAPRPQPAG

SEQ ID NO: 499527 - protein, 317 aa, unidentified
MSTKKSKAFIGIDVSKQLLEVAAHQSDYQFCCANKASAFGELIAELIALRPALIVLEATGGLEIPVTAALHAAGLPVVVINPRQVRDFAKALGQLAKTDRLDARVLAHFAAAIKPPLRPIKSRDELELDALVGRRGQLVEMLTAEKNRRGSAATDTVRKEIKEHIDWLQDRIAELDEQLQALLKSSSLWQVKDDLLQSVPGIGPVVSFSMLADLPELGTLNRQQISKLVGVAPLNCDSGQQRGTRHIYGGRARVRSMLYMAALTATRYNPVIKEFYQRLLAKNKPFKVAITACMRKLLAIINVMVRDGAHWHTPLLA

SEQ ID NO: 499528 - protein, 355 aa, unidentified
MMIIGCDFHPRFQQIAFLDQETGECGERRLNHPQEAAEFYRSLPPGQVRIGLEATGSYRWFRRLMSELGQELLLGDPAAIRASVVRKQKTDKRDARHILTLLQEGRFPVVWQPSIKNEETRQLLLHRCRMVRMRTRVKNQLDSMAKNEGLLSKRVWCPRRRKEIEALPLTGWYAQRRRDLLDLLDELNRRIEPLDEAVEKAAWADESARLLMTHPGVGPVVSLAYVLTIGDWQRFARGKQVGSYLGLTPAEESSSDKRRLGHISKQGNSLLRWLLVEAASKAQSSDANWHRQYVRLSMTKHHGVAKVAIAHKLAVRLYWMLRSGQAWQQVMERGSPPQRLRPVAGDPGSHAGQSV

SEQ ID NO: 499529 - protein, 468 aa, unidentified
MRTVGIDLSARGEHKAVIVDEAGRFVSPVFRFGTTPASLRRMLEMAQANNPDQEIQAVMEPTGMAWFPVAVFLIRHSVTIYLVNSQQVADLRKYFKKHAKSDRIDARVLAKLPLVDAEKLHCLELASDKTLACQRGCKQLERLMKQRTACQNRLIALDRFAWPGLEETVFADLFCPAALWFREHWYSPLRVWRAGVEAIRQEWLSSGLEPADSGEWIHYLVQLAEQTLAIYGEECVYLDYELLQAEAIREQEYFAFVEEMHHRLLLKTVRPLYRQLHPSRNLETIPGVGQDGAAVYLSFIGNPKRFKGLRELRGWSGMVPNSKQSAKSQASGLKITQAGPGLIKKFAFLDANSARQCDPQIAAIYYDQMVHRGKHHVQALCTCSAHLLDRIGVVLRDDRPYQLQDVDGTPITPERARQIIAERYTVPEEVRKRNSKAKRRERMEVQAEKKYKRGKAALGDSGAKAPAS

SEQ ID NO: 499530 - protein, 339 aa, unidentified
MEHTTIAVDLAKSVFQVAVSHRPGHLDEERRLSRDRFLAFFAQRPPATIVLEACGSAHYWARQLQPLGHAVRLLPPHDVRPYVRRNKTDRTDAKGLLEANRNEEIHAVPVKTIEHQAIASLHRLRSTWLATRTARLNTLRGLLREFGIFIPVGAQRVVPQVRELLEHPAAVPMALHPTLAAACDEIAELEAHMRIAERQLAGVAAHLPDVQLLQTVPGVGLLTATALVALVTDIRRFPSGRHFASFLGLTPREESSGSRRRLGAISKQGDVYVRMLLTHGARSVVWHAKTAVHPTPLQQWATDTERRRGRNVAAVAVANKLARILWAVWVQQRSFAAEH

SEQ ID NO: 499531 - protein, 338 aa, unidentified
MKTYAGIDLHSSNNFTGVINEQDQRLYRKRLPNRLDAVLSALEPFKNSLEGTVVESTYNWYWLVDGLQEHGYKVHLANPSAIKQYEGLKHTDDQWDSFWLAHMLRLNILPEGYIYPKEERPVRDLLRRRLLFVRHRTAHILSLQSMISRNLGTQMSGNAIKRLEQGDAEMLFNHPHLVLAATNNIAVIHFLKERISGIEREVKSVIKLRDQFTYLLSVPGIGDILALTIMLEVGDINRFPKVGDYSSYCRCVKSERLSNGKKKDENNKRNGNRYLSWAYVEAANFSKRFSPHAEAFYQRKKAKRGGIVALKALSNKLARASYYIMRDQVPYDVNKLFR

SEQ ID NO: 499532 - protein, 368 aa, unidentified
MTTNTLKAAPAASAKELKNEKPAKAKRMLVGVDTHLRGYQAARKIDSGVIGVVENFRSEEELRLYVAKQTTRAEQVVVVYEAGPLGYTLYRKLTAAGVLCYVCAPDSGEQRKKRRKNNKIDARSLTSKLFNYLNGDQNALQLARVPTEAQEQLRMASRQHDQLVEERKRLGAKGNAMLLSQGFGSWSNWWRPKAWADLSSKLPPWLLERLEIWVDVLKVLDEKIAQAKAAFARSCNGPRPKGVGALSQMQLQSEVLDWSLYSNRRKIACLAGMVPSEWSTGDKERRGSITKVGVPALRRIIVEMVWRIIFFQPQYKPVQKWLEVLRGPNPALKKKAVIAIGRQLIVDLWRLQTGRVTAQELNLIMVTN

SEQ ID NO: 499533 - protein, 356 aa, unidentified
MMRWCYSLPMKTNITKTSPTPSVVPTSSAAVSSGFTLGLDLGDRQHHVCVLAAAGNIVREASLPNTRPALAQLLADFPRATVALEAGTHSPWISRYLTEQGATVLVANPRKLHAISRNERKCNRRDAQMLARLARVDAALLHPIQHGSAQAQHDLLGLKLRDALVRNRVSLINAIRFTLKSLGHPVRNPSSESFHKTVLQDIPADCRPVVQPLLTVLAHVTEQIKAMERDLVRRSKKDYPATQRLQQIAGVGPLTALCFVLKVGDPQRFSRGRDVGAYLGLCPRRNQSGGTDKGWLRAVNKLSKLAKSTHGRQAAKKFEIRWPEILPLTEIAQAKNEKIISFRKNQMARGFGLESE

SEQ ID NO: 499534 - protein, 340 aa, unidentified
MKRIFIGVDFSKLKFDVAVFEGATKEYLGFSVFENNLEGCQQALAWVATVTDVSPDGWLVCGEHTGLYSVTLTHYLCASGVAVSLEPGLQIKLSKGMTRGKNDKIDAGYIAEYAYRFQDKVKPYRVASAALSGLKDLVAYRNRLLGFKKSLTTSQQELQRVKADKAAVAFIYDDSKAAVNDLNARIKRVEAAMRDILQSDAELLENYALLTSIKGVGMLNAVVFLVVTGNFTLFSSARKLGSYCGVVPFEHRSGSSIRGRDKVSKLANKKMKVLLTLAARTAVLHDPVLRAYYLRKLAEGKHDRVIINNVRNKLVHRMFAVVRDKKRYDSSITHPLQQAA

SEQ ID NO: 499535 - protein, 358 aa, unidentified
MKYVGIDVHKKMCQSAIIDEEGELLDEIRFRNDVEGIEDFALKLSTFRDEVKAVVESTGNLWIQVHDRLEEHGFDVVLSNPYKTRLIAEAKVKTDKVDARTLARLLRADMLSTCYVPNKEQRSRRELLRHRMQLVKTRTEVKNRIHSLLDKHGLRMPHKTPFSKKNIAWLREQDLGFMDDAILRSGLAILESVDEQVGLMEEKIAVLAVEDPQVRLLMAMTGVGYFTAMLLLAEIGDINRFSSDKRLASWAGLAPSVRQSGEKTRIGGVSGPGNKRVRWVMVQCAHSACRFDPRFRSFYERYSKRKSGKKAVVAVAHEMIRIVFYMLRNGEAYRSENRGMTERKLKSMERRALNGLRN

SEQ ID NO: 499536 - protein, 387 aa, unidentified
MARKRILSTLDTSIAYEAVGLDLAKTDVALAAFDSDHKEPYFIDRIPYDKLYELLANMAPTLVAMEPCSGAHQIAEQIQALGHEVMMISGRHVQAWVKDHCNGQKTDLNDAFAILNLAYDRWLTPIRGKTREECRLLALQASYRQLKGQRTKTMVHVKATLHAWGFPIRTGSFNQKALRELIDANREAFGGEMAETLHLMIDRVRGLDHDIATVLKLLTEATKRDPRASLLRSIPGFGVLTTSRWCAVMGDIARFDSPKQTMAFIGLVPNNRITGHHTETSSGREARGQGRMSKRGDKMLRSLCILGAASLCMLVRKDRLQDCPFVASIKERLASPRPWFKVLVYVAAKLVRIATALLKYGEKFSFEKAGISKAVLKQWKLEQAKAA

SEQ ID NO: 499537 - protein, 354 aa, unidentified
MKTYYVGMDVHRASIWIVVLNGAGKLVMQSVIETGAERVRGYLKQLRGKVYVTFEEGTQATWLHDIVRSLVTEVVVCDPRHNKLLQSGNKNDRVDAQKLAELLRNGALKAVYHGDHGMRTLKELVRNYDCLVSDSTRVMLRLKAIYRGRAISCAGHDIYRSDRRAQWLEKLREPGARQRASFLYAQLAALKPLRHEAKLVMVKEVRRQAAYPWLMSVPQLGSVSVAQLMAVVGTPHRFRTKRQFWPYVGLAVVTRSSADHEIVNGVLRRSRRPIATRGLNRNHNHLLKKVFKSAATSACHSGPFKAGYDARVAQGMDPSLARLTIARQLAAITLAVWKRGEKFNMQMMNQQLAA

SEQ ID NO: 499538 - protein, 357 aa, unidentified
MEVLHQRCAGLDVHKATVVGCLRVQEHGRVRHEVRRWGTTTAELLALGDWLQQAGCTHVAMEATGVYWKPVWHILEGELDLLLANPAHIRNVPGRKSDVNDATWIADLLAHGLIRASLVPPGPIQALRDLTRIRKQLMREIGQHKQRIQKVLEDANVKLASVVSDVFGESGRRMLKALSAGETDPSQLAALRDGRLTASRETLAAALHGKVTAHHRFLLSQHLGTIAHLEQTVAAFERQIEAVAAPFNPAVACLVTIPGISVTAAHVIIAEIGVDMSRFATAAHLRSWAGLCPQLNESAGKVMSRRLRHGARGSKPCWYSARGPRPAIRTTISTRSLSGYAHGAVHKRPLSRSPLRS

SEQ ID NO: 499539 - protein, 356 aa, unidentified
MIAMKYYTSTTEFNCGIDLHARQMYVCVMDRTGKKLVHTNIRNNDFAYFLKLVAPYRHDLTVCAECMFGWYWLADACQAAGIHFVLAHALYLKAIHGGKNKNDRIDSEKITHLLRTNLIPPGYVYPAAKRPLRALLRQRLLYVWNRSELLSRIQSHQLAHNRPTTRQTPYNREPWEKHLLAQEPDPVRQLALQNDLALIGHYDNQLASLEKELLQLTKQTAGRDFTLLKTTPGIGDYLGLTILHEIGDIARFPSVKDFLSYCRLVKGTVASAGKIKGLRGAKLGNPYLRWAFGEAAIIAKRDALLGPLAQRLETRLNNKFKANTVLAIKLARAVYFMLKTKTVFDPQRLVAALSHN

SEQ ID NO: 499540 - protein, 370 aa, unidentified
MSQSSTLDIGLDVHKDSIAVAYVAEEHGAEVTYLGTIGTRQCDIDQLVRKLHAKAKHLVFVYEAGPCGYWLYRYLTKKGHHCWVVAPSLIPTKAGDRVKTDRRDAIQLARLMRSGDLTPVYVPAVEDEAIRDLSRAREDAIADLKAAKFRLKAFVLRHDIRYTGRATWGPAHLRWLAEVVCATPAQQIVFQAYVRAVHEHTARLQRLVQELQEQVTSWRLHPVVEALEALRGVPFTVAVTIVAELGDLTRFENPRQLMKYLGLIPSEYSSGERRRQGSITKAGNTHARRALVEGAWAYRYPAKVSRHLQLRLEQQPKPIQDISWKAQVRLCKRYRRLIARGKHANQVVVAIARELAGFIWAIAKQVPVKP

SEQ ID NO: 499541 - protein, 412 aa, unidentified
MDVIHSRCAGLDISKKDAKVCVRINGAGRRKTSETVTTFGATTRQIMAMRDHLAAQQVTCVVMEATGDYWKPFYYLLEDLSGVEVMLVNARHVKNLPGRKTDVADATWLAQLGAHGLVRGSFVPPEPIRQLRDLTRTRTAVTRERTREIQRLEKLLEDAGIKLSSVAADLNGASSRAMLEALLAGETDTAAMADLAKKQLRLKIPQLTEALYGRFTSHHAFLTRMHLDLIDQHTAAIEQLTDRIEVVIEPFRSFRDLICTIPGIGGYTADVVVAETGADMTRFPTAQHLASWAGTTPGNNESAGKVKSRRTRPGNPYLQGALGTAAMSISHTRNTYLAAKYHRIATRRGPLRANVAVQRALLVAIWNLATTNTTYHDPGGDYFTRLNPQKARNNAIRQLEAMGYHVTLDQAS

SEQ ID NO: 499542 - protein, 456 aa, unidentified
MAPQFKGNPTKQKSSSHHVLHPHAAGIDLGARDIYVAVPPGCDPKPVRSFPTFTEDLHALRDWLKACGVTTVAMESTGVYWIPLFQILEAAGIEVCLVNARHCKNLPGRKTDVQDCQWLQYLHSVGLLRGSFRPADQVCAVRTILRHRDALLRGASRCVSHLHKALTQMNVQLQHVISDLTGVTGQAILNAILGGERDPQKLAALKDHRIKASRDTIAKSLRGDWRTEHLFTLKQTHALWQQHQTLIADCDAQIAAMLKAFDARVAVSTAPLPPQTKTSHKQAQRNQPRFNAREECYRVLGVDLTAVPGFQTPTVLVLLCELGPDFVNRFPTAKHFGSWLGLCPDNRITGGKIYSVKTRDVKSRVAEALRLAAQSLWQAKNYFGELYRRWKARLGSPKAITAMAHKLARILWHLLKFKQPFNPEVFAREEAKMKRKKLARLQNLAASLNYQLVPNQ

SEQ ID NO: 499543 - protein, 385 aa, unidentified
MKPNSQMTLGEFFRQCVGIDISKSKFTACLYMYDRASDVGCCTKSIDFDNTKSGFNQMVKWSRKEAVKNYPVTFLMEPTGVYYERLAYHLHKIGQTVYVVLPNKARKFCESEGIKTKTDAMDARCLALMGCASRKLKPWLPPAIIYRELRQMTRFHADLCVIRRSVANRMEALNHMEGVSKTVRKHCEKLIEEIDTLTEKNDKDIMRKVAEDKEMQERVKRIATARGLGVTTIVCIIAETEGFHLIENRKQLTSYAGLDVKARQSGKEDPKHRISKEGNAHIRAALYMPALVAVRHNRQIREAYGRICQKHPKEKMIGVAAAMRRLLMLIYTLWKNGEEYDETRDKTHTPRKKELEPEYGPEHCIETNQESIDWNAVDENGEPPF

SEQ ID NO: 499544 - protein, 347 aa, unidentified
MRFYSKQHPYYCGIDLHTRKMYVCVVDQPGQILVHRNLQTRGDHFLNLIAPYRDGLVVGVECMFSWYWLADLCAQEEIEFVLGHALYMRAIHGGKAKNDKIDSRKIAMLLRGGNMPVAFAYPKEMRATRDLLRRRMHLMRKRAELLGHVQNTNWQYNLPPLTKKLSYKTNRVGVAERFGNPSVRKMVGLDLSLIGQLDAHLNDVELYLERTVKIDDPQNFYLLRTIPGVGRILALVLLYEIYDIRRFESVGRFISYCRLVKCAHESAGKKSGSGGSKIGNAHLKWAFSEAICLLLRESPEAQRFVARKEKKHGKAKALSILAAKLGRAVYWMLRKQEAFDVKTFFQN

SEQ ID NO: 499545 - protein, 338 aa, unidentified
MAIVFVGIDLAKNVFAVHGVDEYGKPALVRSSVPRARLHALIASLPACTIGMEACSGAHHWARLFIAAGHAVRLMAPKFVAPYRLSGKRGKTDAADAAAICEALQRPNMRFVPPKSLEQQALLTLHRVRQGFIEQRTALINRMRGLLSEFGIVMPLKASTVRLQAGAALEDLPGWANIAIGDCLSELHRLDERVAQYDRHLAAHARQDDRARQLMRLNGVGETTATALVGSVGSAHEFRSGRQFAAWLGLVPGQYSSGGKTRLGRITKAGDGYLRSLLVLGARAVLNAAKGRTDALSCWALALLERRGYWRTVVAIAAKNARMAWAMLRRGEAFVMPA

SEQ ID NO: 499546 - protein, 326 aa, unidentified
MKLYLGIDIGKSSFTAALCTENLERQIIHPEVMNQADGWQTLKEWVLKQSQEMQATQIQLGVESTGGYEKPMVEWFRSDTNFTITILNPVRVKRFAQSELSRTKNDLNDARLIARYLAIRKPNPTPVTAPEIEELKIMVRHLEHLTRKQADEKTYLETVVEVNIRQQTQQIIQFYQEQIEKVLNQIRKHIDSYPNLQHQSDLLQSIPGIGKITSAILLTECIPSLTPKQQVSHAGLAPRQNQSGKINGKTQLCKTGNKRLRTALYLPTLCAIRHNPIIHEFYQRLIGRGKPKMVAVGACMRKFVHIIVGVLKNQQYFNPFYAKNLS

SEQ ID NO: 499547 - protein, 350 aa, unidentified
MSDAILAIDLGRYKSVACGYDRVTRQHTFRTLDTTPADLALLLARHPGAVVVVEACANAGWVHDRAVAAGHEVKVANTAAAAWKFTHLKRKTDKDDARRLAELEAIGQLPTVALPDPPTRQRRMLIAFRQELVGRRVACQNRIRGLFAGQGLATPHGAKAWTAVGLDGIAAQAKPLIDCGPAELWRGMLDLAVAEYRGLVDRIADVERRLDALSAADPATRLLETIPGVGPRTAEAVAAHLGNAGRFRSAKQVGAYAGLVPTQYQSGVTDRRGRITRRGPGVLRKLLVECAWCMLRYNPWARAQYARLTAGGASRRKPAVVALARKLLVRCWAMLRDGVPWRPDPAPAAE

SEQ ID NO: 499548 - protein, 493 aa, unidentified
MTIVQSTPELFVWVAIDVAKDRHEALIEAPGWRSRKRVRVQNQAEDFRSFADFLHRLGFPVRIGFEPTSNYHRALVYFLHSQGFQLHLISSLALARTREAMHNSWDKNDPKDAQVILHLLKSGLTQHDHDPIVHNLNDLQELSKTHHQVSLEKTRTQHRLLTHSLPLYFPEIARYHCSARSEWLWALLIEFPTPQSMTCLSKPEFIRRAWPLVGRKVAKERILTDIYLTAQTSIGLPAEEHSETVAMLRVVLRQLLTLCQLRATIEDRAEVLLENDTDYQRLRCIPGIGPIIALTVLAEAGDLRRFSHHRQFLKFCGLDLATEQSGQFRGLTRLSKRGNARLRAVFWMAASVAVRMRENSFRAKFERYMRTDPGSADRKRKAYVAVAAKMARVAYALIRSGADYRCFPEVAVPSGRTRSARAVEAISTSYIMCGSSTWKGLRFKYSEGHSFGCWTLCSLWWSAIPVARGSHLVLHFQLRLKSGAQEIFVLTTS

SEQ ID NO: 499549 - protein, 400 aa, unidentified
MRTVFGIDVSKASSEVAILVNGERVHSYTMPNDIIGFSHLLKDLKTVSNPEIIFEATGVYSRRLQAFLEENSYDYTRLNPLEAKKQLDSLRVRKTDKIDAEKLASSQFVLNRKPTYVQEEVYQNLHDLSRFYQNLTEDIVRTKNRLHKVLQVAFPEIENLLSTPTGEQYWNLVSIFPTKHWVLELSEVELKETIRNSTSKRISENRVGNLAEKLVGLAKQSYSAISKTSPMIEEVKYNAQELIRLTNRREQVLQQLIALAEPLPEYEILLSIPGIAETTATSIIGELGDIRRFKSANQINAFIGIDLKHYESGDFLAQEHITKRGNPYARKIMYKCIHNIASASHTNPCHIADFYEKRKRQSQTTSTKPHTIASIHRLIRTMYYLIMHNKLYDYTLAKSH

SEQ ID NO: 499550 - protein, 349 aa, unidentified
MTMLSETVDVVIGVDTHKHTHTAAAVTAQTGAFLEERTVPTNPSGYGELLALADAVGGRRAWAIEGTGSYGAGLTRFLAERGERVIELDRPWRAKRRDGAKSDSIDALRAARDALSRTKLAAPRSGSERAVLAVLLAARRSAVQASTDARRQLQAFVVVAPEPLAARFRGRSGLQMLRVATHLRINPNWDPETLATARVLRSLAHRALELSAEADAHEEAIKMAVRALRPELLKVTGVGPIVAACVLCAWSHPGRCRSEAAFAKLGGVAPIEASSGQTTRQRLNRFGDRQLNRTLHTVVLTRLRCHDATRAYAERRRSEGKSDREIKRCLKRYVSRELYRLLEGAPNPT

SEQ ID NO: 499551 - protein, 355 aa, unidentified
MNSQKYIGMDVHQATISAAVMDDQGKLIMECILETKAATILEFIEGLRGTLSLTFEEGTSAAWLHDLLKPHVSHLVVCDPRRNALLKDGNKSDRIDARKLAELLRGNQLKAVYHGENGVRTLKELGRSYLTLTQDVTRVMNRIKALYRSWAIPCQGTTVYAARHRAEWLAKIQEPGVHLRAERLYQQLDLLQPVRQQARYDLLLESRKHQGVKLLRQIPAIGPIRAALLVGLLQTPNRFRTKRQLWAYSGFSVEIHDSGEFRYGRGKRQRNRERISVRGLNDNHNRDLKNLFKSAALSASTRPGPLYDFYAGLLAKGMRPTMARLTLARKMAAITLTLWKKGVDFDPKQLHRQAA

SEQ ID NO: 499552 - protein, 481 aa, unidentified
MSTARKQQRGKKDPMLNAQLLKRKARGSHCQQGKGNQRRSKLTITNPDAAGIDVGAQVHYAAVPEGRDQVSVRSFGAYTAQLDELVQWFKDCGIKTVAMESTGVYWIPLYQKLEEAGFEVLLVDARQAKHVPGRKSDVQDCQWLQQLHTYGLLRAAFRPEDSICRLRTLQRHRKNLVECAAMWIQHMQKALNEMNLHLHHVLSDISGHSGLTILDAILAGERDPKKLASLADRRVKKSQAQIEAALTGDYRPELLFVLSQSLQNYRQIQQQIAQCDLSIEKQLAKMADCTNPSQDSESTQQSPDSAGCKPRKTKPKDALELSLAGHLKRILGVDLTTIPGLNVLAILTLVSEIGTNMAKWRNEKAFVSWLGLSPNNKISGQRVLSSRTRKVVNRAATTLRLAAMLLGKTSTPLGSFYRRKRAQFGAPKAITATARKLGCLIYRLIKNGQAYQEPDLHTYELKYKDQILNSLRKRANSFGFD

SEQ ID NO: 499553 - protein, 342 aa, unidentified
MSVIIGVDPHKATHTAVAIDRSEVELARARVRATRKQVPQLLRWAEPLGERTWAVESAGGLGYLLSQQLVAAGETVLDVPATLAARIRVLGSGRSDKNDPNDALSVAIAALRTPTLREVVAAEHSEVLRLLAKRNIDIGNHRTRVVCRLHNLLMELAPGGNAKELNASDAVALLDRVAPTTPAEAARRDQAVELLADVQRLDEQLKASHRRIRTAVTASETTLTELFGVGPIIACYLIGFTGDIARFAGRDAYAAYNGTAPVERSSGGRVVHRVSQRGNRRLNHALHLAAICQIRQPSSEGRVYFDRKVAEGKTKKDAIRSLKRHISNAVYRQLVTDAARAR

SEQ ID NO: 499554 - protein, 330 aa, unidentified
MALKVIGLDIAKHVFQLHGADARGKAVLKKRLRREQLTDFFGSISRCTVAMEATRGAHYWARMIATFGHEVRLISPQFVKPYVRGQKNDMQDAAAICETASRPEMRFVPQKTIAQQDLQMLHRIRSRLVANRTQVGNQVRGLLAEYGIIVPLHLFHLRKQLVELTAEAHSQLTPFAQELFVTLYDELCALDERIDAMEKRIQQAFQRDEACQRIAQVEGVGPVIATAIVAAIADGKAFRNGRQLSAWLGLVPRQHSSGDKQRLLGISKRGDPYLRMLLIHGARSVVYRCVAKTDSRSRWIADKQKRLGTTKACVAVANKNADYLGSPRKG

SEQ ID NO: 499555 - protein, 343 aa, unidentified
MECYVGLDVSLKQTSICVVSGTGSVVREGVVDSAPDAIAAFVRSKAPGAIRVGLETGPTSTWLWTELRRLGLPVICIDARHAKAVLKMQINKSDRNDAAGIARIMQTGWFKEVRVKDLDNHAVKALLASRALLVKIKRDLENQVRGLLKNVGLVIGRAKFNVFAMRAEELIEDRPELIAVVGPLLKARKAIEQQTDDLDRKVLKLARNDAQVRTFMTVPGIGPITALCFKATIDDPTRFKRSRSVGAYVGLTTRRHASGEIDWTGRISKCGDAMLRSHLFEAAGVLLTRVPKWSALKAWGMRLAKRSGLRKATVAVARKLAVILHRMWIDQTEFNWSKKEVAA

SEQ ID NO: 499556 - protein, 460 aa, unidentified
MKRQRTAQQKRVRLDSLQQINLHAAGLDIGATEIYACVPEASAVENVRCFGTYTAALHQLARWLQACAVDTVALESTGVYWIPLYEVLAEYSFELYLVNARHVKNVSGRKSDILDCQWLQQLHTYGLLQGSFRPSEDICTVRALVRHRDMLIRYRAAHINHMQKALEQMNVKLTEVVADITGVTGMGIIRAILRGERDPHTLAQYRQPGCRHSLIEIAQALEGHYRHEHVFTLQQAVALYDAYSQQIRACDAELEALYAQFTPPVDLAEHPLPAATKRQRPGKGNRPTFDLRQALYQVAGTDLTQIDGVNVLVAQTIITEVGTDMSKWPTVKHFTSWLGLCPNNQITGGKVKRRGRRKTKSRAALALRMAAQSLNRSHSALGAYYRRMRAKHGAEKANICTAHKLARIIYQMLKNHSQYQDIGPEAYDERFRQRRIRNLKRQAQQLGFTLQPDGSPTVVS

SEQ ID NO: 499557 - protein, 461 aa, unidentified
MRKARKVAGQRGKKRVDVTANLEILHPHAAGIDVGNAQHYAAVPVGRDPQPVQTFGSFTADLHRLGQWLRACQIETVVMQATGVYWIALYEVLEGYGFKVYVVNAKHTKTLPGRKTDVLECQWLQKLHTFGLLNNSFLPPEEIRVLRTYLRQRENLVAGAGTCIQQMQKVLTQMNVQLANVLSDLSGKSGLGILKAILSGERDPYRLAALADPRVQASRKEIAQSLEGHWREDLLFVLRQVHDLYFFHLDNITECDRRIEAHLQTLQSKVDLASQPLPQPTSLPRRKHIPQTNLQEELYRIAGVDLTRIDGLQVQTAQVVLSETGVDMTPWEDEHHFASWMGLCPNHQITGGKVIRRGTKKVLNRAALALRLAAQTLHHSQSYLGAKYRRLRAKLGAPKAITAMAHHLARLIYRLLRFGTEYHDKGMQHYERQYRKNQIEWLKKQAAQLNMQLITNTGVAR

SEQ ID NO: 499558 - protein, 297 aa, unidentified
MTITTVGIDLAKNVFAVHGVDQNGRTVLVKPKVSRAALPELIASLPPCVIGMEACSGAHYWARLFRQYGHEPRLMAAKFVSPYRMAGKSGKNDAADAQAICEAVRRPHMRFVPVKDESQQAMQCLHRTRQGFIEEKTATYNRLRGLISEFGVIAPQSADALRHMVSVQKSSLPLQVQQCVDDLMEHVDRIEANITEYDRILSHIAKTDHRSQRLMELKGVGPTTACALVASIGNAHDFKNGRQLAAWLGLTPSQYSSGGKSKLGRITKAGDSGKIHEHARIYRLRSVAGSQILNFMS

SEQ ID NO: 499559 - protein, 410 aa, unidentified
MDSNYQHFVGIDWATVEHEVHAMNAEGKRVSACSFKHSGDGLADLCAWLHKLGDPATIAVAIEVPHGAVVETLLDRGFVVFSINPKQLDRFRDRFTVAGAKDDRRDAMVLADSLRTDGHLFRRLAAQPAKIVELREWSRMHDELQGDRNAIVNQMRAQLARYFPAFLVVAGDPGEDWATRLLELVPNHAAALATKPARVTKLLKEHRIRRIDAEEVLKHLRSTPVFSAPGTATAAIAHLELLGERVRLVNKQLRACKAKLESSLGDLAKESPEGQRNEQRDVTIIQTMPGIGVIVAATLLGEAAGPLRERDYPALRALAGVAPVTRRSGKKLVVVMRTACHPRVRNALYHWSRVAVQNDPVAKARYAALRARGKSHGQSLRAVADRLLGVLCAMLRDQTEYRPPQEVAAA

SEQ ID NO: 499560 - protein, 385 aa, unidentified
MNKLDRTDTPATAEHATVYLALELSKSKWKLGVLLPDSQKLSRYTIGGGDLAALAARLADMRKKAAVHGKPVQVLSCYEAGLDGHWLHRWLKVQGVINHEIDPSSIEVNRRARRAKTDRIDLEKLMRAFLAHLRGEPRVCSIVHVPTAEDEDRKRQTREREHLVAERTAHINRIKGLLHGQGIRHVRPLDRSFIADLAGLRTGDGHPLPPRLKEEIAREHERLCLVAKQINELEAKSRAELRAARPGLPEAKIKQLIGLKSIGPVGAQGLVNEAFYRDFQNRRQVGSYFGLTGTPYDSGDRRRDQGISKAGNRRARVLAIELAWLWSINQPDSALTRWFRERVRDVKGRIRRIAIVALARKLMVALWRYLTTGVVPAGAVLRPNS

SEQ ID NO: 499561 - protein, 404 aa, unidentified
MSKKLQNPLLPVGIDPSRDTLGVVLLHPSEDLVLEELTIQNRAPLEAQKLLDTARRWADQFHTQPVFVLEATNVFWRPMASWLKAQGALVHVVSSKQTHANRSTGMRKTKTDTIDAALIARLYKQGQSAAPYLPGEPYMSLRELSRLNAFLVDLRARLRKRVYTLLYQVHPLWVDTFAHPFVKASVELMRHEWVHPKRLLQAPDHELAEVLKAASHGRMGKVFAESLKAVSQGLFFVREGEEGFSFALKCLADADVALGDVLEQLELRLIRLLGSLPGELLQTIPGMSPLTTASFLGELGDYKRFASADKAVAWFGFDPAIAQSGTDDGQGRRMSKSGTRYGRRTMFLATLAFIRAVPQARKKFKHLIRAGRARREAVCIMAADLIKTCMAMLKSQSQFDPKKV

SEQ ID NO: 499562 - protein, 370 aa, unidentified
MKKSVLYVGLDVHKMSIDVAIAESGAAGEVRYYGQIGGDLDSLDKVIRKLKAKGAQLRFAYEAGPCGYQVYRHLTAKGYYCLVAAPALIPRRPGDRLKNDRRDALNLARLLRAGELTPVKVPEPDDEAMRDLVRAREDAKSVERRAKQRTAAFLLRHGQRYPGKTTWGRGYWRWLRQISMPRAAQQIVLQEYLDAVQEATARVQRLTAQIRELLPEWRWAPVVRGLQALRGVSLIVAATVAAEVGDLSRFHNPRELMAYLGLVPSEHSSGATVRRGPITKTGNAHARRVLVEAAWAYRLKARVSRTLWQRLTGLPQEICDLAWKAQIRLCARYRRLLARGKNKNTVVTAIARELAAFMWAIAKVLEPGPA

SEQ ID NO: 499563 - protein, 345 aa, unidentified
MELHAIGIDLGKTVFHLVGLNLRGEVLVRKKVSRKQLLQFTANLHVDLIGMEACGGAHFLGRALREQGHEVRLMPAQYVKPYVKTNKNDYIDAEAIAEAVARPTMRFVPIKTDDQLDMQSLHRVRERWVMRRTAIINQIRGLLLERGITLRKGRRHVDGALPDILEDADSKLSVALRVLLAQLKLELDQMAIRIDEADAVLNKTAHENEACQRLVAIPGIGPITATALIAAIGNGAAFRKGREFAAWMGVVPREHSTGGKQKLLGISKHGNSYLRRLFIQGARAVLQHRTKQAPGLSEWLAKLASRTHHNVVAVALANKLARIAWAVLAKEERYQPLALISLVTD

SEQ ID NO: 499564 - protein, 342 aa, unidentified
MTLGLDMGDRYSHYCLLNQQGDVVEEGRMQSTEGAIRRHLEGEPSMRIALECGTHSPWVSRLLKALGHQVIVANARKIPAITGSESKNDRNDAEKLARFAAYDPKLLSPLQHRSPGHQLDLNLIHARATLVRARTMIVNALRGLVKSAGGRLPSCSTESLPARAADAIPPALAAVATPLLEQIALLNRQIDGMDKQVERLAVKYPEIVLLRTAPGVGPIVAAAYVLTLDRPDAASNRSAGTFLGLRPGQSQSGDSDPQRRISKTGDSCLRSLLVQSEQYVLGRFGPDSELRRWGLKLATSGGKRGKKRAIVAVPRKLAVILHSMWRSGQRFQPFPQSAAVAA

SEQ ID NO: 499565 - protein, 423 aa, unidentified
MTKTHKLKTQRKSEIEVETYLAPPPPTQGKIIGLDCHPDTFTAAVFVGQTPHDARKIGSRENLSMEALMRWAAEELSCADIILMEAGSNSFEICKRLGRLGLRVCVLESCHVGKHAKTYADNDRMAAARIALVYLAGNAPCVWVPDEESRERRELLHSYRKAVRAHTADTNTLVAYLNANGIRLGKRSLQQPTTKAWILGQREWSALQVQILEEKLGAIAESQERRRRLYRVIAAQMANEAQMLRCMKVLGVGIVSAFALLAVIGDVSRFHSAQKLVAYAGLNPGQRQSGRGKDIRLGVGKRGRSDIRELLIQGAQSVLVHGRHTALGQWGWKLFARKGNRNVAVVAIARKLLVQVWHLLRGNPPVALEGTKSLCEKLRKLAVTLGTALRKELGLEVGIARSVEILLMRTQPEQTPICPIQPV

SEQ ID NO: 499566 - protein, 372 aa, unidentified
MYDHSEAFVAFDTSKLRNAVAIAQGGRTGEVRFVGEIETTEAATVKLVKKLAGKYRRLTFCYEAGPTGYGLQRLIASLGHDCIVVAPSLVPKKAGDRVKTNRRDALDLARQLRAGELTAVWVPDERHEAMRDLTRAREAAVDDLQSKRRQVLSLLLRLGRYYPGKRTWTKAHMNWLASQKLEHAEQRIAFEEMLLAVRQARERIARLEQAIRTAMPDWSLTEAVTALMAMRGFDLVSATAFLAEIGDLSRFQTPRELMGYLGLVPSEHSTGERIKRAGITKAGNRRARRILVECSWSYRHPPRVGKEKLAKVAAAPRAVQEIAWKAQSRLCARFRALARRGKRPTVVVTAIARELSGFVWAISREVATSRPA

SEQ ID NO: 499567 - protein, 401 aa, unidentified
MTKQKEMFVGIDTSKNSHQVSFHNPTEIKKDLKIGNNREGFEELTKRLKSYRSEGYRMKVACEPTGHYWENLGYKLKEENFELKLINPFHTSRYKEIFDNTPQKDDVKDSRIIAQLLRQGNTLHENLPKGPYAELRELTNQREDLLEEKSRLRNKLDKWLDRHFPEYPKLFSELFGKTCLGILKEYMGPEKINEASLDKLTEKVISLSHGKLREERAKEIKDRAEETIGHTIAPKAAQVRLLHLLTRIDSFQERINKVEEMIDQRLDELEQSTYLQSIPGVGWWGAAVFLGEVGDPTRLPRAKSVEKIAGLNLYRTQSGKTKSKLSITKRGRSTLRKVAYQLAVSGINNNREFSQFYERKLDRGKAKMSALVALSAKILRVMYGVVKNEENYRPLEERVDS

SEQ ID NO: 499568 - protein, 400 aa, unidentified
MRAVFGIDVSKASSEVAILVNGEKVHGYTISNDALGFARLLGDLKTVHKPEIIFEATGVYSRRLQAFLEDNGYAYTRLNPLEAKKQLDSLRVRKTDQIDAEKLAQSQFVLNRKTTYVQEEIYQNLRDLSRFYQNLTEDIVRAKNRLHKALQVTFPELETILSTPTGEQYGNLVVAFPCKDFVLDLSKDELSESIRQSTSKRISDKRVAYLAEKLIALANQSYCAVKKTSPMLEEVRYYAQELLRLSERRKAVLDQMVELAQPLPEYDILLSIPGIAETTATSIIGELGDIRRFQSANQINAFIGIDLRHYESGNFLAKEHITKRGNPYARKILFKCIHNIASASHTNPCHIADFYEKRKRQSQTTSTKPHTIASIHRLIRTMYYLIMHNKLYDYASTQNR

SEQ ID NO: 499569 - protein, 411 aa, unidentified
MKRVIGMDIHRTFAEVVFWEAGRLRPAGRIDMTRSGLEGFGRSLSKEDEIVVEATGNAMAVVRVLSRYVARVIVANPLQVKAIAHAHVKTDKIDAGVLASLRAAGFLPEVWLPDAETELRRRLVARRNQVVRHRTRIKNGVHSILQAHLIPPCPHADLFGRLGRNWLGRQELPADERAAIDRHLRELDRLGEDLAVLDREISERMIEDPSVKRLLTITGVNINVAAGLVAAIGDVRRFSSPQKLVSYVGLNPRVRQSGLGLAQHGRISKRGRSHARAMLVEAAWAAAKAPGPLRSFFLRIRARRGHQIAAVAVARKLAVLCWHLLSKDADYQWARPALVASKIRAMQLQAGQPARKGNKRGAAYAYNVKELRDREIDVARHAEHAYEQFVSRWQPRRPEKRRTGAANEERR

SEQ ID NO: 499570 - protein, 391 aa, unidentified
MVCVGIDVAKDKHDCCILDSEGTTLVDCFTIPNNMDGFKSLLQTIQDCSKKSDKIKVGLEATGHYSYNILGFLLDNDLPVYVMNPLHTNLYRKSLSLRKTKTDRVDAKTIATMLLSDVDLKSYTDTAYHNEELKSLTRYRFDKVQERAKLKQSVSRLVTILFPELEQLVSSIHGTSIYALLSEYPGAKQISEAHLTRLANILVKTSRGHYRKDKATHIRDAARTSIGSVMPAKSLELKHTIKLIQELTSEINEIEDAIRKIMDELKPPILSIPGMGFHSAAMILAEVGDFSNFNSPDKVLAYAGCSPSTYQSGKLTNCYAHMEKRGSRYLRYALYTATKYVCYWNPVFTEYLTKKQAEGKHYNVALSHATKKLVRLIYALQKSGKAYLAVT

SEQ ID NO: 499571 - protein, 360 aa, unidentified
MKKDTRDGSGLTVGVDLGDRWSRYCVLDQQGQILEEDTIATTGRAFRKLFGDRSAARVVIEVGTHSPWVQRLLQELGHETITANPRYVRLIYSSRNKNDQLDAERLARLARVDTKLLHPIRHRGGTAQADRGLLRSRNALVECRTKLVNHARGIVKSIGGRLPSCSTTSFHKRVRQDLPDELKPALTPVLDTIAALTKKIQCLESRIERLASKRYPETGLLRQVSGVGPLTSLSFVLTLEDPARFKSSRAVGPYLGLRPRQSQSGDTDPELRITKAGDTDLRRLLVGSAHYILGPFGPDTDLRRWGLALAARGKKNAKKRAVVAVARKLAVLLHRLWVTAEVYEPLRHNRAQVVSEAISA

SEQ ID NO: 499572 - protein, 402 aa, unidentified
MNCVGIDVSKGKSMIAVMRPFGEVVVSPFEVLHTDSELSKLARLLKSLDGETRVVMESTGNYHAPVAWLLHDAGLYVSVVNAMLVHDYGNNSLRRAKTDKKDAVKLANYGLDHWLTLPRYVPEEDTRLMLKACYRQYQQYSKVQTMLKNNLISLLDTTFPDANRLFTSPPRDDGREKWIDFVATFWHRECVCDLSAKAFAAKYQKWCKKYGYNFSEGKALDIYAAARGHFGVMPKTDTAKLLVEQAISQLRATSSALAALKQEMQSLAASLPEYPVVMEMFGVGPTLGPQLMAEIGDVRRFHSKKALVAFAGIDAPPYQSGQIDVRSRSISKRGSASLRRTLFLVMGVLLQCAPMDEPVYQFMNKKRSEGKPYRVYMMASANKFLRIYYASVKAYLDSLEHD

SEQ ID NO: 499573 - protein, 439 aa, unidentified
MIETILPGVAAIDLGAEKLFVGLAEQPVRSFGSCTRDLHALRDWLRENKIKRVAMEATGVLWIIPHDYLQAEGFEVTLFHGAHARNLPGRKTDVQDCQWHAMLHGHGLLQPCFVPPEPTPQLRTYCRLREDHLAMAAQHIQHMQQALDSMNVRLHNVLSQLHGVSGMRVIDAILAGERDARVLAALCEAQVRKAKEAELIASLEGTWAKHHLFALEQAVEAYRFYLQLVEKCDQKIEHQLGVINQGVETVPRPKGRKVKVTRHNRPQIADLYGQLLTACGGRDAQMLPALGPLSWLKLVGEVGTDLGHWKEQDHFTSWAGLAPTHHRSGKSRRRVPRRKTKVAQIFREAAMSLAKSKDCVLGQFYRTVRGRRGAAVAMVATARKLAVLYWQVMTHGIEYVEKGLEQHQKQMAERKERHLRRQAAKLGFSLNPLKPSASV

SEQ ID NO: 499574 - protein, 381 aa, unidentified
MKSLIYVGMDVHKESYSLCTYLILSGEFIGETKMDAKPSLIKQYLNEMEKLLEYKGYEEIEFITCYEAGCLGFSLYKELVKLGINCKIVAPTTLHKSADSNVKKNDRRDAKMLAQNLAYGTCSFVHIPDEIDQETREYIRMRMAHKREIKRIKNMINSFCLRNGHKYEGNYWTDKHISWLKHLELNDFLKSILVEYVDTYDILMTKLDRIEGKIEEISLSERYKESVDKVSCLKGLTRQGALTIISEVGDFSRFNTTNELCSYLGLVPGEHSSDGKGPSLGITKLGNTVVRSQLVESAKSITLGIKWIKSKRLKQRQKGMPLDIISYADKASKRLFDKYHSLISRGVHCNKAVIAIARELACFVWGMMTNNISERKVGTAN

SEQ ID NO: 499575 - protein, 470 aa, unidentified
MAKSNYKISQHLCGDKGNILSGQLRSKNLENVMVVPIEIGKSYHKALVANYFGCLLRDSFEFHNSQEGFGFLHNTITEISKHQPVEEVLIGMEATGHYFKNPAATLAQMGYRNLFILNPLSTSHCRKAGLTWSKTDDIDLRAVGQAVISGYGTIYSPERPLWEDLRQICRYRRFLIKHQTAYKNKIHSILDRLLPGITELKLFTKSHLWSDSSYDFFIKYPDLDSIKKLNVKSIMKFFQHRARRISPELVHQLMQWTKNALNSCQSAITTRQFVLRSIIEQLKGLSQSIREIEVNMLGYLVKIPAVVLLSINFIGPVRAAEFAGEVSPLEQYYNSRALIKAAGMDPTRYQSSTQESSKHTISNMGSRTLRYITIHTADDLMKRNEYFAHFAKELMRRGKSRGCACVATGNRYIRVAFSMIKDQKTFTPSNGLGISKDPLFKIKDFLQNHKASERTDEYVEYAQKYLGKKE

SEQ ID NO: 499576 - protein, 315 aa, unidentified
MTASTERFVGIDVSKDVLDVHVRPDGTARPFANTPEGLDALLEWLRSLGLTLIVVEASGGYERALLTALSLGGLPVSLVNPKRVRDFAKAIGRLAKTDRLDAAVLARFAETIRPPVWAMPNADAENLQALLTRRTQLITMRTMEKNRLKTLAVSVVRRSVQNMIRTLDREIRKADQQLGDAIRACPEWAAKDDLLQSVPGIGPVLSRTLLLEMPELGTLTREQAAALAGVAPMNRESGKFQGKRLIAGGRAFVRSMLYLASHAARKGNEVLRAFAERLKAAGKAPKVIRIALARKLLIIANAVLRDNRAWTLKTA

SEQ ID NO: 499577 - protein, 362 aa, unidentified
MRIIGCDLHARQQTLAMLDTTTGEVVKKTLPHEGHNVREFYSTLPGPVRVGIEATGSMQWFVNLMEELGIECLVGHPAEIRAAEPRKQKHDRRDADLLLSLLVENRFPAIWLPTKELLDLRALLRHRHQWVRLRTRIQNALQAMALANGLRRGSSLWTQAGQQAIAALPLSPHAAYRRSELQTMYRKFETEIEKLNQRVEEQVCERPRARLLMTHPGVGPITALATEVFLGDPSRFADSKALASYVGMIPREHSSGGRQRLGGLSKQGNPLLRFLWGEAGIHAVRRDPELQRFYRRKLMQKGLGKARVAVARKLGIRLWIMLRDQIEYPEFCRRGQKQQTSGDACAGMPEMRYGATSHRLID

SEQ ID NO: 499578 - protein, 382 aa, unidentified
MVIDADGKRLLSRRVANDEAALLELINAITALAGGGELTWAIDLNAGGAALLIALLIGAEQRLLYISGRTVHHASGGYRGEGKTDAKDAAVIADQARMRRDLQPLRPGDDIAVELRILTSRRTDLVADRTRAINRLRAQLLEYFPALERAFDYSGSKAALILLTGYQTPDGLRRAGAARLAAWLRKRKARNADAVAAAAIEAAKSQHTVVPGQQLAAAMVARLAEEVMTLDTEIGDTDAMIEERFRRHRHAEIILSMPGFGVILGAEFLAATGGDIAAFGNTDRFAAVAGLAPVPRDSGRISGNLKRPRRYNRRLLRACYLASHIAIRTDTASRIYYDRKRAQGKRHTQAVLALARRRLNVMWAMLRDHKPYQPTAPNAATA

SEQ ID NO: 499579 - protein, 323 aa, unidentified
MHQHHAPVQYPRHFGIDVSKDHLDIHCLQSGRSWRIANSVAAVRRFIDEQPPLRDALVVVDSTGGHELVCCETLAAAGIRVHRAHSYRLRSYIRSRGQMAKTDRLDARMLAAYGQERQADLRLFTPQGRLQRQLRQLALRREQLVRMRTREKNRLKAPANGDVFASIRSILRALQREIARIEARMRKLVRAEEALDGRRRMLMAIPGIGSTIANALIALMPELGNIGNKQAAALAGLAPYARDSGKWRGKRHVGPGRPIVRRLMFMAAMVAVRHNETIRGFYRRLIDNGKKPIVALIAAARKLIVIINAKTRKCLTEIQMQLS

SEQ ID NO: 499580 - protein, 379 aa, unidentified
MRTVCGLDVHKDSIFVCILNENGILFQDKIGVLTPDLERLVDVLHEHNATEVCMESTSIYWMPVWRILEPYFSLKLVNPYFIKQLPGKKSDVKDAEWIATCLLKDLIRGSYVPEDRIQQLRQYDRRIFDLNKDIVYKLTKLDAALQRCNIRISNYVSTTDGKSYQKVVEKISEGTTDPKVLTGLIHGRTLNRVGKDIIAASLTGVITQTDIDVIRQIRDEVTLAQKHRKECLDKMEELCNKWFPDQMKNLQTVPGVSLRSATSVIAELGTDMSSFEDAAHLVSWSGLKPRNDESAGKIKSRKITHGNKFLRKTLIECTWAASKTRGCFYNKFSYHQTVVRRKNKMKVQVAIARKMLTAIWFILHNNVPYRDYTPDIAAE

SEQ ID NO: 499581 - protein, 402 aa, unidentified
MFYIIYKDMKKVCGLDVHKDTIFLCILAENGQTFLKEYSTLTSDIEAMRDLIKEQQVSEVAMESTGIYWIPIWRILQGHVEMKLVNPYFIKQLPGRKTDVKDSQWIATVLQKGLIRGSYIPGQHIQELRQYERRYVRICEHVTRLEQAIDRQLHRCHIRITNFTSKVGSVSVMGVVRGLIKGESAPDELIKHIHGRITNKHKEKIAASLQGFVSDSDRFIFRQNYEELELLTRQQQECVKEMENICDSLFKEELKLLCSVPGIQKLSAMTIIAELGVDLKTFLTAASLVGWVGLRPRNDESAKKIKSRKITNGNKYLRRILVQCAWAITRSKGCWLSGKFNELAKRRSQKKALIAIARKLLVIIWHVLSKHEEYKEFKPKLSKEQKQKRIARLEKQILEVQS

SEQ ID NO: 499582 - protein, 410 aa, unidentified
MEVLYQRCCGLDVHKETVVACLRIVSGGEVVREVRTFETTTASLMALSAWLAENGCTHVAMEATGVYWKPVWHILDDGDFQLILANAAHVKNVPGRKTDVNDATWLADLLAHGLIRASFVPDTQTQELRTLLRTRKQLVREKSSHILRVQKTLEDANIKLDSVITDVMGMSGRAMIEALIAGESNPAKLARLANYRLTAPQEKLREALRGRVTKHHRFLLRLHLNQIDALDAAIATVDQQVQAGIAPFRCAVELVTSIPGVSDIGAQVIVSEIGTDMSRFPSESHLISLAGMCPRNDESASKRRSNRVRKGAPWLKTTLVQCAWAAVRKKDSYLKAQFLRIKARRGPKKAIMAVAASILTATYHMLKDGTLYQDLGSNHFQTRSKGQQTKRLVQRLADLGYDVALTPLAS

SEQ ID NO: 499583 - protein, 344 aa, unidentified
MTKISTIGLDLAKNVFQVHGVDASGAVVLRRQLRRAAVEKFFAQLPPCLVGMEACGSAHHWARVIGGYGHEVRLMPPAYVKPYVKRNKNDGRDAEGICEAVSRPTMRFVPVKSIEQQATLAVHGTRALLVRQRTMAANALRAALSELGIVAAQGYEGLRELMARLEEPSDEIPEMMRGALLLLAQHWQALDADERVLERQIAKSARCDGDARRLMEVPSVGPIIASTVLAKVPDAKVFRSGRDFAAWIGLTGRDHGTGGKHRPGRISKQGDRMLRALLISGASAHLRHQKARGVTDPWLRDLLARRPYKVAMVAFAAKTARIIWAMLVKGEHYRDRASAPAAAC

SEQ ID NO: 499584 - protein, 355 aa, unidentified
MKRAYFIGMDTHCQFCEIAAVNTRGDVVERDRCVTCIPALLEVIERVPRPRQLVIEEGPLAGWLWRHLHQAVDRMVVSEPRRNRLIALDGDKDDDLDAEKLAQLLRGGYVKAVHQVETLERALFKQQVSLYHHRVRQRVREGLRISSVFRQHGVMIREKAFAAAEDRPALQAQLPAAESFQEILPLLWSSYDAAVEHEELWRRRLVRLAKQEEEIQRFEALPGISWIRAATLYAYLDTPWRFRSKAALWKYLGIGLERKHSGNAPEYLGVPTRAHRLLKGTILGAACSAVASGNNPFAELYGRWIEHGLSSKLARRNVARAQSATLWGLWKNGSAYRPDWVGVARVAGLATEVSR

SEQ ID NO: 499585 - protein, 395 aa, unidentified
MSAEGEAIRSNDYRKDTTVKATSTRPAAVLGLDVGKSSHWACLVDRDGEVLASAPVRNREAELDTLFASAPAGTLVVVDQFRNIGSLAVRRARAAGLGVAYLPGLAASRAAGLFAGETKTDERDAAVIARTALGVPDSLSGVPGRGEALEAARALSSQRDHVVACATRDKNRLRAVLLESCPALEAAVDLSDRRWLELLAGFGGAWGIARSGAGGPRAEAAGEAAAASTAPPPALVEAENRQVRFLAARISEALDEAGALEAETAALLEGDETYACLLTVPGIGPRTAAQLAVSVDIGRFPDHDHLASYCGIAPRVRSSGTSVRSVRASRRGDARLKSLLIFSCNSLVRSSGRYGEYYRACRARGMGHGRALKAVARKRLRAIYAVMRDRVPYRE

SEQ ID NO: 499586 - protein, 409 aa, unidentified
MVVQAALVTSSTVVVAVDVGKTEFAFSVTDATRTLLLKPRTGCPMTGPSLAQVVADIGQVLPAGAVVKVGIEAAGHYHRPLLMAGAWPIGWEVLELNPGHVTEQRRVLGKRSIKTDVIDLQAMTELLLAGRGQPVRERCLVLGELTAWSAHRTGRVALRTATKNQLLGQLDRTFPGLTLALPDVLATKVGRLVVAEFADPARLAALGSTRFIRFGATRGLQIRKPVADRLVQAARDALPTADAAVARAVLAADLALLVDLDAQVDQATEQLGRLLPLSPFAPLLTVPGWGAVRAGNYGGALGDPCRFENHRQVYRTAGLNPIQYESAGKRRDSVISREGSVELRRALIDLGVGLWLSDPAAKDYGCQLRARGKKGLVIACAMANRANRIAFALVRDQSAYDANRWTRQD

SEQ ID NO: 499587 - protein, 331 aa, unidentified
MENIALDAHKRYTWARVENTQGEKLYESRLQHARGSIKNFVQRWTPGSAVAVETVGNWYWIVDEIEAGGGKPQLVNARLAKLMMGSVNKSDKLDAKGMNRLQRTGTLPTVWIPPSAVRDARELPRTRMVLSEQRTQLKNRVHATFAKYGFVIEGASDAFGKKGRKIVEELLPKLPPHTEQALGRVLDQLDHVSENLKLIEAKMMEAFAPCPETTLLKTEPGVGDILAVVIWTEIGTIERFARAEQFASYCGLVAREHSSGGKFYYGAVRRDVNVYLKWAFVEAANSAVLNRERCHYNHISRLYGAAQSTTRAQQGQGGRGAPPLGSSFLDA

SEQ ID NO: 499588 - protein, 370 aa, unidentified
MLNTTTFVGLDVHARSIKAVALDVMTGETKSATFAYDAAAVAEWVGSLDPAAKCVYESGVTGFDLQKKLTALGVDCVVGAVSKMIKPSADRKRKNDRNDAGFLARMLSVGNVVEVWVPDDECEAARDLVRALDDARDDLKRCKQRLSKFLLRHGLVFSETTPSGQRRGNWTAAHWAWINAISFKEGADNEVLAYYIDAVRQKLEDKKRLEALVKNEASKARWRKRVDSIRCLKGIDTMSAADLVFEADEFSRFKNARSFGAWLGLTPSEHSSGESVRQGGITKAGNKHLRRVLVESAWHYLNATARSKDLVKGQIPDPAARRHAAKGVRRLVKRREGMLERGVHKNKANVATARELAAWVWAVGYIVESA

SEQ ID NO: 499589 - protein, 342 aa, unidentified
MPYFVGLDASKKTTHICVMDRKGDVVRTGVVASEVNAIVGFLRGDGHRYAKVGMESWTMAALLYQGLAKAGLPVICIDVRRAHGVMKAQRNKTDKNDAQAIAELMRVGAYRAVHIKSVENLHIRALLTARSTLVSKIRDLGNSIHGVLLGYGYKLAKGQPAGFDRSVKGFIDANPKVAETIGPLLRARQALQVEKRLLDEKVRAEGNADPTCRRLMTAPGVGVLTAMIFKSAIDEPLRFAKSRSIGAHLGLTPKRRQSGETSYQGRITKWGDRPARAALYLAARSLCAPRARRSWLTEWAEEVRARRGYRRSIVAVARRLAVILHRMWVSETDFQWSTPASI

SEQ ID NO: 499590 - protein, 388 aa, unidentified
MQDVAHRPVAATTIGSDLCAIFISLELSRSTWLVTSLSPGHGEKMSKHSVKAGDIAALLARFSKLRTKACARTGKSLPIVVIQEAGLDGFWIHRVLLSEGIESHVVDAASVATSRRRRRAKTDRIDGETLLRALLAYSRGEPRVCSMVRAPTPEDEDRRRICRERKVLIMERVQHVNRIKGLLFSQGVSGYEPLHRDRRAQLDALQTGDGRRLPQHLKAQICRELDRLELVLEQIKAVETERDALLNAEQTKVAAPPPMLLALHGVGPEFASVLWSEGLSRHFDNRRQVAAYAGLAPTPWQSGSINREQGISQSGNPRLRTTMIQLAWLWIRHQPVSALTLWFKDRNERTGGRRRKTTIVALARKLLVALWKFVSAGVVIEGAMMRPA

SEQ ID NO: 499591 - protein, 371 aa, unidentified
MNSLIHIGIDVHKDTYSLCSYSFQTNQAFGQTKIGSDNKLVIKYVEKLLKSHPEAEVLCGYEAGPTGFGLYRDLCKANIPCVVMAPTSLPRAVGNRVKTDRLDALEMAKHLAYGTYSAVRVPTSEDEAVKDFTRLRNTRQQALKKAKQNLLSFLLRRQRRYTEGSSYWTLTHHRWLKQQQFTDPLDQETYNEYLQELYDQEEKVERYDARIEELSRLDAYRERVEKLRCFKGIDTHTALSLVCEIGDFSRFATAAQFSAYLGLVPREDSSGQRERRGGITKGGNTRLRTLLTEGANAATRGSLYGTKSKKLKARQAGNPAQVIAYADRAQRRLHRTYNKLVLNSVPRNKAIVAVARELSCFIWGMMNDRID

SEQ ID NO: 499592 - protein, 362 aa, unidentified
MRIIGCDLHARQQTLAMLETTTGEVVEVTLKHEGDNVREFYSSLPRPVRVGIEATGSMQWFLNLMEELGIECQVGHPAQIRAAEARKQKHDRRDADLILKLLAENRFPAIWLPSKELHDLRALLRHRHQWVRMRTRIQNALQSIALANGLRRGTTLWSHDGQSRIASLPLAPHTAYRRSELQAMYEKFEAEIEKLNQRVEEQACQRPGARLLMTHPGVGPITALATEVFLGDPARFADSKALASYVGMIPREYSSGGRRRLGGLSKQGNPLLRFLWGEAGTHAARKDPELQRFYRRKLVQKGLGKASVAVARKLGIRLWIMLRDQIEYNEFCRRGQKQQKSSDACAGMPETRYGANSHRPID

SEQ ID NO: 499593 - protein, 346 aa, unidentified
MRKIAYLAMDLHARSFTLGEMDGKGEFIGNREFRTSENNIIQALESVKAKHKLLTIEEGPLTYWAAQIAHPCVDQVIPCDPRENSLIYKSPYKKDKMDTYRLCRLLRLGELKQVYHPENDDRAIFKAAAQHYIDLRTQLTRFKLKIKAMYRHWGIMDVFTKTVYTSKGRVQYLQQVKQLSVRRQLLQLYHLMDQTEAMRKSALKNMKQLGRKYPEIRNFMKIPGIHDVHAHIYHAFIQTPHRFSKRSQLWKYCRLSITDRSSDGKPLGFKRLDSSGVGELKALSYRAFLSAMRGDNEIKRYYQASLNRCHDHKHARLNTQRKILETMYVIWKKGVPYRPELFYESA

SEQ ID NO: 499594 - protein, 319 aa, unidentified
MSHYHTFIGLDIGKFTFSAALHGSPKTQDYANNLKGFRDFVRDHKEHLPKALCILETTGGYEQALIKALQERGLRVHRADTRKVKNFIRSFGSKAKTDALDAKALAKYGAERQTDLELYSPKSPQEEQLFNLVQRRKDLVHMLVTEKNRLQAPTNVTMKASIRRTIAHLEAEIALIKEEIARAMAADPIVEQKLETLVTIPGIGTTVAADLLALLPELGGLSRREIACLGGVAPMARDSGLHQGYRRTGQGREGVKPVLFIAAMAAARSKGPLGLFYKNLLNRGKKKMVALVALMRKILVIANAKLRDLQAQTSPQTPF

SEQ ID NO: 499595 - protein, 435 aa, unidentified
MDEVTDEPLYRDRVCGIDIGKAGMVATIRVPSERDPARRAAETRSFGTTKREVLALADWLRCWQVPAVVMEATGDYWKGPFYRLEAEGLECVLADAKQVKNLPGRPKRDPSDSRWLAACFERGAVTPCFVATEEFRVIRLHTRYRRELTEERTREKQRAEKLLESAAVKLSSVVSDLHGVTGRAVMDQLIAGERDPKALAQLARARARRKIAELEEALDGAEFFTPAHAALLATMLARIDHLNTEIDQLTGVIERLLAPYEEQLQQAESMPGWGRRSAQDAVAETGADMTRFPTGGHLASWAGRTPLDNQSGKRQGRAKSKKGNRYLGGLLGETAVAAGRTQTREGARYRRIARRRGKPKAQVALGNTQLKVYHTLLSNPGMRYQDLGVDYYERQRGIRRRIAHHVGKLGALGFDVTLCRRPDPQSAGTGETTAA

SEQ ID NO: 499596 - protein, 355 aa, unidentified
MKIIGCDYHPGFQQIAFVDTETGELQERRLEHAEEAERFYRDLGVQGACVRVGMEASGHARWFERLLRELRFEMWIVDAAKIRTKRVRKQKTDRQDAELILKLMLKDDFPQIWVPGGENRDLRQLLWHRHRMVQARTRIMNQLQAVALNEGLLCKKRLWRETGRKQLESFPLAPWASRRRQDLLELLDRLTPTIAELTQAIEREVEKSPAAQQLQTHPGVGPLTALAFVLVIGKVDRFQCGKQVASYLGLVPLEDSSGKRRRLGHITKQGNSLLRFLLVEAAQVTVRSDPEWRSKYFHLALRRGRKIAKVAMARRLAVRMYWMLRKGWNYEQLNKFGSHAGQPGHRHGVPLTPSN

SEQ ID NO: 499597 - protein, 350 aa, unidentified
MIIIGADYHPGFQQIALVDTETGELQERRLEHREEAEKFYRDLGTQGATVRAGMEASGHARWFERLLGELQFELWIGDAAEIRTKRVRKQKTDRQDAQLILQLLLEDRFPRVWVPSWENRDLRQLLWHRHRMVQARVRVMNQLQAVALNEGLRCKKRLWRDAGREQLESFRLAPWASRRRRDLLELLDRLTPTITELTEAIEQEVEKCPEAQRLQTHPGVGALTALAFVLIIGRAERFQCGKQIASYLGLVPLEESSGQRRRLGHITKQGNSLLRFLLVEAAQVTVRSDPEWRRKYFHLAMRRGRKIAKVAMARRLAVRMYWMLRKGWDYEQLKKFGSHAGQLGTGDGVR

SEQ ID NO: 499598 - protein, 333 aa, unidentified
MIQVGPPVVGIDVSKKKLDAALLADGKLKYKVVENTNKGYEELVVWLRKQGVVIADVHACMESTGVYSEPVALGLLAMGMKVSVVNPNLVKGFGQSENIRNKNDRADAGVIARYCATMHPPPWEAPSPELQHLRSLTDRVAALKDMRQQEENRLEGYTTRNDLAMQAEAKQMIAHFDDAIKRLGKDIDDHIDRHPDLKRDVDLMTSIPGLGRVTAAKVISRVGDIRRFTDAKKLAAYLGVTPKQRQSGSSVRGRSTISRMGSGEVRTAMYMPAITAIRYNPLIAAFAERLSANGMAKMAVVVAAMRKLVHQIYGVVCSGRPFDPNYLQKPLAT

SEQ ID NO: 499599 - protein, 316 aa, unidentified
MNACFVGIDVSKATLDVGFCPDVLKPFQLKNDPEGFVQLIACLNEFEIGRVVLEATGGYEKAVFTALRMEGINVVRVNPKRPHDYAKSMGKLAKTDKIDALMLAKFAQQLDITSKVEPSPERDRLGELVKLRDQFVQHRDDDKRRLKQAICAEAITAYSHHIAYLNAQIKELGKSIESAMKALDCEKARRLRSVKGIGLITCAAFMAHLPELGTLTGREIAALAGLAPYNDDSGKKSGPRRIKGGRYRVRCAAYMSIWSMIRYAPEFKARYDDLIARGKRAKVAAVACMRVLLVRLNAMLRDGTEWIVQPHQAPAA

SEQ ID NO: 499600 - protein, 405 aa, unidentified
MWFVGIDWADDHHDAVVIDDAGKRAATTRVPHTSDGMAELIAFLRDIGDVDTHPEHLACIVETNRGLLIAALLDAGVPVYPVNPTTVDRQRKPSGAKTDAIDAYLLARTGRSDLADLRRLTPDSPLVAELKLLTRDQDGLIQGQTRLVNQLTACLKAYYPVALELFGKLHQGATLAFLRAFPTPDAARAATVERIAAVLTAARYATAEAKAREMWERVRQPQLTADPVVTRAKARLMLTLAAQLQVLVADIAAYDREIARVFAQHADSAAFASLPRAGKRLAPRLLAEWGDDRGRYADAASVQALAGTSPVVFQSGNYASVHKRYACSKPLRNALHQFAWQSTLQDDWANAYYRRKRREGKSHTKAVRALANQWVRIIYAFWLKRETYDPAVFVAAQQAHAPRAA

SEQ ID NO: 499601 - protein, 365 aa, unidentified
MELSLSSWLVAGFVPGIERHPLKKLRADEQALLRLLHRWRDEATKVGRNINRIAVAYEAGRDGFWLARWLQAHGVEAYVIHASSIAVSREHRRAKTDRLDTDHLKRAFIGWLRGEPDHCHMAAIPTLEQEDAKRPTRERENLVGEQTRLINRIKSCLVRFGIRGFKSKLRKAAERLEALRTPDGVALAPNTLAELRRDLARLRFVRDQIKTIEVARLQRLKNKAPKEGSHAMVCLLVRVIGIGVETADMLVHEVLSRNLRDRRAVARYAGLTGSPDESGKRRREKGLARAGNARVRRGMIQLAWRFLQFQKDSTLAQWYRAQTADARGGTRKTMIVALARKLLIALWRLVTSGEIPNGVILRPAV

SEQ ID NO: 499602 - protein, 424 aa, unidentified
MKHHGWPSREGILTESYRFFVGIDWAWERHTICVLGSDAEVIDRRTIEHSGAGLTQLADLLEKLSSGDPFSVAIAIEMPRGAIVESLVERGFAVYSLNPKQMDRFRDRHTVPGAKDDSRDAFVMADALRTDLHLFHRVRLDHPDILRIRELSRSEEDVQQDQVRAENQLRDLLNRYYPQMLQLCPAVDQAWFWDLLEMASLPAQGAKLSKSRIEKLLRSYRIRRLDADEIHQTLSVPALQLAPGAAEAASEHVLLILPVLRLLDRQREEIARRMQLLLEKMSEDEQVVEHRDVKILLSLPGVGRVISATMLAEASQPLAERDYHAIRSYAGAAPITRRSGKRKMVVMRRGCNPRLRNALYHWSRVSSQNDPRSKEHYAALRAKGHSHGRALRGVADRLLAVLIAMLRSGTLYDPNHQTAAMPLK

SEQ ID NO: 499603 - protein, 386 aa, unidentified
MPQLNDLSRSRVILKRDATLIAVIEMGQSSWLVAGIVPGVERQPLKKLPVDESALLKLLNRWREEAEKAGHRIERIAIAFEAGRDGFWLARWLRARNIEAHVIHASSVAVSREHRRPKTDRLDTELLKRAFLGWLRGERDHCKTVAIPTLAQEDAKRPNRERESLVGEQSRIVNRMKAALARLGIRGFNPKLKKAVERLDGLRTPEGEPIPPNTLAELKHDMERRRLVRSQIRYIEGTRLERLEQAPGDGPHVMVRLLARVIGVGVETADMLVQEVLSRNLRDRRAVARYGGLTGSPDESGKKRREKGLARSGNARVRRGMIQLAWRFLMFQKDSALAHWFYARTKNAPQTRKTMIVALARKLLIALWRLVREGAIPEGIVLRPAL

SEQ ID NO: 499604 - protein, 410 aa, unidentified
MSKLYVGIDVDLRKNTVHCMAPSGDTLKKFKVPNNFDGALALVDNIVELSARHSLQEVILGLEATSNYGYHLAALFKDSEKLASFSPKIHVLNAKAVHNFKKSYSDLPKNDDVDAWVIADKLRFGRLPQEVFMDERFLALQRLTRTRFHLVNTIKREKTYFLNNLFLKFSSLRQEKIFSNNFGATAMAVVEEFLSPDEIAAQPLEELISFLEQKSKNRLVDAEGMAKALQKAARSSYRLNKSLADPVNACLASSISVIKALQTEVKKLDKIIEEHMKAIPQTLTSVKGIGPVYSAGILAEVGEIIRFKNHKSLAKFAGLVWNEQQSGEWKAEDIKRVRSGNKYLRYYLVEAANLIRVHDREYADFYSAKYDEARTHKHKRALVLTARKLVRLVYALLRTNQLYIPRKRGD

SEQ ID NO: 499605 - protein, 499 aa, unidentified
MKHQRQNCTSKTDSSTAIAVRSKRGRPAKVPKLKAAAIEALEQINLHAAGIDVGSAQNFVCVPAQAVKSGQSNVRSFGAFTKNLDDLVEWLKECGVTTAAMEATGIYWMSLYDKLEAAGIGVVLVDPHSVKHVPGRKTDVLDCQWLQQLHTYGLLRGAFRPEASVRRLRVLCRHRADLVCEGSSHLQQAQKALVQMNVQLPLVVSDINGETGLRIIEAILAGERSPHVLVQLRDPRIKKSTVPEMEAALTGQYTEELLFTLRQNIEAWKFYQGQLQQCDQQIEAALKGMTSATKLDIPEAPPKPVPPALPGSPGAKKKRQRPLHGNNAPTVDFSEQIRRICGVDLMKICGLNLLSVLMLIAEIGVDMSQWRSAKAFSSWLGLCPGSKISGGKHLSRRTRHVVNRASILFRMAALAAGQTDTWIGRFYRRKKAHLGAPKAITATAHKIACVVYHMLKYQEEFLPLDVTLYDLKSQERRMRNLRKQAEEMGYELIERKEAA

SEQ ID NO: 499606 - protein, 353 aa, unidentified
MNNIKYVGMDVHKSITVIVVLNELGHFESRSQIKTKGENICDFFRGISGKVEVVFEEGTHSAWLYKLLKPLVASVTVCDPRHNKLIEDGNKSDDEDAETLAQLLRLGAVKAIYKGDDQHQQLKEICRAYDNLIEDSTRVQNRLKAIYRGRGISCSGHDLYRADQRSDWLAKLSEDAARFRAESLLEQLESLSQLRKQAKQRLLAQARAHADYRILIKLPGFGPVRVAQLIAVVGTPHRFRTKRQFWPYCGYAVVTRSSADYQIVEGKIVKQRKKVSTRGLNHNHNPQLKQVFKGAALTALRHEAIKTYYQRLIDHGTKPELARVSVARKLASIALTVWQRREEFDVKKAFAQD

SEQ ID NO: 499607 - protein, 418 aa, unidentified
MEVVNPRCCGLDVHKKSVVACIMIPGKKETRTFSTMTGALLRLKEWLVECGVTHVAMESTGVLWKPVYNLLEAEFAVMVVNAYHIKTVPGRKTDVKDAEWIADLLRHGLLRGSFIPDRAQRELRELTRYRRRLIQERAEVVNRIQKVLEGANIKLSSVATNVVGASGRAILEAMVRGTDDPKVLASLARGRMRSKTGELEQALHGLVGPHQRMLLESQLRHLTFLDEEIARLDEEVAERMRPFEEVMERMDGIHGMGRRSSEEVLAEIGIDMSRFPTAAHISSWAGLCPGNNESAGKRRSGRTGHGDTWLRAILVQVAWAAARTRDTYLSALYHRLAARRGAKRAIIAVAHAILCIIYSMLRNKTTYEDLGQNYFDQLNRQSVVARAVRRLESLGYSVTLAATPPQAQGPAPEPVFSR

SEQ ID NO: 499608 - protein, 399 aa, unidentified
MIENYDSFDVFIGVDVGKGEHHAVALDRAGKQLFDKALPNDEAKLRELIGQLKRHGQVLFVVDQPATIGALPIAVAQAEDVLVGYVPGLAMRRIADLHAGEAKTDARDAAIIAQAARGLPHALRSLQLADEQVAELSMLCGFDDDVVGQITATSNRIRGLLTQIHPALERVLGPHLDHPAVLDLLQRYPTAAAMNAFGPTRLDNQLVKLAPRMGRRLADKITQALAEQTVVVTGTNATSIVLPKRAEQLAALRRQRDEIAIEVERLVEAHPLHPVLISMPGVGIRTAARLLTEVSGKDFATAGHLAAYVGLAPVTRRSGSSIRGEHPSRRGNKILKRALFLSAFAAFRDPVSRAYYDRKIAQGKRHNQALIALARRRCDVLYAMLRDGTLYQTDHQLAA

SEQ ID NO: 499609 - protein, 322 aa, unidentified
MFQITIGVDIAKIKFDVALLLEGKYKHKHFTNDEAGFEAFIHWIVAFNLPKPPLICMEATGSYSLPLADFLIVQSYSVSLVNPAKIHAFAKSELSRTKTDKADAKLIARYALAMRPPLWTPPPPEIRRLQALTRRLEHLLEIQQMERNRLETADDVVVVESIQTLLTTIDDEIKTIRKAIATQISDHPDLDQRRQLLESIPGIGAATVAHLLIALSPHQGFTDAKQVVAFAGLAPALKQSGQWAGQTRIAKNGDPLLRKALYMPTLSAWAHNPVIRAFCLRLKANGKNGKAIACAAMRKMIHIAFGVIKSGKPFDPLYACSK

SEQ ID NO: 499610 - protein, 435 aa, unidentified
MTRYVGIDLHKHLIVGHVVDAAGKKVDTFRYESVGAVTLEHIGRNRLKPEDEVVLEATTHCWAVVRALEPFVARVVVSNPMATKAIAKAKVKTDKVDAAVLSHLLRLGYLPEVWQPDPATRDLREWTARRSRIVGQRTSVINRLRSTLAQRLLHCPYEMTSPSARRWIGSEPVDADMRWLLESDLRLMDALQAELDAMDKLMAKRGMVDPRVKLLMTLPGVSQHTAQSLLAAIGDITRFRDADALASYLGLVPITRQSADHCYHGPITKQGRGHTRCMLIQAAQSVRTHPGPLGHFFRRLKKRKPHNVAIVAVAHKLVLLAWQVLTKGEPYRYALPQATQRKLSRMRVQATGERRPSGLPAGTPKRPARLPGGSHRIKPLAEVYASEQVPAARPAPAGELRHLANLKLNEFVDGLQRAHIVPLRRTPPEGAAGSH

SEQ ID NO: 499611 - protein, 401 aa, unidentified
MDILYACCAGLDVHKRTVVACVRRLGADGKVAREVRTFGTMTADLLALSDWLAEAGVTQVAMESTGVYWKPIFNILEGRFPVLLANPQHLRRVPGRKTDVKDCEWIAQLLQCGLVQASFIPPRPQRELRELTRQRTQLVAQRASVANRIQKVLEDANIKLAAVATDVLGKSGQDMLRALVAGEQDPVALAQLARGRLQEKIPALQQALRGQVTAHHRFLLELLLDQVQSLDALVKRLDGRIQELTSPFEETTQRLDTIPGVNRRVAEALLAEIGPDVAAFPTEGHLAAWTGLCPGQRESGGKSRGGKTRKGNRWLRQVLVQAAWAASRKTGSYLRAHYRRLAGRRGGQAGGSSGGAHPAGDHLPRPAARQHLPGAGGSLLGSLAAGPADAQPGQASGAARP

SEQ ID NO: 499612 - protein, 345 aa, unidentified
MPIVGGLDIHRKQITFDYLDTATGEVRRGQIAPADRAHLRAWLARFAGRDDAAFALEGCTGWRYVAEELAAAGVTAHVAEPADTAFARGRKRHAKTDKTDSRHLRVLLEQGRLPECWIPPAQILECRALLEAYHDLRREHTAWIERIHAVFFHQGAPRLGEGALRTEHGLAALRQAAAIHLSPAGQLQVATALDMLAAVEARMDTLRQQLLHAARHLAGARALQARLYGVGPLAGLAMTCWLGGAGRFSSSRKAVRFAGLDVTVYSSDGRRSPGHLSRQGPEILRWVAYEAGKTHGRASAPGHDYYAAVKDRTDGKIAALSQARKLIRQACHILAELGDDALTAA

SEQ ID NO: 499613 - protein, 344 aa, unidentified
MTHYAGLDVSLEETAIAIVDETGRTVREAKVASEIEAIDAWLRRSGLTITRLGLEAGPLSSWLYAGLKAQGWPVICIETRRLRAVTRAMPVKSDRKDAEAIAQVMRTGWYRAVHVKSLASQQLRVLLRHRKLLQAKRQDLENELRGTLKAFGLKLGQVGQAPFAQRLSELVAGDPWLDRLARPMLAARAALMKSFAELHRLILKIVRADSVCQQLLTIPGIGAITALAYKTGIDDPTRFRHSADVGPHFGLTPRRYESGETEYTGRISKCGDAMVRSLLFEAALALLHRVKAASALKRWARRLAKKVGTRKAAVALARRLAVIMHRMWCDGTAFNPNLIRVAAN

SEQ ID NO: 499614 - protein, 334 aa, unidentified
MSSLVCGLDVHKDSVFATVMSYDGEVIERRRLSCSEVVSFLDQYPIDKVAMESSTSIVPVYRALRGRGYKVLVSHPKKTRLIAESRIKTDRVDSWAVTELARLDALPLSYVPPDDIAALREKVRRRAFLVRMRAKLKVKIKSHLTINGVTPPSDYGLFTRKGLEWLRSLQSDAIESYLPVLSALTVQIGKLSKELRRMAPEDEDVRLLMTIPGIGYYSALLIKSEIGTIDRFPDGEKLCSYAGLVPSVSISGGYRRHGSITKEGSRWLRWIMVESVRIHVKYDTSITRAYHAIAERKGRSIAKVAAARRLLMCCDSVLRNHKPYYDPGGRYQSS

SEQ ID NO: 499615 - protein, 334 aa, unidentified
MHRRQITLDALDTETGEVMRGRIDATPAAVAAWVKRFPGQEVHVAVEACTGWLFVCNALVAAGAVAHLAEPVETSALRGRKRRAKTDREDARWLRELLAEGRLPEAWIPPEHVRQRRSRSRMRHTLIDERTQWLQRIQATLFHHGVSGTPERLRTADGRAFLERLALPADARERIEIALRMIDAIEAQIAPLERELRQLARRQTGCRALMGLYGMGELTSLVTLCELGDVGRLSASRKAVRMAGIDIGVHRSDRRARVGKLTRQGSPQLRWALYEAALSACRPTSPDHADYLALKARGLSHTRASLTIARKLARRSFHVLRELGPAALDPIATS

SEQ ID NO: 499616 - protein, 382 aa, unidentified
MTWHRASCIGRRVVDELISYVGLDVHKHMIAVAVAEEGKRGEVREHGKIANGAASLTKLASKLSRGGRTLKFCYEAGPCGYGIQRHLSGAGHDCVVVAPSLIPVKASDRIKTDRRDAISLAKLHRAGELTPVWVPDQAHEAVRDLVRARSAAVRSLRQARQQLSGFLLRHGHHYNRPAWTLLHRRWLADLRFEQPAHYLVLEDCIAVIEAATARRDRLEGHIKAALADWSLGTVVLALQALRGMALVAAATVVAELGDITRFSNPRQLMAYLGLVPSEHSSGTKRRLGSITKAGNGAARRMLVEAAWTYRFPARISRDLLLRQEGVAKAVCDTAWKAQTRLCGRYRRLSRSGKPANVVAAAIARELAGFVWAICRLVQPAAA

SEQ ID NO: 499617 - protein, 410 aa, unidentified
MELLHRRCCGLDVHKETVVACLRLVADGKVTTEVRTFQTTTADLLRLSEWLAANDCTHVAMEATGVYWKPVWHILDDGEFELVLANAAHVRNVPGRKTDVNDAMWLAELLAHGLIRASFVPDTQTQEMRNLLRTRKQLVREQSSHVLRVQKILEDANIKLDSVLTDLMGKSGRAMIEALIAGETNPAKLASLADRRAKASHEEFREALRGRVTKHHRFLLRLHLNQIDALDAAMATVDAQVEANLGPFRTAVELLISIPGIKNLGAHVIVSEIGIDMSRFPSHAHLISWAGICPRNDESAGKRRSNRLRKGAPWLKTTLVQCAWAAVKKKNSYLQAQFYRIKARRGPKKAIMAVAASILTAIYHMLKDGTMYKDLGRNHFDRRSTDKQKQRLVKRLAELGYVVEIKPLAA

SEQ ID NO: 499618 - protein, 362 aa, unidentified
MLKSTTIIAFDQHAATTMAAVLLPAHRTPALHPLKSDPPTILRFVARLQRQGAVTCCYEAGPCGFELQRALTAKGISCDVIAPALIPRRPGDRIKTDRRDAGQLAVLYRAGALTAIHIPTEQEEAARDLLRCREDIRADLLRARHRLSKFLLRHGRRFTATKKAWSKRHDAWLRAHTWPLPALDQTHRAYLRAVDEVLARLRDVETDLQALLALEPLRPRVQRLRCFRGIDDLTALTIAAELGDPRRFATAPSTMAFVGLVPSEHSSGSKRAQGGITKTGNAHLRRVLVESAWHYRHHPFVSATLRARQRGAPAQVIARAWTAQQRLHRRYQRLAARGKPKQHVVTAVARELTGFVWAALTQ

SEQ ID NO: 499619 - protein, 410 aa, unidentified
MELRHARCCGLDVHKDSVVACVRLVCDGKVTREVRTFGTTTAELLRLSAWLAENECTHVAMEATGVYWKPVWHILDDGEFVLILANAAHVKNVPGRKTDVNDATWLAELLAHGLIRPSFVPDHQTQEMRTLLRTRKQLTRESARHIQRVQKTLEDANIKLDSVLSDVMGKSGRAMIEALIAGETNPVKLASLADRRVKASQGELRESLRGRVTKQHRFLLRLHVDQIDALDGAIASIDAEVEAELAPFRAAVSQVISVPGIKKLGAEVILSEIGIDMSRFASAAHLLSWSCICPRNDESAGKRRSNRVRKGSVWLKTTMVQCARAGVKKKDSYLQALYYRIRARRGDKKAILAVAASMLTAIYHMLKDGTMYHDLGRNYFDQRSKETQKQRLIKRLAELGYAAELTPLTV

SEQ ID NO: 499620 - protein, 434 aa, unidentified
MSDSTVFIGLDTHKKDHKAALFVPGSDAPQEGTIRNEPAQIERWVRRLQRKFPSQAIVVAYEAGVCGFDLQRRIRRPGVDCKVIAPSLIPIRPGQRVHTDRRDAAGIGRYLRDGQLTEVFAPNEQQEALRDLCRSREAAVEDLRRTRQRVLKFLLRRGLQYTGSKHWTQGHLAWLGGIRLEAPLAQEVLGGLLLEMEHRQERVAQGDRRLQAVAQEPEYRQAVGWLRCLQGVDTITAICLLAELYSFGRFPSPRQLMSYLGMTPSEDSSGLAVRKGPITKAGNRRVRRLLTEAAWHPRHRSTASKALRSRREGQPAWAIAIAQKAQERLHRRFGRLSQRGMPANKVVMAVAREMAGFVWALLQGPPSPGVPGALRESRKRRTVRLSPGAPGRGPAGGPPEGRPPVPVGRLAALGSLASVALSSAKAKPSYREHR

SEQ ID NO: 499621 - protein, 367 aa, unidentified
MKVKKNEAEGRDVGLDLGKRTYEMAIVGKDGKVTMSNGRTFPSDRQRLYKKLQSGDRVALEAGNMAFIVAKEIEAAVPGCKVYVLNAGQLAVIYASMKKTDKEDALKLAHILQDFREERLPVVAVPDDKAIKNRKLIASHRRATQSRNRDINLLHAMFVAQGVTTIVQKDLASAENRQEAIKVLTGLERQEAEYLLKLIDLCEQRIEELEKQRAEACARDEVVERLQSVPGIGPLTALAFAAHVDAERFENASQVSNYLGLVPRVYMSGETVRYGGITKRGNGYLRALLVQASWALVRSKDGGKLKERYEYMTAENSISKKKAIVAIARRLAEMLYVMMKDKTWYAKRPFIHSKEEGVKLAQVAMSA

SEQ ID NO: 499622 - protein, 478 aa, unidentified
MNGKGRKAKNQANINNSMSVLSQEELGRRIAAVETDLKSSTWKDLEVDGKFDKNAKLTFISDDMLILGCDIGSETHYIRAIDTRGRELSKDAFPFSNNAGGFQSAKAWAVQIAAEHGKKQIVLGLEPTGHYWFCLAVWMITNGISVVQVNPYAVKQTKELEDNSQLKDDRKDPKLIANLVKDGNYGMPYLPEDLYAELRRLSMLRDQLTEDRIRNVNRLHREMKICFPEYMDAFGKLDGAFALMVMKKAPFPEDVLNIGADGLRETWHEAKLRGRGYSRADHIVKLASESIGLKHGTGGSKEAVRCFVEQILYLTAKLDEIEESLHQKCREIPYAENLLVIEGIGENILAGILAEIGDIRRFDDVKEIQKLSGLGLVACSSGKHKGETKISHRGRKRLRYWLFQAARSAVSHAEEFRTLHVYYTTRPNNPLKKMQSLIVIACKILRIIFAILRTGHKYDPTRMLRDIKHLEKAAAQVA

SEQ ID NO: 499623 - protein, 342 aa, unidentified
MDHYVGLDVSQEQTAVCVVDGAGEIVWQGRCASTPQAIAATVRAKAPHARRIGFEAGPLSSWHWHALRALGLPVICLDARHVRAALSAQVNKTDKNDALGLAQIVRTGWYREVQVKSFDSHARRGLLASRAQLVRMRVDLANQMRGILKPFGLIVGKGTGQPFETRVRERAAAVPSLQPVLEALLAAWCCIRDQIATLDRLIVVMAREDAVVRRLMSVPGVGVLTAVAFVSVIGDPGRFRSSSSVGAYLGLTPRRHQSGELDRSGRISKCGDPLARTYLFEAAGMLLNRVTRFSALKAWGVRLVKRIGRKKATVAVARKLAVILHRMWCEGSDFRWSKESAA

SEQ ID NO: 499624 - protein, 364 aa, unidentified
MKKISTAKIKSQAATKKVTIGMDLGDRTSRYCLLDEEGVVIAEASTPTTKAGIAKAFGAMARCRIALEAGGHSPWVSRQLQAYGHEVIVANPRNVRLIGESTRKDDRLDARTLARLARIDPLLLSPVRHRGAEAQAALAVIRARRVLVRARTMLINAARGMTKSFGERLRKCGAGQVGPTLTAELNPEIRVAVAPLLAEVEALNQRIAAYDRQIEQLAKEHYPEVARLQQVKGVGTLIALTFVLTVDDPNRFQRSRDVGCYMGLRPGRRNSGKSEPQLHISKEGDRYMRSLLVQGAHYILGPFGIDCDLRRWGLKMSERGGKKAKKRAVVAVARKLAVLLHKLWVSGEAYDPLRNSRQLVARAA

SEQ ID NO: 499625 - protein, 393 aa, unidentified
MRYVGIDIASETHVAGVVDAEAQVVVKATPFAEDAGGYAKLLEVIGPPGDCLVAMEATGHYWQNLFAHLAAHGYSIALLNPLRTHRFAEEDLQRTKTDAIDAVGIARFAAQKRPAATRLPDGVTQQLRELVRLRDRLKQDFGDQVRHLHRVVDLAFPEFTRHVRTLDSELASAVLSQYPTAAVFAGASPRRLAKLCYDGKHKVGDELAQALVADAKRSVGAHQGTAYEVQVRYACQTLDLLRRQLREVSGDIERLLHEHDVGSLLTTIDGIGPQTAARLVAELGDIATRFPDGAALASYVGIIPAIRHSGKHTPARAGITPIGHAKLRAALWMPTLTAVRKNPWLRAFYQRLIAAGKLPKVALVAAMRKLLHAVYSVAKNRKPFVPRLEEVTS

SEQ ID NO: 499626 - protein, 371 aa, unidentified
MAVKKSSKKKSEQLSEKTMNDGVAAIGIDLSDRTGRFYAIDDEGKKIAEGKITLRTPELEKWAMSIARTVIAIEAGTHSPWISRLLARCGHEVIVANPVKVALITKNVQKTDPVDAEFLARLARVDRELLFPIQHRGEQAQIDLQVIRTRDIAVKLRSTAISHVRGAVKSFGGRLSQCSTEAFVNTTRKEVPEALKTALDPMFVLIDQLSKTINGYERQVLKLVEQRYPEVERVAQIKGVGALTGLAFVLVLEDAKRFADSRSVGPYLGLTSKKDQSGDSDPQRGITKAGDRLLRRLLVQSAHYIQGPFGVDSDLSRHGEKIAARGGKRAKKRATIAVARKLSVLMHRLWVSGETYEPLRNSINTAATKAA

SEQ ID NO: 499627 - protein, 402 aa, unidentified
MNAVGIDVSKGKSMVAIMRPFGEIVSAPFEIKHTASDIHSLVELINSVEGESRIVMEHTGRYYEVLAHQLSEANLFVSAINPKLIKDFDNDSLRKVKSDKADAVKIARYALDKWQNLKQYNVMDELRNQLKTMNRQFGFYMKHKTAMKNNLIGILDQTYPGVNTYFDSPARSDGSQKWVDFASTYWHVDCVRKMSLNAFIDHYQNWCKRKKYNFSQSKAEEIYGKAKELVPVLPKDAITKLIIKQAVDQLISVSTTVESLRTLMNETASKLPEYPVVMAMKGVGTSLGPQLMAEIGDVSRFTHKGAITAFAGVDPGVNESGSYEQKSVPTSKRGSSDLRKTLFQVMDVLIKTHPQDDPVYQFIDKKRAQGKPYYVYMTAGANKFLRIYYGRVKEYLSSLPES

SEQ ID NO: 499628 - protein, 458 aa, unidentified
MKRKSKRTKGKEEAHRLEGLSKVNQNAAGVDIGATEIVACVSGGEEVQLVKAFGNYTVDLQSIAKWFHEHKIKTVAMESTGVYWIPLFEELERQGFECLLISSRSLRKVAGQKTDVEDAQWIQTLHSYGLLKGSFRPEGDLVALRTLLRHRSQLVEHRSPHIQHMQKALLQMNVQLSQAVTDVTGMTGQKIIRAIVAGIRDPEQLATLRDPGCKHSEEEIAKALTGTWREEHLYVLKQSLELYDFYTEKVEACDEEINRRYGMTRPDWKGGELPVAPDKKRNSHSKNAPKEAREIREHLYRINGVDLSLVDGMGVSLAQTVTMEVGSNVGEKFPSEKHFCAWLGLAPKHDISGGKVLSNRTLKTRNRAGQALRMAANSVKKADCPFGVLYRRLRSRLGPAQATVATAHAIARVVYKMLKYKVEYDPLSVNEYQKQYEEQQVKYMRKRAAKFGYQLIPA

SEQ ID NO: 499629 - protein, 313 aa, unidentified
MKFDVCLIKENSKVKHKVFANTTHGFEQLVVWLNSHTVVGLHVCLEATGTYGEALAVHLFDAGLTVSVVNPAQVKAFAASRLTRTKTDKVDAELIARFCLAHQPQAWQPPAPEVRGLQALVRRLESLIEMRVSEENRLSSGVSIEAVRDSLEEHIAYLVAEIKQTELLIREHINNHQNLKQKSDLLDSIPGIGATTAARLLAEITDFTQYQSARQVAAYAGLVPRERRSGSSVRGRTCLSKIGNARLRKALYFPAMTALRSSGFFQQWASGMRERGKSKMAVIGAAMRKLIHLAYGVLKTGKPFDPDWTTKIA

SEQ ID NO: 499630 - protein, 337 aa, unidentified
MFNSEEGYLHKVVQLGIDVSKAKLDCTLLLDRDTLRSRSKIVPNTAAGFVQLVEWVQRQAQVAAAEVVAAMEPTGVYHQALALALYEAGMTVVVVNPGQLRQFAEGLAVRTKTDAKDSVVLARYAGQPERIVWQPAPIEVRQLQALMGRLATVETELRRELNRREAAQLGHDPQLVQASIADAIAFWSAEQSKLQQAIDEHIDRHPGLKIERERLLTIPAVGPKTANRMLCVLSAHDFGRASQAAAFIGLTPVEHQSGSSVRGRPRLSKCGDARLRAALYMAAVVAIRHNPDVRALYQRLLKRGKAKLSALCAAMRKLVHICFGVLKNQQDYRPQCA

SEQ ID NO: 499631 - protein, 344 aa, unidentified
MTSKLMAGIDLHSNNLFCGIVDMEGKRVFEKKMPCELGHVIAALKPFKARLDTVAVESTYNWYWLVDGLQDRGYNVVLANPAAMEQYDGLKHADDRSDGFFLADMLRLKILPIGYICERKLRPVRDLLRRRMGLVHKRTSVILSLQSLYTRMTGKQMELGALKKLEPADALELFKHPADQLIAQLDVQLLEQLEESIAQVEKTVLRAVKPLRAFQVLQTIPGVGKILGLTITLETVDPKRFASAGDYASYCRCVDSRRMSNGKKKGENNRKCGNRYLAWAYVEAANFAKRYDADCRRFFDCKAAQTNTILATKALACKLAKAAWHMMSGNTEYDVKRIFPGAAK

SEQ ID NO: 499632 - protein, 416 aa, unidentified
MPLALPEARFFTGIDWASAEHAVCVLDAAGKITAQLTVKHSAEGIASLVRRLARYGDPADLPVAIERPSGRLVDLLLEAGHPVVPVSPNAIKTWREGEVLSGAKSDAGDAAVIAEYLRLRYHRLAPAAPYSDETRALRTAVRTRDDLVQMRVAATNQLAALLDAHWPGAKAVFADAGSPVSLEFLTRYPTPAAARHLGEKRMAAFLVKHGYSGRRPAAHLLARLRQAPAGSAGEALTEALRDAVLAVAAVLRALNSAIKDLDRSAAAHLGEHPDGEIFTSLPRSGQVNAAQMLAEWGDCRQAYAGPDSVAALAGASPVTRQSGKHRSVSFRWACNKRFRKAMTTFADNSRHASPWAAQIYADARAAGKDHPHAIRILARAWIRVIWPCWINGVPYDPARHGAAAALAEHTSTRFVA

SEQ ID NO: 499633 - protein, 325 aa, unidentified
MKYIGIDISKATFVAAFPSGSGYRTETFTNDTKGIRNFIGKLSADTHHCVMEATGNYCFLLLYLLDNAGITSSLVNPKKIKNYSRMMMSVTKTDDMDARLIADFGEKMKPAPYKLPSETLMLLKQKKTVIRQLQKQLTATRNLQSSLEPLPVKDKKCLASLKHTIVFLEKQIKHLEAELVQAAEDVFEKQLKALTSIKGIGVTLATALIIATGGFTYFDNAKQLSRYIGICPTIEQSGSSINIRGHINRNGDENLRSMLFVAAWSASQHNKACRECYQRLRQRGKSGKLAMIAVANKLVRQAFAVATSNTSYIDGFVSTKPGTAV

SEQ ID NO: 499634 - protein, 338 aa, unidentified
MSKFSGIDLHSNNSVVVVSDDADRVVYQRRLPNDPEQIRAALAPHREDLVGVVIEATYNWYWLVDQLMNDGYRVHLANPAAIRQYEGLKYSGDFTDAAHLAQLLRLGLLPEGYIYPAEERPVRDLARKRIQLVQCRTAQILAIENLFSRHTGGQMQGERVKRLDEMQVNGFGFAADVTVAIQANLAVMQTLQEEIWIIEKRLMERVKLRPDYALLNTVPGIGPVLATTIMLETGTISRFTKVGNFSSYCRCVDSRRESNSRKKGEGNTKNGNKYLAWAFVEAANFAIRSCPEARRFYERKKRARNGIVAIKALAHKLARACYHMLREHKPFEITRCFG

SEQ ID NO: 499635 - protein, 377 aa, unidentified
MSKIRFVGLDVHADTIAVAIAEPGGEVRSLGIIPNRLESIRKLFGKLGPIQHLKVCYEAGPTGYVLYWQLTALGIACEVVAPTLVPTKAGDRVKTNRRDAEKLARCYRAGELTAVWVPDAAHEALRDLVRAREAAKKDQLRARHRLGKFLLRRGQRPTDAGKAWTKKYLEWIKTHVRFDQPALEATLAHYLHEVEHAAEQILKLERAIDEAVTQASPEIRSVIEALQALRGVAQMTAATIVCELGSLSRFESPRQLMGYSGLVSREHSSGNHIQRGAITKTGNAHLRRVLVEAAWAYQHRPNVTGFLLRRQKSLALSEEVKQMAWKAQHRLHKRYQAFALRGKNKNQIVTALGRELLGFVWAIAVHTAAHSKLLQQV

SEQ ID NO: 499636 - protein, 350 aa, unidentified
MMIIGCDFHTRYQQIAMLDEATGELVERRLDHESGEAHTFYRDLQGPVRVGIEATGPIRWFERLLAELGHELWIGDSAKIRASEVRKQKTDERDARLILDLLLAKRFPKIWVPTPAERDLRQLLWHRHKLVCMRTMLGNQLHALALNEGLCRKKKLFTQKGRAELVHLGLAPWASRRREELLKLLDQLEPAIAELDRAVMEEAHRRADAVLLMTHPGIGPVTSLAFVLAIGPITRFARSKKIASYLGLNPSEESSGGRRRLGAISKQGNTMVRWLLIEAVYPAVRKDPALRQDYQRLKFRRGHAVAKVAIARKLAVRMYWMLRSGAEYAQLVRRQGSPGATLVDASSSLG

SEQ ID NO: 499637 - protein, 445 aa, unidentified
MNNGGWSWWGGIDWGSEHHQVCVIDANRRRVAEVRVEHSAKGLDEIVRVLTTATGGQLDQVAVAIEQPRGAIVETLLAHEIAVFAINPKQIDRFRDRHSVGGAKDDRFDAFVGADGLRTDESLFRRVQLDPPKILALREWTRMHDELTTELGRLSNQLWEQLHRYYPQVLKLSSAVDEPWIWDLLARVPTPADARRLRPKQVAAILKARRIRRVAADQVVARLQEPALTVAPGAAEAASSHVRMLLPRLQLVEEQLRECRHQIDQVLDDLDEPPIADGTPGDGDGGSPPPANEGEPGPATARPRPSDVAIVQSFPGAGRIVTATLLSEAAGPLMERDVGTLRTRCGAAPVTRKTGKQKRGRILMRRACNARLRDAVRHWSANYINNDERGRMHYDTLRAAGHEHERALRGIADRLLDVLIAMLRDGTTYDPTRRKAWTPKPKDDG

SEQ ID NO: 499638 - protein, 410 aa, unidentified
MEPILISCAGMDVHEKKVDVCIAHGPFDKPPKIEIRTFSTMTSDLEELMAWLKKYEVTTIGMESTGVYWKPIFNVMEGEFAIVLANAQRLKAIPRKKTDIIDCKRIANLLRYGLLPNSFIPPREIRELRDLNRTRRKLVGMMTSEKNRLIKVLEAANIKLSSVVSKIYGVSSLALIRSLLEKDKLSREEISQLAKGKLKKKVDQLEKALNGKLTDHHRFLLGMHLENIDHLAKQIKKIDEEIQRKMVPFQNQSKLIQTIPGISEVNASAILAEIGVDMSQFPDAAHISSWAGVCPGNNESAGKKKSGRTQKGNSFLKGALTESAWAASKTKDTSYSAFYRNIVRRRGKKRALIALAHRMLIDIYYVLKSGEPYQDTGAEAVCERTMKRRERSMIRSLEKAGYSVVKAEAA

SEQ ID NO: 499639 - protein, 387 aa, unidentified
MSQTIATLMPAAVDYETTLILAIELSNKSWVLAAQVPSLPHTKAKRTIDPEAKALQAAIAGYRARAAAIGRSVEHVIAVYEAGWSGFWLARWLMSHGVEVHVVQPSSVPVDRRARRAKSDGIDSELLLRTLLAWLRGEPRVCSMVPIPDEADEDARRCVRERTELISERVGLTNRIGAILATLGVSDYNPLLRNRSRRLAELRTALGEPLPTNAHAKIKRLLVRLELVLTQIAELERERDAVMETEASDRASTMIQQLTTLRGIGVQSATVLVREAFVRGFANGKALGSYAGLASSPYSSGGIDREQGIGKAGNRRVRTVMVELAWLWTRYQPGAAQVCWFRERVGATGRRARKIMVVALARKLLIALWRFVIDGVLPEGAVLKPAA

SEQ ID NO: 499640 - protein, 387 aa, unidentified
MTVRTVNNLPASAHAETVRCLFAIELSKQSWVIGFTTPLSAKISRRILSGGDWKGLLELIEEVRARVSREIGRPVEVMSCYEAGYDGFWLHRQLEAHGVRNYVIDPASLQVDRRMRRAKTDRIDTERLLRSLMAYLRGEPKVWSVVQVPSVAAEDARRLHRERDRLISERVQHVNRIKGLCALQGIYDYHPLHPQAMARLEQLRTAQGIALPPRLKSEIKRELHRLTLVVEMIATLEAERDAIVENEASTHVNAEKIQALHKLKAIGSEFATVLVGEIFHRDFNNRRQLASYVGYAPSPFQSGNVAHDQGISKAGNRKGRTTGIELAWLWLRYQPDSDLSAWFRARVGAVKGRIRRIAIVALARKLLVALWRYLETGLVPRGAVFKA

SEQ ID NO: 499641 - protein, 281 aa, unidentified
MPRYSTAFGMDVHLRSTTVCALDAETGEAVTRRFRGNPWGEVAEWMSGFPGPSLAAYESGYLGFAPQRELSGLGVDCVVAAVSRVPRSAADLSSKNDRNDAARMAKAILSHDISPVWVPSPEIEGLRDLAGAHDAATARLAAAKQRLLAFLARRGYAYGGTTPAGNPRRYWTYDFLRWLDKVRPADDGGIRALAALRNEVEAAAETRDDLLAEYRAAVAAGPLSAEVEALQSIKGCGFALAAAFASEVGDFSRFRSGRQVTAYFGLAPKQRSSADSVDWLH

SEQ ID NO: 499642 - protein, 385 aa, unidentified
MLTQGFQATAAANQDGTIYLAFELSKSRWLVARLLPGSSKISRFCLEGGDTAGLLQLLAEAREKAARLGFAKPRIVSCYEAGYDGFWLHRWLQAHGVDNRVLDPASIEVPRKARRAKTDKIDLAKLMRVQLAHERGEPQVCSIVHVPTVAQEDAKRVSRERASLLQERISHTNRIKGLLFAQGVRDTDPLARNFLARLDELVTPDGRRLSDHLLGELRREHARLSLVVSQIATLEAEVRTAVQQAQPGTPEAKMGLLLQLKSMGPTWATLLVNEVFYRDFHNRRQLGAYLGLTGTPYNSGQSVHEQGISKAGNGRARNVALEFAWLWVRNQPNSALTRWFLNRVGEAKGAVRRIAITALARKLMIALWRYLETGLVPTGAVLRTK

SEQ ID NO: 499643 - protein, 377 aa, unidentified
MATGRFGTDKAGYTAMRKVVARWPDRTWAVEGSNGAGRPLAQRLLADGERVVDVPAKLSARARQFDTGHNRKTDAHDAHAVAAVAVRTAGLRVLSYDVQLETLRMLVDRRQELTRTRIQTVNRLQRLLAELTPGKAKKDITTLQAKAILGSVRPRDLAGRTRRRLAAEQLAELVVVDKKIKALTKELKIMVLARGSTLMDLRGVGPVVAARTLADVGDVARFADRNRFASWTGTAPIEASSGEIVRHRLSRAGNRRMNHMIHIAAACQIRLDTPGRAYYRRKLAAGKTRAEAMRCLKRRISDALYRRLLIDARALMSGGADAGPGGHCGASLESSAAGSHPYTSTSDQPLPGPARTTLPAPTSTQKSSISRPLQPAS

SEQ ID NO: 499644 - protein, 351 aa, unidentified
MKPNFEPGKWFMQCVGIDIAKGTFTACLCMYEFDMGCATEPIVFSNNKTGFNQFVKWSRKEALKGYPIRYVMEPTGVYYEQLAAHLSKLDLDICIVLPNKAREFAKYEGILTKTDDMDAYTLGMLGCLDKRLKSWTPPSPIYRELRQMTRFVADINKVRTELQNHLEALTHSEITEKSIVKHYNKLINEIDKQLASNQKTIRDKIKQQPGLSERIERIATIKGLGYMTVVTVLAETNGFALITNRKQLTRYAGLDVPAHQSGPVDPKRHISKQGNVHIRTALYFPAIVSTQYNPQMKDFYGRLCARNPQSKMIGVTATMRKLLLLIYSLWKSGEEYDSKRDKPIKKEKERG

SEQ ID NO: 499645 - protein, 412 aa, unidentified
MDVYCGIDWAEDHHDIALVDRAGQLLARRRISDDAAGLAQLLALLAEHGDSPEDPVPVAIETPRGLLVACLRATGRPVYPINPMAVARYRDRHSVAGKKSDHGDSFVLANVLRTDLHAHRPLPADTELAQAIAVLARAQQDAVWDRTQAHNRLRSHLREYYPAFLAVFAPLKGGIIRPEARAVLAAAPTPADAAKLTLTQLRAALKKAGRSRGIDTEAARLREAFRTEQMRQLPLVEQAMGRQALALLRQLDAACAAAADLEQAVTESFNLHPDAGIITSFPGLGALTGARVLAEIGDDRSRFSDAKGLKAYAGAAPITRASGKTKSVTRRRIKNNRLNAAGYSWAFSALTASPGARAHYDRRKDAGDRHAAAQANLFGRLLGCLHHCLITGQDYDEATAFPATAKKISQAA

SEQ ID NO: 499646 - protein, 355 aa, unidentified
MNSVRYIGLDVHRDTISAAVLNESGRMIQQSILATRAAAILDFIGGMRGTLRVTFEEGTHSAWLYDLLQRRVARLVVCNPRKNALLKSGNKSDAIDARKLAELLRADMLSPVYHGEKSALEVQHLARSYALLTEDTTRVMARIKAVFRGQAIACAGKKLYGHKHRDAYLAELGAGALRRRAEFLYQELEAVQQLRRQAKRDMIVECQKYPETKLLCSVPFLGPVRAAVLIGRVQTPHRFRTKRQFWAYCGLALEMRDSGEYRMVDGQVERRKRPAQIRGLNWNHNHELKNLFKAAATSASACDGVFREFYLGLLKKNMQPEMARLTLARKIAAIALKIWKKGEAFDAEHLKLQAA

SEQ ID NO: 499647 - protein, 346 aa, unidentified
MNKVYNKKRLFGAFDLHSNNNHLAIIDREDNRIYRKKLPNQPDVILAELEPYRVHLSGIVVESTFNWYWLVDLLMDEGYRMHLANPAGIQKYKGLKHADDKHDAFWLAHLLRLGILPEGFIYPKQERPVRDLLRKRSHLVRLRTSLINSLQDIIYRNCGCKMGVNSIKAVKENKVEPLFDGQDDLALSGAVSKETIDYLGRQIRQVENAVLDKVKLREEYAKLLSINGVGKILALTIMLETGTIKRFPKVGNYASYCRKVPSHWTSNGKKKGKGNDKNGNTYLAWAFSEAAEMTRRYDEHARRFFNKKAAKTNRMVAHKALAHKLSRATYYIIRDRVDYDPLKLFA

SEQ ID NO: 499648 - protein, 342 aa, unidentified
MASLRYSVGLDYHWQTIRVCVLGPDGSVLRNKECGNDVEAIVGVVADSLRGQAEGEVWVGIESSCGAADLAEKLRQRTNWQVHLGHPGYIARMRQNPDKTDMHDAHLLADLVRVNYLPRVWLAPLEIRELRMLVRYRQDLARQRRAVKLQIRALLREQRISTYLRPWTKGWLEWVATEAPLSEQGRWLMAQRLQQLRESQAKLAAAEKRLADVTSSDPEVARLQEYKGIGRVTSWTLRAEIGRFDRFSSGKQLSRFCGLSPRNASSGQRQADAGLVQAANRELRTVLIEAAHRLIRNDAHWSGFATRLLERGKPKSVVVAAVANRWARRLYQEMKEPLPSAA

SEQ ID NO: 499649 - protein, 343 aa, unidentified
MERTDGVETFVGIDAHSKQCSIKAISRQGEELKEIDVATRAVDLKKALKGLPRPMWAMVESSYLAPLLRDLIEESVDRFIVCETRENRWISHSEDKGDQADADRLCRLLRMGEFKAVHVPGGLGRDRREVLRMYQKVQGDVSRTKNRIKGKYREHGVPLQGKRVYGEVHRKECLAQVSREQGRFLLEVLYQKLESDEERCDEVLDRLVKLMRGDARYESLQEIPGLGKVLSAVVAAVIDEPDRFATKRKLWSYAGLGVRSRWSGDPSKAKVSGSKGGNRLLKYAALMAANAALRGENRFSRHHRKMLAEGAEPSMAKRTVARKILATALVLMKTGAAYEDDQV

SEQ ID NO: 499650 - protein, 349 aa, unidentified
MRFYTKQHRHYCGIDLHARTLYVCVLDQAGQVLVHKNLRASPEELLAAVAPYRDDLVLAVECIFTWYWVADLCAQEGIAFVLGHALYMKAIHGGKAKNDRIDALKIATLLRGGMLPQAYVYPAGMRATRDLLRRRLHIVRKRGQLLAHIQNTSHPYNLPPLGKRIAYPSNREGVAEHFEDRGVRKSIAVDLALLERYDALVTDLESYLVRQAKQHDPQAFQLLRSIPGVGKVLGLTILYEIHDVRRFDRVQQFASYARLVKCAKESAGKKHGTSGAKRGNVHLKWAFSEAAVLFVRHAAEGKKLLAKLEKRFGKGKALSILAHKLGRAAYYMLLRGKAFDLQKFMATVN

SEQ ID NO: 499651 - protein, 415 aa, unidentified
MEGLSPLHRRVAGIDVHRMLHVVTVLIEQPDGRVVKHSREFGGFKRDCRALAQWLAELQVELVVMESTGIYWKSVYAHQENAGITAWVVNAHFIKHVPGRKTDMLDAEWLAVLARFGLVRGSFIPPKDLRELRLVSRYRRKLGAMCASQINRLHKMLDDAGIKLGAVVSDIHGVSARAMVRGLIEGQSEATLLSHARGALKRKTEELAASLDGDLSERHLFVLRHLSDSIDALQRQLADVDAYLMRAMQPYAWAHSLLQTIPGIDQTAAALILIEIGDDMARFGSPERLACWAALSPGNNESAGKRKSGRTRHGNNAIRFILCECANAARMTKSTLASKYKSLMVRKSHKKAIVAIAHKMIRLIYILLSRRQPYIDQAIDYAAMSAKKNAPRWIKQLKAIGKWPAPSAAAAIAAH

SEQ ID NO: 499652 - protein, 337 aa, unidentified
MLIIGCDFHPSFQQVAIFDNRTGEIERKRLRHRQEAEQFYRAVAGQGVRVGMEACGQYPWFERLLESCGIELWVGDAARVRAAAVRKQKTDRRDAELLLQLLREQRFPRIWVPSLEERDARQLLVERHKQVQTRTRVKNQLQALALGQGVQKKRKLWSEAGRAELEQLELMPYAAQRRQHLLGTLEQLDGAIAALDRQVEQEAQRRPEAVKLMTHPGVGPVTSLAMVLTLGPADRFENARKVGSYFGLIPSEHSSGGRQQWGHISKQGNAFLRFLLVEAGQTAARYDAELGRFYARLAMRKNRPLAKVAVARKLAVRLYLMLREDWTYTQLCKAVCR

SEQ ID NO: 499653 - protein, 326 aa, unidentified
MTRIICGVDISSVSLEARIGRDGAFASFPNNSEGIAALAAFCQSHQVELVAMEATGGYEQRALALLSEQGLPVAILNPRAVRRFADSMGQLEKTDRLDAGMIAWYAQTRRSQPVCLSSASQQQLRALVTRLRQLTQVRTAQLNQSRLVTDPAVVALIDELLAVVARQIRALETSIAQLVAQDPLWHQLDQVFRSIKGVADRTVARLMAEMPEIGTLSNKTISKLAGVAPLARDSGKHQGKRTVRGGRASVREILFVVASVVGRHEPDFIAFQQRLSTAGKPRKVIRIALAHKLLVRLNAKARQVRQQHATSQSKTSEPLVLKNTYC

SEQ ID NO: 499654 - protein, 536 aa, unidentified
MADKKRNTQRKHIRSEGAYSLDEIRSLTMDDGTRVITSADGDIKRPVCAGIDVHKEILMAAVCKTDPKTLNAVFYVRQFKSTNSDIRTMGAWFQSHGVQDVCMESTGKYWIPVFNILEQCGLRPVLTHPKYVKQAKGQKTDFRDAVHIASMFRMDLVVASFIPPADIRDLRELCRYRLKLTYMRTSEKNRFQNSMTVSKVRLDCVFSDPFGKSASSIMEYLIMTEPEDVSDKQILSMVDRRVKASGEDILDSIHGYEFIGIQRDKLKVINLHLGQINECIRLIDEKLDYFRQKYSRIIRHLATMVGVTEESALYILGEIGTDMSVWRDDASLASWAGLSPANNASAGKKKSTRTGDGGHYLKPLLVQCALAAAKSTKKDPYFHYKYETLKKRRGHKKAIIAIARKMLVAIYHMIRDDADFLPVDHEEVLHSTKKQKGLNLDNVIAFLKEQGADDDTLRLVERQCGAQEMDAAEEMESVSSAEKKQSVSGSAATSQPIQESVNGSPVLISGSKQGRALNHHLKDPAVATATAQNELL

SEQ ID NO: 499655 - protein, 340 aa, unidentified
MEKISALGIDLGKSAFQVHGVDAAGGTVIERRFTRQGLRAWLVRLQPCLIGMETCSGAHHWGRWLQKQGHEVRLMNPRYVKAYVKTNKNDARDAQAICEAVTRPSMRFVPVKAIEQQEVLMLHRIRSRLVADRTALANQVRGFLLEFGIVVNQGIRVLRRRLPEILEEAQNELGDEGRMLLAELREELVALDSRVSELDERVQRQSQSDESCRRLQAVPGIGPLTASALVSTIGDPHSFSGGRHLAAWLGLVPRQDGTGGKIRLLGISKRGDRYLRTLLIHGARAALRTAGKRQDPYARWALSVEERRGRNIAVVALANKMARIVWALWAKQQPYAAGRA

SEQ ID NO: 499656 - protein, 398 aa, unidentified
MTRKNTLKTLPIDTEYRVVGLDLAKSDVSVAAIPIDDNTPSLVDRMNYADLLEWAEKISPTLFAMEPCNGFCLLCLQLESLGHEVKVISGATVSMWINTHLSGQKTDLNDAIALARLAISDAELTPIRHKTITEIRIQTVQAVRQQLITQRTKSLVSFKGLAQQWGIPCCAGHRNLKKLREAVEAKVDLISKPVAESLLSLLDAVKSLDYQIGQRDKTLQKLVMSNQQGRLVQTVLGVGTQISARIITVVGNVNRFESPRALVAYVGLAPRNIITGHKNAPKKKSSNAPDLSHKGQGKISRRGDKLLRSLVIQGAACLYMQYCKNQLPQCQLKRWLKKQIDSGKPYGKIIVSLAAKLIRIVWAVLRYGEEFNIQKAGMSRSMWGDMAPKSPISEEVPA

SEQ ID NO: 499657 - protein, 390 aa, unidentified
MIYVGIDVAKDKHDCCILGPDTEELFQVFTIRNNSDGYGELFHKIESVSKDKSQIKIGLEATGHYSYNILGSLLDHGYHTFVINPLHTNLYRKGQSLRKTKTDKVDARSIAEMLVTDKTLKPYTGTSYHSEELKSLTRYRFELVKERAKMKTSVSRLVNILFPELESLVPTLHMNSVYRLLQELPGAYFIASSNLTHLKALLADASKGRYGREKAIEIRETAKSSIGSLMPAKSMELRQTIHRIDTLTSDIKEVEQSIQKIMDECGSPITTIPGIKYRMGAMILAEIGDFTRFSNADQVLAYAGLSPSTYQSGKLISSYARMEKRGSKYLRYALFNAAIYVSGWDERFRIYLSKKRAEGKHYYVAISHVIKKLVRTIFRMEITHTSYQPL

SEQ ID NO: 499658 - protein, 367 aa, unidentified
MIVNEVAKNVEKIISIDTAKNSFQVLVVNQKTGKKKNTKVQRSKFVEYILKQGPCLIFMESCSASQHWARLFESFRFTVKLIAAQHVKAFLRNRRVKNDERDAEAIYKCGIQPDTKFVRIKTVEEQTVALLHTLRKAAVSQRVELSNRIRGILAEFGIVVARGRGSFNSEIEALFNECEKIHDVNLRVAISSLFEDYHRLEQREKELSEKIEALNKDNELVKIALTCPGVGSLTASAIVAEVGDASQFRNGREMAAWNGVVPSQHSTGGRSTLGGITKTGNRYLRTLLAQCACAVIQNASRHLEQGKDTHLDRFALRLKLNGKPVKKIMIAIANKIIRILWAMLTQRKTFENKAEETSDISAELQLA

SEQ ID NO: 499659 - protein, 417 aa, unidentified
MGGESKMSRRCIGLDIHRDFCEVAVWEQGQVRSAGRIEARPEALAEYATALRPTDEVALEATSGARQVAQILEPHVGRVVIANTHRLAAISDSKRKTDRQDARTLAQLLAAGVLESCWLPDEGTRALRRRVSRRHNLVVARTRAKNEAMAVLHRNLSQRPPMSDPFGAKGRRWLGALELPSDEVETLSAALRQIDFLSGEVEVIERELARFAAGSAEARRLMTVPGVAMVTAVTFLAQVGEIERFASPKQLVGYLGLDPRVRQSGNGAAFTGRISKEGASLVRHVMVEAPHAGIRSPGPLRAFYERVRSRRGHAIAVVASARKMVSLFWHLLKRKEDYRHSIELVTQKKLRKVELLAGAPRRRGGGRCEGPNRDERREIDRDRARAAAEEYQRFVAERQQGTGTGNGGAAMQAAPRT

SEQ ID NO: 499660 - protein, 450 aa, unidentified
MRSTYAGVDWASEKHDVVIADETGEEILAATFAHDEAGVRGLCRTLVRHEVTLVAIERPDGLLVERLLDAGLRILPLHPNQVAATRDRFRASGGKSDRFDAFVLCELARTDHHRFRVLEPDSDQTKALRALTRAREDLVGTRTALVNQLRAELAGFWPGPLGLFTSLHSQISLAFLERYPGPADARGLGEQRLQAFLARQRYSGGQKPARLLAKLRRAPEARVGELELGVRRALVLSLVATIKTINEQIKQLERQIATAIREHPDGPIFLSLFKKPNSVITAAELLAEIGDCRGRYPTRDTLAADAGQAAVAVESGKRKAACFRWACNKRLRQAFVTLADTSRHHNPWAQDLYAAALARGHDHPRAIRTLGRGWCRIVWRCWQDGVPYDPARHRALQRHVTVTIPTSPGPRPDTAATQRMAGAAVTQQADRRAERNALDGKPTSAIALEG

SEQ ID NO: 499661 - protein, 348 aa, unidentified
MRFYTTAHQHYCGIDLHAKQMYVCILNQAGETVLHRNMKTDPEQLALAIAPFREDLVISVECLFTWYWLADWGVQQGIPFVLGHALYMKAIHGGKAKNDKIDSEKIARLLKAGMLPLSYAYPARMRATRDLLRRRMMFTRYRADLSAHVQNTVSQYNLPPLYLRTDKRADLPLIPDHFPDPVVRQMVELDTTVIDHLDEQLRVLEQDLAMKAKAHDAFAYHLLRSVPGIGRILALVILYEVEDITRFPTVGQFASYARLVKCAKESAGKKSGYSGKKIGNAYLKWAFSEAEVLFLRGNPDAQKAIARLASKHGKGKALSILAHRLGRAVYVMLTKRQPFDKARFMATL

SEQ ID NO: 499662 - protein, 388 aa, unidentified
MYRIIKIGMDVHSKNYTLCAMEPTIGAEDRIFGEVQVAPDYKEVICFIESLKMKLGFYDEYSIECGYEAGCLGYTLYHQLTGAGIKCVILAPTTMLTQQGNRIKTDKRDARLIAQCLSYGGYHPVYIPTGEDDAVKEYLRMRDDHKLALKKLKQQIHAFVLRHGYQYSGTKWTIKHVTWLKKLELDPMYRETLNEYLASYEEQEAKIERYDKRIEEIASERRYQENVKKLGCFLGIRTHTALSLIVETGDFKRFAKGNTYAAFLGLAPGERSSSDNVNRLGISKAGNTHLRCLLIEAAKGICKGAIGHKSKELRARQSGQPAEVIAYADKANTRLRSKYYKMIRHGKKTNVAVAAVARELACFVWGMMTGNISIRPTAGTSMPAVRQG

SEQ ID NO: 499663 - protein, 394 aa, unidentified
MKLVGIDVGKNSHHFCVMDKETGEFNVAPSSFSNNKEGFDFLINSLKPYSKKSILIGMEDTGHYHVALLKFLLSNGYPVALINPKTTDLTRKMEGGITKNDKLDTITICDVLDTPERKKQYRITKVDRFDLYEQRQLTRHHHNLKEELNVYCNRLQKSIDLVFPEFNTLFSSKYSIVYMNLLKTFGSAEAIASTDIRTIRKCFEIKGRGNRISLTPEKLKECAKNSIGISSEVETIQIKHLVSQITLIKEQIAEIDKKIEEFSITNNSPILSIPGISHFSGTSILAELGDIGNYSKPSQIIKFAGVAPYHYESSRYNAQHTGITKKGSKYLRKTLYQIILTVINNNPVFKKYYRLKKSQGKGHRCAQGHCIRKLLRIIYHLLETGQSFDPALLR

SEQ ID NO: 499664 - protein, 423 aa, unidentified
MVLGVGLDWAESFHDVALGRPGEGVVEQFRIEHGPAGVGRLVARCLELEPDPGEVRVVLETRHGLLVEALVDAGFTVLPVNPDLVARRRGPAKKKDDAEDARICCLLALDQYAQLRRLVPHGPIGAELRAIARDDERAARDERRLLNRLRADLLATFPAAVDIAAGDLGAAVFLRLIERWPAAAELAAASRTEIVALARAGRHGWPEAFADRVAAALATPRLPVRPELARAKAGTIRLSATQLLAIRAQRRSWQRRMGELLLGAPRTGRDNTPKDPEPGKAFPGSETYLSMPGLGDRLTARVAGEIGECWQQFHSPNALQCYAGRAPVTRRSGRSEFVVARRLAYNRYLGDAVGQWAFCSLTRSAWAREYYDAKIAAGKTHHAALRALGNRWLEILWHCLRLGVTYNEATHTANRNHTNRPAA

SEQ ID NO: 499665 - protein, 349 aa, unidentified
MPIVADQFDHVVGVDTHARSHTYCIIACRTGAVIDTAAFPTTKPGLARAMTWIRRRATGELLAAVEGTSSYGASVTTMLIDAGIEVAEVRPAPKAAQATSGKSDTIDAETAARSVLGKSIERLAKPRSAGVRGTLRVLLAARSLMDQQRTANRNALNALVRTTDLEIDARRPLTNAQIREIAAWRIGRQETLTPLGVVRQEARRLAQTVIEQTGLLAQNNRQLEELANATAPGLQDQLGIGPVTAAILICAYSHKGRVRSEAAFAALGGVAPLPASSGNTTRHRLSRSGDRQLNRAFDIIVRTRMSCDDETKAYVNRRRADGRTNREIRRCLKRYVARATYRQLEAVMT

SEQ ID NO: 499666 - protein, 306 aa, unidentified
MSSCNKVRARSFANSPDGWRHLLDWLITQKIQRVHACLESTGRYSLGIACALYEAGHVVSIVNPAQIRDFARTKLGRNKTDGVDASHIREYCELFKPQPWAPPSEAHRRLGELQTIRAGIIAGLTEWKNRKNSGMVDAGAQALADVTISHFTSQLGAVDEAIAQTIDNDSGLRWKRDLLLSISGVGDTLAGVVLAELPGPDVLRSSAEVVAYAGLNPRRHQSGTSIDRVTRISKIGNAVLRAALYMPALSAMRYNPVIVALVTRLKSRGRLKPKQIVVAAMRKLLVLCFGVLKTGKPFDSAIAMGC

SEQ ID NO: 499667 - protein, 364 aa, unidentified
MRKFYGGLDVGSSICELVVIDDQGERVYAKQFDTSERNLILHVQDARKGLRGELHLALEEGEMAQWIAGVLRPEVTRLVVADPKRNAWIARDTQKGDRFDAEKLAKLFRGGFLKEVYHPEDQDRTEFKRVAQHYHALTMDQATLKVQIKAKYRAYGVILKGRLSEIFSRAGREACLTLLPGDRGRQMIRQLYLMLDAAQEAQKQAKTLMLAMGRKFPEVARFAEVTGVGPVWSCTFSAYLQTPHRFKTKRKLWRFSRLGITDRQSNGEPLGRRKLDPSGVGMLKQLSYQVFCTAMRFPDNDFKRHFDESLQRTKDKTHARLSTQRKILTVLWAMWKNDQEYRPCGAEKRLLKEDGANGQTLARA

SEQ ID NO: 499668 - protein, 469 aa, unidentified
MKRKSRRAKGQKVFPLSGDLKLIEPDAAAVDVGSRSHWVAVNPERDPNPVREFGTFSADLMSLADWFAQCEVKSVVMEATGVYWVNLYDLLEERGFKVYVVDAHTVRHLPGRSKSDVKDCQWLRRLHSYGLLRSSFRPPAQIGQLRNYHRSRSNIVDAAAQQQLRMQKALTLMNIHLHHVNSDISGLTGLSIVRAIVGGERDPKQLARLRDPRIRASKETIQKSLEGNWQEELLFDLKIALESYDHFQGQISAYDEQIRQALKEVPSKVDLLQEALPPGRLRVCRKRPGMSHQDQINLREELYRISGVDLTRIDGISLQTAQKVFFEIGTDVGAWDEEKRFTSWLGLSPNHCISGGKVLKRSRRKVVNPLSVALRLAARTLNNSHSALGANFRRLTAKIAMPKAITAMARKLAVLVYRMLKYGTQYVDKGMQHYQSKYQATKVHYLRAQAAKLGMILLPKQPAGAGAAA

SEQ ID NO: 499669 - protein, 319 aa, unidentified
MSTIIGVDVSKDSFDIAFEKDIKKFVQGKFGNCAEGFCLFYDSLPQVERIIVMEATGPYYLKLAYFLHEKGEKVAVVNPLKIRRFAQMRFERVKTDKADARIIASYGKSEELKLWEPLEGHIVDIRQICSVMERMVKDRTAWSNKQEALKNDPKHSLMAMQEIEEMIAYITKKLDDLENKLDAIIKDHFDDQNKIIRSIPGIGPKTAIMLLALTNGFTRFDTYKEFISYIGLSPRIYDSGTIRVKVHICKLGMSRARQLLYMAARAASKYNIACKLLYERLLEKGKAKKLALIAVANKLVKQAFALTFKSELYAKDFAL

SEQ ID NO: 499670 - protein, 345 aa, unidentified
MIIGCDFHPSWQQVSWMDTETGETGEKKLVHATGDAKTFYQQLEAPVLIGVEATGNSQWFVELVEDLGHAIWIGDAAQIRASYVRKQKTDKRDAAHILKLLVEGRFPRLWTPDREQRDLRQLVLHRHKLVEIRSRVKNELQHLSMNKGMQRKGKLWSQTGQKLLRELPLKPWAACRREDLLGLLAMLDQQVGKLDDAVQQAAEQHPQARLLMTQPGVGPNTALAYVLTIGDVSRFPRGKQVASYLGLIPREESSGGRQKPGAISKQGNGLLRSLLVEAAQIAVRYDPGYRKQYLHRCHQKPKGVAKVAAARKLAVRFYWMLRTQTAYPEIVRIESSPRVPLVGAS

SEQ ID NO: 499671 - protein, 388 aa, unidentified
MHGIAAQSEAAIAIRTDLRAIFVSLELSRSTWLLTSLSPGAGEKMSKHSVSASDTAGLFSRFAELQQKARTRTGRTFSIITIQEAGLDGFWIHRLLQGEGIESWVVDPASVLTSRRRRRAKTDKIDGETLVRTLLAYKRGEPRVCAMVKAPTPEEEDRRRICRERKTLTAERVRHVNRIKGLLFAQGVGDYDPLRRNRRGRLEELATGDGRPLPEHLKAQISRELDRLEIILVQLKAVGSERDAMLEPAKEGPPTPASMLAQLKGIGPEFAAVLWSEGLFRSFNNRRQVAAYAGLAPTPWQSGSVAHEQGVSKAGNPRLRTTMIQLAWLWLRHQPGSALSIWFRERVQRNGGRGKKTAIVAMARKLLVALWKYAVHGILIDSTKVKAA

SEQ ID NO: 499672 - protein, 370 aa, unidentified
MLDTTTFVGLDVHARSIKAVSLDVMTGEVRCATFGYDAGAVAAWVRSVDPKARCVYESWVTGFDLQKRLSGLGVDCAVGAVSKMIKPSADRRRKNDRNDAEFLARMLSVGNVVEVWVPDDECEAARDLTRALEDARDDLSRSKQRLSKFLLRHGLVFDERTPTGRRKGNWTRAHWSWIESIRFAEGADNDALAYYVDAVRRAAEEKARLEGLVGAEARKPRWRRRVDSLRCLKGVDTATAADLVFEAGEFSRFGNARSFAAWVGLTPSEHSSGESDRRGAITKAGNKHLRKALVEAAWHYLTCSGRPKDLARGQAPDPAARRHAAKGVRRLVERREALLARGVHGNKANVATARELAYWVWAVGLMAEEA

SEQ ID NO: 499673 - protein, 337 aa, unidentified
MSEITTVGIDLAKNVLSVHGVDAGGKSVLRKSLTRGKLLELMAQLPACRVGMEACSGAHELARRLQTLGHEAKIMAPKFIVPYRKNQKNDGNDAEAICEAVGRPNMRFVPIKSAEQQAVLVVHRVRSELVASRVGLINQVRGLLTEFGIVLPQGRFSFRHNIGTALDDVRLPVLAHQVLHEVNARIRVLDEDILAYDRRLEAMVRDSALMQRIVAVCGVGPITASAIVASAKLFKNGRQFAAWLGLVPRQYSTGGRSILGRITKRGDVYLRTLLIHGARSALITLSRRTDRLSRWAAALTERRGFKKACVAMAAKNARIIWALLAKGEDFRLERAAA

SEQ ID NO: 499674 - protein, 371 aa, unidentified
MNSIVYIGMDVHKESFTVCCYTIDADKIQYQQKLAPDYKLVLKYIERIREFYPANTEFICGYEAGSLGYSLYHQLVGCNVKCIILAPTTMAVIGNNRVKTDKRDAGNIVRCLAFRTYSEVYVPTDEDSAVKEYIRMRDDQKKLLKSTKQQILALVLRQGYRFEGGKTYWTIAHVKWLKSLKMRDVFQETLEEYLVTYTYLTEKIGRFDKRIEEPASNERYKENVKKLNCLIGVKTHTALSVIAEVGDFKRFAKADNFASFLGLVPSEASSGGKQNRYSITKAGNGHLRRLLVEAAQGYTRGAVGHKSIDLRKRQAGNSPQTIAYADRANERLRRRFYKMTLSKNVNRNIATTAIARELACFMWGMMTSNTV

SEQ ID NO: 499675 - protein, 394 aa, unidentified
MSDVPCFVGIDVAKAQLDIAIRPTGERWTVPNDASGVATLVDRVQTLQPTLIVLEATGGLERLVTSALATAGLPVVVVNPRQVRDFARATGQLAKTDALDARALAHFADAIRPKPRTVPDAQTQELRTLLGRRQQLVAMRTMEQNRLAGTSGRLQTDIAAHITWLNARLATLDDDLDTVLRSSPLWRENDDLLRSAPGIGPVCARTLLLELPELGTLTRQKIATLVGVAPLNCDSGTLRGRRMIWGGRARVRTVLSMATLVATRYNPRIKAFYERLLAAGADVDAVGDMYRGTTTLGLVATSVHPVNAGVQAELIDVLVRAGASLAHAVAPDYTHGLVVNACLANGRGEGALLVNDDSAGLIRALAFVVVGLFVSALARGWEVAGIGHRGQRAE

SEQ ID NO: 499676 - protein, 408 aa, unidentified
MEVVHERCCGLDIHKRTVVACLLRPGQGGQPEREVRSFSTMTRGLLELADWLQTAGCTHVAMASTGSFWKPLYNLLEGSFELLLVNAQHLKAVPGRKTDVKDAAWIADLLRHGLLRASFVPGRPERELRELVRYRTSLIRERAAEVNRIQKVLEGANIKLAAVATNVVGVSGRAMLEALVAGNEDPEALADLARGRLREKRAALEEALAGRLGAHQRFLLRVQLRHLDDLDTTIATVGEEIEVRLRPFAEAAERLLTIPGVGPRTAQTFLTEVGPDMRRFPTSGHLASWAAVCPGNRESAGKRQSGRTRKGSPWLRSALVEAAQAASRTQTYLGAQYRRLAARRGGRRATMAVAHSILLIAYHLLRDGGTYEDLGANYFDQRDRQAVQRRLIHRLEALGYNVHLEPAA

SEQ ID NO: 499677 - protein, 320 aa, unidentified
MSSESPASRVFVGIDIAKAELVIALRPSGQCWAVPNTPEAWADLAQMLAPQQPERIVLEATGGLERPLARALTAAGLPVAVVNPRQVRDFARAIGRLAKTDALDAHVLAHFAEAVAPEPRPPLDAAAHELEALVDRRRQLRDVLVAERNRLRQADPVVRPGIERHLEWLEAEVETIEQELAERVAQDSIWQAKAQLLQSVPSVGPVIATTLLARLPELGSLGRKEITALVGLAPYSRDSGTMRGRRCIWGGRSDVRAVLYMGAVNGLRWNATIQAFYARLRAAGKPAKVALTACMGKLLRILNHLVATNQKWDTTKLSPA

SEQ ID NO: 499678 - protein, 331 aa, unidentified
MDTVSLIGVDLGKHCFHLHGQDASGRMVFRKKLTRSQMFTLLGNFPSCTVVMEACAGAHWIARRLQALGHEAKLISPQFVKPFRQGNKNDFADAQAICEAASRPSMRFVSPHNEAQQIVSALHRVRGGLVRERTGTINQIHAFLLEFGISLPRGMAVIRRLPAVLEAESLPPRLVSVIERLHAHCKYLDEQIHQLERELLTQLHEDERSERLLEIPGIGPMTASVLMSELGDARQYGSARQFAASVGLVPRQYSTGGKPTLLGISKRGDKELRRLLVQCARTIMQRIEHRTDALGVWIRGLLARRHSNVVACALANKLARIAWAILAKGTH

SEQ ID NO: 499679 - protein, 412 aa, unidentified
MTAKDQFAALVGLDWADKKHDVCVQFKNGDRIFHVIEHTPEALDIWLNELHQRAKGRIAIAVELKKGPVVYALQKYPFVTVFPVHALSLARYRQAFWPSGAKDDPQDAELALDLMLRYPHKIKAIEADNPDIRLLQQLVEQRRLLVEDKRRFVNRLINTLKQYYPQLLEWFSHRDSSLFCELIIRWPSLQQLKRARSDTIRHFMNAKGGPAVAYTEQRVASIASAIPLTTDKTVIEANALMATALASQIKLTSDLIRTYDERIESLFDTLPDAELFKSLPGMGPCMGPRMLSALGDNRDRFTSAEEIQNYAGIAPVTERSGQKSWVHWRWQCAKFVRQTFVEWTAKTVNSSYWARLYYQGQREKGKSHQSAIRVLAFKWIRIIYRCWKIKTRYDEAKYLLALEARKSPLLKP

SEQ ID NO: 499680 - protein, 460 aa, unidentified
MIGYLGIDVSKGYGDFTLLDQNKKELEKVFQLDDTRTGHDALEALLQKHIKDRQIDMVYCGVESTGGFENNWYAALIRIGVVMPVKVARLNPSGVKNNTAAGLNRNITDALSSRYIGEYLIAHADKVVYEQQSDYYSSFRSLHKQIMRLKKQNTQLINGLKTELYSAFPELTRYCKQGVPEWVLEVLRKYPSASAVARVKVEQLSRIPHVTLEKAQSLISKAKSSVASRSNATHEFLIKNLAMEILHKQELIEKHKNYLIQQCKGPEVSLVDSLPGVGEYSAAALMVEIEDIRRFASPNHQASYFGLHPVLKQSGDKAAFRMSKKGRASMRAILYMCAQTAVMHDAHLKAIYHRHRSKGKNHKQAIGVIMHKLSRMIWGVLTSKHPYQATVDEKNQNKKPAGQSVDGASKEIKAKRRYQPLDTEAPISNKQTKKRKAHVKSQVEQVEQVRDQQHAPDVNI

SEQ ID NO: 499681 - protein, 342 aa, unidentified
MQTNNNLKQEIILKLYVGVDVSKDKIDIIFYIKKKRYHYKFDNKKSGFVNLNTLLKKRFNVKKVIIAMESTGHYHINLADYCVYNKYDVYILNPKKVKDFISSMYEMKTDKNDSKAILEYLEIKERNNNLETIKDRDKINKYIKLSDVERKLKVLSQERARVIKLRKIEKTRIQMGVSAEEKIRNRQIKRRITFYNKELELIEKQIKDVIKNNKITKEKYKLLNEIPGVGFVTAIGFIALTSELGKISNKKISSLVGVAPHPNESGKMKKRSKIHKGRKNMKVILYMAAINTIKHHPTLKPFYKKLVEEKGKPKKVAIIAVMRKLLVIANAKMRDYYLKEGK

SEQ ID NO: 499682 - protein, 438 aa, unidentified
MSNKVIFNLDELFISVGIDVGADFSWMSIALPNQQFVGKPYKILHSSIDSLTTAVSKIKEAEELYSLESRIFLESTGIYHYPLFCYLRDKGFNCSVINPIITKNSTNINIRKVHNDRFDSKKAALVGLKPDLKVSLMPSDLALNCRNLCREYYDLMDNRSAYVNKLQGELRMAFPQYLGIFSKVTINTSLTLLETYTSPSAFLEADKQEIIDIIKSTARFGLTYAQNKYNAIIQAATDANQFGYIIESNIKRIRLYISFIRKYDEEINDILESLHKLVDSNEDTKFVKQVHLIETFKGAGFLSAATIMGEIGDFSAFSKPKQLFAYFGLDPAVKQSGKFEGTKVQMSKRGSSIARRVIHTLSLQSISISRNGKAKNPVLREYYLQKCDSKPKLVAMGAVSHKVCNMIFAILRDNKPFEIITPQEHIKQYNAAKCDIAA

SEQ ID NO: 499683 - protein, 366 aa, unidentified
MKKISTVAVDASRNISQRLTIGLDLGDRSSCYCVLDETGRIMLEQRVSTTAKALREVFGKMPRSRIALETGMHSPWVSRLLGELGHEVIVAHARNVRLIGESRKKDDRLDAQTLARLARIDPQLLSPVKHRSAKAQADLTVIRARAGLVRARTALTNTARGLAKSYGEQLRGCNVRNMNPEKAERLSLELQKALEPLLAASAALSEQIAEYNERIEQMAKASYPQTALLKQVKGVGTLIALTFLLTLEDAHRFGKSRDVGCYLGLQPGRRNSGQSEPQMRISKEGDPYLRTLLVQGAQHILGPFGVDCDLRRWGLKLAERGGRSGKKRAIIAVARKLAVLLHHLWVSGEVYEPLHNSEPNAVAIAA

SEQ ID NO: 499684 - protein, 342 aa, unidentified
MQVINRVAIDLAKNVFQVCALNSHNKVLFNKKLSRKKFIEFMVQLPESTIYMEACYSSHYWGRTLQEMGHHPFLIPAQHVTPFVRGNKNDNNDTLAIAEAANRPGIRFVPIKTVRQQEIMAMHRLRSRLVKSRTQVSNQARGLLSDFGITFPMGAKAFIDAMTALQDNESLSLPFRNLMLDLSTEFHEISERINTIESMLKSYIKQTGSCAIVSSVPGIGVINASALVASIDKGQAFNNPREFAVWLGLTPRQYASGEKSRNGGITKRGDRYLRTQLIHAARAAKKWSRKRDDQLSLWIKQLEARVGVHKATVAVAHKLARIIWVLLQKQQTFVQQYPQQIK

SEQ ID NO: 499685 - protein, 476 aa, unidentified
MSEQEQHAPETEERAKASKGKRGRRRKGMCLDDRPLLEPNAGAMDIGAREIFVAIPPERDDNPVRVYLTFTEDLEAMARWLVSCGITTVAMESTGVYWIPIYDVLEQHGIKPCLVDARGMKNVPGRRTDWHECQWIQFLHSVGLLRAAFRPDGDVCAVRSLVRHRSDLVQMTSQHIQHMHKALTQMNVQIHHVTGLTGLAIVDAIVGGQRDAQELAKLRDPHIKASEETIRKSLKGNWRSEHLFTLKQSRQMYQHYQEQIAACDEEIEKLLRAFQPRVDPEEKPLPPDRKKKQRGRRKKNVNPKTGFDLRTESYKLFGVDLTQIPGLNSMVLTLFSEVGRDMSRWPTSGNFASWLGLCPDNDISGGRVLWKGMRRVNNRAGDLFRLAAYSLHHDPSPMGDYLRRMKSKMDAPAATTATAHKIAIIFYTMVKKQVEYDASIWAERDAERERRFEAKLKRQALQRGYKLVPIEEKPAA

SEQ ID NO: 499686 - protein, 355 aa, unidentified
MNKIKTNFQGQTIFVGMDIHKASWNLGIYLNDMFIKNVHQKPNPSVMAAFLNQHFPGAKYKAAYEAGKFGFWIQRQLTQLGIECLVVNPADIPKSQKDTLQKTDPRDARNIALRLQSGVLHSIHIPDEQQEADRVFFRHRKRIWKDLTRCKNRIKGMLAFSGIDIPEQYDNANWCHNFIVWLKTIDCRQISRRTALNYMINQMEFLRKELLLISNDIRKMMREQRYKTNYYLLRTIPGIGPLTAASLLVEIGEVKRFETFYHLNSFVGLLPMEHSSGQNENKGILTVRKHRQLRSDLVESAWTAKRTDPAMSLYFQEQVKRKDTKIIIIKIARKLLNRIRYVLINQAPYEYGIVK

SEQ ID NO: 499687 - protein, 320 aa, unidentified
MNKERKYVGVDISKEYLDMAVVEPDNKWRFGNNAYGIGKAVERLKRLSPVFVVFEATGGLELSFWEALTEAGIEAAPINPRQIRDFAKAKGKLAKTDEIDAAVIAYFGQAMHPRSQPFPTTQEIKEMMSRRSQIVEMITEEKNRLNWARSSRIKEDIQLHIEWLEREKDEADKNLKQVINIDPEMREKSKLLQSTPGVGPIVSASLLTQVPELGTLNRHQIAALVGVAPLNRDSGQWRGKRSVWGGRSRVRSALYMATLVATQHNPVIRVFYQRLLDENKPTKVALTACMRKLLVILNAMLKNKTSWTTSIAQVSSIACP

SEQ ID NO: 499688 - protein, 348 aa, unidentified
MAVTIVETPTITGGVDTHADVHVAAALDPVGGLLGVAEFPVPPVGYARLLGWLGGFGTVCLVGIEGTGSYGAGLARHVATAGIRVVEVDRCDRQDRRRQGKSDPLDAVSAARAAQSGRARGAPKGRDGSAGAIRALMVAKRSARAERTQTINQARSLIVTGPDDLRTRFARHTVTALVAETAALRPRPGSTVGYATRIALRELGRRAQFPGGQLERLDELIVPLVTARAPGLLALYGVGPDTAALLLIAAGDHPARLRSEAAWAHLCAAAPIPASSGKRTRHRLNPGGDRQANHALWRIVITRMSSHPPTRAYVERRTAEGLSKTEIIRCLKRYVARESYPRLRAAAD

SEQ ID NO: 499689 - protein, 347 aa, unidentified
MAHCVGLDVSVKETSVCVVDDSGSVILEHKVPTEPADIITLLTSLGVSFGRIGIEAGPLSQWLVNALTAADLPVICVETRHMKALLTAQQINKTDRNDARGIAQMMRVGLFKPVHVKTLVAQEQRMLLTSRKLLQRKLLDLELDLRGTLRNFGLKVGVVSGSRYEARVRELVEGFPRLAAIAEPLLNVRRVMRQQFAVLHKMLLDTVRDDPVCRRLMTAPGVGAVVALTYRATVDQPQRFLHSRAVGAHVGLTPKRYQSGEIDYDGGVSKCGDALLRTMLYEAAQVLLTHSGKWSWLKAWGMRVAQRRGIRRATVAVARRLAVVLHRMWVDGSEFRWRRDGAVPAVA

SEQ ID NO: 499690 - protein, 345 aa, unidentified
MARFYIALDTHCRSTDMAVVSASGKLVHRDRCATTIPALWQRIDAVKRPRALTFEEGPLAGWLARQLRVAVDELIVCDPRRNALIAKESDKEDAIDALQLAHLFRGGYLKPVHQAATQERALLKQHVALYHDRVRDRVRQGHQLVAQLRRHGVIASIAQVTEEATRAALYKKLPHSVVLRQDLELLGAMYALYCQQEATLRAGLIRLAQHEEAVRRFQEVPGLGWVRAVTFYVYIDTPERFASKSKLWRYCGIGLEKRGSGQGPVRTRLCRQGNRNLKGIRIGAAQSALAGASPYAQQYRSWLEQGLPKSTARRNLARRLATTLWTLWKEGGRYDPSRVGARTVG

SEQ ID NO: 499691 - protein, 347 aa, unidentified
MNYIGVDCHITSLDFAVVNERGITTKKAKVNTGVKEFIGFVKSVPNPRKIYIEEGELAGWLLETSLKFGEQLIITDPKINKWIGKAGQKDDTIDAEKLAQLARGRYIKAIYHPVDKRRRFKELVFAYHDTVKSQARIKNKIKANFRRNGIRCSGVTVYSDKHRAKWRAKLSQNKIPRLIVEELWVQLDQLHASKDLLKRNIRIQSKRYPEIKRFMQIPGIGLIHAATISAIIETPHRFANKKKVWMYAGVGLVERSSGEKVYSRKLTRNYNRPLKNAIKQAVEAAIFAHDNQFRRQYLRLTLEKGIASHKAKLTVARSLLSVLYGMWKKGEAYDPEIDNKRRNGDKK

SEQ ID NO: 499692 - protein, 355 aa, unidentified
MSQEKYIGMDVHQATISVAVRDVQGKLIMESVLETKATTILEFVQGLRGTLALTFEEGTSAAWLHDLLKSHVSRLVVCDPRKNALLKDGNKNDRVDARKLAELLRTNQVKPVFHGEHGTRALKELGRSYLTLTQDRTRVMNRIKSVYRSWALPCAGTSVYTRRHRAEWLAKLVEPGVRIRAEHLYQQLDSLEPVRQEARRQLLLESKKHAAVKLLRQIPSIGPIRAALLVALLQTPHRFRSKRQLWAYCGFAVEVHDSGEYRWVRGKLQRNRERITVRGLNDNHNSDLKNLFKGAAISASTRPGPLQDFYLARVAKGMRPTMARLTLARKIAAITLTMWKKGANFDSQQLQRQAA

SEQ ID NO: 499693 - protein, 412 aa, unidentified
MQVLYRCCCGLDVHAKTVVACLIKDGKKQTRTFSTMTDDLLALSDWLAAAGCTHVAIESTGVYWKPVFNLLEGTLEVVLVNARHVKAVPGRKTDVRDCEWLGDLLRHGLLRPSFIPPPEIRELRELTRYRQTLVKEQTALANRVQKLIESANIKLGQVATDVLGVSGRLILRALADGETDAGRLAEFARGRLRRKGVELRRSLEGRLTKSQRFVLSELLSRLDEVGAAIARVNERIEAEARECRDPFVAEAVRLLQSIPGVGPRAAEAIVSEVGVDMSRFPTDAHLASWAGMCPGNHESAGKRLSGKTNKGSTYLRNALIQSAWAASHTKETYLAAQFRRLVRTKGQKRALVAVGHSILVIAYHILKRRAGYEELGGDYFDRQSTEHLQRRLIRRLERLGLKVVVEPVAQAA

SEQ ID NO: 499694 - protein, 336 aa, unidentified
MYEGDQTRGKQVRVEHERGAIREFLSQFPEDTPVALESIGNWYWIVDEIEQAGCQALLAHAAKAKVMMGNVNKTDKLDARGLAMLLRNGTLPTVWIAPSQVRDERELPRTRMALCKIRVALKNRIHATLAKYNLLLPTESDIFAPKWSSQLNEVIEQLPSETQKCLQQELELLEDVQRQIQAMEERMKECISLTPDMQLLKTVPGVGDILAIVIGTEIGRIERFASAEQLASYAGTVPAVKSSGGKTRYGHTPKESNHYLKWAFVEAANGPAQYRQKPRWQHRHVTHLYERVSLRKGHSVAVGAVARHLAEATFWILNKKEPYHEPIHQKVLPKQA

SEQ ID NO: 499695 - protein, 428 aa, unidentified
MNPTKLIKLTDFAATIGLDWADQKHDLWLCPAGGGPPHHLTLEQTPQALHAWVAQLRQRFANRPVAIAIETSRGPIISLFLAYDFIVLFPVNPKALKDYRAAFAVSGAKDDRTDAMLLEELVRLHRDKLRALQPDTELTRKLAGLVENRRHLVNERTRIVNQIHAALKTYYPLAQTLLKNQMTQPLAAEFLRRWPDLDTLQKTRDQTLRAFFYQHNSRSASRIQERLQAVRAAQPLTTDPALIEPARQLVSALASLLVPLHKAIAQLDRDIAAAMDQHPDAALFRSFPGAGPALSPRILVAFGTQRDRFASAVEVAQFYGIAPVTQQSGQTKIVRLRCRCPKFGRQSFHENAACALREEPWARGFYEQHKHKHDDHHHQACRALAFKLIRIYFACWKNRQPYQPDRYLQALQTHGSPLSQQLPIQPTK

SEQ ID NO: 499696 - protein, 342 aa, unidentified
MQITTIGLDIAKNVFQVHGIDSTEKVVVRKQLRRGQVLAFFKALAPCLIGMEACATAHYWARELTKLGHQVRLMPAKDVKAYVKRNKNDAADAEAICEAVRRPTMRFVPVKSAEQQARLMQHRARDLLMRQRTQLINALRAHLAELGIAAAQGREGIKELLAIVAQDGDTRLPVDAHASLIVLAAQLQAVQTMIGSIEKRIVAQHRSSEENKRLQTIPGIGVLGASTIVAVVPDPKVFRSGRDFAAWIGIVPREDSTGGKQKLGPISKQGDRYLRRILVVGACAVLRRARQQPEKYPWLTQLLARRPFKVVAVALANKMARIAWALLAKGGTYRAPALAAAA

SEQ ID NO: 499697 - protein, 340 aa, unidentified
MKLYGAIDLHSTNSVLVVIDEEDKIVYQKRLPNDLALILKELCVYQWRLEGIVVESTYNWYWLVDGLMAEGYQVHLANTAAIQQYEGLKYSDDDSDARWLAHMLRLGILPQGYIYPREERAVRDLLRKRSQLVRQRTMNLLSIQNLMTRNTGSSMTANQIKGLDKAQVDGLLPDADLSLAVKANWSVMSSADEQVERLEQRVTERVKLRAQFSFLKTVPGIGQILALTIMLETGDIGRFATVGHYASYCRCVGSQKISNGKRKGSGNTKNGNKYLAWAFVEAANFAIRFNSKIKSFYQRKKAKRKAVVAIKAVAHKLCRACYYIMKDQVAFDVSKAFGQK

SEQ ID NO: 499698 - protein, 357 aa, unidentified
MISKKISVKSKKNNSCSLTENESYDHYIALDWSEKNMAIARMGKKDTVPKIIDVPSDLKELKLYLSKLQGEKILTIEETTTSQWLYVELYEYADRIFICDPYRNRLLSDGPKTDRIDAGKLCKLLKNGMMKEVYHSTNELYELRKLVSYYDDEVRAGVRLLNQKSALYRAENKSWKKKQELEASRVNKFIVAQLDEKIESYREKKKKYEEEFEKISKKSKVLRSLKSIPGLGPISSVTILSIVIDGRRFKSSNHYLSYCGLVKHEKQSGGRSYGRRSPRYSRRLKAVYVSAAVRVASTENPLRQYYEYLLNEKKLPVYNAKNALARYIAKISLGIIKSGEKYKPYKWRDNKKAKEAA

SEQ ID NO: 499699 - protein, 422 aa, unidentified
MLEEAHDSEELIGRVAALDIGKAQLVCCVRVPSPDRPGKRLQEVRTYPTMTRSLLAMADRLGALGVSRVVMEATSDYWKAPFYLLEAHGFEVWLVNAKDVKHLPGRPKTDRLDAVWLCKVAERQMLRPSFVPPPAIRRLRDLTRYRADLVVGRTAEKQRVEKLLEDAQIKLSVVASDIFGVSGRAMLAALVAGERDPKVLAQLARTRLRAKRGLLEEAFVGRFGDHHAFLLQTMLARVDQASADIAALEVHIEAEIAPFAAAADRLDEICGVGRTAAQVIIAEVGVDMGRFPTPGHLVSWARFAPGVKESAGRRKGNATTGHGNPYLARVLGEAAVAAGRTNTFLGERYRRIARRRGAKRAMVAVGRSILIIVWHLLSDPTVRYQDLGAGFYDTRINAQRRKRNHIRQLEALGYKVTLEPAA

SEQ ID NO: 499700 - protein, 369 aa, unidentified
MELPKTRGTKKGAAATKQQAIQYLAFDVHQATVVGVARDERGSIVLRATIPTEARAILQLVKSAGPRVHVVFEEGTQAQWMHDLVVPHAEKVIVCNTRRRNESGNKNDRLDAEALSEQLRLGSLKPVFHGVTSVLTLKELVRSYNNLVEDSTRVMQRIKALYRARAIPTKGTSVYRTTQRKEWLAKLAGGSRVRAAVLFSHLEVLLKLRPPAKAAMLAEARRQPGWKVLRSIPYLGPIRVAEILAIVRTPFRFRTKRNLWPYVGLAVVTRSSADQEFVDARLPKRRRPPLTRGLNRNHNPILKSVFKGAANAATVRPGPLRDFYEASLARGVREELAKVTLARKIASVALRLWKKGELWDPNKLTMQVA

SEQ ID NO: 499701 - protein, 400 aa, unidentified
MLSIGIDVSKGKSTVCGMKPGGEIVYAPFEVQHTREGMSELVLLLHNSGEEVRAVLESTGSYHCPVVAALLENGIFVSVVNSLRMKRFCSQSIRKVKTDRIDAMQIALYGLAYWQELQPTKLPEDTYRELQLLARQYYQMTSLLIKAKVDFNAICDQVLPGMQELMSDHAGRHKLSDFVLRYRHTTHILEMGETRFRKDYCKWAEKKGYRNRERMAALIFATAQNGIPVLPNAPSTQIVITEAIRVLHTVEASRDAILTQMQALAKTLPEYSLVREMPCIGDTLAPRLIAEIGDVRRFHSKRALIAYAGIDAPPYQSGKFCANNRHISKRGNRYLRKTGYEVMQSYVMHKPANDPIFTFIEKKRGEGKSGKLAMVAGLNKFLRVYYGKVTELYRSLPAIE

SEQ ID NO: 499702 - protein, 429 aa, unidentified
MRLSDYLFVGIDLHKQTHTAMILDSSGKELGTITFENVPTDFSKLERKVKKCIQKMKLSQGVEVEAFYCLENAYGYGRALAVWLIDKGYVVKDVNPALSNRQAKHRAMYRKSDEDDARAIAMAGIHEFVKLPDACPLDEYWSIQQLVHRRDTIMNQRVRLVNQLHEQLHRAYPYYKEFFQDISRPTALHFFETYPSRKYLIGVSADDIREELLLVSHNKCSTKVCQNIYDIVSADTSKLCEYQDSRDIVTRGIISDIQHSDMMLAEIDSELERLYKELGLTLATMPGMKIIMSMKLIAEIGDIRRFKSSEKLAQYAGIAPMPYGSAGKNKDYATKQGNRRLQATIYYLAVQQIQISPSDKPRNPYFRNYYEEKLLEGKNPKQALICISRKLVKVIYAMLKNKTAYVMPETLESKEDKVLDSCDVTKEAS

SEQ ID NO: 499703 - protein, 288 aa, unidentified
MTSNVKYIGMDVHKESISIAVRNSAGKIVMECVIETKASMILQFIDGLRGDLQVTFEEGTSAAWLYDLLKPHVTKLVVCDPRKNKSMREGNQNDKIDARRLAELLRLNHLTPVYHGEHGLRTLKELVRSYLTITKDLARVMTRVKAIYRSWAIPCTGKQVYARCHRAEWLGKITEPGVRRRAEFYYLQLDALRVLRQDARRDLLAESKKHKAWKRLCEIPAIGPIRAAVLLGILQTPHRFRSKRPLWNYGGLAIEMHSSADHRCVDGTCNEPRNKCWSGASTETAITI

SEQ ID NO: 499704 - protein, 345 aa, unidentified
MEKFSLFIGIDLGKREFYAAFRYQSQLVKARKYENTASGIARFIQDIQAFGLEQNQVLIALEHCGVYLEKLVMALYAEGLFIWLWNPLIAKHAPLDLNRHKDDPRDAKTMAMLAQNYQAKAKRYIPPSAREREIKALSLLRKQLIKQRTQLINQKKSNLDKALPLPLAEEVFQQLIETLTAKIKQVEKQLQKTLLQSERFKRVYTILTSIPGIGPVTATQLIEISRGFTTFSSEVALAKYAGTLPLKHLSGSSIKRKPRSSKRANKQLKVNLTLGATSQIRKGMFFENFYRYKTEVQKMEHLKVINIIRNTLLKLAVKLVQLDQEFDPDTFRKNKKSWQVFLTLS

SEQ ID NO: 499705 - protein, 344 aa, unidentified
MEHFAGIDVSLEHSSVCVVDGVGKIVREAKVASEPEALVRFFRGLETGVTRIGLEAGPLSQWLHAGLVAAGFEVVLLETRHVKAALSAMVIKTDRKDARGIAQLLRMGWFRPVHAKSPGSQEVRALLVARKLLQTKLLDVEFSIRGILRGFGLKMGEVSKGRFAARVRELAAGHAMLERITEPMLRAREALRTEYARLHGEMLAIVKPDPVCRRLMTVPGVGALVAITFKSAVDDPGRFTRSRVVGAHFGLTPRKYQSGETDVTGAISRVGDGMVRMALYEAAHIMLGRVTRFSSLKRWALDVAKRRGLKRAKVALARKLATVLHRMWVDGTTFHWGKQAVAVV

SEQ ID NO: 499706 - protein, 374 aa, unidentified
MDKGIKVYVGLDVHKDTIAVAAAQAGERTAARLIGQIAHEVPKLLKALAKLGQPTEVQVVYEAGPTGYGLQRALAAKGYRCEVIAPSLIPKRPGERVKTDRRDSVRLAERSRAGELRAVTIPDRADESIRDLARAREDAVNARTQARHQLKAFLLRHDERYAGKTNWTKSYYRWLGELNFGDASSQIAFTEYHLAVQAADARVARLTQALGTSVKGWRFEPVVQALQALRGIDLVSAVGLVAEIGDFRRFEHPRKLMAYLGLVPSEQSSGERVRKGSITKTGNAHARRLLTEAAWNYRFTPRIGRQAQQRQEQLPDPIRATAWKAQLRLSQRYRKLNERGVHHNKVCVAVARELAGFVWAIAQQAHGAADTAAH

SEQ ID NO: 499707 - protein, 390 aa, unidentified
MEVRLENTASATTNNDPAHCFVAIELSKSSWVLGFQTPLAKQTSRYQVKACDAKALLELIERVRSRMARELGRPVEVMSCYEAGYDGFWLHRVLEAHGIHNHVLDPASLQVNRRARRPKTDRIDADRMVRALIRHLRGEPEACSVIRVPSPEQEDARRLHRERDRLIAERVAHVNRVKGLCATQGIYDYEPLRSDRLKRLEKLRTGDGRALAPRLKAEIVREIKRLEIVLEMISTVEAERDAILTEKKSTHLNADKIKMLAKLKAIGAEFSTTLVGEVFYREFANRRQLGSYVGLASSPFCSGSLDRDQGISKAGNPKARVMMIELAWTWLRYQPESALSRWFRERVGNLKGRPRRIAIVAMARKLLVALWRYLQTGVVPTGAELKAQSN

SEQ ID NO: 499708 - protein, 395 aa, unidentified
MNKTVHHLGLDVHKETIAVSIAPAGTAEVRRYGIIGGSLDAVDKLLKKLAPPGVELRVVYEAGPCGFVLCRHLRSKGIACDVVAPSLIPKKASDKVKTDRRDADQLARLHRAGELTPIHVPDQEDEAVRDLIRARHSAMDELRKARHRLKGFLLRLGFRYTGKSSWTDAHKRYLSGLVMPQPAQQIAFQEYIHAIDDAGERLARLTQAVLDALPGWKWAPVVRALMSLRGVQELTAMTLVAEVGDFSRFDDPRSLMHFLGLTPSEHSSGGARTQGGITKCGNAHCRRVLTEAAWQYRLAPKVSEAMQQRQQGQDKAVRTLAWKAQQRLHKRFKQLSAKKKSVVAATAVARELTGFVWAIARQVPPAEQPAAPEILRTCRGKVYRLNADQKMEKAG

SEQ ID NO: 499709 - protein, 402 aa, unidentified
MAEDQVWAGVDVGKEHHWVCVVDGNGNVVLSRKVVNDEHTMRDLVAEIDKLAGEVSWTVDLSNVFAALLLTVLADAGKTVRYLAGRQVWQASVTYRGGESKTDAKDARVIADQSRMRGEDLPVLRPGDDLITELRMLTAHRADLVADRTRTINRLRQQLLAVCPALERVAELTQDRGWAVLLAHYQRPKAIRRTGVSRLTKVLAAAGVRNAATIAAAAVTASKAQTVRLAGEDVGAGLVAELAQGVMNLDERIKHTDADIEERFRRHPLAEVITSLPGIGFRLGAEFLAVVGDPALLESPDQLAAWAGLAPVAKDSGKRTGRLHTPKRYSRRLRRVMYMSALTAIRCDPASKAYYQRKRDQGKRPIPATICLARRRVNVLYALIRDNRTWQPNTPQITTAAA

SEQ ID NO: 499710 - protein, 351 aa, unidentified
MSRQSMPSMIATIGIDLGKNTFHLVGLDQRGNIVLQLKTSRAQLERRLTNIPRCLIGMEACSGSHHIGRQLEALGHNVRLIPAQYVKPFLKGHKNDYRDAEAIAEAVQRPTMHFVSIKTPDQMDLLALHRVRSRLVSQRTGVINQIRGFLIERGVTVRQGPVPLAKALSDILSSSTPTLSPRLVRLITDLAEDWRRLDNRIAIVSAEIEALAEQDAPCQRLMTVPGIGPIISSAVVAAIGNGTGFKQGRDFGAWLGLVPKQESTGDRTIPGRITKRGNRYLRTLFMQGARVILLRPASWAKHSFGPWLTAAAQRLHHNVLATALANKLARIALTVLVQGRGYETRVTSEAS

SEQ ID NO: 499711 - protein, 340 aa, unidentified
MTSYVGLDVSLAETSVCVLGADGKVRYEGKVRSLPNELVACIQRHADDAERVAIETGQTSALLFRAMEAANLPVVCIETRHAHKVLSARQNKTDRNDAKGLAELVRVGWYKEAWVRGASAQAIRSLLLARRMLMVTRRTLENTLRGAVKRFGLIITKTAGKTFKGRAVAAMELDPAYAAFAAPILVVLETVAEQIRTYERQLQAVIRGNATLSRLMTVPGVGYLSALAFYSTIEDPARFKRSDDVGPYLGLTPRTHQSGEVDWSGRITKTGDSMTRAYLFEAATVILTRVTKPTPLREWGLRLKERSGMKKAQVAVARKLAVMMHAIWTDGTEFEWRAAG

SEQ ID NO: 499712 - protein, 421 aa, unidentified
MDWADQKHVWSLYIPGTPQREQGECVHSPEAIHAWIGQLTARFAGRPIAVCLEQSRGALLFSLSKYDNLVLYPIHPATASDFRKAVYPSGSKDDPLDADMLLEFLLKHRDRLRAWRPDTAHTRELQFLVEDRRQLVDEKTRCLNRLTQRLKLYFPQALSWFTSVDSLLLWKFLQQWPDLEALRKVRRSKLQAFLERDRRCSAPDIEELWPALQQAVPATHDAAVIGSSVLWVTTLVQHLQTLREAIRHYDKRIQELTETHPDFPIVSSFPGVGPALAPRLITALGTQRDRFQSANQLQSYSGIAPVKAASGKRCWIHMRWACPKFVRQTFQEWAQHSLARSAWARAFYDRQRLLGKQHHAIIRSLAFKWIRILYRCWQNRTPYQEALYSATLARRAPTPATTVECLWTTTAGFSKIAAIKT

SEQ ID NO: 499713 - protein, 391 aa, unidentified
MSMYFVGIDISKYKHDCCIISAADQQIVSKFTVKNDKDGFEHLLTTLNSLSNPEDIKIGFESTAHYALNLELFLENAHHSFMEVNPVLIKEYKKSTTLRRTKTDSVDCESIARWLMTVEYKPHSKGFYHSYSLKSLTRLRDRLIRQRSFYLVKITNVLDHTFPEFKPFFNERLSKTAIYLLENYGSAEKMAHMNSASYDKLRCASRGKFSIQQFLRLKELAANTVGVNNSIFDIELNSLLTLYNSLCKEIKTLEAEITKLIEEVHPHYMSIPGIGPISAAVIYAEYGDISNFSNPGQMLAFAGIEPGINDSGTESHGGRMVKHGSSQLRYVLLNACLPLIRFDITFATYYAKKRAEGKKHRVAITHVAKKLIRVIYALERLDIDFNTQKLH

SEQ ID NO: 499714 - protein, 391 aa, unidentified
MVCVGIDVAKDKHDCCILDSDGTIRADCITIPNNMDGFKQLLQTIRDCTKKSDKIKVGLEATGHYSYNILGFLLDNDLAVYVMNPLHTNLYRKSLSLRKTKTDRVDARTIATMLLSDVDLKSYTDTAYHNEELKSLTRYRFDKVRERAKLKQSVSRLVTILFPELEKLVPSLHIASVYSLISEYPGAKQVSEVHLTKLTNLLATASKGRYGKDKAIQIRDAARTSIGSVMPAKFLELKHTIKLIRELTSEIDEIEVSIQKIMDELNPPILSIPGVGIQSAAMILAEIGDFSNFESPDKILAYAGCSPSTYQSGKLTNCYAHMEKRGSRYLRYALYNATKYVCHWNPVFAEYLAKKRAEGKHYNVALSHATKKLVRLIYALQKSGKAYLVAA

SEQ ID NO: 499715 - protein, 450 aa, unidentified
MREPQEIDDREDEQPAARVAAVDVAKASGVVCTRMPRQGEPGRFVTKVWPVEATTNAILELADHLAGLRIEKVVLESTSDYWRPFFYLLEAAGLTVELVNARDVKNAPGRPKTDKLDAVWLAKLAGWGMLRPSFVPPAEIRVLRDYTRLRTDLTRERTRHWQRLEKLLEDALIKVTTVASRIDTMSVRDMIEALIAGQRDPRKLADLARGRMKAKYAALVEALTGRFDDHHGELATILLAQIDGLTSQIDQLTTRIEELITQIPAAQGVDPDGTTGPHAGNGPDAPVLPALDRLAEIPGISRQAAQVIIAEIGLDMTRFPTAGHLVSWARLSPRTIQSGARTRPGKTAKGNPYLKGVLGDAAAAAGKTKTFLGERYRRLVKRRGKLKALVAIARTILVIIWHLLADRAARFDDLGDSYYITTIRTDRKLRSHIRQIQALGYNVTLSPVAA

SEQ ID NO: 499716 - protein, 343 aa, unidentified
MVGELYVGLDVHKLTTVATILDAQGKRVDQARLGSADDVLVSYLKRFPPPQHVVLEACNVWPHIYDAARSTGADVTLAHPYKVRVITEASLKSGKVDSEALAQLLRLGSVPMAYAPDPTIRDLRQLVRDRVFYVHQERGIKNRLYSILLRRGITYEDGIFGLKRKRETLRELHLPEIDRGLDVLTHLDESCVELDRAVHEAFLASKEAQLLESIPGIGELTAVALVAELCPIERFPNVEKLCSYVGLVPTNHQSGDTSYQGHLKPDSNALVRWLLVDASWTHRYKAKGSDVSKVAKRVSRRRGKQKGNIAGAHKLLKIVYAVLRRGTPYTPERPSPEALSAKS

SEQ ID NO: 499717 - protein, 430 aa, unidentified
MNHMTDTNTTHAPEQFAAFIAVDWADEKHAFCLQAAGQKQKESGTLQQKPELIGAWVAALRERFGGRAVAVALEQSRGALIHALLGYDFLVVYPIHPTTVAKFREAFKFSGVKSDPLDTDQILEILTKHLDLLKPLRPDTQETRLLARLVEDRRKAVELRASHIQALKASLKEYFPQALEILSGNVTSRLAYAFLKKWPTFENFQQAKPSTVKRFFYGHNVRSPQRIEQVLQVALKSRALTTDTPVVESGVRLSQMHGEVIHTLNPLIEQYDRKIEAAFNDHPEAKLFTGVPGAGPALAPRLLAAFGTDRSRYDAADNVQSFSGVGPVTKSSGKTRVVYARSACPKFLRQTFHEFARLSVAQCQWARNYVDYYTGQGKKYQTVIRALAFKWIRILFRCWKDRTPYDDQKHMKRLEQRGSIFATLHLQKTS

SEQ ID NO: 499718 - protein, 412 aa, unidentified
MEAAYYVAGIDVHKKMLAVVIANARDRELRFECHRFGTTVNELQNLSTWLGERAVQEVVMESTAQYWKPVWLALEGQFQLWLAQARSNRGRRGRKTDFRDAKRSVSRLLSDDLILSYVPGREQRSWRTLTRTKYQLTRDRVRLQNQLESLLEECQIKLSSVVSDWLGASGRRILRAIADGETDPARLRELGDRRLHATEADLTDALNGQPQPLHRKLLLLYLQRLDVIEGQIAELERMIAEAMKAHEDSVVRLAELPGLGVDSAQQIIAEIGPGAEAFPSAPQLASWVGVCPGRQESAGESTSNRSAKGNRAMRRLLNQLAHAAVRKRDCYLQILFQRLSPRLGYAKAVWAIAHRLCRLIWKVLHEGVHYVERGPAVSALTLKRRKQRLVTQLKKLGYGVQLTPLSGIAMDT

SEQ ID NO: 499719 - protein, 396 aa, unidentified
MQIKPAAGLTACKGGHFMYRILKIGMDVHTTNFTLCALESKFGEEDVVLANITVGPDHKNVLDFVRRIQEKMDPKGKDKIDVECGYEAGCLGYSLHRLLTACKLKCTILAPTTMHSEKGPRIKTDSRDAKLIAQCLSNGGYHAVHIPTAEDNAVKEYIRMRDDHKVALKRLKQQINALIIRFGFLYDRTKWTGTHLKWLRALSLPELIRETLDEYLATYDDLTVRIDRFDRRIQEIADQEQYREKVRKLECFLGIKTHTALSLIVETGDFNRFRKGNVYAAYLGLAPGEHSSGESGSRLGITKAGNSHLRRLLIEAAGGICKGKIGQKSKNLISRQTGNPADVITYANKANTRLRSKYYRLIRNGKKRNIAVAAVARELACFIWGMMTGNIHGNAA

SEQ ID NO: 499720 - protein, 424 aa, unidentified
MKVTYQTCCGVDVHKSFLVATIVKTTGGIEPSYQKKRFSTFNNSILEFKQWLLDNHCHDVCMESTGKYWVPVFNLLEDKINVVIANPKWVKAVKGNKDDTKDSKWIGDLFRLGLVKGSYIPCKKVRILREYTRYRYKLVSCRSSEKNRYQNALTVCNVALDSIVSDIFGKSSTSIIDYLLEQSGTSINHEEIASKLLRSLKSKEDAVIESVEGYQMTDAQKYRMRLVRAHMDYITAEINDVDKMIENMISSNPDFENAVQFLCTIPGVKRDSAITIISETGTDMSQFSSSKRLCCWAGLTPGSNESAGKKKSVRITRAGVYLKPALVQCAHAAVKSDKSPYYKKKYESLVKRRGKKRAIIAIARMILTAIYQMLSTGEQWNPSDLYKIDMPVALVEKQKAKAIKQSKKLLQREGLLPPDEPLAS

SEQ ID NO: 499721 - protein, 313 aa, unidentified
MSDNLPQTIGIDISKASLDCHVHPVAAERQFANTAKGHKALIAWARQWPVERIAYEATATYHRALEAALADWPCVKLNPERARRFAQATGTLAKTDRIDAMLLARMAATLQPPVRPARSAQQAQMAELINARDGLVRDRTACLNREKNLTIALLKRQCRQRIKQIEQHIKALDTEIATFIAADAELARRHQILTSIAGIGDLTANQLIATMPELGTLDGKQAASLAGLAPVARQSGQWKGKSFIRGGRANVRQALYMPALVAARFNPDLKAKYQQLVTAGKPAKIAITAVMRKLVITANALLKANRLWQQSPA

SEQ ID NO: 499722 - protein, 358 aa, unidentified
MTGAVSPISSRAVQVIIGVDTHKDQHVAVAIDGRGVRLDEKRVPVATCGYEELERWSCDLGQVHAFGVEGTGSYGAGLARFLTDRSHTVVEVNRPDRSVRYRKGKSDPTGAEMAARSALAGVADATPKAGEGEVEMIRMLKSAKDSAIKARTQAVNQMKALVVTAPAELRETLEGLTTVALVTRCKSFRPGRLDGPKAAAKYILRSLACRHRQLNEEVQELETELERLTSAAAPALVNAFGIGSNTASSLLIAAGSNPDRLRSEASFAALCGVNPIPASSGKTNRHRLNRGGDRQANAALYRIVMVRLRHDPRTQEYMQRRTAEGMSKSEVIRCLKRYVAREVYSTIQKPAQPIEKAA

SEQ ID NO: 499723 - protein, 354 aa, unidentified
MIIIGCDYHPGFQQIAFVDTDSGELQERRLQHREESETFYRELVAQGVGVRVGMEASGQARWFERLLAELQIELWIGDAAEIRTKRVRKQKTDRQDAQLMLKLLLEDRFPRIWVPSGENRDLRQLLWHRHRMVQARTRIMNQLQAVALNEGLRRKKGLWREAGRKQLEGFRLAPWASRRRHDLLELLDRLTPTIAELTQAIEREVEKCPEAQRLTTHPGVGSLTALAFVLIIGRAERFQCGKQIASYLGLVPAEESSGDRQRLGHISKQGNALLRFLLVEAAQVTVRSNPEWRRKFFHLAMRRGRKIAKVAMARRLAVQLYWMWRQEWDYEQLKKFSPHAGQPGTGVGVQSNTE

SEQ ID NO: 499724 - protein, 318 aa, unidentified
MNTNTLQNINVGVDTGKSQLDIYIRPLDIYFSVSNDKAGIDKAIKNIKKYSPQRVVIEATGRLEMPFIMACADAKLPYVIANPLHIKKFAGAIGRKAKNDRLDAALIAHFAEAIKPKLTQLKPEKIRLMSDLVARRNQLLAMQTMEKNRLQIMPKALASSITPVLTAFKKQVQKIEEKIIKLIEQCPEYTAKNAILQSMPGIGKIAAASIISNVPELGYITNKQAASLIGVAPITKESGKYKGKRIIQGGRHQVRTVLFMAMMSAMQCNPVFKATYQRLLDAGKPKKVAIIACVRKMVVILNSMLRDGTMWDENTSKI

SEQ ID NO: 499725 - protein, 363 aa, unidentified
MFTERTSVGLDVHARSVAAAAIDSDTGELIQARLSPSKEQITHWVQALPGPVAVTYEAGPTGFDLCRALMAVGVRCEVAAPSKVQRPSGDRVKTDAKDAVHLARLLRMDEITPVAVPSVDQEAARDLVRAREDARGDLMRTRHRLSKLLLRHGIVYSGGAAWTGRHDAWLRTSALPQLTSAATRLTFDSDYEAVRGTLARRDRLDAHITQLAADSEFTPVVHRLGCLRGISTLTGFALAVEIGDWHRFTGNTIGSFVGLVPSEHSSGQSRSQGSITKTGNTHVRRLLVEAAWHHRARYRIGKTMRDRWDQAPAGARARGDVGNRRLHARWVNFLERRKKPTIANVAVARELAGWCWSLAVMDD

SEQ ID NO: 499726 - protein, 369 aa, unidentified
MKKNSKNNKEKTRQRALQAKSRKMKLTVGIDLGDEWSHCCFLGEEGEIVEECRVKTTREAVKSRFGELKLAVIALEVGTHSRWVSQMLSEFGHEVIVANARELRAITGSDRKSDRVDAEKLARYARVDRRILRPIKHRGEEAQVDLVVIRARGVLVKTRTQLVNSVRGVVKSFGYRMPNCSTERFVKLNNEVPEKLREHLAGLMEVLEHVQKQIEEYDQRVEKLAKEKYPETTVLRQIWGVGEITSVSYVLTIEDKGRFEKSRDVGPYLGLRPRRSQSSESDPELRITKAGDCFLRSLLVECAQRILSKKGPDTALKQFGLRIEARGKKKAKKRAIVAVARKLAVLLHKLWVTGEVYEPFPETTVRKAA

SEQ ID NO: 499727 - protein, 415 aa, unidentified
MKKINKSSNEKKLQTIGKNAAKVEKAPESEQITKVKRQQRLNVQFLLQKLEAAKNAPKEAAPEDNVEYWIGIDLGDKKSNYCILDKNAEIVAEGSMATTVTEFDMYFKAMPRSRIALEVGTHSPWTSSLLEKLGHSVCVANPRKVGGGKKKGNRKNDKLDARTLARLLKADPKLLYPIQHRGETARHSLVLLRARQAVMEVRTKLICAARGLVKSDGKRLPRCSAESFHKIERTEVPEALRHTLEPLFKQIESLTEQLKEYDKEVKRMCKEAYPETEILRQVNGVGAIVALAFILTLDNPRRFAKSRDVGAYLGLIPRQYESGDSRPQMRITKTGDRMMRALLVQSAQYILGPFGKDSDLRRHGLKIAARGGKNAKKRAITAVARKLSVLLHSLWVTTEAYEPLRNSTPKEEKAA

SEQ ID NO: 499728 - protein, 352 aa, unidentified
MHYVGVDLHKQTSWFYTLDSSGNRVDSINLTNNHDILKNYFKKIPKPFTLAVEATYNWYFFVDLAREYTNSVFLANSFELKAFAKKHKKTDKIDARLIATVLYKGYLPTVAIADKHTRQIRELLRYRMKLVIDRSRNISRLKALLDKLGYMSSGNFTTFKALENIKMEDLPDIYKSLIERYRELIIYLSKKIYEIEKEINKLPNEDIDVYNLLSAPGIGPFSAALIKSEIIDIKRFNSFNRLCAYSGLAPRVSASANKIYHGSLNVNRRKNLQWILLENVKHFVEADPERAKKFCEIKCRKGYNTAKVILARDFLKVIYHILKEQRPYYGQKRSVEHKIKIQSVAAAALIGV

SEQ ID NO: 499729 - protein, 357 aa, unidentified
MGKSIRNLSTVTRVGLDLAKRVFQIHTLDAKGEIVVVRKLTRSQLLPFFATLPPCGVAMEACASAHHWGRALIELGHEVRLLPPAHVKPYVRRNKNDAVDAAAICEAAGRPGQRFVPVRSIDNQAELMRHRARELLAGQRTAALNALRGHLAEIGLIAPQGAHYAYGLKRMAADGFNENGEIVVPDCVRAALRSLVGQIDALDEAIGAIDRELAASVKADETAKRLMTIPGVGPVTASAIMATIQDASAFASGREFAAFLGLTPRQNSTGGKTRLGRITKMGDRYLRKLLVIGACATLRHRKGHNDAMRLWASGMLERKTVKYKFKLTAVALANKVARIVFALMTRGGQYDDRPVTA

SEQ ID NO: 499730 - protein, 330 aa, unidentified
MKEENLVGIDVSSKEAVAKINRSGKSRVLATFSNDIDGHKKLIKWAIKGGKTARICLEATGVYSFELAMALHDHPRTSVMVINPRALRNFAQALMQRAKTDPIDAEVALEYLERMPFQTWHPPCNEVLELQAISRRIWQLKKEMNQTSNRKHACLKRSSVCRTVINDLDVHIRHLKRRMKQLESDALKVVQNLPDLESKFQHLISVTGIATASALRILAEISALPEDMQPEQWVAHAGLDPRPFESGETIHKHRYISKAGNKYLRAALFFPALVAIKKEMHIKAFYSHLIAKGKKPMQAVVAVMRKLLRTIWGMLKYDQDFDGNKFYKLA

SEQ ID NO: 499731 - protein, 404 aa, unidentified
MAVIIGIDPHKGSHTAAALDKTEGVLGELRVRSAATQLEHLLAWAVRWPERTWAIEGAGGLGYLLAQQLIAAGERVVDVQPKLAARVRLLATSSTNKNDPNDARSVAIAALRSPEAKEVQAEDHAAVMKLWAKRRHDLVSARTRVVCRLHAVLCELVPGGFSGQLYASRAAKMLDQLEPENAVAAARHELGRQLLEDLRRVDEQMLETKKRIALAVAASKTTLTEIFGVGPIVAATVIGYVGDATRFASSDRFAAYNGTAPIEVSSGPRKIYRLSRRGNRRLNHAIHMAAVTQIRNLHSEGRTYYDRKVAEGKTGKEALRALKRRISDALFRQLLIDTQQARKSIMGPGGQTGNDSVACVTDSHPDGRLFGEATPEPGTTLRPAATAIRSKRSRTVSRKIERAS

SEQ ID NO: 499732 - protein, 315 aa, unidentified
MKPTLAQNVGVDISKDFLDVVTSPAGEAIRFANDAKGHRALIKRLAAFEVIRVVFEATGAYHRLFERTLAEAGLPMVKVNPRQARRFAEASGQLAKTDRCDAAMLARMGAALALEPRPVVSQTTDELKELLGARDALIKDRVAALNRRKTALSALIKRQLAQRLRQIDAQIDAIDQQQKKLRSADSNVQERYQILTSIPGVGDVTANVLIVEMPELGQLEPGQAASLAGLAPIANDSGKSSAKRSIRGGRSRARQALYMPALNAVRFYPHAKAKYDAMIKAGKPNKVALVAIMRKLAILANALLRDSRKWSPQKP

SEQ ID NO: 499733 - protein, 563 aa, unidentified
MTLRKNKIPLLWELPVWISCGDEVFPFPQQGAFQMAFSVRTTHRRRRKPNSKTARKQRSLQKPNGAISGRVQKVGGGKFAIVCVDPAKHRSEWMMADYFGNLLIEPQTVEHQAAFFKLAVEQIRQVQQEHDIQDAIVVVERTGNYYLPPKRAFASAGFETRVVHPFVTKHYRVPADPGNKTDETDLYAQHRAAVAGFGLCEFELESPYRELQLRARHRRNLVEKSAALACQIRDHLHLAMPGYANLFCRLFETQSAWAIAHRCDSPGAVIELGHAGLRQHLREQKIAHRAPTLDKVLTWAAQAVHDPIQDGTSHHAIWTDLHELYQHFQRKIAALEQQLASDVVQTPYVRLLAIAGINVVSAAELAGEMGPVKHYANANAITGRSGLFPSRHQSDQTDHGDGPIIRQANRRLRGVLMRIADNLACHCSYYRGQAEVDHSRGIDKRASRVKIAKRFSRLALACVAGDEPMRHPCFKAPDSILEKLRRFHHEHKTPMDRLLTDLDTAVDQLPYHTRGREAELVANILEQQASRRRGSVAIGEVLPAVLARLGIHTTNNNESGDRP

SEQ ID NO: 499734 - protein, 414 aa, unidentified
MFAVGVDVSNGRSTVAVLQTKTSALMKPFEIPHTAEGFASLAGKLAGLDGEVRIVMEHTGRYYESFARAMHSAGFFVSAINPLAIKNYQDGINIRKVKTDKADAMKIARFALDKWEILPQYTPMDTIRYDLKTMHRQFQLSSKTKTALSNNLVALLEQSYPGANRYFDSPARPDGSQKWVDYVDTFWHVDCVARVSQNAFVERYRKWCKRHGYNFSQQTAIDLHTDARQKFALVPKSDTCKLLVREAVSQLNAVSRTVETYRTEMDRLASQLPEYETVMAMTGVGKSMGPQLMAEIGDIRRFPHQKSIVGFAGTDPIKDDSGDKVSDSKPSSKRGSPYLRKTLFVIMSILLQLHPQDDPVYQFLDKKRSEGKPYYVYMTAGMTKFLRIYYGKVRDCLKEQGLWEQTPDAPGMAD

SEQ ID NO: 499735 - protein, 391 aa, unidentified
MIYVGIDVAKNKHDCFITNSDGKVLFPVFTIQNNRDGFDDLFSKIQSTSSDMSNIKVGLEATGHYSYNLLGYLIDKGLPTFVFNPLHTNLYRKSLSLRKTKTDKVDARTIAMMLMSDVNLKSYSDTSYHNEELKSLTRYRFDKVQQRAQLKQSVSRLVTILFPELEKLVPTLHIASVYALLSELPSAGKIASCHLTHLTKLLENASKGRYSREKAIEIRDAARASIGSNMPAKSLELKHTLRLIGELDSEIAEIESEIKQIMDQISSPILTIPGIGYRMGAMILAEIGDFSRFDSPDKILAYAGASPSTYQSGQLESSYSHMEKRGSRYLRFALINAAKYVCHWDETFGAYLQKKISEGKHYNVAITHATKKLVRLIYAMEKSGKPYIKTA

SEQ ID NO: 499736 - protein, 367 aa, unidentified
MKKTITTTGKASTKMRSQKLTIGLDLGDRSSWYCVLDECGEVILEQKLSTTPKAIREVFGGMPRSRIALETGIHSPWISRLLTELGHEVIVAHARNVRLIGESRRKDDRLDARTLARLARIDPQLLSPVKHRSQKAQAHMAVIRARAGLVRARTSLINTARGVTKSYGERLRGCNARNMNREEAEGLSPELQTALQPLLDGIESLTERIREYNERIKSIAQENYPETALLKQVKGVGTLVALTYVLTLEDPHRFHKSRDAGCYAGLQPGRRNSGQSEPQLHISKEGDAYLRTLLVQSAHHVLGPFGADSDLRRWGLKLAERGGKNGKKRAIIATARKLAVLLHRLWVGGEVYEPFHSAKRKVLVAAA

SEQ ID NO: 499737 - protein, 412 aa, unidentified
MEVLYPRCCGLDVHKKTVVACVLITEAGKAIRKEIRTFPTMSADLLGLADWLRECGCTHVAMESTGVYWRPIYNLLEDDFTLLVVNAQHIKAVPGRKTDVADSEWIADLLRHGLLRASFIPPRPQRELRDLTRYRTSLRYERVAEVNRLQKILEGANIKLASVVSDITGKSGHAILLALVAGTTDAAALAHLAYGTLRGKIPQLERALAGQFSAHQRFLVAHQLAHIDALDQLMDQLSAEITARLAPAAVEVTLLQTLPGVGQRTAEVIVAEIGTDMTRFPSAGHLASWVGLCPGNQESAGKHQSGRTRKGSPWLRSALVEAAQSAGRMKRQPTYLAAQYRRLAARRGAKRAAVAAAHSLVVMIYHMLSRHEPYHDLGGGFFEEREPHERERRLARHLESLGYTVTPPAAVA

SEQ ID NO: 499738 - protein, 391 aa, unidentified
MSMYFIGIDISKYKHDCCIISAANQKVVSKVIIKNNKAGFNELLTIIHSLANPADIRIGFESTAHYALNLELFLENSLLTFMEVNPVLISEYKKSKTLRRTKTDSVDCESIARWLMTVEYKPHSKGFYHAYSLKSLTRLRDKLIRQRSFYLVKITNVLDHTFPEFKPFFNERLSKTALYLLENYGSAEKMARMNSASYEKLRSVSRGKFSPQQFLRLKELAVNTVGVNNSIFDVELNSLLSLYKSLVKEIDTIEKEINKLIEEVHPHYMSVPGIGPLSAAVIYSEYGDISNFTNPGQMLAFAGIEPGINESGTESHGGKMVKRGSSQLRYTLINCCLPLIRFDMTFATYYAKKRGEGKPHRVAITHVAKKLIRVIYALESQDIDFNAQELR

SEQ ID NO: 499739 - protein, 333 aa, unidentified
MKFYTGNHNFYCGIDLHARKMYVCMLNNSGKIVLHKNIKTDPEIFFELIFPYLEDIVVGVECMFSWYWIADLCHEHHIPFILGHALYMKAVHGGKTKNDKIDSRKIAALIRGGNFPLAYAYPKRMRSTRDLLRRRMHLMRKRAELLAHIHNTNTQYNLPVIGEKIAYKANRKGIAERFQDPSVNKSIQIDLAMIDTYDKLLQDVELYILKHAKAHDANTLYLLQTIPGVGKILALVMLYEIHDIGRFPLVQDFSSYCRLIRPEKESNGKKTGKGNKKIGNPNLKWAICEATIILLRESEQAKKLHQKLIKKNGEGKALGILSNKLGRAMRYSQ

SEQ ID NO: 499740 - protein, 347 aa, unidentified
MGTPSYEGKQVYMGLDVHREFFVASCICDGVVVKRCRMPGTAEAVISLVSKEFGGASVRAAYEAGYSGFWLYRRLVAAGIECRVVHPASIEVSSRDTVKTDKRDSLKIAQQLAAGRLRGVRVPTEEAEQRRLLTRTREQLMNKKRRVMVQIRMRLHYFGLFPESIQRRIKLQDVEDILVGLEGELQHTIGMLRDEWAELAQRLKELDRLLVEQAKEDPLDAVYRSVPGVGPLISRILSTELGDMSQFRNERALFSFTGLTPSEYSSGGHICRGHISRQGNTRLRHMLVEAAWKAVRKDPVMREYYIKLSERIGKRKAIVAVARKLAGRIRAALRKHEHYTLNYKAAA

SEQ ID NO: 499741 - protein, 508 aa, unidentified
MGRSPEPTVNNFAAARSEKSFSPNLRPAKVRAGRIAPRRTRSDVAKPARLQLRTPVGAAARPPTSERTAPCEGPDTSTTRGQPTMHKQEGRISMRTYGELKYYGGLDWGKRQHQVNILDGSGRVVARFGFEHSGSGWAQFRERIQAYPELGMAIETSAGPAVEQLLRSGVTIYPVHPKAAKSYRQRQAPSGVKDDALDAWSLADALRLDGAKWRALREQDPILEELRLLCADEAALIEQRTALVNQLQQALQEYYPAALEAFDDWTQAYTWAFVKAFPTPQKLGQATGHRRKVFLHTHQLWRSDTAPQRLAIFARAEGFCGGESVTRAKSRLALALCESLQTLERQLEEYRAAIERLFGEHPDHDLFDSLPGIGPKLGPRLLSGVGSERAEYPQAQGLQCMAGSAPVSYQSGQMRVVKIRWHCDRFLRHTVHLWADTSRKTCAWAQTYYLAKRAQGKSHSCALRCLGQRWLKILWKMWQTHTPYDPEFHARNQQRHGSWVLQFQPAKA

SEQ ID NO: 499742 - protein, 340 aa, unidentified
MAMTVKLGLDLHARDVVVCRQNDGQQPKPVCRMTHKELLDLVAGLIAAGHRVESCYEAGPCGYGLHRKLIQMGARNRVIVPRKWDAEGRRVKTDRRDAREICDALDRYLRGSTTAFSVVYVPTEEQEETRALGRQRGMLVKERQRCVVRGHGLMLTAGVQADPDWWHPKAWSELAKTLPPELRARIETWQRQALHFESEIEAWTKRVESMGEKQILVKGLGLLTNTLLGMEVCDWARFGGRRKVGGYSGLCPSEYSTGTRRRQGSISKHGNPRMRHLLVEAAWRLLRWQPDYPPLKKLRQALGARARKRAVVAVARRLAIDLWRIHTGRCTPEQLGLKVG

SEQ ID NO: 499743 - protein, 474 aa, unidentified
MPVCLIHETSRENVMKTNKQSKQIKNKRISKHLEQVNLFAAGIDIGSQSHYVSVPEELATESVREFPCFTGDLNRMADWLVEIGIQTVAMESTGIYWIPAYEILEERGLVVLLVNSRHIKNVPGRKTDVLDCQWIQQLHTYGLLEGAFRPEEETVALRTYMRQRETLTQQASDQIRRMQKALRQMNLLLDNVVSDIDGITGMKIIRAIVDGERDSIILAKYRDGRCKKDEKTIAASLEGHYREEHLFSLKQSVELYDIYQTKITDCDKAIQAQLDKMDNKGDKKDLPPSKKSKSKNTPKFDVRGDLYQMTGVDLTRIDGLNESSILKILSETGSDISSWPTEKHFCSWLGLSPGNKVTGGKILSGKTKPSANRAAAAFRLSAFGLLNSKSALGAYCRRQRTRLGAPKAITATAHKLARTFYSMLKNGTEYVDKGQDYYEKQYQERIISHLKKRATEMGFELIAKDISMLEISKA

SEQ ID NO: 499744 - protein, 343 aa, unidentified
MAAITTVGLDIAKSVFQVHGVDAQGSVIVRRQLKRRYVLAYFKKLPPCLIGIEACATSHHWSRELQALGHTVRLIPPAYVKPYVKSQKNDAADAEAICEAVQRPSMRFVPIKTPEQQSCLMLHRTRHLFIRQQTAVINTIRAHLAEFGIVAPVGRNGVEDLLYAVADQKDERIPDVARACLEALGALLSRLKAQILEFDRQINAWHRSNETSRRLDELPGVGPTLATALVASVADPKAFRSGRDFSAWIGLVPKQNSSGGREKLGSITKQGDRYLRSLFTAGALAVIRYAKIHGTKHRPWLARLLERRPTKVAAIALANKLARMAWAMMAKGESYREPVALAR

SEQ ID NO: 499745 - protein, 349 aa, unidentified
MTLYIGVDFHPHQQTVAWCDTETGETQTFDLLHNLEQVREFYTSLPEPAIVGIEASTRAAWFENMLFETNHKLLVGNPVLIRKRAVSRHKNDRRDAELILELLMRNEFPALWRRPSESNQVLEILRLRLNLVRQRTQVYNRLQALAHNVGLPKGRMKTPAFQALIKAVDMDEAGNLGRTHLFGLLGKFNEQIAELEIWLKQKAAPDKKAELLLTQKGVGYLTALATVHTLGDVSRFAKVSKQVIGFAGFDPLESSSAGKIRFGRISKAGSALLRFQLGQAAQMAARSDVKLKSFYKRLAKKKPKAVAKTATARKLLVKLSIMLRDHITAQEFDRRGQAVGNARKSQGLQ

SEQ ID NO: 499746 - protein, 339 aa, unidentified
MKLYSAIDLHSSTNNLAIIDDDMKRVFAKKLTNDSQIILDALSHYQEDIVGVVVESTYNWYWLVDALMDEGYQVHLANPCAIQRYSGLKYSDDTHDAFWLAKLLKLGILPEGYIYPKQERPVRDLLRKRGHLVKLRTSLVLSLQNIITRNCGVKVCSNDLKKLTEDCVSAHLCGNEDLSLCGNVSKESIDVLTRQIRRIESFVEKKLKVTEPYTNLLTIPGVGTILALTIALETGPIRRFPTVGNYVSYCRKVASAWLSNDKRKGTGNRKNGNKYLSWAFSEAAEYARRYHHASRNFYNRKLSQSNVWVAHNALAHKLSRAAYYIIRDRVPFAEEKLYS

SEQ ID NO: 499747 - protein, 416 aa, unidentified
MLFIGDDWAEDHHDLEIQDEDGRRVARARLPEGLEGITRLHALVAEHAPAVWADMPPEQVAAQVIVGIETDRGSWVTALRAAGYQVFAINPLSAARYRQRHSTSGAKSDAGDAHVLAEIVRLDRDHHRAVAGDSDLADAIKLLARAHQTAVWERTRQVLRMRSALLEYFPAAVRAFEDLAAPDALSVLRRAPDPDRAAKLARGHLVAALRTARRHHVETKADALLAVLRAPALRQPVTLQGAYAAVVTGQVGIITALNGQIAGIQEVMAEHFGRHPDADIYLSQPGFGVVLAARTLGEFGDDKDRFADARARKNYSGQSPITRASGKKTVVLARYATNRRLGAALHLQAFSALGASPGARAYYDTLRGRNIGHHAALRQLANRLVGILHGCLKSGTVYDENTAWQHLRTDPQRAAA

SEQ ID NO: 499748 - protein, 352 aa, unidentified
MKYALEQESILGVDTHLDVHVAAVINQFGQLLGTQSVSTNTAGYLQLFQWASAFGALKRAGVEGTGTYGAGLCRFLCDKGIMVLEVNRPNRASRRLNGKSDSLDAENAARSVLSGVSKAIPKQQSGACEAMRIVSVARRSAVKAKTQSINQLRAMLVSAPQSVREELWKAKASDCAKACAMIASLGDTVVLKALLTTLKSLAKRWLALSEELKDYDQQLETLTQEHAQQLRSRFGVGPQTAATLLTVAGDNPNRLKNEAALASLCGVNPLPASSGKTTRHRLNRGGSRTANNALWTIAMVRMRSDPRTKIYVERRTHEGLSTKEIHRCLKRYIVRELFPLIMGDLGALAGVP

SEQ ID NO: 499749 - protein, 353 aa, unidentified
MLAEMVDHVVGVDPDRDWITTAVVDAATTGVVATARFAASGSGYREAMAWADEYSTDTERAWAVEGTSSYGRGIAAALARSGEWVIEFDRAKEKASKDGAKTDTLDAVRAARETLGRDKWASPRSPDGVREALRVHAVARDSAVQARTAAINELKAFVVTAPDHLREQLRGLKRRSLVKRCAGFRHSDKQPIDEQCTRAAMKAVARRIVHLADEIKAHEKTLRLLVEEAAPQLLGEFGIGPITAAALYVAWSHPGRCRNEAAYARLAGVAPIPANSGQTQDRHRLNRGGDRQLNNALHTIAVTRIRAHPQTQVYKERRLTEGKTDREIRRCIKRYIARRVWRLLENPPLETAA

SEQ ID NO: 499750 - protein, 308 aa, unidentified
MTFAGIDVSKTHLDLALVSNSPKPTRLRFPNSPEGRQALLAALAHHNPAWVALEPTSAYHLPLLKLLAENRLQVALVNPYHLAAFRKAKGERQKTDRQDALLLARYAQVYHEDLRAYTLPPETLRELKALVGYREDLAGRERTILNQMEAAEWAGSKEVLALLQKELACVKGLLGEVEARIQALLATLPEAEVLMALPGVGPQVAAAVLALLPPELWGRAKRAASYAGLIPEREESGKSVERSRLSKKGPPLLRRKLYMGALVAVRHDPEMRAFYHRLLSRGKRKKQALLAVAHKLRSCKDLCVRVRV

SEQ ID NO: 499751 - protein, 423 aa, unidentified
MKLATEHQFTDLVGIDWADRKHDFCLQATGSDRRESGVLVHNPESIAQWASGLHRRFGGPIAVCLEIAKGPLVHALQRHDFLVLFPVNPAMLAKYREAFVPSRAKDDPTDAEIALELLLWHRDKLQALQPQSADMRTLATLVEQRRGLVGDKTRITIRLNITLKGYFPQVLDWFEDRHTMMFCDFLYRWPSLKQVKRARQATLRSFFSAHNLRRARLVEERINGIRAASALTDDPAVIRPHQLLVQALVAQLRVTLQAIDDYDAAITAVAMRLPDYQLFAGLPGAGSILAPRLLVAFGEQRERYRSAADLQNYAGVAPVLERSGNKSWVHWRLACPTFLRQTFVEWAGSTIPRSFWAGAYYERQRAKGCSHHAALRSLAYKWIRIVYRCWQTRTPYDESVYLNALKRRGSPLIAHLATTARTT

SEQ ID NO: 499752 - protein, 384 aa, unidentified
MNNDTIVFIGLDTHKSFIQVAVLQGHRGAKPDHLGRIKSNKSALIKLAQQLQSKYPKATLHFIYEAGPCGYWTYRLLTSLGHCCYVIAPSLIPKKTGDRVKTDKRDAAKLAKLFKAEELTPIYVPEAEDEAIRDLSRARETAMKDLKDAKFQLKGFLLRNNIQATVNDNWSKKHLRWLTDLILPHHSQQIVLQEMIITISERIQRLQRLDNELLHQVKNWRYYPVVKAVQAMRGVRLLVALGTIAELGDLRRFDHPRKLMAYLGLVPTESSSGGKTRRGSLTKCGNSRARRLLIEGAHTYRHKANISVELQHRQEGLPKEIVDIAWHAQQRLCRRYQRLLQKGKHRNIVVAAIAREMIAYIWAIAREVVVSEVDPKARIARLPA

SEQ ID NO: 499753 - protein, 321 aa, unidentified
MQQPAVFIGVDVAKATLSWSTHGSPGQHDLGNDEASITTWLQTVAKDAAIAVESTGKYHLSVVRLAYLSGRRAYVLNARDVYFFAKARGVRAKTDGTDARLIASYLAQHHAELKPWTPPTPAQDRVRSLLRCRAAVSAKRSALRQVLEEVDGLGAAVNELQAKFDSLLQEIDSQVTTILEQDTQLASKRAQLSTITGVGPQASALFISLFSRIQFANVNALIAYTGLDPRPNDSGNKIGKRRLTKRGDTELRRQLYLCAFAASHSKALGPLYRSIKAKGFKPTEALVILGRKILRIMWAVWNSGKPFDPSLVAPQEACSKT

SEQ ID NO: 499754 - protein, 346 aa, unidentified
MGKAITDFSLVTTVGLDLAKHVFQVHGVDVSGRVVVAKSIRRGKLLEFFASLPPCLVGLEASGSAHHWARELIKLGHDARMMPPAYVKPYVRRQKNDASDAAAICEAVRRPSMRFVGARSLENQAALMRHKAREMLVSQRTQLLNGLRGHLTEIGVIAAQGPRHARELAALIEDCDETIPIEVCEAVAPLVVQLRNLDEAIARLDRAIARIAHKDDTARRLMSIPGVGPITASAMAANVQDASSFSGPREFAAFLGLTPKQNSSGGKPRLGRISKMGNRYLRKLLVVGAHAVLFHRKPHTDPLRMWAKKLIEKKPFKLVAVALANKMARIAFAILRGKTVYREIPA

SEQ ID NO: 499755 - protein, 435 aa, unidentified
MEEVTDEPLYRDRVCGIDIGKAELYATIRVPSDKNPARRASETRSFATTKRGVLALADWLHCWQVPAVVMEATGDYWKGPSCRLEAEGFECVLADAKQVKHLPGRPKRDTSDSAWLAACFERGAVRPCFVPDPEFRIIRLHTRYRRDLTDERTREKNRTEKLLESAAVKLSSVVTDLHGVTGRDIMDHLIAGERNPKVLAQLARARARRKITELEHALDGAEFFTEDHAALLTAMLERIDGLNAQIARLTAVIERLLAPYEEQLQQAESQPGWGRRSAQDTLAETGPDMSKFPTGSHLSSWAGRTPLDSQSGKRTGRARHKKGNKYLGAITGETAVAAGKTQTREGARYRKLARSRGKAKAQVAVGNTQLKVYHKLLSNPGMRYQDLGPDYYQRQAALRRKIAYHVREIEALGLEVTLARIPEPDPDGPASTQAA

SEQ ID NO: 499756 - protein, 354 aa, unidentified
MPETAHTAIAVVGIDIGKNSFHVVGHDELGAIVLRQKWSRGQVEARLANMPPCMIGMEACVGAHHLSRRLKALGHDARLMPAKYVRPYSKGQKNDFRDAEAIAEAVRRPTMKFVATKTADQLDLQALHRVRERLVSQRTGIINQIRAFLLERGIAVRQGQRFLRAELPRILATPPDMLSPRMVRLIEGLAGDWRRLDERIECLSGEIQAIARRDVGCERLMSVPGIGPIISTAMVAAIGTGEAFSKGRDFAAWLGLVPRQMSTGDRTILGKISKRGNRYLRVLFVQAAWVVLIKPKSWERHGLKSWIEAAKKRLHRNVLAIALANKLARIAWSVLARGRGFEARTINVVAARLA

SEQ ID NO: 499757 - protein, 388 aa, unidentified
MNYMGIDISKYKHDCFILSDFGEIVNEGFSFTNNAEGFGILERELNLCGKGHVRIGLEATGNYGINLKLFLEKIGFEFMEINPLLIKEYIKSNTLRRTKTDKLDAKAIAGYMLSKDYRPHQTEFYNKFALKQLTRFRSRLVSIRSSYLVRMTNVLDCIFPEFKPFFGNKFSVTALYILTHYQTPTAIANMNSCSYDILRRKSRGRFSMDKFVTLKALAKNTVGVYNKCYGAQLETLLDLHSQIDCKIDEVEAEIIQIINELNPPTLSVKGISEISTAVIVSEFGDISRFENPNKMLSFAGLEPGYFQSGTQEHNGHMVKRGSPQLRSTLLNCCRALRLHNETFAAYYRKKVSEGKAESVALSHMAKKLIRLIFALETKGEAFDSDKLR

SEQ ID NO: 499758 - protein, 317 aa, unidentified
MIGIDVSRATLAVACWDAFRQEVAWVCELPNSAEGLAQLVARTAPGECWALEPTGRYSELVVRTAWAYGRRPLLTPPKAARKFLSSLNLRAKNDRLDATGIARYAAVVPLRSFVLKDEAREELSQLLVLRKSISGNLTTFRQQAQALPRVRDEFTPVIKALQERLGAVDRQLAARARQQPAVKQLQAVPGIGLVSASALALRLQTMHFVTYHAFVAYLGLDLRVSDSGQHRGRRRLSRHGDAELRRLLYCCAQASVRAKASPFRMQYERELAKGLPTTGALCAVARKMAKVAWALVKSGQQYDPERVYRSRLVDRKP

SEQ ID NO: 499759 - protein, 347 aa, unidentified
MDHIGIDVHKRESQIYILAEGGEVVEQRIRTEPERFAAVLGPRPRARILIEASTDSEWVARCLEALGHEVIVADPNFAPMYATRSRKVKTDRRDARALAEACLLGAYRAAHRLSDPQRHVRGRLGVRDALVRTRTRYISLIRALLRQHGYRVPSGSAERFIHRVQALPLPGRLRSVIAPLLAVIGPLNQQLTYSDATIEHLAVQDPRVPRLRSVPSIGPVTAAAFLAAIDDVGRFHHAHQLEAYLGLVPREYSSGDTQRRGPITKAGHSRTRWLLIQAAVSILRRDLPAAEELRTWALRIAARRGKHVAVVALARRLAGILYALLRDGSVFEPQRVRPPRPTALVAM

SEQ ID NO: 499760 - protein, 385 aa, unidentified
MEATRIGIDIAKDLFHLVGMDSRGKMLWRKALRRQRVLEWLAQIESAQVGMEACATAHHWAREIQKLGHEVKLIHPTFVIPYRKSSKNDFNDAEAICEAMSRANMRFVEIKTVEQQDIQTLHRIRRLAIKQRTQVANQLRGLLAEYGIAVRQGITPLRREATELAAETGRLTSGMRRAVTDNLEQLELLDRQLRALDRDIASYCRTDERCRRVAEVPGVGPLTATAIVAKVGNARQFPNGRALAAYLGLVPRQNSTGGKTVLLGITKKGDRYLRTLLIHGARAALQVASRHDDRRSRWALQLRRKSGPNVAAVALANKHARVLWKLLTSGEHFRPQPAADQPEIDGEGARKGSQTRKSRSSGAPARPVYPPRAPSPHTAPKSLSD

SEQ ID NO: 499761 - protein, 349 aa, unidentified
MKILAIDLGKTKSVACVYDVDSGSATFRKIPTAAAAIQGLLTEHRPDRVVIEVCPAAGWIGDLVSCGCTELQLANTAAPAWRWSNTKRKTDRDDALRLAQLSALNQLPQVPATPRPTRQWRALIRYRHHLVRRRTQLRNRIRALFDREGLVLPQGKICWTQNGTAALRKYACDVNEVDDDDLWRGELDCELDALQSVDELITRVESKLNVLEQKQAKCRLLRTIPGVGPRLAEIVVAVLGDPHRFQNSKHVGSYVGLAPRQYQSGDSDRKGHISRQGNGLLRAMLVEVSWVSLQYNDWARSVYERVRRGSPARKKIAIVAVARRLLVRCWAMLRDTTCWRQPTLAGSRG

SEQ ID NO: 499762 - protein, 350 aa, unidentified
MVVIGVDAHKRTHTLVVADEVGRELANRTFPATLEGHGTALGWVRTWPERTFALEDCRHLTRRLEADLLRAGERVVRVPARLMASARRTGRALGKSDPIDALAVARAALREHGLPVARLDGQTRRLRLLVDHREDLVAERTRMQSRLRWHLHEVFPGLEVAPRSLGRLHVIAALDRRLQPVEGTVAAVARELLARIRELTARINQLQQEITRLVRPLAPTLLALPGCGPLSAAKLLGEVAGAARFRSRAAFARWNGTAPIPVWSGNATRHRLNRGGNRQVNAALHRIALTQWREVGPGRAYVHRRLASGDTKTEALRLLRRQLSDEVFRRLLADETLTQAASAGKEAIAA

SEQ ID NO: 499763 - protein, 432 aa, unidentified
MKHNPSSKQNQRISRISETTLVIGTDIAKHQHVARAFNYRGLELGRRCLFQNDENGLLNLLAWAESIKQEHGLTDVLLGVEPTGHYWFPLFHFLKQRGVEVVLVNPHHVRRSKELDDNSPTKNDIKDAKVVAKLVLDGRYTQPQLPEGVYADLRVLMNQRDRLCGDLNRVKGRIHNWLDRFFPEYRQVFKDWEGKASLITLQHFPLPQDVVSAGETTVMATWKNNGVNRAVGPKRAELLYRKAQTSIGLTEGATAARYELAMYLEQYTLLCRQIERLMEQVAALVEQIPGASHMMSIPCIGLVTVAGFLAEVGDLSGYEHSQQIVRHAGLSLRENSSGLHKGETTISKRGRCRLRALLYRAALTMVAKNPEFRALHLYFTTRRENPLKKKQSMIALCIKLIRVLFELGRKQKHYDASKVLGPHREAQLQAAA

SEQ ID NO: 499764 - protein, 400 aa, unidentified
MRAVFGIDVSKASSEVAILVNSEKVHGYSMPNDAIGFSRLLKDLNTVSNPEIIFEATGVYSRRLQAFLEENGYAYTRLNPLEAKKQLDSLRVRKTDKIDAEKLAESQFILNRKPSYVQEEVYQNLRDLSRFYQNLTEDMVRTKNRLHKTLQVTFPELEQLLSAPTGEQYWNLVSSFPSKDFVLDLSPSELAEVIRQSTSKRISEKRVTLLSDKLTALAKQSYCAVKKTSPMIEEVKYYVQELLRLTKRRQGILDEMVSLAQPLPEYEILLSIPGIAETTATSIIGELGDVRRFQSANQINAFIGIDLRHYESGNFLAQEYMTKRGNPYARKILFKCIHNIAAASHTNPCHIADFYEKRKRQSQTTSTKPHTIAAVHRLVRTMYYLITHNKLYDYNLTQSH

SEQ ID NO: 499765 - protein, 385 aa, unidentified
MSELNDLSRSLTSLEQDKTIIAVIEMSQSSWLVAGIIPGIERHPLKKLEPSEEELVRLLMRWRTEATKNGQTITRFAVAFEAGRDGFWLARWLRARDIETYVIHPTSVAVSREHRRAKTDRLDTGLLKRVFIGWLRGEPDHCHMAAIPTLAEEDAKRPNREREGLVRERTRIVNRMKSCLARFGIRKFKPTLRKAPERLATLGTPEGVPLPPNTLLELRRDMARLRFVMDQIKEVEEARAQRLEQAPQEKTHAMVRLIARVIGVGIETADMLVHEILSRQLRDRRAVARYAGLTGAPDESGNKRGEKGLAKAGNARVRRGMIQLAWRFLVFQKDSALARWYRTRTESAGKKRKTMIVALARKLLIALWRLVTIGEVPAGVVLRAA

SEQ ID NO: 499766 - protein, 342 aa, unidentified
MKDTIIGVDLAKRVFQVHGASIAGEVKFRKKLTREQFRLFIAQQPACIVVFEACGSANYWAREVEKLGHEPKLIAPQYVRPFVKRQKNDATDAEAIVIAARQPEMRFVLPKTAEQQAKSVLFRNRERLVRQRTELVSALRSALYEYGHVFPIGLAHLKRMDALVQGADCDLPSLIVTECRELLAQIAETTEKITTKTKRLKALADETDTARRLQTMPGVGPLTALAVEAFAPQMGQFRCGRDFAAWLGLVPRQHSSGGKERLGRVSKAGQTDIRRLLIIGAMTRILAHARYKGPAESWLGRMLAKKPKMLVGIALANKMARQLWAMLTRNEDYRDPAMAAAM

SEQ ID NO: 499767 - protein, 324 aa, unidentified
MKSVGIDIAKDKFEVCLLDEERREKQISLPNTRGGINQLSRWLKKQGAIQAQLCLEATGIYGEPLAEAMHQRGYGVSVVNPARIKAYAASQMRRSKTDKLDAALIADYCRSQQPAAWSPPAAEVKELRALVRHLEDLKQEHRRAKNRLETQREAVVVRHLKQQIRLLEQQIEQTEQAIRDHIDRHPDLKRDRDLLDSIPGIGHLTACVLLAELGDIRRFDDVRELVAFVGLNPRQRQSGKKRSTQGISRMGSASLRAALYMPAIVAKTHNPCLNAWAETLTRRGLSGKQVIVAVMRKLLHLAYGVLKHEQPFDPHYLPNQAAHA

SEQ ID NO: 499768 - protein, 348 aa, unidentified
MVIVGIDAHKRSHTAVAVDASGRRLGQRTIGTTSEDHLALLGWAEQFGPQRSWAIEDCRHLSRRLEADLLAAGESIVRVPTKLMAHARRAARSYGKSDPIDALAVARAALREPDLPTAQLDGPARDVRLLSDHRDHLIAERTRVINRLRWHLHELDPGHEPPARTLWRPKHLTAIAARLAEFDSVVARLARAEIEDCRRLTHQIQALDEELQTIVKKLAPTLLDICGCATLTAAKIIGETADVRRFRSRHAFARHNGTAPLPVWSSNKPRHRLSRTGNRQLNAAIHRIAITQAHYHEPARQLLDRRREGGKNKAESLRVLKRRLSDVVYRALLSDAEHAASPIPLAAA

SEQ ID NO: 499769 - protein, 362 aa, unidentified
MQYYVGLDVSQRQTAICIVDETGKKVAEGKALSQPDDIHNWLTTKIADPTTIVRVGIESGAMTRWLCAELTKLGLPMICLEAFQAHQFLKSNRNKTDKNDARGLAQLVRMGGEFIRPVIIRTQVSQEDRMLLTLRQNLVKQRVCLENNIAGILKAFGFIVPRGNAASKTFHARVMAALDKADERGLKLRDAVLLSLDLYISIREQIAKLTKQVEIAAKKNPVCQRLMTAPGVGPIVALSFVTAIDVPERFSNSEDIGAYLGLTPRQFQSGEIDFHGNISRLGDSMTRSHLVQAATVLLSHSKKWSSLRAWGMKVAKRRGFHKARIAVARKLAIVLHRMWINEQDFRWSSKEAEQELAGTAPA

SEQ ID NO: 499770 - protein, 324 aa, unidentified
MFQVHGVDRHGKTVLQRKLRRAEVLKFFSKLEPSLIGIEACHGSHFWARELTSLGHMVRLVPTQYVKPFLVGGKNDANDAAAICAAVTRSGIHFVAIKSAEQQSLQSVHRMRERLIQERTAKSNQIRSMFVEEGVIFPVGLPQLRKGIVALVNDPDAHITPLLRRLGLMYLEQLKALQQWLDELVAEIAEIFKSNEACQRLATVPGIGPVIATALVSSVGDPSQFRNGRQFAAWLGLTPMQRSSGGKTKLGGITKRGDTYLRTLLVQGARAVMHFVNRRDDRHSRWIKAVMQRRHTRVAAIALANKTARIAWAILTGKESFKVA

SEQ ID NO: 499771 - protein, 387 aa, unidentified
MQATDPTSTRSTSSDQAAIFVSLELSRAVWLVTALLPGGGQKMSRHQVPGGDLAGLLSRFAELQRKAHARTGQLAPIVVIQEAGLDGFWIHRVLESEGIESHVVDPASIAVSRRHRRAKTDRIDGEALVRTLLAYKRGEPRVCAMVRVPTPDEEDQRRLCRELKTLVSERVRHVNRLRGLFFSQGIADYDPRRPDRRERLDELRTGDGRALPPHLKAVARRELEVIELLDRQIAAVKAERDALLAAAQMAEVPSKAVQMLLGLKGIGSGFAGALWSEGLFRHFDNRRQVAAYAGLAPTPWKSGKIDHEQGVSKAGNPRLRAILVEMAWLWLRHQPGSALARWYHDRVRLGGRLKKVTIVALARKLLVALWKYVTHGVVIEGAVLKVA

SEQ ID NO: 499772 - protein, 357 aa, unidentified
MTNDKYVGLDVHQASTSIAVLDWDGKMISNAVVRTTADAIRDFINGLSGTIHVTFEEGTQAAWLYEVVKRLVAELVVCDPRKNKVLAVGNKGDRIDATKLAELLRGGLLKSVFHSNHDTKVLKQLTHNYDSLVSDTTRVMSRIKAVFRGQAIPCSGRDVYYKRNREQWMTRLAEPGLRIRAQFLFDELEPLKALRREAKKVMLKEARRHKAFKILSQVPTLGPIRIAQIIAVVGAPHRFRTRRQFWAYCGFAVVTRSTDDYRFDENGPLRRSRPPATRGLNRNFNRRLKHVFKSAALQGAGKEPFKSYYQARVAAGMRPEMARLTLARKIANITLTLWKNGGQFDGHKLSEPHDRTT

SEQ ID NO: 499773 - protein, 348 aa, unidentified
MAMTIVEADRAVTGGVDTHLDVHVAAALDPRGGLLGVDSFAATPAGYRKLLSWMGAFGPVAKVGVEGTGAYGAGLTRFLRHHGVDVVEVDRQNRQARRQQGKSDPLDAVEAARAAQSGRARGAAKTRDGAVEAMRTLVVAKRSARDMRIKCLNQIRHLSFTGPEELRARLKGLSPVMLPVEAAALRPRAGSDPVLYATKLSIQTLGRRVLALEEETARIDEVLSELVASVAPSLLALYGVGVGSAAALLLAAGDNPERLRSEAAWAHLCGVAPIEASSGKVIRHRLNRGGNRNANAALWHIVMVRMVSDPRTREYVERRTKEGRSKLEIIRVLKRYVAREVYAHLPRP

SEQ ID NO: 499774 - protein, 427 aa, unidentified
MSYRIAGIDVHKRMIVVVVADVDVAGDYEFERRQYGSTPAQLRLLAAWLVEQGVEEVVMESTAQYWKPVWASLERYWKPICEKWEGTSPMSGSLHLAQAQSNRGARGRKNDFADAERLVRRLVAEELTLSFVPDAEQRLWRTVMRTRYQLRCNQVQLQNRLEALLEEAHLKLSSLVSDLLGLSGRRMLQAMAEGETDPAVVAARADCRLRATQEQLCDALGACRELHPVYRRLLKAALEEWERIEAQIAQLGQEMASLIGPQQEQVQRLAEVPGLGVDSGQQILAEVGASAATFPSDRALASWVGACPGEEQTAGVNRNRRSPKGNRHLRRILNQAAHAAVKLKGSIFALLYRRYVVRLGHNQTIAVIAHRLCRLIWKILHEGVRYEERGPAVSQRAKQRRTARMIRQLRSLGYSVELLHAAAGVPA

SEQ ID NO: 499775 - protein, 402 aa, unidentified
MNSVGIDISKGRSTVAVMRPFGEVVISPFEVRHTDSELSELARRLKSLNGETRVIMEATGNYHAPVAKLLHDAGLYVSVVNAKLVHGYGNNDLRRVKTDRKDAIKLANYGLDRWLTLPRYIPEEDTRLLLKNCYRQYRQYSKVQTVLKNNLISLLDTVFPNANRLFSSPVRGDGSEKWVDFVAEFWHCRCVSEKSEKAFANKYQRWCRKHGYNFSEEKAHTIHAEACGHIDVMPKSETTKLLVTQAVAQLRATSAALAALKHEMQSLASVLPEYPVVMDMFGVGPTLGPQLIAEIGDVRRFYSKKALVAYAGLDAPPNDSGDVTGRHKSMSKVGASSLRRTLFLVMSVYLQNAPLDEPVYQFMDKKRAEGKPYRVYMMASANKFLRIYYATVKAYLELLEQV

SEQ ID NO: 499776 - protein, 411 aa, unidentified
MDVVHERAAGMDISKRDVKVCVRVPGKRPGTFEQKVTTWGATTSQVLELREHLLTNRVTTVVMEATGDYWKPFYYLLESVLPVTLVNARDVRNFPGRKTDVSDAGWLAQLAAHGLVRASFVPPEPIRELRDLTRTRATIVQERSRHIQRIEKILEDAGIKLSSVVSQLNGVSARSILDALVAGERDPEKLAALAKGRLRAKIPELVDALTGRFRDHHAFMVNLHLTQLDHSATLIDEITARIEVVVEPFRVFRETLTTIPGVSVRVADVIIAETGGNMRIFPSPGHLASWAGVCPGSNESAGRVKSTRTRPGNAHLKAALGISALVITRQKNTHLAVKYRRIAARRGSIKAIVALEHSILVAVWKMGTTGEAFAELGPNYYSNRHPDRTKSNAINQLRTLGYQVTLTPTAA

SEQ ID NO: 499777 - protein, 362 aa, unidentified
MLYTGIDLHRRSIALCTLNADGIVVARAKIKTESQAVLAYFQQWSEPQQAVVECTSNWYWLCDLLGSQGVIPVLAHAKYLKAISYAKVKTDAIDAHTLAQLLRMGYVPEAHQLPPEYRAMRDLLRQRMVMEHKRTILMQHASSILAKFNIVDPPYSAADPEFANYVATCALPEQYTMTILMFHQQCRQVCEHKRMLETYFKARLRPSRTLQLLVSIPGIGDITGAIIASETGDIHRFPDPKHYCSYCRLAPGAKDSGGKHSHRSGSKDGNQYLKYAFTEAAIKAMMYYPDIKRFAARVEHRSNSTIARTVVAKELAKIVYSVLVRQQRCTAFKGVPIAKRSDWPRTCKPGRLTGEDALLPTA

SEQ ID NO: 499778 - protein, 366 aa, unidentified
MKKTSTVRVNRNMIFKGHKLTIGLDLGDRWSCYCVLDEAGEVLLEQKLPTTPEAMKQSFEKIPRSLMALETGTHSPWVSRLLRELGHQVLVAHAQKVQLITKSNRKDDRHDARTLARLARIDPELLGPVRHRSAKAQIHLTVIRARAELVRARTALVNAVRGLVKSYGQRLPKCGTQQVSRELAAGLNAELREVLEPLLKEIESLNERIKEYDERMEKIAKESYPHVELLKQVKGVGTQIALTYVLTLDDPHRFAKSREVGCFLGLRPGRRDSGESQPQMRISKEGDRYLRTMLVQGAHYILGPFGEDSDLRRWGLRLAGRGGKSAKKRAVVAVARKLAVLLHRLWVSGEVYEPLRNSHKALRAVA

SEQ ID NO: 499779 - protein, 415 aa, unidentified
MKVVYPICCGVDVHKSFLVGTIVSTTGGVEPHYQKKRFSTYNNDLHRFCDWLLSNGCKNVCMESTGKYWVPVFNILEERGITTTIANPKWVKAVKGNKDDTKDSKWIGDLFRLGLVPGSFIPSKEIRVLREFTRYRYKLVSMKSSEKNRFQNAFTVCNVALDSVVSDMFGKSATAITDYLISADSFDAEYCTSLLQRSLKKKADSVIESIEGYSITDEQKIRMRIVRSHLDYIQSAIAEVDSAIDAMVTQHEGLIALLQTIPGVDRNSAITIISEIGTDMEQFGSSKRLCCWAGLTPGNNESAGKKKSVRITRAGVYLKPALVQVAHAAVKATDNSYYRLKFEQISKRRGKKRAIIAIARMILTAVFQMMSTGEVWNPTDLFKVDMPQALKEKQLEKAIKQATRFLEKQGVFTPA

SEQ ID NO: 499780 - protein, 388 aa, unidentified
MNVEADKSEPFTAIRTDLGAIFVSLELSRSSWLITSLSPGGGEKMSKHSVPGGDFAGLMERFAQLQEKARLRTGQSFRIIVVQEAGLDGFWIHRALQNEGIESHVVDAASIATPRRRRRAKTDKIDGETLVRVLLAYKRGEPRVCAMVKAPTPGEEDRRHLCRERKALTAERVRHVNRIKGLLFSQGISRYQPLRRDRRERLEELQTGDGRAFPQHLKALVNRELDRLELLLKQIKTVEAARDALLAVGQTAKPAPAAMLLGIRGIGPEFAAILWSEGLFRHFENRRQIAAYAGLAPTPWQSGAVDREQGVSKAGNPRLRTTLIQLAWLWLRNQPRSALSVWFHERVSRNGGRLRKTTIVALARKLLVALWKYVTAGVVIEGVRMKVA

SEQ ID NO: 499781 - protein, 337 aa, unidentified
MTIIRIGLDSAKHVFQVHGVDENEQAVLRRQLRRSEMAKFFSKLPPTRIGLEACGASHYWARVLRGLGHAVVLMPPQYIKPYVTRGKTDALDAAAICEAMSRPAMRFVPIKSAEQQAGLMLLKVRDLLVKQRTMLINAMRGHAAEFGVIAAKGRVKVAELLQQAHAEAAGVPALAREMLQVLAGQLDALDGKLTALEAELMVLHKADPVSQCLATQPGIGPIGAVSFSLKVTDPKGFRSGRHFAAWLGITPKEDSTGGRHRPGRISRQGDEGLRRLLVLGATAVIRFAKPGQASPWLINLLARKPKKLAAIALANKMARILWAMMVSGEVYRRPLPA

SEQ ID NO: 499782 - protein, 397 aa, unidentified
MYIVGIDIAKRKHEAAVIDGDGAVIIKPFSFTNNCSGYNRLLAMLAKAKLPLDEVSFAMEATGHYWLALFTRLQKEGFRVQVINPVQTNSIRSFYIRQAKTDPRDALLIAEVIRFGHFSESTLHPENIYELRELCRGRHAIVSMQADVKRKVVALLDQVFPEYETAFTNLFGDTSMAILQTCPTPKELSEMRLEELCHLIEVSSHKRFRMAKAQELQELARNSFGFAMAGDVFSTMIRLYAKHLDFLKQQVREMDRKIAEIMETLDTPITTITGIGLTLGAYILSEIGDISRFSSAAKLAAYAGIDPTMRQSGEYNGVRNRMSKRGSPYLRHAIWLAASSAVLHDPALKLYFQKKRDEGKPYMASVGHACRKMVSIIYAVMRDNKAYTPCIPNEISV

SEQ ID NO: 499783 - protein, 370 aa, unidentified
MKKNTTKSQSPKRARARQQGPITVGMDLGDKTSRYCVLGCTGEVLAEGSVSTTKKAMTQKFLEIGPCRVAIEVGTHSPWLSRLLTSLGMEVIVANARQVQLISASSRKNDRVDAQTLARLARIDPELLRPIRHRSEQAQTDLLKVRMRAALVETRTSLINTARGLVKALGERLPSCDADAMGVEKLEGLPAGLREALQPLAKPIEGLTEQIHELDRELEQIARTKYPETELLKQVSGVGTLIALTFVLTVEDRERFQKSRDVGCYVGLRPKQSESGERQPQLRITKEGDVYLRKLLVQGAHCILGRRGPDTDLKRWGLKLAERGGKNAKKRALVAVARKLAVLLHRLWVSGEVYEPLRNSQAAGSKKTAA

SEQ ID NO: 499784 - protein, 372 aa, unidentified
MQATTFVGLDVHKRWINVAVLLPGNDTPIEWRIANEALAIRKMLKRVAELAPGDVRYCYEAGPCGYALQRQIISWSDASCMLVAPSLIPRKPGERIKTDRRDARKLAQLFRAGLLTEVKPLTEEDETARDLSRAREDLREDLVRARHRLGKFLLRRAITFTPGKRAWTLAHRRWLKSLRFDNPTDAIVVADYLLAIEQIEERLKNLVVHIERLAVDPRYAKAVATLRCFRSFETITAVGVAVELHNFERFTAARRLMSFVGLIPGEHSSGERRRQGAITKTGNSHVRRLLIEAAWNYRHHPHVGRALRERRKGQSPRTVALADRAMHTLHRRYEQMTHRGVLPQKAVVAMARELTGFVWAALSPLAQQNTSH

SEQ ID NO: 499785 - protein, 418 aa, unidentified
MEIEKDLDVVHERAAGLDISKRDAKLCVRVPGARPGTYTSKVTTWAATTGQVLELREYLEQARVDMVVMEATSDYWKPFYYLLEETVPVMLVNAKSAKNLPGHKTDVKDAAWLARMGAYGLLRASFVPPEPIRDLRDLTRARAIAARDRVREIQRLEKFLEGSGIKLSSVVSDLTGVSSRDMLEALIRGERNPEVLAGMARGTLRSKIPALVDALTGRFRPHHAFMARLHLDQIDAHTRTIEALTQHIEEAMKPFRDAREALATIPGVSQRVAEVIIAETGANMTMFDTPARLASWAGVCPGANESAGHIKSAHILPGNKYLKAALGTAAMSATRSKNTYLAAKYRRITARAGRNKALVAVEHSILNAAWHMLRNGEIYNDPGADHYNRISPTRAKNKAIKQLNNLGYDVTITPVTAA

SEQ ID NO: 499786 - protein, 318 aa, unidentified
MQSISTVGLDIAKSVFQVHGVNAVGQVVIRRQLKRRYVLEFFQKLQPCLVGIEACASSHHWSRELQALGHTVRLMPPAYVKPYVKRQKNDAADAEAICEAVTRPNMRFVATKTVEQQSCLVLHRTRHLLMRQQNSVINAIRAHLAEFGIVAPVGRSGVEQLLRVVADSKDSRLPEIARACVAALGAQLQMLKAQILESDRMITAWHRSSEVSKRLDEIPGVGPVLATALVASVVEPKAFRSGRDFSAWIGLVPKQNSSGGKERLSNISKRGDRYLRSLFTIGALAVIRCQNPSHQASALARSNAGAAPCQSRCYRYGQ

SEQ ID NO: 499787 - protein, 386 aa, unidentified
MPQPNDLSRSLVILEQDATLIAVIEMGQSNWLVAGIVPGVERSPLKKLAVDESALLKLLNRWREEAEKAGHRIERIAIAFEAGRDGFWLARWLRARGIEAHVIHASSVAVSREHRRAKTDRLDTELLKRAFLGWLRGERDHCKMVAIPTLAQEDAKRPNRERESLVGEQSRIVNRMKAALARLGIRGFNPKLKKAVERLDGLRTPEGEPIPPNTLAELKHDMERRRLVRSQIRDIEGTRLERLKQAPGDGPHVMVRLLARVIGVGVETADMLVQEVLSRNLRDRRAVARYGGLTGSPDESGKKRREKGLARSGNARVRRGMIQLAWRFLMFQKDSALAHWFYARTKNAPQTRKTMIVALARKLLIALWRLAREGAIPEGIVLRPAL

SEQ ID NO: 499788 - protein, 340 aa, unidentified
MKTCSKFFIGIDVSKPYFDTSLLCVIDQQKQQIQTLRFENSIQGLKEFHKWLKKHKVTMNENTLLVIENTGIYHRLLWAFCCEKNLPIHIGNAAHIKWSFGIARGKNDRVDSIRLCQYAYRNAEELRSSSILDPVLLQIQDLMASRRRLVSQLNSNKVYLNELKNISNIDNRLILERLHRDAIKGISNSISKIETLLKKIVSENEKIKKNYDLLISVPGIGHLTAIYIICCTCNFACRRSGKQLASYAGVVPFEHSSGISIKGRNRVSNMANKELKKMLHLCALSAIQFYPEFKCYFERKTEEGKHKMSVINAIRNKIVLRAAAVVIKQMPYISKYNILA

SEQ ID NO: 499789 - protein, 343 aa, unidentified
MVHYIGLDVSLKRTSICVVNQVGSVVREGVVESEPEAIAAFVRSKAPGAVRIGLETGPTATWLWTELKQLGLPMICIDARHTRAVLKMQINKSDRNDAAGIARIMQTGWFKEVRVKDLESHSVRALLASRALLVKIKRDLENQIRGLLKNVGLVIGRAKFNVFTVRAEELIEDRPELMAVVRPLLKARQAIEQQTDDLDRKVLKLARVDAQVRSFMTVPGVGPITALCFKATIDDPTRFKRSRSVGAYVGLTTRRHASGEVDWTGRISKCGDAMLRSYLFEAAGVLLTRVPKWSALKAWGMRLAKRNGLRKATVAVARKLAVILHRMWIDGTEFNWSKKEVAA

SEQ ID NO: 499790 - protein, 452 aa, unidentified
MAKQSHRRCDQLPVLHPNAAGIDVGASELFVAVGADRDPQPVRRFPTFTRDLHALADWLQQCGVRSVAMESTSVYWIPIYQILEARGIEVCLVNAQHVKNVPGRKTDVSDCQWLQYLHSVGLLRASFRPPGAICAVRALWRHRGSLVQMAAEHILHIQKALDQMNLQVHRVLTEITGLSGLRILDAILAGQRDPLTLARLYHKRVKSSESTVAKSLEGDYRPEHIFALRQSLAAYRYYQQLVLETDQEIQRQMVELEAADNALAKMPKRTKRLPYQRQGHEPRVFDLRRELYRILGVDLTNVPGISAMTSQTILCEVGTDVSRFRNASAFASWLGLCPEKKISGGRVLFTKSRRVRSRVAIALRLAARSLHHAKDYMGEFFRRICRKLGKPQAITATAHKLARIVYHLLSTREAYDESVFHKCEEEALKRAEMRLRRQAAHLGFRIIPAEEG

SEQ ID NO: 499791 - protein, 423 aa, unidentified
MTDPPLQSFLRFVAIDIHKSYLMVGAIDSQQRIVLQPRKVELHRWLVWAQANLLSTDTVVLEATTNAWTIYDQIVGLVARVVVAHPAKVKLIAEARVKTDKVDVLTLAKLLRADMLPEVWVPPLHVRDLRALLSHRRRLVALQTTAKNRLHSVLHRLNLAPPDGDLFARKQREWWELLELSATERLRVDQDLATLEHLRPQIEEVDVELRRLSTSEQWAEQVPYLVQLPGVGLLTAMTMLGAIGDITRFGAAKQLVGYAGLGAGVHASGKTHRDKGITKQGRRDLRFVLVEAAHVAVQTHPHWKKEFERLAARIGEHKAVVAIARKLLIAVWHVLMARSADRRADAEQVAFKLMVWAWKLTEAQRGGLTSRQFIRAQLMRLGLGDELTHITRGGTKRPLATREEVLAVLAERRDQVPDEQSSE

SEQ ID NO: 499792 - protein, 339 aa, unidentified
MEYIGLDVHRHYTVLARMAANGDMLTTAKVKNADVGETIASYGEPCQVVLESTGNWMYIESLLETQELVEDIALAHPLEVKAIAHARIKTDKVDAKVLAHLLRTDFLPRAYRAPFAVRELRDLLRFRASLVRVRTTVKNKIHAVLIKEGLTLTVTDLFGRGGRRWLASQTLSTVHRLSVDSYLRVVDSLDAEVAGVTAEIDRQAKEHAEVEWLTSIPGIGRYTALLILAEVADISRFSDAQHFASYAGLVPSVHSTGGHTYYGPITKRGSAWLRWALVETVHRNVGRPNPINERYQRLVRRKGSAVASVAVARFLATCVYALLSEERPFQFAREARNST

SEQ ID NO: 499793 - protein, 346 aa, unidentified
MVGIDVAKAHVDFSVLGAELDAQRFDNEAEAHSALAAALKPMDVALVVIEATGGYETALACALQAAGLPVAVVNPRQARDFAKSMGRLAKTDRIDACMLAEFAGVLVRRDDLASFIRTLADQEQQALVGMVTRRRQLVTMMLSERQRLQLAINLVRPSIEAMIEAIRQQLDDVEVEMVGHVQAHHAELDKLLRSASGIGPVASAALIAELPELGRLNCRKIAALVGVAPMANDSGNTKGRRRVQGGRFEIRRVLYKGHAHGCTAQSGHQVLLRPAAGRKQVAQSRLGRLHAQAADHAQCHGQNQQTLGQIASRRLTRKTATKSFHRQLKWRCPVASSIAKSLKPRA

SEQ ID NO: 499794 - protein, 408 aa, unidentified
MEVVYRCCCGIDVHKKIIVACLDQGGEQSLREFGTTTSEIKSLATWLTESGCEMIAMESTGVFWKPLYNLFELMDLDAMVVNAAHMKALPGRKTDVKDAEWIADLLRHGLLKASYIPSREQRELREITRYRKSLTEERCRETNRLQKILEGANIKLDSVVKDINGKSARKLLEKIIEDDVPTSEEEVSKVVHGRMRSKLGQLVTAIEGITTPLQRKLLAQVIDHIDDLNRRIADLDRLVQDYMDEYAAAIAALCDIPGIARRSAEVILAEIGLDMSRFPSAAHLCSWAGVCPGNCQSAGRRKHGKTTKGNKPLKTILTQCAKSARSVKGSYFSAQYQRIAARRGKNRATLAVAHSMLIAIYHMLKNSAPFRDLGSDYYDSFNRDRKIHSYLKRLKALGWEPDALPGSA

SEQ ID NO: 499795 - protein, 389 aa, unidentified
MRTMGEDGKLHQEVRHWATMTRDLMAMAEGLATAGVTHVAMESTGVYWKPIFNILEEGFEILLVNARHLKNVPGRKTDIKDCQWIAQLLQHGLLKGSFIPPRGQRERRDLTRQRAQMMEERSRICNRLQKVLEDANLKLASVASDVVGVSGRLMLQAMVAGEDDPEKLADLAKCQLRGKIPQLEQALYGKLTEHHRWMLRLLWDQLTSTEALVARLDERIAQCTRPQQPVLERLDEIPGIDVRVAQVLLAEIGTDMKPFPSDAHLASWAGMCPGNNESAGKKRSGKTTKGSRWLRQALVQAAWAASHKKDSYFQVHARNLMHRRGRKRGLVAVAHSLLIVVYHMLKEETHYRDLGPQFLDRLRAKHLVRFHVRRLQQLGLQVALTPVAA

SEQ ID NO: 499796 - protein, 424 aa, unidentified
MPCERSRFPILLWSWERRIGFRLFELARAFDPVKEINLHLFPNDHPEAWGLPATSNRSLVWPFTPHPGFRFPTTGEFHMAHIGVDLHTNSFTICRLEADGSQAFATYQLAQADLERCCLSIDADDEVAVEATANRAWFCDEIRPCVGRIVVVNPHQLQVIRRSVKKTGKNDARALATFLSKDVLPETRLKRPGEAELASLTQTRDMLVKSRTKVLNKIHGIFNRHGIKLKKEGFSDRRLRGLEIEDFGDVEKIELTVLRDQALDLTTSIRKIDKVLAEAASALDGFEEIISIKGVGARAAAIFLSGIGDVRDFATADKLAVYVGIVPRVASSNGVTQYGRITKQGNKLVRTTLVQCTLSAIRYSGYPSAFYRRIKKRRVSGKAIIATARKLLTIIYNTLKNQWIFEDFPAFKLRNPGQMAGQTS

SEQ ID NO: 499797 - protein, 344 aa, unidentified
MKNSNVIGIDLAKNVMQVCIIDKHGELLSNKAISPSKLKILLANNIQSIVAMEACGACHYWARLAQKYGHDVRVISPKKVKAFLQGHKTDANDALAIAIASTQFGMNFSQIKSEEQQSLQTLETSRKFLSRELIALNNHIRAYLYEYGITMNKGQKGLREAIVVVLDDGDTRLPMCLKNTLRLLWERFQLTVAQFKDTEKYKAHLVNQIEPCKRLMDLEGIGKVCASMLYVNIGDGREFKNGRQASVYIGLTPKQHSSGGKTYMRGIDKHGGNKELRAALYQGALSIISKLPCEPRTVKEAWLIELVKRAGIKRACIAMANKTVRTAWALLATGKSYQPVLLSK

SEQ ID NO: 499798 - protein, 413 aa, unidentified
MDAISVGIDVSKGKSVVMAMRFPRAVVFQPREIDHSAAGLKQLVALVKKLDGEPRVTMESTGHYHIPVASALHEAGIFVSVVTPMLIRRFADVSLRQAKTDRQDSITIARYGLKYWDELRAFSPLDITRQRLRDCSRQYHLYVDVKIRLKNNLVALLDQSFPGSNSFFIGPPKADGHEKWVDFAEKFWHCECVCNMSEKAFVEEYSEWCKHHDYCFNRDKALLVYEKSQGLAPCLPKNAYTEFRIQDIAKRISNISHGVEIYRAEILRLAQRLPEYPVVKKMFGMGKTFGPLLIAEIGDVRRFTHKKALVAFAGIDPGSEQSGKYINKNSVAITRSGNEKLRSVICRVAICYVRSKKKDEPVYQFYLKKRSEGKDYYLSIVAAANKLLRIYYAKVTAYLDELDDPIEKIPSPC

SEQ ID NO: 499799 - protein, 440 aa, unidentified
MSKIRKIIEHAAGIDIGSQKVFVALEDKAVKSFETFTSSYQALVKYLQENKITHVAMEATGVYWITLYDILETADFDVYLVNPADSKNLPGRKTDVQDCQWIRELFSMGLLRKSFVPPDYIRELRCYTRLREDKIQSASMHVNHMQKAMIQMNIRLTEVLSQVHGASGMAMIEAILKGERDEQKLLSLCHASLLKSKSEKIIEALKGNYKQEYLFELQMAYEGYMFYQNQILECDKKIEALLQQQTQGKQYDKEKIKEHPIKQIRHNKPVVADLHENLLKLNNVNASSLPGITDYSFLRLTAELGTDLTQWPSEKNFTSWLGLSPGKNQSGKMNKRSKKKSITRAGQIFKQAAQTILISKKIALGDFARKLRAKRGPAIAIKATARKLAELYYKLFTKGLDYVEQGLQFYQDKQKEKQLYYLKKKALELNLQLVDIHTVT

SEQ ID NO: 499800 - protein, 386 aa, unidentified
MIYVGIDISSEKFDVAFYEPKAKKYTLQTFRQSRKGFKKFASKLENLHEEISIAMESTGIYDNNIYEFLNDLGYEVILFHPYSVKNFLKSYSNSKTDQIDAKNLALALFVLGDNAVVSTKLPKEIQALRKLVRFRSSIVKEQTRLQIQLRNILKVNMPEIVKFFSQMNSVVLLGLLSKYPSRESILANKKEAVELLSSFKGWSRKKAKEVVESLEDSIGLTDKLGVHSTMVSTIVTQLKMVKESAEKLEKEIERINSSFLPKNPISTIPGMGKLTEATIVSEVGEISRFSTKEKFVAFLGMDPVIKQSGKSYRTSGISKKGNKNLRMVFYNLAVRAIRYIPKYRKKYEELKKRKHAKVALVAIARKMAELVYVIWKNGVEFDPAMP

SEQ ID NO: 499801 - protein, 369 aa, unidentified
MNTTTFVGLDVHARSIKAVALDAMTGEVRSATFAYDAAAVAEWVGSLDPAAKCVYESGVTGFDLQKRLAALGVDCVVGAVSKMIKPSADRKRKNDRNDAEFLARMLSVGNVVEVWVPDDGCEAARDLVRALDDAREDPKRRKQRLSKFLMRHGYAFSETTPTGRRKGNWTAAHWAWIRSIEFPEKADDDVLAYYIDATRQAMEDKKRLEKLVEAEASKPRWKKRVDSLRCLKGVDAMTAADIVFEAGEFSRFKNARSFAAWLGLTPSEHSSGESVRQGGITKAGNKHLRRVLVEAAWHYISASPHPKDPAKGQAPDPAARRHAAKGIRRLVKRREEMLGRGVHKNKANVATARELACWCWAIGRMVENG

SEQ ID NO: 499802 - protein, 327 aa, unidentified
MTASVASHNQIFIGIDVGGLSFEAAWHRGGSTQYQNRPDAIAAFVARLSVEKQIIRIAVEPTGGHEKALVKALRGAGLPVEMVHTSRFAAYRKLIGAKAKSDTSDARLLAAYAAAPEEVRGRKAGHVVLPQDDVREQLAELAARRDQLKHMIHAETCRLSTVRSPSIRDEITAHLQALRQADRKTHDAMMQLVRQRDELRNAKRLLQTIKGIGDKTALTSIAAVPELGLISNKAAAALVGVAPFVRQSGTMKAPARIHGGRALVRNAFYMAAVTASRHNPVLAPFYARLIAAGKPVKVALVAVMRRLVVYANAVLRSGQPWKGAEIG

SEQ ID NO: 499803 - protein, 356 aa, unidentified
MSREIKYIGMDVHKEAVVIAVLSSSGKLMMESIVETKASSILQFIHGLRGELQVSWEEGTWASWLYDLLKPQVQEVLVCDPRRNGLLKEGNKSDKIDARKLADLLRTGMLRPVYHGEHGLRTLRELGRSYRTISQDLNRVMNRIKALYRGWSIPCAGTQVYAPRYREQWLQKIEHAGVRRRAELLYQQLDGLQALRRTLRPELLAESRKHKASKLLRQIPCIGPIRAARLLGLMQTPHRFRSKRQLWTYSGLGIETRDSAQYRYVGGQLQRTKKPQQIRGLNRNHNHEMKEIFKGAATRASCGVGPLRDFYVALLDKGMKPEMARLTLARKIAAIALTLWKKEERFDAEQLKPQAA

SEQ ID NO: 499804 - protein, 350 aa, unidentified
MTNITTIGIDIAKRIFQFHGVDKNGKAVLKKKLMRDQVLTFIANLPKCLVGMEACGGANYWAREISKLGHEVKLMAPQFVKPYVKTNKNDQADAEAICEAVSRPNMRFVPIKSIEQQDILSIHRVRARLVKNRTALANEIRGLLHEFGMIIPQGINKITSKLTEVLDSGKLSPISQQTFSDLKEEFIENDKKIKCLESRLKIMASELDKYQQIIAIPGIGLITSTALIASIGNGSCFENGRQLSAWLGLVPRQASSGGKEKLLGISKRGDIYLRTLLIQGARAVLNTKLRFTTESQKAKKDYSKFTQWIFNLHDRGGHNKTVVAVANKLARDVFAVLSSGNDYVENKVCS

SEQ ID NO: 499805 - protein, 320 aa, unidentified
MALLQVFVGIDVSAEWLDVHVLPWRTRLRLANTPDGWRALLDELADHPQAHVAVEASGGYERGVLHCLSTAGFAVHCLDPYRVRQFARAGGRRAKNDRIDAEVIARFLSAFTLRPTEIDPVREQLSEHVTYRRQLVEERVTVANQARLLRDARLKRLSRHRLARLDVLIARLDKRLAALIAADPHLRAKAAVLRSLKGIGATAAATVLALLPELGLIDRRKIAALVGVCPYDLDSGKFAGQRHIAGGRKHLRNALYMATLTAIRYDPAIKPFYQRLVQGRDEKKPAIIAAMRKIVVILNARMRDHMAQIATTETPLLRVA

SEQ ID NO: 499806 - protein, 319 aa, unidentified
MAQNDLVVAGIDVAKDKVDVCIRSLSLRRTFASTAEGRRELATWLRRKKVAKAVMEASGGYEREWVRVLHQAGIEVRIVDPKRVRSFALSAGRLAKNDTIDAEMIAWFAETFSAAPGQPHDAAREELRALVKARKHLLDLQTRLKSQNEHAAPGPVQKSYARILKSLAAEIAKLEAAIAVKIKATPDFAERAEIIESVPGLAETTSATIIAGMPELGQVSNKICPALLGAAPYDDDSGHRRGERHIKGGRRWVRNAIYMPCLGAATQNNPVLKAFYHRLIAKGKEPKVALIACMRRLIVIINTMIARRQKWDPSRYALN

SEQ ID NO: 499807 - protein, 276 aa, unidentified
MALRPAGERWAVPNDASGVTTLVDRLLALHPTLMVLEATGGLERAVTSALATAGLPVVVVNPRQARDCARATGQLATTDALDARALAHCADVIRPTPRPLPDAQMQELRALLGRRQPLLVRRTAAQNRLAGTSARLTQDSAAHIPWLNARLATLDDDRETVLRASPLWRDNDDLVQRAPGMGPVCARTLVLALPELGTRTRQQSAALVGVAPLHGDSGTRRGRRTIWGGRAPVRTVLYMGTLVATRDNPQSKVFDERLRAAGKVKKVALTACMHKL

SEQ ID NO: 499808 - protein, 343 aa, unidentified
MQTVTTIGLDIAKSVFQVHGVDAGGQVIIRRQLKRRYVLAFFQKLSPCLIGIEACASSHHWSRELQALGHTVRLMPPAYVKPYVKRQKNDATDAEAICEAVTRANMRFVPTKTPEQQSGLVLHRTRHLFIRQQTSVINAIRAHLAEFGIVAPVGRQGVEELLNVVADPNDKRVPEIARACLSAFGAQLRRIKEQILEFDRMITAWHRSNEISTRLDEAPGVGPVLATAVVATVADPKVFRSGRNFSAWIGLVPKQHSSGGKDRLGSISKQGDRYLRGLFVAGALAVIRYAKIHGTKHRPWLTALLERRPIKVAAIALANKIARMVWAMMAKGERYKEPVALAA

SEQ ID NO: 499809 - protein, 367 aa, unidentified
MKKISTAATKQIRNFSQPKLTIGLDLGDRSSWYCVLDESGTVLLEQKLSTTPKAMREVFGSMPRCRIALETGMHSPWVSRLLSELGHEVIVAHARNVRLIGESRKKDDRLDARTLARLARIDPQLLCPVKHRSAKAQADLTVIRARAGLVRSRTALINTARGLAKSYGERLRGCNPRNVNAEKAQGLSPELQAALEPLLAATEALSERIQEYNQQIAKIAQESYPQVARLEQVKGVGTLIALTFLLTLEDPHRFRKSRDVGCYVGLQPGRRNSGQSEPQMHISKEGDPYLRTLLVQGAHHILGPFGADSDLRRWGLKLAERGGKNGKKRAVIATARKLAVLLHRLWVSGEAYEPLRNSHPIPMPAAA

SEQ ID NO: 499810 - protein, 342 aa, unidentified
MNIPVRIGMDTSKSVFQLHGVDESEGVVVRRQFRRAEMIRYFERLPPVLVAIESCGSSHHWARLLQSFGHEVKLIPPQYVKAYVKRGKNDAADAEALCEAVTRPNMRFVPVKSKEQQAACMLMTVRERLVGVKSQLSNAFRSYAAEFGIVGPAGRQNVTALIKRVLEDDSLPEMARDLFRLQAEEYAAVEARLAKIEAKLLKWHREDDVSRRIATIPGVGPIGSSMLSMKAPPPETFRSGRDFAAWLGLTPKDHSTGGRQRHGGITKAGDSVLRSTLIVGATALLRHIRKGRHKPTPWLASLLERKPPKLVAVALANKFARIAWRLMISGGVYNRPAAAMPI

SEQ ID NO: 499811 - protein, 375 aa, unidentified
MSEITRAAIARVGVDLAKRVIQVHGVDAVGRRVVARALKREQFITWCALLPPGCLVAMEACSSAHHWARRLRAMSLDARLIAANFVTPYRMEGKGGKNDATDAAAICEAASRPSMRFVPIKSREQQGVMSLHRVREGLKEERTACVNRIRGVLAEFGLVFGKRPKVLRAVLSDVLEDASNELSTTARLVLQRAFEHWRELDAHLKWCDQQVGEHVRATPAAQRAAKIIGIGELGASALIAGVGEFKQFKNGEQFGAWLGIVPRQNSSGGKASLGRITKRGDDYLRTLLIQGAKTAVMSAAKRDDPISRWLVQLTARVGWQKACVAMANKNARILWAVMTRDAGFDPKHLSVKPDAKRAANERAAAMPELAMACPA

SEQ ID NO: 499812 - protein, 451 aa, unidentified
MPSQPTATNEVWNVVNPHAAGLDIGASEIWACVPADRDPNPVRSFGTFTPDLLALVAWLKACRITTVAMESTGVYWIPIFELLEEAGLQVYLVNARHIKNVPGRKSDVKDCHWIQRLHSYGLLSASFRPEAEIVVLRAYLRQRAMLIEHRAAHIQHMQKALQQMNLQLTQVLSDISGLTGLAIIRAIVAGERHPAKLAQLRHGRCQRSEADIAKALTGHYRAEHVFALKQALTLYDVYTDQLAECDRQIEQQYSAFKPRFDPDDPQAPLGPDPKVNTHSKNAPTFDVRRQLFRLTGIDLTQVDGLHVSSVQQLLAEIGTDMSKWPTDKHFSSWLGLAPHNDITGGKVVRSRTLKNHNRAGQVLRVAAQSVGRGKSALGAYFRRMRARLGVQQAIVATAHKLARIIYQMLKHRQPYQPLSAEAYNEQHRQREINRLKRQAAQLGFTLQPQPS

SEQ ID NO: 499813 - protein, 384 aa, unidentified
MEKFSTLYVGLDVHKESIDIAVAEAARDAEVRHLGSVAGGLDAVSKSMRKLVSAGHRLHIVYEAGPCGFVLQRHFSSLGWHCDVVAPSSIPRPSGERIKTDRRDAMKLARLARSNDLAVVRVPGPADEAVRDLVRARDDAVREQRNGRHRLKALLLRNGITYSGKSSWTAAHLRWLARLKMEHAAQQIGFQEYLHSITETAARIDRLEQAMRDALTDWTLRPAVQALMSMRGVQLIAAMTLVAELQDFLRFESPRQLMAYVGLVPGEHSSGPKRRQGSITKAGNSAARRMLVEIAWHYQHGPRVSPIIAARHDQLPKAVTDIAWAAQLRLQAKFKRLMARRLMKNKAVVAVARELAGFVWAIGREVQASGWQGIAVEPTTAAAS

SEQ ID NO: 499814 - protein, 343 aa, unidentified
MQAITTIGLDIAKSVFQVHGVDAKGNVVLRRQIKRRYVLAFFQKLPPCLVGIEACASAHHWSRELQALSHTVRLMPPAYVTPYVKRHKNDAIDAEAICEAVTRPNMRFVATKTREQQSCLTLHRTRHLLIRQQTSVINAIRAHLAEFGIVAPVGRNGVDQLLGIVADASDKRLPELARACVAALGTQLGTLKAQILQFDRLIMAWHRSSEASRRLDDIPGVGPALATALVATVADPRAFRSGRNFSAWIGLVPKQHSSGGKDRLGSISKRGDRYLRFLFVAGALAVIRYAKIHGTKHRPWLTALLARRHTKVAAIALANKIARMTWAIMAKGEHYKEPVALAA

SEQ ID NO: 499815 - protein, 408 aa, unidentified
MEVVHPRCCGLDVHKQTVCACISIKEGPVQERQKKRFETTTAELRQLFAWLKEWKVTTVAMEATGVYWKPVWNALEEGFELLLVNPQHLKSIPGKKTDFKDGERIADLLQHGLLKGSFVPSRPIRELRELTRARASFAQERSRIINRIEKTLEDPNIKLGVVASDVVGASGRAMLEAIIGGETDPVKLAELAKGTLRNKIPRLQLALEGRVTDHHRFLLRQWLDTLDFVDRKIAKLEEQIREKARPFEAMLQAWMQVPGLRRINAYSLLAEIGADLNQFPTAAHLASWAALCPGNRESAGKQTSGRTRPGNRWLRRTLCEAAWAASRTKKSYFGALYRRLVRGRGKNRALIAVAHSLLVTVYSFTQSGTAYLDLGSEYFEQLNKKYLERALVRRLEKLGHRVILEPAA

SEQ ID NO: 499816 - protein, 405 aa, unidentified
MGEGSFAGVDWASQEHAVCVMDADGRIAEGGRYRHDERGLRALCNRLVELGVLLVAVERPDGLLIERLLDAGLPVIAVHPNQLAASRPRFSAAGHKSDSFDAFVLGELARTDSHRFRVLVPDSDATKALRALTRAREDLVETRVALANALRAQLECFWPGAVAIFADIDSPIALAFLKRYPSPADARGLGEQRLERFLARNHYCGRRPARELLRRLRNAADGRAGQLEIEARRQLVLGLVAVLEPIVVQIAQLTSEIRGALHDHLDGEIFSSLFRDPKTAICPATFIAEMGDCRPRYPTKAALASDGGQAPVAKESGKSKRAHFRWACDHRLRDAFSTLADSSRHHNPWAADIYDRARARGASHPHAIRILGRAWAGVIWRMWHDHTTYDPALHGNYQQLITARG

SEQ ID NO: 499817 - protein, 341 aa, unidentified
MDISVLGIDLGKNSCSVVGLDAIGKVVVRRRMRRETVITYAATLPACVVAMEACCGAHHMGRALARQGHAVRLMSPEYVRPYVKAQKNDDRDAEAIAEAATRPTMRFVELKTEEQLDMQTLHRIRDQLVGDRTSLMNQIRSLLLERGYIVPQGRAKLALRLGEMLDGDEPVLGSRIHRLVSDMRLRWSALDERIADLDAEFTDAARADERTRRLLTIPGIGALNATALVAAIGDARTFGRGRDLAAWLGLVPRQATTGGKPRLLGITKRGSRYLRKNLIQGARASLPVMSKSDTRLGAWLRGLLSRSHHNTVVVALAAKMARIVWALLRHERTYDPVAQAA

SEQ ID NO: 499818 - protein, 379 aa, unidentified
MDHAITGTPAETILHGALELSKNSWLLALQFPDRAQPSLYPISGGDTEGLMAKLTAAGDRWAKMSGKAPSIVLCYEAGYDAFWLARFLKARGIECLVVDPASMQVNRRARRAKTDRIDVGMLLRALIAWGPGDRHVWSVVRVPSVDEEDLRRSHRERDRLVRERTAHINRIKGLLFGQGIRGINVKSKYKTLQIDKLVTGDGCPLPPRLASEITREIARLALIQEQIATLERERDRAPTPCKATEKKRVQLMCLTGIGPAIAAVLTREVYYRQFDNRRQVAGFLGLATSPHDSGDVERSQGISRAGRGQVRGTMIQAAWLWLKHQPKSAITRWFVQRTAGQSGRIRRIMIVAVARKLAIALWRFLEQGLVPQGAMLANR

SEQ ID NO: 499819 - protein, 382 aa, unidentified
MTRAARFIPRDYEVFAGLDVDKRSMSVVFTDHNGTMRALRMAGQARPLVNYVRKHFAGQRVAFAYEAGPTGFGLHDELVSEAYTCMVVAPSKVPRARGERVKTNRLDSRKLAENLRGGQLQSIHVPTQAYRNLRHLVQLRDTHVRQLSASKLRIKALLLFEGIPFPEPSEKWTARAMRELQTLSCSETVRFKLDDLLDTLQFHFQAAARVTKQIRQYCLDDPELQQSISLLLSLPGIGWIVASHLVARLGDPRQITNGKQIAGFLGIVSSEHSTGEKENRGEITRSGDSRLRNKLIQSAWTAIQKDPELRAFYRRIYQRHPKKVAARKAVVAVARKLTTRIYVVLKEQRPYVIRPDSSIAPLTAEETVGPRDRLDGAQNDQS

SEQ ID NO: 499820 - protein, 313 aa, unidentified
MSQPLFVGIDVSKNSLDVHLTPSGERRQFPNSKAGLRRLSKLLVNRNPCLTAVEATGGYEQLALNHLAGARLRVAIINPRRIRDYAKAIGKLAKTDSIDAAVIAEYASANHAHVRPFVLRQEQAVKHVVVRRRQLVDMRTAEKNRLKQASDPAIRKSIKALIAVLNRQVSQLQDQIRTTIRSNPLWSRRNEVLTSAPSIGPVTSSTLIGELPELGEGDHRQLAALVGVAPFNNDSGKKKGDRAISAGRRSVRKVLYMAALSAIRRNPVIKAFYQRLVAKGKPFKVAITACVRKLLSILNTMVHKNETWKPKMA

SEQ ID NO: 499821 - protein, 340 aa, unidentified
MTITTIGLDLAKNVFQVHGVDEHGKAVLRKTLKRAQVLAFFANVPTCLIGMEACAGAHYWARELAQLGHTVKLIAPQFVKPYVKGNKNDANDAEAICEAVGRPNMRFVPVKSVEQQDLQALHRVRSGLVQERTAKINQVRGLLGEYGIVIGQGVAQLRRGLPEILEDAENGLTAAARALFAHLREQIVHLDAQIAIYQTSIEQRCQASAACRKLIQIPGIGVLTATALVAAMADGSAFEQARQVSAWLGLTPRQDSSGGKAKLLGISKRGDSYLRTLLIHGGRSVVKAAANKDDAQSRWINDLVKRRNKNIAAVAVANKNARMAWALLQRDESYRVPEAA

SEQ ID NO: 499822 - protein, 351 aa, unidentified
MPHKSTVHAATAIGIDMGKNTLHMIGLDLRGAIVLREKVLRGRIASRLANLQPCLIGIEAGMATHYVARELAALGHDVKQVPPTYAKPFRQGHKNDFRDAHAVAEAVQRPTTRFVPAKTNEQLDLQALHRVRSRLVSERTAVINQIRGFLLERGIIVRQGLRFLRQQLPDILAKRTDVLSPRMVRIVADLAGDWRQLDERIETVTDEIETLAKSDDNCRRVMTVPGIGPIISSAMVAAIGSGAAFARGRDYSAWLGLVPKQMSTGDRTILGRISKRGNGYLRTLFMQAARVILLRPANWPKHGFGAWLIRAAQRLHPNVLAAALANKLARIAWTVLAQERSYEARVTKAAA

SEQ ID NO: 499823 - protein, 361 aa, unidentified
MHATTAAVDLAKNVYQVVLADAEHRVIEQHRLTRSQFERFFDNRDVEHIVMEACGSAHFWARRFEQRGCEVRLLPPKYVRAYVRRSKTDAADARALIEAARDCTLRPVQVKSVEQLALQALHRTRSLWMSTRTSRINALRGFCREFGLHIPVGARTGVEAIARALADEYCALPEILRSSLRALLDEIRVLETRIAQIERELSAAAAVSEPCKQLMTIPGIGLLSSTAIVAATSGSVAHFTSSRHFAAWFGLTPKEHSSGEQRRLGGISKQGDKYLRMLLTHGARSVLRAATVAQSRGHSLSGIRAWAVELQRRSNHNKATCALANKLARICFAVLRDRTAFGQRVVRLTKKLNRQAFVIAH

SEQ ID NO: 499824 - protein, 626 aa, unidentified
MLDSRLHAFGRNSPLRGRQIKLLPARLAKLPRPYKEEEGELQSDANDLAASVSVDRTQQFSQSRGIGDSWAVANLRRLKKTAQIFRDVPLDVAQADGVSKHAAATLPGPSCGIPQALGLNLLEHHEELVRSDVGDGASSQGRKDVALQDSRCIFDRVGGELTVRDARLREFKPLACDDFEGMCARRTLFFAVGTWIDVPCEEPAGVGVQQTGRGQIDAWVDAEGYHPFGILEVNLPAIKVLTRWDFLSYPERWDGRSRLLNGIDVPKWICTASTSTEKGATTMNITAVGFDLAKSVFQVHGVDQEGRASVKKQLKRAQVAVFFANLPPCLVGMEACSSAHYWARKFQALGHTVRLMAPQFVKPYVKTNKTDAADAEAICEAVNRPGMRFVPIKSIESQTLLALHRARQGFIKSRVAQTNQIRGLLAEFGIVVPQGARNIEARIPDVLEDAENGLPVNFRQLLLRLLEHSRQLRRQAEEVEAEIKRWHEHNDASRRVAEIPGIGALTASALVASIGDAKAFANGRQLAAWMGLVPRQYSSGGKPKLLGISKRGDKYLRGLMIHGARSVILRAKAKPGYAESWLGRLLARRHVNVAACALANHNARVAWALLAHKRHYRTAYTTAEAA

SEQ ID NO: 499825 - protein, 401 aa, unidentified
MNAVGIDISKGKSTVAVIRPFGEVVAKPFDITHYPDQLAELAEYIRSLEGESRVVLEHTGKYSEPVAKFLCEAGIFVCVVNAKLIHDYGGDTIRRVRTDKVDALKIAGYCLDKWVKLERYEPVPDNRKMLKTYNRQLSEYTKIKTMLKNNLISLLDQTFPGVNDLFTSPARESDGHEKWIDFVAAFPHCHSVAVLSRQGFTTKYEKWCRKNGYNFCVHKAEQVYSAALNCLPTLPNNDFAKTLIIQTVSQLNNLCETVATVKSEMSKIASRLPEYETVLAMHGVGKILAPQLIAEIGDIRRYPKRSSLARFAGIEPPENQSGTYNQHSRRISKQGSPHLRKTLFLVMCCVLQLKHSHEPTFQFIDRKRSEGKPYKVYMIAGANKFLRIYYARVNECFNSTA

SEQ ID NO: 499826 - protein, 450 aa, unidentified
MQPEVEEIPDAEHELLVARVAAIDVAKASGKVCVRLPGRAGRRVSRVWDVAATSGPVAELAEHLVEQGIEKVTVESTSDYWRIWYYLLEAAGLSVQLVNARDVKNVPGRAKTDKLDAVWLAKLTEKGLLRPSFVPPAPIRRLRDYTRLRTDLTHDRSRQVQRLEKLLEDALIKLSAVATDIMGVSGRAMIEALIGGQRDPKVLAGLARGRMKTKRSALVAALDGRFDDHHGELARMLLDQIDALSTQIDALSARIDELLAAMPDAQPVDPHPGGPLPGPSIDTAPDAALGAVGRLDEIPGIGPNTAQVILAEIGLDMSRFPTAAHLVSWAKLCPRTIQSGPVTRGGKTGKGNPYLKGALGDAAAAAAKTNTFLGERYRRIVKRRGKLKALVAVARSILTIVWQLLSDPTARFHDLGPDYHTRRINLERRMRNHIAQLTAMGYRVTLEPAA

SEQ ID NO: 499827 - protein, 343 aa, unidentified
MVHYIGLDVSLKKTSICVVNQAGSVVREGVVDSEPEAIAAFVRSKAPGAVRVGLETGPTATWLWSELKQLGLPVICIDARHARAVLKMQINKSDRNDAAGIARIMQTGWFKEVRVKGLDSHSVRALLASRALLVKIKRDLENQIRGLLKNVGLVIGRAKFNVFAVRAEELIEDRPELIAVVGPLLKARQAIEQQTDDLDRKVLKLARHDAQVRRFMTVPGIGPITALCFKATVDDPTRFKRSRSVGAYVGLTTRRHASGEIDWTGRISKCGDAMLRSYLFEAAGVLLTRVPKWSALKAWGMRLAKRHGLRKATVAVARKLAVILHRMWIDRTEFNWSKKEVAA

SEQ ID NO: 499828 - protein, 344 aa, unidentified
MTSMNFIGLDIHKKTISYCVKDAAGEVLAEGTILSTRQSLDVWMRTLCEPWTVAMEATMFTGWIYDYLFPHAAAVKVAHPLMLRAIAAAKKKNDRIDACKIADCLRCNFLQECYMASTEIRERRRTLRYRKLLVRQNVQLRNKVSQMLMESGVVYNKQKLHKVGYFKELMTTNPDIGEGLRPLLTICRETIVRIGKTEGALVRSLARDPLLSDRVQRLMTIPAVGPITALTWVLEVDDVARFGSVKQAISYCGLCGAERSSADMVKRMPISKQRNKHLQSVLVEAAKLGPRLSPDLALVFETEKQKGHANRATIAVARKLVAYLLAVDRSGREFVVAGERREAA

SEQ ID NO: 499829 - protein, 564 aa, unidentified
MLHRVTTKYVCGVDLHAKTLTGVIMDLEGKIHRKGTVPCELPQLMELLGPYAGDVTVGVESTYNWYWLIDALHRVEVQCVLGHALYMSRKMSGKHKSDGVDAQGIADLLRTNQFPLAYSYPPEMRGVRDLLRRRHTFVRRRAGTLTHFQCSLHQEGCTEPLRNKLQYKSTRDSLVNLATSDDTRKMLQSDLAYIKGLDSIIDDLEKTVLQHAQTHNPKHLQALQTMPGCGEITALTLLYEMHTIDRFRSPQQFCSYSRVVRAENSSAGKDYGGSSSDKIGNADLKWAFSEIGVAMLRVSPPVLSWHQKQSLAHGKAGAHARLRHKIALAVYAMLKHDRVFDLEKFVGKEHMEGVEKKSPTHNGTHMSGPSCEPCGLIGAPPPSIVSTQSATIVDSGEPATAAAEGSTPIAPVPVKKRGRPALPRDSHGNIVRPTHPTTARNEQPASAAHQSVKKSGPNPKPALPTATPKVTEPIIVRNHNNEDQTPLRQLLPEHLAGLTQADLSSLLLSIVSNIATAAANPAHNWSVHGPDNSQLPSRLIGAAAVASSSQEHQRESNMVGAPRQ

SEQ ID NO: 499830 - protein, 390 aa, unidentified
MTGTTQRQESTALTSDRLLMAIELGRRQWKVGFTTQLGQRIHRRTLNADAWDRLAEMVTVAKKRLGLPTDAAVTSCDEAGRDGFWIHRYLTTLGLENLVVDSSSIEVNRRARRAKTDAIDLAKLLSMLRRHMGGEKNVWHVVHVPNEEDEARRQPHRELWTLKRERTRVTNRITSLLATVGVYIKVNANFPRRLDQLRQWDGQALSAPLRARVAHEWEKVALFTTQIDALERARRRELRERPDAAVLLVRQLLQLRGIGEQSAWVFVTELFAWRRFRNRREVGAITGMVGTPYRSSLLNHEQGISKAGNKRVRAVATQIAWSWLTHQRQSALTAWYSARFAHAGPVARKIGIVAVARRLVIDLWRYLDAGVIPKGAVFKDHVIGATSSGG

SEQ ID NO: 499831 - protein, 385 aa, unidentified
MIDASFPYLANEEALMTFLGIDLHTNCFTCCYIDSKSGDKQVKTFKIDDCGLSSFYSTLNRRTHVLVEATINTFAFVELFQHLVAEVVIANTYKLKIISVTDKKTDKVDAEKLARVLKMQELSGEQQISPVMVPPKVVQDLRALFSTYTLIRKQITATKNRIHSLLKQNLFPFTKEYIFGKKTRPSIRAISEDPVLAFQLGLLFDLLESLENKADEFADQILLTAAPFSREIDILTSMKGVSVFTAAAIMADIVSVDRFPNSKHFTSYLRSAPRVENSNEKTIIKSTNKAGRKTSIILLSQSLNHFRDSNPKLSAWHDRLATYKKKGLVRMGLCRRVFAEIYQMLKKQEYHYYCDVKNHQKKMGDYCLFLGRHGIEINEKLKLAS

SEQ ID NO: 499832 - protein, 412 aa, unidentified
MQDILTCAMGLDVHRDIIVACLVKGAVDAEPEAETRTFSTLIPEMQKLRDWVIEAECRNIAMESTGIYWQPIYEMLESCFDGEISILVVNARHMKNVPGRKTDMKDAQWIATLLRAGLLKGSFIPDKAFRELRHLTRYRKSVVHDITAQKNRIDKFLQSSGFRFTAFLSDTFGASGRNIIRHLIEHGSIDREALDKCLKTKTRNRIDEILVALNGSLSEHQRRFLNMVFRHLEDLEAHKHTVEDEITEEVLKHTDALNLLCSIPGIDVTAAAAIIAEIGTDMSSFPDSQHICSWAGLSPGNNESAGKRKSVHINKGNPYLKSMLCEVAWIMASHRKLYLSGWYWKVKQRKGAKRATIALARKILSIIYTMLKTGTPYSEECFEQRRQRCERKRANRMVNELQKLGYTVVAPD

SEQ ID NO: 499833 - protein, 332 aa, unidentified
MSYCIGIDVSKASLNVHIRKTDQDLQISNTLGEVKKLYSKLKKIYKKEIEELVFIFEPTGSYSELLRKFCAEKQIKCFIINPKQFSNYAKALGVEVKNDEVDARVLAQAITLAKPHQIKIPVYDADVEQIKELMSFYKFTTKQTAQLKGHLESLVSKDGDKFSIKELKKSIAASKEREKRIIAQVHQMIQSNPTYKKAYENITSIVGVGQIGGIALLHLFIKYPEANQRQITSLAGLNPVYKQSGSSLQTLYKISKSGSVFYRGALFMGVMTAIRYDENFKAFYARLKANGKHTTQAQIAVMRKMILVAHSLYRNDQQYIKNFRNNEVKTID

SEQ ID NO: 499834 - protein, 402 aa, unidentified
MNCVGIDVSKGKSMIAVMRPFGEVVVSPFEVRHTANELSELAGLLKSLDGETRVVMESTGNYHAPVAWLLHDAGLYVSVVNAMLVHDYGNNSLRRAKTDKKDAVKLANYGLDHWLILPRYVPEEDTRLMLKTCYRQYQQYSKVQTMLKNNLISLLDTAFPDANRLFTSPPRADGSEKWVDFVAAFWHCECVCGLSEKAFTAKYQKWCRKHGYNFSQDKALDIYASACGRFGVMPKTNTAKLLVEQAISQLQTTSAALAALKQEMQSLAASLPEYPVVMGMFGVGPTLGPQLIAEIGDVRRFHSKKALVAFAGIDAPPYQSGQIDVRSRSISKRGSASLRRTLFLVMSVILQCAPIDEPVYQFMDKKRSEGKPYRVYMIASANKFLRIYYASVKAYLDSLEHD

SEQ ID NO: 499835 - protein, 413 aa, unidentified
MMKQKLIQSSITMSKEKKKSVSLKQETKLLKYSVGIDMSKDKFDGLISAIDLEQRVKVIASKQFTNSKQGFKELQEWVSRKCKMPIPIVFIMEATGVYYENLAFYLHKNDFYLSVVLPNKAKKYMQSMGFKSKNDKIDAQGLSRMAAEQCLEKWEAPDEAIMNLRGITRQRESIQEIRTQINNQLLAYQCSEFKNQSIINQMGNTIALLNQQIKETEVLVKEEIQKDEELKIKVENITEIKGVGIITVATVLAETNRFKYFKNQRQLVSYSGYDIVENQSGKHVGKTKISKKGNSHIRRILHMPAFSVVSNNEPVFKALYERVYARTKFKMKGYVAVQRKLLVLIYTLWKTGQKYEQQFGVTTGNDEQKILFPLGFEKTVNSRKKSRWAQVPPTQDELPYKESQVVLFPLEQR

SEQ ID NO: 499836 - protein, 418 aa, unidentified
MKIVYPICCGVDVHKTFFVATLITSDGLTPHYSKRRFSTFNSSILQFKQWLIDNNCFDVCMESTGKYWTPVRNLLEDTIRVTIANPKWVKAVKGNKDDVKDSKWIGDLFRLGLVPGSFIPEKPIRILREYTRYRYKLISCKSSEKNRFQNAFTVCNVALDAVVSDMFGKSASSITDYLISSETFNPEHCTSLLKRSLKKKADSVIESIEGYQMTKEQKDRMVIIRSHLEFVQNSIAILDRKLDEMVAPFESAISLLCTIPGVDRNSAITIISEIGTDMSQFASSKRLCCWAGLTPGNNESAGKKKSVRITRAGVYLKPALVQVAHASVQSNKSPYYQNKYKHISKRRGKKRAIIAVARMILTAIYNMLVHGEEWNPSDLYKIDMPQEMLERQKQKAIKQAANLLISQGIIKASEISLL

SEQ ID NO: 499837 - protein, 323 aa, unidentified
MNKSIFQITLGVDIAKKKFDVACLIEDKYKHKHFTNDVSGYTDFVIWFMALCGDVNPLICMEATGAYSLPLADFLINQGYAVSVVNPAKIHAFGKSELSRAKTDKADAKLIARYALSAQPPLWIPPPAIIRELQAQTHRVEHLLEMIQMERNRLDTADKSIIESITKSIAFLETELKTTRETIKNHIKNNPDLKQRSDLLDTIPGIGEASITHLLVVMSDHHNFTHAKQVVAFAGLAPKLRESGTWRGSTHIAKNGDPTLRKALYMPALSAWTHNPVIRVFCLRLKANGKNGKAIVCAAMRKLIHIAFGVLKSGMPFDPNYAV

SEQ ID NO: 499838 - protein, 429 aa, unidentified
MTGSNDTPRGRTLVAIDIAKHYHDVLIEPPTPKRRSRLRLANRREDFEHLAGYLRGLRSSVLVGFEATGNYHRPLAYFLHCQGFELRLIPTLALARTREAMHNSWDKNDPKDAQVILHLLKTGLAQTWHDPMVNDLNDVQELSKTHFQVTLARVRVWHTLRNHYFALYFPEIDRFVRSDHSIWMIQLLASFPTPAAITALSEEEFQTRAWNLVGRKVSKRALLAEIYAAAKQSIGVPVALESAAIAMFRLVLEQYLSLHRLRERISEQAAILLADNPDSRRLMTVPGIGPANALTVLAEAGDLRRFRHHRQFLSFCGLNLSTLQSGKSRGQSHISKYGNARLRTALWLAAQTAVRMRENSFRRKFDNYVRGNPLDADLRRKAYTAVAAKLARVVFGLIKRQVDYRPFFEHQFQVEEPSRASAVGAVSTP

SEQ ID NO: 499839 - protein, 375 aa, unidentified
MKEKVRFLGLDVHAETIAVAVAEHDGEVRSLGTIANREESIRKLMKKLGPVEQLRACYEAGPTGYVLYWQLTRLGVECAVVAPTLVPVKAGDRVKTDRRDAEKLARSHRSDDLTAVWVPDEGSEALRDLVRAREAAKQDQLRARHRLSKFLLRTGRRPAMGLKAWTERYLAWVQQIQFSQPAQEFTLLDYLHEVQHTDERVQRLEQAITEAVKFASPQVQEVIRGLQALRGVAHISAVTIAAELGNLSRFESARKLMGYSGAVPSEDSSGQRQRRGNITKTGNAHLRRIVVESAWSYRFRPAIGPRLRQRQEGVPEEIKEIAWKAQIRLHKRYLKLTAAGKDKKKIITAVGRELLGFVWAIGIKAETAGKLQMAA

SEQ ID NO: 499840 - protein, 402 aa, unidentified
MYVGWDWASQRHDVTVIDDTGQLVDRWRLAHTEAGIHQAMTRLAGHGRPDDLAVAIEATSGIVVDRLLAAGHPVVPIHPNSFNAARPRWGASKAKSDPGDSFKLADYLRTDGHRLRRLQPTDAATRHLQAISRLRTDHLEAKTTATNQLSALLEAHWPGAKAIFARLDSDIALDFLERYPTPQAAQRLGEARLAAFLRRHGYSGRRTPAQLLHRLRAAPVAVDQLDPEVLADCIRIQVRLLRSLLGSLADLGRALAAALGEHPKATVLQPLPRIGQINLAQVLAEVGPILDRTGYLSAAAAEVGATPVTKQSGNSAVVQFRWAANTRARNALGIFADNSRHASRWAAHLYRQARRRGKRHPQAIRILMRAWLRVIWVCWHTGRPYDINHHRAEQRLAQEPAA

SEQ ID NO: 499841 - protein, 368 aa, unidentified
MNTVKFIGMDVHKKMITIAIADEGRQKQPRHYGSIANDPDALDKFCRKMVSTSSRLHFVYEAGPCGYGIYRHLTQKGFDCMVAAPSMIPKKSGDRIKNDHRDAAMLARLHRAGELTAVYVPDAHDEAMRDLTRAREDAVMATRKAKQRLNAFLLRNQIIFCGRSKWSKTFFNWLADITMPYPAQQIALQEYIDTVHENQNRVIRLTDQIRQQVPTWRLAPVASALQAARGVSLIVAVTLLAELGDLGRFDKPSQLMAYLGLVPAEHSSGESIKRSGITKTGNTHARKVLIEASWAYRMKARNSRLLLKRQQALPDVVRQIAWKAQLRLCNRFRRLAAKGKPKQKVVTAIARELSAFLWAIAKQVQPVI

SEQ ID NO: 499842 - protein, 369 aa, unidentified
MGDITDIFVGIDVAKVRNAIAIADGERGGEVRFLGEVDASEESMRRVVKRIAAKHSRVHFCYEAGPTGYGLHRLITSLGHSCIVVAPSLVPRRPGDQVKTNRRDAISLAKLLRAGELTAVWVPDEGHEAMRDLVRGRAAAVETLRVHRQQVSAFMLKHGRIFPRKKGWTMRYLRWLQEQQFDHPAHQIVLQEMVEAVRLSKERVDRLGQTIEEFVPNWSLAPMVRALQALRGIDLIVAVTFVTEIGDVRRFESPRQLMGYLGLVPSERSTGTTVRRGGITKAGNGRVRHMLVESAWTYRHPPRIGTKKLYLLQQVTPRVRDIAWKAQTRLTGRYRALSGRGKKATVVCTAIARELVGFMWSVAREAQIN

SEQ ID NO: 499843 - protein, 354 aa, unidentified
MSQQLSTTIAVIGVDIGKNSFHVVGLDQRGAIVLRQKWSRGQVESRFANMPPCLIGMEACVGAHHLSRKLKGLGHDARLMPAKYVRPYSKGQKNDFRDAEAIAEAVQRPTMKFVATKTADQLDLQALHRVRERLVSQRTGIINQIRAFLLERGIAVRQGQRFLRAELPRILAAPPDVLSPRMVHVIEDLAGDWRRLDERIEGLSGEIEAIARRDAGCERLMSVPGIGPIISSAMVAAIGNGDAFAKGRDFAAWLGLVPKQISTGDRTILGKISKRGNRYLRVLFVQAAWVVLIKPKSWERHGLKPWLEAAKKRLHHNVLAIALANKLARIAWSVLARGRSFEARMTNEANAQPV

SEQ ID NO: 499844 - protein, 359 aa, unidentified
MLILAIDLGKAKSMACWYQTTDATHEFRTVPTRPGDFHTLLGDRPVDRVVVEICDAAGWVVDLCRTLGIAVQVANTNQEAWRWKNVKNKCDRGDGLKLARLSAMDQLSLVHVPEKPVREWRSLILYRHKLIDRRTSVRNAIHSILVAQGRAIPGRRSVWSDDTMSQLAELAKPLGECTATEDLWRGHLKMELEHLDELCRRVVELDRKLDALGEADARVRRLRTIPGVGPRLSELVVAMIDDPNRFASARQVSAYAGLVPRRYQSGEMDRSGRISKAGCGKLRKLLTEIAWGMLRHNPHGRGVFDRISKGQKTRRKQAAVARWAARCCAGAGPCCVTAASGACRRLSGAAQRRVAAEVH

SEQ ID NO: 499845 - protein, 449 aa, unidentified
MRKPQVIEDEDHQRVFERVAAIDVAKAAGMVCTRMPNPSRRGAWQSTVWEVPATMNAVLALAGRLLVDGIEMVTLESTADYWRIWYYVLESAGLAVQLVTPSQAKNLPGRPKTDRLDAMWLARLTEMGLLRPSFVPPAPIRVLRDYTRARTHLVQDRTRCWQRLEKLLEGALIKVSAVASKLTTVSAQDMIRAMIAGERDPAVLAALARGRMKAKHGALVEALTGMFDDHHGELAQMLLDQIAFCDTRITALTARIGQHLAQIPAAWGVDADGSTGPSAGTGPGAAALPAARRLAEVPGISLELACSIIAETGLDMSRFATAGHLVSWAGLCPSARQSGPRNRTAAKGQGDGYLRGHLGQAAIGAARTATFLGERYNRIARRRGKAKAQVAIARTLLVITWHLLADPAARYTDPGPTYYQTKIDKNRKARSHIRQLEALGYTVTLTQTA

SEQ ID NO: 499846 - protein, 420 aa, unidentified
MTASKERTIVSVVNPICCGVDVHKESITACILFNDSKGKEQTLIQEFSTFTDDLFSFRDWLLTHNCPILAMESTGVYWQPVHNILEGHIEVVLVNARDIKNVPGRKTDIKDSEWLAGLLRHGLLRSSFIPPKEVRTWRSLTRTRRKYVNTQSSYKKRVQKLFESANIKIDSVVSDLFGVTGRNLMNLLVSGHKDITMKDIENCVRGRLKSKQQELYRSIKGFFTEDHRFMLQTLLSTIASLEDTIASLDQRIDNYMIKHKELLERLKEVPGISDISARDIIAEIGTTLDAFPSEAALSSWCGLCPGNNESANKRKNAKNHTWKNQLKPVMIEVGWAAARTKNTYYHDKYHRLKTRRGHKKALVAIAHRVMNCIFHIIKYGVHYKELGMNYLDEKTKLSKLYRLKKQAESLGFKLAPVTAE

SEQ ID NO: 499847 - protein, 341 aa, unidentified
MKKFIRTAVDLGKNYFQFHGLAGEGGAPVSRKLKRSKVLEFYAQIEPCRVGMEACGSAHHWARELIAMGHEVVLIPPAYIKPYVKRGKNDAVDAAAICEAMARPDMRFVPVKSADDQAVLMLHKSRELLIKQRTMSVNALRGHLAEFGLVVAKGIGRVDELLALAQADARLPQIAKATVTELAQHLEGLDQSIDGIDDDIARAHRKNPKSCLIDQVPGIGTLIASVVAASAPDPGVFKSGRDFAAWLGLTPRQHSSGGKEKLGAITKQGNRYIRKMLVVGATSVLRVVGKRKGALADWINALRARKPERLAAVALANKLARICWAIMTTGESFRTETYVKA

SEQ ID NO: 499848 - protein, 391 aa, unidentified
MEKNNSLMSGTTIGLDLGDRHSQLCVLSSSAAIEDQFRISTTQRGLERAFGEREPCRAVMEVGTHSPWVSQWLKQRGFEVIVANPRKLPLITQSDEKDDRTDAELLARLGRTDPKLLRPIEPRGETAQRDQALLQVRDGLVRSRASRITQARGLAKPLGMRLPSCTTGAFANRMRKAGLEDAFPGMRALVETVDHLTQQIRALDREIETISESRYSETALLRQVPGVGPITALSYVLRIEDPRRFKRSRSVGAYLGMRPRRRQSGDSDPMLRITKAGDPYLRRLLVQSAQYILGPFGPDTDLRRFGERLVARGGRAAKKKALVAVARKLAVLLHRLWVTAEEYEPLRHAHRIETGGIGAGHGVEPRQDAARLLHIAPILEGDATRRRGETM

SEQ ID NO: 499849 - protein, 412 aa, unidentified
MPDDQSLPNLSNLSWEVYVAFKIFRKNCCGLDVHKTWIYACMGITDTNGRTEYKQARFSSFTKGLQELADWLAKYDCNDVCMESTGKFWIPVFNILEKTCWVTLAYPKYTKPQKGNKTDHKDAKWICDLYMCDMVNPSFIPPPDIRQLRDLMRYRSKLTNIMTSEKNRALNCLTVSNLKLDDVFSDVFGKSSRSVIRYILEHPGETFQVAPFIDRRCKHPVEEIQAVIDGTISHQQAVKLRECLQHLDELEVHKTNVEKEILCLVQQYPYQLELLQTVLGFSGNIMTAIALISEIGADMSVFPSAKHLVSWAGCCPRNDQSSKKVKSTRISRAGVYLKPLLVQVAIQPFTANADKLSAAGALEIRCQICDGRFLSMWAALFIFLGCPLPPCPKNLHVHNGRIVILASVAWIF

SEQ ID NO: 499850 - protein, 358 aa, unidentified
MEKQNNFESLRLYVGIDVHKKQWSVSIFTDAAHHRTFSQPASAEALKSYLDNHFPNASVSCAYEATKLGYWIYRKLIDFGYSCLVVNAADIPTSNKESNNKTDPSDSRKIAKALRAGLLTSIYVPQQVTEGDRQLFRYRKRVLADLTRIKNRIKDKFLFTGTKIPEEFDNSNWSKAFLKWIRTAQLPDSSTRLTVDYLLEQYHLIYRHFLKVSVEVRKLQRTARYKGDAKLLRSIPGIGPLTTVELLCEIENINRFACFKKFNGFIGFKPGSHSSGDHDWKGSMTYRRHKSLRSSLVECAWTTLQKDPVMLNRYNELKQRLTGKRAIIVIARKLVSRIYYVLKNQKPYELGVIGRLNH

SEQ ID NO: 499851 - protein, 327 aa, unidentified
MILSALGIDIAKLKFNVCLLNTNGKLKHKVFANTTDGFQQLAAWLSKQGAQRVHACMEATGAYGEALALFLHAAGHTVSVVNPAAIKSFAGSRLSRTKTDKVDAELIARFCVAQQPLAWTPPAAEVRQLQALVRRLDALVEMHTMESNRLEAIITVEVVKASVQEHMIYLDQQIEQTEALIRAHINDHPRLKRQSELLDSIPGIGAATAATLLAEIADITQYESARQVAAFAGLVPRQRQSGSSVRGRTRLSKIGNARLRKALYFPAITALRCSAFFKEWATGLRERGKCKMSVIGAAMRKLIHLAYGVLKTGQPFDPEWTQKEKIA

SEQ ID NO: 499852 - protein, 360 aa, unidentified
MSVTATHPSPDHSYYAGLDAHHAYVVVAVVDKQGTVVHQASVRTTEPARLVDTLAPYHSATHPLAVVVETCPFWPWLYDLLVPCGIAFQLAHAQELEAIAKAARKSDQRDARLLARMLAGGLIPTAYAKPPAQREQACLVRHRAALVRHRTMLANRIHSQLHAVGLTLPRERLLRLATHSWLRDTAGPLLRPEQRRLIESHWRLVRRLTRMLQRLEPAIVAAAQADPAARLLATIPGIGPYRALLLATELMPLTRYAAEGKFVGYAGLAPITRRSADTVHHGPLPNGANRWVRGALISTVPTHLRYAPDSRLSQYYARQKARLGWQIARVATARQLARVIYHMLRTGEGWRATPAPVGRS

SEQ ID NO: 499853 - protein, 405 aa, unidentified
MQVYIGIDWSKSKHDICVQNAEGIILAEFCVPHSSEGFACLMERIRGLGATPQDCFVAIECSYTLLIDFLWANGFVHIWVAPPNRVQAERKTRTSSGAKSDPGDAWIIADLVRTKRYLLQPWSPGSALLQRIQIQVRHIGNLTRDIVRQTNRLRDLLLRYYPAAATLFSSLDTQISLHFLRNFPTPEDASGLTWDTFRQFVRQHRYPHQSQLTARFSHLQKNHLQADPVTSAAFRAITIQTAEATLAFVQAKNHALKELKGLFAQHQLSSIFASLPGAGAYLAPALLAKLGEDRARFSSPSSLQMLAGTCPVTKTSGKRRLVHFRRSCDHEFRSIVQQWAKTSLSESPWAQMYFRQVRPRCQSDNHAYRCLANRWLTVLWTLWQQQLPYDENRHLKEQAARKTVS

SEQ ID NO: 499854 - protein, 343 aa, unidentified
MDHFAGLDVSVKDTSVCIVDDTGKITREVKVASEPDALLTVLRNPAYRFKRIGLEAGPLSQWLFSALAEADLPVICVETRHMRAVLKAQINKTDRNDARGIAQMMRAGLYRPVHVKTLRSQKLRMLLTHRKLLQAKAIAVENDLRATLRNFGLKVGVVGAVKFEARVKELIENFPDLVALVEPLLVVRRVLREQISILHRRVVAAVRNDEVCRRLMTVPGVGPVVALTYRATVDIPARFRKSKSVGAVFGLTPARNQSGESDRPGAISRCGDEMMRTTLYEAAQVMLLRSAKWSWLKAWAMKIAGHRGMKKAIVALARRLAVILHRIWIDGTEFRWTREGAAA

SEQ ID NO: 499855 - protein, 440 aa, unidentified
MSKRAYRAARVNDVNWDQLAQGKDGLDITVGVDVGKFSLWAVCRWADGRFERPWRVQNPVEIPTLLALLKRVSAGRKLVVAMESSGTYGDALRQALADNQIELQRVGGKAAHDYAEVFDGVPSQHDGKDAAVVAELAALGKAMPWEYQPADPWEQELAYWVEWMVAHRQMLTIWQGRLEGLLARHWPEATQVLKLSSGTLLRVLKRYGTPQALAADGEAAKLLARWGGAFLAPEKIEKLLAGARASVGVRLGEWQQRQIQNYAQQALAARQEANRAGRRLRSLAEGHAVLQAQGKVVGVPTACVLWASTGDPRKYHAAGAYRKAMGLNLVERSSGTYQGKLRISKRGSPRTRQWLYFAVLRLVQKCGVRSWYEAKKDHDEADARRALVAVMRKLAVALYYVGVHNEEFQPRRLFGRIRRHRGSPGEQKSRTKRRSRAEQI

SEQ ID NO: 499856 - protein, 355 aa, unidentified
MKNQAIQYLALDVHQATTVATARDEQGTIRMRATVPTESSAIVGLVRGLGSRVHVAFEEGTQAQWLHDLLEPHAERVVVCNVRGRSETTNKSDRIDADGLSEMLRVGSVKSVYHGGSSVLTLKELVRCYMNLVDDSTRVMLRIKALFRARGIPTAGTSVYRASERAKWLAAIESRGARMRAESLLQQLDSLFELRPKAKAAMIKEARRQSGWKVLRSIPFFGPVRVALMLAIIATPFRFRTKRQLWPYIGFAVITRSSADQEFVDGKLRRSRRAPLTRGLNRNHNPALKNVFKGAANAAAAKPGPLKDFYDSCVRRGMREELAKVTLARKISSIALRLWKKGELWNPDKLTTQTS

SEQ ID NO: 499857 - protein, 468 aa, unidentified
MKYNQQRKRTGKSERRVSTSLFERIQPDAAGVDCGQKSHFVAVPPERDPEPIREFRTFTADLQRLAQWLAQCGVKTVAMESTGVYWIPLYEILEQRGFEVVLVNARDVHNVRGRKSDVKDCEWLQQLHSVGLLRASFRPAAAMVPLRSYLRQRAILVEELTARIQRMQKALTEMNLMLHIVVSDITGVTGLKILHAILAGARDPERLAVHRDGRCHASHQELVAALTGNYREEHLFSLRQNFTAYQFHLQQIAECDTEIEALLNTLAAQQPPPSAALPTPRAKPTKKHAPAFDIRTPLHVLTGGADLSQIHSIGPQAALQLIAEIGTDMSRWPTEHHFASWTTLAPNNKISGGRLLSSRTPPSANRAAVILRRCAMSLGRTSTALGAFYRRLAVRIGKAKAITATARKLALLVYRALSRKLTYLDPGATAYLKLNHARELKSLRKRARLLGFELVDRSSGEVLLNPVS

SEQ ID NO: 499858 - protein, 346 aa, unidentified
MTIVEAARTVTGGIDTHGETHVAAVLDEVGGLLATGSFEANPDGYSALLSWLAGFGAVGKVGVEGTGAYGAGLARFLARAGVEVIEVDRPNRQDRRRTGKSDPIDAVEAARAALSGRAHGHAKSRDGAVEAIRVLVVAKRSARQARVKALTQMRQLTFTAPDQLQCRIKGLPAPQFIAAAQGLRPTRSADPVMAATKASLSSLAHRIGELEEEIVRLDTMITPLLQTHAPELLGIYGVGIDTAATLLVTAGDNPERLRSEAAWAHLCGVSPLQASSGKVTRHRLNRGGDRQANRALWTIVITRLASDPETQAYMERRGKEGRSKREVIRILKRYVAREVYRSLPHG

SEQ ID NO: 499859 - protein, 403 aa, unidentified
MDVLHTHCAGLDIHKDTVVACSRRASAGKVIREVRTFKTTTSELLALPDWLASLGATHIAMEATGVYWKPVWNILSDGDFELILANAAHVKNVPGRKTDVNDATWLADLLAHGLIRASFVPGAQTQEQRGLLRTRKQLTRERTSHIQRLQKTLEEANIKLDSVISDVIGASGRAMIEALIEGETDPLRLASLASSRIKASPAALGEALRGRVTRHHRFLLRLHLQQIDALDRVIAEVDKEVEANLAPFRELIPVLTSIPGIGDLAARVLLAEIGTDMSRFPTSGHLVSWAGLCPGNDESAGKRRSTRMRKGAPWLKTVLIQCAWAGARKKGSYLEAQFHRLRARRGAKKAVGAVTASILTAACHMIAEGTFYQDLGPDHFKRRARPNHIKRLVAKIQIKPLAA

SEQ ID NO: 499860 - protein, 382 aa, unidentified
MYYVGLDVHAQRSSMCILDDNGRRVKHLEVKGAWPRLLEVVDQQVPKPFVICYEASCGYGHLYDQFSRRAERVRVAHPGQLRLIFRSKKKHDRVDGEKLAKLLYLDEVPVVHVPDVDVRAWRGLINYRRKLVARRAAVKTQVRALLRGLGITVGVTGGLWTKKGIAWLTGELALGSAADRVRRDVLADDLAHLEAKVATVEKELDRIATDHPGVALLRTIPGVGPRTAEAFVAHVDDVGRFARVKQVGSYFGLVPCQDASADRNRLGHITKDGPAGARWLAVEAAWQGRRRSPRIRAYFDRVMRNDPARKKVALVATAHYLVRVMAAMLRSGEVWREAQQQQPQQQQPKQQQPKQQQTSALDQQVAATTKETKAKAKTSDKE

SEQ ID NO: 499861 - protein, 360 aa, unidentified
MMKNSVAAAVHAALNAERPVILDNPPAALAEEPRPRQEPTTEAVPLPAECWVGIDVAKAHLDGATWPEIERLRVARDDAGLVALTAWLRARAPRLIVLEATGGLEVPVVTALVEAGLPVAVINPRQARDFAKATGRLAKTDALDAAVLAHFGHAIGPEPRPWKDAEAQALTAVIQRRRQVVEMLTAEKNRLASAHPHVKPDLEATIAWLEQRLKDHDRDLQQRLRASPVWRERDDLLRGVPGIGPVTAATLLAALPELGTLDRRQISALVGVCPFNRDSGRSRGRRMIFGGRAGVRAVLYMATVTASRCNPVIKAFYQRLRQAGKPAKVALTACMRKLLTILNAMLKAKTPWQPPAECRS

SEQ ID NO: 499862 - protein, 316 aa, unidentified
MQIFPNIGVDVAKDAVVVACAAQSFPVHSITNQRAPLLVWLKSLPAGSRIGLESTGGYHELLADLAYAQGHTVFLLNPLDTKHYARAMGNRAKTDRVDAELIARLVAQEHIRLRPYTPPTANQRRLDRLIRRRAKIVRIKSTLKMTMSNLSGFSAELKAVSLKLDALIAKIDSAMAAIAACSPQHVDAQQHLQTIVGVGPVVGMALTNTLERVPFRNADAFVAFIGYDPRANDSGHKIGRRRLSKRGPAELRRLLFNAAMAAIKSKVWKPIYEHYRALGWSTTATLVIIARKIARTAWSIHHYHSTFDPERIAKNA

SEQ ID NO: 499863 - protein, 421 aa, unidentified
MIYIGVDLSDKFFDSCITNSRGDVLARSRFDFDNDGFCSLVKLIQEHQTDNNENSNHENSMEKFNECIIGLENPRSRLVDFLVGRGYTVVLTNPNAISSYRQSRKPSKAKSDEADAQLIADYAREHHKSLQCIQIPDETIRELSLLLEDRDRLIQQKVRFSNQLISTLKEYFPQALDAFGCIDNKCTIKFLKRVDTFAQVKALSRKKREQLLTECGVYRKDSKERFYQAMNKSEYHISQAVVKTKTRLKNVIITHLDLLTQQIQEYETQIQNLMDDSPHGHIFKSLPGAGYILGAKLLVMYSARDFNDATEAQQLFGTAPYTAISGQSKFVGFRRGANKLGRNTFQQFARCSIKASPWANKQYVKKRNQGKGSHHAFRCLANTWVKITFAMWHSKTTYDERKHMASIANHIINQPAFVNRD

SEQ ID NO: 499864 - protein, 367 aa, unidentified
MLIHVPPEVRVLAMDVHKNTISTGLLEPGSDSPVLDRLSTDDESVRRLIARFAEPARVWACYEAGPTGYELARVLRNAGMRCEVIAPSLIPVRQGDRVKTDKRDARRLALLFRGGQLSAVRVPTVPEEAVRDLCRARADMVIDRTRARHRLGKLLLRHGIVWRGGDNWTLKHYRWLDGLRFEDSALRVTFAHYRATLTAREAAVDAIDADLALWFDRAPFADAVHRLAAYRGVTELGGLTLASEVCDWRRFPTAGMFMAFTGLVPSEDSSGERTRRGGITHAGNGHLRAQLVESAWAYKSRPAAGTVIKRRQEGLDPAVVARAWAAQLRLCGKFRRLDARKTNRKIVVTAVARELAGFVWAEMTATA

SEQ ID NO: 499865 - protein, 536 aa, unidentified
MTRKHTYKAEPVERVRVEALLPLVTAGCIVALDVAKQKFVAALATLAGDVLKLFRFEHPTETKKFLAIVMELRAGVERGKLKVAMEPTGTYGDAIRHQLVKADVPVWMVSPKRTHDSQELFDGVRSLHDPKSAVLVAKLCAMNLATLWQPPEPTRRQLRALTELRAHEQGHEERCYGRLEAILARHWPELGRFMNVRGPKSALRLLSSYPSPAHVCADPDAVASFLQKASRGNLSTETVQGLIADAKSSLGVPMVEEEEQYVRRLATEALEMRQHAEQLEVSMSKHAQDDAALGRLMGWMGVFTAAVLIALCDPRQYATARQFEKACGLNLREKSSGEHAGRVSITKRGPGLVRQVLYLFALRMIQGSVACRIWYKRRRGYTADSKQRAVVAVMRKLVRAIFHVARGNEFNESKLFDLRRLDLEGDEAKRKLEADEAKRKLEADEALEVDAVKRSGIDGGSARNSKRLPARPSASQVPFDRRLLAAIEAAREAHELLARADTRQRPGKDLQPPMEPRPIACETNHTHAAKGARAFA

SEQ ID NO: 499866 - protein, 345 aa, unidentified
MTTMNYIGLDVHKKTISYCVKDVSGRIQQEGKIGSTRRELDCWMKTLPQPWTVAMEATIFSGWIYDHLLPHATQIKVAHPLMLRAIAAAKKKNDQIDASKLADCLRCDFLPECHMMPRAIRDRRRTLRYRHLLVRQMVQRKNRVSGLLMETGVEYNKQRLHKVSYFRELLSANGEVPPSLRPLLKLSRETIERCQKTEYALVSSLQRDPVLADRIKRLRTVPGVGPITALTWALEIGDVSRFGSIKKAISYCGLCGEERSSADKAMRMPLSKQRNKHIQRALVEAAKLAPRQNHEMAVIYDQERQKGNSNRATLAVARKMVAYLLAVDRQQRDFVPAEERRTTAA

SEQ ID NO: 499867 - protein, 343 aa, unidentified
MKITTIGIDLAKNVFQVHGVDERGKAGLKKQLKRVLVLPFFANLPPCLIGMEACASAHFWARKLQALGHTVQLMAPQYVKPYVKSNKNDAADAEAICEAVGRPNMRFVAVKNAEQQAILAVHRARQGLVKARTAQANQIRGLLGEFGVVLPQGISHIAKRLPEILEDGENELPGSFRQLLARLGEHLQHLAGQAAELEGEILRWHRDNEASRRLAQIPGIGPLGASALLATVGDARTFANGRQVSAWMGMVPRQASSGGKSTLLGMSKRGDGYLRTLLIHGARSVLQQVERHPERAAPWLKQLLARRPKNVVAVALANKNARIAWALLAHGRAYERHYTPAAT

SEQ ID NO: 499868 - protein, 337 aa, unidentified
MKVTLIGIDLAKSIFQVCGVNQAGKRIFNRQLRRAKLMEFLIQHPEAVIAMEACSGSNYWGRELKQRGFKVMLIPPQHVKPFVKGNKNDRNDAFAITEAARRPNLKCVEPRTPAQTDMIQVHRVLDRMIRQRTALINQIRGFLSEYGVVIARGKEKLLATMPDILEDAENGLTPSSRALYQEMYEQWRQANEAIGRLEKGLKSQSKTDEAAQRLMKIKGVAVKISTATIAHAGNGYGYKNGRHFSANLGLVPREYSSGGKQKLGAITKRGNRYLRRLLIQGAWSVIRNADKNDDRLSRWARQVVERRGKHKAVVAVANKMARIMWSMLYHQTEYRAA

SEQ ID NO: 499869 - protein, 391 aa, unidentified
MIFVGIDVAKDKHDCFILNSEGTVLADVFTIANNRIGFETLLSRIQSCSQGESKIKVGLEATGHYSYNLLGFLLDSGLATYVINPLHTNLYRKSLSLRRTKTDRIDARTIAMMLMSDVDLKSYSNTAYHNEELKSLTRYRFDKVKERAKLKSSVARLVNILFPELEKLVSSLHIAVVYALLSNYPGASYIANANTEELAETLCTASKGRYTKSKTAEIQVAAGVSIGSKMPAKSMELKHTIALIRELDKEISEVESAIDKITSQMDSPIFTIPGIGRHMSAMILAEVGDFSNFASADKLLAYAGLSPSTYQSGQLQNCYAHMEKRGSRYLRYALFNAAKYVCLWCPTFSAYLEKKRSEGKHYNVAISHAAKKLVRLIFAMQRSGKAFLADY

SEQ ID NO: 499870 - protein, 435 aa, unidentified
MEEVTDEPLYRDRVCGIDIGKAGMVATIRVPSDRDPARRMAETRTFGTTKREVLALADWLRCWQVPAVVMEATSDYWKGPFYRLEAEGFECVLADARQVKNLPGRPKRDPSDSRWLAACFERGAVRPCFVATPEFRVIRLHTRYRRDLAEERAREKNRAEKLLESAAIKLSSVVSDLHGVTGRDIMEHLIAGERNPKALAQLARARARRKIPQLEEALEGAEFFTAEHAALLAAMLARIGRVDEEITRLSGVIERLLAPYEEQLQQAESMPGWGRRAAQDAIAETGVDMTRFPTGAHLVSWAGRAPLDRQSGTRKGRARAKKGNRYLAGLTGETAAAAGRTQTREGARYRRLARRRGKLKAQVAVGNTQLKVYHKLLSTPGARYQDLGPDYYERQRDTRRQIAHHVGKLGALGFEVTLARIPEPEPDGPGQPQAA

SEQ ID NO: 499871 - protein, 387 aa, unidentified
MPQPNDLSRSLVALDQDSTIIAVVEMSQSSWLVAGMLPGIERQPRKKLEPSAERLLGLLHRWRDEAVKAGRQITRIALAFEAGRDGFWLARWLRAHGVEAHVIHPSSVAVSREHRRAKTDRLDTELLKRGFLGWLRGERGHCTMARIPTIAEEDAKRPNRERECLVRERTRIVNRMKGTLARLGIRNFKPTLRKAAERVTTLHTPEGSALPPNVSAELQRNMARLGFVVSQIKEIEAARQKRLEQEPETEPHAMVRHLARVVGLGVETADILVNEVLSRPMRDRKAVARYAGLTGSPDESGTKRREQGLAKAGNARVRRGMIQLAWRFLRFQKESALALWYRARTADSRVGTRKTMIVALARKLLIALWRFVTTGETLEGVVLRPAG

SEQ ID NO: 499872 - protein, 322 aa, unidentified
MPGPILGVDIAKKKFDAALLLNDKLKHKVFKNDQEGFAELSSWLKKQGVDHIHVCMEASSTYGDELATRLHDQGHVVSIVNPARIKGFAQSELLRTKNDRVDAGLIARFCLAMHPEPWTPVPPGMRRLQAMVRRIDALIGMRTQEMNRIDVSHESIKPSVRDHIAYLDQEIESLKEQIAAHIKDDQELKTKRDLLKSIPGIGEATIAAILAELHMFEKCDRVQKIVAFIGLAPRELISGSSVRGRPRICKMGNSRMRKVLYMPALVSIQYNPVIRAMYERLRKNGKNGKVIVCAIMRKLVHIIFGILKSGKPFDPNFRPNYA

SEQ ID NO: 499873 - protein, 369 aa, unidentified
MKKHSKKANEKGRTSATKGQPEVTIGIDVGDQYSHFCWLDAEGEIVKRGRMSSTQAGLKKEFGKIPAGRIALETGTHCHWMSEVLSQLGHEVIVADARELKSISGSRRKNDPRDAEQLARLARVDVRLLHPVMMRKRKTQQDRSVLRARDLLVASRTQLICAIRGMVKADGSRLAECSAESFPQQVGQSIPEGLRRALAPLLETLDVLNEKIRYYDQLVTHMAGEEYPETCLLRQVPGVGPVTALYFRLVIENAQRFQHSRDVGSYLGLVPKQQDPGASTPQLRISKAGDEGARRLLVNCAHYILGPFGPDSDVRRWGLLLAARGGKNAKKRAIVAVARKLAVLLHRLLVTGEVYEPLRNSQAAERAAA

SEQ ID NO: 499874 - protein, 343 aa, unidentified
MQTVSTIGLDIAKSVFQVHGVDAKGLVVVRRQLKRRYVLAFFEKLAPCLVGIEACASSHYWSRQLQALGHNVRLMPPAYVKPYVKRQKNDMADAEAICEAVTRANMRFVPTKTPEQQSGLVLHRTRHLFIRQQTSLINAIRGHLAEFGVTAPVGRKGIEELLRVIADPSDKRVPDVVRACLAALGSQLLSLKKQILDFDRMIMAWHRSNQTSKRLNCIPGVGPLLATALVASVADPKVFRSGRNFSAWIGLVPKQHSSGGRARLGSISKKGDRYLRGLFVAGALAVIRYAKLHGTKYRPWVAALLARRPTKVAAIALANKLARMAWAMMARGERYNYPAALRV

SEQ ID NO: 499875 - protein, 354 aa, unidentified
MAVASIAHAHVPVRIIVGVDTHKDSHVGHAKDGLGRDLGHLEVPTTARGYAALLAWAQGFGEVAAFGVEGTSSYGIGLARYLQGQGQLVLEVIRPGRQDRRFRGKSDPIDAEVAAAAVLSGKARHLPRASAAKVEMIRALRIARTSATKARTQAINAIKALVVMAPEAVREPLRELPTARLVATCARFRVGPIDDSTTAIKAGLRSLATRYQMLDAEAGLLERQIDQLTSATDPLLRSRFGVGPDTAAALLLAAGDNPARLRSDASFSMLCGSSPLPASSGQTKRHRLNRGGDRQANAALYRIVMTRLRWHDQTKAYMRRRLNEGKSKTEVIRCLKRYVAREIYQVLTAARERP

SEQ ID NO: 499876 - protein, 424 aa, unidentified
MGQWGARGVVSLTDRTSIDGNTKVDKAQTAWAGIDVGKTHHWVCVLDAEGNKLSSMKVANDQTEITATIATTVGALADRIVWAVDIIGAPSAMLLALLIQAGQSVRYASGRVVAAMSAAYSGEGKTDAKDAYVIAETARIRRDLTVIDPGTDLVRNLELLTGHRADLIADRVRMINRLRDVMTSVFPSLEREFDYSSCKGALVLLTGYASPERLRRVGETRLAGWLQRRRVRNYAAVAARAIAAARAQSVTLPGQEIAAAMIAELATNTLALDQRLTELDAQIAATLDEHPQAEIIQSMPGFGPILGATLLVAAGDLAAFPSAGHLAAAAGLVPVPNDSGRRTGNLHKPRRYSRPLRHVFYLSAQTSMMRDGPNRDYYLKKRDRGRTHTQAVIALARRRIDVLWALLRDERIYTAIPPTLAQAA

SEQ ID NO: 499877 - protein, 346 aa, unidentified
MKVLKQVLGVDVAQKELVVTLGRMHEDLSIELYAHKVFKNSENGFTALLSWVNKLSDKNQKVRFVMEATGVYHQKFAYYLEEKEYEISIVLPNKISSYIRTLENKTITDKSCSEAIAQFGLERKLDLWLRPNKLYTNLQQLTRERDQIVAERVVVKNQLHAESAQGDPHEKSLQRLKARIRFLNEQEKEIKYDIEAYIKEDENLNQQIENICTIPGVGRLTAVIVLAETNGFELIRNKKQLVSYAGFDIKEKLSGTSVKGKPRISKRGNRNLRKAMHLPSLSAVKYDKHFKDIYTRIVSKHDIKMKALIAVQRKLLEMIYILHKNKCPYDKNYEGIKENRAQIQMV

SEQ ID NO: 499878 - protein, 396 aa, unidentified
MITVGIDIGSRQHAVARCRSGQGQAEREVLRVTQDRAGFDRLDAWLAGQDEPVGRITMESSGHYWMGLASHLRGGSVSVRVVNPLGAKYFAKSRMSRTKSDPADARSLALMAQQDHTEPHDPLEGVELRQASRFAMTLVTEQARVCQRLVRLVELGFPELGELFDDPACRTAREVLRVAPTAAVARKRRTSTLAQANAGPGHRRLGEAKAERLKEAARDSIAVAELEDEVAFEVGLLLDQYDLLEEQIARAEDHLASLLDGELARRLQTIPGVGPATCAVFIAEIGDIWRFDDADQLLAYAGVHPAERSSGKRGADPETSWHMSKAGNAHLRAAAYRMAVVGIQHNPVIKAHYERKRASGKSKMNALGHCMSKALNLVWGVWRNEADWDPDWGSRA

SEQ ID NO: 499879 - protein, 359 aa, unidentified
MASVSIAHEPAAGVTVGVDTHGEVHVAAAFTSDLGRPLGHLEIPTTPAGYGRLLRWAQAFGDETPRFGIEGTGAYGAGLARHLRRAGCTVIEINRPNRQTRHARGKSDPIDADAAARAVLSGEASSVPKSDEDRVSMIRTLRVARRSAVQSTTQISNQVKGLIVTAPAELREQLRLLSGHDLIETLAGLRPGSITTPTAAAKMALRVLARRHQHLGDEIATLNVELERLTQEVAPELCALKGVGPDVAGALLVAAGDNPERLRSEASFAHLCGVAPLPASSGKTTGRHRLNRGGNRQANNALWRIVIGRLRWHQPTKDYVARRTAEGLSKKEIIRCLKRYVAREVFRLIVAERELARAA

SEQ ID NO: 499880 - protein, 478 aa, unidentified
MAKAANQRSDLQVVPLLKHEPLYIGIDVGKVKHFAGFVSTTLLERHQRFEACPALAFENSREGFRALVERIGHYAVLDHCFVIMEKTGHYHRALQQYLQELDIPVYLMHVQERAKGMMKTDKRDALGLANHLYNQLELGVQVADQTQLVRQAVAPTPAAAQLRGLIRHRYELVRESTQRKNKLIAICDEVFPELPRILKNPNAPTALAIRQQFPTPHAVATASLTVLQEIRGTAHSITDSKLMELQRLAAQSIGTKDLTRQRGLVLEQTQLIKELKLLQEHIEQLETEIRTIVEQAREGQILRSMGIGHIQAATIIAAIGSIENFSNAGQLKSYCGWAPVRDQTGTTFDRTHLTRGGTRMMRQIMFLIVVRLIQQPESEWGQLYERLVQARCPYDERTGERKGKIRVIGRVAGQMIETIYALLKTDAEVLAKVPPGKEPPPPTLYDPALHRRHREGYYRPLKSSPRPTVITLLPNPQE

SEQ ID NO: 499881 - protein, 394 aa, unidentified
MKLVGIDIGKNQHFFCIMDKDTGELIVQPASFSNDKHGFDLLIQNLKPYSKKSILIGMEDTGHYHFALLRFLLDRNFSVALINPTTTDFSRKMQGGITKNDKLDTLTICDVLDTPERKKQYRITKVNSFDLYEQKQLTRHHHNLKEELNVYTNRLQKCIDIVFPEFNSLFDSKYGRVYMSVLKTFGSAEAIANADIRRVRKCFEYKGRGRRISLTPQMLKDRAKSSVGIPSSADVIQIKHLVGQIELIHEQITEIDKKIEEFSLKTNSPIFSIPGISHFSGTSILAELGDISNYSNARKIIKAAGVAPYHYESSQFTAQHTAITKKGSKYLRKTLYQIILPVIRYNPVFKEYYQLKISQGKGHRCAQGHCVRKLLRVIYHLVTTNQPFNPDLLR

SEQ ID NO: 499882 - protein, 483 aa, unidentified
MARRKPSTFERLQRGESLNRKERREVQRRLNLDDPGLDIIHRDAAGIDVGNESHFVSVPPDRDPQPIREFGSWTAALEEMAQWLKQCRIRTVVMQSTGVYWIALHDVLQRHGLEVNLVDARGSKNVPGRKSDVQECQWLRKLHTYGLLRPCFLPPPEIHAVRTLWRLHQQHVRDAGRCIQQMQKAMIQMNVQLHIALSDISGVSGQAIIHALLKGERDAKVLASLRDPRCQASEEEIVQSLQGNWKDDILFELQQAVEAYDFYQRQMENCDQQLQRYMAALSTRTTVLAPASTLPSTKNEKKGRTRKPHKAKGNQPAFDLATELQRTLGVDATTIDGIDVITIQTILAEIGPDLSAWKTEQHWTSWLNLAPKRDVSGGRVIRHVRQHHTNRVGNAFRMAAQSLVRSESYLGARYRYFRAKLGGLKAVKAMARYLACLYYRLLTRGQIWVDRGTQEFNRRSQERELAALQRKARKHGLQLVPAA

SEQ ID NO: 499883 - protein, 350 aa, unidentified
MKTILAIDLGKRNSVFCRLNTSSLKTKYFTTSTDPQKFHDIFIELDIKSSIILFEVGTQAGWLSDMMRAMRIEFKVANVNHSAWKWTNNPNKSDKTDAHRLAMMYHHGFFPEVYIPEKPVRQKRSLIYYRQKIVGRQTQVKNGIRALMTTVAIDLPTGKNCWTKKYRNQLEQLALPFDKIDDPCQLWRGQLHSELQQLDALQTCLGKTTTKLDELNEQKQSIKLLETIPGIGPRTAEAIVAVIDDPHRFKSCRQVSNYAGLTPRRYQSGQMERSGRISKRGNPLLRALLVQASWAALRFDWAKHIYKRVCRGSAKRRKIAIIAVARHLLMRCWAMLRDNKPWQYKTQIEM

SEQ ID NO: 499884 - protein, 319 aa, unidentified
MNLIPVGVDIAKAKFDVAVLLPSQKYKTKKFANTPAGCREFMAWLARFGDCHVCMEATGCYSTELATSLADNGWSVSLENPARISAFGETELTRNKTDKSDAALIARYCALYQPAQWFPAPLYERQLTALVRHLKNLEEMRQMEENRLEGAEEVILPSLNEHIATLDGLIEETKKKISRHIDDNPDLKRDKALLKSIPGVGDILSISLLAFAGDLRRFSNSKALVAYAGLNPRRCESGLWKGKSRISKVGHAELRSALYMPAIVAGRYNEVVKRLMVRLSERGKSGKEQVCAGMRKLLQLAYGVVKSGRMFDAEIPLAA

SEQ ID NO: 499885 - protein, 342 aa, unidentified
MQIATVGLDIAKNAFQVHGIDATERVVVRKQLRRGQMMAFFEALSPCLIGMEACATSHHWARELTKLGHEVRLMPAKDVKAYVKRNKNDAADAEAICEAVRRPTMRFVRAKSVEQQGQLMQHRTRDLLMRQRTQVINALRAHLAELGIVAAQGREGLKDLLAIIADEGDERLPMSARVSLMVLAAQLEALQTLIGSVEKRIMKQHRLNQASKRLETIPGIGVIGATAITATVTDPTVFRSGRDFAAWVGLVPREDSTGGKTKLGPISKRGDRYVRRILVVGAHAVLRYAKRNPQKYPWLTELLARRPFRVVAVALANKMARVAWALLVKGGTYRAPEVRVAA

SEQ ID NO: 499886 - protein, 382 aa, unidentified
MELIYPRCAGLDVHKKSVVACVRLLRPDGSHEALVRSFGTFAADLLELADWLAGHGVERVAMESTGVYWKPVWHLLEDRFEVLLVNAAHIKQVPGRKTDVKDAEWIAQLLQYGLLRPSFIPPPPIRELRDLTRRRTQLVRDRATVANRLQATLEDAGIKLGDVASDVLGASGRAMLERIVAGCDDPAELAELARGRLREKLPALRRALCGRVGAHHRFLLGTLLEQVRQAEGLIARYDGRIAEVTAPFAEAAERLEAIPGVSRRAAEVILAEIGPEMGQFPTAGHLASWAGMSPGNKQSAGKRLSGRTTKGSRWLRATLVQVAWAASHTKATIFSVTYRRWARRLGKKRALVALGHKLLRVIYRMLKDGTDYSERLVPGRAA

SEQ ID NO: 499887 - protein, 338 aa, unidentified
MKLYCGIDLHSNNHWLTIIDEADGRLVERRLPNELAITLRELEPYRNELTAVAIESTFNWYWLVDGLMEAGYQVKLVNTSAVKQYDGLKHSDDRDDAFHLAHLMRLGILPTGHIYPKKERGVRDLLRQRGRLVQQRTAHLLNAKSTYARQLNLKVETEILNGEKKAPWPDVADPHTAMAIYAHRPVILAINGEIKRIETEVRLQLKENEGYRLLQTVPGIGPILAWNILLEAGDIGRFAKVGNFTSYCRLVQGIKISNGKKKADSNRKNGNPYLAWAFHEAAHTAMRYMEHAKKYYERKSRQRNRMVAMKALSHKIARACYFILRDKVTFDPDKLFKQ

SEQ ID NO: 499888 - protein, 392 aa, unidentified
MSQQHCHFDASRSLTALEQDSTIIAVIEMSQSNWLVAALVPGVERHPLKKLDAQEEGLLKLLHRWRNEAGQAGREIKRIVVAYEAGRDGFWLARWLRGRDIEAYVIHPTSIAVSREHRRAKTDRLDTELLMRAFLGWLRGEKRHCSMVAIPTIEEEDARRPNRERQNLVTEQTRIVNQTKAIFARFGIRTFRPTLRKAEEKLKGLRTAEGTSLPENTRAELCRHLARLRVVREQIRAVERERLRKLAAAPAVEKGSHAMVFLIARVLGIGIETADMLVSEVLSRRWRDRKAIARYAGLTGSPDESGKRRRERGLARAGSARIRCGMIQFAWRFLRFQKDSALAQWFAARTADRRASTRKTMIVALARKLLIALWHLATRGEVPQGVILRPAS

SEQ ID NO: 499889 - protein, 386 aa, unidentified
MQTLNNLSRSLIDLEPASTLIAIIEMSLSSWLVAGIVPGIERQPLKKLAVDESALLRLLHRWREEAEKAGCRIERIVVAFEAGRDGFWLARWLKARSIEAHVIHAASVAVSREHRRAKTDRLDAELLKRAFLGWLRGERNHCKVVAIPTLKDEDAKRPSRERESLVGEQSRIVNRMKAALIRLGIRGFNPKLKRAAGRLDSLRTPEGEPIPPNTLAELRRDMERRRLISNQIRQIEEARLKHFEQAPNDGPHAMVRLLARVIGVGIETADMLVHEVLSRNMHDRRAIARYAGLTGSPDESGRKRREKGLARSGNGRVRRGMVQLAWRFLTYQKESTLAQWYRARTENARGARKPMIVALARKLLIALWRFVWQGVVPDGVVLRPAQ

SEQ ID NO: 499890 - protein, 363 aa, unidentified
MFTERTSIGLDVHARSVAAAAIDGVTGEVTRTRLTPSYEHIQSWIADLPGPAAVAYEAGPTGFGLYRALTDAGVRCEVVAPSKLQRPAGDRVKTDARDALHLARLLRLDEVTSVSIPSVNQEACRDLVRAREDCRADLMRARHRLSKLLLRHGIVYYEGAAWNDAHDRWLRGRVAPQLQTPATRMAFDSDYEHVLMLQARRRGLDSAIEDIATDSEFTPVVRRVSCLRGVGTLTAFALAVEIGDWNRFTGNTIGSFVGLVPSECSSGSTRAQGPITKTGNTHVRRLLVEAAWHHRSKYQVRAVMRARWELAPAAARARGHEGNRRLHNRWVGFLARRKRSTVANVAIARELAGWCWSLAVMED

SEQ ID NO: 499891 - protein, 340 aa, unidentified
MSEVSIIGVDLAKRVFQVHGALPDGNVAFRKKLSRSQFMKFLAEQPPCLIAMEACATAHYWGRAALGSGHEVRLIPPIYVKPFVKRQKNDAADAEAIVEAALRPTMRFVEVKSADQQSLGLLFRTRELLVRQRTQLINALRGHLAEYGIVVAIGARNVKVFQQALLDHGTRLPKTVLSISGVYFEQIAALTEKVTELEIALRRETARDGQATLLQTMPGIGPMSAAAIQAFAPPLENFARGRDFAAWLGLVPRQHSSGGKDRLGRISKMGQRDIRRLLIVGAMSMVNWASRKGSQDSWLMRLLESKPKMVVAVALANKMARRLWAMCVKKEVYEIPVLVA

SEQ ID NO: 499892 - protein, 345 aa, unidentified
MPIVGGLDIHRKQITFDYLDTVTGEVKRGQIAPADREHLRAWLARFAGRDDAAFAVEGCAGWRYVADELAAAGIAAHLGEPADTAALRGRKRHAKTDKTDARHLRTLLAEARLPECWIPPEHILEYRALLETYHDLRTAHTAWVQRIHAVFFHQGAPPLSDDALRTEAGLATLRAAAAAHLSPAGQQQVATALDMLAATEARLGPLRHQLADAARHLMGAKVLAARLYGVGPLTALALTCWLGGKGRFSSSRKAVRFTGLDITVHSSDRKGPPGRLSRQGPPVLRWAVYEAGKTHARTSAPDHAYYATVKDRKNSKRACLSEARKIVRQACHILTELGDDALTAA

SEQ ID NO: 499893 - protein, 326 aa, unidentified
MTYALGIDVSKAKLDAALLKADGKYRSKVFSNDRADFKGLLQWIAANVPTGKADVHVCMEATGSYHEALALFLSDQGIAVSVVNPLLVKRFIEVDRVRNKTDEGDAKSLARFCQMTRPELWEAPSVGVRTLQALVLRLDTLQEMRQGELNRLDVAHASVQQSMRDVIVGLERSIRDVQAQIRQTIDDDPDLRQRSTLLESIPGLGNRTIPQLLAYIGRPERFKTVKALIAYAALAPLIRQSGTSLNKHKGTHPQGHRDLRSALYFPAMVAGKHNPLVAAFWQRLKTQGKPGKVIVVACMHKLLAIAYGVLKSGKPFNPDHLKAQMA

SEQ ID NO: 499894 - protein, 397 aa, unidentified
MYIVGIDIAKRKHEAAVIDGEGTVIIKPFSFTNNCSGYNRLLAMLAKAKLPLDEVSFAMEATGHYWLALFTRLQKEGFRVQVINPVQTNSIRSFYIRQAKTDPRDALLIAEVIRFGHFSESTLHPENIYELRELCRGRHAIVSMQADVKRKVVALLDQVFPEYETAFTNMFSDTSMAILQTCPTPKELSEMPLEELCHLIEVPSHKRFRMAKAQELQALARNSFGFAMAGDVFSTMIRLYAKHLVFLKQQVQEMDRKIAEIMDTLDTPITTITGIGPTLGAYILSEIGDISRFSSAAKLAAYAGIDPTMRQSGEYNGVRNRMSKRGSPYLRHAIWLAASSAVLHDPALKLYFQKKRDEGKPYMASVGHACRKMVSIIYAVMRDNKAYTPCIPNEISA

SEQ ID NO: 499895 - protein, 357 aa, unidentified
MTNGKILKNASNNNSSSKILYDQYLGLDWAEKTMAIARLTNSMSHPRVFESRTSLYELKEYLKTLKGTSILVIEETTTSHWLYVELKDFVTKIFICDPYRNHLLSEGAKTDKIDARKLVVLLRAGLLKEVFHNDDESFRIRKLVSGYNDLVNAGVRALNQKSALYRAEGLKYKKDKLTVNDKVLNFVDNHYNKEINLYKEQKKEYEKIFNEISRSIPAIKRLEDIGGIGTINAVKIFSTVIDARRFENKYKYWSYCGLVYNQKESGGRNYGRKKPRYSRQLKAVYRNATLAAIGGNNDIRHYYEYLLSEGLSDSKAKNAVARYIAKVSYAMMKHNTRYRAFQWRESKDTIKEVKEII

SEQ ID NO: 499896 - protein, 351 aa, unidentified
MPATASTAIAVIGIDIGKNWFHIVGLDDRGAILVRQKLSRSQVETRLANMPPCLIGMEACVGAHHLSRKLKALGHDARLMPARYVRPYSKGQKNDFRDAEAIAEAVQRPTMKFVATKTADQLDLQALHRVRARLVSQRTGIINQIRAFLLERGIAVRQGQRFLRVELPRILAAPPAVLSPRMVHVIEGLASDWRRLDERIEALSGEIEELAKRDAGCERLMSVPGIGPIISSAMVAAIGTGDGFAKGRDFAAWLGLVPRQISTGDRTVLGKISKRGNRYLRVLFVQAAWVVLVKVKPNRWEGHGLRPWIEAAKKRLHHNVLAIALANKLARIAWSVLARGRAFEASKLQAA

SEQ ID NO: 499897 - protein, 388 aa, unidentified
MQIAADRPQASTAIRTDLGAIFVSLELSRSTWLITSLSPGGGEKMSKHSVRGCDVAGLLERFAHLREKARARTGQRFPIIVIQEAGLDGFWIHRMLNAEGIESHVVDPASIATSRRRRRAKTDRIDGEALVRTLLAYKRGEPRVCSMVKAPTPEEEDRRRLCRERKVLTAERVLHVNRIKGLLFSQGITGYEPLRRDRRERLEQLQTGDGHTLPDHLKGQVRRELDRLELLLNQIKAVEAERDGLLAAERAAARTPAAMLLDIKGVGPEFAAILWSEGLFRHFDNRRQVAAYAGLAPTPWQSGSVDREQGVSKAGNPRLRTTLIQLTWLWLRNQPHSALTLWFHERVRRNGGRLRKTTIVAVARKLLVALWKYVTAGVVIEGAVMKPT

SEQ ID NO: 499898 - protein, 356 aa, unidentified
MSRDVKYIGMDVHKEATVIAVRNSRGELVMESMVETESSTILQFIHGLRGELHVTWEEGTWAAWLYDLLKPHAHEVLVCNPRRNALMKEGSKTDRIDARKLSELFHAGMLGAVDHGENGVRTLRELACMYQTVSQDLTRVMNRVKALYRGWGIACAGTQVYAPRYREEWLQKIEPAGVRRRAELLYEELDGLQALRRKVRPELLTESQKHKAAKLLRQIPCIGPIRAARLIALMQTPHRFRSKRQLWTYSGLGIETRDSGQYRFVDGQLQRSKKPQQVRGLNRNHNHEMKEIFKGAAIRASCGVGPLREFYGSLLDKGRKPEMARLTLARKIAAITLTLWKKEERFDAEQLKTQAA

SEQ ID NO: 499899 - protein, 367 aa, unidentified
MKKISTVATQQSRKISEQKLTVGLDLGDRSSWCCVLDEAGAIVREQKLGTTPKAMKEVFGAVPRSRIALETGMHSPWVSRLLSQLGHEVIVAHARNVRLIGESRKKDDRIDAQTLARLARIDPQLLSPVKHRSAKAQADLTVIRARAGLVRARTALANTARGLAKSYGERLRGCNVRNMNAEKAQGLSPELRTALEPLLAGIESLSERIRECNEGIERLARESYPEVAQLKQVKGVGTLIALTFLLTLEDAHRFRQSRDVGCYLGLQPGRRNSGQSEPQMHISKEGDPYLRTLLVQGAHHILGPFGADSDLRRWGLKLAERGGKSGKKRAIIAVARKLAVLLHHLWVSGEVYQPLRLSKLRAMPAAA

SEQ ID NO: 499900 - protein, 364 aa, unidentified
MFIIGCDYHPGFQQIACVDTDTGELGERRLAHREEAEQFYRELKQQNLSARVGMESSGHSRWFERLLHELGFELWIGDPAEIRTKRVRKQKTDRQDAQLLLRLMLENRFPRIWVPDSENRDLRQLLWHRHRLVQMRTRVMNQLHVVPLNEGLRRKKALWRPAGRKELESIVLAPWASRRRQDLLDLLDQLTPKIQDLTHALEEEVEKRPVTRRLMTHPGVGPLTALAYELVIGTPERFHCGKQLASYIGLVPTEESSGDRRRLGHISKQGNVLLRFLLVEAAQVTVRSQPEWRSKFFHLAMRRGRKVAKVAMARKLAVHLYWMWRQGLDYGQTQKLGSHAGEPGHRDGMQSITDVMIGHPAPSK

SEQ ID NO: 499901 - protein, 370 aa, unidentified
MKSIIYVGMDVHSTNYTLSCYMVENDMSFATVQTEPDYKNILNYLEKVRKNIGGPCEFRCGYEAGCLGFTLYNQLTEHGVDCVILAPSTMPSYRKNEIKTDKRDAMKIAKCLAYNTYSPVYVPTQEDLETKEYIRMRDDHKQALKKIKQQILSFCLRHGLKFSSGKAYWTGKHLAWLKTLSLSTMLREILDEYLLSYHRLVERIDRIDQRIAELATSERYADKVKKLSCFIGVRTHTALALLVETGDFSRFTKAEHYASYLGLVPGEQSSGASQKRTGITKAGNSHLRRLLTESAQCYGRGQVGYKSKTLKARQAGNPQEVIVYADRANERLRRKFYKLVKSGKQHNVAVAAIARELACFIWGMMTNRIA

SEQ ID NO: 499902 - protein, 358 aa, unidentified
MSEITRVGVDLAKAVIQVHAVDAGGKLVTNRQLSRDKFLPWCAQLPPGCLVAMEACGGSHHWARKLIGLGLSAKIIAAHLVTPYRLQGKRGKNDANDAAAVCEAASRPNMRFVPVKTTDQQGILCVHRQREGLKEERIASINRIRGMLTEFGLVVSQKPEKLREKLTDILEDASNDLSGLARLVVQEAYDQWRDVEERIKWCDERINAHVKNDAQAKAAKELMGVGPITASAAVATVGDFHQFKNGAQFGAWLGVTPRQNSSGGKTSLGGITKRGDMYLRMLLIQGAKSAVMTAHMRDDPISKWLCQLREKSGWQKAAVAMANKNARILWAMMTKGCRFDSRHVSVKPAGAMALAVTA

SEQ ID NO: 499903 - protein, 338 aa, unidentified
MPTGQTGQTYTLFVGVDIAAQTAMVATQRPGAKASRSFTIEQTPEGYTSLLRQLQATGFVPGQVLVVMEATGSYWISLATRLVHEGFAVSVINPAQAHHFAKALLKRAKTDAIDAQTLAQLAMILQPEPWTPPPQIYYALQQRLAQRDDLLNLRQQVRNQLHALVQHPEVIAEVRARMERLLATFASQLTEVESEITAALSQDSAWAAAATRLQSIKGVGWVTAAWTLVTTLNFTSCDTVDSLTAYAGLAPMPRQSGSSVWHRPSIGHTGNGRLRTAFYMATLSAAQHNPVIKAFYTRLREVGKPEKVARCAAARKLLHIAWAVVKKDQPFDPNYALG

SEQ ID NO: 499904 - protein, 315 aa, unidentified
MSEKQWIGIDVSKSTLDVYLRPSQKQLQVANTEKGVLELLEQLTSLEVEQVILEATGGLEQPVAQAFHQQGIDVSVINPRQGRDFAKATGQLAKNDRIDAQVLAHFGEALHPPATIFASEAQQELQDLVSRRRQLVEMMSAEKNRRSILRKIPTDLEEHITWLQKRIRQLDEEIERLSQTQSEWRSQIDLLRSVPGIGPVIATTLVAALPELGKLKDKRISALVGVAPFNHDSGKFQGKRRIWGGRAAVRSALYMGTMVAVRYNPVLKVFYERLLTAGKVKKVALVACMHKLLRILNAMIRDQKPWQIQTEIQTA

SEQ ID NO: 499905 - protein, 341 aa, unidentified
MKLIRVGIDLAKNVFQVHGVDRSEKHVWRRRLRREEWIDVLRERTEPGCEIGMEACGGAHHWARELQKLGYRVKLIAPQFVKPYVKSNKHDAADAEAICEAMARPGMRFVPVKTVEQQDLQAIHRVRASLIEQRTAKANQIRGLVAEYGLVAPRELLHLRRALPRWLEDEANGLTVRFRWLLRGLQEELLTLDERIGELDREIEEIARTEPDAKRLMQLRGVGPIIATAMLATVGDGRQFRNGRQMSASIGVTPKQHSSGGKERMLGISKRGDAYLRSLLIHGARAVIRTARGKDDPLSKWVTRLADRRHPNVAAVALANKTARIAWAMLSRQTNYQPAVN

SEQ ID NO: 499906 - protein, 342 aa, unidentified
MAIVTIGLDLAKHVFQVHGVDETGQAVLRRQLRRGEIDAFFEGRSRCVVGIEACGSAHYWARRITALGHEVRLIAPTRVKAYVQRGKKNDANDAAAIAEAVTRPHMTFVPVKSAERQSVLILHRTRDLLVRQRTMLVNALRAHLAEFGIVAAQGWRRAKELIAGLGEAEIPDLARSALQLVADQIDECDGRVDALEKQIISWHRTNEDSRNLATIPGIGPITASAIAASVPDPTAFKNGRQMAAWLGLVPRQNSTGGKDRLSGITKAGDSYIRRLLVIGATSIVRYARGKAPGCGEWLKALLERKSARLASVALANKMARIAWSVLNRGEVYRENDPSLRAA

SEQ ID NO: 499907 - protein, 396 aa, unidentified
MSQVWAGVDSGKTHHHCVVLDADGIKLLSRRVANDEPDLLQLLADVLALADEVTWAVDMADGGAALLIALLVNHGQELLYIPGRAVNRATDGYRGEGKTDARDALVIADQARVRRDLKPMRPSDEATIELKLFTARRTDLACDRNRAINRLRGTLTSMFPALERALDVTTKGPLVLLTGYQTPAAIRRTGVNRLAKWLSARKVRNAEALAIATVEAAERQHTAVPGEAAIAAMVRALVEEVIALNEKIADVDKLIEGRFRRHELAEVITSMPGIGALLGAEFLAAVGSDMASFATPDRLAAFAGLAPAPHDSGKSHGNLHRPQQYHRGLQRVFYTSALISIRCDPNSRRFYDRKRSEGKRHVQAVLALARRRVNVFWALIRDGRCYEVIPPVTHAA

SEQ ID NO: 499908 - protein, 403 aa, unidentified
MNSVGIDISKGRSTIAVMRPFGEVVISPFEVRHTDSELSELARQLKSLDGETRVVMEATGNYHASVAKLLHDAGLYVSVVNAKLVHDYGNNELRRVKTDRKDAVKLANYGLDRWLTLPRYIPEEDTRLLLKNCYRQYRQYSKVQTVLKNNLISLLDTVFPNANRLFSSPIRGDGSEKWVDFVAEFWHCRCVSEKSERAFTSKYLRWCRKHGYNFSEAKAHTIYAEASGHIGVMPKSETTKLLVEQAVAQLRATSTALAALKHKMQTLASQLPEYPAVMDLFGVGPTLGPQLIAEIGDVRRFYSKKALVAYAGLDAPPNDSGDVTGRHKSMSKIGASSLRRTLFLVMSVYLQTAPLDEPVYQFMDRKRAEGKPYRVYMMASANKFLRIYYATVKAYLESLEHTA

SEQ ID NO: 499909 - protein, 315 aa, unidentified
MSDVPCFVGIDVAKAQLDIALRPSGERWAVPNDTSGVTTLVDQLQALQPTLIVLEATGGLERMVTSALATSGLPVVVVNPRQARDFARATGQLAKTDALDARALAHFADVIRPTPRPLPDAQTQELRALLGRRQQLIIMRTAEQNRLAGTSERLAQDITAHIAWLNTRIATLDDDLETLLRASPLWRANDDLLQSAPGIGPVCARTFLLELPELGTLTRQQIAALVGVAPLNCDSGTLRGRRSIWGGRAHVRTVLYMGTLVATRFNPRIKAFYERLLAAGKLKKVALTACMHKFLTILNAMLKHRTPWQTQEVQN

SEQ ID NO: 499910 - protein, 340 aa, unidentified
MSDIYTIGIDLAKSVFQLCAFDKTGKKLINRSLKRNQVIKFLSNIAPCLIGMEACSSSHYWAREIKKLGHEVKLMPPQYVKPYVKTNKNDMADAEAICEAVRRPTMRFVSVKSEEQQALLLLHREREGVIRDRTALINRIRASLQEFGVSVPAGRFQLRKWFREGFSLVEHKLPKLLVEHISLMQTRLRELEQYAEYLDKQIDLTSEVSDECQKVKQIPGVGRLTSSALIASIGDAKAFSSGRQLSAWMGLVPSQHSSGGKSLLLGISKLGDTYLRRMFIHGARAVIRHLKEGKPFFEWVTSLLKRMHKNKVIVALANKLVRISWAILAKEESFSVGRTY

SEQ ID NO: 499911 - protein, 314 aa, unidentified
MASIGTVVTIGVDPHPGSHTACALEANGLELGRVRVTNDGGGLGQLYQWAQQFRCRRWAIEGAGNRFANALVGQLLAVQEEVFSIPPSMTSQYRSRRGRAKDDAIDAANVARVLQANPNLPLYDPTPYESRLKELSRTYARVSEQLTANRMALESIDVPAAQQAMTEVIAALQRAAKTLKREMQAAVQATAPRLLDLCGVGPVVAATVLAETGRIRRFPNHDHFAAYAGCAPVRWQSGAHSTLRVNTGGNRTLNWAIYIMVINRLRVDPRTQIFHQRKLAQGKTQREVLRALKTYVARELYHTLLCITPCPHPN

SEQ ID NO: 499912 - protein, 444 aa, unidentified
MKTTSASPRGAVPNVAAWIGLDWADQQHVGCLYDVASGQQEAFSLESSAEAIPLWLAQLRQRYGGRRVAIVLEQRRGALIHALLGCEFVILYPINPQSLAKYRQAYFSSGAKSDAADAPLLMDLVRHRPDRFHPWQPDDPETRSLQLLTQARRRWVDQQTALTNQLTQLLKGYYPQALELAGDLSSPGACQFLKRWPTLAALQQARPSQIRKHYQRYGRPTAAELDGRLERIRQAQPLTQDPAVLLHGSLMLRALVDQLLPLFDTLREFERQIAALFAQHPDRPLFEHLPGAGKVLAPRLLAAFGTQRERWQQAAEVLTYWGVAPVTEQSGRSRWVHWRLACPKFLRQSWHEFAAHSRRHCGWAQAFYQQLRAHGKGHHAALRALAYKWIRILFRCWQTRTPYDEQVYLKSLEQKNSPLLAAIQALSSSSAPSKAVRGSLVKNL

SEQ ID NO: 499913 - protein, 333 aa, unidentified
MTETTSIKFAALVGIDWADRKHDICLQVADTGEREFSVLEHGPEAIGEWANALRVRFSNQPVAVCLEQRKGALITAWLKYEHLVLFPVNPRLLAGLRRAFSPSGAKDDPTDAEIAVDILLQHRDKLRAWTPGDPRTRQLQVFVEARRRLVEQRVRVTNRLTANLKGYFPQALDCFESLDSVLACDFLTRWPSLGEAKRARAETLRAFFLKHNVRSQELIAARIALLKSAMALTSDAGVIVPALLATRTLVAELRTLIAGIEQYDVAIAKVFNAHPDAFIFRSLPGAGPTFAPRLLAALGADRARFESVRAVQEYLGIAPVTERSGRSEWVHWR

SEQ ID NO: 499914 - protein, 321 aa, unidentified
MQTNNTVVYAGVDVAKATLQLHLQGHQSEFSNSPKGLHQLCAQLQKVPTVHVVCEATGGYERALVKTLQQGQIPVSVTNPARVRAAAQAQGQRAKTDRIDAQVLTDYGQRYQPKATPPTSATQDQLVALTQWLEQLIHGRALAKTQAEHHQDPFVHRQHAKLMTHLESQIEAVEKQIEALLEQDAALQQRVNCLDEIQGVGPRTAWMVLAHMPELGQLNRHEVAALAGLAPWTRESGTMKGRCCIGGGRPEVRLALYMAALSAARCNPVLRTLYKHLRAKGKLPKVALTAVMRRLLIYMNLCIKALPSEPATAGAADLKAA

SEQ ID NO: 499915 - protein, 451 aa, unidentified
MSVFCGIDWAEQHHDVALVDSNGTLIAKARITDDAAGYQQLLALLAEHGDTESEPIPVAIETSRGLLVAILRTGKRQVFAINPLAASRYRDRHGVSRKKSDLGDALVLANILRTDMHAHRPLPADSELAQSIAVLARAQQDAVWHRQQAANQLRSLLREFYPTALNAFITGRKGGLAHPEARAILAIAPTPTIAAKLTKPQIRAALKRGGRQRYTEAETKRLQEAFRAEHAHQAPLVEEAMGKQMLVLLQQLDAAAQGADSLAEAVESSFREHPDAQLITSFPGLGCLLGARILAEIGDDRDRFADARALKAYAGSAPVTRASGKKRYVGRRFVKNNRLTHAGYLWSFAAITVSPGANAHYRRRRDRGDWHAAAQRNLFNRQCHEVNATATKSSPSGFCGQEAFGGEFVGRVRGLFEEPFPGPAAQLDAEAVVVGESECGGKLARVPGAMR

SEQ ID NO: 499916 - protein, 340 aa, unidentified
MQQVTTVGLDLAKNLFQVHGADAQGRPVLRRRLAREKVREFFANLPPCLVGLEACAAAHYWARELAKLGHTVRLMPPQYVRPYVKTNKHDAADAEAIREAVTRPGMRFVPVKEEGQQALLMLHRVREQLLKQRTATINALRAHLAEFGIVAAQRRTGLRELLAVVADVEDRRLPPLARELLQGLVEHLRGLEERTAELDRHLVATARDGGACERLAAVPGIGPVIATGLVAAIGDAKSFTSGRHLAAWLGLVPRQHSSGGKERLLGISKRGDGYLRRQLMHGARALVAVSRGREGGLWAWVDALLARRPYNVVVAAVANKLARIAWALLSRGETYRAATA

SEQ ID NO: 499917 - protein, 304 aa, unidentified
MNGIGIDVSKRQLDIGTTDGETLQVSNNRSGFSELDAWLKKRPTRQIVLEATGGYEQPVLDFLHKAGHPVARANASRARKLAQGLGQIAKTDRLDAYALAQMAALVKLPPYQPLQSWQQKMREFVRARRQAMDALTIARQQQEMVLDRELRRLLQGNITRLQTLVERLGKQIVEQVGQQPQLKMLKSMKGVGPVLQAVLASYLPELGRITGKRIASLVGVAPMSHDSGTMRGKRSIHGGRAEIRQVLYMAAMSAMRHEPRLRDFYQSLRARGKEGKVAIVAVMRKMLVILNASVRDAESGLVPA

SEQ ID NO: 499918 - protein, 309 aa, unidentified
MCPKDALEVACGPESPTQCFTNDDAGHEALVNVLHVHRVDLIVVEATGGYEAPCACALQAAGLAVAVVNARQARDFAKAMGYLAKTDRIDAQVLAALAAVLANRADRQKLIKALPSDEQQRLHALVLRRRQLVQMLVAERNRLPMSHQAARVSIEALIKAIRKQIVDIEADLSSHIAHHHADLAGLLRSAQGIGPHTSMALIADLPELGKLSNREISALVGLAPFNRDSGKMRGKRMIFGGRTQVRCALYMATIVAMRHNRVIQRFYQRLLAAGKPKKVAIVACMRKLLTILNAMVRTGKQWDETFHFA

SEQ ID NO: 499919 - protein, 355 aa, unidentified
MERYIGMDVHAASCTLAVISEKGRKLRDFPVETNGQALVEAIRMIPGHKHLVLEEGLQSAWLYETLSPHVDELVVAGIAQSRGHKSDKRDAYGLAEKLRVGNLDKPVFKAPRQFTRLRELSRIHMTLVGDVVRGQSRIKSLYRSRGILVSGANVYGVRHREEWQQQLCSSAQTRATRLYDHLDFLLDQKKQAEIDLLREAKKHPIVRVLETTPGFGPIRAARLVPIVVTPHRFRTKRQFWSYCGLGIVTRSSSDWIQATDGGWIRARVPQTRGLSRQHNHFLKSLFKGAATTVITQLSKDPIYARYERLLDGGTKPTLAKLSLARMIAATVLRMWKDEKEYDPERGGPSTVTREG

SEQ ID NO: 499920 - protein, 438 aa, unidentified
MVRYIGLDLHKQFIEVCILDASGRALYRGRTSCLRSELEKFARTKLTPEDRVALEATTNTWAVVAILRPFVAAVVVSNPLKTKAIAEAKVKTDRIDAEVLAQLLRCDYLPAVWYPDEETQRWRGLVTHRTALMGQRTRLKNHVQSLLGRLLVQPPCKCLWAKAGLAWLKEVALPADERWVLDSELRQLEVIEGELAKADQQLATIAQQEPRVRLLMTLPGVNYVVALGLLSALGDLSRFKDGDHVAAYLGLVPTTYQSGRHCYQGPITKAGRSQTRSFLTQSAQHVARHGGPLGAFFRRLVKRKHRNVAIMAVARKLVTVAFLMLKHNEPYRYARPELMREKFTALQMRGLEPSEASVLAMPKPRAKGKPGLAEVYRAAGLPAVMCPEELPLGEQRMLTERALGEFVAELYHPAPTARLETRNAHVGTATRQAVNNKE

SEQ ID NO: 499921 - protein, 393 aa, unidentified
MVCVGIDVAKDKHDCFILSSEGEVLADVFTIQNNAEGFNTLLQTISCCTNPKDKIKVGLEATGHYSYNILGFLLDKGLPTYVINPLHTNLYRKSLSLRKTKTDRVDARTIAAMLMSDVDLKSYTDTVYHNEELKSLTRYRFDKVRERAKLKQSVSRLVTILFPELEKLVSSLHSASVYALLSEFPGAKQISSTHMTHLKAVLKNASQGRYGQEMAETIRNAARSSVGSVMPAKSLELQHTIRLIRELDAEIEDIETAIQAIVDEMQSPITTIPGMGVRMGAVILAEIGDFSRFDSPDKILAYAGMSPSTYQSGQLSLSGAYSHMEKRGSRYLRYALYNATKHVCHWDPTFAAYLAKKRAEGKHYNVALSHAAKKLVRLIFAMEKSQRPYCAAA

SEQ ID NO: 499922 - protein, 438 aa, unidentified
MERFTLVNPHAAGIDVGDTEMVVAVSPEVCDQNVRTFGAFTCDYQQIVCWLRECKVTHVALESTGVYWVQLYLLLQKEEFEITLANAKHIKNVSGRKDDENDAMWIQRLHSCGLISGSFQPDLQTRGLRDLMRHRRTLVRDQSRCTNRIIKALELMNIKVQTVISDIDGKTGKDILAAILAGERDATVLASLANGRVKASKEMLIKSLQGNWDTRHLFLLKQQHETYNFISGQIKELDMQIEKQLQTLTASVHEGELLPINLDHPRKRSTRKNAIPFNATAHLKTLLGVDLTEIPGISEVSALEIISEIGTDISRWPTENHFTSWLGVVPNTKKSGGKIISNKIMKKKHRAGQALRIAASTMYHSKSALGDFFRRKQAKGGPSKAILATATKIAISIYMMIKNKTPYQPERMKEAQDKFKQAQIRKLETRLAMLKSAA

SEQ ID NO: 499923 - protein, 410 aa, unidentified
MGLYCGIDWASDHHDVAVVDDDGHVVARGRVSNDAAGFVQLLTLLAEAGDSAKDPVPVGIETDRGLWVAALRETGRVIYPINPLAASRYRARYAVSGAKSDATDAVLLANIVRTDADAHRPLPADTELAQAIRVLARAQQDAVWARQQIGNQIRDLLKDFYPAALVAFAELPSGGLARSDARTILAAAPTPAQAARLTPARLRRLLVKAGRRRELDRDVERLRAIFTGTYLHQPPMVENAMGIQLTALLRQFEAACAAADELAEAAIAHFEQHPDAAIITSFPGLGNLAGARVLAEIGDDRSRFADARGLKAFAGSAPITRASGRKSVVTHRHIKNRRLSAVGQIWALGSLRASPGARRHFDARRAAGDWNRQAQRHLFNKFLGQLHHCLQTGQHYNEHRAFPPPLQRAA

SEQ ID NO: 499924 - protein, 414 aa, unidentified
MKVVYSICCGVDVHKSFFVGTIIKTTDGVQPHYEKKRYSTYNSGILSFKDWLISNGCFDVCLESTGKYWVPVFNILEKYGVRVTIANPKWVKAVKGNKDDVKDSKWIGDLFRLGLVPGSFVPPKPIRLLREFTRYRSKLVSMKSSEKNRFQNAFTVCNVALDSVVSDMFGKSASDITGYLMSDEEFCPEHCVSLLKRSLKKKSDEVLESIEGFSIAPEQKVRMKIVRSHLNYIESALTDVDNAIDSMVAEHESAIHLLSTIPGVDRKLSVTIVSEIGTDMAQFGSSKRLCCWAGLTPGNNESAGKKKSVRITRAGVYLKPALVQAAHAAVKSNDSPYYRLKFDQIAKRRGKKRAVIAIARMILTAIYAMLSTGEIFNPCDLFKIDMPESLKVKQKEKAIKQAIRLLEAQGITVG

SEQ ID NO: 499925 - protein, 358 aa, unidentified
MATISLSALQAFVAAYHSEFFWIGIDVHKRSYHLALLRADAKTFTLAVPADPEKFVKQIHHLGITVAGVAYEAGPTGFSLARALQAENIPVIVVAPNKIPRSVSTGAKTDRLDCLKLAQFASKGLLRSIAVPTVQEEADRALCRRRHQLVDSIRRCKQRIKGFLLYHGFKETESLRRWHADYPDQIAALPLETEGRLTIESHLRELAFLENELRSVIDQLGRMNLRPCHQPVIKALTSVPGVGKIVATTFHAELFRPERFNRAEEVASYLGLAPTVRQSGERTSRGYLVPVGQTRLRSLLIQAAWVWRAKDPYAQGIYNKLLSKNGIPQKAIAALARRLAIILWRLSIEQRAYRPLVA

SEQ ID NO: 499926 - protein, 392 aa, unidentified
MLICGIDIAKHKHEASLVDESGKLLSKSLRFSNDNSGAASLLEYLSKLNPDDQDIIFGMEATGHYWLALYSFLFDKGFTVNVINPIQTDALRNVFIRKTKNDSKDSYLIAETVRMGYTSSTLLPDDALLGLRQLCRHRTDLVDMTSELKCKIIGLLDRIFPEYAKLFSDTFGKSSVELLSRHTTPEEIADLSSKKLAALLGKCSRGRFGTEKAEQIKAAAKNSFGIRLGADIFALQIRQLLDQIMLIEDQIAVIEAEMETRLSSLNSCITTIPGIGSVLGAAIVSEIGDISAFSSAEKLVAFAGIDPSVVQSGNFEGTRGKMSKRGSPHLRRALWLAAQRAANLDGSIFRTFYLKKISEGKHHYTAIGAVARKLTYTVFAVLRDNKPYVPIA

SEQ ID NO: 499927 - protein, 360 aa, unidentified
MFCERTSVGLDVHARSVAAAAIDGVTGELIQARLSPSYDQVESWVRTLPGPVAVTYEAGPTGFGLSRALNDSGIRCVVAAPSKLQRPSGDRVKTDAKDAVHLARLLRLDEVTAVAVPSVDQEAARDLVRAREDCRGDLMRARHRLSKLLLRQGIVYTGGQAWTGSHDAWLRRQRFDSPAVQMTFESDYEAVLMVKARRDRLDAAITAMAAASEFTPVVQRLGCLRGVGTLTGFALAVEIGDWHRFTGNTIGSFVGLVPCEYSSGASRVQGSITKTGNTHARRLLVEAAWHHRARYLAGKTLRDRWELAGPAARVRGDAGNRRLHARWVRFLDRRKRPVIANVAIARELAGWCWSLAVLQE

SEQ ID NO: 499928 - protein, 367 aa, unidentified
MEKSSIVFVGMDVHKESIDVTLAETGGEVRRVGSIGGDRAAVEKLLGRLSRVHGHLHVVYEAGPCGWWLQRLCAGHGHACSVVAPSLIPRRAGEHVKTDRRDSEKLARLARAGELEALYVPDVRDEAIRDLVRGREDAVVAQRRARQQLKALLLRHELRYVGRTSWTGAHRRWLAELKLPEPAQQIVFEEYVMAIEAAGERVARLTRAIEEQAAHWRFGPVVQALQALRGVQFIHAATLVCELGDLTRFESPRQLMGYLGLVPREDSSGPARRQGSITKAGNGFARRALVEAAWAYQHPARVTPIIARRQTGLPKSIRDIAWAAQLRLCARFRKLAARRLNKNKVVVAIARELSGFVWAMARQVKPL

SEQ ID NO: 499929 - protein, 328 aa, unidentified
MKKEKEPKQYCGIDVSGNTIDVCYTKTDGTMEWGQYENNRIGFKQLLKYCGTDYHYIMESTGVYHLPLAFFLQAQECMYSIINALQIKRFIQMNLERNKSDKKDAYHICNYGIMNDPKVYEMPDRQYFECKSLNNAIEGITQELTSFKNKLHALSKLEIEKKAIEKSYKQIIKTLSTELLKLESELNTKLSTWQPELVKLVSSVVGIGKRATSLLIVSTQGFKHTLNYQQLISYVGLSPKEYTSGTSIKGKVRICKQGGGRLRHVLYMCALNAKETNKECKTLFDRLVAKGKNKKLAVIAVCNKLLKQVFGVVKNQTMFHRNYLQKTA

SEQ ID NO: 499930 - protein, 347 aa, unidentified
MKAPQYYVGIDIASASFTCSVGKMEGRWQIVVRPASFANEYDSFSAYLNWLHDHEVKPDNSVICMEATGVYNEVLAHFLCANGYTVAIEPPLKVKRAFKPEGHKSDPVDSTQIAEYAYRFWDELSQWTPRKEILEQIKTLLTTREQFVVERSGHQNALQALKRKQVRTLMAEKMHEKAIEELKRHVQEIEAEIQRLIDQDPDLRNLVALLISIPGVGALLAAHMLLLFKSAPEPYNPKSLAAFIGICPYESSSGTSVRGPSTSRHYGPPALRKLLHLAAMSIATHQQQFRLYYLRKVKEGKPKQLVINNLANKLIKIMVAVARTRTKFIPNYCSVNPALLKMALTKS

SEQ ID NO: 499931 - protein, 321 aa, unidentified
MTYVGIDVSKATFVVAYSSAKGSETKTFKNTVKGIREFIQTISPKENHCVLEATGNYSMLLVYLLSKAGFVVSMENPLKIKNFARVMLSVVKTDEIDARLIALYGERMQPAPFKLRNDSILLLKQKRTVLRQLKKQLTANTNLEGSLKVLPFIDSKSKKVLEKTIKFLQKQIKEMEEELTSLAEIEYKKQMDLLTSIKGIGATLAAALIIATGGFTYFDNAKQLTRYLGLSPTYQQSGTSVNVKGHINRNGDAHLRSQLYIGAMASLRCNTECKACFDRLRSNGKPGKVAIIAVANKLIRQAFAVVTQEKPYVDGYKSVKP

SEQ ID NO: 499932 - protein, 403 aa, unidentified
MQVLYPRCAGLDVHKDSVVARIRCVSEPPHDAVRSFSTTTSALLELNEWLRTYGVTHVAMEATGVYWKPVWHLLEEDFELVLANAQHIRNVPGRKTDVNDATWIADLLAHGLIRSSFVPPPEIQELRDLTRTRKQLVREIAQHNLRIQKTLEDANLKVGSVLSDILGKSGRAILQAIIAGESDPEKLADLAYGNAKKRRGELVESLRGRIRVHHRELLRIHLNVIESLQQAMADIDARVGKALAPIQDSARLLTTMPGVNEVTAQVMVAEIGVDMTRFPSAAHLISWAGLCPKNDESAGKRRSTRVRQGAPWLKTTLVTVAWGAVRTRDSYLQAQFHRLRARRGAKKAIVAVAASMLTAAYHMLKNGVEYRDLGADHFTRRDRSKGPSSDWFGDSPTWAAMCR

SEQ ID NO: 499933 - protein, 345 aa, unidentified
MGVDTHKDVHVAVALDELGGYLGTLSVPATKDGARRLMSWATGLGTFERAGVEGTGCYGAGLARFLRAEGIRVFEVVRPKRRDLRRAGKSDPIDAEAAARAVLAATVVGEPKGTDGEVEMIRVLRMARRSALKARTQAANQLKALLVTAPEELREELRGLSTIKLVCRASRFRTGESLTGVMVATKFALRSVARRYRHLCEEISELDEQLGRLVAEAAPALVAVEGISTDTAASLLIAAGDNPERLTSESAFAHLCGVAPIPASSGKIVRHRLNRQGNRDANRALYVVALGRMSRDERTRTYVARRTAEGKSKKEIIRCLKRYIAREVYRILVSPLHTSTPISVP

SEQ ID NO: 499934 - protein, 436 aa, unidentified
MAVIVWQAAYPVLAACILYEISREIRGSEEHLIVGIDVAKQKHNAFLGTATGKTLLKRLVFENNREGFEKLLMHVESISASNGHKRVTFGLEPTADYHKPLAEFLINREHNLVLVSGVAVKRNRELLDGRWDKNDMKDSANVADLISQGKCLFYEYPTHVLRDLRSLLSLKRKFKKIEHGFRVRIRNHLLAQYFPELDRYYGHRESENLAIVQWCLSPSKIAKMKYEDFFRLVTTRDRGLIQHQRLKAIWDSAHSSVGCSAGTATEFEAGILVDTLKQVRETIGNINEKVIEICVLFPEYKYLLSIPGFGPDVSAIVLAAIGDPFRFESGNQVLKAAGWDLSANRSGRRSDSVTPVISKRGKADLRYALYQAALIASTRNKHFTSWFIEKLKGREKEKGIKTKMRVKLAAKLLIIAWTLMKKKEPFNPELLKVKKN

SEQ ID NO: 499935 - protein, 341 aa, unidentified
MNVKTIGIDLAKNVFQIHGVDEHGKRLFNKQLRRAQMASFFANIPPCLIGMEACASAHFWANKLISMGHNVKLMAPQFVKPYVKTNKHDAADAEAICEAVTRPNMRFVPVKTAEQQAVLALHRSRQSFIKQRTAQANQIRGLLAEFGIVVPRGIQQLQRRLPELVEDADNPLPVLFRTQLSLLQHHMAYLFDVIATLDKQIEQCYRQNALCQRIGKIPGIGPVTASAPIATIGKANNFENGRQLAAWLGLVPRQHSSGGKQVLLGISKRGDTYLRTLLIHGARAVLQSAKHKQDAVSSWANQLMARRNNNIASVALANKNARTVWALLAKEREYCAPIISA

SEQ ID NO: 499936 - protein, 348 aa, unidentified
MAVTIVEDRRAITGGVDTHAEVHVAAALDPIGGLLGVKEFPVTAAGYASLLGWLAEFGTVALVGIEGTGSYGAGLARHMAAAGVRVVEVDRADRQDRRRQGKSDPLDAVSAARAAQSGRAAGAPKGRDGAVEAIRALMVAKRSARNERTQAINQARSLIVTGPDDLRARFAKHTVTALVSDLAALRPRPGDVPGYATRIALRELGRRAQFLDAQLERLDELISPLVAGRAPGLLALYGIGPDTAALLLIAAGDHPERLRSEAAWAHLCAVAPIPASSGKVRRHRLNPGGNREANHALWRIVITRMSSHAPTRAYVDRRTREGLSKKEIIRCLKRYVAREVYPRLRAGG

SEQ ID NO: 499937 - protein, 363 aa, unidentified
MGWTASRHLVPKFGRQNTNWRPSMSEIKRIAIDTSKAVFTLHGVDDAGRPMLRRNVRRRELLPFFEKLPPVEVVLEACGGSHHWGRALSTIGHRVRLLPAQYVKPFVKRSKNDRNDAEAISVAASQPSISSVPIKSLEQQAAAMLLSVRELLVRQRTQLVNALRGHAAELGMVAPLGEKGLAELRTEIAAADERAVPAAAKQALMLLGQETRRIETRLAAIEVKLMQQHRANPVSRRLSGIPGVGPIGALNFALRIDPAQFRSARHLAAWLGLVPRECSTAGRQRLGGISRAGDERLRQLLVLGATAVIRHAKPGRPATSPWLLSLLGRKPRKLAAVALANKMARIIWAMMTSGQAYRSQSAA

SEQ ID NO: 499938 - protein, 345 aa, unidentified
MNNTRIGVDLAKDVIQVCIYARNKVLSNTEMTYQAFALWLINTKPTTIIFEACSTSNYWNQVALSLGYDAKLICPKFVSSIRKKQKTDANDALAIVQASFVPDITFISGKSIEQQQLQSIMRLRDLATKQKTALSNQLGALLLEFNIRCSPKLGGLRGAIESVLENAENEFSWALRASLKAAWDHYLMICQSVATYDESLIKAINEHPECKKLLKLEGVGVINAVNLYIALGCSEIGVFAKGKDAAACIGLTPIQHSSGGKTKLGSVGKYVKNSILRSQLVVGSMAAIRMIVKRDAKTKKERWIQELVSRRGIRCAAVALANKNVRTAYAMMTKGTDYKAELLAV

SEQ ID NO: 499939 - protein, 343 aa, unidentified
MAIVAGYDVHRNQITFDALDTDSGEVTRGRIDSTREAVSAWVERFPGRQVQVAVEACTGWLFVCEALAEAGAVPHLAEPAEVAARRGSKRRAKTDRADARHLRQLLAEGRLPEAWIPPAHVQQWRTRARLRKTLVDERGQWLQRIQATLFHHGVPAGSVPERLLSGRGRAWLAGVALPDAARERITVALAIIEALDQQLAPLERDLRALARRQTGCRALQAHFGIGATTALTILCELGDVSRLSASRKAVRAVGLDVGVHRSDRRSRVGKLTKQGSPNARWALYEAAQSACRRTSPDHAAYLALKARGLSHTRASLTIARKLTRRSFHTLHQLGPEALAPVTD

SEQ ID NO: 499940 - protein, 341 aa, unidentified
MDRVIIGVDPHKLSVTIEARDSREMLRAKGRFGTDTRSYRQLLAYARQWPERVWAVEGANGIGRPLAQRLLASGERVLDVPAKLAARARVFDTGQGRKTDPADAHAIVMVALRDKRLREITADPDLAVLRLLCDRRDELPAARAQALNRMHRLFLELIPGGAPVKKTTAQYRALLATVRPRDLAGKTRRRMAAEEIADLEHPGATLKAMKAELKAAVAASGSHLMDIHGIGPAGAARIHADVGDVARFPNRAHFASRVRHRPHRRLQRPAHPPPAVAGGNRRINHVLYMAGIVQLRNDTPGRAYYRRRVAEGKTSMEAMRCLRRRLSDVVYRQLAADARAR

SEQ ID NO: 499941 - protein, 404 aa, unidentified
MRCITMFYCGIDIAKYKHEASVIDMSGKALSNSITFANDRQGCEKVLAIFEKSEITPDNVVIGMEATGHYWLSVYTFFLELGYTVKVINPIQSEAFRKMYIRQTKNDSKDSYIIAQIMCFGEYSATTLSEDNIIALRQLSRYRLALVDACGDCKRRVIALLDQVFPEYDKLFSDTFGKTSSELLLNCPTPEDMLAVSTRKLTNILNKASRGRFGKEKAEELKDAAKNTFGIAFAKDAFSFQIKQLMQQIIFTEKQLSELEEQIANLLHETNQYITTITGIGDVLGAIIVSEIGDINRFERPNQLVAFAGLDVTVKQSGEFSGTKNRISKRGSPYLRRAIWLAAQRAAFCDPILSEYYQSLKARGKHHLTAVGAVARKLCNIIFVILKENRPYLPIPPKKSQNLS

SEQ ID NO: 499942 - protein, 379 aa, unidentified
MWAVVERRKPQQPFNVDALNSQGSVPMKRDKYMGIDLHQATSVVVVLDSEGKQVLETVVATEAPAVIRLLQMINGPLHVTFEETTQAAWLYEVVRAHVTEVIVCDPRRNKLLSEGSKADKPDARKLADLLRAGMLRSVYHGHEGTRTLKELVRAYETLSQDTERTMVRIKALYRGRGIRTPGRSVYQSSQRELWLKQLSETGLRQRVGLLYEELDNLTPLRKKAKKAMLTESRKHRAVALLQTIPELGPIRSALIVATVDTPHRFRTKRQLWSYIGLAVVTHMSSEYDIQDGHIVRKRKPIATRGLNQNCNRRLKEVFLSAATGGSQTEPYRTYLEALRKRGVRPEMARLTLARHIAAIALRIWKKGETFDPKKLNWAT

SEQ ID NO: 499943 - protein, 355 aa, unidentified
MKNTNNSLDFTGQNIYVGMDVHKRTWTCTICSQHAILKKVVFERPFTKNLVNYLRRNFPNANCYSAYEAGFCGFVAQKELKAEGVNCIVVNPADIPVSDKEKQFKTDLRDSKKIAVTLRSGELKAIYVPTLENQKDRAVVRERWSISKDQTRAKNQIKSHLNFFDIEIPEDFTSRYWSIKFVDWLLKIAEEKQDDALKVKIQKHIILRTHQLWATRELRKLSRTDRHIELSKNLLTVPGVGLFHAMVFLTELIDMKRFKNENHLFSFCGLIPTTNTSADKQRIGEMTRRGNTRVTTALIKSAWVAIRSDNELLMRYETYRKRMNGNKAIIKIAKTLVRRIRKVWIHKEKYIKAEC

SEQ ID NO: 499944 - protein, 352 aa, unidentified
MSMLADVVEVVIGVDTHKDTHTAAVLDSRTGGVLARVTVSTDPDGYAQLVALAGQHSGLRAWALEGSGGYGAGLARHLADSGELVVELDRPQRPARRAGAKSDPIDAERAARDALARTRLAQPKTGAQRAALQVRLTARRAAVEASADAQRQLHALVITAPEVVRARFRGQSTRVMLTTATRLRPTTSADVDVFTCLSVLRDLARRVRFLEAEAAAHEKAIRAIVRSWRPDLLDLTGVGPIVAATVLTAWSHPGRCRNDAAFAMLAGAAPIPASSGKTVRYRLNRSGDRQLNRALHTIVLTRLQRDEDTRAYAERRRAEGKTDREIKRCLKRYVARDLYRRLENPPQPLDAS

SEQ ID NO: 499945 - protein, 349 aa, unidentified
MIVLGADTHKRSHTVAAVAAGTGELLGEQTIPVGRRGFGALLGWARGLDEDRVWALEDCRHVSGSLERFLIERGERVLRIPTHLTAKARKSARRRGKSDPIDALNVARAALQEGLDAFPAAQLAGPELDLRLLVDHRERLVRHRVELNSTLLWHLHDLWPEIELPGGALFSKKWSSRIGRRLARAEQTMRVRIARDELRRLRELTGAINQLEREITVLVEQIAPQLLAEPGFGPLIAAKLVGEIAGAQRFATAAKLARAAGVAPIPASSGNTQRQRLDQGGNRQINAALHRVIVTRARCHPETRDYIARRRSEGKTTREAIRCLKRYLARRVWRLLLQPPTRQRNLSIS

SEQ ID NO: 499946 - protein, 405 aa, unidentified
MNAVGIDVSKGKSTVTIRRPGDIVLMPPCDIPHTQSAINGLINEIKALDGETKVCMEHTGRYYEPIATWLTNAGIFVSAVNPILIRDFGDDSLRTPKTDKADSKKIARYTLDRWTKLKQYGNMDKTRNQLKTMNRQFGFYMAQKTAMKNNLLSILDQTYPGANDFFDSPARSDGSQKWVDFVHTYWHVECVRGKSLNAFTEHYQNWCRRKGYNFSAEKAAKVYCLSSDLIAVFPKDDNTKMLVRQAVAMLNVSSETVESLRQEMNKLASTLPEYPVVMAMNGVGTSLGPQLIAEIGDVTRFTHREALTAFAGVDPGKNDSGQHIQKSVCTSKKGSPSLRKALFQIMDSLIKRSPADDPVYAFMDKKRKQGKPYYVYMTAGANKFLRIYYGRVKEYLSSLPETEEL

SEQ ID NO: 499947 - protein, 343 aa, unidentified
MTYFAGLDVSVKETSICIVDDTGKIVREARVASEPEALLQVLTNNNYRFKRIGLEAGPLSQWLFSALAEAGLPVICVETRHMRAVLKAQINKTDRNDARGIAQMMRVGLYRPVHVKTLRSQKLRMLLTHRKLLQSKAIAIENDLRGTLRNFGLKVGMIGAVKFEERIRELVENLPDLAVLVEPLLIVRRVVREQLGILQRRVLAVVRDDEVCRRLMTIPGVGPVVALTYRATVDVPARFRNSKAVGAVFGLTPAKYKSGETDRTGALSRCGDEMMRMMLYEAAQSMLVRSTKWSWLRAWAMKIARHRGMKKAIVALARRLAVIMHRIWVDGTEFRWTREVTAA

SEQ ID NO: 499948 - protein, 357 aa, unidentified
MKKSIKKSAVEVASLGIDLADQWSDWVTLDDAGVVIERGRVKTTEPHLRAQFGPMAPTVIAIEVGTHSAWVSRLLRSCGHRVVVANARKVALIHQNRRKNNRIDAEFLARLVRVDEKLLFPIEHRSEEGQQDLTILRSRDVLVGARTKLVNHVRGISKAAGVRLPICSTEAFVKKCGPALPAGIAPAVKVLLEHITQMTTHIRDYDRTIDKMPKKYPAAKLLMQITGVGALTAVAYVLTVEDVHRIARSRSAGAYFGLVPGSDDSGEDHEPGRITKEGDRYVRRLLVAAGHYIIGRFGPDCDLRRHGLGIAARGGKNAKKRAVVAVARKLGVLMHRLWLTGEVYEPLYNANRQQVAA

SEQ ID NO: 499949 - protein, 351 aa, unidentified
MDIIGCDLHTRYQNVAWVEAETGEIRSRRLEHENGEARAFYLSRARGTVVGIEATFPALWFERLLAECGHELWVGDAARIRASEVRQQKTDTRDAEHLLDLLQAGRFPRIWVPAAAERDLRQLLVHRSKLVRMRTAVKNQLHALAISQGVCRKGQLWSARGRAELASLALLPWASRRRQALLEWLAQLQGPLAELDRAVAEAAQQREAAVRLMTHPGVGPVVGLAFALTLGPVERFPNSRKLVSYLGLNPREHSSGGRQRLGAISKQGNTMLRWLLVEAAQTAARYDPELRRAYQRLKFRRVSGVAKVAIARRLAVRLYWMLRARVDYAQLVRLSGSPSSAVVPPRAESKV

SEQ ID NO: 499950 - protein, 358 aa, unidentified
MSDGSKERPKVTAGLDIGDKYSYLCLLDTESGEVLEEGRVRTTPEAFERRFASEQPLRVAIEAGTHSPWASRLLEGCGHEVLVANARKLRLIYSNKRKTDEVDAENLARLARVDPKLLYPLRHRGEESQAHIALIRSRDALVSSRTQLVNHVRGAVKSFGARLPKCPARSFHKRAQEHIPEALLAALAPVLEQIGSLTERIRDYDRRLEAIAKEHYPETELLRQVEGIGPLTALTFVLTVEDPYRFERSRSVGAYLGLVPARDRSGERDPQKHISKEGDEMLRRLLVSGAHYILGPFGSDSDLRRHGGKIASRGGKNAKKRAVVAVARKLAVLLHSLWISGEVYEPLRNAHRSGEQAA

SEQ ID NO: 499951 - protein, 319 aa, unidentified
MLGIDVSKETLACTLLDPQTHKPLWSRTYPNTATGVMRLLRHTPPASPWALEPTGRYSLLAATTAQAAGRSVLLAQPKPARHFLRSIQSRAKTDRLDSHGIGLFALCRPLPPYPLKSPVVEQLDQLLRARKSLAAALASFALQATEMPHAAPALAPVMAALETQKKALDQQIRQLTTSHAAFAITKELEKVPGIGPVTAATLAARLVAHDFGHSDAFVAYCGLDVGVRQSGKKQGQSGLTKQGDGELRRLLYLAAQANLRRKDRPFKAHYERERAKGLTSTAALCAVARKLARLAWSLHKHGTAYDPARVYQQNQLSLP

SEQ ID NO: 499952 - protein, 353 aa, unidentified
MAHPAPRQLTVGVDTHLDVHVAHAKDHLGRRVATTSIPTTPTGYQDLLAWARGLGEVDAWGVEGTGSYGAALARFLAAQGQAVLEVNRPDRSARRRQGKSDPADAQAAARAVQAGEVTVVPKAGDGQVEMTRSLRVARASAVRARTQAVNALKALLVTAPAELREQLRGLPAAALVRAAAGLDPGPVTSPLAAAMLALRILARRHQALSAEITTLTTELDRLTAKAAPKLVALSGVGQDSAGALLAAAGDNPGRLRSEAAFSMLCGASPVEASSGKTRRHRLNRGGDRQANAALYRIVLVRLRHDPATKAYMARRLTEGKSKKEAIRCLKRYVAREVFAVLHQMAQDTPTPAA

SEQ ID NO: 499953 - protein, 388 aa, unidentified
MIYVGIDIAKLNHYASAIDSDGVVLIEPFEFLNDNAGFYTLLSKLNSFELDDIIIGLESTAHYSNNLVSFLVTKGLHVCVINPIQTATLRKNNIRKTKTDKVDTLVIAKAIALMDHPRFVTLYDIALMQLKNLGRFRMNLVKQRSRTKIQLTAYLDQVFPELQYFFKSGIHQKTVYAILKEAPSAIQIASMHLTHLKNLLVSNSHGHFKNETALELRVLAQKSVGAADRSLSIQITQSIAQIELLDSQIDAVESEMKDIVTSLDSVIMTIPGIGPINGGMILGEIGDINRFSKPRKLLAFAGLDPSVYQSGNFTAKKTKMSKRGSSALRYALMNAAHNIVKYNQTFKEYYDSKRAEGRGHYNALGHCAGKLVRIIYKMLKDDVEFNLD

SEQ ID NO: 499954 - protein, 363 aa, unidentified
MVEGICWAGLDVHASRTSIAVLDTASGEVIKRTVLGRPHEAIGVLEQLPGPVRAVYEAGPTGYGLARRSRPGLQIEVCAPGDIAAGGGASSRVKTDARDALKLARLLVAGQLTMVTVPTVEQEQVRDLVRAREDVRADLMRARHRLGKLLLRREIYFPGKDRSWTVKHLQWLASLRFEDRSTEATFQDYLHGHDTLLARRDRLDEHIEQVATSCSLAWEVGRLRCLKGIDTLSALGLAAETRGLERFHKPMHVSAFLGIVPSEHSSGERRRVGAITKAGSQHGRRLLVEAAWHYHKPPRTGAALRRRQDGADPAAIDCAWRAQRRLHQRWRDLHQIRGKRSTVTNIAVARELAHFCWEITRPE

SEQ ID NO: 499955 - protein, 269 aa, unidentified
MSEKIYFGVDVCKESLAFCGPGVAGQMANNAPGARRLLARLPKGAHLIIEASGGYERELVRVAQQSAVPLSVVNPRQVRDFSRGVGRLAKTDPIDAEMLARFGAEVNPPPDAVPTAAEVALQELVSARQQLVEERTVLLHQQAQHLNSIVRRLDCARLKLLQRQIAQLELAIGSILEEQSALKQKVERLQQVKGVGLITAVTCVALCPELGSLSRGQTAALVGVAPYDDDSGARKGWRHIAGGRSRLRRALYMASISAVRSNPILRRFY

SEQ ID NO: 499956 - protein, 387 aa, unidentified
MKKTNSSVACAGMDVHYKFSNVTFRDASGKVVSRQRLDHPDRKQLQQRLRCWPAGIPVVMEASFGWGWLSDLLQEAGQQVHLSNCYKVEQMRKARGWVKTNKKDADLISLLPFEPSDWWKVWRAPLEVRNRREQMRFRGDLVRLQTMAKSRIHAIFHRHGIFHEYSDLFGAQGRKFLVELCLHNPAKLPAQALLALRGQLKLLDHLRRQLADVARVLHKQLAKTPLTTRLKTIPGIGVILAHTLAAEIGRIERFQNQKALASYSLLAPRSDDTGEHHPSDPPLGRHLGLRGNKTLKWAFIEAAHGAVRSGGKWRAMFDRVTDGGRKNRNRGYIKVARQLVKVVYAVWAKGIDYHDLAPVRPGRKNNRSKSRSETGQLYHPMVHALPA

SEQ ID NO: 499957 - protein, 411 aa, unidentified
MQTLVERGCGLDVHQATVVACLLSVPAGGRVHKQMRTFGTTTRQLVCLREWLLAEGCTHVAMESTGVYWKPIYAILEGAFQIVVANAQHVKKVPGRKTDVKDAEWLADLLCHGLLRPSFVPPQPIRELRDLTRYRRKLVESQVAERNRLLKLLESANIKLASIASDVFGVSGRLMLLALIEGKASPQEMAELAKRKMRSKIPELVLALEGRVEEHHRFLLQLQLDRLETAERDLAVLEERIQQKLEPYTAQLDLLDEIPGVDWTLAAVIIAELGIDMGVFENASQLASWAGVCPGNNESAGKRKSSRSPRGNPYLKIALIEAAQSAAKAKGTYLRDKFYRVKARRGYKRAVVAIAHKILVAVYHMLSQHVSYNDLGGLYLDKLNKQHLTGNLVRRLERLGYTVTLNVQEAA

SEQ ID NO: 499958 - protein, 320 aa, unidentified
MELILGIDVAKAKLDLALRLPDGRIRSKVVANTDAGLAELQAWLAPHDRTALHVCMEATGIYWEAVAETLADAGLTVSVVNPARIKAYGAARQVRTKTDAVDARLIADFCASQHPPAWTPPPPAQRELRAWVARREALVVMRTQEQNRLPVAHPSVRPGIEALIAHLDRVIAEVEAAIRQRIDDEPTIKHQRDWLDSIPGLGDKTIPVLLSFYGGPARFDHARQAAAFAGLDPRQHESGSSVRGKPRLSKVGHAGLRKALYMPAMVTLHKTAWGRTFRDRLAAAGKAPMVIIGAMMRKLVHVAFGVLKSGQSFNPSLHGA

SEQ ID NO: 499959 - protein, 388 aa, unidentified
MRRSNQDRIVGLDVHPDSFAGAILQGMDPWKARVVSTSTRVALPLLEKWVLRHTREEDILVMEASGNAFCVAERLRALKRKVVILESHRAGKVGKTYCATDRVDAIKIARIYLSALSPVVWQPDAKTRERREVFSAYQAVVKEGMRLKQQIKSMLNEHCVRLEKGFRLSHPSALGRLLRRRKWTEAQKMLLSQLHAGLVGARVRRQRLRHYMAQEILAEKELLRLTRLCGINLITLYGLIAAIGDIQRFANARKLSTYFGLNPTVEQSGNYEGSGALKRHGRGAIRALLVQSAKKLLQVDNPLQKWGLALAARRGRNKATVAVARKLCVAVWHVMQGHVIGAIERMDTLHTKLHKLATELGVPTIKQLGYETKEAFVQKKLYVLRSYA

SEQ ID NO: 499960 - protein, 442 aa, unidentified
MDTDCFSLYVGIDWGDAQHQVCMLSDPNHPKELQVKHGGRALADLAMALAHDVWGQNHRVAVAIEVDSGPVVESLLLQGFAVYSINPRQLDRLRDRYFPSGAKDDRRDALVLAQSLRTDRQLFKRVEVDDPDTITLRHVTRARDELQRSLQRTTNRLRNHLAQYFPALLQLSPDASDPLVWALIERAPDPEVAAKLSIVAIAKIVKDLRIRRVSPQQIRDVLREPPVQLLPGARQALAQRALTLIPQIRLFHEQFVEHTRAMERQIADRCQPVQEPVSEPAGEPALEAPAPDQSSKPSDAPTSPAPRLSDAAILRSMVGIGAYVLAVLLTEATRAIARRDLAALRAQTGIAPVTRQSGHSLHVSMRRACSWRLQKAAYCWGMAAIQNDPLSKAHYQRLRASGHTHARALRGVVDRLLDVLITMLRDGTLYDPERRRELQNAA

SEQ ID NO: 499961 - protein, 386 aa, unidentified
MHHVTNIPSPEQTGTGADYAILFVSLELSRSTWVATSLAPASKKMSKHTLVGGNGRDLLDLLARLKARAEQRIAAAVKVVTIHEIGLDGFWVHRLLDANGIESHVVDPASIAVPRRHRRAKTDTIDGETLLRTLMAWQRGEPRVCAMTVPPTPSEEDHRRVSREREALLRERIRHTNRVRGLLFGQGINNYNPLHKNRRERLKELQTGDGRPLPARLKAEILREIDRLELVLRQISEVEAERDEMLRSAEASSPAALLMRIKGIGTEFATVLYLEGLFRHFENRRQLAAYAGLAPSPWKSGSIDHEQGISKAGNPRLRTTMIELAWMWVRYQPDSALSRWFRDRVGSERGRTRRIAIVALARKLLIALSRYVSHGEIPAGAVMKAV

SEQ ID NO: 499962 - protein, 451 aa, unidentified
MSKDKGKKEKKKAIQGMPVLQYYAAGADIGDTKHDIAINDGRGGQIVKTFKTFTADVQKAVNWLKDEGVTTVAMESTGVYYLTFYLMLEEAGIEPYLVNARHVKNVTGRKKDDTDAMWIQRLHSCGLLQNCFQPDNDFRTLRTYVRQRKGLITRSSDEVRRMQKALELMNVKIHVVISDILGKTGMQIIKAILGGNYDPVELSKLRDPRIKATREEIIKSLEGLWKEEYLFMLEQAYNTYCFYQQQIEVCDKKIYEQLLKQIGKANQGDITVDPPKSKKTGKPKKNQFSFPVAPLLIKLTGVDLCQIPGINESSALEFISETGVDTNRWKSSKHFAAWLNLVPNTKITGGKIISSRMMKKKNRAGQTLRMGASCLYGNKTPLGDYHRRMSAKYGGKGASLATGHKISRIIFKMLETKQEFNFQMLIESQQKYRGTKIKQLEKQLARLKKVA

SEQ ID NO: 499963 - protein, 409 aa, unidentified
MIIIGIDWARSKHDLVLMDPEGQVVARLQVTHNAEGLAQVAAAIAEHESEPWEVRIAVEMHDGALLAWLLEQGYTVFGINPKSAQRARDRYRPAGGKDDASDAFILADMLRTDRGSLRPVQPSSDATIALRKLVDLRTRHVHDRTALFHRLRTRLDEWCPQLSQLCGDFNRIWQRRLLKRFPLQQDLNAAHGQTLNAFIRQHRIGPDTAERIKATRQAMPMPIPAAIAPSLRLEIQHLLAQIELLTQDIAELDKQVRNELDQHPDAQVFQSLPVKGTNTIATLLAGLGEDREHAPGYRQLAAAWGVAPVTIASGRYCSVRRRHAADQTLAQALMHFAFNTAFTAGCWAEDFYRRKRDEGKAHYTALRCLAQRWLKILYRIWKDRVPYDEQYHRNNQQKHAQPTPQPANC

SEQ ID NO: 499964 - protein, 413 aa, unidentified
MKKHTYRAQKVNNMNWQQVNEQSAGEALVLAVDVAKVQQYALLTNQEHTQTWLMQWSHLEHTQYLIEQLKTLEAPITVVMESTGTYGDSLRYQCRQAGFTIFQANAKKVHDAREIYDGVPSLHDAKAAWLIAKLHKDGATKPWCEPTEEERRMNALRLEYELHQDQYRRNQNRLEAYLSRHWPEVLPMMPLDSVTLEQLIKTYGSPQEVAAQSEQAASDMRGWGKSGLSAEKIAKVIASAKNTLGEPCIEAERQFLMALASELHHSREQKQATKQALEASVENDEALREMGHTVGKVTTAVLISLHLDPRCFATPKSYQKALGVNLTEKSSGQINGRLRLSKRGSALARKFLYLAALRLLVNDPVVSKWYEAKKDERAKLKTVIALMRKLPLALWHIARGERFDAGKLLKVAV

SEQ ID NO: 499965 - protein, 328 aa, unidentified
MQGKVSSERTAMATVYVGIDVCKEWLDIHLHPLGRSFRVTNDTAGMRRLKRELDALDQMPRSTLHIVMEATGKWHRAVQRSLHADGFYVSVVDPLRARLFAKACGFLAKTDRLDARLLAIMGEALKPAQTPPQDQALEALQELVNARSAANGERTALSNRMKTAVTAFLRKELTRRLAALDTHIARLDGDLERSIGAEPEMRRRLDILISIPGIGAVTAASLIAGLCELGACSGKQAAMLAGLAPLACESGERAGHRSIRGGRPAPRNAIYMAALSASRHNPDLAHFAERLKKAGKPNKVVLVAVMRKLIVLANTLITKNRIWTPNPP

SEQ ID NO: 499966 - protein, 347 aa, unidentified
MRFYTQQHKYYCGIDLHARKMYVCILNNLGKIVLHKNIKTDPEIFFEIIFPYLEDVVVGVECMFSWYWIADLCHEHCIPFILGHALYMKAIHGGKTKNDKIDSRKIAALIRGGNFPLAYAYPQGMRSTRDLLRRRMHLMRKRAELLSHIHNTNTQYNLPVIGEKIAYKANRKGIAERFKDPSVNKSIQIDLAMIDTYDKLLQDVELYILKHAKAHDANTFYLLQTIPGVGKILALVMLYEIHDIGRFPIVQDFSSYCRLIRPEKESNGKKAGKGNKKIGNPNLKWAFSEATILLLRESEQAKKLQQKLIKKNGEGKALGILSNKLGRAVYYMLKNKKAFDMNKFFSN

SEQ ID NO: 499967 - protein, 376 aa, unidentified
MQGKYSVGIDISKKDFKVCFVILDQDQEIQIKSSRKFSNTVKGCESFKKWHKNHQKEDLPIVFVMEATGSYHEHLAWYLYQDKQQLSVVLPNRSKAYMISLGLKSKNDKVDAKGLAMMGAVQKLRVWQPISKQIYNLRALTRHLEDLQKIRTSLMNQQEQPKYAMYELKDVSRSIVSTLKTIDKQIAGCKKKIHAIIAKDVVLKKKVSHITSIKGVSTMTAAVVIGETNGFALINNLKQLTSYAGYDVKENQSGSRTGKTRITKKGNAHIRRAMHLPAFGVVRWHVKSFENLHKRVYGRTGLKMKAYVAVQAKLLRLIYTLWSKETDFDLNYQTSVNQEGTKTLIKQVDKETARSKDPAARDELIAVKTTSPLLVV

SEQ ID NO: 499968 - protein, 426 aa, unidentified
MLFAGLDVHKKEIEAVVLDEAGNVRLSQRLATERETLEAFARRHLAACRVALEATTNCWALAAILEPLCAEVVVSNPLRTRAIAEAKIKTDRVDALVLAQLLRCDYLPRVWFPDEQTRRMRRHATERANLSADRTRLKNRIHAVLHQRLITPPMEDLFSQRGRAWLKTLALDPEGAATLARQLAQLELIEQLLAALDQQLTEAAYQQPAVKLLLSLPGVDVTVAQTIAAALGDVKRFPDADRAAAYLGLVPSTHQSGQHCYHGRITKQGASHARWMLVQAAQQVGRHPGPLGLFFRRLARKKNRNVAVVATARKLITIAWHMLMNNEPYRYAQPKTMEAKFSRLRIRATGRKNKGGTPKGQPRSAAYGSGARTRALPSLDTIYAQEQLPPLAPLSSGEQSMLARHQLDSYAHSIRRAQRVPRRSRT

SEQ ID NO: 499969 - protein, 337 aa, unidentified
MRYLGVDLHTNSFTVAVRTEKGSERIAEYQLRKIGEFKRTLRKTDKVAVEATGNTRYFVGQVCSRVEEVVVVDPNKFEVIKKSVNKTDENDAKALALFLSKDMLPKARLKTKEDAQIGSLVGTRDKLVKLRTMLINKIHNILNSYGIKRKKESFSSNKGLDSVLRLDFDDIVLFELEILVIQIKSLNDNIKKLDNEISDRGKKLNGYKNLSSIKGIGDKSATILLSVIGNVNDFADEDKLASYFGIVPRVSKSNQTEHHGRITKRGSKIGRTTLVQCTLIAKRYSPYLAKYYERIKARRGSGKAIIATARKLLGIIYNTLKNDWVFEDFPNFVLVNS

SEQ ID NO: 499970 - protein, 423 aa, unidentified
MQNTAARKRKQVPEGYLIIGVDPHKKRHAAVAITQDFTTQAKFKFDNTREGLEAMLNHAKMEMVKSGCRGVMFAIETGGHYWRNIAYYLEGRGIPFRFINQFTLKRRREGKDLNRRKNDYRDSEVAAQLLCTGEFTESKLPQGVYAELRTAHNAYRRLVKERTRITNLVKGLLDGLFPEFTRVFKDPCGLTSLSVLSTCSIPGVIAGMTEDDFVAVIEARHRGRLMRRKLRALHNLARTSIGINAGAESVSSEISFLIEKLELIRQHIRIIEGTLAKLVDETEEGKYLLSIRGLNYIAVAGLLAELGCFKAYRSAKQMIKMAGSNPTESESAGKKRSRTPMSKQGRPVLRYCAWTSVIPMLRFNSDFRAWAKQRRERPAHANPLGGREVVGAALNRLLRLAFAMVKNQTYYQVSKSELTLVAV

SEQ ID NO: 499971 - protein, 315 aa, unidentified
MVDVPCFVGIDVAKAQLDIAVRPSGERWAVPNDASGVVTLVERLQALHPTLIVLEATGGLERSATAALATAGLPVVIVNPRQARDFARATGQLAKTDALDARALAHFADVIRPTPRPLPDAQTQALRALLGRRQQLIGMRTAEQNRLAGTSERLTQDIEAHIAWLNARIATLDDDLETTLRASPLWRENDDLLQSVPGIGPVCARTLLLELPELGTLTRQQIAALVGVAPLNCDSGTLRGRRTIWGGRAHVRTVLYMGTLVATRFNPQIKAFYQRLLVAGKIKKVALTACMHKLLTILNAMLKHRTSWQVQEVQN

SEQ ID NO: 499972 - protein, 371 aa, unidentified
MTSRQRSTSSSVDPPVRREVVLGVDTHGEVHVAAVISPLGKILATESFPATAAGYRQLLVWARKRGTVRRAGVEGTGTFGAGLSRYLLAQQIQVYEVNRPDRSARRLLGKSDPLDAQAAARAVLSGRARARAKSGDGPVHSARMLKLAKDSAVKARTQAINQLKAVLVIADPALREQLSSLGNRELFRTCARLGLSGGGGDEDAVAQATHLTLRMLAERIQQLTAQIDELNQRLTRLVEHHAPQLLEPVGIGPDSAVTLLITMGDNPERLNTEASFAALCGVSPIEYSSGRRSTRRLNHGGDRQANAALHRIVFTRLRHDPRTRAYYERRTQEGKTDVRSSDASSDTPPARSSTWSDRLPAPLRYRGVRET

SEQ ID NO: 499973 - protein, 346 aa, unidentified
MEQISRIGMDTSKHIFQLHGVNTAEEPVLRKKLRRKEMVAFFEKLRPMVIAIEACGGSHHWARLLQSFGHDVKLIAPQYVKPYVKRGKNDAADAEALCEAMSRPAMRFVPVKTLDNQAALMLVGLRDRLIRNRVQLANAIRGYAAEFGLTAAKGMCKIEPLLDRAAADETLPALARELFAFHAGEYAQLQEQLEKVEAKLMVWHRADECSRRLAQIPGIGPIGASMLVMKTPTPEAFRSARHFAAWLGLTPKDHSTAGKVRPGVITRAGDEALRSVLVVGATAVIRQIRYGRGALSPWLVDLLKRKAPKLAAVALANKIARIAWKLMVSGQTYRANGRSPAMAWAA

SEQ ID NO: 499974 - protein, 357 aa, unidentified
MKKLFIGIDFSKEKLDATIILACGMNEIGSREYGRFPNNTTGYRKLCNWVKTNAWNTIAEEWLFCGEDTGSCSIGLSKWLYGKGYDIWIENAYAIKHSSGIQRVKNDKADSAIIAEYAWRQQDKVVPFEPLNESLAQLREIFLYRHKLVGQRVAMELRKEDKSQSNKSKAISFINRKSKHLIAEINKTIAECDKAIDSIIEADEELKENYAIITSIKGVARQNATCMLVYTNNFKKFGYDPRKIACYYGVAPFGKQSGTSVNTPAHTSHFANKLIKSLLGQAAHIAKIYNPEIRDYYQRLISKGKKPQVALNNVKNKLIRIIVALVRKKVPYDQNTYKYYEEREVIERKKNEKLIYC

SEQ ID NO: 499975 - protein, 467 aa, unidentified
MSDVRLGIDVACRADHRASLADDRGEFLWSSWRFRTTTVDLERLWGKIPEGARVTVILEPTRNAWVPLAAWLEARGATVVLVPPEQSSDLRDYYNKYTKTDRLDSRVLARLPMLHPEGLRGIDDLGPAESLRRATRLRASMVKRRTASGLRLDALVELLGPGWADALGSGSYPKTSLVLLEKYADPRALKRLGRTRLAALLVRSSRGLWREDKADELLAMAAETISLWSGGGIDFAFLAEDIAAEVRILRNLDAEIDAIDVRIEALYAEADPCGVVRSAPGLGPVSAAAILGSIGDFRRFDNLAGVRSFTGFVPKVDQSGLVAAHKGITKAGDAGLRQALFLAADKIRRIDPTLAARYHRLVIVEGKHHNSALCSVAAVLITRIAACWRNGQRYELRDEEGNAITEDEGRTICEERYKIDPAVRAARRRTTPAKTFKQRAGRGKKESTTKVAPAIDPPGGEPTEKVA

SEQ ID NO: 499976 - protein, 421 aa, unidentified
MKNSTARKLKQVPKGYLVMGVDPHKKRHAAVAVTQDFTTHSKFKFNNSREGFEMALERARAEMVRTGSRGVIFAIETGGHYWRNLAYFLDERGIPFHFINQFTLKRRREGKDLNRRKNDYRDSEVAAQLLCTGEFTDTKLQHGVYAELRAAHNAYRRLVKERTRITNLVKGLLDGIFPEFTQVFKDPCGLTALSVLSICPVPKSIVQMTEEEFVGAIRAKHQGRLMRKKLRALHYAARTSIGIEEGAQSVSSEISFLVEKLQLIKRQIHSIDETLAKLVDGTEEGKYLLSIIGLNYISVAGLLAELGSFRCYRSAKQLIKMAGSNPTESESGGKRSAHTPMSKKGRPVLRYCAWTAVIPMLRFNPDFRAWAEKLRERPVHANPLAGREIVGAALNKLLRLAFALVKNQTFYQSPQLAQVTG

SEQ ID NO: 499977 - protein, 392 aa, unidentified
MSKTIMIGCDLHDRSMLVRYAIDAGEPRQKSFRNDFEGRQKMIQRFSELAAKHQIERIVFAYEASGQGYGLSDLLEENGIECYVLSPTLLPKTPKSAKLKTDAKDAQMLLEQLRGFVLAGNPLPVVWTPPHRLRDDRELVRNRIDVADESTRIKLQILSMLKRRGIDKPSFYGTWSKRFVKWLRDVANQLDPVVGPVLESLVCRFELFRDEMTKLEKRIRELSRAPRYADAHDALRELPGVGLLTAMTFLTEMGDLTRFHNRREVGAYLGLCPASFESGETSNRKGHITRQGPSRLRRMLCQAVWVSLSRDAQISAAYDRIKGGKPQRNKKAIVALMRQLGIKMWHRAIACGVSTELAGRGGPHDPRTLARAQQRGTVPYVSPSPQPLASTG

SEQ ID NO: 499978 - protein, 295 aa, unidentified
MKITTIGIDLAKEVFQIHGVDSCGKVLLRKQLRRNEMAKFFANIEPCLIGMEACGSAHHWARQIGQYGHTVKLMAPQFVKPYVKTNKNDMADAEAICEAVSRPSMRFVSVKNVEQQAILSVHRARQGFVKSRTAQANQIRGLLSEFGFVIPKGISSIAKRMPDILEDAENGIPGTMRQLLQRLNNHLKELDRQVDELEIQIKQWHKESEASLKLEAIPGIGPITASAIVATVGNAMEYKSGRQLAAWLGANAQTAFKRRQADIAGYQQAWRQLFANIADPWCTICCSSSRAQYRN

SEQ ID NO: 499979 - protein, 322 aa, unidentified
MNKYKETFGVDISKDVLDVRGSKAGHHQYKNDELGFKKFLKRLPDDCLLAMEATGYYHYRLAQFLYKNAVVVSVINPLSIKRFIQMKLAKVKTDKSDSKAICEYALINEVPIYSALNDLQSECLQLFRLLDVYIKQRTAIKNKRHGEETLGIPSNFVYRSLKRHWKWLDKEIKSIEEKLLSLVKKDQQQQLSLLKSVPEIGPKTALFLIVITDGFSKFETASQLYSYVGITPTTRESGSSVRGRPRISKVGNKKLRNLLFLCSFNACKHNKACRELYERIVNKGKSKKLALIAVANKLLKQCFAIAKSGRPYDESYVSVLPK

SEQ ID NO: 499980 - protein, 425 aa, unidentified
MNYKQNEKINQVKESTLVVGIDIGSTTQYARAFDWRGIELGKVFTFSNSREGFEAFKAWMQRLQDKYRKSDVIVGIEPTGHYWFDLGAYLEDEGILLVMVNPYAVKQTKELDDNSQSKNDRKDPKVIAKLVTEGRYSAPYTPDGVYADLRIMVTNRKRLIREMTQIKNRFARWFAIYFPEYTDVFGDYEAQSSMLLLKKVCTPEAIVELGAEKINQIWRDAKLRAVGMKRATTLCETAKRSIGLKKGSSAAQYEMKLLLEDYEYKKAQLDAVIEEIEKLCRKIPESEQMLAIKGIGVITVAGFLAEVGDVRRFESPRQIQKLAGLSLRENSSGKHKGQTTISKRGRSKLRAVLFNAAIPLIATNPEFKSLHEYYTTRANNPLKKKQSVIAISCKLIRVFYAILANGVTYDAQKMLSDIHRQPQAA

SEQ ID NO: 499981 - protein, 347 aa, unidentified
MLHAGLDLSRKKLDVCLIKDSGEHVDQLVSPPDRDALKTLARRIEETHREPVSAVIESMTGARFVHDTLEAEGWDVEIADAQKVKGLAPLALKTDRIDSQVLATLSQRDLVPAIWLPDPRVRQERELARFRLHLVKHRSALKNRIHSALISFGKPCPVSDLFGKEGRLLLERLEIPEPWRSNITASLALIDDLERQIDATNRRLREGHADHPYIPLLMSAPGIGWVLAFTIASEIGEIERFQSPQKLAGYTGLCPRVNQSGDKDRRGPITKHGPTYLRWAMLEATMHALKHPAYSERYQRTKRRLGKQRGAKVAQIDIARRLTHAVWHMLTRNENFAPRGATFRLAT

SEQ ID NO: 499982 - protein, 318 aa, unidentified
MNVIGLDISKNTMDVTLITAKGEMDYIKIGNSHEGFEKLIGWIKTKRVRKIAISMEATGIYYEQAAEYLSAVYTVYVINPFKIKDYAKSQFSHTKTDKADSKLIADYAKRHLDKLTPFRPSENPTLYKLINLLQQLKQQKHESQNRLHTAKDPFIRSTHETIILLLSKKIEETSKRIDSTIKQQKSLNVEYQNLQTIPAIGKDTAAILLRHLTDKTFRTANQFVSFAGLSPKIEQSGSSVNKKGRLSRYGHRQLKRALFMPALVAYRINAFPQLVKNLEAAKKPKMVVIVAIMRKLAKIAYYIHKTQKPFDKTRHQTV

SEQ ID NO: 499983 - protein, 389 aa, unidentified
MKTTAKGVLQTGGEQVAVGVDPSRNALQLAILAPHGTTTKRFPLVPASLASIDAVLGQGQGVRIGIEGAATCGAMVLLHWLRQGYDIREVNPQISKRLRECLTESHTDISDAQGLAWSVRFHPHLPKVRLTVTTAAWKRLSRLRARLVKARTGLYNRLHSLLAESYGAVYKRLFPNLKSKRALEFFQAFPTLDDALDDLPQVRSLLGEERARLLEEAGRWGEGLYLETLRLEICLTIQLIFAHRTAIEGVEAKMAELSQADPQVGRLRAVPGMGTTLALTILGHSGDFSRFESHDAYAAYCGLAPAVWQSGQSRVYAKRRRRYSRPLKQAFLQLALTQLRLNPESRAYYERKRREGKPHWVALIALARQLCKKVYKLMAEKAPPTRPLT

SEQ ID NO: 499984 - protein, 428 aa, unidentified
MLEQNTEPDPAPDFAAFLALDWADEKHAFRLQVVGQSKIETGTLEQKPEVLGPWLAKLRERLGGRPIAVGLEQSRGALIHALMAYDFLVLYPIHPTTVAKYREAFKSSGAKSDPLDAGQILEILTKHQDRLHRLNPDTVETRLLGRLVEDRRKAVNLRTTHLQALGANLKEYYPQALELTNDNLSSRLAGDLLIKWPTFEDFQQAKPSTIKRFYYGHNVRSPEVIERALALADKSQALTTDPAIVESGRRLTQMYARLIQQLNPVIKDYEQRIQRVFDAHPEVKIFTGLPGAGPVMAPRLLAFFGTDRSRFAAALNVQSFTGIAPVTKSSGKSRVVYARAACPKFDRQTFHEFSRLSVTNCQWARNYVQYYTEKGKKYHTIIRALAYKWIRILHKCWKERTPYNEDKYMETLKLRGSIFATLHLQNKS

SEQ ID NO: 499985 - protein, 347 aa, unidentified
MRFYNRQHQYYCGIDLHVKTMYVCILNTAGQVLVHRNVASTPADLLEVVAPYRDDLAVAAECMFTWYWLADVCAAEGITFVLGHALAMKAIHGGKAKNDKIDSHKIAVLLRGGMLPQAYVYPAAMRSTRDLIRRRLHLVRKRGQLLAHIQNTRAQYNLPIFGRKLAYRANREGVVAHFPDPSVQKSIEVDVALIDQYDALVSDLELTIVREAKRHDPDAFHRLRSVPGIGKVLALTILYEIQDIARFDRVQEFASYARLIKCTKESAGKKLGTGGAKMGNVHLKWAFSEAAVTFLRHNRDGQKLLARLEKKHGKGKALSILAHKIGRAVFYMLARGTMFSMDKFLAA

SEQ ID NO: 499986 - protein, 322 aa, unidentified
MITLGIDVSKAKIDCCIFPSGLTGKRKTKRFDNAQSGFVKLVKWLTELDVNLSDTRAVMEATSVYHENLAQFLYDMELTICIANPARVRAFAKGLSMLNKTDKADSEALVYYANTVKLATWQPEKENVRILKALINRYAVLEEDLQREKNRLEKAQSTQTFPQVLLSINIRIQQLEQEIIRLDETISSHVNGDSELKNDLALLTTIPAVGRKTGLLMLGLLRSHHFEKASQVAAYVGLVPIHFQSGSSVNKRSRLSKAGDSKIRSSLFMPSIVALQYNPHIKALYQRLREKGKPKMLIVSAAMRKLVHLCYGVLKHQTAYQI

SEQ ID NO: 499987 - protein, 311 aa, unidentified
MSEFIGIDVSKARLDVAVHGGNSFAVENTEADIGRLCEQLKALAPELVVMEASGGYERLCVAALAACGLPVALVNPRQVREFARATGVLAKTDRLDARVLAHFAAVVRPPVRPLPDEQHQVLEELLARRRQMVVALVAEKNRLGLARTRLVKRTLREVVSTYERLLELIDRELDDLIKASPLWREKEDLLRSFKGIGPVSARTLLAELPELGLLNRKQIAALVGVAPIARESGSWRGRRSIWGGRGQVRAVLYMATVTAMRANAQIRVFYLRLRQAGKPGKVALVACMRKLLTILNAMVRSHTRWQQPVAA

SEQ ID NO: 499988 - protein, 319 aa, unidentified
MRKRTIEFEQVIERGCGLDVHRDTVVATVMGKGIQTETRTFGTTTSSLKELGEWLESLQVTDGAMESTGIYWKPVLHVLRDYPLNLLVVNARHIKNVPGRKTDKADSQWICKLLISGLLRGSFIPPESIQALRDLHRYKKKLVGTVASEKNRIIRVLEDANIKLSSVVSDTSGVTATYLINGLVEGRKDLANLVSECYHKRLQASPEQIVEAINGRLTPHLSFLLKSMQKHIQAVEEQLAEIDAEIENHIKDFQAEIELLQTIPGVGKEGAIGIVAEIGVDMEVFPSEHHLASHSGMCPGNNESAGKKKVPEHDRGINT

SEQ ID NO: 499989 - protein, 358 aa, unidentified
MRTQFNEELSFKGESVYLGIDVHKKQWTVSIMTTYKDHKTFVQPPDARVLGNYVKENFPGAEYYSVYEAGFCGFWIDEALKREGIRNIVVNPADVPTSDKEKKQKFDHIDSRKLCKKLRDGDLRAIHVPTSTQLQDRDMVRLRKKFVKDITRCKNRIKGLLNYYGIKIPDEYSSSHWPKAFITWLNTVELSSSSGTTMLRFLIFELESISELNKKLSRKLLFLAGEDRYKKMIQLLRSIPGIGLIGALTILTELGDIRRFKSMDHLCSYVGLVPNVYSSGETVRTGNLTARRNTYLQPILIQCAWKATSTDPALLQAYQNWCKRMKGQHAIVRVARKLLGRIRFVLLNEKQYMLRTVS

SEQ ID NO: 499990 - protein, 446 aa, unidentified
MKKSSRMSVIHPHAAGVDIGAEFHVVAVPPDADAAPVRTFQRFTGDLHRMSDWLKTCHITTIAMESTGVYWLPAFEIPEAAGFNVILVNARDAKNVPGRKTDVNDAQWLQKLHSFGLLRASFRPEHDISVLRSYLRQRERLTEYRAAHIQHMQKALMQMNVQLHHAVSDITGVTGLSIVRAIVSGERDPSVLIQYRDVRCKKTPEVLQQALTGNWQPEHLFAPEQSVAFFDFYQEKIRECDDQIETSLLQLSTGTEEPEGVLPSARHRTKQPNQLSFDVRPLLRKITGADLTQIHGFGPYLALKFVAECGTDMNRWPDASHFTSWLCLSPGNKISGGKVLSPKTRRSSSRIAAALRLAATTIGRSDTALGAFYRRLSSRIGKAKAVTATARKLAILFYNALKYGQKYVDPGADYYEERYRNRVLDGLERRAKSLGYSLQQDPELCV

SEQ ID NO: 499991 - protein, 344 aa, unidentified
MEHFAGLDVSVKETSVCIVDEAGRITREVKVASTPEALMQVLRAPAYHLKRVGLEAGPLSQWLFGALAEANVPVICVETRHMRAVLKAQINKTDRNDARGIAQMMRAGLYRPVHVKTLRSQKLRMLLTHRKLLQSKAIAIENDLRATLRNFGLKVGVVGTAKFEARIKELVGDDSDLVLMVEPMLIVRRVLREQLAILHRHLLALARDDGVCRRLMTVPGVGPVVALTFRATVDVPARFQNSRAVGAVFGLTPCKHQSGESDYTGGISKCGDEMMRMMLYEAAQIVLIRATKWSWLKSWAMQIAKRRGVKKAIVALARRLAVIMHRIWIDGTEFCWIRQQAVAA

SEQ ID NO: 499992 - protein, 450 aa, unidentified
MKPDSFQTHSTPTTEPAPLPPILCWVGLDWADQKHCLVVRTRPAGPSQTHYLDQKPEQLEEFFLGLRAQHPQGRIAVAIEQSRGPVLYALMKYDFLVLYPVNPRTLADYRRAFKLSGAKADPLDADLLCELVGQHADRLRSLAVEDAATRQLRLLTEARRGFVEERTGLSNQLGATLKGYYPLARELVGEDLTIPMALAFLRRWPNLAKLQTAKPSALRAFFYGHNSRSEEKIAARLEAIKKARPLTEDPALLEPLQLQMQRLVAHLRTVQQTIDQYDERISQVFATHSQAWLFAPLPGAGAALAPRLAAVFGTVQANFEAALDLLCFSGVAPVRKQSGNQEVVHFRYARPLFVHQSLVEFAKCSIGQCAWARLLYEHELKQGKSKWRAIRKLAFKWIRILWRCWTAGQPYDETKYLRSLQRDGVQLYRSLYEALPPLPTPIVNNSQKHV

SEQ ID NO: 499993 - protein, 427 aa, unidentified
MTKAEHTSDARILVGIDISKNRHEVLIAVPGKARRRRMTVLNTADDYRRLIDVLRGFELPVMIGFEATGNYHRALMFALGAAGFELKLVSSVALARTREALHNSWDKNDPKDAQVIVRMLEIGAVQVFHDPLVAGTGDIQELSKTYEMVARAKTELWHRILTHYLPLYFPEADRFHRSSRGDWFLAFLEAFPSPHMITAMDKDAFIEAAWPVIGRRVSKAALLADIYETSRASVGLPVAPDSDAIRMFRLVLAQGRSLIQQRNAIEERAAELLGNHPDYRLLRSIPGIGPVNALAVLAEAGDLRRFRHHRQFLKFCGMDLATVQSGLFRGRSKISKYGNARLRRTLWLASQAAVLKPANSFRDKFERYIAQDRHNPDLRRKAYTAIAAKMARTIHAVIKSGEPYRPFFEGVSPGGRTPLCRAVEAAS

SEQ ID NO: 499994 - protein, 350 aa, unidentified
MSECTTAVIGCDLGDKQSTLCILRADGRVERPKSIKTVREAFRTFFFARPPAHVVIEVGAHSRWVSALLEELGHRVTVANARRVRLISQNDSKSDQVDAELLARLGKADVELLAPIHHRGMEAQADLAVPKARDALVGCRTKLINTCRGLVKSFGERLPQCSGESFHRQAREYVPAALKPALEPVFQALERIHEAIRKEDKLVARLAKEYPDVEVIAQPNGVGILTALVFLLTLEDKNRFKSSRQVGGFVGLRPRKNQSGEDDPQLRITKAGDPFLRRLLVQCANYMLGPFGRDSDLRRWGLELARRGGKNARKRACVAVARKTGVLMHRLWVTGEVYEPLGYGTKRLAA

SEQ ID NO: 499995 - protein, 322 aa, unidentified
MQKDLLYCAIDVCKDRLDVDGTALALPEQLNNDQAAYRQLIKAAKKYSGPVQFVFESTGPYHLGLALALWEAQMPLSILNPARVRYFAKAQGKAKTDPLDKQVIGAFAQAFRPAPTPAPDELSRQLTELLQRRDELITSRVAEQNRLGQCRHGLIKKQIGRLIAQLTEQIKQIDGLMNKLARSSAELQSKIELLCQINGVGQLTALTLLITVPELGTLGRNRISRLVGLAPLNDDSGNQTHKRYIQGGRKRPRNALYMAALTASQHNAVLSPFYQRLLQAGKPKKVALAAVMRKLLICLNALLRQHLEHTGPSEAQPIYNKV

SEQ ID NO: 499996 - protein, 354 aa, unidentified
MKMVAQAEKRSYIGKQVFVGIDVHKESWHVTVRSSGEEIFNGRIPGQYQSLKRILERYHDARIKVAYEAGPFGFWLLDRLVQDGIETIVVPPSLIPIESGNKVKTDKRDSRKLATLLESNMLKHVYVLTSEEREHRDLLRTRRQIVEHRNNVARQIKSKLMFYGIRSPFTSATRWSLQYVAWLKTITFETSYLKEAFELLIQMYEYLTRQIARINRTVVLLCRDKRYRGRIKLLCTAPGIGRLTAIELLVELQDMTRFKSAEELASYIGLTPSEYSTGERTRQGRITRCGNKRVRTYLVESTWVLITKDPYLRAKYLRLKSLRGGKRAVIAIARKFLIRLRRMLLDNVPYRMAA

SEQ ID NO: 499997 - protein, 403 aa, unidentified
MNAVGIDVSKGKSMVAIMRPFGEIVVSPFEIKHTSSDINSLIELIHSVDGESRIVMEHTGRYYEALAHELSVANLFVSAINPKLIKDFDNDSLRKVKSDKADSVKIARYALDKWQNLKQYSVMDELRIQLKTMNRQFGFYMKHKTAMKNNLIGILDQTYPDLNAYFDSPARSDGSQKWVDFAATYWHVDCVRKMSLYAFTCHYQKWCKRKKYNFSQSKAEEIYGKAKELVPVLPKDEITKLIIKQAVEQLNNASATVEELRALMNETASKLPEYSIVMNMKGVDPSLGPQLMAEIGDVSRFTHKGAITAFAGVDPGVNESGTYEQRSVPTSKRGSSNLRKTLFQVMDVLIKTMPQDDPVYQFLDKKRAQGKPYYVYMTAGANKFLRIYYGRVKEYLSTLPESN

SEQ ID NO: 499998 - protein, 365 aa, unidentified
MNFIGADLHKKSITLCVMDERLKILARKTVPCGQPDQIVESFRQFLPFKVVVEATASYLWFVELLEPLAEEIVLANPKKLRVIAESTKKTDRLDAQVLAEFLARDMIPRAYMPTPRQRQHRALVRHRQYLRGRMTSVRCKIRHVLADYNADRKDLFSARCGKSYFKQVALSDADGFVLKQLWSEWEDHQARLLATTRKIKAFIAKAPAREKEARAILKSAPGVGFVTAEVVLSEIGDVSRFGNAKKICAYAGLVPAVRQTGGKKSKDLHITKQGSGLLRWALVESAWRLVKSSPKWSALYSRLRERCGSKRAIVAVARKLLCVLYAMLKTSTPYKIIPAATPAEPPEPTRKRLVRVSTAAQAVTP

SEQ ID NO: 499999 - protein, 383 aa, unidentified
MRKIQETLQAQSTTTQDIMYIAFELSNSTWRLAFSDSNKKRHVTIKARDLKQLEIEITKAKKRFCLKDDIQIKSCYEAGRDGFWIHRYLLSKGIDNLVVDSSSIEVNRRKRRAKSDRLDAENLLRLLMRYHGNERQVWKVVTAPTVEEEDARHLHREIETLLRERIRYRNRIKALLVQHGLDVKNPSRKNFLKVLNTLRTWDGQALPESMKARVVREHERLKMIEDHIKLLKKEREQKVKSKETASLRQVAQLRGLCGIGVNSSWVFVMEFFGWRKFRNRREVAALAGLTPTPYDSGGSQREQGISKAGNKRIRTMAVEIAWCWLRFQPHSKLSRWFNERFASGGSRMRRIGIVALARKLLIVLWRYLEHGVIPEGAIIKNAS

SEQ ID NO: 500000 - protein, 352 aa, unidentified
MKVYAGIDLHSSNNYVGIIDEQDRRLYQKRLPNQLDHILCALEPFKESLEGIVVESTYNWYWIVDGLQEHGYRVHLANPSAIKQYEGLKHTDDKWDSFWLAHMKRLNILPEGYIYPKEERSVRDALRRRLFFVRQRTSHILSIQSTITRNLGYKVSGRDIKRLDESDADKIFDDPYLRLVVRNGISAIRFLKESIKEIEGAVTSHVQVKPEFEYLQTMPGIGKILGLTIMLEVGDINRFPSAGNYSSYCRCVKSEKLSNNKKKGEGNRKNGNKYLGWAYVEAANFAVRFYPEFQRFYQRKKAKKNGVVAIKALSNKLARASYYVMRDRVPYDIERHFYNHSACGRESEKGLV

SEQ ID NO: 500001 - protein, 374 aa, unidentified
MREPSTFVGMDVHRKDIAVAMLVAGSAGPVEWRVAHEPSAVRRLAKKLQREGGGAIHCVYEAGPCGYALQRQLQALDLACDVVAPSMIPIRPGERIKTDRRDARKLAELARAGLLTVVHPPSEDEEAVRDLCRGRDDARLDLMRARHRLGKFLLRRGRVFGAGTQRAWSQAHRGWLGQQTFERTAERIMFEDYLLAVEQTEARRRSLELHLEDLARQPHYVEAVGGLRCFRGIDTITAITVIAELHDFRRFRSPSQLMAYLGLVPSEHSSGPRQQRGGITHTGNRHVRRLLIEAAWHYRHKPRVGAALAQRRHGQPASMIALADKAQLRLCRRFRRMEYRGKHPTKIVVAVARELVGYLWAALTPVAPVAQAVN

SEQ ID NO: 500002 - protein, 356 aa, unidentified
MDKNITAGGFLTIGLDLGDKHTEACVMDGSGEVLETFRVRTTQVALDRALARFEASRIVLEVGTHSPWVSRRVTAAGHEVIVANPRRVRLIAENDSKNDRFDAELLARLGRVDPSLLSPIVHRGEQAQRDLVLIRARDGLVRARSQLINQVRGFAKSLGSRCPTSSTEAFPQRVRATQPGDLFPGLSTMLAMIEQLTAEIRSMDREVERLCKERYPETAILRQVKGVGAITALAFVLTLEDPHRFAKSRSVGAYLGLRPRQRDSGEQRPQLRITKAGDALLRRLLVTAAHYVLGPFGPDTDLRRFGLRLAERGGTSAKKRAVVAVARRLAVLLHRLWITGEVYEPLAYKGHVAQAA

SEQ ID NO: 500003 - protein, 349 aa, unidentified
MQEHTTIAVDLAKSVFELAVSNQPGTVSLRRRLTRGQFSSYLSEHGPATVVMEACGSAHFWGREAQRLGHRVVLLPPHTVRPYVLRNKTDGADARALLEALRNDALCAVPIKTIDQHVLTSLHRLRSSWVATRTARLNTLRGLLRELGLNIPVGATRVVPAVHALCAQGDAGLPAALRLVVREAAVEIGELEARTRAVEHSLEALASQSSLVARLRTVPGVGLLTATALVAFVGDVARFPSGRHFASYLGLTPRESSSGLKRKLGRISKRGDPYLRMLLIHGARSVLAHAKRPQAPRDGLRTWALGREHARGHNKAAVALANKLARIVWAVWRHDQPFQPRKEESASKN

SEQ ID NO: 500004 - protein, 311 aa, unidentified
MAAVFVGIDVAKARLDVGTDPSGETWAVDHNEDGIATLVERLVALRPTLVVVEATGGLELEVVAALVAAEVSVQVVNPRQVRDFAKATGQLAKTDRLDALVLAHFGAVLQPTPRPIPEVALRDVRALVARRRQLQAMVIAEKNRRSRAPRRLHAQIDEHLTWLRRAVAALDRDLDRTIRGTPAWQASVRRWQSIPGIGPVVSATLLADLPELGTLNRQQIAALVGVAPLNRDSGTRRGTRSCWGGRAHVRTTLYMGTVVATRCNPTIRAYYHRLLAAGKPKKLALVACVHKLLTILNAITRHASVWQPSAP

SEQ ID NO: 500005 - protein, 444 aa, unidentified
MSPLHDATTQTQEYAAWIGLDWADQTHFWSMRTTDGPLQRGQLDNTPEAIEIWAAELAQRFGGRPVAVALEQARGAVIGTLSKYAHIVLFPVHPNTLANYRKSFAPSGAKSDSKDGDLILDLLVKHPERLRRLQPDTLETRRLQFLTEERRKQVNQHTSELQRLTNWLKQVFPQILRWFDNPAAPLVGDLLLRWPTLLQLQKAPPKTLLKFFHQHNCRSEERIQQRLTEIRQAVPATTDEALLETGTLCIQTCVRTLAQMRASITAFDRQIAEVYRGHPDRAIMESFPGAGPALEPRMIAAVGSRRERFDSANAIACFVGIAPVKESSGNSCWVHWRWACPKFIRQTFHEWAGCSIRTCDWARAYYDRQRAKAKGHHAALRALAYKWIRIFFRCWRDRVPYSEVRYHQALQARAAQPTPTPTASPVQLQWETCAGFSKLATVSS

SEQ ID NO: 500006 - protein, 333 aa, unidentified
MVAADGRPLADREFPTTAAGYTEMWQWACGFGRIEHAAVESSASYGAGLTRMLTDQGVAVIEVNAPDLPRRYAHGKTDQLDAYAAAMAVITGRATAVAKDTRGAVESVRMLTLARTSAVEEATRIGNQIRDLCTTAPVEFADQARQARTIAARAAFIAGLPVPADKGDLSGPAAAFVRAARSLLERHRLARREVRSLTRELDRLLATVVPTLLSRPQIGPVTAARLVITAGDNVERMRTEATFAKLVGAAPLPASSGKTSRHRLNRGGDRQANSALHMIAVGRMQSHAPTRAYVERRSAEHKTKKDIIRCLKRYIAREVFRDLTTDLGTLDKL

SEQ ID NO: 500007 - protein, 349 aa, unidentified
MIVVGIDPHKQTHTAVAVDRATGGVLAELTLRARTPGFERLVVWARGLDAERLFAVEDGRHVSGALERHLIARGERSVRVPPRMMGESRRVDRIRGKSDPIDATAVARAALAHPDLPEATLAGPEREIGLLVAHRESLVNERTDKICKLRWLLHDIDPELAPPPRSLNRFATLERLSRTLQARESSVDVEICLDLIDRCRQITRRANELERRIGGLVRTHAPALLEIPGCAALTSAKIVAETAQVGRFPSEGHFARYAGTAPIPASSGARHRQRFNRRGNRQLNTAVHRIAVTQIRMHAPARDYVEKKRAEGKSKTEAIRALKRHITRVVFKTMTSMDQPTDRLTAAAA

SEQ ID NO: 500008 - protein, 345 aa, unidentified
MDHISRIGMDTSKHIFQLHGVNAAEVPVLCKKLRRKDMAAFFEKLAPTVIAIEAGGASHHWARLLQSVGHTVKLIPPQFVKPYVKRGKNDAADAEALCEAVSRPTMRFVPVKTAEQQAALMLVGVRDRLIRCRTQLSNAIRGYAAEFGLTAAKGTAHLVPLLERLQADESVPTLARELFANLAKEYGQMKKQIDEIEAKLIAWHRADQCSRRLARIPGVGPIGAVLLTMKTPEPGLFRSGRQFAAWIGLTPKDHSTAGKVRLGVITRAGDEALRSTLVAGATAVIKHVRRGGSASPWLSELLKRKPPKLAAVALANKMARIAWKLMVTGQSYAIRPGPATAAGAA

SEQ ID NO: 500009 - protein, 347 aa, unidentified
MKVLIGVDPHKASVAVAAVDEDLGELLERAAFPQNRDGLRSLERWARRFPERRWAVENAGGLGRHLAVRLVATGESVVDVPPKLSARVRVLSSGNARKNDGVDALATALAASRNVRLAAVDPEAASEALRLLSERREDLVAERTRALNRLHALLRELLPGGVARTLSADRAARILRGIRAQGGASVRLRRRLASEVLRDVRTLDRKIADLNGRIEAEVEASGTTLTEIFGVGPILAARIIGTVGNVARFPTKAHFASYSGTAPLEASSGEVVRHRLSLAGNRKLNYALHMVAVCQARSDARGGTYYRKKITEGKSRKEALRCLKRRVSDAVFRSLLADSQAPSRSAA

SEQ ID NO: 500010 - protein, 332 aa, unidentified
MKYIGIDIHKCYSVVCALDGRGRKLKEARIEPNSSSGFVQFFNELKGPVKVVLEACWNWGLIYDLLEEIDGIEEVVLAHPLKTRLIADAQIKTDRLDAEALGTLLRGNLIARAHIPSRATRARKNLLRQRLYWARLRTMLRNRIHALLDRQRVLELPQCSDIFGSKGLCFLRNLDLPEPDGTLLREQLALHDLIFTQMRAQEKRIAAEFAGDKTGERLLSVPGIGPTLSAVIASEIDTIGRFPSADKLCGYAGVVPTTQASGGKVHHGRLLPFCNKWLRWALVEASWVAVGCSPYFGSLYRNHRARGKKANTAIRCHKCSTSVVTANSGSPG

SEQ ID NO: 500011 - protein, 351 aa, unidentified
MTMVGGFDVHRKQITFDYVDDDGLVRFGEIRPATRKTLRGWLSEHCPEGDAEFALEGCTGWRYVVDELAAAGVAAHLGDPAEIAVARGPKKRAKTDRADARLLRTLLLQGRFPESWIPPAHVLEVRVLGRLYCTLMDERRAWQQRIHAQLFHQGCPPIRALLTEAGGEALARVELSAAGRQYVDSALRRIDELSAEIGPLRTQLVNFAKHQAGCRALQVHYGIGWLCAAIMWAEIGDARRFASSDQLVRFAGLDVTVYSSDRKCAPGHLSRQGSPELRWAAFEAAKCAARRGSPDYGYYHKLAAKHDGHNGKNPTLAVERKILRRCYHTLRELGDAALGLPDTQPHQEVAA

SEQ ID NO: 500012 - protein, 337 aa, unidentified
MKYCGIDLHSNNSVVIVSDEEDRIVFSKRLANDLRQIGAALEPHREDLTGVVIESTYNWYWLVDGLMATGYQVHLAHPSAIKKYEGLKHSGDFADAAYLAQLLRLGLLAEGYIYPREERGARDLARKRMQLVRYRTAQILSIEGILMRQTGARMKGEAVKRLTAEQVDAFAFAPDVSLAVEANRAVSQTLSQQIETLEKRLKQRVILRPEYHLLKTVPGIGDVLATTIMLETGTINRFTQVGNFSSYCRCVDSLKESNGKRKGEGNTKNGNKYLAWAFVEAANFALRCCPQAKRFYDRKKSKTNRVLALKALAHKLARACYHMLRDQKPFDVHLCFG

SEQ ID NO: 500013 - protein, 369 aa, unidentified
MTDLTLFVGLDVHKKTISVAMVEATAGAEVRFYGTIANTPDAIRGLCKKLTKDGQQLHFCYEAGPCGYGVQRQLSRLGHRCDVVAPALIPRKVGDKVKTDRRDAMMLAQTLRAGQLTAVWVPDEAHEAMRDLVRLRAQAMRDLRKTRQQLLSFLLRHSLVSPYGHWTKMHRRWLGELIFAHPAQHLAHEEMLQRIERAEALCDRLKRAILELVPQWSLAPVVQAIQALRGVSLIVASVIVAEVGCFSRFNSPRQLMAYLGLNPSEHSSGAMIRRGAITKTGNALARTCLVEAAWTYRFPARVTQIIRDRLNGLPEPIRNVAWKAQVRLSARYRKLIAAGKPAPKVVVAIARELVGFIWAIARMVEPKFA

SEQ ID NO: 500014 - protein, 359 aa, unidentified
MDAQEGAVRRIIGGVDTHKDLHVAAVVDEQDRVLGTQSFASTRQGYRQMLAWMRCFGEVQRVGVESTGSYGAGLLRFLQQAGVTVLEVTTPDRQDRRRRGKNDDFDAQNAAHAAFAGIRTVTPKSRDGMIEALRVLSACRKTAVTARRIALQMIQNTIVCAPESLREMLRRMTRMQLVRTLAAWRPDLTAYRDVEAAYRISLKSLARRYLELHDEIADLDAMIAAIVDELAPNLVARNSIGHRGAAQLLLTAGDNPQRLRSEAGFAALCGVSPVPASSGKTARHRLNRGGDRAANSALHIIAIGRLRTDARTQAYVAKRIGEGHSKLEAIRCLKRYIAREVFTLIKQRQREINQTRIAA

SEQ ID NO: 500015 - protein, 400 aa, unidentified
MRVVFGIDVSKASSEVAILVNGEKVHGYTISNDAIGFSRLLGDLKTVYKPEIIFEATGVYSRRLQTFLEDNGYAYTRLNPLEAKKQLDSLRVRKTDQIDAEKLAQSQFVLNRKPTYVQEEVYQNLRDLSRFYQNLTEDIVRTKNRLHKVLQVTFPELETILSTPTGKQYWNLVITFPCKDLVLELSKDKLSESIRQSTSKRISDKRVAYLAEKLIALANQSYCAVKKTSPMLEEVRYYTKELLRLSEQRQAVLDEMVELAQPLPEYDILLSIPGIAETTATSIIGELGDIRRFQSANQINAFIGIDLRHYESGNFLAKEHITKRGNPYARKILFKCIHNIASASHTNPCHIADFYEKRKRQSQTTSTKPHTIASIHRLIRTMYYLITHNKLYDYTSTQNR

SEQ ID NO: 500016 - protein, 402 aa, unidentified
MTYDYVIGMDVGKYFHHACVLDIDGTQVLSKRINQNEKSLRALFSTFSAHDHKVLVVVDQPNNIGRLTVAVAQDLGIDVRYLPGLAMRQLSRIHAGNAKTDIRDAYIIAHAAKNLPESLRSVDRVEEAFLQLKVLNGIDEDLARSYTRLINQIRSALVGCYPQFEQALRGQIIHRKWVLHLLARYGGPTKIKRLGKAKATAFARRYKARNPEPVLDAIFAAISEQTVAIAGAHYAEMGVAMSAKDALLKLEHRTQIEQEVIELINDIPHTQILLSMPGIGPKTAAQILMTAGDMTDFPSVGHLASYAGLSPRTNQSGTSIMSNSLNRAGNKKLKNALWQSSFASIRFHERSRQFYERKRREGKRHNAAVVALARRRLNVLYAMMRNHEHYHDPAPSQEDLAA

SEQ ID NO: 500017 - protein, 408 aa, unidentified
MGNEIDKGGGLDIHKKSVKAAIESEDGTILEAEFGMTIRELGCLKEWLLDNGCKRVIVESTASYWYRIDQVLSDEINVILVNPRDVKSSFGKKTDKIDARRLASRCLTMYEVKPSRKFSKEESELKRLTRAREQNVKTRTRFKNQIHKVLDAAGIGLSIFITDIFGKSGMYLLRGLVERKSLEELIPGIPTNRIRKRAHELYELIPVQLNDTDVLLIRQALDTMDFVQKSINEIDAILYRIAESHKDDLQILMSVPGVQFVAAITILAEIGNYRDFKDGDQLACYSGLTPSVYDSGEKHTLGRITKHGSKHLRWILNQVAHAASKTKRSRMRKIYYRIMRKKGEGKAITALARKMLSIMHHILINREMWKEEGVKKRRLDFKFDRSSSSSTQLTWLDMLFKNGNEIGT

SEQ ID NO: 500018 - protein, 350 aa, unidentified
MQTMPQDGVICGVDTHADVHAVAIVDRNGQVLAVDEFNADRQGYGQLIVWASGFGEIRCVGVEGTSSYGKGIAGELRRNGIDVREVIRPNRQSRRRNGKSDPADAIAAARAVLSGEASAVPKTGDGPIEAIRTLSIARSSAVKARTQAANQIRDLITSGPDGLRDRFRGLSTVQRVNTCVRLRITDRFSMSEAATRTALRTLARRHKALTREVDDLTVRINQLVTVTAPTLTSLKGVGPDVAAKLLIAAGDNPDRIRNEAAFAALCGASPIDASSGKQQRHRLNRGGNRQANNALWRIAMVRMSSDPTTRAYVERRTKDGLTKGEIIRCLKRYIARETHHAIIQDLGPLT

SEQ ID NO: 500019 - protein, 351 aa, unidentified
MPRRSTVRAVTTIGIDMGKNTLHMVGLDSLGAIILRERVSRGRITSRLANLPPCLIGIEAGMATHYVARELAVLGHDVKQVPPTYAKPFRQGHKNDFRDALAVAEAVQRPTTRFVPAKTNEQLDLQALHRVRSRVVSQRTAVINQIRGFLLERGIIVRQGLRFLRQLLPDILAKRTDVLSPRMVRIVSDLAGDWRQLDDRIETVTDEIETLAKSDDSCRRVMTVPGIGPIISSAMVAAIGNGSAFSRGRDYSAWLGLVPRQMSTGDRTILGRISKRGNSYLRMLFIQAARVILLRPANWPKHGFGAWLVRAIQRLHPNVLAAALANKLARIAWTVLAQERCYEARIIKAAA

SEQ ID NO: 500020 - protein, 385 aa, unidentified
MSELNDLSRSLTSLEQDKTIIAVIEMSQSSWFVAGIIPGIERHPLKKLEPSEEELVRLLMRWRTEATKNGHTITRFAVAFEAGRDGFWLARWLRARGIETYVIHPTSVAVSREHRRAKTDRLDAGLLKRVFIGWLRGEPDHCHMAAIPTLAEEDAKRPNREREGLVRERTRIVNRMKSCLARFGIRNFKPTLRKAPERLATLATPEGVPLPPNTLLELRRDMARLRFVMDQIKEVEETRAQRLEQAPQEKTHAMVRLIARVIGVGIETADMLVHEILSRQLRDRRAVARYAGLTGAPDESGNKRREKGLAKAGNARVRRGMIQLAWRFLIFQKDSALARWYRTRTESAGKKRKTMIVALARKLLIALWRLVTIGEVPAGVVLRAA

SEQ ID NO: 500021 - protein, 381 aa, unidentified
METMYCGVDLHYGTSTFHFLDEKGETKESIETKTDKKSIENVLVGYKNYSMAYAFEAGNMANYFHRIVNKKENTKKIHVVHPYKFRVISESKRKNDKEDSFHLAQGLLKDYLPYPVYIKSDICRQIKAILNIRRRIVNTRAKIILQAKSILRSLGIKESYRDLKTKKGFARIINYLEGDSFYVPIIESLAEECVKETDKINISEQQIKNLIDQHFKQEYDWLVSVPGISFVTASTILSVVDDINRFDRAGQFSSYCGLVPSEHSSGEKTVRGRITKQGVKELRSLLTQAAWVIVRFKKEPDERLIKLKKKFYRMSYKQKNTQKAVTAIARHLSRIVFGVLKNRTPYCGKIVNKAEACNIEIQGGRKLRVKTFRVLHPSMQD

SEQ ID NO: 500022 - protein, 347 aa, unidentified
MLHVGLDLSRKRVDVCLISDQGELVDELAAAFDEDGLRRLSERVAAKHTGRVRAVVESMNGARFVHDTLEAQGWDVLVADAQRVKGLAPLACKTDKIDARVLAELSFRDLVPAIWLPDPQVRRERELARFRLHLVRHRSSLKNRIHSTLITFGKPCPVSDLFGVAGRELLGRLEVPEPWRENVEASVVLIDQLDRQIDAIAGELKYVGADHPYVPLLMTAPGVGWLVGFSIACEIGDINRFSSPTKLCGYTGLCPRVIQSGETDRRGPISKHGPKYLRWALFEAALNACDHPLYKERYERTKKRLGRQRGPKVAQIELSRKLTEAIWHMLTRNQPFAPAGAPIRLAA

SEQ ID NO: 500023 - protein, 344 aa, unidentified
MEHFAGLDVSVKETSICIVDDTGKIVREVKVASEPDALLQVLKNNAYHFKRIGLEAGPLSQWLYSAFAEVNLPVICVETRHMRAVLKAQINKTDRNDARGIAQMMRAGLYRPVHVKTLRSQKLRMLLTHRKLLQSKAIAIENDLRGTLRNFGLKVGIVGKLKFETRIRELVENLPDLAVLVEPLLVVCRVLREQIAVLHRRLLVIVRDDDVCRRLMTVPGVGPVVALTFRATLDVPARFRNSRAVGAALGLTPGKYQSGESDHTGGISRCGDEMMRVMLYEAAQGMLVRSTRWSWLKAWAMQVARRRGMKKAIVALARRLAVIMHRIWVDGTEFSWSRQEAAEA

SEQ ID NO: 500024 - protein, 288 aa, unidentified
MKRKVYVGMDVHKETIQIAILPSNTKALVKEQQIKHEEGQIKKFIQKLKSEGTEIHCCYEAGVTGYPLYRYLKTLGVNCIIAAPGKIPRQSSDKIKTDKRDAIKLARLLRSGELESIHVPSEEDEAVRDYLRSRDSLRLDLGRNRQRLMKFLLRKGITYSTTKYWTASHYKWLNNLHFENEILQATFNDYYSRVRVQEENLKAMDQKIREIAESEPYREKVGILRCFRGVDYLTAMFLLSEVNDFKRFKTAGSFMSFLGLVPGEYSSGSKRNKRALQKREVPDFEGFW

SEQ ID NO: 500025 - protein, 389 aa, unidentified
MKIYVGIDIAKLNHFAAAISSDGEIIIEPFKFTNDADGFQLLVSKLESFDKNSLIIGLESTAHYGDNLVRYLVTELYQVCVLNPIKTCQMRKNNVRKTKTDKVDTYVIAKTLMMQDNLRFVSFFDLDMMDLKALGRFRQKTIKQRTRLKIQLTTYVDQVFPEIQYFFKSGLHQHAVYALLKEAPSPKEIASMHMTHLANLLKVNSHGHFTKEQAKELRVLAQKSVGANDSAISIQITQTIQQIELLDSQLEKIEAEMTDIMKFNDSVIMTIPGIGYINGGMILGEIGDIHRFSNPNKLLAFAGLDPSVYQSGNFQAKTTRMSKRGSRVLRYALVNAAWNVVRNNSTFKAYYDAKRAEGRSHYNALGHCAGKLVRVIWKMLTDEVEFNLE

SEQ ID NO: 500026 - protein, 384 aa, unidentified
MSADSRPEQSAIRTDLGAIFVSLELSRATWLITSLSPGRQKMSKHQVRGGDTAGLLARLAELQSRAHARTGQLFPLIVIQEAGLDGFWIHRVLQSEGIESHIVDPASIATSRRRRRAKTDKIDGEALIRALLAYKRGEPRVCAMVKAPTPREEDERRIGRERKVLTAERIAHVNRIKGLLFAQGISDYEPMHRHRRARLDDLTTGDGRPLPQHLKAQVSRELDRLELLLEQLKAVEAERDALLAATESPDKPALAALLLDLKGIGPEFASVLWSEGLYRSYANRRQVAAYAGLAPTPWQSGTVDREQGVSKAGNPRLQTTMIQLAWLWLRHQPGSALSRWFHERVARRGGLRKTMIVALARKLLVALWRYVTAGVVIQGATMKR

SEQ ID NO: 500027 - protein, 326 aa, unidentified
MQGKEASEQETKVKSSVGIDTSKCWLDVHVLPANDRLRVANSYEGIRQLKRWLLRFDLALVVIEATGKWHRHLHRSLAASAIPVAVVDPLRVRRFAQAQGIFAKTDRLDARVLALFAAMMAPSIRSPAPQTMAELAELVVARASAVEAQTALNNQLSATECTFLKRQLKRRSARAAKDIAELEGEILKRIKADDGLARRYAILTSVPSFGFAVAATLIACLAEIGSATAKQIGMLAGLAPIADQSGERDGVRVIWGGRPAVRRVLYLAALSATRFNADMKAFYRRLRGSGKPPKVALIAVARKLVVLANTLLSENRTWQPRMPTQF

SEQ ID NO: 500028 - protein, 412 aa, unidentified
MTTAATHYEQRNTTEATLFLAFELSEKTWKLGFTTGHGQKPRERTVTARHHEHVLDEIAQAKRRLGLPDTAPVVSCYEAGREGFWLHRFVQAQGITNHVVASSAIEVNRRRRRAKSDGLDVRTLLSMLIRYAQGERQVWQVVKAPSVEAEDQRHLHRDLETLKQERARTTTRIKGLLSSQGLRVTSLTKLPEPLEALRLWDGSPVPPGLRRRVLRVYAHHTFLSEQIAAVEAERRAQLHASTDARIDQVRQLMLLKGMGINGAWLVVMAFFGWRAFKNRREVGGLAGFTPTPYQSGESAREQGITKSGNRHVRWMTTELAWSWLRFQPDSALSVWFRERFGSGGKRLRRMGIVAVARKLLIALSAIPAAGPIASDVRFKKRVVGSLAIHFALIPVFPQSEKARCLLEKDTKS

SEQ ID NO: 500029 - protein, 341 aa, unidentified
MGQAHTIGLDIAKRVFQAHGADASGRVVFRKRLVRAKVLAFFAAQPPCTVAMEACAGAHHWARELGKLGHTVRLIPPAYVKPYVKRHKNDRADAEAICEAAQRPSMRFVPVKTEEQQANGVVFRARDLLVRQRTQCINALRGHLSEYGSVFPQGITHADAVIAHVEDPDSAVPESVRAVLKVLIGTFQALEAQIQALDAEITQRAKADPVARRLMTIPGIGPIAATAITALVPAPEGFRAGRDFAAWLGLTPLQTSTGGKQKLGAISKMGERTIRRLLILGASAVVRWAGQRGTPAGSWLARMLARKPKMLVTVALANKTARIVWALLVKGGGYRAPAPAA

SEQ ID NO: 500030 - protein, 344 aa, unidentified
MQITTIGLDLAKNVFQVHGVDVTGQVVVRKSLRRSQMLPFFAKLPSCLVGIEACGTSHYWARELIKLGHEVRLMPPAYVKPYVKRGKTDAADAEAVCEAVTRPTMRFVPVKSPEQQAALSMHRTRDLLVKQRTQLINMIRGLLAEFGVDIPKGLERALLMARQIVDGKAPEVPIEAAKIVATLSQQALDTHIRLREIDRDLAVWLRGNDVARRLMTIPGIGPIGATALAASVTDPHQFRSGRQFAAWLGLTPLQKSSGGKERLGRISKMGDKYLRKLLIVGMTALVRRAKYNPGKIDPRLADLLARKPTRVATVAMANKTARVIWAIMARGETYRTDHQPALAA

SEQ ID NO: 500031 - protein, 429 aa, unidentified
MNCTQNKKIEQVKETTMIVGIDVGSEKHYFRAFNWRGIELTKKPVAFSNSMEGFNSFYNTIVELIQKSELEEALVGIEPTGHYWFDLGQFMGEKNIKFVMVNPHHVHKSKELDDNSPSKNDRKDPRVIAGLVRDGRYFYSYMPTGVYAELRNASNRRFVLVEEQTRAKNRLQKWIAVYFPEYKGIYTRIDAKGGLLVLKQAPTPEEIVRLGVEGIIKIWKDAKLRGNGHKKAMLILHAAMKSIGLKAGLTEARMEIQDLIEDYELQTKRLERVNDLIKGLCQQVRYADKLLEIKGIGITTVAGFIAEVGDITRFDSTKELQKLAGLELVADSSGKHNGKTKISKRGRKRLRYLLFEAAISVVGKNEEFKEIHRYYTTREKNPLKKMQSLIVVACKLIRVFHAILTKGIRYDASKMLKDIRHPGEQLKAA

SEQ ID NO: 500032 - protein, 315 aa, unidentified
MRETFVGVDVAKAEVVVACRPEGVGWTAANDQAGMSATVARLRTLAPTLIVAEATGGYERALVAALAAAGLPLVVANPRQVRDFAKATGQLAKTDRLDADILALFAERVRPTPRPLPAPVVQQLNALITRRRQLLDMLTAERNRLEHAAAPIRRSLADHIRWLERRVADVDRDLDHTIESSPVWRAKENLLRSVPGVGPVVSRTLLADVPELGHLNRKEIAALVGVAPRARDSGTLRGKRIVWGGRAPVRAVLYMGALVATRRNPVIRAFYGRLVAAGKPKKLALTACMRKLLTILNAMVRNNTTWGHTTQRSDT

SEQ ID NO: 500033 - protein, 316 aa, unidentified
MSKKKTFIGIDVSKAILEVAVHQRDTRFAVANKESAFPELLAQLITLRPKLIVLEATGGLELPVLHTLFAAGLPAVVVNPRQVRDFAKATGQLAKTDRLDATVLAHFAAAIQPQLRRVKNATELELDALVTRRRQLVEMLAAEKTRLSSTATAPMRAEVRVHIEWLEQRIAEIDGQLRQRITESTAWRVKDDLLQSVPGIGPVTALTLVADVPELGQLNRHQVAKLVGVAPLNRDSGKLRGQRHIFGGRQAVRNTLYMAIQSAVRHNPVIKEFYERLLASHKPKKVALVACMRKLLTIINVMIKTNTKWQLAQKSI

SEQ ID NO: 500034 - protein, 284 aa, unidentified
MIIIGCDFHSRFQQIAMLDTGTGEITERRLEHENGEARAFYAGLPRPTRVGMEATGYARWFQRMLTKQGHELWIGDAAEIRAKMVRKQKTDSRDAVHILDLLTSHRFPRIYVSKPEDRDAWQLLRHRDKLVRWQTSIRNQLHALAMGEGICRKQKLWSKTGRQELEDLSLDSWASRRRKELLEMLDRLGPAIAELDKAVKEQVEKRGEAVLLMRQDGAGPVTSLAFALLVGPVERFRTSRKLVSYVGLNPRENSSACTQRLGSISKQVTSLVRYLLLQAAQTDS

SEQ ID NO: 500035 - protein, 359 aa, unidentified
MLYLGIDQHARQITISLRDEDGDVVQARQVSTRPEKINEFFQKLTRERLRDGESFAAVVEVSGFGDWLIDMLYDYRCQKVILIQPEERKKQKTDRRDAAALSELLWVNRRRLLHGKPVKGLRQVDIASKVDQDNRRLTTLRKDVRRERTRIINKIKYLLRRHNLIWHMPTKTFPTVDAVNWLKKLSLREVDRLEMDYLLADLEHIQQRLKDIEKVIDERCGSSEDAVLLTSMPGIGRFTAIALACRVGRVERIPRSHSLANYWGLTPGCRNSGDNNKRLGSITKAGSSMARWLLSQVAYQALRQDKRLRDWFKRIKRRRGASIARVAVMRKLATVIWHMLHSRKTYGECRQLSTDQAHK

SEQ ID NO: 500036 - protein, 403 aa, unidentified
MLCNFYGRVLIEPTTVEHTQGSLQAMTQRVAEACKTQGLTDSIVAVEMTGIYHKPVQRAFRKANFDTRIVHPFASNHYRRPLHPDQKTDDNDLEAIFHAAIKGYGLATLPVAEVYQSLQASSRHRHNLVKQRSRLMVQIRRLLHQAMPGFADLWEDGKLFHKSIALPVALQFSSADAIGKAGTRGIAKYLQQTKIRFQMRTIERIVAWSRTAAEPSELAWMHTAQWRQLNQVRQLFDQQIVAVEREMAGFLVKTPYLLLLSVTGINIVSAARLAGEAGPIEHYASAAAINGRAGLYPSRYQSDEVDHADGTLVRQCNRKLRGAAMLVAENLIKCHPYYRGLSALWAQQKVDPRDRRCRIANRAMRMVYQLVAGRQVWRGRGIDREYLLSKLQEFHRVHKTPIE

SEQ ID NO: 500037 - protein, 465 aa, unidentified
MVQQQESDKAAAKRTMHEVHPHTAGIDVGSRSHWVAVDAKRDDQPVREFGSFTGDVVKMAKWLESCGVTTVAMESTGVYWIPVYDVLEAAGFEVLLVNAKHVRNVPGRKSDVKDCQWLQQLHSFGLLRGSFRPTQEILELRTYTRQRSRIVRDAARCVQHMEKAMLEMNLQLHHVISELTGVTGMAIVRAIVGGEHDGRKLAELRDRRCREPKEKLAAALQGTFKTELVFVLEQSLSAYDHQIRMLAKCDERIEQKLEVLEKAALEKLASEGKEPQPCPPPKPRQVKGNQPKFEIQSPLHRLCGDIDITQILPLATALNFVAEVGTDMSRWPTEKHFTSWLTLAPGTHITGGQSFSGRRGPAKNRAGLILRQAAVAIGRTQTALGGFYRRLSARGLGSTAAIATARKMAAFIYRALKDGRPLRDVGLAAYEQQHQDRQLRQLGKRAASLGYQIVPMPMQAAAGPN

SEQ ID NO: 500038 - protein, 413 aa, unidentified
MERSEEMIFVGVDWAEAHHDVHVQDEDGKRLAGGRLPEGIEGIARFHEMVGAHADEPAEVVIGIETDRGLFVGALVAAGYEVFAVNPMSTSRYRDRHSTSGAKSDPGDAKVLADMVRTDRHNHRPVAGDSELAEAIKVLARAHQTMIWSRGRQTNSLRSTLREFYPVALVAFDDLTSGDALEVLKMAPTPTLGAGLSRSKIASALRRGGRQRRIEPRAAEIQEALRTPQLSGSALAATAMGTSVGATVAVIATMNAQIAELAQGLEAHFERHPDAEVVRSLPGLGTILSARVLGEFGDEPNRYATAKCRKNYAGTSPITRASGTKRIVLARYARNMRLADAIYQWAFASITASPGARAFYDYRRAAGDTHHAALRHLGNRLVGILHGCLINHTVYDENTAWGHRAALELARAA

SEQ ID NO: 500039 - protein, 423 aa, unidentified
MLAVGIDWAEEFHLVALGRPGEGVFDVARVEHTPAAVNALLGRLLGLEPDAAEIRVVIETRHGLLVEALVDAGFTVLPVNPDLIARRRGPARKKDDAEDARLACLLALDAFVDLRKLVPHDELSGELRAIARDDLRAQRDERRLLNRLRADLLAVFPAALTIAGEDLGAPTFLRLLERWPTADALASASRKELETFARAHKHGWPDRFADRVQHARATDQFTAKAHLVRAKADTIRLAAAQLLLIRTQRRVWQRRMGELLLGAPRTGRARQPGDDRGPAVPGGEIYLSFAGLGDRLAARIAGEIGDVRQFDTPNALQCYAGKAPVTRRSGKSELVVATRLACNRFLADAVQQWAFCSLTRSGWARDFYDTQRHRGKGHNAALRALGNRWLEVLWHCLTNNIPYNEAVHVANRNRALGRIPVAA

SEQ ID NO: 500040 - protein, 451 aa, unidentified
MQNRNVKMEVINPNAAGIDVGSRSHFAAIGQSKEEIKEFGVYNEDHQQLIRWFLDSEVQTVAMESTGTYWQHLYSALIAAGFRVILCNGKFTKNIKGKKTDVKDAQWIQKLHTIGLLTGSFLPDQATEQLRTYCRHRSNLVHQSADTTRKMQKYLRLLNLRLDVIVKDVTGLTGLAIIDAICKGEKSPKKLAGLRHGNCKKSEEEIAKALQSNGRKDYLFGLKQEYQLYVNFQQKIKECDVEIEKLLNEQINNDDEKKQHSIDKKVYKKINKNSPKNLDINLLSYQYFGGVDLLAIEGVSHATALSMMSEVGNGIHKFETAKQFASWLRLAPNNKISGGKMLSNRIPKGSNRLKIALRNAANAIGNLKDTDLSNFFNRIAYRKGRPAAISATARKLAVIIWNMIVKTVPYRPENNYEFLDQKRKRKVQEMKKLIHRFDIKTDELGLQLSNL

SEQ ID NO: 500041 - protein, 363 aa, unidentified
MKIMVGIDLHSNNALCGLMDESGRRLLHKQLPCDLAAILQLLKPYKKRIATIAVESTYNWYWLVDGLQDHGYHVVLANPARMQPYSGKKHTDDVSDAYFLTELLRLNLLPTGHLYDRKVRPVRDLLRRRLLLVRQRTTLILSFKSLNERTLGQRVPLARVKAMEPEEAQARFTEPADQLLAGEQITLMDHHTDAITKIEQHILQVAEKSPAYQRLQEMPGIGRILGLTIALETGDAKRFADAGRFASYCRCVKSLRQSNHKKKGENNRKCGNRYLAWAFVEAAHFACRHNEQCQRFYDRKKQQTNPIIATKALACKLAKAAWHVMAEDVPYDAARVFGPGKKKDFGETGREPAKGSGHPSQLD

SEQ ID NO: 500042 - protein, 382 aa, unidentified
MNVKYTGSRSIKHTKEGFDEIVSLVREMEKKLETEVCVVYEATGVYHRVLKKVLEDNNIKQFIINPLLSAKTRKNDSLRSPKTDKLDPKSIAKTYYSHSLHNSHKQETIYHELRELSRYYEDILVHIRKDKVAFRAQLDIVFPGYDTLYDDLYGPVALAIIEKYPHPEILQKKKINTVSKVIQNKTCHRQAVSDTMADKAIEYSKTIYSGCDKDDIEVLILQRFIKKLNEDMAEAERTIGEMIKLAQELPDFNIIKSIPGIGDNLAARIIAELGDMTRFKKKNELVAFAGLDPRISESGQNDGDHMHITKKGNKRLRCLLYLAVTCSIRLKRDDNSIKDFYIKKKQQSNPMCSKAAKTACASKLVRIIYSMCKTGELYQYNK

SEQ ID NO: 500043 - protein, 373 aa, unidentified
MNYTTVYVGMDVHKESFSLCCYTIDEEKAKYLQKTPADYKKVLKYLEFLRSVYGNDADFVCGYEAGCLGYSLYRQLTANNVKCEILAPTTMLEQRSKKRIKTDKRDAEIIARCLAQHNYSPVHIPSALDEETKEFLRMRDDHKLAFKKVKQQIQAFCLRHNFHYEGNSPWTAAHIKWLRNLKPDGLYKEILEEYLLTYDSLNEKIERFDNRIEELASRDEYKESVQKLRCFIGVKTHTALSVLVEVGDFKRFHSAQNFASYLGIVPGENSSGDDRTRLGITKAGNQHIRRLLTEAAHGFVRGRIGFKSKELKARQKGNTPEVIAYADKANERLRRKYYKMVLGKGKKSNIAKTAVARELACFMWGMMTDHIAC

SEQ ID NO: 500044 - protein, 407 aa, unidentified
MEVVYRCCCGIDVHKKVIVACLVNGGEQELREFGTTTSEIKTLANWLTESGCEMIAMESTGVFWKPLYNLFELMDLDAMIVNAAHMKALPGRKTDVKDAEWIADLLRHGLLKASYIPNREQRELREITRYRKSLTEERCREVNRLQKILEGANIKLDSVVKDITGKSARKLLQRIIDDDIPDSDEVSKLVHGRMRPKLEQIVASIEGITTPLQRKLLAQIIDHIDDLNRRIGELDKLVQEYMAEYEAAIEAIDEIPGIARRSAEVILAEIGLDMGRFPSAAHLCSWAGVCPGNYQSAGRRKHGKTTKGNKALKTILTQCAKSAKTVKSSYFFAQYQRISARRGKNRATLAVAHSMLIAIYHILKNKTAFHDLGSDYYDSFNRDRKINSYLNRLKALGWEPDAIPSSA

SEQ ID NO: 500045 - protein, 355 aa, unidentified
MSQEKYIGMDVHQATVSAAVRDRNGNLLMECILETKADTLVEFVQGLHGTLSLAFEEGTLAAWLHDLLKPHVNRVVVCDSRKAALLRDGNKSDRIDARNLSELLRTNQLKPVYHGEHGLRTLKELGRSYLTVSQEMTRTMNRIKSLYRSWAIPCAGTTVYAPRHRRQWLAKISEPGARMRAEHLYEQLDHLQPIRMRARRELLQESNKHAAVKRLRQIPSIGQIRAALLVALLQTPHRFRSKRQIWAYSGFAIETHDSGEYRYVRGRLQRNRERITVRGLNRNHNPDLKNIFKGAAISASSRPGPLQDFYETRVAMGMRPTMARLTLARKIAAITLTLWKKGANFDPQQLSRQAA

SEQ ID NO: 500046 - protein, 369 aa, unidentified
MTDDTLFVGLDVHKKTISVATVEAAAGAEVRFYGTIPNTPDSIRGLYRKLTKDGHQLHICYEAGPCGYGVQRHASKLGHRCDVVAPTLIPRKVGDKVKTDRRDAMMLAQTLRAGQLTAVWVPDEAHEAMRDLVRLRSQAMRDLRKTRQQLLSFLLRHGLSSPHNHWTKAHRRWLGELTFGHPAQHLAHEEMLQRIERTEALCDRLKQAIVDLVPQWTLAPVVQAIQALRGVSLVVAAVIVAEVGCFSRFDSPRQLMAYLGLNPSEHSSGGTVRRGAITKTGNALARTSLIEAAWTYRFPARVTQIIRDRLKQLPEPIRAVAWKAQVRLSARYRKLTAAGKPAPKVAVAIARELVGFIWAIARMVEPKFV

SEQ ID NO: 500047 - protein, 468 aa, unidentified
MRTNQPKIMSQRQRKNHRRKKLAAAQTPLDITHHPDAAGIDVGAEELVVAVPHGRGQAPFVRTFSAFTAGLHALRDWLVKCGVKTVAMESTGNYWLCACAILEDAGLEVCLVNARHVKGVPGKKTDVCDAAWLQQLHAAGLLRGSFRPHKEILPLRYLLRHRGDLVAQAGQQVQLMQKVLTEMNLHIHHVFSDVDGVSAQAIITAILGGERDAGKLAALRDRRCRAPLEKIQAALVGDYREEYLFVLKQCQARWQQLGEAIVECDQEIARRTAAIAGVTDAPLPQAPAAQRRVQKNMITAMPVYAEAHRLLGVDLSSVPGISGGVLCVLLSELGSATDIRKKFRSAEAFASWLGLCPDNRISGGRILKAGTRKVTNRIANILRMAANALSRAPGRMGEYVRRFKGRLGKAEGIVAGAHKLARIIWALIVSGQPYDEAKAFQTTPASAARRLQNLQNQAKALNMTLVPA

SEQ ID NO: 500048 - protein, 319 aa, unidentified
MAQNDPVVAGIDVSKDKVDVCIRALGLQQIFPSCAQGHRELVVWLGKHQVNKAVMEASGGYEGDWAKALREADIEVRIVDPKRVRSFAHSAGRMAKNDAIDAQMIAWFAETFRQAPGQVHDAAQQELVALVKARIALVDLKMQLAAQSEHSASGQVQKARDRVLKSLIGEIAKLEATIAARIDATPPLAERAEIIASVPGFAKTTSANLVAGMPELGQVSNEIAAALMGLAPYDDDSGNRRGERHIQGGRRWVRNAIYMPCVGAATLNNPVIKAYYDHLIARGKKPKVALVACMRKLIVILNTMIARRQKWDPSRNALS

SEQ ID NO: 500049 - protein, 350 aa, unidentified
MTTLARQITGGVDTHLDVHVAAALDERGALLGVESFETTPDGYDKLLTWLRSFGTVELLGVEGTGSYGAGLTRHLHAESIRVVEVDRPNRQRRRRHGKSDPEDAISAARAAQGGDATGEAKTRDGNVEAMRVLRVARASARKGRTQALNQMRSLISTGPDCVRAELRSLNVYRMLERASSYRPGTKRDLVSINKLTLRMLARRAIELEKEVREIDAILKVMVEETAPELSAVSGVGTDIASALLVAAGDNPERLRNEASFAHLCGTSPIDASSGKNQRHRLNRSGDRQANSALWHIVITRMVSDPRTREYIARRMKEGQTKKEAIRCLKRYIAREVYNNLPMEHLALDSP

SEQ ID NO: 500050 - protein, 320 aa, unidentified
MAIIGVDVSKLSLVAVRTSSTGIVKEGFEIQNTEVEIGTWLDKLQSKHKYLLVASEATAEYHNILAKACLAKAIKFRLLNPILTKQFNRATIRKRKTDLTDALIIAKLAIQGEGSIVTPASLSPAKVVHRTAIRLVKVEQTLESMCRRFSESLPEEKAVNQQLLDCMQLLKTSCEVLRSRARESTDPKLTKLLMSIPGVGERIVVTLINEIENIHRFPSPKSLVAYAGLDPRVRQSGTSLKRNTHVTKRGSIYLRRDLYIAATIAARWDSEVHEYCEKKLGEGKRYREAMMACSRKLLNRVYAVWKRGTPYERRLATTGT

SEQ ID NO: 500051 - protein, 333 aa, unidentified
MDTLGVFVGLDYHDESVQVCVVDREGRMLANECCRNDQRAIVDCVHRYGRQVQAAVESCTGAANLADELVAAGWQVNLAHPGFVRRMKQNPDKTDWHDAHILADLVRIGYLPRVWLAPESVRELRQLVRYRQQLADSRRTAKLRIRALLRQQRLRPPGGINAWTRRWRKWLLEEAALSVQGRWVVEQHLWELASLAERLREVETRLQSLCENDPEVIKLRAQAGIGPVTAWTLRAEIGRFDRFRTGKQLARFCGLSPRNASSGQKQADAGLIKAANPQLRTVLIEAGHRLARYVPRWRQLALRLRSAGKPGSVVAAAVANRYVRALYHQMLAA

SEQ ID NO: 500052 - protein, 369 aa, unidentified
MTGGAGRWGSVVGVDPHRHTLSATVVDERGGIVATGHYNVSGDGHRALEAWALSFGPVVRWGIEGASGLGRHTSVYLCRQGHDVRDVCPTRTAERAHGRYQGKSDALDSERIARETLAHPDLPLAFKRAGDDAGPDETAELIALWHKERRSLLRTRQHLLNEADALLSDLPDELRGHLPQTKAVRPRLTALRRPRRAWPAATAVRLRLLDRHRAAIFELDRRDREITQELAKLIAGTGSTLDQLCGLDTRSVAELLVEVGDPRRFTEGGFGRFSGTAPLPASSGEGAGEPIRHRLNRGGNRRVNAVLHRMAVTQLRCDERAQRIRDEARRRGHTKREAIRIVRRHLAAVVYRRMIRDLRARPAASALAA

SEQ ID NO: 500053 - protein, 419 aa, unidentified
MAFKILRRNCCGLDVHKTWIFACIGITDANGRTEYKQARFSSFSNGLRELAGWLTKHSCADVCMESTGKYWIPVFNILEKTCWVTLAHPKYTKPQKGNKTDRKDAKWICDLYMCGMVKPSFIPPADIRQLRDLMRYRTKLTNMLTSEKNRALNCLTVSNLKLDDVFSNVFGKSSRSIVQHILEHPGEQFDVAPFLDRRCKHSVEDVQAAVDGAMSREQAAKLRECLLHIDQLNGHRETIETEILRLAQPYSHQLELLRTVPGFSAAPLTAVALISEIGVDMSVFPSAKHLASWAGCCPRNDQSNNKVKSTRISRAGSYLKPLLVQIANAVIKSDKYPECKERYRRIKARRGHKKAIIAICRMLLTAIWNVLSKLEPYSAKGYLEDKLTEHSVVISKSQGLELLRKRGYIFKDEVSADSG

SEQ ID NO: 500054 - protein, 312 aa, unidentified
MEYIVGIDVSKASLDCHNLQDSTSWQVSNDVNGWKALLKSLNTAKLIVVEATGGYQEGLVDTLLAKNLPVAVVNPRQVRDFAKSAGRLAKTDRLDAEIIARFGLALNPTPQTSLSEVKELRDLVNYRDDLLKLCSAQKNRRQQYRDLAIRDSIQRSLDALQQEIAWADEKIQAFIQTNKAIEAKATVLQAVKGVGPVLTASLLGLLPELGQIDNKAIAALAGVAPFNCDSGKYRGGRRIWGGRKAVRKTLYMSALVAKRYNPLMKAYYEQLAARGKSFKVAIVACMRKLLVILNAKMRDYYNSNVAQEAKPA

SEQ ID NO: 500055 - protein, 338 aa, unidentified
MSKITTIGLDLAKNVFHVVSCDARGKIVRKRMLKRGQVLPFFGNLERCLVGMEACAGSHHWCRELEALGFEVKLIPARYVKAYVRGNKNDYNDALGIAEAVVRPEMRFVASKSPEQQDIQALHRVRRGCIDARTALCNQMRGLAGEYGLVAPKGIATLRRRIPEWLEDGDNGLSALFRRLLCAGIERLQELDSHIAFYTREVARLSEHNEACQRLQTLPGFGPIVASAFHGQIGHGEAFRRGRDASASLGLVPRQHSSGGKDTLLGISKRGDRYVRSLLVHGARAVVSRAEHKDDRLSLWVNHIRVKRGYNKAVVALANKMARMGWAVLANKTIYRAA

SEQ ID NO: 500056 - protein, 420 aa, unidentified
MSEDTVSWRERTVFIGFDWAKDHHDVMLVDRQGQVVDDFRFDETAEGWRTLFEKLAPYPSRAVAIETSSGAMVERLLDAGYAVYPVNPKAAKRYRERKAPSGTKTDRIDAWSLADALRVDGHTWRRLQADDPLTVELRLLCREEIALIEQRTALIVQLQAALHEYYPIALRAFDDWTFRSAWAFVEAFPTPQALVAAGKRKWEKFLHAHQLYRPETYQRRLGLFAEAEAFGGSPAITNAKSMLAVALAAQLRVLQNHLDKFRTQIATLFAKHPDHDLFGSLPGAGKKLAPRLLGELGDHRDRFDSPEALQCYAGTAPISYESGQIKKARFRRACQKVLRHTVHLWANLSRAECPWAEAYYQKKREEGQSHACALRCLGQRWLKILWKMWQTGTRYDAELHHRNQIRHGSWVIGLRTGSTA

SEQ ID NO: 500057 - protein, 380 aa, unidentified
METMTRTSESSASQVLLLAFELGERTWKVGFSVGAEPRIRVRQMAAGALAVLLTEIAAAKKRFGLAAETPVVSCYEAGRDGFWLHRYLVARAITNYVVDSSSIEGNRRARRAKTDRLDLGGLLSLLARYVHGDRRVWRVVRVPTVTEEDARQLPRTAESLTRDRTRLVNRLKALLATQGVRLPVDHHFVTALDEARLWDATPIPAGLRDRLLRDWAQLQCVEAELRAVSQARVERVDVTTPTGRTIAQLQRVRAIGPTGAWVLATEIFGWRQIQNGRQLGALVGLVPAPFQSGETCYDQGISRAGNRHVRRVMVQLAWGWLRYQPASALSRWYQRRFGDGGPRLRKIGIVALARKLLVALWRYLETGVAPDGATLKSVTA

SEQ ID NO: 500058 - protein, 386 aa, unidentified
MQKLNDLSRSLAVLEPDVTLIAVIEMSLSSWLVAGIVPGVERQPLKKLAVDESALLKLLHRWREEAEKAGRRIKRIVVAFEAGRDGFWLARWLKACGIEAYVIHASSIAVSREHRRAKTDRLDTELLKRSFLGWLRGERDHCKMVDIPTMKDEDAKRPNRERDSLIGERSRIINRMKSALVRLGIRGFNPKLKRAAARLDDLRTPEGEPIPPNTQAELRRDMERRRLVSDHIRQIEEARLERIEQAPSSGPHAMVRLLARVMGVGIETADMLVHEVLSRNMRDRRALARYAGLTGSPDESGRKRREKGLARSGNARVRRGMIQLAWRFLLHQKDSALTKWFRSRTENARGTRKPMIVALARKLLIALWRLVREGIVPDGVVLRPAQ

SEQ ID NO: 500059 - protein, 316 aa, unidentified
MEVSRSFVGVDVSKGRLDVAVRPSGESASFSNDELGIKPLVNRLGEIQPTLIVLEATGGIERQLVRALVSAELPVVVVNPRQVRDFAKASGQLAKTDAIDAMVLARFAEAIRPTVRPLPDESLLELRALIARRRQLTEMIVAERNRLTAASKSVRKRINTHIRWLEAELGRADKDLDQSIRQSPIWKENEDLLRSVPGIGPVISRTLLAELPELGQLNRKQIAALVGIAPLNRDSGTLRGRRTIWGGRATVRAALYMAALVASRRNAVIRDFYKRLRNTGKAPKVALVACMRKLLTILNAMIKHRTCWAEIAIQTS

SEQ ID NO: 500060 - protein, 368 aa, unidentified
MKKETITSDGISGESLVNYVNQVLNLGLDVHYRQVTVAMQEDGGRIKAAGKMGHADFLNWVPKKLEEGWEIYSCYEAGASGYWLHRELEKLGVKNLVVVPKAMGQGGKKQKTDQRDAGELCDSLDRYLRGQEKALSVVAVPTEEQEEKRALIRYHRQIMADRGRCEARGKGLLCAQGIQVRGRWWRGDSWLELTSDPRLKDWMKEQLVGWRNKILSTDEEQSALRERIAALAPAILPKGVGAYSAAVLHYELRGFEHFKNRRQVGSITGLCPGVHLSDGRGKEGSINRCGIGIVRWTLVEMVWRLMIWQPQYPPVRRLAAGLVKSKRARKRLVVQAARRLAIDLWRLSTGQTTPEKLGLVMQSKAPGN

SEQ ID NO: 500061 - protein, 396 aa, unidentified
MHKKTVVACVLTSTSKETRTFGTMTHELLEFVEWLEQERVTHVAMESTGVYWKPVFNLLEGHDLELLVVNARHAKAVPGRKTDVKDAEWLADLLRHGLLRASFVPDRGQRELRELVRYRRTLIHEKTRLITRVQKVLEGANIKLGDVASNVMGLSGRAMLKELASGNTDAAAMAELAMSNLRPKRQRLAQALEGTVAAHQRFLLRSQIELIEVMEKQIEAINAEVEQRMRPFQAALDLIDQIPGIAQHGAEQIIAEIGIDMSRFPTPGHFASWARVCPGTNESAGRRSKTGTGDGNPWLRSALIEAALGAVRAGRAHPNFFAARYRRLAGRRGPKRAQMAIAHSILIAIYHMLRDGTHFVDLGPEHWDQRHKESVARRSIRRLEQLGYKVTIEAVA

SEQ ID NO: 500062 - protein, 342 aa, unidentified
MEKIATIGLDIAKSVFQVHGVDAAGEVVVRKRLSRARVIPFFAKLPRCLVGIEACSTSHHWARELIALGHDVRLMPAQYVKPYVKRGKNDAADAEAICEAVTRPTMRFVTVKTPEQQSVMMLHRVRLMLNRQRTQLSNSTRAHMSEFGIVAPVGRIGLERLLAIVADKDDESIPPDARLCLAMLGAQLAIVKEQILENDRRIRASARDTEVGRRLMEIPGVGPLLASAFVASVADPRLFRTGRDLAAWIGLVPRQNSSGGKERLGGISRAGNQFLRQMLVVGSMAVIRHAERHGTKRPWLIELMTRRAKKVAAVALANKTARMVWALMTSGEHYREPQVAYA

SEQ ID NO: 500063 - protein, 448 aa, unidentified
MPRSSKTEGLPVLNDRAAGIDIGARIQVVAVPPELSDEPVRTFQAFTADIERMADWLVSIGIKTVAMESTGVYWVPVYEILEDRGLEVILANARECKAVPGRKSDVNDAQWLQRLHACGLLRASFRPGREIAALRAYMRLRDRHLEYAAAHIQHMQKALTFMNLQLHHVVSDLTGVTGLKIIRAIINGERDPDVLASMRDIRCKQTEETIRAALVGNYQPEHLFALSQALALYETYRARIADCDTQIEMVLQTLVLDKPLPEPPLGKNKSRAKQTNSVNFDVRPLLYQLTGVDLTEIHGIGPNLALELVAECGTDLSRWPTEKHFTSWLTLSPGCKISGGKVLSSHTRKSTNRIAARLRLVATAVGRTDTALGAFYRRLAARIGKAKALTATARKIAILFYRAMRFGMSYKDPGADQYEIKYRERVVKQLHRRAATFGFTLQPIESVS

SEQ ID NO: 500064 - protein, 310 aa, unidentified
MDAVYVGIDVSQARLDVHVLPGGEAFAVARDGKGLEELIERLRAFSPQLIAVEATGGFETIVAAAVAGAGLPLVVVNPAQIRHFAHALGKRAKTDPIDAAVIAHFVEAVKPELRALPDEAQRLLAELVGRRRQIIEMMVAERQREKRAANVRVRKSILRHIRVLEKELPEIDEDIGTLVRGSPVWREKEDLLVSFPGIGNTLARTLLAEVPELGELTRREIASLVGVAPFTRQSGRWKGKSMIGGGRGSARRALYIAALVASRHNPGLRTFYRRLLAAGKPKMVALIAVARKILTTLNAMLRDKRKWQPA

SEQ ID NO: 500065 - protein, 336 aa, unidentified
MYCGIDLHSNNNYVAIQDEAQRDVACRRLPNHLGKVLEYLEPYREELEVMAVESTFNWYWLVDGLNEAGYDVRLVNTTKASDYSGMKYTDDRHDARWIAHLLALGILPEGYIMPPEERGLRDLLRRRSFLVHKRTSLYLSIKTIFARSRSEKISVQKIQSLDSESVRMMFDDPHVAESIIVMLPVLRVITAQIKGIEKSVLETGKLRDEFQLLQTAPGIGKVLALTIMCETGDIGRFAKVGIYGSYCRCVSSVKISNNKKKGKGNRKNGNKYLSWAFSEAAHHAIRCEPRAKRYYDRKKSGKHPMVAARAMANKMARGCYFVLRDQVPFDVSRAFC

SEQ ID NO: 500066 - protein, 348 aa, unidentified
MSKGNQYVGLDVSLKQTSICVIDDADKIVWRGQVDTTPEAIVSAVTQHAPHAVRIGLESGQLSNWLFHGLKQAGLPVICVDARHAKAALSLKVNKTDANDAVGLAQIMRVGWYREVTVKGLDCQAVRALLVARAQIVSQITTLKNCVRGILKTFGRVLPKGLRSQFPARVRAAIEGHPVLGAIIEPTLQVLEAARAQLLVYGRAVIQRARSDDTARQLMSAPGVGTVVALAYMTGVEDPARFKRSSSVAAYFGMTPRRYQSGEVDHAGRISKCGDGMVRGLLFEAAKVLLGRSSRPNALKTWGEALGKRIGLKKATMAVARKLAVILHRMWTTGATFQWNAGTTSSVA

SEQ ID NO: 500067 - protein, 342 aa, unidentified
MSILILGIDLGKNSCSVVGLDKNGTVVVRRRMRRDGVIAFAAKLPLCTMAMEACCGAHHMGRSLAALGHQVRLMSPEYVRPYVKAQKNDDRDAEAIAEAATRPTMRFVELKSEEQLDVQTLHRVRDRLVGERTSLTNQIRSLLLERGHIVAQGHARLRLLLVELLDSGVGALSSRMAFLLGDMRAHWEELDRRIAAFDAEFAAMARADERARRLTSIPGIGALNATALVAAVGNAATFGKGRDLAAWLGLVPRQVTTGGRPKLMGITKRGSRYLRKMLIQGARAAMPSLARSPTAIGSWLRALLARSHPNVAVVALAAKMARTVWALLHHGRSYEVMSVAAA

SEQ ID NO: 500068 - protein, 428 aa, unidentified
MEQIQPIVKAEPEPEFAALVAIDWADQKHYWSLQVVGQKGLQRGTLDNTPEAVEVWIMELHMRFGGRPLAVALEQRRGALAVMLSKYAHVHLYPVHPTTLAKFREAWYPSRSKSDPSDADLLLEILTAHRSRLRRLDPDTVEMRFLQNLVENRRRLVDERTALSNRLTDQLKLYFPQILGWFNDVASAVVGDLLQHWPSLQDLQQVKPAKLEKFLRDHHCSEIPERLTQMRQAIAATHDRALLDSAPYLVTAWVRQMAVLRESIRQLEKRIAERAAQQEDWHIFQSLPGAGAALAPRLMVALGTQRDRYCSAGDLQSFSGIAPVKEASGNTQWVHFRWACPKFLRQTFHEWAACSIAQCEWAKAYYEQQKARGKQHHVAVRALAFKWMRILYRCWKDRQPYREEIYLASLAKRRIAIVAALAQASQMP

SEQ ID NO: 500069 - protein, 343 aa, unidentified
MQAVTTIGLDIAKSVFQVHGIDAEGNVIVRRQLKRRHILTFFQKLPLCLVGIEACASSHHWSREIKALGHTVRLMPPAYVKPYVKRQKNDATDAEAICEAVRRPTMRFVETKTPEQQSCLTLHRTRHLFIRQQTAVINAIRAHLAEFGIVAPVGRQGVDKLLDIVADARDTRLPEVARACLAALGNQLRMLKAQILNFDRMITAWHRSNETSKRLDALPGVGPALATALVASVADPKAFRSGRDFSAWVGLVPKQNSSGGKQKLGSISKQGDRYLRSLFTAGALAVIRYAKIHGTGHRPWLTALLARRPTKIAAIALANKITRMAWAMMARGERYREPVALAA

SEQ ID NO: 500070 - protein, 381 aa, unidentified
MTTTTTRTEHGNTPAGTLFMAFELSDKTWKLGFTTGPGQKPRERTVTARDQERVLDEIAQAKRRLGLPETAPVVSCYEAGRDGFWLHRFLEAHGITNQVVDSSAIEVSRRQRRAKSDGLDVRKLLSMLMRYHHGEQKVWQVVNVPSVEAEDQRHLHRDLETLKRERGSTTSRIKGLLSSQGFQVTSLTHLPEQLDALRLWDGSPIPPGLRQRVLRVYAHHTFLSEQIAEVEAERRALLKTSSDASIDKIRQLMLLKGIGINGSWLLVMEFFGWREFKNRREVGGLAGFTPTPYQSGESAREQGITKSGNRHVRWMTTELAWSWLRFQPESALSVWFKERFGSGGKRLRRIGIVAVARKLLIALWRFLKTGVLPEGAVLKEA

SEQ ID NO: 500071 - protein, 393 aa, unidentified
MGVIIGMDPHKRSATIEVIDPSGRRLEVGRFGTDKAGYAEMLAAGRQHADRVWAVEGCNGIGRHIAHRLVHDGEVVLDVPAKLSAQVRTFATGNGRKTDPVDAHSVALAALYAPSDPGLHRVLVDDDLVVLGLLVDRRDELGRARTQTLNRLHRLLLELFPGGAKQYLSAPQARALVASTKPRDLPGKTRRRIVVELIGELEAIDRKIKTAEKDLAALVTERGSTLMELTGIGPTGAARLLADVGDIHRFRDKDRFASWNGTAPLEASSGAQQRHRLSRAGNRRINRTLHIMAVVQLRNPTPGRELYRAKKAGGTPSMMAMRSLKRRLSNIVYARMVADQQRREQTMVTSPGGQRGNDSDSSATGSQPHTGTSDKPLPGPATTKPRTQLPAMS

SEQ ID NO: 500072 - protein, 436 aa, unidentified
MNPMNSTNDTNDTNATHPLGPYAAFVAVDWADAQHAFTLQAAGQHKKEAGTLEQTPEAIGLWVATLRERFGGRPVAVGVEQSRGALIHALLNYDFLVLFPIHPTTVAKFREAFKFSGVKSDPLDTGQILEILTKHLELLKPLCPDTEATRLLARLVADRRKTVELRASHIQALQASLKEYFPQALAVLSGNVTSRLAYDFLKKWPTFGEFQHAKPSTVKRFLYGHNLRSPQRIEQVQQVAQKSQPLTTDPAIVESGVRLSQMHAEVIHTLNPLIEQYDRKIETVFHDHPEAKLFSGVPGAGPALAPRLLVAFGTDRARYEAAGNLQSFSGIGPVTRSSGKMRVVYARCACPKFLRQTFHEFARLSVAQCQWAQNYVAYYTGQGKKYHTVIRALAFKWIRILFRCWKDRTPYDDLKHMKKLEQRGSIFATLHLQKNS

SEQ ID NO: 500073 - protein, 356 aa, unidentified
MHDITPDAIVIGVDTHKDAHVAVAINGLGARLATASFPVTTQGYRQLADWAASHGTVHTIGIEGTGSYGAGLTRSLTAMGLRVIEVGRINRQLRRRHGKTDTVDAESAARSVLAGDAQGQPKTGDGAVEMIRHLKIARDTALKARTQAMVTLKTLLVNAPQALRERFIGITGKKTLIRGLAALRPGTPVSTTASAKMALRALANRWLMLDAEIKEHESVLEELVRAQAPALMDAPGISTGTIADMLIVLGDNPQRIRSEAAFAKLCGVCPVPASSGKTSRHRLNRGGNRRANAALYRVALVRMRHHPPTREYIQRRTAEGKSPREIRRCLKRYIAREIYHHLCTAKQPEIACAKGA

SEQ ID NO: 500074 - protein, 351 aa, unidentified
MASSKHHRGTTMSYYAGIDVSLEASHVCVIDGSGKVVREARVASEPEALIAWLGSVGLELTRIGLEAGPLSQWLYAAMRDAGLAVELLETRHVRNAFKIMPVKTDRKDAQGIAELMRLGWFRPVHCKSMEAQETRAMLTARKLVQKALHEVEMSLRGVLRGFGLKIGKVAPMQFEARIRELVEGHPSLEVIVTAMLAVRATLRRELSGFEKRLRAMARSDMRARLLMSVPGVGTIVALTYAAAIDDPTRFTSSKTVGAHFGLTPTRYQSGETDRIGRISKIGDASVRATLYESAHIIITRPVKGCTALKSWAMRITKRAGMKKAKVALARKLAVIMHRMLVDGTTFTTQPA

SEQ ID NO: 500075 - protein, 544 aa, unidentified
MTWQRTIGIDLALEGQHVAVVCDQQGEVLNKNPFLFTTNLQELEELISKFIPQGTDKKQVSVVMEPTSNAWLIISSFFLSRGFSVFIIKTQKSYDLRQFFKKHAKTDCIDAKTLAKMPFVDPEGLNPLILSGKDYFSLQKLIKFRENTVNAISECKQKIYAYFQLLNPKLMRLFSSDRFTNLAKAFYARYANPFKIKKDGFKKFEAYLNKKCFGMPKEDIIKRMFETSIEILNVHQDIISNSETKELPYDMETIQYLINEELDTIKFLEKKETETEKKIKELYDKIDPYKILKGIKGFGGNIIAPAICVFTGSVKRFACIRDYLGYVGLVPKTKQSVKPAKEGLKITKASQKLLKKYYCLAAETTRRYDIEFAHKYKMLINQGHHHQQAICALGNMLARRVYSLLKQREEALEANDLLKLQNIQYELRDLNHKAITDEEALAICKRDYPSKKEEHARLLKQKNEKAATASSSGQSSLSGTKPKKGNSTISHNVQPSQDLQSSLTIAYILAQPDELIQELIDKGVLDKNMLSLSKNDSNLFITCS

SEQ ID NO: 500076 - protein, 381 aa, unidentified
MRNVALDLGTRKISFCEVSGKEVIVRRTVTSLGALDDVLGEDAAPARVALEACREAWHVHAVLTKCGHEVLLVDTSRVRQLGIGQHGRKTDRIDAEVLARAVEEGRIPLAHVLSPERQHLRKELGVRRALVETRAQYVTTVRGLLRGDGIMLVRCDTEHFVSQVRRASLSEEQRQSIEPLVVVLQQVNAQIVAVDARLETLCAREPTIEALTSAPRVGLIVAAAFVSVIDEAKRFRHAHQVQAYLGLVPSENSSGERRRIGAITKHGNAYLRAMLVQAAWAILRTADRHDPLRVWAEQVAERRGKRIAVVALARRLAGVLWAMWRKGTVYDAAWIGQCSHRGLERNAQSAEVRAAAMKRAAQKAKVRLRPQRRRSSMTTPA

SEQ ID NO: 500077 - protein, 460 aa, unidentified
MKNKEQSQQIKNKRISKHLEQVNLFAAGIDIGSQSHYVSVPEELAAESVREFPCFTGDLNRMADWLVEIGIQTVAMESTGIYWIPAYEILEERGLVVLLVNARHIKNVPGRKTDVLDCQWIQQLHTYGLLEGAFRPEEETVALRTYMRQRETLTQQASDQIRRMQKALRQMNLLLDNVVSDIDGVTGMKIIRAILEGEREATVLAKLRDGRCKKDEKTIASSLEGHYREEHVFSLRQSVELYDTYQAKIIDCDEAIQSQLNKMDSKGDKKDLPPSKKAKSKNTPKFDVRGELYQMTGVDLTCIDGLNESSVLKILSETGSDISAWPTEKHFSSWLGLSPGNKVTGGKSLSGKTKPSANRAAASFRLAAFGLLNSQSALGAYCRRQRTRLGAPKAITATAHKLARTFYSMLKNGTEYVDKGQDYYEKQYHDRVVINLKKRADNMGFELIAKDISMLEISKA

SEQ ID NO: 500078 - protein, 348 aa, unidentified
MLIIGCDYHPGFQQVAFVDTDTGELGERRLSHREEAEQFYGALKQRSVRVGMEASGHSRWFERMLRDLQFELWIGDAAEIRTKRVRKQKTDRQDAQLLLKLLIEDRFPRIWVPDAENRDLRQLLWHRHRLVQMRTRVMNQLHVVALNEGLRRKKALWRAAGRKELESIALAPWATHRRQDLLDLLDQLTPKIQELTRALEEEVEKRPVTRRLMTHPGVGPLTALAYELVIGTPERFHCGKQIASYVGLVPTEESSGDRRRLGHISKQGNVLLRFLLVEAAQVTVRSQPEWRSTFFHLAMRRGRKIAKVAMARKLAVHLYWMWRQGLDYGQLHKLGSHAGEPGNRHGVQ

SEQ ID NO: 500079 - protein, 423 aa, unidentified
MRFIGLDVHRDFCEVAIAEAGMVRLAGRVRTEPAALELFAQSLGGDDQVALEATGNALEIARIIEPHVGRVVLANPKAVKGITRAGAKTDKIDARTLATLLAGGFLPTVWLPDEQTRVLRRRISVRAQLVRQRTRAKNQVHATLVRNLKGKPPVSDLFGARGRRWLAGQELPADERETVAACLRQIEFLDGEIALVERALAERVLASAEMRRLLTLPGVNFVTAAALLAAIGDIRRFPSARQLVSYLGLDPRVSQSGIEPARHGRISKQGPGETRHVLVEAAWHASRTPGPLRAFHQRIAARRGGNIATVAVARKLAVIVWHMLSRGEDYAFARPSLTREKIRKLELATGAERQKGKRIAVWGTKEQHQLDKQLSAQAEIAYRRLVQDWQPTIKGAGAAPGRASCGPSSGHAARQETAPPPAL

SEQ ID NO: 500080 - protein, 352 aa, unidentified
MCYVGLDVHKKLVVYCGKAADGTVVEEGRIGATRRELKEWAERRPWPWTGGMEATMFTGWIYDVLKPYAAELKVAHPQMLRAIVASKRKNDRVDAARIADAVRCNLLPECYMAPQEIRDLRRVLRFRNFVVRLATAVKNKTSGLLMECGAEYDKARLHGKRYWEELLGGLGETPASVKDLLRLNRATLGLFERTQRRLLGTLRDHPRLSGRLMRLMTIRGVGDVVALTWALEIGDPNRFGSIRKAISYCGLCSGESQSADHAKRLPLSKQRNAHLQWVLIEAAKLAVRWNPQLAAVHEKELQRGNRNRATLAVARKLVAYLLAVDKSGQAFQSREVGGQDAAKRSLVLGRGK

SEQ ID NO: 500081 - protein, 443 aa, unidentified
MSRKKATHLRGERGQDFANRMRGIPSEQILCVSLDISKYFHVVMIHNGLGEIVKPTFEIDMMQSGLDQLCQAIEQAKVQTSAQVVLIGMEPTSHYFENLARHLLKRALPVTLINSFAVKQNREQRLMRREKTDEIDVAAIGDLLRRGEGTPYKPPSETYLQLQQIDRVRLSKVRIASMLKNQIIGHLDRIFPGLVVFGEEAQKRYPPLFETNFWTCSTLQRLIRICPNSHCLAQMTPQALVQLFHEHQSRLGLKSAARIIARAQETLLPEPLLVDIRAELLQHDLQLLDELQSHLAVLEQRLAQLLATTPYAVWAKLKGLSVVQVASLAAAIGDPANYSEAAQVFRRSGLVSGRNDSGRRQRKGQGNPVLKAGDVYLRRALMSALATLLLHQPVLIRYYQQLKKAKPDGVARVATARRLLGILWATLRDQYPTTLLCCKGADM

SEQ ID NO: 500082 - protein, 337 aa, unidentified
MIAGFDIHKQVMQAAVLEPASGEFCEERFSGADGLAAWVARWGGRVEVVAIEATTGWRWVARDLEAAGLEVRLVDAGQARALRGKKRKAKTDRLDARWLCLIVARGLLGEGEAWLAPIEIQRLRDQTRLRKALADDRTRWAQRLHALLVQEGWPCPRSRLLTRTGRRWVGGLVLDPQARAQVDVLLAVIGSLEQQLDSLETQLRRFARTDRRCRAVTQIFGVGPIIACHLVAEIGDATRFRRARQVVRLAGLDPVVEESADTRRRGHLAKAGSPTLRWALVQAAQHGGRQRSPERHLYHAVTRRSGSPQAKLTVARKIARRAYHVLQDLDRDQPQAA

SEQ ID NO: 500083 - protein, 327 aa, unidentified
MNQSASNLSILGIDVSKGKFDVALLREEKYKHKRFLNNLEGFKKLGEWLAEYKVERLHACMESTSTYGEALAEYLHDRGFMMSIVNPARIKGFAQSELIRSKTDKVDASLIARFCAAMKPSLWTPESKEIRELRSLVRRVDALIEMRQQEINRLDVSDAVIKKTIENHIDYLTKQTDSIKEQINKHIDRHPQLRDKQKLLQSIPGVGEATIHLVLANFANTEKFSNAKRLSAFLGIAPREYQSGHSVRGRRRMSKVGRSSLRKAFFMPALVALRYNPIIVEMKRRLTKAGKPKMLIVGAAMRKLIHIIYGVLKHGKPFDSNFALKIT

SEQ ID NO: 500084 - protein, 370 aa, unidentified
MLDTTTFVGLDVHARSIKAVSLDVMTGEVRAATFGYDAGAVAEWVRSVDPGARCVHESGVTGFDLQKRLSGLGVDCAVGAVSKMIKPSADRRRKNDRNDAEFLARMLSVGNVVEVWVPDDECEAARDLTRALEDARDDLSRSKQRLSKFLLRHGLVFDERTPTGRRKGNWTRAHWSWIESIRFAEGADEEVLAYYVDAVRRAAEEKARLEGLVEAEARKPRWRKRVDSLRCLKGVDTASAADLVFEAGEFSRFRNARSFAAWVGLTPSEHSSGESDRRGAITKAGNKHLRKTLVEAAWHYLTCSGRPKDLAKGQAPDRGARRHAAKGVRRLVERRGALLARGVHNNKANVATARELACWVWAVGLMAEEA

SEQ ID NO: 500085 - protein, 421 aa, unidentified
MEEIAGEEAELVERVAALDIGKAELVCCVRVPHGDKPGRRRQEIRTFATTTRSLLELRDWLICQGVSLCVMEATSVYWKPPFYLFEDAVECWVVNARDVKNVPGRPKTDRLDAVWLCKLAERGMLRPSFIPPPWQRELRDLCRYRRTLVHERTREKQRAEKLLEDTQIKLSSVISDIFGKSGRDMLEALIAGQRDPARLAELARGSMRGKKSVLQEALTGHFRDHHGYLLRMMCDRVDALTTQIGELTAKIDEAIAPFAHQVAQLDEIPGIGRTGAQELIAEIGTDMNRFPTAAHLVSWAKFAPKARQSAGKSKPGSTGKGNPWIASTLGEAAIGAARTKTFLSSRYHRLARRRGKQRALVAVGNSLLVIIWHLLSDPGAQFTDLGPDWHDRLAPIRRKRQLIAELERLSGMKVTLQEAAA

SEQ ID NO: 500086 - protein, 340 aa, unidentified
MIVSTNFFIGIDVSKPYFDASLMAVVSHVKQAIQTARFDNTSLGLKLFEKWLKTYKVSLNDDSLVVIENTGIYHRLIWDFCSKKNLPIHIGNAAHIKWSFGIARGKNDKIDSIRLCNYAFKEAEDLKATGALDPQLLHLKDFISARTKLLKQRSGLSVSIKELGNFNDRSHQKLIEEALKNAIDGIATSIKNIEEQIKKIITENQDFKRNYILLTSIPGIGHVTAVYLIGCTANFAGRPSGKELACYAGVAPFEHSSGISIKGKPRVHRMANKELKRLLHMCALSLIQYNEEFKTYYNRKKNEGKNSMSIINAVRNKIALRVAAVIKNQTNYKNNYNIAA

SEQ ID NO: 500087 - protein, 358 aa, unidentified
MLMQRKELSFEGQNIFIGIDVHLKSWTVSIFTEKLFHKTFTQPPKVESLKKYLDFNFPNANYYSVYEAGFSGFSAHYYLNEMGINNIVVNPADVPTTQKEHQQKDDPTDSKKLARSLRSGELSSIHVPQIATLEARSLVRVRSTLVKDMTRFKQRIKSFLYFHGVNYPPEFEKSVSHWSRKFMLWLKDVKLKNTAGMDALGVLIKEAEQQRNLLLETTRKVRELSKSEIYSRDMKLLCSIPGIGPIAAITLLTELEDITRFENTDHLAGFVGLIPCRHSSGEKNKNGEMTFRGHEFIKRVIIESSWIAARRDPALNMAFHNYAKRMETNKAIIRIARKVMNRIYFVLTKKQEYVMGFV

SEQ ID NO: 500088 - protein, 309 aa, unidentified
MDARYVGIDVSKDRLDVHVRPSGDAFAVARDGEGLAALVARLQPLAPHLVAVEATGGFEMTVAAALGAAALPLAVVNPAQVRHYAQALGRRAKTDRIDAEMIARFAEAARPEPRSLPDEAMQTLSDLVTRRRQIITMMVAERQRATRLPKRLKRSCERVVRVLEAELSALDQDIDTTVRGSPAWRAKEDLLASVPSVGDITARTLIADLPELGTLDRRKIAALVGVAPFTRQSGRWQGKAFIGGGRPNVRAALFVATMSAVRHNPTIRAFRQRLLAKGKPKMVVMVACMRKLLTILNAILRDQKPWQHA

SEQ ID NO: 500089 - protein, 319 aa, unidentified
MTQNELVVVGIDVAKDKVDACIRTVTERRTFPTTASGRRSLIAWLRKHQVGKAVMEASGGYERVWAKALRQTALEVRIVDPKRVRSFAESAGRLAKNDKIDAEMIAWFAETFSEAPSQVEDPAHEEIKALVKGRKSLIDLRARLEMQKEHEVPALVGKAHARLLKKLAGEIAAIETAIGAKIKATPAFAVRAEIIQSVPGFAEATALTLLAGLPELGQVSNEVAAALVGVAPYDDDSGKRHGQRRIKGGRRWVRNALYMPCVGAATLNNPVFKAFYQRLIAKGKEPKVALIACMRKLIVILNTMIARGEKWDPKRYQVA

SEQ ID NO: 500090 - protein, 318 aa, unidentified
MKMAKRSIITAGIDTSKAKLDIAVHGGAAFLVSNDQAGWKQAAMQLRGAGVGRIGIEATGGYERGVTWSLREAGFTVVVMQPLQIKAFAQLVLKRAKNDRIDAVLIAACTHLLDAGNKVTPDARFEALADHLTSIEQWEEDMTRMKTRLEHIRDSRLRRIVEGDIMRLGKRRDTELLRLQAALSQYDDLAQRFALVESVRSIGARTALSIVIRMPELGQVSREQIAALAGLAPFVRQSGKQKGEAHIGGGRERVRRAVYAAALAGAFHWNPQLKAIYQRLTRRGKSHKQALVACARKLLIFANTVVARGTAWEAKSAA

SEQ ID NO: 500091 - protein, 399 aa, unidentified
MVCCMTNGDEKRPLSRFTVSNNRPGITDLQQRIRRLLQSHNLDQIRFGLEHTGCYSTHAAMYLQRHLDFGCPDVKVYMFNPSLIKEFKKAHYLDAPKNDRVDAWFIASKLRAGHLPHPFTWSEPLLALQRLTRARFHLMQALTRESNFLMTNLYLKCSDYTLVFRNKLSATSLAILEDFESVEALADVSLDELVEFLVYHGKNRFEDPEAVAKQLQKAARSSYRLPKAMADSVNLAMASSIRVIRTIQEQLKSLKTAIEDHLKTIPQTLNSVPGIGPIYASGILAEIGDIHQFDSHKQLAKFAGLAWTEHQSGKFTANHTRLIRSGNRFLRYYLMEAANSVRVHDPVFAEYYAMKKAEPKQFAEKRALALTARKLVRLVFYLLKTNQLYQPEGECQQKA

SEQ ID NO: 500092 - protein, 344 aa, unidentified
MEQFVGLDISQAMTHLCVVNGKGKKVWQGKCPTKPDDIAKTIRDKAPSATLIGLESGALSPWLWHALKGMGLPVVCVDARHAHGALSMQINKTDANDAHGIAQMMRTSFFKQVTVKSLDSHRIRTLLGARAQLVGIRTDLKNQVRSVLKTFGFMVSQSVEKGFEAKVRGTMSDQPFLQKMVCPLMEVLQTVQEQVAALDELLGDYAENDKICSHLMTIPGIGVVTAVAFTAAVDDPKRFRKSRSVGAYFGLTNKRYQSGEMDHSGRISKCGDRLVRSYLYEAAGSLLTRTKTWSALKSWGLRIAKRSGMSKAKVAVARKLAVIMHQMWITGEAYRWSETEASAT

SEQ ID NO: 500093 - protein, 325 aa, unidentified
MQKPHDNSKASPAAFMQDNTLIAVIELSLSNWLVAGLIPGVSREPLKKLEPNPEDLLKLLHGWRDEAIKAGRPITRIAVAYETGRDCFWLARWLRERGIDAHVIHATSVAVSREHRRAKTDRLDTAMLKRGFLGWLRGERGHCTVAIVPTMEEEDAKRPHREREGLVHEQTRVVNRMKSALIQFGVRNFNPKLRKASVKLETVRTPEGKSLPPNTIAALRRDMERLRIIKEQIKAIEQARLQQLEQKPEALANRMVYLLVRIYGLGLETAGLLVHELLSRTLRDRKAVARYAGLTGSPDESGSKRREKGLSRSGKPFPLGQRAGT

SEQ ID NO: 500094 - protein, 429 aa, unidentified
MTRISVGVDVSKNRSTVCIMDQDGKVIMRPFLVWHSTEELDFLADTLKRLNGEVRVIMESTSIYQYPIALHLKEKGIFISIVNAYEMKQFANIDFRGGKTDKKDSRTIASYGISYWDKLVEWQIPKDTYFNLDLLNRTYMNAKKHRQIILQELQHYIDCAMPGMDKELHSLNLSTKKDFMLDFVEKFWHRDEIVNMTEAEFTEVFTAWAKEKGYRPVEGKAAKIYAIAKSCIPYYPANPTVKTILQCIVDKLSGVNRTLVTIVTQMIEEAKKLPEYQIVREMPGVGDPLAARFFGSAGDIRRFKNSKALVAYAGIDSPPDESGDFSSTHRHITKKGSKVFRDTGYEIMMALRAQKRTWEKVRKNPEVYDHMLKKKAEGKPRKVAKIAALNKFLRIVYARIKELYDNMALAERAKTKTRSKTRAKTKVTA

SEQ ID NO: 500095 - protein, 392 aa, unidentified
MYIVGIDIGKNHHEASIVSPEGKQIGRSLRFATTHKGADSLMSFIFKNIGNSPCVFGMEATGHYWYPIYSFLKAKGYTICVINPIQSDSLRKMYIRQTKNDSIDSFLIAEVIRFGQFGTTSMADENILAMRQLCRYRDSVISSRTEIKLRIGTIMEQIFPEYEKQFSSLWVSTSMGILEKYLTPENIENAPIDELFEIIKDKSHNRLTKAKAISIKEAAADTFGIKIAQDAFSFQLKQLIDRMNFLDKQIEALDCQILEYYEKFDCYLHTIPGIGMIAAATILAEIGDINRFKSSSALVAFAGIDPTVRQSGEFSSTHNHMSKRGSPYLRHAIFLAATTCSFHNSPLNAYYKKKREQGKHHLTATGAVARKLTTVIYAVLRDGKPYEPKSFC

SEQ ID NO: 500096 - protein, 426 aa, unidentified
MVKAQKMALVRGNVLIVGIDVAKKRHYARVYNQMKLDVVRPFHFHNTREGFYRLVSKIEEARNKEGAASVIIGVEPTGHYWKPLAWFLQEQGYQVVIVNPYHVKGSKEMVDNSQTKNDRKDAGIIAELVSEGKFLSCLLPEGVYAELRVLYVTRQQQVRQLHSALCRLEAILDEYFPELPGVFKSLLGLAARWVLRNCPFPEDVLKMGPEKLAEELKKASRHRVGKKRALALLSAAQESIGVREGVEGARIKLRACLDEIEFYQAQITSTEEAMARFLNETGLASYLLSIPGVGVVTAAGFLGEIGDPKNYRHYKQIQKLAGYNLTENKSGQRDRGPRTISKRGRPGLRNLLYQAALTLVAKNKEFKALYRHFLTRPVNPLKKKQALVAVALKLLRVMFGLISKKETYDPAKVLGEYRQKQLNQAA

SEQ ID NO: 500097 - protein, 411 aa, unidentified
MNAVGIDVSKGKSTVAILRPMGEVVQTPVDVPHDAVSLERLAYQILSLGENTRVVMEATGRYHEPVAIELHDRGIFVSVVNPLAIHGYCSGGTVRKVKNDQKDSLKIAKFALDHWVDLREYTPMNAVRQQLKIFSRQYNLYMKSRVALQSNLISLTDKVFPGVNEIFTSPERSDGHLKWVDFVTTFWHCECISLVSENAFTERYKKWCKRMGYKFSAAKVSDIYIDSLGHIVTLPKNNNTKLLIQTAAKELTAMNELLAVVKAEMIRLAKELPEYETVHAMFGVGELLAAQLMAEIGDIRNYPRRSSLVGFAGVDPEVNQSGKMNSESNPSTKRGSPHLRKTLFQLMTVYLRLSPADEAVYQFLDKKRSEGKPYYVYMTAGANKFLRIYYARVKECMAKLETPAELAEENG

SEQ ID NO: 500098 - protein, 341 aa, unidentified
MKKNLFFIGLDIAEADFAASIYKTPDQPIVTKEAIPNNPEGFDLLLLWLKEHHIDKTNSRICMEATGVYSQAIAYYLLFQGFPVSVEPPLKVKRAFDPVGHKTDPVDSKQIAEYAYRFQDELTSWQPRDEILEKIRQLLSVREQFTKQKVALKNAMEAYSKQRVQVALIKKAHQETLAQIEKQISRIDKELAKLIKQDPQILQKADYLKSIPGYGMLLAAHLLVITENFTKIQNSKRLASFVGIVPYQHQSGTSVFKKAKIRYFGPGPSRKLLRLAAQSVATHDVTFRRYYLRKLAQGKAKALVLNNIANKLLKVACAMIRNNTRYIKEHRSIHPMYLKSA

SEQ ID NO: 500099 - protein, 354 aa, unidentified
MLAELVDHVIGVDPDRDWITVAALDAHTSGVISNDRFPATRDGYRDAVLWADAHSDPAERAWVIEGASSYGRGLALALQRNNEFVVEFDHPTRKATKDGAKSDALDAIRAAREALGRDKLNEPRAHDEIREAIRVHTVARAAAVRARTAAINELKAFVVTADEQLRSELRGLRRPKLVARCARFRDSTNRPIDQRCTRNAMRALARRIQHLTNETAEHDRVLKELIDQAAPQLIAERGIGYVTAAAFYLAWSHPGRCRSEAAFARLGGTAPIETTSGQNQTRHRLCRGGDRHLNRALYLVAVTRQRSCPETRDYMQRRTTDGKTKREATRCLKRFIARRVWRLLEHPKSHLDNT

SEQ ID NO: 500100 - protein, 394 aa, unidentified
MRKPTPQIRSTLFEGLQALYGLTLVAQNGKEDRPMDDGSRRKPSMTVGIDLGDKYSYLCLIDQESGEVIEEGRLRTTPEALRRSFSSEQPLRIAIEAGTHSPWVSRVLEECGHEVLAANPRKLRLIYANKRKTDEIDAENLARLARLDPKLLYPLKHRGEDSQAHLAIIRSRQALVGARTQLVNHVRRAVKSFGARLPKCPARSFHSKASAHLPEELLVALGPILETIGSLTQRIRDYERQLEMISKEHYPETDLLREVEGVGLLTALTFVLTLEDPYRFAKSRTVGAYLGLVPARDQSGDRDPQRRISKEGDEMLRKLLVGSAHYILGPFGSDSDLRRHGEKIASRGAKNAKKRAAVAVARKLSVLLHRLWVSAEVYDPLYNTHRCARQEEAA

SEQ ID NO: 500101 - protein, 429 aa, unidentified
MRTESTPGARGPVFCGVDTHADSHWLCVLDWRGRKVLSSQFPADAAGYEALAGAIAAAGEPACVAMEGTSSYGAGLTRHLASLGMPVREALSPARMQRRRPGQGKCDEADAERAARAAMSGSRLGTPKSQDGWVDGVRCMLAARSGAVKARTSAINTARSLLTTAPEGLRSRFRGMGGPRLMEELPSVRAEGALGAALGALADLWAAARDAALDMEREIEASLEENCPALLAMYGCGPVSAAKLAVAAGDNPGRLRSEASFAAICGACPIPASSGKTVRHRLNRGGDRQANSALHEIARQRVMRDPETAEYAERARARGKSDREVMRCLKRYVAREAYRALMRPHEVRRPEDASELVAARRAARVSQVRAASILGTSEKYISMLERGQRELKPIRRAYEAWVEAGLPLDWDRQAFEAERKMDSKKHLAK

SEQ ID NO: 500102 - protein, 465 aa, unidentified
MMTEQKLWRNRKERKEWARRLQSEDPGLEVVHPQAAGIDVGNGAHYVAVRPDRDPEPVRRFECFTADLYRLADWLQECGVKTVAMQSTGVYWIPLYEILEERGFEVYLVNARHTKNLPGRKSDVQESQWLLKLHTYGLLNNSFQPPAEIRVLRTYWRQRGGHVQGAATCIQRMQKALTQMNVQLANVISDVSGLTGQAIIRALVAGERDPQKLAQLSDPRIQASREEVAKSLQGNWRPELLFVLQQEVEMYDAYQQRMAECDQQLQKHLASFVGTVPPQPSEAEPKRKKTKPAKNAPRFELHSELQRITGVDLTRIDGIDVMVAQTLISEVGLDMSRWKTEAHFSSWLGLCPNNSTSGDKVLGRGTRHVVNRAATALRMAAVTLMRSRTYLGAQYRRLRTKLGAPKAITAMAHRLARLVYRMLKYGQQYVDKGAEYYEHRYRRQQIEFLRKKAAKLGLKITLAQT

SEQ ID NO: 500103 - protein, 423 aa, unidentified
MYIKNTLYVGVDVSLKSLTTCILDTLGSVIFKPANFSNDPSGVDSLFAKILELANKHDVEDIFIGAEATSVYDCHLLYAIADNAELNKFNVSSYCFTPKLINNFKKSLGDLPKNDKSDSFIIAQKLKSGHLPNECYINFKQLALQRLTRFRKHTMDSITREKGYLTSLLFLKFSTMAQQNILSDEFGSTGEAILTEFCSVDDICNKPIEELIDIIVSASQNHFKEVYNVAIKIQEAAKSSFKLPGDMNDSITFVMKNSFEIISSLQKSIKHTDKTISDLLDKNFKNESIILQSIDGIGPVISAGIIAEIGNIKRFDSDAALAKFAGLVWSQYQSGEFEAEDTHLKKTGDQYLRYYFCLAASAMKMHNVRFNEYYSRKYREASSHKHKRALVLTARKVVKLVFALLRDNKLYIPTKKGGLPIED

SEQ ID NO: 500104 - protein, 343 aa, unidentified
MKVSTIGLDLAKSVFQVHGIDAAGQVVVRQQLRRRQLLGFFEKLGPCLVGIEACATAHHWGREIAALGHEVRLMPAHYVKAYVKRGKNDAADAEAICEAVQRPTMRFVSLKSPEQQSLLMLHRTRELLVRQRTMLVNALRAHMAEFGIVTRVGLPQIKELLAVIADRDDRRLPPDARACLESLGRQFLSVHEEICAADRRLHAWHRSDPVSQRLATIPGVGPVTASALAASIADPSVFKSGREMAAWIGLVPRQNSTGGKQRLGKISKQGDPYLRWLLVAGAMTVIRHAKRRGTANQPWLDDVMARRPTKVAAVALANKMARMAWALLRHGGAYQPPTITASL

SEQ ID NO: 500105 - protein, 340 aa, unidentified
MGDITTIGLDLAKSVFQVHALDEVGRIVLRKRLRRGQVLAFFAGIPPCLVGLEACATAHYWARELVALGHEARLMPPNYVKAYVRRNKHDVADAEAICEAVRRPSMRFVPVEAVQQQSAHMMHRARDLLIRQRTMLVNALRGHFAEFGLIEAQGLHKVARLIAVVMDEEDARVPDIARQVLKVIVNQIEDSQTRIAGLETQVLSWHKSNPVSQRLATIPGIGPIIATAIAATVADPNTFRSGREFAAWLGLVPRQSSTGGKARLGGISKRGDSYLRRLLVNSAHTVLLCSKHAKTDPWLTSLLSRKPRLVAAVALANKTARVAWAIMSRQDTYRHAAVPA

SEQ ID NO: 500106 - protein, 341 aa, unidentified
MEWTVAIGVDTHKDTHMAVALDHVGVQVASCEVPARRAGYLELVRFAQELGEPAFAIEGAGSYGAGLASLLVACGFRVYEVERPRRNERRRGKSDLIDAAAAAGRLLAGEGLSALRGGGQEREDLRVLLVERRGAVRAETAARNQLQALLVTAPSELRERLGRLSGETLVRRCRRLRPRGEHEQVLVSVLRRLAARVQALARELAELDQELEGIVSALVPELLDECGVGPICAAQLVVSSGDPTRMKNEGSFAALAGTSPVEASSGPLRRHRLNRGGDRQLNWALYVIARARIRFHGETRAYYERLLARGKTSREALRCIKRMLARLFYRLLVHNPALTLA

SEQ ID NO: 500107 - protein, 466 aa, unidentified
MKRHRRRPSAKPRPSRAVLEEINPNAAGLDCGAAEHVVAVPPDRDRRPVQTFGVFTGELHTLADWLAACRVTHVAMEATGVYWIPVYEILEARGVHVSRVNARHVKHVPGRKTDVSDAEWLRDLHMMGLLRGSFRPADDIVPRRAYLRHRTALLQGAAAHVQCMQKALVQMNLQLPLVVSDITGQTGMRIVRDLVAGERDPQVLARHRDPRCRASEAEIVAALTGNYRPEHVLVLTQHLALYDAHQAQLTDCDAAIETHLTTLTATVPESTTPLPPPRDPHRRVAKNEPAFEVRAPLHRLTGTDLSQIDGIGPYNALRLIAELGTDMRRWPTERHFTSWLTLAPRNKVSGGRLLSSRTQPSANRAATILRVAAMTLGRGDTALGAFYRRLAARVGKAKAITATARKLAIHVYYALKGDRPYVDPGAAAYDARFREQTLRRLQHRAQHLGFTLVSLNTGEILEPTVS

SEQ ID NO: 500108 - protein, 321 aa, unidentified
MKTVSFEQVISRGCGLDVHKETVVATIDGEGLERSTREFGTFTSSLTELKDWLVENKITHVAMESTGVYWKPVYNILEPTGITVWIVNARHVKNVPGHKTDKKDSRWICKLLLAGLLKPSFIPPREQRELRDLTRYRKKLIQDVASNKNRIIRILEDCNVKLSSVLSDTSGITATKLIDKLCDGKKVTLKDIDDVYHGKIRATKEEIWEACNGNITDHHIYLLGTIRSNNRHIESLIEELNQKIRRMLSPYENVLELLREIPGLNHKTVEDLIAEIGLDMEVFPSEKHLASWVGVSPGNNESAGKKKAVEQLTVTNRLKQP

SEQ ID NO: 500109 - protein, 401 aa, unidentified
MKRLSGGIDVGSEFHHITILDEEDHILYNQKVSHQLNEFIETIKQFKKIEKKEKGEISFALEGKNGYSAPLDRILLNQGFTLYNVDNFKLKRFREAFAGEWRDDQRDALMLSKMLKLKDHINSQREKVFIKIEKPSPVTESLKLLSRHQQTLIDEKVRLTNRLRKKLLEVCPEILKLAKLKNKKLIAILAKYPDFSKYKSITVKSLLKIKGIGEKQAPFLLKRLNHIAYMPGLTDIYKTIILSYAKRISELQKEVKDIDKSLDKIGNQSKEVKHLKTLPGVATKLASRFIGEIGDIHRFPSEKQLAIYCGIACVNNDSGKITKAKAVYKANKICKQTLITMAGGSIRLSLQCRAYYQKKRAEGKSHNHTLRCLARQMIKVIYKMLTEDRDYMVRKELKKVA

SEQ ID NO: 500110 - protein, 346 aa, unidentified
MYDRKDIILAVDYHAENTEVRWLNCASGEERTLRIPTTRGGILRLVETAVGEAGRVGGQVTWIMESTTGWARVKELIGSRVQFILANVLQMPLPPKAYRRKSDKIDTGRILREFLNGSLPQSHQPTTWWREVRRLVDSRQDLVERQTAVKNWISHFLHHETWADREGLWTQKGLRRLQGLRLSASDRRVLDLKLQELEELAQRRQKLEAAMQAVYDQWPEAQWVDEVRGIGMVTAVSILAHIGSIERFPTAEDLISYAGLAPGHRQSDATSHNGKIGGGGTDSHLRYLLIESMQWVCQIPRYREAYERASAKHGKNIARIIVARMLLRSLFKMLKDKVRFNQVSAA

SEQ ID NO: 500111 - protein, 406 aa, unidentified
MGNVDPTLPRFGTDVMKQAPPSVSARLTDQFLNMRLKGGAMDAIYIGVDFHSRQQTICYLKTETGELVITELKHQDKERVRAFYQQFQGHVIVGLEASGYSPWFEALLEELGREVWLGDATEIRRRARWRYKDDRRDAEHVWDLMVHHEFPRLHQPTPQSREILRMLRYRQKLIKVRTMTKNSLQAIAMQAGLAKGHQLFTAAGQAEFKAVAMSAVLQYQRDHWFELLKPLNKELLETMKWCKAAAKGDAAITRLRTHPGIGLLTALCLQHTLQPVSRFRNQRKVVAYAGFDPMVRRSADSAIHLGISKAGSRMLRYLSVEAVHTAIRYDEDLKRFYKRVAERRGRPKAKVAAARKLLIRAYIMMRDEIDYAEFRRRAVAARLARRSQGPPSVPEVLIGQSASPGA

SEQ ID NO: 500112 - protein, 397 aa, unidentified
MIAVGIDISKAKSTVAVIDSDGTVLASPFTMAHTQPEMEAFVTYLKGLGEPTTILMEYTGHYHYPVLKKLQDEGFPVCIVNPYQMKKYGDVEIHKAKTDKKDALRIAAYALEKSYKLVPYSSMEQKYEDLKFLSRQYNQRISYVAKLKVQLIALLDQTMPGITRILPLNSRNPEKCALLLFIKRFKSFDEIQRIGKARFLASYDVLAKKASERSASSKGLSIYELAVDSITTRGEDPYIWLSQNQCVDLLSATQNAADEIISQMRNIAETIPEYKVLRAMRGVGDRLGPIILAEIGDIRRFHSGKALNSYAGNDAPPYQSGQFESRNRHISKRGSSALRKACYEVMQALKLTKPQDDPVYLFMLKKEQEGKPFNVAKMAGVNKFLRIYYARAMELYK

SEQ ID NO: 500113 - protein, 427 aa, unidentified
MNETELSRVKEFRQLKNEIQALDTYLIVGIDVAKERHHAFFGTATGKTLLKKLIFDNTSAGFSELLARAEVLRAQSGLVKIVFGLEPTSNYHKPLGRYLISKGCHVVLVGGKAVKNNRELLDERWDKHDTKDAANVADLVSRGKCFYYDTPSREIEELRELHSLRARLKKEEHSLSLRIRNNLLAKHFPELDSFYSACERETLAIVRWCLNPQKIAAMPFDQFFKLVATNGRGIAQNLRLQKIHRLAHESIGCPVGCAVELQAALLVEKIKQVREQISEVDQLIGQICAQFPSYEYLLSIPGFGPYVASKVLATLADPRRFDTAKQVVRTAGYDLCADRSGKSSDQAVPVISKKGNSQLRYALYQAAMVASSRHRFFIAYFARMLQGRERERGIRTKMRVKLAAKMLVTAWTLMKKGEPFNPDYLNV

SEQ ID NO: 500114 - protein, 336 aa, unidentified
MEPSTIAIDLAKRVFQIHYVDPQTGAIHSKALKRAQLVPFFANRPACRVVMEACGSAHHWARTLARLGHDVRLIAAQFVRPFVKSNKNDAADAAAIWEAAQRPGMRFVAVKTEDQQAMLALHRIRQQLVRIRVMQINQLRGLLYEFGIVLPQGRRPSIEAAKAALASLDDQFPVMLMDSLQDQLSRLRTLDEQIERLERRIQEWRRNDEACRRISEIPGVGVLTATAAVSVIGQAKSFRSGREFAAYLGLVPRQNSSGGKAKLGGISKRGDVYLRTLLIHGARAVISGSKHLPERLRVLLTRRPTNVVAVALANKMARTIWALLAYGRTYQASPTQ

SEQ ID NO: 500115 - protein, 444 aa, unidentified
MAPRKRVAFELTPPNAAGIDVGAASHFVAVPPDRDDEPVQELPSFTEDLERLADWLTACGVDTVAMESTGVYWIPLFERLEARGFTVYLVNARHVKNVSGRKSDVLDCQWLQQLMSFGLWRGAFRPKGELCALRCVARQREMLLKYPSRHVQHMHKALTQMNIQLGQVISDVAGETGQKIIRAILAGERDGATLAKLRNVRIRASEEEMAKALQGNWREEHLFALKQAVALYDAYAEQLAECDRQLEIMLAALAPHDGAPELPKRRSGKAKNAPRFDRRTYLFQLCGVDLTRIDGIDVTTAFKVLSEVGADLSRFKSAKHFASWLGLCPGTKISGGKVLSGTTTRTANRAAQALRMAAANLRNSQSALGASYRRLCGRMDKPRAITACAHKLARLIYSLVTQGEEYVDQGQAQYEERYRQRVVKSLTKRAEQLGFQLVPVTVAA

SEQ ID NO: 500116 - protein, 349 aa, unidentified
MEIVIGVDPHKATNVVAAIDEQGELVGKEAFAANRKGQRTLERWAKRFPERRWAVEGAGGIGRPLAQKLLAAGERVVDVPPKLSSRVRVLSTGNARKNDSLDATFTALAALRNDRLASVQPEDGPQGHAEILRLLTERREDLVSERTRALKRLHVLLRDLLSDPVGKQLSTNAAAKLLRRARPQHPAGRVRRRLASEVVRDVRALDRRIAVLEERIGGEVEASGTTLTDIFGVGPILAAKIVGIVGDVSRFPSKAHFASYAGVAPIEASSGEVVRHRLSLAGNRTLNQVMHMIAVCQARSDPRGAAYHRKKLAEGKSRREAMRCLKRRISDVVFKALVADSRRASLAVA

SEQ ID NO: 500117 - protein, 338 aa, unidentified
MQLYAGLDLHSRNTYIGIMDKEFKRVFGKRVLNKLPLILKTLTPFQDQLKGIVVESTYNWYWLIDGLMDAGYQCVHLANPSAMKQYEGIKHTDDQHDAFFLAQMLILGILPQGYIYPKEDRPVRDLARKRLFLVRHKTSHILSLQSLIARCCGQRVSANDIRKFTVEDLQPLLKQEHIVLAAQANLDTIVFLKQQIKRLEKAIQKKVKLNKAFQQLMTVPGIGLILAMTIMLEVGDIGRFAQVGNFASYSRCVSSQRLSDGKSKGHGNRKNGNRYLSWAFTEAAHLSRRYNEHFRSYYNRKVAQANTSLATKALSNKLARICYYIMRDNVPFRKELSS

SEQ ID NO: 500118 - protein, 352 aa, unidentified
MYYVGVDLHKQTSWFYTLDSSGNRVDSINLTNNHDILKNYFKKIPKPFTLAVEATYNWYFFVDLAREYTNSVFLANSFELKAFAKKHKKTDKIDARLIATVLYKGYLPTVAIADKHTRQIRELLRYRMKLVIDRSRNISRLKALLDKLGYMSSGNFTTFKALENIKMEDLPDIYKSLIERYRELIIYLSKKIYEIEKEINKLPNEDIDVYNLLSAPGIGPFSAALIKSEIIDIKRFNSFNRLCAYSGLAPRVSASANKIYHGSLNVNRRKNLQWILLENVKHFVEADPERAKKFCEIKCRKGYNTAKVILARDFLKVIYHILKEQRPYYGQKRSVEHKIKIQSVAAAALIGV

SEQ ID NO: 500119 - protein, 354 aa, unidentified
MTSTKYIGMDVHKESISVAVMNASGKIVMECVIETKASMILQCIDGLRGDLHVTFEEGTSAAWLYDLLKPHVTELIVCDPRKNASMREDSQNDKIDACRLAELLRIDHLSPVYHGEHGLRTLKELVRSYLTVTKDLVRVKTRVKAIYRSWAIPCNGKEVYAACHRAEWLEKIKELGVRRRAEFYYQQLDALRVLRQGVRRELLAESKKQKAWKRLCQIPAIGPIRAAVLLGILQTPHRFRSKRPLWKYSGLAIETCSSADHRSINGQLQRSKKNSVRGLNQNCNHDLKNLFKGAAVIASSKPGPFQEFYTALLAKGMRPEMARLTLARKIATIVLIVWKRGVCFDAQHLKPQTA

SEQ ID NO: 500120 - protein, 402 aa, unidentified
MITVGIDIGKEKHAAAILGADGRLLAKPAFFDNTHDGAKKLWAQIARHGGGDGVRVGMESTGNCWKPFHDFLAAKGATVDVINPIVTSASMAGDVRGRKTDKQDAVVIAGIVARGERAARRPEGEGERDLKCLTRQRRYLVSDRSGSKNRLRDQLLESFPEFPALFNDLFSRLPLALLEKWPGAAELARARKDSVAKVVKANSRGKDAEKEAARIIAAAKDSICFAHPPPKSAARCILSTLRALRALDENIEEIDAEIQECERPEVARLMDGIKGAGKTMPMVIASEFGGFERFEASPTTGKGADMAKRMLAFAGCEPRIRESGKWKGRIKVSKRGSGQLRLALYLVANTIRMNDDYFRAVYDEKIKTKHHSVALFYVIRKLLEVLCSLHKSGRTYSIAKPN

SEQ ID NO: 500121 - protein, 382 aa, unidentified
MTTDLMGQPVACGHDAKIFVSLELSKSRWGIVLFRPSRDKFSHRTAGGGDAGSLISFLHEQKRLEEARLGRPVRVISCYEAGRDGFWLDRALRAAGIENHVFDPASLLVSRRAKQVKTDRIDGEGLLRTLMALDRGEPKVVSVVRVPSVAAEDERRLTRERERLVRERTQHRNRITALLFVQGVRGILLNRPDWTAKLGHLRTGDGRPLPPHLMAELRREGARLELADSQIAAVEAEMATAAKAQAPQAVVNQLRQLCAVGPASSAVLAGEVFSHDFADRRAVAAFVGLAPVPWASGQVARSQGIAKTGSGRARAAMLELAWGWLRFQPESTLSHWFQARVGTTKGRIRRIAIVALARKLIVALWRYVTQGVVPEGAKLRSI

SEQ ID NO: 500122 - protein, 399 aa, unidentified
MLHDHPCVGPTAIRTQFGAIFVSLELSRSKWVLTSLSPGNGEKMSQYSLTAGDIGGLLVRFADLKRKAKERTGSDYPIITIHEAGLDGFWVHRVLQNEGIESHVVDAASIATSRRRRRAKTDKIDGEALLRALLAFKRGEPRVCAMVVAPSPEAEDRRRICRERQTLIEERIIHVNRIKGLLFAQGISDYAPLRRDRRKRLEGLSTGDGRPLPVHLKAQISRELDRLELLIDQTRSVEAEQEALLAAESKAGIEKVGPEKAGPEEEPRNAVAMLLAVKGIGEHSAAILWSEGLCRQFSNRRQVAAYAGLAATPWRSGAVIHEQGLSKAGNPRLRTLMVQLAWLWLRHQPQSALACWFRARGERGRKGSIVALARKLLVALWKYVAHGVVIEGAAMKPAA

SEQ ID NO: 500123 - protein, 425 aa, unidentified
MNYKQNEKINQVKESTLVVGIDIGSTTQYARAFDWRGIELGKVFTFSNSREGFEAFKAWMQHLQDKYRKSDVIVGIEPTGHYWFDLGAYLEDEGILLVMVNPYAVKQTKELDDNSQSKNDRKDPKVIAKLVTEGRYSAPYTPDGVYADLRIMVANRKRLIREMTQIKNRFARWFAIYFPEYTDVFGDYEAQSSMLLLKKVCTPEAIVELGAEKINQIWRDAKLRAVGMKRAMTLCETAKRSIGLKKGSSAARYEMKLLLEDYEYKKAQLDAVMEEIEKLCRKIPESEQMLAIKGIGVITVAGFLAEVGDVRRFESPRQIQKLAGLSLRENSSGKHKGQTTISKRGRSKLRAVLFNAAIPLIAKNPEFKSLHEYYTTRANNPLKKKQSVIAISCKLIRVFYAILAKGVTYDAQKLISDIHRQPQVA

SEQ ID NO: 500124 - protein, 343 aa, unidentified
MQITTIGLDLAKHWFQVHGVDANGRVVVRRRLWRSGVIAYFRSLEPCLVGMEACATAHYWARELMALGHTVKLMPPAYVKAYVKRNKNDAADAEAICEAVTRPSMRFVPIKEAEQQAVLMLHRARSLLVRQRTMLVNALRAHLAEFGIVAPQGRRHVEILTKTIAHQQAPLPELARSILQTIVDQLNGTMARIREIEGRLTKWHRQSRVSRLLATVPGVGIMGASAIAATVTDPSLFRSGREFAAWLGMTPRQNSSGGKERLGRTSKRGDKYIRSLLTAGAVAVLRHARNRPTRDGEWVRALLARKPTKLAAVALANKTARIVWAVMMRADGYQPREVFRQPA

SEQ ID NO: 500125 - protein, 341 aa, unidentified
MQAITVGLDIAKSVFQVHGVDADGQVVIRRQLKRRYVLAFFEKLAPCLIGIEACASSHHWSRQLRALGHTVRLMPPTYVKPYVKRQKNDATDAEAICEAVGRANMRFVPTKTPEQQSGLVLHRTRHLFIRQQTSVINAIRAHCAEFGIVAPVGRRGVEELLRVIANEKRVPELARACLLALGAQLRRIKEQILEFDRMITAWHRGCETSRRLDEIPGVGPALATAVVASIADPRAFRSGRDFSAWIGLVPKQSSSGGKPKLGSISKQGDRYLRGLFTAGALAVIRYAKIRGTGHRPWLTALLARRPIKVAAIALANKIARMVWAMMARGERYREPVALVAY

SEQ ID NO: 500126 - protein, 373 aa, unidentified
MRDNSEAFVGLDTSKLHHSVAIADSGRTGEVRFYGEIENTPAATAKLVRKLAAKYERLTFCYEAGPTGYGLHRQIKNLGHESVVVAPSLVPKRPGDKVKTNRRDAITLARLLRANELTAVWVPDERHEAMRDLTRARETAMLDLRSKRQQVSALLLRQGRSYPESKKTWTKAHMSWLASQKFDYPEQRLVFEEMMLAVRQALERLERMEQAIRAAVPDWSLAEVVTALMAMRGLDVISAATLLAEIGDLSRFQTPQQLMAYLGLVPSEESTGNTIKRGPITKAGNRRARRMLVECSWSYQHPPRVGSLKQHKVDAAPPAVREIAWKAQCRLYRRYRALIRRGKLKTVAITAVARELAGFIWAVNREIATAARK

SEQ ID NO: 500127 - protein, 360 aa, unidentified
MSFNGTSVGLDVHALSVVAHAFDEETGRVERARLCPDHGEILDWLHQLRGPVRVVYEAGPTGFGLARALADAEIDCVVAAPSKLIRPSGDRVKTDARDAAHLARLLRLGEITAVTVPEADVEAVRDLIRAREDARADLMRVRHRLSKLLLRQGRVYSGGKAWTGVHEIWLRRQRFEDSHTKAAFDHHVDAVLTATAARDRLDEQIIDVAASPRWADLVDRLGCLRGISALSGLALTVEIGDWTRFTGSSIGAYVGLVPTEYSSGATRVQGSITKAGNAHVRRLLIESAWHHRAAYRNPGPTMRARWAKVDPALKARGHAGNRRLHQQWCRFNERKKPHVVANVAVARQLAGWCWSLATLT

SEQ ID NO: 500128 - protein, 346 aa, unidentified
MLYVGLDLSRKRLDWQALEREGGRVGIGAVPPDRDGLAKLVQRLGDAGDRVLAVIESMSGARFVHDELELAGWDVRIADAAKARGIAPLACKTDTIDTWVLAELARLDLVPEIWLPDATIRAERERARFRLHLVKHRSSLKNRVHAILFQHGVPNPSSDLFGAGGRRLLERLQLPEPWASTLAASLALIDTLAEQIDRCQRELRSLGADHRYIPLLLTCPGIGWILAFTIASEIGDIHRFPTPRKLTGYTGLCPRVEQSGGRDRRGPLPKNGPNYLRWALVEATHTALRHPLYSPIRERIHARYGQKRGTKIAAIDVARRLSEAIWHMLTTNQPFAPAGAPASLAA

SEQ ID NO: 500129 - protein, 316 aa, unidentified
MVTGITAYKRRSQMNNTTVYVGMDVHKESFTLCAYTLEKEKGSYSRRTPADYKEVLKYLEFLRTVYGNDTIFVCGYEAGCLGYTLYHQLTDHHVDCVILAPTTMLEQRGKKRIKTDKRDAEIIGKCLAQHNYSPVHVPTASDEEVKEFLRMRDDHKLALKKVKQQILAFCLRHNYRFDGNSHWTAAHINWIKSLTPEALYKEILDEYLLTYTILSDKLERLDKRIEELAAKAEYKEAVKKLCCFIGVKTHTALSVIVEVGDFKRFASAEKFASYIGLVPGEDSSGDGQTRLGITKAGNRHVRMLLTEASQDRKSVV

SEQ ID NO: 500130 - protein, 426 aa, unidentified
MWDAKRRVLKIKSLKHGIIQDKRGNVMRAVFGIDVSKTSSEVAILVNGEKVHGYSILNDAIGFNRLLGDLKTVHNPEIIFEATGVYSRCLQAFLEECGYAYTRLNPLEAKKQLDSLRVRKTDKIDAEKLAKSQLVHNRKPTYVQEEVYQHLRDLSRFYQNMTEDLVRAKNRLHKVLQVTFPELENLLSTPTGEQYWNLVMAFPCKEFVLSLSQSDLYEIIRQSTSKRISEKRIAYLTDKLIKLAKQSFCAVKKNSPMLEEVRYYAQELLRLSERRQVVLNDMVTLAQPLPEYDILRSIPGIAETTATSIIGELGDIRRFQSSNQINAFIGIDLRHYESGKFLAKEHITKRGNPYARKILFKCIHNIASASHTNPCHIADFYEKRKRLSTIASTKPHAIASIHRLIRTMYYLITHNKLYDYSLTQNR

SEQ ID NO: 500131 - protein, 359 aa, unidentified
MQTQNTKTAIDFTGQNIYVGIDTHYKTWMVSIYSDEFELKTFGQEPDVDRLENYLLKHYPNANLKLAYESGFCGFWIQRSFAKKGIHCNVAHAADVPGSNKELIRKTDKVDSRKIAKGLRNNELNCIFIPDEQLESDRQLLRSRTKIVRDTTSVKNRIKAFLKFKGINIPGDYKSNKWSKKFISWLQSIEHNSVSSKAAFSSYVDELIFLSEKQKQLNQTIESLAKSDPYSGDLHLLRTVPAIGLLSGMTILTELGDISRFQKQDHLYSYCGLTPDCHSSGNTERIGKVSRRGNIFIKTVLIECAWVAVRKDPALLLYYKQQLPKMDRNKAIIKVARKLLNRIRYVLKNKMEYQIGIVE

SEQ ID NO: 500132 - protein, 329 aa, unidentified
MKRIWFIGIDISKKTLDVVIYDKKKSKSSIHFKVTNEIKGFKEMIKTLKTEGISFSEAFVCLEYCGVYGIEIGLFLEGKIDFCFCSPLHIKRSLGLTRGKNDKLDAFKIARFSYLFKDELSSSIMPSETMLRLKSLMGERSRAVKAATIEKQVLKELSGQLTKKAITRIKRRLKALSEDVKAIENEVRELIISTPELEKSYNLLQSITGIALVNATMMILCTNNFEGITNARSFACYCGVAPFEYTSGTSIRGKTKVSHLANKKMKTDLTNAARSAVVHDPEMRIYYKRKRAEGKAYGTVMNAVKFKIITRVFAVIKSGTPFVKLRQAG

SEQ ID NO: 500133 - protein, 418 aa, unidentified
MFKIFRKNCCGLDVHKTWIYACIGITDANSRTEYFQARFSAFSKGLQELSHWLDKYNCKEVCMESAGKFWIPVFNILEKTCLVTLAHPKYTKPQKGNKTDRKDAKWICDLFMCDMIKPSFIPPPAIRHLRDLVRYRRKLTNMLTGEKNRAQNCLTVSNLKLDDVFADVFGKSARSITEYILAHPGEPFDVAQFVDRRCKSPLSEIQAAVDGAVSPEQAVKLRQCLDHIDQLRLLRQRLEQEILRICEPFADILQLLRTVPGLGNDPMTAIAVLSEIGGDMSVFPTAKNLCSWAGCCPRNDQSGAKVKSTRISRAGSYLKPLLVQVANALIHSRKHPEFAERYRRIKARRGHKKAIIAVCKMLLTAIWNILSKLVPYSPAGFLSTSHDLPPSKSLTVAQGLSLLRRRGFILTDDPLSAP

SEQ ID NO: 500134 - protein, 353 aa, unidentified
MSNYITIGMDLGNSKHTVCAIDGAGEVLWRREVANTPEALKPFFEENAGATVAMETGLCCRWISALAKRCGCEVLVGNARKLAPIWQSRQKSDENDAFMIAKLARFDRSLFHPVSLRDDERHEMVQILELREVAVSQRTQAVNSVRGLCKAMGVFIPDCDASRFHKVAKDAIPRDLSWKFMPMLRQLKGTEETIRRYDAMLKRYASDHFGEEVALASTIPGIGPVTSCAFVALVGDAKRFGKARDAGAYFGLTPARDQSGDRDAPKRVTKAGSKMMRRLLVTAANYILRKSSPDTAIKRHGMTICARGGKVAKRKAKVAVARKLATVMLAMLRSGRPYEDRLAANVPAKPDAA

SEQ ID NO: 500135 - protein, 409 aa, unidentified
MEVVYPRCCGIDVHKRSVTACCLTPGPGGRPTAEVRTFETMTDGLLALGDWLERERITHVAMESTGVYWKPLWNLLEGRFALLLVNAQHVKAVPGRKTDVGDAEWLASLLRHGLLRGSFVPDRPLRELRELTRYRSSLVHARTAEVNRLQKTLEGANVKLASVVSDVTGVSARAMLAELAAGQEDAAALAMLARGQLRHKTAELERALTGRMAAHQRFMLAQHLGLIDALDAQIARVGEEIAQRLAPFEAELAILDSIPGIGRWTAQVILAEIGPDMGRFPTPGHLSSWAAMCPGSDESAGKRRSGKTRKGSPALRVALTEAAYAAGRTNDTYLGERYRRLIARRGKKKAAVAVGRTILEMAHTLLSTGQFYDDRAARRLAARPAPTEEERLIRRLEKLGHRVILEPAA

SEQ ID NO: 500136 - protein, 319 aa, unidentified
MDAAGNLFVGIDVAKDSLDAYVLPEGRRGTTTNDRQGFRELLVLLPPAGECLVVVEATGGYQRALVAELIAAGHQVAVVNPRQVRDFARGLNLLAKTDRLDAQVIARFGQQVQPRPAQKIPEKQDRLEQLVVRRRQLIELRTAEKCRLETASTKVVVKSVRSMIEQLDKFIRQIEKELSELIESDDQLQCRAAALQTAPGVGAITAATLVAELPELGRLNRQEISALVGVAPFNRDSGKFHGRRAIWGGRAAVRSALYMATLTARRFNPVIRDFAQRLEAAGKPFKVVMVACMRKLLVILNTILKNNSVWNPHFNLNRG

SEQ ID NO: 500137 - protein, 346 aa, unidentified
MTIVESTRLVTGGVDTHADVHVAAAVDTNGGVLGVESFATTPGGYLELHHWLAEFGTVDRVGVEGTGAYGAGLARSLRGQGVVVIEVDRPNRQERRRNGKSDELDAIEAARAALSGRASGIAKSADGDVEAIRALLVARRSGRNVRIKYLNQIRHLVFTAPDELRERLRDVPTDQLARTAAALRPAAGGDTVVHATKLAIATLGRRVVALETDGKRLDDVLDTFVRRTAPSLLEIYGVGTHTAAILLVAAGDNPHRLKNEASFAHLCGVAPLRASSGKVDRHRLNPGGNRQANHALWRIVFTRMAGDERTRKYVARRLADGRSTREIMRALKRYVARELYPHLIAG

SEQ ID NO: 500138 - protein, 377 aa, unidentified
MEKDSRFVGLDVHAETIAVAVAESGGEVRSLGTIPNTPEAVRRLAKKLGPPETLRVCYEAGPTGYVLYRQLTALGVPCAVIAPTLVPVKAGDRVKTDRRDAEKLARSYRSGDLTPVWVPDPGHEALRDLVRAREAAKKDQLRARHRLGKFLLRQGRRAPTGSKAWGVKHRAWLQTIRFAHAAQDATLLDYLTEIDHAADRIVRLERAIATAAAVAPAPVRAVIAGLQALRGIAKLSAVSIVTEVGALSRFAKPRQLMGYSGAVASEHSSGPHLRRGGITKTGNAHLRRIVIEAAWAYRHRPAIGGTLRTRQQGLSEEVKALAWKAQHRLHGRYTRLLAKGKAPTQVVTAIARELLGFIWAIGVHIEQHTAGGAPAAA

SEQ ID NO: 500139 - protein, 341 aa, unidentified
METQRHIGIDLHRNQFTCCVRLENGRNYLSEWKLEDLPRFVKKLRASDEIAVEVTGNTRLFRDAVAPHVARVVAVDPNQFKVISHSVKKTDPNDARNLALYLEKDLLPEVRMKDKTQAQLASLTQTRDTLVKLRTSLKNKINNILSAHGINLEREALSSEKKLNEVLAMRFDPMVKIELEVLVEEIRSLNQRIAKLDKTIADEGSKLEGHKNLTSIKGIGPLSGSILLSVTGDIDDFADEGKLAAYFGIVPRIANSNETERSGRITKRGSKLGRTTLVQCALIAQRYSPYLKRYYEKIKARRGTGKGIIALARKLLGIIYRTLKNNWVFEDFPNFVLAEAA

SEQ ID NO: 500140 - protein, 343 aa, unidentified
MKVIVKQVVAIDVAQKELVVALGRMYNDWTPEIYAHKTFANTPKGFEALLLWVNKLATPDLAIRYVMEATGVYHESLAYFLDEKGDEVSIVLPNKISNYFKTLQVRTITDKTSSEAIALFGLERKLEIWKRPAKLFKTLRQLTRERDQIIQERTMIKNHLHAEEAEAEPNKSSIKRINKRIDLLNKQLQEITKEISQCLTQDEKVKASVSLISSITGIGRLTAVTVLAETNGFELVRNKRQLSCYAGFDVKEKQSGTSVHSKARISKKGNKYLRKALHMPALTAIRHDDRFKAIFVRLVARHGIKMKAAVAIQRKLLEMVYTIYKSGKKYDKDYLKEEVKVAV

SEQ ID NO: 500141 - protein, 346 aa, unidentified
MEQYVGLDVSLKMTAICIVDRTGKIEREGMVASDPAAIAAFVRLHAPHVARIGLETGATSTWMWTELNKMGLPVICIDARHAKAALKMQINKSDRNDAVGIARIMQCGWYKEVRVKGLDSHAIKAVLVSRALLVKIKRDLENQIRGLLKNLGLVIGRAKMNMFVVRAAELIEDRPELAAAVEPLLKAREAVEKQIADLDRKVMRLARNDVQVRRFMTAPGIGPITALCYLATIDDPTRFKRSRSVGAYVGLTSRRYASGEVDWTGRISKCGDPMLRSYLYEAAGVLLTRVAKWSVLKAWGMRVAKRSGLRKAKVAVARKLAVILHRMWVDGTEFKWSSKEVATQPA

SEQ ID NO: 500142 - protein, 377 aa, unidentified
MQETMIQSVKADKLFIGMDLHKNTSTFVVKDKDGKLINSAKVLTDKNDVTRYINSIKRNSDGRDLSLAVEPVSQWYYYADLIENLGVDVHLAHPLEVKAIAHAHIKTDKIDAGVLADLLRTNFLPEAYFSPAEVRSWKEQCRFRASIINLRSQVKNKIHAILFKHSLKHNFSDLFGKGGRRWLASLELKEPFQGNLNKYLILIDQLTEQVVQAEEIITNTVINCPQAKLLISIPGISYCSALTIMAEIGEIDRFISVKHLQSYAGLIPSTYNSGDKQIHGRITKRGSKWLRWIMIESAYHQMNCKRIPGFGAYYNGIKIRKGTKTAAVATARKLLAVVWRLLKDNRPYEVVDPRCWKSRPIASKISSVSAVVSTMAG

SEQ ID NO: 500143 - protein, 363 aa, unidentified
MNQYIWIGLDVHVESITAAILEGDRSEAEVIKLSGDLMKVRRLFRRLSKKGTIRACYEASGAGFVLHRVLTRDGFHCEVIAPSLIPRKPGDRRKTDRIDAVMLARLYRTGHLTPIHIPTVDQEALRRLIRLRLTYQEQCKSTKRRVHGILLNGGLVYRDGRSLWTKKHRAWLAKLRQQLQGPLHTALVTELNHLEYLEMQRNSLDAEIERYAQTTPFRAGVEALCCLRGIKTLTAMTLLSEIGDVRRFRSPRALMAYFGLVPSERSSGERERRGPITKAGNAQARRILVEAAWNNRHRAGANLILNRRRQGQPPQIVAIAIKAQHRLSNKFYKLWQRKHPHVAITAVARELCGFVWAVLNETP

SEQ ID NO: 500144 - protein, 426 aa, unidentified
MRFIGLDVHKDFCEVAVVEGDACWSGPRVRSTPEDLEVFAQSLGPKDQVVLEATGGALAIARILEPHVGRVLMANPMAVRAIATAKAKTDRLDARTLAKLLAAGFVPGVWISDERTRLLRRLVSRHAHLVRQRTRAKNEVHAVLQRTLAGRPPVSDLFGKRGRAWLGAQDLPADERQTVEASLRHIDFLDGELRLVDRTMAIQVLSWPEVRWIMTIPGMGAVAAAGVMAAMGDVRRFPTSRHLVGYLGLDARVRQSGSGPARHGRISKQGSAEARHLLVEAAWAAMRTPGPLRAFGERIRARRGANIATVAVARKLAVLCWHVLTREEDYAFGRPSLVREKIRRLELAAGAPNRNGYRNPVRVFATPAQRRLEREVGDQAEKAYRRFVKDFRSSGKKGAGATTGARISAARKGQAARQEQAPDPAL

SEQ ID NO: 500145 - protein, 317 aa, unidentified
MNTKNNQNEINVGVDTGKTQLDIYIRPLDIYFTVENNQSGIKHAIQILKKHPVTRVTIEATGRLELPFIIACAEANIPFVVANPVNIKRFAGAIGQKAKTDKLDAQLIAHFGEAIKPPLSSLKPEQMRLMSDLLSRRRQLMDMQTMEKNRSQIMPKTLSSLIKPILTALKNQIDKVDLKLQKLIEECDEYKAKNAIIQSVPGVGNVVAFNLLSDMPELGYVNNKEATSLVGVAPFNRESGVYQGKRMIRGGRPKIRTAMYMAMMSAIQCNSKFKDLYQRMVKAGKPKKVAIIACIRKLVVIINSMVRDGVMWDPKMV

SEQ ID NO: 500146 - protein, 382 aa, unidentified
MIRWAAVPPKEVCMLFVGIDLHTNCFTCCYLDKSGGKRLETFDLKAEGLQRFFATLTKDTHVLVEATINTFAFVERFQDLVAQVVIANTHKLKIISFTDKKTDKVDAEKLARVIKTQVLSGEQQASPVMIPSHLVQNLRSLFSTYQLLRKQIVSTKKRIHSLFAQNLMPFTKKYIFGKNSRALLREIAMEPTLSYQINFLFDELEHLEWKTDQFVEKILVTAHPFIHEIEILTSMSGISTFTAAAIMADIETVARFPNAKAFTSYLRSTPRIESSNTKTIIKSTNKSGRKLSIVLLSQSLNHFRDADPFLKAWNDRLCEFKRKGVVRMGLCRKAFTQIYQMLKKDEPHRYSNTILHNKKMNEYRMFLRSYGISGLFEQKKGA

SEQ ID NO: 500147 - protein, 429 aa, unidentified
MNYNTQNAKIASITEKTLIVGIDVGSETHYARAFNWRNYEYSKKPFAFSNDEAGFSSFKEWIDDIAEKHGMVAVIPGMEPTGHYWLNLGAYLQEQGMKPVHVNPHHVKKSKELDDNNPSKNDRKDPKTIAGLVNEGRFSYPYIPTGIYAEIRNLSNLRIQTQEEITRIKNRIARWFSIYFPEIKDIYRNPDAVSGLMVIKQAPLPCDIKELGVDGVNKIWRDARLKGAGIKRATTLVTAAEHSIGNTEAPRSARKEIRNLLNDYEIYKNRMDELMEEIEKTLSEIPYIDKLMEINGIGIKTVSCFIAEVGDIGRFDNPKQVQKLAGYAIVADSSGKHNGESRISHRGRKRLRYALYEAAISVIGKNKEFKEIHSYYRTREKNPLKKMQSVIAVACKLIRIFYTILTKGVDYDGQKMLNDIVRPEIEPAA

SEQ ID NO: 500148 - protein, 337 aa, unidentified
MKYCGIDLHSNNSVVIVSDEEDRIVFSKRLPNDLGQIGAVLWPHRGELAGVVVESTYNWYWLVDGLVDAGYRLHLAHPSAIKKYEGLKYSGDFADARYLAQLLRLGLLAEGYIYPREERGARDLARKRMQLVRWRTAQILSIENTMTRQSGTTLKGEAVKRLTAEQVDAFGFAPDVTLAMEANRAVSQALGQQIEAIEKRLKESVGLRPDYHLLKTAPGIGRILATTIMLETGSIGRFAQVGNFSSYCRCVDSLRESNGKKKGEGNTRNGNKYLAWAFVEAANFAIRYCPEARSFYERKKRKANRVLAIKALAHKLARASYHMLRDQKPFDVGRCFG

SEQ ID NO: 500149 - protein, 414 aa, unidentified
MSLPAAQFFVGLDWAADSHAVCVIDTEGRPLARFSVEHSADGIALLIRRLAKFGDPLDLPVGIERPDGRLVDLLLEAGHPVVPVSPNAIKTWREGEVLSGAKSDAADAAVIAEYLRLRQHRLTAATPYSGETKAVRTVVRTRDDLVAMRVAAVNQLAGLLDAHWPGAKAIFADLESPIALAFLTRYPTPTAAMHLGEKRIAGFCKAHGYSGRRSGPELLTRLRSAPSGTTDPHLTTAVKDAVLAMVGVIGAVNAAIKTLDASVAARLGEHPDGEIFTSLPRSGQINAAQMLAEWGDCRQAYERPDSVAALAGCTPVTQASGRHKSVHFRWACNKRFRRAMTTFADNSRHTSPWAAAIYNQARKTGKDHPHAVRILARAWIRVIWRCWHNNTPYEPAIHGAARAIRQATSPNLVA

SEQ ID NO: 500150 - protein, 467 aa, unidentified
MARKSKNMNSKNRRRVPQSLNVMQPHAAGIDLGSVEHWVAAPPLEDGTPNVEHFGTTTPELCRLAEWLKEQRVVTVAMESTGVYWIPIYEILESRGFEVLLVNARQIANVPGRKTDIIDCQWIQILHACGLLRGSFRPSDEICRLRALIRERNTMVEQRSDWIRRMQKCLDQMNVCVHHAVTDITGVTGMAMIRSIVAGERDPRVLARLRDGRCHKSGAQIAKELTGNWRPEHLFNLRQALKMYDQLCSVIEEYDSEILSYITAIQPEDSGDKSAPPPVSKVKAKNLAKRGHEPMRQALYRLSGFDLTTIDGIGADTASVIISELGLDFTAFPNESHFVSYLRLAPNLSISAGKKVPRKSKATTCTRIATALRMAALTLRNSRSALGALYRRVSRRKGASVAVFATARKLAQLVYRLICYGQAYVDVGQDAYEARFNHRRLKIYTKILKNMGFDVQPLTTQEVAPVA

SEQ ID NO: 500151 - protein, 372 aa, unidentified
MEKFSKYVGLDVHKDTIAVAIAAEDSEVRFFGEIANNPTAIIKLVKLLSKEGELVSFCYEAGGCGYKIYRQLTAMGKDCIVVAPSLIPRKAGERVKTDRRDSINLARLYRAGELTPVWVPEDEQEALRDLTRAREDMKHFERQAKQRLLAFLLRHGWVYSGKARWTHAHYRWMETVKFDRQAQQIVFQEYKDIVNSFGTRVEEIENQMQIHAKESLSWPVIESLMSLRGVNFITAFTLIAEIGDLQRFASAPKLMAYLGLVPSERSSGNSVRRGGITKTGNSHVRRVLIEAAWTYRFAARRTPIIQRRMDKVPAAIQEISWSAQKRLCQRYKTLQTNGKLKVQVCTAVARELTGFIWAIGQATPMMKNTPTN

SEQ ID NO: 500152 - protein, 329 aa, unidentified
MTRLADTIDGVIGVDTHRDTLAAAATDRVGGTLAQTFAAADLAGYQQLLGFARALLPGRRCWAIEGTGSYGAGLTAFLQTRGERVVEVGRPKRPPRRTGARSDALDAVRAAREALAHDHPLAPRRRGDREALRVLLATRHGACAAKVSATNQLKALIVGAPEELRAELRGLATKRQITRWATLRDRPSRSLERRMTVRALRSTAQRIQLLAAEAAELRAELEQLVAAVAPWLLELPGVGPISAAQVLVSWSYAGRLRSEAAFAALAGANPIPASSGQVTRHRLNRSGDRQLNRACTRSCWLGCAMTQRLAPTPPAAAARARAPGTSGGA

SEQ ID NO: 500153 - protein, 347 aa, unidentified
MRFYTNQHKFYCGIDLHARTMYLCILNQEGKIVLHRDIKTSPDIFLKTIAPYREDIVVAVECIFTWYWMADLCSRENISFILGHALYMKAIHGGKAKNDKLDAYKIASLLRGGMMPMAYVYPSDMRATRDLLRRRMHLVRKRAELLAHVQNTNHQYNLPEIGKNIGKKGNRAGLAQRFTDASVRKSIELDLGLIDHYDQLLHRVEHEISLIAKIDDADSYFRLRSIPGIGRILGLIILYEIHDISRFPRVQDFVSYCRLVKCAKESAGKIVGSSGKKIGNVHLKWAFSEAAVLFLRRNPEAVKYRAKLERKHGKAKSLTILAHKLARAVYNILKKKEVFNPKVFFAK

SEQ ID NO: 500154 - protein, 429 aa, unidentified
MQNESTPDARGPVFCGVDTHADSHWLCVLDWRGRKVLSRQFPADAAGYEALAGAIAAAGEPACIAMEGTSSYGAGLTRHLASLGMPVREALSPARMQRRRPGQGKCDEADAERAARAAMSGSRLGTPKSQDGWVDGVRCMLAARSGAVKARTSAINTARSLLTTAPEGLRSRFRGMGGPRLMEELPSVRAEGALGAALGALADLWAAARDAALDMERAIEASLEENCPALLAMYGCGPVSAAKLAVAAGDNPGRLRSEASFAAICGACPIPASSGKTVRHRLNRGGDRQANSALHEIARQRVMRDPETAEYAERARGRGKSDREVMRCLKRYVAREAYRALMRPHEIRRPEDASELVAARRAAKVSQVRAASILGTSEKYISMLERGQRELKPIRRAYEAWVEAGLPLDWNRQAFEAERKMDSKKHLAK

SEQ ID NO: 500155 - protein, 361 aa, unidentified
MVVTVGIDVHKDTHCAVAVDAAGRQLGRDRTFRAIDAGHRQLLRWVLTEFGREVEFAVEDCRQFSNRLERSLLAAAQTVIRVPPKLVALTRQNTRTRGKSDPLDAVNIARAAVREPGLPRAEHPHASRDVKLLVDHREDLVGSGSAIQNRLRWLLHELDPRIDPEPRQLDSMRELDRVRDRVAALPVTTETGTVIRIALEQFGDIRQLTVRARELEKELVLLVQQAPQLLDLPGCGVLTAAKLVGETANPSRFRSEACFAMHAGVAPIPASSGRTQRHRLARGGNRQLNAALHRIAVTQARLDCPGRDFYQRRKTEHQDSTMEVLRVMKRKIARIVYQLLNTPTTTAAACQPVAARHRSNT

SEQ ID NO: 500156 - protein, 390 aa, unidentified
MFYLGIDIGKFHHAAALLTHEGKVIATVPSFSNTHAGFEQLLTLITYHLPPKEELRIGMEATGPYWIPLAWWLKTHGWPPVVMNPIKTSSLRNYGVRGSKTDNIDSVLIANALRFEGDKPQQVSPKHSEELCHLTRLRADMVKDRTRVALRVTSLLDRMFPELLCSFSKTLSPSCLALLSQAPTPTRVLALGEERLTALLYHASRGKLGVTRAREIINKAAVSIGVNSQALEEILPLLLEQIDLIGSQLTTLDHRISELYDQAGLYFTSIAGVGTLTAATILGEFGSVERFKQAQQMVAFAGVDPKLRDSGQHRGQVHISKRGSRYLRRALYLACRGVVRKDDYFNATYQRHRDNGKCYKEAIVAVMNRFIHVIYAIWRDNRPYYPLTPV

SEQ ID NO: 500157 - protein, 346 aa, unidentified
MGTDVFVGIDVSKDTLEVATTEPQGERMNFAQTEDGLSLMADFIQSFTPCLVVLEATGGLERAAVATLAARGLPVVVVNPRQVRDFAKSKGILAKTDKLDALVIAQFAQAIRPEVRPLKTAEAQELEAILSRRRQIVQMLTAEKNRLHSAPGWTRKDIRLHITWLEKRLEKIEKELSGMIRKSPVWRVKDELLRSFKGVGPVLSQSLLSDLPELGSLNRKKIAALVGVAPLNRDSGKFRGRRMVLGGRSQIRSVLYMATVAAIRSNPVIGVFHERLIKAGKAPKVAITACMRKLLTILNTMMKNQTPWRPLTQNMLDMQHSCLSVSNASSALSSKFPGVPGLPKCT

SEQ ID NO: 500158 - protein, 356 aa, unidentified
MTSNIKYIGLDVHKESISAAVMNSVGKVVMESVIETKASMILQFIDGLRGDLQVTFEEGTSAAWLYDLLKPHVTKLVVCDPRKNKSMREGNQNDKIDARRLAELLRLNHLTPVYHGEHGLRTLKELVRSYLTITKDLGRVMTRVKAIYRSWAIPCSGKQVYARLHRAEWLGKINEPGVRRRAEFYYQQLDALRGLRLEARRDLLAESKKHKAWKRLCGIPSIGPIRAAVLLGILQTPHRFRSKRPLWNYGGLAIEMHSSADHRSVDGQLERSRKNVLVRGLNRNCNHDLKNLFKGAAAVASSKPGPFQQFYTALVAKGMRPEMARLTLARKIATIVLIVWKKGVCFDAQHLKPQTA

SEQ ID NO: 500159 - protein, 369 aa, unidentified
MKKNSKNNKEKTRQRALQAKSRKMKLTVGIDLGDEWSHCCFLGEEGEIVEECRVKTTREAVKSRFGELKLAVIALEVGTHSRWVSQMLSEFGHEVIVANARELRAITGSDRKSDRVDAEKLARYARVDRRILRPIKHRGEEAQVDLVVIRARAVLVKTRTQLVNSVRGVVKSFGYRMPNCSTERFVKLNNEVPEKLREHLAGLMEVLEHVQKQIEEYDQRVEKLAKEKYPETTVLRQIWGVGEITSVSYVLTIEDKGRFEKSRDVGPYLGLRPRRSQSSESDPELGITKAGDCFLRSLLVECAQRILSKKGPDTALKQFGLRIEARGKKKAKKRAIVAVARKLAVLLHKLWVTGEVYEPFPETTVRKAA

SEQ ID NO: 500160 - protein, 351 aa, unidentified
MKYYTSTTEFNCGIDLHARQMYACVMDRQGKKLMHTNIAGNDWDYFLKRVEPYRDDLTVVCECTFNWYWLADACFEADIPFVLAHALYLKHIHGGKNKNDRIDSEKLAHLLRANLIPPSYVYPSARRPVRGLLRQRMSYVWERATLKTHLSMNQTAEGLVPAHKSDHNRDTWEERILEQYTNPLHKFAASCDMNMIRAYDAQIEKLEAEIIRHAKKDLGRDYHLLLSVPGIGRVLAMTLLFEIDTIGRFPTVKDFLSYCRLVKGSVASAGKVKGLTGGKMGNAYLRWAFGEAAVIAKRNHVMLTPYAEKLVSKHGKFKGNAILADKLARAVYFMLQKGTAFDAERVIATSI

SEQ ID NO: 500161 - protein, 385 aa, unidentified
MSQLNDLSRSLTSLEQDNAIIAVIEMSQSSWLVAGIVPGIERHPLKKLEPNEAELLRLLMRWRAEATKMGCTITRIAVAYEAGRDGFWLARWLRAHDIETYVIHPTSVAVSREHRRAKTDRLDTGLLKRVFIGWLRGEPDHCHMVKIPTLAEEDAKRPNREREGLVRERTRIVNRMKSCLARFGVRSFKPTLRKAPERLATLVTPEGVPLPANTLLEVRRDMARLRFIMDQIKEVEEARGQRLGQAPQEKSHAMVRLLARVIGVGIETADMLVHEILSRSLRDRRAVARYAGLTGAPDESGSRRQEKGLAKAGNARVRRGMIQLAWRFLLFQKDSALAQWYRTRTESAGKKRKTMIVALARKLLIALWRLVTIGEVPTGVVLRAA

SEQ ID NO: 500162 - protein, 456 aa, unidentified
MKKEKAPKKKDALASLPVINPKVAGTDVGSTVHYVCVPTADGKSTDVHSFATTTPQLRRLIALLQSRGVTSMAMESTSVYWIPLYEMLEAAGIEPVLVNARQLHKVPGRKTDVADCQWIQRLHACGLLRGSFRPGDDIASVRSLTRQCANLVADQARAVAWMQKALDQMNVQVHRAVTDLAGTTGLAIVRAIVAGERDALKLAALRDPRCKKSVAQMTEYLEGTWKEEHLFNLEKALEQFDFFAAQIGAYEQRIRQKLEALVPEERRGKPAPIHPKAGPGNKKAADQPLRATLWRMSGCDLTLIDGIGIGAAEVILTEVGPNLEAFPTEDDFVSWMHLCPRTAISGGKPLAKKGKGTGANRLGGLLRLGARTLGKSKSALGAEFRRVARRKNGAIAIFALARKLAKLVYRMLRYGQTYVDIGEKAEEERHLARRLHSLANQAKEFGYQLIPRPVEG

SEQ ID NO: 500163 - protein, 427 aa, unidentified
MGKEDLSRINAFRQLKKEIRGSKDYLIIGIDIGKVPHHAFLGTATGRTLRRLVVENSASGFEHLLTMVQFFSDRDGLKKVVFGVEPTSVYHKPLAEYLIKCGHMVVLVSGVAVTRNRELLDGRWDKNDDKDSANVADLISQGKCLYYDYPSILLRDLRDLLSLKRRLKKQEHGTKVRIRNHLLAQYFPEFDRYFGKGGSEGLSIVKWCLKPSIIAGMEYDEFVQLVAPRVRTIGQANRLRAIWDVASESIGCSAGEALGFEAKLMVEDLQQVKESIRAVDDNIKDICFGFPEYSYLLTIPGFGPDVSSKVLGAIGDPFRFDSGKQVLKLAGYDLNASRSGTTSDSAVPAISKRGKAYLRYALYQAAFIASTSNRYFIIYYTNKLRGREREKGIKTKMKVKLAAKMLVIAWTLMKKKEPFDPEFLNID

SEQ ID NO: 500164 - protein, 358 aa, unidentified
MAGKVTETAVVGGVDTHKDLHVAAVVDQNNKVLGTQFFSTTRQGYRQMLAWMTSFGALKRIGVECTGTYGSGLLRYLQNAGLEVLEVTAPDRMERCKRGKSDTIDSECAAHAAFSGIRTVTPKTRNGMIESLRVLKTCRKTAISARRVALQIIHSNIISAPDELREQLRNMTRMQLIRTLGSWRTDASEYRNVTNVYRISLKSLARRYLELHDEIADLDVMIVAIVDELAPELIKRNAIGYESASQLLITAGDNPQRLRSESGFAALCGVSPVPVSSGKMNRYRLNRGGDRAANSALHIIAIGRLRTDDKTKEYVARRVAEGHTKMEAIRCLKRYISREVYTLLRNQNRQINSIPITA

SEQ ID NO: 500165 - protein, 369 aa, unidentified
MDDITFVGLDVHKATVCIAVAEGTRGGEVRQLGVFENRPEILRKVVSRLSKGGRRLSFCYEAGPCGYGLHRLLTGYGHECVVVAPSLIPMKAGDRVKTDRRDALILAKLHRAGELTAIWIPDAAHEAMRDLVRARATAVRVLVKARQHLQGFLLRHERIYRGARAWTLAYRRWLSTVRFDHPAQQIVLQDYIHAVQEAETRRDRLTQQIEELLPNWSMASVVAALQSMRGVALVVAVTVVAEVGDFRRFVNPRQLMAYLGLVPSEHSSGSSVRRGGITKAGNALARRVLIEGAWTYRMSARVSRKLHDRLEGLPAAVRDIAWKAQLRLCARYRRLAATGRPKVVVTTAIAREMVGFIWAIARVAQPALV

SEQ ID NO: 500166 - protein, 346 aa, unidentified
MKKIFIGIDFSKEKFDATLIKAEGLKECAPSMHEVFDNKTSGFRRLVRWVKAQSEGLPIDTWIFCGENTGAYSIGLSNYLYASGYDMCLENAYKIKHSAGILRVKNDKADSKAIAEYAMRNYDKVRLHKPQSSSLTCLREVFLYRHSLVRQKVALTVRRDEKRLTQEKSDARAFMSFTSKHLITEINKAIYKCDQKIKETIAADDELREIFDIITSMPGIGVQNATCLMVYTDNFQKFDMDSRKIACYYGIAPFGRQSGTSVNSRPKVSPFANRMIKSLLSQAALAAIKSDINVYNYYQRLIERGKHPLLVHNNIKNKMLHALVAMVRDRIKYNPDYVYQTNKSIA

SEQ ID NO: 500167 - protein, 372 aa, unidentified
MSTNAITFVGMDAHQKSINVAMLLPGAKQPVEWQVANEPAAIRRLAKKLAREAPGEVRCCYEAGPCGYALQRELEGGDGIVCEVVAPSLIPVKPGERIKTDRRDARKLAELQRADLLTVVHPPTVDEESVRDLSRCREDAQEDLTRARHRMSKFLLRRGLRFTVSKKAWGKLHRQWLRGLTFEHAADPAVFGDYLLAIEQLEGRVLTLAAQLTEAAQRDPYREPVAWLRCFRGIDTVTAMTLVAELHDFRRFRTARELMAYLGLVPSEYSSGESRHRGNITKAGNRHARRVLVEAAWHYRHRSKSGEALRRRRAGQPARVIALADRAQERLCRRFRYLVERGKPTPKVVVAIARELVGFLWGALQVPAEVRS

SEQ ID NO: 500168 - protein, 308 aa, unidentified
MNHKVGKDNTVARFIGIDVSKQWLDVASLPERETRRFTNDSAGQEQLSTWLMSLAPELIVMEATGGFETRVATTLAAQGLALAVVNPRQVRDFARAFGVLAKTDRIDASVLAAFAEKVHPPVRPLPDEDRRELIDLVDRRRQLVTMRAEEKTRLSQATASARQDIKEHIDWLDERLRRLDIDLTAKLRTSSLWKAKEEILISVPGVGRVTVFTLLARLPELGALNRRAIAALTGVAPFARDSGQHRGHRMIWGGRADVRSVLYMAAVSAARINPVIRSFYLRLKQAGKPSKVALTACMRKLLTILNTM

SEQ ID NO: 500169 - protein, 373 aa, unidentified
MNTIYIGVDFHARQQTICYLKTETGELVTCELKHQDKQALRAFYAQFRGQVIVGLEASGYSPWFERLLEELDCEVWLGHATEIRRRARWRQKNDRRDAELILDLMLHDEFPRLHRPAVQSREVLRMLRYRQKLIKIRTMSKNSLQALALQSGLAKGSRLFTKDGQQQLGTAEMSSVMQWQREHWLQLLEPLNQQLLETMAWFKAQSKGDICISRLRTHPGIGLLTSLCLMHTLQPVSRFRNSRKVAAYAGFDPVERSSAERKCFLGISKAGSRVLRYLLVEAAHTAIRKDEDLKRFYKRLADRRGRPKAKVAAARKLLIRAYIMMRDEIDYAEFRHRAVAARLARRGQGPAGPEVLIGQPASAECRDQLTSQH

SEQ ID NO: 500170 - protein, 391 aa, unidentified
MVCVGIDVAKDKHDCCILDSDGTIRADCITIPNNMDGFKQLLQTIRDCTKKSDKIKVGLEATGHYSYNILGFLLDNDLAVYVMNPLHTNLYRKSLSLRKTKTDRVDARTIATMLLSDVDLKSYTDTAYHNEELKSLTRYRFDKVRERAKLKQSVSRLVTILFPELEKLVPSLHIASVYALLSEYPGAKQISEIHLTKLTNLLATASKGRYGKDKAIQIRDAARTSIGSVMPAKFLELKHTIKLIRELTSEIDEIEVSIQKIMDELNPPILSIPGVGIQSAAMILAEIGDFSNFESPDKVLAYAGCSPSTYQSGKLTNCYAHMEKRGSRYLRHALYNATKYVCYWNPVFAEYLAKKRAEGKHYNVALSHATKKLVRLIYALQKSGKAYLTAA

SEQ ID NO: 500171 - protein, 366 aa, unidentified
MKKISTVAKRGNEIFKEPKLTIGLDLGDRTSHYCILDEAGDVILEHNLPTTPKGINQVFNKISRSRIALETGTHSPWVSRQLTQLGHEVIVAHARNVRLIGESSRKDDQLDARTLARLARIDPELLGPVRHRSAKAQIHLTVIRARAALVSTRTALVNATRGLTKSYGERLRKCGTGQMSREIAKELSQELRDALEPLLKEIESLNDRIDEYDRRIEQIAKEVYPQVALLKQVKGVGTLIALTYVLTLDDPHRFRRSRDAGCFLGLRPGRRNSGMSEPQMHISKEGDGYLRTLMVQGAHYILGPFGQDSDLRRWGLKLAERGGKNAKKRAVVAVARKLAVLLHKLWVSGEVYEPLRNNRQVVSAAA

SEQ ID NO: 500172 - protein, 428 aa, unidentified
MGAMSENEVLGQEPEFAALVGIDWADQKHAWCLQAAGTTQRESGEVEHTPEAVEAWVGQLCQRFGNRPIAVAVEQVKGALVFMLSKYEPLHLFPVPPAMSANLREALYPSGAKDDPRDADLLVDLLLQHRDKLRRLSPDSEATRRVQNLVEERRHLVEEKTAQSNRLTNHLKIYFPQMLEWFDRLDTELVCALLEQWPTLEELQKVPPARLRTFFRKQRCHYPELVERRLIGIRQAMPAIRDRAVIEAKSAVVKVSAQLIRSLIRGVADLDRKIEEAAAAHPDFFIFESLPGAGAVLAPRLLAAFGSQRDRYANAEEVQSYSGIAPVTERSGKRKWVHFRWACPKFLRQSFHEWAGHSIAHSQWARSYYQQQRERGKAHHAAVRGLAFKWIRIVFRCWKDGVAYDESRYLAALAKRNSPLAAVAGTIL

SEQ ID NO: 500173 - protein, 350 aa, unidentified
MQVATIGIDLAKSIFQVHGVDTAGRVVVAKALRRGQVLAFFDKLRPCLVGMEACATAHHWARELARFGHTVRLMPPAYVKPYVRRGKNDAADAAAICEAVTRPSMRFVSVKTVEQQAALMIHRSRDLLMRQRTQLINALRGHLAELGLVTSQGREGVAALFGIVRAEVANTLPQPVRAALSPLIDQLEATGQQIAALDKAIHAQHRASQASRRLETIPGIGIIGATAIAATITDPAAFKSGRDLAAWIGLVPRQNSSGGKERLGGISKQGDRYVRKLLVIGAAAVLKRARQHPDKYPWLIALLARRPAKVAIVALANKMARIAWSVLVRSETYRVPAFVGSEAKGLAMGA

SEQ ID NO: 500174 - protein, 271 aa, unidentified
MTFRPHALHLKAELFVKSSRAHVRDDGFTRCNFHLKFFIMVYRGIDISKSSFVAAYPSTNGNPTKTFPNTTAGMRELIGTLAVAEHHCVMEATSNYGCCCTCYIRTVLPSVLPPPQKKKQIKHFSRMMMPVTKTDEKDAYMIAMYGEKMNPPIYKMPSQATIRILTTEGFTYFDNAKQLSRFIGICPTYQQSRTSVNIREHINRNDDERLRSLLYIAFWTALRYNSRECYIRLKANEKPFKVALIAVTNKLVRPVLTITTINSIYRWICPG

SEQ ID NO: 500175 - protein, 408 aa, unidentified
MKTLHNRCAGVDVHKTEAVVCLRFVTHGKVKREVRRFPTTTHGLLELAQWLESARCTHVAMEATGVYWKPVWHILDGRFALILANAAHVKTVPGRKSDVNDASWLADLLAHGLIRPSFVPPAAIQDLRDLTRTRKQLTREIAQHSQRIQAVLEEANVKLCSVITDILGASGRRMLKAMIAGEIHAHKLAALGSERLGCAPETLIDALTGHMREHHRFLLAQHLHTIEQLEKTIAAFDTRIEEKLMPFRDTVERLKEVPGLGSTATEVILAEIGLDTSLFPSAGHLLSWAGFVPRLDESAGKGRSTRIRKGAPWLKPVLVHAAWGAARKKNSYFQAQFLRLKARHGAKKAAIAVAASILTTVYHMLRDGTCYQDLGPEYFTRRNPAKAAARLANRIRNLGYHVEIRPAA

SEQ ID NO: 500176 - protein, 326 aa, unidentified
MQHILGIDVSKDKLDLILVNEQGKSHLVISNDLAGFKVLDKWLASHHVDRVLACMEATGQYGDEVAEHLYCKDHDVSVVNPARIKHYAQSKLHRNKTDKADADLIAEFCLKEKPILWEPDCPELKHLRALARRLTDLRANYHQENNRLKSGEKDVWVIQDLKAHIEYLKACIETTEAEIQNHIDQTPGLKTNQDLLITIPGIAKKSSAQLLAEIGEVRRFDDAPQLAAYAGLNPKGCSSGSSVHKKAHISKQGRSEIRTCLYMPAVVALRHNPVIRDLKGRLEESNHPKMSITGAAMRKLLHIVYGVLKNQIPFDPNYDRQFNFSA

SEQ ID NO: 500177 - protein, 375 aa, unidentified
MSAKLRFVGLDVHAETIAIAVAELDGEVRSLGTIPNRAESIRKMIKKLGPTERLRACYEAGPTGYVVYWQLAELGVPCEVVAPTLVPIKAGDRVKTDRRDAEKLARCYRSGDLTAVWIPDEGSEALRDLVRAREAAKQDQMRARHRLSKFLLRSGQRPPSGVRPWTRPYLIWVAQLRFAQIAQEATRQDYLHEVEHMRERVARLEQAISEAVRLASPALQQVINDLQALRGIGDISAVTIAAELGQVSRFDSARQLMGYCGAVPSEDSSGKRTRRGGITKTGNAHLRRIVVEAAWSYRRPPCIWYGLRRRQESISEEVKEIAWKAQHRLHKRYRTLGAAGKDHRKIVTAVARELLGFIWAIGTRAEAITRQQSAA

SEQ ID NO: 500178 - protein, 421 aa, unidentified
MEQARDEEQIVTHVAGLDIGKASLVCCARVPDDARPGKRLQEVRTYATMTRSLIGLAERLAVLGVTRVVMEATSDYWKPVFYLLEAHGFEVWLVNARDVKHLPGRPKTDKLDAVWLCKVAERQMIRPSFVPPSPIRMLRDLTRYRVDLVAEAGAERNRAEKLLEDAQIKLSVVVSDLFGVSGRLMMAALIGGQRDPRTLADLARSSLRRKIPALQESLTGHFTDHHAFLLGKMIARVEQVEADIRDVDARIEEQLAPFAPAAARLLEIPGIGPAAAAAIIAEIGVDMTRFPTPAHLAGWAKFAPGVKESAGRRKGNGSTGHGNRYLARVLGQIAVTAARTDTFLGERYRRIARRRGAKRAIVAVGRSVLTIIWHLLSAPEARYRDLGADFYLSRTDTERRKRNHIRQLEALGYRVTLDLAA

SEQ ID NO: 500179 - protein, 409 aa, unidentified
MLFVGDDWAEDHHDVELQDLAGRRLGRARRPEGVVGIARLQELVAAQLGADDGPEQVVVGIETDRGPWVQALVAAGYQVFPVNPRQVARYRERHGTWGAKSDAGDAHTLADMVRTDRHQLRAAAGDSDQAEAIKLLARAHQTLIWDRHRHLLRLRAALVEFFPAALAAFPDLAAADALELLQAAPDPTSAARLSRARIAAALTRASRRGVPAKAAQVQQALRAEQLPQPERVVAAYAATVGAAVAVIGTLNAQIEALAGQVEAHFGEHRDAAIYRSQPGLGGVLGARVLGEFGDDPGRYRDARARKNYAGSSPVTKQSGKKKVVVARFVRNDRLADPLHQQAFCALTASPGARAYYDQLRARGTGHHAALRQLSNRLVGILHGCLKTRTHYSEATAWSHRTSDAATAAA

SEQ ID NO: 500180 - protein, 370 aa, unidentified
MSVRRILAKTIDTDLEYEAIGIDLAKNCVSVALLTTDGEVVCIDRLDYSELEKSAQALSSTTFAMEPCTEMNYLVQKLEAWGHRCLVIGGKNVQNYVENHYSGQKTDLNDAQALAFLAQDTQLRTIKAKDVEQQKYASLTTLREQYIKQYRQTIVSLKGICQAWGLNISKGISGKARLKDLIENHAAFPEELKESLVDMVTHAQTAQKALNKITKTLELLAKNDKVCQLIQTIPGLGPICSCRLRATIGDIRRFKNPKDFPAYYGLVPRSIATGHNEKKGKITHRGDKTMRSLMVQGAGSVINMATKGKLKSKQLTKWILKKQKEKMPWGKLVCAVAAKLLRIVRAVLISNKPYNSKIAGVAKCSLPKAT

SEQ ID NO: 500181 - protein, 414 aa, unidentified
MLPPEIRCVVGIDVAKQAHVVCALEAPSGAIRHKPSRIEATAEGYGLLGAWLQTWGSPEQILIGLEATGPLWEPLYEHLTQAGYQVLLLNPRQTASWASSLGLRAKTDGIDAQTLAAGLLAGLARASTLPSETVQALRTLTRARRDLIQSRTATRQRLHDDLVTLFPEFVRFLPRLPGHTDLGNPAVLDLLSTYSSAQALAQVPLEELTTTLARMSGGRWTREQAQALQDLAHHSTASARAVTARSLVARMLAQQLQELAVHSTAVEAAIAELLKDDADGQRLQAIPGIGPHTAATIRAELGDVRRFGRVDAVVAYAGLDPRTRQSGAFVGQKQLSKRGPGALRHALYLAAFVAARCVPEWRTRYERLLARGRAKKEAFTILARALLRVIYHLLRTGDAYDPALLNQSSPATTG

SEQ ID NO: 500182 - protein, 344 aa, unidentified
MIVLGADTHKRSHTIAAVLAATGELLGEQTVQVGAKGFAALLVWARELGGERVWALEDCRHVSGSFERFLIGRGERVLRVTTKLMADSRRRARGRGKSDSIDAIAVARAALREGLDALPAAQLEGAELDLRLLVDHRERLVRQRVALNNTLQWHLHDIWPELRLPGSSLFYGNWGPRVARRLARAEQTMRVRIARDELRRIRELSQTIKALEAEIAGLVAQIAPQLLCEPGLGPLTAAKLVGEIAGAHRFSTDAKLARAAGVAPIPVSSGKTNRHRLDRGGNRQINATIHRIAVTRLRCHPETQDYITRKRAEGKSTKEAIRCLKRHLTRRLWHLLQPDGPAPN

SEQ ID NO: 500183 - protein, 377 aa, unidentified
MGEFFRQCVGIDISKDKFTACLYMYDRASDEGCCTKSINFANTKSGFNQMVRWSRKEAIKGYSLTYLMEPTGVYYEHLAYHLHKIGQTVYVVLPNKARQFCESEGIKTKTDAMDARCLALMGCVSRKLKAWSPPAAIYRELRQMTRFHADLWEVRTSVTNRLEALRHMEGLSKTVRRNCEKLIEEIDTLIEKNDKAIMQKVAEDKELEARVKRIATAKGLGEATIVCVIAETEGFHLIENRKQLTSYAGLDVEARQSGNDDPRHRISKKGNAHIRAALYMPALVAIRYNRQIRAAYGRVCQKHPKEKMIGVAAAMRRLLLLIYTLWKSGEVYDETRDTTRTPRKKSPELEHGPKDSITTTGEHVDWNAVGENGQALF

SEQ ID NO: 500184 - protein, 402 aa, unidentified
MNCVGIDVSKGKSTIAVMRPFGEVVVSPFEVCHTVSELSELARLLKSLDGETRVVMESTGNYHAPVAWLLHGAGFYVSVVNAMLVHDYGNNSLRRAKTDKKDAVKLANYGLDHWLTLPRYVPEEDTRLLLKTCYRQYQQYSKVQTMLKNNLISLLDAVFPEVNRLFNSSPRADGSEKWVDFVSTFWHCQCVSTLPLKSFSARYLKWCRKHGYYFSQEKAFEIHSKAQSCIGVMPRNETTKLLVQQAIAQLKATSAALAALKQEMQSLAASLPEYPVVMEMFGVGSTLGPQLMAEIGDVRRFHSKKALVAFAGIDAPPCQSGQMDIHSRSISKRGSAALRRTLFLVMGIYLQSAPLDEPVYQFMDKKRSEGKPYKVYMMASANKFLRIYYASVTAYLNTLARI

SEQ ID NO: 500185 - protein, 314 aa, unidentified
MSSLPCVVGIDVAKATLDLAVRPTGATWQVPNDDRILPDLVARLQALAPTRIVLEATGGFEHAVVAALAAAGLPVIVANPRQVRDFGRACGQLAKTDRIDAALLALFAERVQPELRPLPSEAAQVLDAFLTRRRQILEMLGAARNRLGFAKRPIRRDIDQHIRWLEKRLKDVDRELEAAIQASPVWRATEDLLRTVPGIGPVISRTLLGELPELGHLNRKQIASLVGVAPHARDSGTLRGKRMVWGGRAPVRAVLYMGAIVAAKFNPVIRGFYQRLRAAGKPAKVALTACMRKLLIILNAMVRTGTPWTVAKTA

SEQ ID NO: 500186 - protein, 338 aa, unidentified
MVLIGIDPHKASHTAVAIDDSEVALAELTVRADRSQVERLLKWAIEFPDRLWAVESANGLGHLLAQQLLAAGEEVVDVPPTLAARVRVLASGRSQKNDPNDALSTAVAALRAPRLRTVAREDHGAILRMLGDHHRDLGALRTQAICRLHALIRCLVPGGTGVRLSADRAAAVLRQLKPAEAADLERKRLALELVADIRRLDAQIADSKARIVKAVRASATSVVEINGVGPIVAAFLIGHSGDMRRFQNRDHYASYNGTAPIEASSGPKKRHRLNPRGNRQLNHAVHVIAIAQIRHASDGRRFFDRKVAEGKTNKEALRALKRHISNTVYSHLVIDSSR

SEQ ID NO: 500187 - protein, 349 aa, unidentified
MSQQCSTAIARMGIDIGKSVFHVVGLDAKGKPVFRYRFTRERLLEFLARASPTIIGMEACPGSNWLARKAIGQGHQVRIVPAQFVKPFVKSNKTDIVDAEAIAEAISRPTMRFTQPKTEAQLDLQALHRVRQRLVSSKTAIVNQARAFLLEYGLTIGAGPAYFVRDMPSILADDGNGLTPAMRDLLQEQWQEYRSIEARLLQLRRQIEAIAGADDVATRLISVPGIAHLTATAITAFAGTGTQFKSGRHFAAWLGLVPGEFSTGGKQHLLGITKRGNPYLRKLLIHGARACVLHLDRTKDYLGLWISEMEAKGIHRNKVIVALANKLARIAWTILTRRGTFYLRQPQAQ

SEQ ID NO: 500188 - protein, 415 aa, unidentified
MKVVFPTCCGVDVHKTFLVATIITTPADSLQPNYQKKRFSTFNSDLNRFADWLLEHNCLDVCMESTGKYWVPVFNVLEKRGIRVVIANPKWVKAVKGNKDDTKDSKWIGDLFRIGLVKSSFIPDLNIRILREFTRYRYKLVSMKSSEKNRFQNAFTVCNVALDSVVSDMFGKSATAITNYLTSDESFDPEHCVSLLQRSLKKKAEQVLESIEGFSIASEQKARIKIIREHYDFLEKMIAKVDTCVSEMVEKHEGEINLLCTIPGIDRNSAITIISEIGTDMRQFGSSKRLCCWAGLTPGNNESAGKKKSVRISRAGVYLKPALVQVAHAAVKDKASPYYALKYERIAKRRGKKRAIIAIARMILTAVYSMFCTGEVWNPVDLYKVDMPEHLKEQQLAKAIKQATRFLEKQGLSVA

SEQ ID NO: 500189 - protein, 332 aa, unidentified
MVAGTQGSLNKAGSTKMTQISRTAGIDTSKAKLDIAVHGGLDRWQVDNTPAGWRRLAADFTGAEVMRVGIEASGGYEQGVVGYLRDKGFTVLVLQPIQVKAYARLHLRRAKNDKLDAVLIAACAATIEQVRIEPDRRLTKLAQHLTFVEQIEEDIARFKVRLEHIDDPRLRRVVMADIARLKARRSAELLRIVTALRAHDDLARRLDLVLSVPGLGERTALALIIRMPELGRVSREHAAALAGLAPFDDDSGKHKGERHIAGGRRRLRRSLFAAALPAAFRWNKALIELYSRLTKRGKAHNEALIACARKLLIYANTVVHRGTPWTERPLAA

SEQ ID NO: 500190 - protein, 436 aa, unidentified
MDGSYAGVDWASDKHDVLVADAAGEKLLAATFAHDEKGLRSLCRQLVRLGVELVAVERPDGLLVERLLDAGLRLLALHPNQVAAARDRFRVSGGKSDGFDAFVLCELARTDHHRFRVLEPDSDATKALRALTRGREDLVGARTALVNQLRAELDRFWPGPLRLFSDLHSRISLAFLGRYPSPADARGLGEARLQAFLTRERYSGRQKPAQLLAKLRQAPEGRVGELELATRRQLVCGLVAMIKTLNAQITELERQIATAIGEHPDGPIFLSLFKGTVITAAELLAEIGDCRDRYPTRDTLAGDAGQAAVAIESGKRKAASFRWGCNKRLRQAFHTLADSTRHWHPWAQDLYASARARGHDHPRALRTVGRAWSRIVWRCWQDGVPYDPTRHRALQRHITVTIPTPSGPRPDTDATQRMAGAAVTQQAARKGRARSA

SEQ ID NO: 500191 - protein, 378 aa, unidentified
MNHNIIYVGLDVSKDKIAMAVAPEGRRQPDYIGMMPNQASAILRQMKRLGKPEQLRVCYEAGVTGYELQRLLAKTGIACEVIAPSLTPQSAGRRVKTDRRDALQLAGLYRSGELVPIYIPDEEDEAVRDLFRAREDVKEDQLRARHRITKFLLRHGLQAPAHTRRWGVKYWDWLNQLTFAYPEMQVTLAEYRQTLTEVEQRLHRLEQAIKQRAQKGKLAPLIQALKTFRGISTITAVGLAAEIGSFQRFSSARAFMAYTGLIPSEYSSGGKRRQGHLTRTGNRHVRRLLVEAAWTYRHRPVVKGDLKKRQEDQPAEQLQLSWQAQRRLHHKYMHLISRGKEAGKVVTAVARELAGFVWALAWTVERPKETGKQVDLAL

SEQ ID NO: 500192 - protein, 393 aa, unidentified
MFIVGVDVAKRSHEAIVIDDSGTIVQKAFNFKNDSTGFHKLKSILDAISTDPSNFIIGMESTSHYWLALYTSLKKNSYSVHVLNPIQSNALRGMYIRQVKNDTHDSLIIADVIRFGRYTEGGMPPSEIYELRELCRARSFIVDMTSDLKHKVVALLDQAFPEYETLFTDIFGMTSAELLRTYSTPEEILSVDTEKLAALISEPSRKRFRTVKAEQIKGLAANSFGITLEYNTFGILIKQHMEHIRFAELQIADLDERIASLFSHFDSCIVTIPGIGPTLGATIFSEIGDISKFDSSAKLAAFAGIDPTVKQSGEFTGTHNHMSKRGSPYLRRALWQAATVAIQCDPYFKSFYQKKRDEGKPYMNIVGHVTRKLTNIIFAVLRDNKPYYIQPQP

SEQ ID NO: 500193 - protein, 418 aa, unidentified
MKVVYPICCGVDVHKTFLVATIISAQGITPHYSKKRFSTFNNSIFQFKQWLIDNNCFDVCMESTGKYWVPVYNLLEDTIHITIANPKWVKAVKGNKDDTKDSKWIGDLFRLGLVPGSYIPNKPIRILREYTRYRSKLVSCKSSEKNRFQNAFTVCNVALDAVVSDMFGKSASSITDYLVSSDSFDPEYCSSLLQRSLKKKADTVVQSIEGYQMTKEQKERIVMVRSHLDFIHQSIATLDEKLDKMVAPYESAITLLCTIPGVARASAITIISEIGTDMSQFANSKRLCCWAGLTPSNNESAGKKKSVRITRAGVYLKPALVQVAHAAVTSKHSPYYKLKYERIGKRRGKKRAIIAIARMILTAVYHMFVTGEVFNPSDLYKIDMPQELVDKQKEKAVKQAAKLLISLGLIKATDISVA

SEQ ID NO: 500194 - protein, 361 aa, unidentified
MSESMALVGLDVHRAQTVAAVLDPVTGELSVERLRGAPAQVVLAFLEELGRPVRAVYEAGPSGFGLARTAEEHGIDVRVVAPGSIPRAPGDRVKTDRRDAKRLVRLFAAGELSFAFVPSETDERFRDLVRCIDDARKDLMRSRHRLSKFLLRRDLRFTGRSWTVPHQRWLGNLVFDDALSRATFIDYRCAVEALAQRRRALIGVLEEAAPQSSHGETIARLRCFRGIDTLTAAGLCAEVGSFERFAKPALLSGVLGIVPCEYTSDTKRVQGQITKAGPPHARRLLVEAAHHYRHRPAVGETIAARQAGQDPRVAAIAWRAQKRVNARWTHLGARRGKHTGTVAVACARELAAFCWEAATLD

SEQ ID NO: 500195 - protein, 417 aa, unidentified
MNSPPETIPIQRYIGIDIHKDYLMIGGQNRHQEWTLRPRKVHVSRFRDWAEKNFQPGDAVVIETTGSVWDIYNIVAPLVSKTLVAHARKVRQIAEARVKTDKEDIKRLITLLIADIVPEVWVPPMHVRELRSLISFRWRLTKQITMSKNRLHSVVQRFNLNAPEGGLLTDTNKSWWEEQEFSDLTGFEVKQDLEIVKTLEGQKEAIDQKLAELSNTEPWASDMVYLMQIPGFGLIFSMVVLSAIGDISRFSNPKKLVGYAGLGAGVHDSGKKHQGKSITKEGRKELRWALVEAAWRAVGSDPYWKAQHKRLEKRMPRNKAIVAIARRMLVSIWHILTKRETYHHFDEETIAYKMLIWAQAIGEEGRQGLTRQQFAKYGLLRLGIGQDLERIVKGGGPRRIAPTEEVLALKPELAPPR

SEQ ID NO: 500196 - protein, 394 aa, unidentified
MIYAGVDIAKTDHVIGAVDERGAEMCRPMPFKNTEAGLERAVAWLEGLAGPPSDVVVGTEATGRCWMACYSFLVARGYSVAVINPMQVKAVRKLKGLDKVKNDRIDARLIAEALRIGQYDETRLATDEVASLRSLSRYLQSLRGMAAELKTQCVCLMDAHFPEHAGMFSDMFGAGSRAVLSRSPLPFEPARRRADSLARDIAEASRRGGKSAGYAAKIKAAARSSIGVRLGQEAASFQVKSLIRQIEFADSECAKVEARVRALLDEVEPLALTIPGASYATGAQIVSEIGDVSRFRNAPALVSYAGLNSSVSQSGQFDSGGGPITKHGSPYLRRALWLAANRARQYDPGLRAFYDKKRAEGKPHRVAVTAVARKLCRIVFAVMRDQVPYGPGRE

SEQ ID NO: 500197 - protein, 402 aa, unidentified
MNNQTLFVGIDVSKLKHDIAFMRPDKQLLGQPFVINDDRDGYQTLLERLQSVAGRHHIQHYKIGLEATSDYWKNIYYFLKQQPDNFQLTVINPLQTHNWAKTELRRATTDPLDAKNIALFMVEKNPLPSLTRAPLPDIIKDIDRQLCALKKQLTMSKNRLRLELTKVAPELEKATSSLNTKRILSVLNCFPTAKEIASASVEDLRQITYGKRNYSLPASFIEKLKILTEHSIAYKTGIGAGYVVQSLVRQIIDSHQEMARLNEQIVRLYQQVNDQQSLLTTIPGIGRETAIALEAYIGDVNRFPNAKKIVAYFGLNPVIHQSGKSKRKSRLQKKGSPMVRQKLFMAVLGIVSNKGGPIYRFYQRLVDSGKPKMVAIGAAMRKLLVTIYAMLKNQQTFDENKM

SEQ ID NO: 500198 - protein, 337 aa, unidentified
MNTTVALFVGLDYSQHAVQVCVLDQAGNVLANRAVPDAADAIDQAVRRFGTVRGAALEACNGSANLAEELADRFGWPVHLAHPGFVSRMKQSPDKSDFSDARVLADLERVGYLPRVWIAPQQLRELRTLVRDRQHLAGQRRNLKLQITALLRAHRLRCPHNRWTKAWYLWVDNQAALPEQARWVTQQRLRRLPWIINEIVSVEQRLDQVTAIDSTVNWLRTLAGIGPVTAWTLRAEIGRFDRFRSGKQLARFCGLTPCNRSSGDKQADAGLIRAANPELRRVLIEAAWVLARLQPRWRQLAQRLKAQGKANTVVVAAVANRFVRWLYHEGLRQQAAG

SEQ ID NO: 500199 - protein, 343 aa, unidentified
MDHFAGLDVSVKDTSVCIVDDTGEIVRELKVASEPEALLGVLRNAAYHFKRIGLEAGPLSQWLFSALGEAGLPVICVETRHMRAVLQAQINKTDRNDARGIAQMMRVGLYRPVHVKTLRSQKLRMLLTHRKLLQSKAIAIENDLRGTLRNFGLKVGIAGGTKFEARIKELVENLPDLAVLVEPLLVVRRVLREQTAALHRRLLAIVRNDEVCRRLMTTPGVGPVVALTYRATVDVPARFRRSKSVGAVFGLTCSKHQSGEIDRSGRISRCGDEMMRVMLYEAAQSMLRSKKWSWLKAWAMQIARRRGMKKAIVALARRLAVIMHRIWVDGTEFRWTREAVTAT

SEQ ID NO: 500200 - protein, 355 aa, unidentified
MSCEKYIGMDVHQATISVAVMDSMGKVIMESILETKASTILEFLGGLRGTLSVTFEEGTWAAWLYDLLKPHVAHVLVCNPRKNAALKQGNKSDKIDARELANRLRLNDLKPVYHGETGVRMLRELARSYLTIVKDLSRVMNRVKALYRSWAIPCAGRDVYYTRHRSQWLEKIPEAGPRRRAERLYQQLDMLQYLRQQARRELLAESRKHSITAKLRQIPSLGPIRSALAVALIQTPHRFRSKRQLWKYSGLALETRISGEYVYVHGERRRSKKQISIRGLNKDHNHDLKGLFKAAATRASVIPGPFREFYQRSLAKGIKPTMVRLTLARKIAAITLTLWKKGENFDVEKLKSQAA

SEQ ID NO: 500201 - protein, 363 aa, unidentified
MYDSTTVTVGMDVHARSIRLAAVRADELLEERTLPYDEEAVERVLRRWPVVRCCYEAGPTGFGLYRYLVERGVDCLVVAPGLVPQRPGDRVKTDSRDARKLARLLAGGLLQTIHVPAPELEAARDLVRAREDARLDRMRDRHRLSKFCLRHGRMLPTSSWTVVRRKWLSEQRFGFVAQQQTFDSYVHTVDLVDARIEQLERAIRETAEQEPFRELVARLRCLRGIDTLTALALVAEIGDFHRFKSAEEFMAFIGLVPTERSSGEQRRQGSITKVGNSHVRRLLVESAWHARRRPKVGYELARRQRGQDAAVIEHAWRCQQRLYQRWQRMTGRGKPQQKIVVACARELAGFVWAIATDQPLRNT

SEQ ID NO: 500202 - protein, 372 aa, unidentified
MKKRSSSGKNPKPAVKAKRAQGPVTIGMDLGDRNSRYCLLNDEGEILREGQVATTKAGMMQTFGSIGRARIAIEVGTHSPWVSRLLRSLGHEVIVANPRQVKLITESSRKDDRLDAQTLARLARIDPQLLRPIQHRSEKAQMALMVIRVRAALISARTSLVNTARGLAKALGERLPQCDADQMGVPQTESLPPNVQRVLEPLLKEVESLTEKIKDSDREIEQIARKDYPETALLQQVGGVGPLIALTFVLTVEDKDRFQKSRDIGCYVGLRPRRSDSGQRQPQLRITKEGDPYLRTMLVQGAHYIISRRGPDTDLKRWGLHLAERGGKRAKKKAVVAVARKLGILLHRLWVTGEVYEPLRNQNRRVERKKAA

SEQ ID NO: 500203 - protein, 459 aa, unidentified
MCQEHVVITGRPKRLTRLGCEPGSIVVVLEPAYAGIIPHFRKEEQMSFIGLDVHKKFINGAVIDSPSEHAKRVFTIPTKKESITRFASSLSPSDSLALESTTHAFPIANLIRKNSNGANVVVSNPMKTKVINESKNKSDSVDALALANLLASGYLPVIWEPDSETGSLRKITSYAQAIGRDRTAVKNRVHSILHRNLIEYSGISDLFGKKGRKFLSSLSLPEDEQLQLAEELETLDFLDRRFVSIKERMAKVSVKDNYIKRLMTIPGIDYFIAFSLKAAIGNDISRFKSPKKLVGYFGLCSSVYQSADKRYTGKITKRGRSHARWVLVQAAQAIVKSPSPLRAFFLRIKNKRGRNKAIVAVAAKLSRIIWNMLTKGEDYFYSPPLRTKEKLAKLRIIATGEKMKSGPKKGIPSAGGRTAYLKARKNDKTTAKSAECDYVKFIKERFSSRKSARRTEFLS

SEQ ID NO: 500204 - protein, 366 aa, unidentified
MARYVGLDAHSKSCVYVIQDEQGRVLGEGSVPTTIDGLLMMRTRHALPAGTAVALESGTMAFFVARRLTRLELEPRVIDAHEVRTKALRPNQKSDRRDALELCEGLRRGSYRSIVHVPPEPIERLRETLGRRRHFVRVKTMQVNAVKRLLRTAGLQTLSRSLQLASGWEKLLGALTDDPSLHAFCVAHHAVWRCAQEQIAALENSLQEQRRPYQRELDRLMTVPGVGPIVATTALAVFSDVRRFPSAKHAASYAGLVASTFDSGERVRHGHITRRGSSELRAMLCEAAHHAWRRTNPLHPYFSSLCARRGYKLAIVAVAHRLCRILYSMLRHGTDFDLNQLAVEHGRFERTTVHHYRRKSSTPVPA

SEQ ID NO: 500205 - protein, 355 aa, unidentified
MTASYEYHIGVDYHKSYSHLVVQDSSGKTLRSGRVKNDRQSLGGFLERYRENSHAVVEATRNWMVIYDWLDDICDDVVLAHPLKVKAIADAKIKTDKIDATVLAHLLRADLVPEAWAPSERSRDLRVALRERMFYVRLRTMTKNRIVTVFDRYPEQTAQLKKLGDLFGKAGRVQLAQVNVSEIDRIQINRGLAFIGDIDMRIKQSEATIRAMTKANANVKLLKTIPGIGEFFARLIDAEIDDISRFRQPKKLAAYAGLVPSTYSSGGKTFHGKIIKQGNKWLRWAFVEAVAPAIASDPQLRAQYEHLKIKGINKARVAIARKLLTITFQILRDQRAYEPRGESTMEGASTISRLS

SEQ ID NO: 500206 - protein, 311 aa, unidentified
MTLPQDVIGVDIAKDWIDVFFLSTGRAERVPMATAELRAFAARARGALVVFEASGGYEHPLAEALGAADVTYARVNPRQAREFARATGRLAKTDRVDARVLAEMGRALALRPTPPADPGRARLAGLMGRRDDLGAMLRAEMARLRQARDASVRRDIGSMIALLRRRIGKLEAEIAAVIGADEALSDRSRLLRTMPGVGPLLAASLLARLPELGRLDRRAIASLAGLAPHACDSGRFRGKRRIWGGRAEVRRTLYLAGFIASRYDPALRAFRRKLQEAGKPVKLAIVACARKLLTVLNAMLRDQREHRPAAG

SEQ ID NO: 500207 - protein, 344 aa, unidentified
MEHFAGLDVSVKETSVCIVDDTGKIVREVKVASEPAALLAVLKNPAYRFKRIGLEAGPLSQWLFSALAEAGLPVICVETRHMRAVLKAQINKTDRNDARGMAQMMRVGLYRPVHVKTVRSQKLRMLLTHRQLLLSKAIALENDLRGTLRNFGLKVGMVGKVKFEARIRELVENLPDLAVLVEPMLIVRRVLREQIVILHRRLLAIVRDDEVCRRLMTTPGVGPVVSLTYRATVDIPARFRKSKSVGAVFGLTCAKYQSGEVDWDGRISRCGDEMMRTMLYEAAQAMMRSKKWSWLKAWAMQIARRRGMKKAIVALARRLAVIMHRIWVDGTEFRWTREQAAAAA

SEQ ID NO: 500208 - protein, 409 aa, unidentified
MEIVIERCAALDVHKDTVVACVRGPGPNGRRQHEVRTFGTTAVELLALRDWLEAHAVTDVAMESTGVYWKPVFYVLEEAFTCLLVNAAHIKQVPGRKTDVKDCMWIAQCLEHGLLRGGFVPPAPIRELRDLTRHRKVLIQERTRAANRLHKLLEDAGIKLASVATNILGVSGRAMLAALVHGTTDPAVLADLARGKLRKKLPALRQALAGRFRPHHAFLVSQLLAHVDYLDEAITTMSEEVEERLVPFAAQLTQLDTIPGINTRTAEVIIAELGVDMSCFPSDRYLASWAGICPGNNESAGKHQSGKTRKGNRWLRMTLIEAAGAAIRTKDSALGARYRRVMRHRGHKKAVVAVAHAMLRAVYHLLAEGTTYREPGADYSDRHHTHRVTRRAIQLLERQGYRVVLEPAA

SEQ ID NO: 500209 - protein, 336 aa, unidentified
MQLYFVGLDVHKQVIAYCVKTADGEIVGEGKIPATRNALDQWVTTLPGPWHGGLEATLFSSWIYRHLKPHAARLEMGHPARMKAISSGKKKSDKLDARMLADLLRANLFPACFVMPPELEGLRRQLRFRRLVVEEAVRFKNKTAGLLMEAGIEYERRRLHGKRYFGEVMRQELIDRELRPLLEFSRSQTEELARMDGRLMRLLEQHPRLEARVEALRKIDGVGPVTALSWALEVGDPSRFASIKRAVSYCGFASALRESAGQQKRGPLSKQRNPHLQTVLIEAAKIGVQYHEKLRAIHDQAAQKGHANRATLAVARKLVAYLLAADRAFFAQSAPA

SEQ ID NO: 500210 - protein, 369 aa, unidentified
MGKCITYVGLDVHKNSIDVALADGGREDEVRHYGTINADMGSVDKLVRKLVSQDREPRFVYEAGPCGYEIYRHLTRQGHDCVVAAPSLIPKKSGDRIKNDRRDSVMLARLHRAGELTPVYVPHSEDEAMRDLSRAREDAKRAERKARQQLNGFLLRNGFRYTGRSLWSLAHWRWIADIRMPHGAQQFTLQEYIDAVRSCTERIERITGQIRELVAQWRLGPVVEALQALRGVSLVVAVTVVAELGDLSRFDHPRKVMAYLGLIPSEHSSGENTKRGGITKTGNGHARRMLTEAAWSYRLPARVSRRLRDRQQGLPQKVWEIAWKAQVRLCARFRRLVARGKRTQIAVTAVARELAAFIWAIARSVEIAA

SEQ ID NO: 500211 - protein, 403 aa, unidentified
MNAVGIDVSKGKSMVAIMRPFGEIVSSPFEIKHTSSDITSLIELINSVEGESRIVMEHTGRYYEALAHELSAANLFVSAVNPKLIKDFDNDSLRKVKSDKADSVKIARYALDKWQNLKQYSVMDELRIQLKTMNRQFGFYMKHKTAMKNNLIGILDQTYPGVNSYFDSPARSDGSQKWVDFASTYWHVDCVRKMSLNAFIDHYQKWCKRKKYNFSQSKAEEIYGKAKELVPVLPKDEITKLIIKQAVDQLNSASTTVEELRTLMNETASKLPEYSIVMNMKGVGPSLGPQLMAEIGDVSRFTHKGAITAFAGVDPGVNESGTYEQRSVPTSKRGSANLRKTLFQVMDVLIKTMPQDDPVYQFLDKKRAQGKPYYVYMTAGANKFLRIYYGRVKEYLATLPESN

SEQ ID NO: 500212 - protein, 387 aa, unidentified
MPQPNDLSRSLVTLDQDSTIIAVVEMSQSSWLVAGVLPGVERQPRKKLEPSAERLLGLLHRWRDEAVRAGKKITRIALAFEAGRDGVWLARWLSARGVEAHVIHPSSVAVSREHRRAKTDRLDTEMLKRGFLGWLRGERGHCSMSRVPTIAEEDAKRPNREREGLVGERTRIINRMKATLARLGIRNFKPTLRKAAERLATLRTPESTPLPPNVLAELQRDMARLGFVVSQIREIEEARQKRLEQEPETGPHAMVRLVARVVGVGIETADMLVHEVLSRPMRDRKAVARYAGLTGSPDESGAKRREQGLARAGNARVRRGMIQLAWRFLRFQKQSALALWYQARTADSRAGTRKTMIVALARKLLIALWRFVTTGETLEGVILRPAG

SEQ ID NO: 500213 - protein, 360 aa, unidentified
MKKFQSFVLQNEEIFIGLEDSKKTWRLAVRSGNIVVAETAMEAKINALESYLKKQFPMCKIHLAYEAGFRGFWLHDRLVANGVDCIVVPPNRVHQEKSNTQKNDTRDARLLAEMAQFYPHKRCFIPSCKAREDREIIRLYLSVNNQIIAMKNRIRKKLVFHGFEEHFPDKTAWKDSDYANVVKTLANLHLSEALEFSFVNLCEQLKLLQERKKSILKKLIELSEKPEYLPMVEIMKSVPGIGPLVAIGFILELAGDMRRFPRRAKWGHFLGLAPRDFSSGEADHKGHISREGNPRIRAWLVEAAWIAIRKDPVLLKKYNAVVRSSGSGKKAIVAVAHKMALRCRALLISGQKYQKGVIEG

SEQ ID NO: 500214 - protein, 412 aa, unidentified
MLFVGDDWAEGHHDIEIVDDDGKMLVRRRLPEGLEGVTRLHSLIAAQMPDDWVDHDPAETAGLVKVGIETDRGSWVAALVAAGYEVFAVNPLSVARYRERHSTSGAKSDAADAHLLAEMVRLDRAHHRPVAEDTDLGEAIKLTARSHQSLIWDRSRHVARLRSTLREYFPAALLAFEDLDTPDALELLGKAPEPDQAARLSKTVIGAALTRARRRRVEDRTRKLQNILRAPELRQPPELQSAYAAVVASEVAIITALNAQIDRLGAVVGEHFGRHRDAEIYLSLPGLGLILGARILGEFGDDPDRYADAKARKNYAGTSPITKASGKKKIVLARYARNRRLGDALQQWAFCSLRGSPGAKAYYQQLRDRKISHEAALRQLANHLVGILHGCLKTHTTYDEHTAWAHHSTTAA

SEQ ID NO: 500215 - protein, 343 aa, unidentified
MKVIIGVDPHKASHTAVAISGDEDELGSLKVRATRGQVDQLVSWAEPFPARTWAIESAGGLGYLLAQQLVAAGEDVVDVPATLASRVRVLASGRSNKNDPNDALAVAVAALRTPALRAVAAADHAEVLRLLAKRNTDIGNHRTRLVCRLHAQLAELAPGGIAKELNASDAEGLLAGLRPATPVEQARHDLALELVDDVRRLDAQLKESHRRIRTAVGASQTSLTELFGVGPIIAGMLIGYAGNVRRFRNADQFAAYNGTAPVEFSSGGRTVPRLSQRGNRKLNHALHLAAICQLRQPHSEGRAYFDRKVAEGKTKKEAVRALKRQISNAVFRQLLVDASRAGG

SEQ ID NO: 500216 - protein, 336 aa, unidentified
MQDSRYIIGVDVSKSKLDYYVTDSLRGTVANTQEGISRLLDEIITRHPGIPHVCLEHTGIYGRPLAEGCHGRGVVYSLLDPKKIYHYKKGKYGTRAKTDRHDAQLIRNYAADNPPQPSAPPTQRQEELRELDNLRALLVKQCAELKTALRHARVKPVIAHYQRRIARLEKDIAGFEQRIAAMLDEDKATAVLRQRFLEVQGVGPATANAVLIHLRDAIGNVSDKRIANLAGLAPIPDESGNISLPWRIEGGRKRVRDTLYMAARSASRHNPVLMPVYRRLRAKNKRSRCATIAVARNLVCLLNRIARDPDFKPVTTRKEAPLLLPPHPSLPPPCVV

SEQ ID NO: 500217 - protein, 350 aa, unidentified
MKKIVKQVVGIDVAQKELVVCLGKMYDDWTPELYASKTFSNSAKGFEFLIQWLSKLTDVSTPLRFVMEATGVYHESLAYYLENRELEVSIITPNKISNYARTLNVKTVTDKTASEAIALFGLERNLEKWKRSNPLFKKLRQLSRERDQLVQARTMAKNQLHAELAEAEPNSSSVVRIKKQIAFFNKQELEIRSEITELSKQDEKVNGSIKIICSLPGVGLLTAVTVLAETNGFELIRNKRQLTSYAGLDVKEKQSGTSVKGKPRISKHGNKYLRKAMHMPALAAIRFDEKHKAIFARLVCRHGIKMKALVAVERKLLEMMYTLYKTNRPYDKEYFKTKESTIKKETPVEN

SEQ ID NO: 500218 - protein, 409 aa, unidentified
MEQQLERCCGLDVHKETVAACVRIGGRSGKAEQHVQTFGTTVGELLVLRDWLAAHGVTHVAMESTGVYWKPVFYTLENDFTCLLVNAAHIKQVPGRKTDVKDCVWIAQLLEHGLLRGSFVPPAPIRDLRDLTRYRKALIHDRTRVANRLHKALEEAGIKLASVASDILGVSGRAMLAALVDGTTDPTVLADLARGCLRRKLPALRQALVSRFRPHHAFVLGQLLAHLDYIDEAIATLSAEIERVMVPFAEPLRRLDTIPGINQRTAEVILAEVGADLRAFPSARHLASWAALCPGHHESAGKHKSGKTRKGNRWLRTALIEAAAGASRAKNSALQARFRRVLRHRGPKKAVVAVAHALLRMVYHVLADGTVYREAGADYYDRHHSQRVTRRALQALERQGYRVTLEPTA

SEQ ID NO: 500219 - protein, 369 aa, unidentified
MRKGTTYVGLDVHKETIAVAVAEGEGGEVRSLGLIPNRPEALRRLVGRLGPAKDLVCAYEAGPCGYTVYRFLTRLGVRCVVVAPSLIPTKPGDRVKTDRRDAAKLARLLRSGELTPVWVPDEEHEALRDLTRAREDARVDLLRARHRLSKFLLRLGLVPPAGVKPWGAKHRQWLQGLQLGRASQQVVLREYLLAVEQTQERLRRLEAELAEAARTSRHAAVIGALQALRGVGLVTAVTLVAELGDLQRFRTPREVMAYAGLVPREASSGPRQHRGAITKTGNAHVRHVIVEAAWHYRHAPGVWGALRQRQVGQPEAIKAIAWRAQDRLHRRYRRLLGRGKARQQAVVAVARELLGFVWAVAHAVRSSGR

SEQ ID NO: 500220 - protein, 338 aa, unidentified
MTIETLGVDIAKNVFQLHGVNYNGHVVLKRRVMRDQLLEVLAQIDRCTVVVEACTGAFYWARKFEALGHQVRVISPQYVKPFVRRQKNDGNDAEAICTAARQPHIPFVPKKTVEQQDIQALHRARQRMVNHRTAVVSQIRGLLLDRGFAIAKSITRARRLVPDILANFDNELTPMARDAIGELYDLFRDLDRRIASFDKKIEQVFRNSEICQRIATIKGVGPKTATAIVAAIGDGAEFKNGRHLAAWVGLVPRQFSSGDRKVLMGISKRGNQHLRSLLVHGARAVVRTAPNKTDLNNQWVNQLRERRGFNRATIAVANKNARIIWAVLRTGEPYRAAF

SEQ ID NO: 500221 - protein, 331 aa, unidentified
MVKCHCVGVDVGAKELVVSIDRNGERERGLVFSNSADGHRKLIRWATRKGAVARVVLESTGVYGLDLAFALHRAKRVEVMVANPRAVAAFAKAALRRSKTDALDAETILEFSLRMPFVPWAAPTRSILELRGLSRRIEAMSKSVAQEKNRLHANEQSEALSDFVRQDIREWVELLEGRVDRLRKQALLVIDQIPELARSFGHLTSIKGIANAAAIQLLAELGTLPADMTVRQWVAHAGLDPRQFQSGTSVHKPARISKTGNAHLRRALFLPAMVAARWEPNVKAFYEKLLGRGKTKMQALVAVMRKLLHAIYGMLRHDQDFKGEKFFAVKP

SEQ ID NO: 500222 - protein, 341 aa, unidentified
MNTVTLVGIDLGKHSFHLHGQDRQGRSLLRKKCNRTQMIELLAKLQCCTVVMEACAGAHYLARQLTAFGHQVKLISPQFVKPFVKANKNDFIDAEAICEAASRPSMRFVTPKTEEQQVLGAWHRVRESLVRDRVKTSNQIHGFLLEFGISLPTGPGVIKRLPSVLAEHRLPARLMVLLERLHAQYKHLEEQIKEVEDELARQLKDDDLGTRLMTIPGVGPITASLLSAELGDGKQYSCGRDFAASLGLVPRQYSTGGKPTLLGISKRGDKALRRLMVQCARSYLVWVHRKTGRTAEWVKSMLTRRHPNVVACALANKLARTVWALAAKHTEFREAPTAMST

SEQ ID NO: 500223 - protein, 372 aa, unidentified
MKENSIFIGLDVHKDTIDIALVEEDRKSVVRYYGTIGGDLADLEKAVRKIKKAHPGVALHFVYEAGPCGYGLYRYLTKAGHECVVVAPSMIPKRSGNRVKTDRRDAMMLAGLHRAAELTSVYVPKDEDEAMRDLVRARQDAVKAGRVAKQQLKSFLLRHGIKFSRLADWKQSYMTWLAGLTMPNPAQQIVLQEYINTVKDCTDRIARFTVQIKEVLPSWELNPVVMALQAMRGVSLLVAVTAVAELGDLKRFARPSQLMSYLGLVPSEHSSGDSRRTGGITKAGNGHVRRALVEAAQTYRLPARISKELLARQKGLPKQVCDIAWKAQVRLCGRFRKMAARGKKHQTIVCAIARELCAFLWAIAREVKPVTV

SEQ ID NO: 500224 - protein, 348 aa, unidentified
MKYIGLDCHKKYDHATMIDTETGEIKAKRLSHIKEEFREFIGDRAGTRMVIESCRDWSRTYELSEDLVEEVILAHPLKVKAIASAKVKTDAVDSRTLAQLLMADLIPQAHLRKSDNRVKQRVIRHRAFMVVMRTRVKSRIHSLVDSQLLPPDVLQTKPINLFSKKGMKWLNSLEWAKAEDKKLVESHLRVMEAINHEISLTNDMVKKIYEEDRDAQLLATIPGIGVTLAMLISTEIDGIERFRSPSKLCSYAGLVPSTHSSGGKTYHGNITSEGNRWIRWALVEAAVPASYADIEIKKRIDTLRKTKGANVAKTAIARWLLKVIYHVLKERRPYIAAYKGVVKAGAAF

SEQ ID NO: 500225 - protein, 365 aa, unidentified
MNSVITNTELSSHEGTRCQFNGSTGAIKLGIDVHQDFYVVVMQEGGANPKPPQRFSKQAFVHWASKLKSRGAEVYAVYEACGFGFWLQRQLSSLGVQCHVVCPQKLDEQNRRVKTDELDAKALCLKLDRFVEGNRCALALVRVPSEGEEQNRAIHRQREQLVKARKQLEAQGRSLMVNHGMEPVQNWWKPRTFAALPAPHWMKALLANSQSILVALQQKIVALTAQLQSAASPDQPCGLGKMTSVIIDREIGDWNRFSNRRQIAGYTGLCPGEYSSGNTRLQSWVTKHGNPRLRAALVELSWRLVRFQPNYKPIIKWRAILAKGALATGAARKKAIVAVARQLAVDLWRIKTGRLRAEELGLINY

SEQ ID NO: 500226 - protein, 343 aa, unidentified
MQTITTIGLDIAKSVFQVHGVDNDGKVVIRRQLKRRYVLAFFEKLQPCLVGIEACASSHHWSRELQALGHIVRLMPPAYVKPYVKRQKNDAADAEAICEAVTRTNMRFVPVKTPEQQSGLMLHRTRHLFIRQQTSVINAIRAHLAEFGVTAAVGRKGIEELLRVIADPSDKRVPDVVRTCLAALGSQLLSLRKQILDFDRMIMAWHRSNQTSKRLNCIPGVGPLLATALVASVADPKTFRSGRNFSAWIGLVPKQHSSGGRDRLGSISKQGDRYLRSLFVAGALAVIRYAKIHGTKYRPWVAALLARRPTKVAAIALANKLARMAWAMMARGERYNYPASLRV

SEQ ID NO: 500227 - protein, 421 aa, unidentified
MPNIEIGVDSMVKENFIYVGIDLHKETHTAVMIDCYNQKLGEITFPNRPADFPKLVTKVKKCNTDGKEVVYGLENAYGYGRALAVWLIDKGYLVKDVNTAISHRQAKHRGAMYRKSDSDDAKAIALATLNMLDKLPDACPNDAYWSLGQLVHRRDNIMKQRTRLVNQLHEQLCIVYPSYKQFFNDISRPTALYFWEHYPSRKYLKGKSVEDLRAELVPVSHNKCSTKTCEKILDAIAGDKVKNNAYQDARDMVTLSIVSDLQHYDKQLAEVDKMLEQMYKMLGCTLTTIPGVNVITAVKILAEIGDIKRFSNANKLAQFAGIAPLHLSSSGKGKDVATKQGNRRLQAAIYFLAIQMVQLSSKGTPRNPVVRAYYEKRKAEGKTSQQALICISRRLISIIYGMLKNGTEYRMPVVENAGEKL

SEQ ID NO: 500228 - protein, 408 aa, unidentified
MYAVGVDVSNGWSTVAVLRSKTDIVIRPFNVTHNSQGFASLLEKLGALDGEVRVVMEHTGNYYESIANVLHKSGLWVSAVNPLLIRNYGDNSLRSVKTDKADAKKIARYTLDNWEELRQYSPMDTIRYQLKTLNRQFQLASKNRTACSNNLIALLEQSYPGVRSLFSSPVRSDGSQKWVDFANAFWHVDCVAKLSLNAFTVKYQKWCKRHGYNFSEAKAAAIHENARTLFPLVPKSETTKLLVREAITQLNTISHTAEVFRAEMNRLAAQLPEYDTVMAMTGVGPSVGPQLMAEIGDVRRFAQKSSLVAFAGIDPGRDDSGSKVSNKGRIGKRGSPHLRKTLFVIMSILLQLKPEKDPVYQFLDKKRFEGKPFYVYTTAGGTKFLRIYYGRVRDCLKEKGLWDESVTD

SEQ ID NO: 500229 - protein, 332 aa, unidentified
MNMHPQGGVANRNQRPNAGIDVCKQHLDVCLGTLEQRVTNDASEWNELIAKCKAADVDLVVLESTGGYERGLVCALQDAGITVARVNPRQARDFAKSMGVLAKTDQVDARTLRDFADVLARHKDRAKYITPMLDEQRRQLAELMTRRRQLVDMRVAENNHLEHAGKRSVRSITSVLKTLDKQLAAIDREIDDHIDRHFKDQRTLLDSVKGVGPVTILTLTAALPELGRLGRRQISKLVGVAPLADDSGPRKGKRRIWGGRADVRAVVYMAAVVAMKHNPVIRDFHSRLIAAGKPKKVAIVACMRKLLTILNAMLRDQKLWDPAKHVHSPIAA

SEQ ID NO: 500230 - protein, 462 aa, unidentified
MTVPTTKGRRKRATPVPTSLPAIRSLVAGLDVGSSEHWVCGPARADGQPNVRGFGTTTDQLQELADWLADHRVESVAMESTSVYWIPIWELLEARGIEALLVNARQLHNVPGRKTDVSDCQWLQLLHSCGLLRGSFRPGEAITRLRALQRQLANLVAERTRCVQWMQKALDQMNVQVHRAVTDLTGTTGLAIVRAIVGGERDPARLAQHRDPRCRKSAAEVARYLTGTWRAEHLFNLASALRLFDALEAEIAAYDAHLLTAIESLQPPDRQAAPVPPHPNLAKEKAIRTHGEQPARTTLWRFAGVDLTRIDGIGAGAAQVVLTEVGPDLAAFPSEDQFVSWLRLCPRTPISGGKPLKKPRNGLGANRIAGVLRLAATSLQRSKTALGAAFRRIARHKGSAVAVFATARQLAKLIYRMLRYGHDYVDIGEQAYDRQFQTRRLAALTETARSLGYTLLPNAAAK

SEQ ID NO: 500231 - protein, 364 aa, unidentified
MESITHIGLDVHKDTIAVATLRPGSTSCEERVIPNTPEAIRSLTRRLGDPASYAFCYEAGPTGYDTYRLLDSLGLRCDVIAPALIPRRPGVRQKTDRSDARNLARLHRAGELIPIGVPTPTQEALRELIRVREDLKNDRRIARQRIHSFLLRQGRHYPKGASRWGKGFEAWARAQTFDLPAVQATFSHLLGAEEVRRAQLEAVEGEITRAALDPEIAPSIALLRCFRGVDTLTAVTLVAEVGDFRRFRSAAAFMAFTGLVPSEHSSGLSVRHGSITKTGNAHIRRVLVEAAWAYRYRPGIGAGLAKRLEGQPPEAVAYAWRAQCRLSARFRLLSVKKGSNKAAVAVARELAGFVWGLMTENTAA

SEQ ID NO: 500232 - protein, 331 aa, unidentified
MVHAVDERKRVVLKTEIAASRESLRWLIGQLGPQPKLFVFEAGNQLKWVADTLGKQDGVSLHVVHPNEVKWISTSSGKTDKVDAKKLAELARGDLLPRKVHLVEGEVRQLRELISARTQLMRKRVSMMNTLRGYLKQEGVRLGEKFFARADWKERLEKTRLSQTLKLILRAFHPSIEALTASEHELDQRISDIKNAKTELLETIPSIGVLSSRTIVAALDDAKRFENRKAVAKYGALTPTIYQSGDTVQLGRINRDGRHEVRRVLLQCAHLLTRMKSPAARPLRLFYERIARRQGKKKALVALARKLLTVAYGVLKSESPYDPMKLLPQAA

SEQ ID NO: 500233 - protein, 413 aa, unidentified
MDKIYDICCGIDVHKKLIVACLNHKRKKELREFGATTRELMELAEWLQKNECEIVAMESTGSYWKPLYNIMESYGLHAIVVNPAHMKAVPGRKTDVKDAEWIAELLQHGLLQPSYIPSKDQRELRELVQYRKSLVGERTRELNRLQKMLEGANIKLSGTVTNINGKSARKILEYILSGNEIDEKKYDEMYEEKLIAHNLKASKEQILDDLKGFMSPLQRRMLKELLQHLDELNVHIENLNDEIDNFMKPEEKQASQVIQDVTGIGNTSAQTIIAVIGTDMERFPSDRHISSWAGLCPGDNVSAKKRKSGKIRKGNALLKSTLVLCAHAAVRHKSSYFHAQFKRISTHRGKKRAYVAVAHSILIAIYHILKDGVKYQDLGAEYYNQFNAERKIHAYLKKLKALGWEPPKEAVSA

SEQ ID NO: 500234 - protein, 338 aa, unidentified
MAIVTIGIDLAKNVFAVHGINEAGKPVLVKPTVARGKLLELIASLPPCTIGMEACSGAHHWARLFMTHGHTVRLMAPKFVAPYRLSGKQGKNDAADAAAICEAVQRPHMRFVPIKTVEQQGQLCIHRVRQGFIEQRTATINRIRGLLSEFGIVLPLKAATIRREAMVHLEDLPGWANTVIGDLLSEVSHLDERVEQYDQHIEQIAREDTRTQQLMRLPGVGPTTATAILALIGNGHEFKCGRQFAAWLGLVPGQYSSGGKARLGHITKAGDAYMRSLLVLGARAVLNAAKKKSDSTSRWAVALAERRGYWRAIVAIAAKNARMAWASLTLGERFAMPA

SEQ ID NO: 500235 - protein, 451 aa, unidentified
MLIQGSSDPPRLVRVGIDAAIVAQHEVCIRATDAEGRVRTDRFHVQPTLAGLRSLTDRLAQMPGVVAVAEPTSMTWLGLSVALAEAGCDLSLVGARHAARLRGAISGKHKSDVIDADVLARAGEVFDLHPLRPVDPAQLALRRACVRRGTAVIDGNRHLRRLISLARWAFPDVWNGFGGSLPTAIAVLQRWPHLAQLAAARRSTLTGVVALHTRGVSDVPERVEVIRSSAAAWASFWEGHVDLDALAFDVTEHLSDMATAKARIERATTQARRYWEQLYGDDELLMSIPGVGPVTACVIRGFLADGSAFPSAKAAASYVGLNPSTWSSGTVSQPSRAITKEGPAVLRLAFFQAANAARRQDPQLAGFYHRLMTAHGHCHTQACVAVARKLVERTWTVLHRGTPYQLRDSRGQPISHLEAKQVVKDRCTVPDHVRASARAHSAATNRGKLTR

SEQ ID NO: 500236 - protein, 296 aa, unidentified
MGGVIGLDISKRTAEVAILLPGTRQLRRQRFAADAPSSARLARRLAAADRVALESCTNAVAFHRLLCQHAGEVVISHPLKTRVIAEAKVKTDKVDAEILARLLAADFLPRVWVPDAATNRLRHLVCHRQGLVTQRTQAKNRLHAILHRHLLAPAMTDLFGTAGRRSLASAALPDDERTLLDADLRVLDFFDGEIQTTDKQRARVALVDPDVRRLMTVPGLALTSAVGLKASIGVISRFASAPKLVSDFGLNPSVHQSRQPAYHALLRQRFGSHDAPGPTAPPPRRPTHAQPAKKRT

SEQ ID NO: 500237 - protein, 339 aa, unidentified
MSEHNLISVDLAKNVFQLCAMTDRMKIVFNRQLKRKDLTRFMATQKPVDVVMEACYSSHYWGRCFAAMGHQVRLLPAQHVAPFVRGNKSDHNDAVAIAEAAHRPNILPVPIKTLEQSDIQSLHRMRERYVKHRTGLINQTRGLLSEYGVVALQGHRAFTQLLREVSEPEYEDLSVCLKEQLSSIADEYHYQSKRIDEITRTLSDIAHHHPLCRILLSIPGIGPINATAIYCAIGNGSQFKNGREFAVWLGLTPKQSSSGDKMSSAGITKRGNRYLRKQLVHGARAVLSRSKNKSDRLSRWTQQLVARRGVAKASVALAARIARLSWVLLQKQELYQPKD

SEQ ID NO: 500238 - protein, 309 aa, unidentified
MKQQVKFDQVIKCGCGMDVHQKTVVATIRRSDTDFETREFNTYTRSLKSLREWCKSEGVTHIAMESTGIYWRPVYNIMEEDFEVILVNARHIKNVPGHKTDKKDSRWISKLLLSGLLKGSFIPPREIREIRDLVRYKKKIVGEISSGKNRVIKILEDCNLKLSSVFSDVSGASASKMINDIIEGNDEIEGLMNHIHGKVQASRTEIRQALEGTLTDHHRSMLKLVKMSIDGKEKIIEELDRQIGEAVEKYAVEIDKLQTIPGVGKESAIRIISEIGVDMGNFPNENHLSSWAGMSPGSNESAGKKKAHE

SEQ ID NO: 500239 - protein, 339 aa, unidentified
MKKNYFVGIDVSKQTLDVAFIEVHNAERSQPSWKVFDNNEKGLSSMKTWLQNNQVGLDGNTLFVIENTGLYHRRLMDFCNKHQLQLCIENGAQVKWSLGIARGKSDKVDSRRLATYALRFADRLKPATALQEGIQAIKDLITLRNRHIVQLSSLRSHLKELKATTDGKAVKDLQKLHDPLMKAMKAAIQKIEAAIIKKIQDNAVTKKQYHLLLSIPCIGPVTATYLIACTNAFTLCSTGKQLACYCGVVPFEYQSGISIKGKHRVHKMANKNLKSLLHLCAISAIKYVQEIKDYFNRKVEEGKHKMSIINAIRNKLVLRAFAVVRNDKPFVENTCFTGE

SEQ ID NO: 500240 - protein, 447 aa, unidentified
MTLDVVSKTGKTPVLGRMLSKYVGHKMSSIENEITKTRNHSRQRGNMMRTVFGIDVSKASSEVAIVINGEKIHGYTMPNDAIGFTRLLDDLKTVQKPEIIFEARGVYSHRLQAFLEENGYAYTQLNPLEAKKQLDSLRVRKTDKIDAETLAISQFVLNRKPTYIQEEVYQELRDLSRFYQNLTEDIVRTKNRLHKVLQVTFPEMENILSTPTREQYWNLVMTFPYKDFVLELSKDELLEGIRQSTSKRISDKRVAYLAQKLAALANQSYCAVKKNSPILEEVRYYAKELLRLSEQRQAVLEQMVELAQPLPEYEILLSIPGIAETTATSMIGELGDIRRFQSANQINAFIGIDLRHYESGNFLAKEHITKRGNPYARKILFKCIHNIAAASHTNPCHIADFYEKRKRQSQTTSTKPHTIASIHRLIRTMYYLITHNKLYDYTSTQNR

SEQ ID NO: 500241 - protein, 336 aa, unidentified
MNIKRIGLDLAKQVFQLHAVDHQEHVVLRKTLHRARMLTFFTRLEPCLIGIEACGSSHYWARELTRLGHTVRIIPPQFVKPYLKGNKNDANDAEAICEAVSRPGMRYVAIKSEAQQSMQAEHRVRARLIHDRTALSNEIRGMLGEFGFVLPAGLSALRKALPEILSQQEKWDNRFIRLQSELTEELQALDERLNRYDRRLKQLAQEDERIRRLQEISGIGPVAASALVAAVGDAKQFKSGREMAAWLGLVPRQHSSGGKTKMGHISKRGDSYLRTLLIHGARAVLNACDHKEDRRSRWLQSVAERRNRNIATVAMANKNARIAWSVLSREEEYRVM

SEQ ID NO: 500242 - protein, 424 aa, unidentified
MENTAARKRKQVLEGYLVVGVDPHKKRHAAVAITQDFTTRDKFKFDNTREGLEMMLDRAKVEMVKSGCRGVMFAIETGGHYWRNVAYFLDEQGIPFRFINQFTLKRRREGKDLNRRKNDYRDSEVAAQLLCTGEFTESKLPQGVYAELRTAHNAYRRLVKERTRITNLVKGLLDALFPEFTQVFKDPGGLTALSVLSTCPIPRVIAGMTEDEFEATIEAWHKGRRLMRKKLRALHYSAKTSIGIDAGARSLSSEIAFLVEKLELIRRHIGIIEGTLVRLVDETEEGKYLLSIRGLNYIAVAGLLAELGCFKAYRSARQMIKMAGTNPTESESAGKKRSRTPMSKQGRPVLRYCAWTSVIPMLRFNEDFRAWAKQRRERPVHANPLGGREVVGAALNRLLRLAFAMVKNQTYYQVSKSELTLVAV

SEQ ID NO: 500243 - protein, 318 aa, unidentified
MNEVYIGIDVSKNTLDVASFPTSKSWQFENHATGINQLVSMLRKQSPALTVAEATGGYETEMAYALKKAGIRCAVVNPREVRDFARATKKLAKTDRLDAYVLAHFAALIQPEPRPLPDEDARELEAILSRRRQVVEMITSEKNRLHHAMSPVKEDILAHIAYLEQRLQDQEFALEGRIDESPVQREKYNLLKTVPGAGPNLARTLLIGLPELGDLDRREVAAVVGVAPYNRDSGKRRGIRHIRGGRPDVRSALYMSTLVATRYNPVIREYYLRLCSSGKAKKVALVACMRKLLTILNAMVRNHSPWAVSRPELAFSVA

SEQ ID NO: 500244 - protein, 351 aa, unidentified
MPMLAETVDAVVGIDTHRDIHQAEIATPSGTPLATISVGNDSAGFAELLGWIVDHAPGPQVAVAIEGTRSYGIGLTRALAAAGLAVIESEQPSRGQRRGKGKSDPIDAHLAVLAALRLDAARLPTPRADGDREALRILLGARHELTVASTAQTNRLRALLLGGTDTDRDTARGSLTDTVLARLVRRRPPAQASRHLLVRHAEISRLAAAPRQARAELKANRTQLQAIITDLAPALTDRLGIGPVSAAQVIVSYSHPDRWPNEAAFAALAGTNPLPASSGQTVRHRLNRGGDRALNSAIHTIAVTRMRACPRTRAYLTRRTTEGKTPREIRRCLKRYIARELYRTLTSTLTT

SEQ ID NO: 500245 - protein, 353 aa, unidentified
MSEDKYIAFDVHQATTVVSVMNAAGREVKTAVLATQAQPLLGFLESLRGRLHLTLEEGTYAAWLYDLLQGRVAELVVCDPRHNALLKEGSKTDHQDAHRLADLLRTGMLRPVYHGNRSLRNLRELAHAYQALVQDTTRVMNRIKAYYRSYGIDCAGRGVYSRKQRESWLGRLPAGASRVRGELLHEQLEQLRSLRRRARRELLGESRKYLVAARLCGLPGFGPLRVALLIAGMQTPHRFRTRGKLWSYSGLGLVQKGSSEYRLVEGRAVRRPGALQLRGLNRSHRPGLKALFKSAALVAIRQPGPFQDYYQSRLQQGVDPAILRVTVARKLAALVLSLWKKGGRYRAEGVKQA

SEQ ID NO: 500246 - protein, 373 aa, unidentified
MPKYSTAFGMDVHLRSTTVCALDADTGEAVTRRFPGNPWGEIAGWMDGFPGPSLAAYESGYLGFAPQRELAGLGVECVVAAVSKIPRSAADSASKNDRNDAARMAKAILAHDISPVWVPSPEVEGIRDLAGAYDGATARLATAKQRLLAFLAKRGFAYGGTTPAGNPRKYWTYDFLRWLDKVRPEDDGGVRTLAALRNEVEAAAEARADLLSEYRAAVDASPIAAEVAALQSIKGCAFALAAAFSAEVGDFTRFRSGRQVTAYFGLAPSQRSSGDSVRLGGISGAGNALVRKLAVEGSWCYAAARHQPKLMPRDTGVPLEIRMHGRKGSERLLRRREEMLARGVPAAKANAATAAELVRWLWALGMMCREGAE

SEQ ID NO: 500247 - protein, 523 aa, unidentified
MNSFLVVLSYGFIKKFNHFLPSISNNRARSYYKVSQKIFLVDHFLYRYMITVAVVERSRPWGYDPVRKTVRPLLVETCLRLVGTMISYNKRSYDTARRIRGTGNYIWRRRFIMNPVIGLDVAKGESQVQAYLERKKPYKKSFKIKHDLDGLGSLLDFIKEIEDISGERPPLVMESTGHYHSPVVQYFEDKGYLIIIVNPLISYKAKSSSLRKVKTDIIDANHLCELFYKEDLEPYKKRGIQLMNLRHLTRQHDNITGMFVQTKLQFQAVLDQVFPEYSKVFGDLYSDVSLKTLQAFPTSEEVLIVDTETLATKIKEFCNTRSLKWANQQAEKLMIAAAQNPFQKVLYSSLALSLDMYINMLFEYKKHLSMLENEIDALAKSIEESKIIRSIPGIGEKIAATIVSEIGEIERFNHPKKLVAFAGLDPSVFESGTFKGTYNRITKRGSSRLRQALYMGVKCAIRDCRKQKTTDEILPRNKKLRAFYDKKREEGKPFRVAVIACANKLLHWIYALLKNKTSFQDLA

SEQ ID NO: 500248 - protein, 373 aa, unidentified
MNYSTVYVGMDVHKENFFLCCYTNEKEQAEYPQKVDGHYSKVINYIEAMRFHYGDDAMFICGYEAGCLGFTLYHQLTDHNVKCVILAPTTMLQQRGKKKVKTDKRDAALIARCLSHHDYSPVHVPTEQDEQTKEYIRMRDDHRLALKKVKQQILSFCLRHDYRFDGTKNHWTQAHLSWLRSLKPDGLYEEILKEYLLTYDSLIDKIERLDKRIEELASDERYSENVHKLSCFIGVGTVTALAVLTEVGDFKRFATANHFASYIGLTPGEDSSGDDQNRLGITKAGNRHIRRLLVESAQSYTRGQIGFKSKALKARQAGNSPEVIAYADKANERLRRRYYRMVLKCNKKTNVAKTAIARELACFMWGILTDNVA

SEQ ID NO: 500249 - protein, 365 aa, unidentified
MSKDIKKPAGETRRYVGIDLGDKKSRVCILDERGEIVLQEWVVTTPEAFFKRFHGEAKMDIAMEVGAHSRWASDLLGRCGHKVVVADPRQLALITKNDAKSDKRDARTLAQLLRADPRLLSPIEHRAENLQTDLTVIRMRDNLIETRTRLVTSVRGVVKATGGRLPSSETSSFPQQVSDLIPEPLRPALAPVLEVIDRLNEAIYEYDCLLEHWARTRYQESSRLTQVKGAGTLTALTFMLTVGDKARFSRTRDIGPYLGLRPRLGQWGDNEPQLRITKAGDGLLRKTLVECAQYMVGPFGQDSDLRRWGLKMIEAGNGSKRARQRAVVGVARRLAVLLMSLWKSGQTYDPLRHSRAQESSAEVAA

SEQ ID NO: 500250 - protein, 340 aa, unidentified
MTHIAMDVHRKRSVLAYQTPAEAEPKVVRCYTTRAGFARVLGALPRPWIVCLEATRQSPAVVRWLGELEVEAVQLVDPKGLKAFVKGKPKTDARDAKEMLALLQMGRLPKAYLAPPEVQEVRALTRARAYVRRGSTSLRNQLRALLNQHGLEVPARDLCGVAGRRQLAESVAQLGPLGQSAAGQLTPLLLATEQALDVLDGHVREELARQPVAQALMLLPGLGPVMALAVTAELGEIERFEDVAHLWSYAGVAPRAHDSDEYQAERHLPQRCNKRLRHLAVQAAQAAARCRQPSNARRTYQRLCRRGLHHNTAKVAAARELLKDIYYCWKRAGRATELAA

SEQ ID NO: 500251 - protein, 360 aa, unidentified
MGNGTFVGLDVHARSVVAGLIDEQTGEVKVQRAPHLTEELVTWIVGLEGPVRVAYEAGPTGYGLARACEAAGIECLVAAASLIARSPAGRGRKSDVSDAEQLARLLRAGELTGVRVPEPADEAARDLVRAREDARADLMRARHRLSKLLLRHGLVYEQGRAWTGAHDSWLGRQRLDHPGARAAFEDYYSAALGAGLRRDRLDEQIIEMAADPRWAPCVGRLRCLRGVGTLTAFALCVEIGDWHRLRGGTIAAYLGLVPSESQSGARHSRGPITKAGNSHARRLLVEAAWHHRRPVRASAPIERRRAGQRPEVRARAERAGQRLHRRWAQLEGRRGLRSTVVATAVARELAGWCWSLAVMD

SEQ ID NO: 500252 - protein, 402 aa, unidentified
MQVDDIDVFIGIDVGKSEHWATALTTAGECLHDRPLPNDEARLREVYEHLGEHGRLLVVVDQPATIGALAVAVAQDMGITVGYLPGLSMRRIADLSPGSAKTDQRDAAVIASAARTMPHTLRSITSSDEDAAALSMLTGFDLDLARQVNQVSNRIRGLYTQIHPALEGVLGPWLEHDSVLEVIATWPTPAALRKAGRARIDAKLKANGCRRHAAWAQAIVEALSKQTVTVAGTDAAGVVLPHLARQLIALHTQRADIAAQVEALVEAHPLYPVLTSMPGVGVRTAAVFLAGTLGKTFTTGAHLASYAGLAPVTRRSGSSIRGEHVSHGGNKRLKRAMFLSAFASLRTDPVSRTYYERKRAQGKRHNQAILALAHRRILTLHAMIRNGTLYNPQPAQPLTTTA

SEQ ID NO: 500253 - protein, 326 aa, unidentified
MTLSHSLDNTFIGIDVGGANLDVAWHRGDSAHYANRPDAIATLVRRLQAQPQITRIVVEPTGGYEKALVQALRRAKLPVEIIHTSRFTAYRALVGVKAKSDTSDARLLASYAAAPDEVRGRKAGYVELPEDAIREALSELASRRDQLKHMIHAEICRLGTVRLAELREAITTHIETLRAEDKQMHQKMLALVRQRADLQHDQRLLKTIKGIGTKSALVCLALVPELGRVDNKVAAALIGSAPFIRQSGTMNAPAHIHGGRAAVRSILYMAAVTASRHNPVLRPFYERLIAKGKPPKVALIAVLRRLVVFANAVLKSRQPWRGANAT

SEQ ID NO: 500254 - protein, 355 aa, unidentified
MSQEKYIGMDVHQATISVAVMDAAGKLIMECLLQTKASTIVEFIQGLQGTLSLTFEEGTSAAWLHDLLKPHVSRIVVCDPRKNALLKDGNKSDRIDARKLAELLRGNQLHPVYHGAHGVRTLKELGRSYLTITQDVTRVMNRIKAVYRSWAIPCAGTTVYAPRHRAEWLAKIREPGVRVRAERLYQQLDLLQPVRLEARRELLAESHKHSSVKLLRQIPAIGPIRSALLVALLQTPHRFRTKRQLWAYSGFAVETHDSGEYRSVRGKLQRNRERMTVRGLNDNHNRDLKNLFKSAAISASTRPGPLRDFYVARVEKGMRPTMARLTLARKIAAISLTIWKKGVDFDAKQIDQQAA

SEQ ID NO: 500255 - protein, 271 aa, unidentified
MAVYYIGADVHFNNTELAVEHNKEIIRRFSVPTTIPTIRSVLKELNGRCHLTFEEGPMAGWLYRNLKDDVDSIIVCDPRRNKLIACDGDADDVIDSGKLAALLRGKFLRSVYHDHDTKQLELKQWVRLYHDFVKSATRNINKVRGCCRGEGIRIPSRAIKTGAYRQQWLDGLENQVLAEQVCLLWQGYDIAASQARVAKKQIAKRIKGNAVLQRWSDLAGIGTIRAATIYAYLDTPWRFKKKNRLWKYCGVGLQHSASGKDAKGRPRKGRL

SEQ ID NO: 500256 - protein, 339 aa, unidentified
MRLYVSMDLHSSNCYTGIIDEGSKKLFNRKLANDKRRIISALVPYKEEIAGIAVESTYNWYWLVDTLMEEGYKVHLANPSAMKQYEGIKYLDDRHDAFWLANMLRLGILPAGYIYPRETRGVRDLLRQRSRFVVQKTSLKHTLQQIYCNNTGIILRNNTLNDIEEEEIKSALGEEDLSYSGTSILATIRFIEGQMKAIETHILNRVKGEPLYPSLMTVPGIGVVPGLTIVLESGPLDRFASAGHYASYCRCVPTAYWSNSKQKGGGNKKNGNRYLSWAYAEAAHFAIRSCKEAKAFYQRKCAKTNQPSAYRAVANKLSKACYYMMKDRMPFDAERLFQR

SEQ ID NO: 500257 - protein, 360 aa, unidentified
MQRQITTLDFKGQNIFVGIDVHLKSWTVTILTEELTHKTFTQPACAETLRNYLKRNFPGGDYNSVYEAGFSGFWAHYKLKEMGINNIVTNPADVPTSQKEHLQKDDPTDSRKLARSLRNNELKAIFVPNPATLEDRSFVRMRATLVKDMTRFKQRIKSFLYFYGISYPPQLEKSGSHWSKRFMKWLSEEVSLQHDSGTQALKILVQEAEQQRKLLLEVLKKIRLLSCSEKYAKNIALLRTIPGVGPITAITFLVEIENIERFENTDHFAGFVGLVPNRHSSGPKTNDGEMTFRGQKTLKTLLIESSWTAARSDPALMMSYLSYVKRMEPNKAVVRIARKVLNRMYYVLKNKMEYVPGVVK

SEQ ID NO: 500258 - protein, 342 aa, unidentified
MGEVSIIGVDLAKNVFQVHGAAADGSVVFRKKLSRPQFARFMADQPPCLVAMEACASAHHWAREMARHGHEVRLIAPHYVKPFLKRQKNDAADAEAIVEAALRPTMRFVEPKSVDQQARAVAFRTREQLVKQRTEAVNALRSHLYEFGHIAPEGIGYLPRLAKVVDDPGSGVPDLARDICRMLIDQIAQLTARIDALKARIAAMSQEADLPRQLQTMPGVGPITALAVETFAPPMEQFRRGRDFAAWLGLVPRQHSSGGKQKLGKTSKMGQRDIRRLLVIGAAAVIRWASRRGAPKGSWLARMLERKPVPVVATALANKMARGIWAMLTRGESYRGPVLIGA

SEQ ID NO: 500259 - protein, 460 aa, unidentified
MQINGSSEKQAGVASVGVPVRVQVGIDAAVVANHHICVRTVGVDGTERTDRFLAAPTLAGLQLLTRRLSPYPGAVAVAEPTSMTWLSLSVAVSEAGGQLALLGSRHSARLRGAVIGKNKSDVIDADVLARAGDVFTLRAMRAPEPTQLALRRACTRRGAAVIDGNRYWRRLMSLARWAFPDVWNAFAGSLPTALAVLDRWPHLAHLGAARRASLTAVVAEHTRAVADVPARVEDIRSTATAWAKFWDGHLDLDALAWDVSEHLADYDAALQRVERATTQATVYWERLFGDDELLHSLPGIGPATGPTIRAFLGDGTAFGSAKEAACYTGLVPSNWPSGPVVQPSRAITKEGPAVLRLACYQAANVARAVDPQLAGLYYRLMVEHGHCHTQANVAVARKLVERIWTVLTRAQNYQLRDPDGQPITSRAAKTLITERFTVPADVRKRARAHSAGTHRGRLAR

SEQ ID NO: 500260 - protein, 427 aa, unidentified
MNYTQNEKIMSITEKTLVIGIDIAKEVQYARAFDYRGIELSKVQPFGNTSHGFKMFEEWVKLVAKENQKKTIIVGLEPTGHYWFNLGSFLRNLGMKLVLVNPFHVKRSKELDDNSQTKNDLKDPKTIAKLVIDGRYSEPYIPEGIYSDLRIAMNMKESLSKNLNIIKNKVDHWLDKYFPEFSDVFADWEGKASLISLTEFSTPEKVLSVGVQQIVETWKKSVKRGVGFNRAVRLVEAAKISVGIKEGIRMAEKELKANLEQYELYLKQYEQLEKEIEQLALQIPGVKEMLTIKGVGIMTAAGFVSEVGDIKRFTHPSQIQKLAGLNLIENSSGKHKGKTSISKRGRARLRALLFRVIMPLVSKNNEFKMLHEYYTSRKENPLKKKQSLILLCCKLIRIFFAMMNKQVEYNPQKLIKDTGFDLLPRVA

SEQ ID NO: 500261 - protein, 348 aa, unidentified
MWIIGCDFHPSWQQVAWCNSETGETGEQRLEHSNGEAERWYGQLPVGSRIGLEATGNSQWFVELLQRLGHEVWIGDAAQIRASYVRKQKTDKRDAAHILKLLLEGRFPRLWRPSPEQRDIRQLLIHRHKLVEIRTRVKNGLQHLAMNRGMQKKRQLWSEAGQRALRELAMPGWAGCRRQDLLETLAYLDRKIAPLDRAAEETAQRDKMALLLKTQPGVGPITALAFVVTIGEASRFPRGKQVASYLGLIPREHSSGGKQRLGGISKQGNRFLRQLLVEAAQSAVRYDDSLRRPYLYRCHRKPKGVAKVAAARQLAVRLYWMLRTMTPYPEIVRIESSPRVALVVRHGG

SEQ ID NO: 500262 - protein, 311 aa, unidentified
MNDTIGIDISKDTLDTFWLSKRKHKQFANTKVGLRALIRWVREAEVSLVVFEATGVYHRLLEASLAVHDFPFARVNPRQARRFAEGTGTLAKTDRVDAAMLARMGSLLELQADKPKSEMLHNLKGMATARQALIKDRTAARARLATAAYPLLKKQATLRLRQVERDIAQIDATIETIITSDKTLSEKAEILISIPGIAKVTAFAMLIEMPELGSLSGKQAASLAGLAPISRQSGKWQGKERIQGGRACLRRAIYLPAVVATRFNPDMKAKYHELIAKGKCKKLAITAVMRKLVVMANALLRDGRKWTETRA

SEQ ID NO: 500263 - protein, 496 aa, unidentified
MPIIRPNAIRIKRFRELKETLRTNRDRLLVGIDIAKAHDVAQVRLAHTQILDKHLTIPNTAAGFAAFWAHLEQRRAETGLSEIVCAVEPTGTYHEALAQFLETQGADVVLVSNTVAHHNRRTLDGTWGKSDPKDAHNLCDLLERGHVLFYSLPDGPLAELRRLVRLLRQARTELAACKARFRNTLLPRLGPAGEALPLAVVATLPGPLQVFVPPPAPDPGPRRRPARRPVRGAEDAPALGPLPPALAYECTDLAARLTAVQARITQLAAALVQIATPLPAYGWLLSLPGIGPTLAAILLAEIGDIAWYTRFSQLRKLAGLDIIWVASGKWTGTTRISKCGRPLLRWALYQAALGACRNPGWHARREALIAKRQGDRYAFLKANTELAAKLLRLTWGVWRSGRPYDPARGAGRPAGPPPLCRGRRRAAPAAQTGRGGSRTGGASLAPRVPAAGRDALRPSPLPPQAEVVFRSPSRARSPVARLASTLAVPGKARGGR

SEQ ID NO: 500264 - protein, 318 aa, unidentified
MEAFRTHVAGVDVHKGMLAITVLRGAAGDVPEVLQFECQTFTEDLMACGQKLLELGVKDVAMESTGVYWKPIHNTWSPMGLKLTVAQAAHVKNVPGRKTDMNDSHWLAELHRFGLIRASFIPEDQFQRMRLLSRHRTNLTSDLARIKNRVQKTLEDGNIKWGSIVSDVFGKSGLAILRLLASGQTDAGKLTLAVTTKIKRIEDARKALTNCFTREHCFLIKELMDQYDHLQKKLVTIDNELFDKVKPYRHLVDELKRIPGIDDVLAIGIIAEATTDMSNFEDERKFAAWAGVAAGNNESAGKKKDPSAAKATRICADC

SEQ ID NO: 500265 - protein, 326 aa, unidentified
MLYAGMDVHKRFCQIIVCTKEGEVVKKGRIKTDEKEIREFFYGLKNVKVAIEASANYSYIVDALAKEGYEVLVAHPLRTRAIAEAKIKSDKIDAKILADLARGNLIPTSWIPPKEIRELRDLVRQRIFLVKQRTKIKNKIHAELIKRGIECRGNIFTKAGKEWLHSLKIPAIETYLSIMEKLEEEIKKMDKRLKEEEKKFEEVKLLKSIPGVSTFSALVILAEIGDVNRFPDEKKIFSYAGLVPSVHKSGDRVYYGHITKQGSKYLRWILVECARIHVRKCDSKITEFYRKLRRKGKHENVAIIGAARKLLQTIYYMLKKGESFHS

SEQ ID NO: 500266 - protein, 380 aa, unidentified
MEKDIRYVGLDVDSERAAVAVADSGVAEVRCLGMIPNTGESVQRLVKKLGPVGRLRFCYEAGPHGYALYWQLTQLGAHCDVVAPTLIPVKSGDRVKTNRRDAEKLARLYRSGELTAVWVPDAAHEALRDLVRAREAAKKDQLRAKHRLGKFLLRRGLKAAAGIKSWTLKHLAWIKTLYFEHPVQEATFLDYLHEVEHACERIARLERALDQAIETAPSAMRALIDGLQALRGVSSLSAATIVAEVGPPSRFPRPKQLMGYSGMVSSENSTGNSVRRGAITKTGNAHLRRVIGEAAWAYQRRPSMYAALKKRQEGLSEEVKEIAWKAQHRLSGKYRRLLAKGKLHQKAVVAVGRELLGFVWAIGIQVEKEQRARASYGRVA

SEQ ID NO: 500267 - protein, 357 aa, unidentified
MQLQDALTIPKIFIGLDIHKKSWTVSIQTDLFFHKTYSMPSNAEDLYQYVERTFPNHAVDLVYEAGCCGFSAARYFLNLGWNVLVVNPSDVKTGDKERYQKTDALDSKNLSNQLKSGVLKGIFIPTEEHEQFMTLARHRTQVTKKLRQTKSHIKSMLLFHGIKVPEEFDNSNWTIAFIAWLEEIKFSTSCGDLALQGKIRMFKFIKSEYLEIANQMRAYCRKNNKKDYNLLKSIPGIGGYLASVILAECGDLRRFNNEGQFSSYIGLVPGMYNSGGSEKCLGITPRSRSQLRSYLVEAAWIAIRKDTEMQNYYRKHQGKNVKSVIIKVAHKMARRILSVIKTETPYQINRNLVLEEQ

SEQ ID NO: 500268 - protein, 343 aa, unidentified
MESIHYVGLDVHKKTIAYCIKTVSGKTVRQGMVGAERKALRQWLTELPGPWMGALEATIFTGWIYDFLKPYAVELKVAHPEMLKAITAAKKKNDRADAEKLADLLRVDLLPECIMLSEELRELRRILRYRNLVVRTATKMKNKMSGLLMEVGATYDKRRLHGRKYFSELLERVEDVPESVKDLLRLSRGNLELFTSVQKKLTKTLREQPLIRERVERLMSIAGVGEVMALTWVLEIGDPGRFSSSRQAISYCGLCSAQRESAGKEHRGPISKKRNKHLQTMLIEAAKLAPYWNPQLAALHEKELAKGNRNRATLAVARKLVEYLLAVDRRGTPFVAETPPQVA

SEQ ID NO: 500269 - protein, 389 aa, unidentified
MKIFVGIDIAKLNHFAAAISSDGEILLEPFKFTNDADGFQLLVSKLESFDKNSIIIGLESTAHYGDNLVRYLVAEFYQVCVLNPIKTCQMRKNNVRKTKTDKVDTFVIAKTLMMQDDLRFITFFDLDMMDLKALGRFRQKTIKQRTRLKIQLTTYVDQVFPEIQYFFKSGLHQHAVYALLKEAPSPKEIASMHMTHLANLLKVNSHGHFTKELAKELRVLAQKSVGANDSAISIQITQTIQQIELLDSQLEKIEAEMTDIMKFNDSVIMTIPGIGYINGGMILGEIGDIHRFSNPSKLLAFAGLDPSVYQSGNFQAKTTRMSKRGSRVLRYALVNAAWNVVRNNATFKAYYDAKRAEGRSHYNALGHCAGKLVRVIWKMLTDEVEFNLE

SEQ ID NO: 500270 - protein, 386 aa, unidentified
MKKDSIAKLQVTKSQIRRKAAKQRLTVGLDLGDRTSRYCILNEGGGKEREDQLATTKAGLESIFGKMAGSRIALEVGTHSPWVSRHLAAMGHEVIVANPRKLRLITQSVKKNDRMDAEQLARLARVDPELLGPIRHRGREAQGDLAIIRARAELVDCRTGLINTARGLAKPMGERLKSCDADYVKETLAEGLSEATQNAIRPLLKSVEELSRQIGAYDKKLQEMEKRYPETKVLKQVNGVGTLIALTFILTLEDAERFAHSRDVGPYLGLTRKQRDSGESQPELGISKTGDVLLRRLLVQAAHCILRDGAPDSDLKVWGLSKVQAGAKTGSGKKGSKRRKKKATVAVARKLAVLLHKLWVTGEVYDPQYNRKAAEAAKGKEKAAAA

SEQ ID NO: 500271 - protein, 418 aa, unidentified
MKKDNNSAKKSEPTVKRAKSRAPVQRDAKEVLAEVLGKLTGKLDAPAVSTNSKENRRGNTVGPNRDRMTVGVDLGDRWSQYCILGLEGETLAEGQLRTTQEDVGEFFQALTVARVVIEVGTHSAWVQDVISEWGHEVLVANPRLMEGSKRRKRKSDRIDANKLARLGRVDPQSLYPIRHRSREVRQDLVVLRARDALVSVRTELINTARGLVKSMGTRLPRCSSPSFAEKVKHAIPVEVREALLPLVQLTETVNDCIARYDQKIEELGQKKYGHTTLLRQVKGVGPITALAYVLTLEDPQRFSNSREVGPYLGLVPKQEDSGDSQPQLGISKTGDRMLRRLLVGSSQYMLGAFGPDTDLRRYGLRLCERGGKNAKKRAVVAVARKLAVLLHHLWVTGDVYEPLHRSGAGTGTAHAAAA

SEQ ID NO: 500272 - protein, 353 aa, unidentified
MTLYIGVDFHPHQQTAAWCDTDTGETEIVTLLHDLEKVKEFYSSFPEPAIVGTEASSPAQWFEDMLDSAGHKLLFGDPFKISRSKQSRHKNDDDDADHMLTLLLRDEFPAIWRRSPEQNRVLDILRLRLSFVGQRTATYNRLQALAHTVGLPKGKMRTVGYQNRLKDAELDEAGTLQRSHLFSVLENFNLQIAELEAWLEKRADSNPQVQLLMTQQGVGYLTALAVANTLGDVSRFDKVPKQVTKFIGYDCLERSSAGKRRYGSITKAGSPLVRFLLGQAAQTAIRYDTKLKSFYKRLAKRKPKKVAKTATARKLLVKLSIMLRDNISAQEFDRRGRAVGNARRSAGSEMAVA

SEQ ID NO: 500273 - protein, 408 aa, unidentified
MNPLYVGIDVSSKSNVVYFMLPDGSKHCNFSVANSHTGSSQLVKRILSAMTSCSLDTVLIGLEATSVYGDNLVYFLREDAALARFNSKIHVLNPKQVSKFKEAYNDLPKNDLINSFVIADCLRFGRINKEVYIGDYRYKALQNLTRARYFAVSNLIKEKQRFMNILFKKYSTMTQEKVFSDTFSTTALAVYDEFESAEALADMDLHELTAFIMEKGKNRFPNPNAVAKAIQKAARSSYRLPKTVNDSVNQVLSISITSIKALEAQIKEFDKAIATQMELLPNVLISIPGIGPVFSAGIMAEIGDINRFHNQAQLAKYAGLAWKQHQSGDFEAQTTRLINSGNRFLKYYLCEAAFSLVRCDKEYSDFYHLKYKEVNRYQHKRALALTARKFVRLVFRLLKDNRLYTSAE

SEQ ID NO: 500274 - protein, 355 aa, unidentified
MNSIKYVGLDVHRDTISVAVLNADGKLVMQSVIATHATTILDFLRGLRGTLQVTFEEGTHSAWLYDLLVRRVAHLVVCNPRKNALLKAGNKSDAIDARKLAELLRAGLLSPVYHGQNSTAAVKHLGRSYAALTEDTTRIMGRLKALYRGQAIACAGKKPYGLRHREEWLAQLADSGLQRRTRRLYQELDLLQQLRREARHDLILECRKHSETKLLRTVPWLGPIRVALLIGRVQTPHRFRTKRQFWAYCGLALETRDSGEYRVINGQIERKKKPVFIRGLNRNHNHDLKNLFKSAATTASGSDGPFRPFYENLLKKGMRAEMARLTLARKIAAITLHVWKKGEPFDAEYLKSQAA

SEQ ID NO: 500275 - protein, 338 aa, unidentified
MRLYGAIDLHSNNAVCGLIDTQDQVKMRTKTPCDLDVILSAFGPFKKDVCGIAVESTFNWYWLVDGLMDAGYRVHLVNTCAVKQYKGLKHTDDDTDTFWLAHLLRLGILPTGHIYAKETRPLRDLLRKRSQLVGLRTTNILSIHNLYSRNTGARLASNAVKHLTRERLEQRFGDENLVLAIDSNRQIVRVLDEQIGVLEESILAQAKLDPRYRYLLSVEGVGKILALTIMLETGDIARFEKVGNFTSYCRCVDSTRWSNGKKKGKGNSKNGNKYLSWAFVEAANFAVRYHERAKRYYQRKMAATKRVVAIKALAHKLARASYYVMRDQVPFDPDKLYG

SEQ ID NO: 500276 - protein, 389 aa, unidentified
MSQAFDASRSLTALEQHNTIIAVVEMSQSKWLVAAVVPGIKRQPLKKLDADQESLLKLLHRWRKEAELAGHPIKRVVVAYEAGRDGFWLARWLRMHDVEAYVIHPTSIAVSREHRRAKTDRLDTELLLRALLGWLRGEKRHCSMVAIPTAEEEDAKRPNRERDSLVTEQTRIVNQIKAILIRFGIRSFRPKLRKAEQLLKDLRTAEGSPLPDNTRAEMYRHLVRLRMVREQIRAVETERLQKLKAEHGRKKGPHAMVRLIARVVGIGVETADMLVNEVFSRRFRDRRAVARYAGLTGSPDESGKRRREKGLARAGNARVRTGMIQLAWRFLRFQKDSALAQWFQTRAADGRGSTRKTMIVALARKLLIALWRLVTTGELSDGIVLRPAS

SEQ ID NO: 500277 - protein, 329 aa, unidentified
MNNTPVHHSYPLLGIDISKATFDARLVLDSAHSHHQQFANDAKGFAALDRWLAQHGVRRCYAGLEATGPYGHALLWHLHSHQHAVSLLNPRHVKDFARSQGRRVKTDVADAMVIAQFLRSHQPRLWSPPAPSIAQLQALVRRRHQLMVMMGAERNRLAQAPTCMKPGIRRLIGLLRKEVVSMDKSMAKLIIADTHLQKAERLLRSIPAVGAQVAATILSEVPALSSFARARDVAAFAGLTPSIHQSGTSVRRRGAMSKEGSALLRKMLFMAALNVAKRPDNPLHATFAALVARGKAKASAIGAIMHKIIRIAFGVLKHETPFVPSLAKL

SEQ ID NO: 500278 - protein, 376 aa, unidentified
MNKIIRIGMDTSKSVFVLHGVDAAEQPVLRKKLRRSQVLAFFAKLEPTTVGMEACGGAHYWARELRALGHQVVLLPPQYVKPYVKRNKNDAADAEAICEAMSRPTMRFVPVKTIEQQAALMLVGTRDGLIGRRTQLSNTIRGYAAEFGLTTAKGLDKIEPLLGRVASAELPKLAKEMFALYGREYAQLQRQIMNIEAKLMAWHKNNELSRRLVEVPSIGPIGATLLAMKVTNPHAFRCGRDFSAWIGLTPKDHSTAGKKRLGVITRAGDESLRSVLVAGATAVIQQAQKGRGYSPPWLLELLRRKPPKLSAVALANKMARVAWKLMVSGERYNPARMVAQADASEGRVAALCKGSAPRPSLASRISAREVPAMTKA

SEQ ID NO: 500279 - protein, 322 aa, unidentified
MKESLSVFVGIDVSKAELVVATAGQPGGQCIANDNASIAQWLNTLPANAALAMESTGRYHQQVLTLALAAGLRAYVLNARDVYFYAKGLGARAKTDALDAQVIARYLAEHHASLHPWQAPPAVIEQVQRLLGQRSVVATKRAALRECLQGEHTVPAALAEPLQALEDAFADLLRGMDRRITQLLEAAPELSQRRALLQSIVGVGPQTSALLVGLLARLPFASADALVAYSGLDPRASDSGKSRGRRRLSKRGPPLIRRQMFLAAMSASHTKTFKGVYQKLRDRGLASTEALVVLARKLLRIAFAVWKTQMPFDASRFLANMA

SEQ ID NO: 500280 - protein, 361 aa, unidentified
MNGSSEQPSMTAGLDLGDKYSYLCLIDTQSGEVIEEGRLRTTPEALRRRFASEQPLRIAIEAGTHSPWVSRVLEECGHEVLVANPRKIRLIYATKRKTDELDAENLARLARLDPKLLYPLNHRGEDSQAHMAIIRSRQALVGCRTQLVNHVRGAVKSFGGRLPKCPARSFHKKAPEHIPEALWPALGPILETIGSLTERIRDYDRQLETISEEHYPETELLRQVEGVGVLTALIFVLTLEDPHRFERSRSVGAYLGLVPARDQSGDRDPQRRISKEGDEMLRRLLVGSAHYILGPFGSDSDLRRHGEKIASRGGKNAKKRAAVAVARKLSVLLHRLWVTGEVYDPLYNTHRRQEQKQEEAA

SEQ ID NO: 500281 - protein, 368 aa, unidentified
MGQKSSKLYVGMDVHKESIDLAVAEEGGELRHHGQIGGDMNALWRAVRKLESLGRELVFVYEAGPCGFGIYRGLTARGHTCWVVAPSNTPRRVRDRIKTDRRDSLKLAGLARAGELTPIYVPDMRDEAMRDLVRAREDAVVMQRQARQRLAALLLRNDVRYAGKTAWTAAHRRWIAELKLPQSAQRLAFEEYVQAVEEASARVQRLSQCIEQELATWRWRSVVAALQACRGIQLIHAVRIVAELGDLCRFSHPRRLMAYLGLIPSEDSSGEHRHQGAITKAGNSSARRALVEAAWAYQYGAKVSALIARRQADVPKAALDIAWKAQVRLCARFRRLAARGLNRNKIVVAIARELAGFVWAIAQHVKPI

SEQ ID NO: 500282 - protein, 314 aa, unidentified
MVQAIGIDVSKGKLDVGLINFDQTTNNLQCGNDHHNIPSLVKTLQSYQDIEDIPIVIEATGGYHYGITFALIEKGLKKVFVINPIITKKHLSSQIRKIKTDKKDSILLAKIGLLEDLHTYAESRQEVLFKRNIRLFHFLKKQLQQVNNRLSSAKSLSIENDFEQEMLLETKKNFDTQLKKVTQVIIKGITIEMPQIKGLSELHLKAITAELGNIKRFKNHKQIVAFAGLDPSIRESGSSVRGKSKLSKRGSKTMRYFLFQSAWGVMMHNDKYKEYYQKKRAENKHYYTCLSAIARKLLCEIYHNLKEHPYSINS

SEQ ID NO: 500283 - protein, 338 aa, unidentified
MMIIGCDFHPRFQQIAFVDQETGEYGERRLNHPGEAELFYRSLAGRKVRIGAEATGNFRWFRKLMQELGHEFLLGDASAIRAACPRRQKTDKRDARHILNMLVEDRFPAVWQPPVENDELRQLLLHRCRMVRMRTRVKNQLDSMAKNEGLLSSRVWSPKRRQEIEALALPNWYAQRRSDLLGVLDELNKRIKPLDEAVLQAAEENTEARLLMTHPGVGPVVSLTYVLTIGDWKRFPRGKQIGSYLGLIPAEESSSDKRRLGHISKQGNTLLRWLLVEAAAKAQRYDPGWHRQYVRLSMNKHHGVAKVAIAHKLAVRLYWMLRSGQDYKQVMERGSHVG

SEQ ID NO: 500284 - protein, 451 aa, unidentified
MAKRKLKMDIINPNAAGIDIGSRSHFVAINQEHSDVKEFGVYAQDMKELLEWLLINDVKTVAMESTGSYWQNLYAELQNSSIEVILTNGKFTKNIKGKKTDVLDCMWIQKLHTLGLLSGSFLPDLQTEHLRTLVRHRGNLIYTTSKASKRMSQNMRLMNLRLDVVVKDIVGLTGLKIINEICNGETSGKELAKLRHGNCRKSEEEIAKALQSNNRQDYLFVLKQELHKYQDAQQLIIECDVEIKKLLDEFINQDDVKKSLYIDKKVHKRINKNTPKNIDLNLMSYQYFDGVDLYAIEGFSHGTVLSLMSELGEKGIQKFQNAQHFTSWLRLAPNNKISGGRILSSRTPKGSNRLKIALRQAANAIGNLKDTHLSNFFNRIAYRKGRSVAVSATARKLAAILWNMLYKNQQYNPPTVYEYLDQKRKKKVLELQKQIANLDARMSNLQTSVSC

SEQ ID NO: 500285 - protein, 338 aa, unidentified
MAIVTIGIDLAKNVFAVHGINEAGKPVLVKPTVARGKLLELIASLPPCTIGMEACSGAHHWARLFMAHGHTVRLMAPKFVAPYRLSGKQGKNDAADAAAICEAVQRPHMRFVPIKTVEQQGQLCIHRVRQGFIEQRTATINRIRGLLSEFGIVLPLKAATIRREAMAHLEDLPGWANTVIGDLLNEVSHLDKHVEQYDQHIEQIAKEDTRTQQLMRLPGVGPTTATAILAMIGNGHEFKCGRQFAAWLGLVPGQYSSGGKARLGHITKAGDSYMRSLLVLGARAVLNSAKNKSDSTSRWAVALAERRGYWRAIVAIAAKNARMAWASLTLGERFAMPA

SEQ ID NO: 500286 - protein, 390 aa, unidentified
MVKHPTASAVGAKGSVASRSANRVRREIDRVEVFKAVTERDPRRTCGKIPNSRWSRRRAKRSPSSHLQDGEKTMSEALFVGIDVSKDSVEVASCPPELRLSAPNKASGFRQLLDVLKPREIALVVLEATGGYERPLAAELAQEGYNVVVVNPRQVRDFARGLGELAKTDPIDASVLARFAQVVHPKPRPRSSDTQGALAELVTRRRQLTVLLTAETNRLETMREKHVISSIRRVIKTLQDQIRQLDDLISDHIQSDDGFRQKDQILRSTPGVGPHTSAMILAHLPEIGRLNRQQIAALAGVAPWDLRSGKYVGKARIWGGRKEVRCVLYMAALTAMRCNPHIRAIAERLRKAGKCFKVTITACMRKLLITLNTLVRNNSPWQSDFQLKNA

SEQ ID NO: 500287 - protein, 344 aa, unidentified
MQPKQYVGIDLHRRRSVVVRRSAEGETLEATRIDHEDLGAFERAVMAAGEHPEVVLEAAYGWYWAVDWLQELGCEVHLAHPLGNNWGHRRVKNDLRDAEDLADLLRMGRLAEAWIAPKEVRELRELVRYRAKLVCLRTNCKLQVYAVLAKEGIAVPMTDLFGVGGMELLESCHLATAYRTRVESLRELIEVFNRQIAMLETDVYHQVAGNTGYKAIQVIPGVGPLFASVFVAEIGDVTRFKSPSHLSSWAGLTPKHHESDLTVRMGPITKQGSRLVRWAAVEAAQRQGHGTKLRADFARITANHGDTPGARKIARVAVARKILTLVYYGLRDGTIRSKVVVKAA

SEQ ID NO: 500288 - protein, 397 aa, unidentified
MILLLFVGIDVAKHKHDIAILDDSGVILKSHLRIKNNRGGFKLLNQTLEKLYHSLAEEIFIAMEDTGIYSLNLFQFLRSKRYIVHTYNPLLIKEFAKSTSLRKTKTDKRDALTIAYKCYLDRMDSPPKVDPVIEELKRLTRHRSRIGQYQSDLKIQYTRVIDLVFPELASLLNPVNLHLKYVHAMLSVYPSTTQLANAHLTSLTTLLKKASKGRVGKSRAIQIRDLARESIGTVSDSLSFELIHLIKTIRFYRHMIQETDQQIESIMAEIQSPILTIPGISFRLGSVILSEIRSIEQFQNPGQLLAFSGLEPSIYQSGEYSGQGKMVKRGSPSLRWAILQAARLIAIQSPVFKTYFIKKREEGKHYNVALSHVAKKLVRVMFYLLKSEQSFDESKLV

SEQ ID NO: 500289 - protein, 504 aa, unidentified
MLKIVYRVCCGMDVHKSFVVACIASTNEYGVTTYKSKRFSTFTRDLRRCADWLSENNCKDVCMESTGKYWIPIYNILEPTCNVVLAHPKYVKAIRGKKTDKRDAKWIADIFKHDLVAGSFIPPADIRQLRDLVRYRWKLTNFTTGEKNRAQNCLTVSNFKLDDVFSDVFGKAASAITTRILEDPTEKITDVSGFRTKGMKATNEQVLAAVDGEMCEEQAEKLRIIRSHMDSLELCKLNLESLILSTAEQYLPQLNLVMTVPGIQSFATIGIISEIGVDMSVFPTSKHLCSWAGLTPQNNESAGKKKTTRISRAGAYIKPLLVQCALCAFVPSSSRNSVIATLHSKSAVGTRKPLLPLPECSLRLSTICSRRTRRTTLKSTERATDHLHTARFLWKKHLHSTTARLLSNCSANILDFKHILVFSPLLGGLILCALFSEWYLNYNVSTFSPLPQHQKRARCALQRALDLLSMGQIIFHQSLEQLIPVHFSDQRPGVIVVGDIGGIF

SEQ ID NO: 500290 - protein, 386 aa, unidentified
MKTRNPPIPTRDAENAAVIFVSIELSKKAWLTAIHTPLADKVGLHKLEAGDSASLLALIHRITKKAERTMGGPVTVLSCYEAGYDGFWLHRVLAEAGIINYVIDPASLQVNRRARRAKTDRIDAMGMLRALMAFHRGEDQVFSVVQVPSIEKEDARRVHRERQRLIKERIQHVNRIKGLLATQGSYDYEPLRRHRLERFEALTTAMGRPIPHHLRDEIVRHLQRLELVLEMIRAVEAQRDAVVEAGPAANESGRKIQQLVRLRAIGPQFATVLVGEVFHKHFANRRQVASYAGLSPSPFNSGSLIREQGISKAGNPRARTTMIEMAWLWLRYQPHSALSCWFHERVGMGTGRVRRITIVALARKLLIALWRFLETGLVPDGAELKA

SEQ ID NO: 500291 - protein, 311 aa, unidentified
MDATVVGIDVSKNQLDVHIRGQNESFVVPPDAEGLAALIERLRPLEPLTIGLEATGGFETFVAAGLASAGLPVVVVNPAQVRAFANALGKRAKTDPIDAAVIAHFVEATAPEMRPLRDEETRLLADLVARRRQIVAMIVAERQREMHAPARVKKSIVRLLKALRRELDSLDGDIDESVKGSPIWREKEDLLASVPGIGTTIARTLLAELPELGTLDRRKIVALVGLAPWTRQSGQWRGKSFIGGGRASVRAALFMGAMVAARYNPALKAFRDKLVAAGKPKLVAIIATARKLLVILNAIVRDKKPWADQTA

SEQ ID NO: 500292 - protein, 345 aa, unidentified
MQGMYYIGLDVHKRTISYCVKDGSGKIYAEGTIHATRFDLDLWMRTLPQPWTAAMEATVFTGWIYDHLQPHAAALKVAHPLMLRAIAAAKKKNDRIDASKICDCLRCDFLPECYMASTALRERRRTLRYRNLLVRQMVQMKNKIAVLLMESGVRYNKQRLHKAGYFRELLATNPDIDEGLCSLLRLCRETVVRLQRTESALVRSLERDSFLMDRVERLMSIPAVGPITALTWALEVGDVQRFSSIKKAISYCGLCGAEKSSANTVQRTPLSKQRNKHLQTTLIEAAKMAPRYSPVLAMLYDKERQKGNGNRATLAVARKLVAYLMAVDRGQRNFQVVETSHCTAA

SEQ ID NO: 500293 - protein, 358 aa, unidentified
MRMAVYVGIDVHKKYCQAALMNDNGKLERELRFDNTTKGAEGLVNLAKSIDPEIKAVLEPSANFWIRIYDKLEDEGVEMKLSNPLRTKAIAEARIKTDRIDAKTLATLLRGDLVAESYVPNRKNRERRAIIRHKASLMHMRVEIKNRIHALLDKHELTHNYSDLFGKEGLEWLRNQQLPTIDHQILQSNIQILETVTVEIDNADIQIAKDAVNENQAKLLMTMPGIDYYAAMILLSEIGDVKRFPTPDKLASWVGLTPQVHQSGETNWTGHITRKGSKRARWILGQCAQSARQHDPRMRNFYERIERKHGSSKAIVAVAHKMVTIMHVMLIRNEPYRGQNIQLTEQKHKRLDRIANTA

SEQ ID NO: 500294 - protein, 345 aa, unidentified
MEITTVGLDIAKRVFQLHGVDAAGKAVLRRKLQRSEVLAFFKALPSCLVGIEACGTAHYWAREIRELGHEVRLMPPSYVAPYVKRGKTDAADAAAICEAVTRPTMRFVPIKTAEQQSVLMLHRTRDLLVRQRTMLVNAFRGHMAELGVIAPQGIARVAELMAVLSGEDTTKVPALAREALRGLAAELEALDRRVKEIEVAIVRWHKDNEASRRLATIPGVGPITASAIVATITDPFQFHSARHLAAWIGLVPRQHSSGGKQRQGGISKQGDRYLRRLLVLGATAVIRHSRSKSTAEAGWLKSLLERRPARLVSVAQANKTARIVWALLVRGEAYRMPAAVPGGAA

SEQ ID NO: 500295 - protein, 400 aa, unidentified
MRFYTGQHRYYCGIDLHARRMYICVLDAEGQVRLHRNGPATPEHFLATIAAYREDLVVAVECIFTWYWVADLCAREGIAFVLGHALYMKAIHGGKAKNDKIDAHKIAVLLRGGMLPMAYVYPREMRATRDLLRRRCHFMRKRAELLTHTQNTASQYLLPAFDKKLAYKANRTDVAERFADPEARKSIETNLALLDQYDRLLTDLELHLTRSAKVHDVNAFYRLRSVPGIGKILALVLLYEIHDIHRFPRVQDFVSYCRLVKCATQSDGKHYGYSGTKIGNAHLKWAFSEAAVLCLRGNPAAQRYLTRLATKHGKATALTILAHKLARAIYYMLHRGHAFDPNTFFHDPSHGAPALGTAVPAGATLEPEVRPAGRQGPAHQHAGHAAPLAEDMMATTTLAD

SEQ ID NO: 500296 - protein, 329 aa, unidentified
MSEATQLKRFSQSPDPDALYAHLVRNYPEAEYHSVYEAGFCGFWIHYRLVGLGIHNIVVNPADVPTTTSEKLRKTDAVDSAKLARSLRAGELKGIYVPGSESLETRSLIRLRDSITKDQTRLKNRIKSHLRYLGIEIPEEFSGPGRCWNRRFVVWLKGSETGTAYGRQTLDFLVRQYEALRGQRLEMLRAVMALSRTERFEKPLENLMTVPGIGQLTGMSLLSEIDDIRRFKSADQLAAFIGMIPMCHSSVEREGVGDITVRRSARLRSVLVEASWVAVRQDPALSMAYGNYCKRMAPGKAIIKIARKLVNRIYFVMKRNQPYVKRVVA

SEQ ID NO: 500297 - protein, 400 aa, unidentified
MISVGIDVSKGKSTVCLLKPYGEIVCKPFEVQHTEKDLEELANLLQKLNGEIKIVMEATGIYHLPILTFLLEKGFFVSVINPLMMKRFSKDNSLRGAKNDRLDSVMIASYGIEKWYKLKKYEVNDRIYTELRLLGRQYYRFMQTHVKHLQELTHLLDYTAPGLKAMFNSWNEHSNRDKLSDFVERFWHFDLITSLSREEFVEQYLLWAKEKKYHQSRSKAEKVYDLASNGIPTLSSHTPSTQMMIQGAINVLRIVNNSLYYILSRMKELAKSLPEYATVRSMGGVGDSLAPRLIAEIGNVKRLRNGHALVALAGIDPPPYESGQFVGTHRRISKRGSPILRKIGFEVMRVLKSHKEPEDNAVYNYILKKEAEGKNKKLSKIAGLNKFLRIYYVRVMEVYQ

SEQ ID NO: 500298 - protein, 421 aa, unidentified
MTPPNGMVWAGIDTHTDTHTIALIDERGRTLGAETFTANPEGYDRLIGMLPEPGTVAAVGVEGTNSFGAALARRLAAAGYEVREVLRPKRNVRRRDGKSDPIDAVAAARSVMAGDDAGLPKSSDGWVEALRHLNTQRAQLVSAMTAISNSANGLLVTAPESVRERYRGLRGGARMNRLAECRPAGGLVERSALTALKSAAKAWKALKRQSDLLEERMRAILQVHARPLLDMYCAGTVVAAALAIVAGDNPERIRSEAAFAKLCGACPLPASSGRTNRHRLNKGGNRQGNVALHRIAIVRLRYHQPTRDYAARKTREGKGKLEIIRCVKRFIAREAYRALIAIRNGGTGRKTPAERGARLRELRVGHGITQQQVGEALCVPSSRISEIERGKRDLPELEQRAIQWIHSITSPKQHTQTLDNV

SEQ ID NO: 500299 - protein, 377 aa, unidentified
MWSDTSDAQDGEVRVTVGVDTHTDQHVGVALDQFGRRLGTRSVPTTPAGFAELLAWASGFGVLEQIGIEGTGSYGAGLSRWLRARGLTVIEVERPHRHDRQARRRRGKSDPIDAEAAARAVQAGTVIGQPKAGDGQVEMIRTLRLTRRSAMQARTQAANQLHALVVTAPDDLRARLRPLPMAELITLVAACRPVKAGTALSTPVAAAKLALKGLAIRYRQLSAEIDALDVHLERLVSTAAPELIAVKGVGTDIAGALLVAAGDNPERLHSEAAFASLCGVAPIPASSGKTNRHRLSRGGDRDANRALYLLALGRMGWDPATRTYVTRRTAAGLSKPEIIRCLKRYIARELYRILIAPTASPPHSADGDDAPASAIAS

SEQ ID NO: 500300 - protein, 412 aa, unidentified
MQDILTCAMGLDVHRDIIVACLAKGEIGSDPEIEIRSFSTLIPEMKKLRDWVVESDCHHVAMESTGIYWQPIYEILEPCFNGEINILVVNARHMKNVPGRKTDMRDAQWIATLLRAGLLKGSFIPDKAFRELRHLTRYRKSIAHDITAQKNRIDKFLQSSGFRFTAFLSDAFGASGRNIIRHLIQNGSIDRAALDKCLKTQTRKRIDQILVALNGSLSTHQRSFLAMVFGHLETLDTHRKAIEDAIANEILKHSKEFDLLCSIPGIDVTAAAAIIAEIGTDMSAFPDSQHICSWAGLSPGNNESAGKRKSTHINKGNPYLKSMLCEIGWVISGKRTLYLSGWYWRIKQRKGAKRATIALARKLLALIYTMFKTGAPYNEDCLEQRRKRCERKWAHRMVNELQKLGYMVVPPT

SEQ ID NO: 500301 - protein, 348 aa, unidentified
MTTMVEDTRVITGGVDTHADLHVAAALDSVGGLLGVQEFPATAAGYAELLGWLRSLGNLALAGVEGTGSYGAGLARYLAAAGVRVVEVDRPDRQDRHRQGKSDPLDAVSAARAAQSGRASGAPRGRDGAVEAIRALMVAKRSARQERTQAVNQARALIVTGPEELRARFARRSPAQLIEAIAALRPRPGDVPGYATRVALRELGRRARFLDGQLDRLDELIGPLVTERAPGLLALHGVGPDTAALLLVAAGDHPERLRSESSWAHLCGVAPIPASSGKTAGRYRLNRGGDRQANSALWRIVLVRLRSHEATRAYADRRGKEGLSKKEIIRCLKRYVAREVYRQLRAEN

SEQ ID NO: 500302 - protein, 322 aa, unidentified
MNASYLCFAGIDVCKDHLDVHLLPSKSAERFPNTAAGHRALIGLLKSKRVRLIVLEATGGYEHAAVVAMVKAGLRVHVAQPQVIRAFAKSLKLRAKNDDLDAAVCARYAQDRCDELLIEKVDEKQDALRDLVSHRNDLVVDRSAWKNRLKQAETQGRDKQVVRSAKRMIAFYTKEILRTEKEIDATIKSDKVLQAKADALLKIKGVGPQTKRIVIALLPELGKEESRRINSLVGVAPYASDSNDRQKPRHIFGGRMLVRNVLYMACMTAAYKNAVIKPYYEQMTARGMPHKSAMMACIRRMLAHMNEQIRLVLEAAATRSAA

SEQ ID NO: 500303 - protein, 366 aa, unidentified
MKKNSTVAAERKQIFKQARLTIGLDLGDRTSYYCILDEAGNVIWERNLPTTSNGIRQAFGRIPRCRIALETGTHSPWVSRQLSELGHEVIVAHARNVRLIGESSRKDDQVDARTLARLARIDPGLLGPVRHRSAQAQIHLTVIRARAVLVSTRTALVNAARGLTKSYGERLKKCGTEQMNRESAKGLSQELRDALDPLLGEIESLNERIAEYNGRIEQIAKEVHPEVARLKQVKGVGTLIALTYILTLDDPQRFRRSRDAGCFLGLRPGRRNSGKSEPQLHISKEGDRYLRTLMVQGAHYVLGPFGQDSDLRRWGLKLAERGGKNAKKRAVVAVARKLAVLLHKLWVSGEVYEPLRNNHKVVSAVA

SEQ ID NO: 500304 - protein, 375 aa, unidentified
MKEKLRFLGLDVHAETIAVAIAEPDGEVRSLGTIPNRAESIRKLVKKFGPADKLRACYEAGPTGYVVYWQLAELGIQCEVVAPTLVPVKAGDRVKTDRRDAEKLARCHRSGDLTAVWVPDEGSEALRDLVRAREGAKQDQMRARHRLSKFLLRSGQRPPTGVRPWTRPYLIWVAQLRFTQIAQEATRQDYLHEVEHMRERVARLEQAITEAVKLASPALQQVINDLQALRGIADISAVTIAAELGQVSRFGSAKQLMGYCGAVPSEDSSGKRTRRGGITKTGNAHLRRIVVEAAWSYRRPPCIWYGLRRRQESISEEAKEIAWKAQHRLHKRYMRLGAAGKDQRKIVTAVARELLGFIWAIGIRAETISKQQIAA

SEQ ID NO: 500305 - protein, 447 aa, unidentified
MKQRNRAAGRTGLTLTHPNAAGIDIGSASHYVAVPPDRDDEPVREFASFTADLERLADWLTACGVDTVAMESTGVYWIPLYELLDARGFTVLLVNARHVKNVSGRKSDVLDCQWLQQLMSYGLLRGAFRPGDEVCVLRALVRQRGMLLRNQGRYVQHMQKALTQMNIQLANVITDVVGETGQRILRAIVAGERDGQALAAFRNARIRASEDEIAASLQGHWRSEHLFALKQALDAFDFGGTQLAECDVQIEAQLQRLQTHVGEPAKGKKRSKPRNAPKFDLRAQLYRMCGVDLTRIDGIEVTTALAVVSEVGADMSRFPSDKHFASWLGLCPGTKITGGKVMSGKTKRCANRAAQALRLAATALRASKSAIGAYYRRLCARMDKPKAVTAAAHKLARLIYAMLTKGEEYTDRGQDYFEERYRERVVRQLAHRAKQFGMQLVPDPQST

SEQ ID NO: 500306 - protein, 369 aa, unidentified
MENSNTVVGLDVSKEWLAAATLPIGSQRPTEIVKLPNDPKTVRRLVERVAGKGAVTFVYEAGPCGYDLHRQISAMGHRCVVIAPALIPRRPGDRVKTDRRDAEKLARYYRSGDLTEIRVPNCEEEAARDLVRAREAVLADRLCACNRLLKFLLRQGRVFLDGKSWSRAHKAWLRAQSFDYPASRLTYETYIRSLEEVEERLAIVEQQVFDLANTERYVAGVSYLRCLRGIDTLTAVTLLTEVIDFRRFQKARDVMGYTGMVPSEHTTSFDPRRGRITKTGNAHVRRVLIEAAWNYRRKKVLSQAIADRRKGCPPEVVRIAKKAEDRLHRKFWRMTERGVANNKAAVAVARELAGFIWAIAQHIPVSAES

SEQ ID NO: 500307 - protein, 338 aa, unidentified
MNIVFLGIDLAKNVFQLCGLNLAGKPVYTKRTGRKELLQTLANIPTCLIGVKASTGAFYWQREFEKLGHKVKVISPQYVKPFVRGQKNDGNDAQAIAVALMQPTMQFVPPKSPEQQDIQALHRARQRIVNHRTATVCQIRGLLLDRGIPIGSAVSRVRRAIPLILEDAENGLSSRMRRTIAELYELFNDLGRRIHFFDKEIETVFRQSEACQRIARVKGIGPKTATAVVAAIGKGTEFKNGRHFAAWLGLVPRQHSSGDRQVLMNMTKKGDKHLRTLFIHGARAVVRVATNNDDGHMNQWVNQLKGRRGFNKTTVAVANKNARIIRSMLRNETEYQVV

SEQ ID NO: 500308 - protein, 358 aa, unidentified
MQQAKDIILVVDYHAENIEFRWFNEATGEERVGRYATTRAGILRQVEQAAREVDRGGRVVWIMESTTGWARVRDLIGTRAKFVLANVLQMPLPPKARRRKTDKIDTGRMLREYLHGDLPQSFQPTAWWRQVRRVVDCRQDLVERQTAIKNWMGSLLRHETWEDHENLWSAKGRARLQRLGLSASDRALVELKLEQLDQLAAEQEQIEKRMLAIYDVWAEAQWVDQVRGIGMVTAVSVLAHVGPIERFATAEDLISYAGLAPGVRQSDQTCHHGRIGGGGTDGHLRYLVIEASIWLRDIPRYRPTYERVLKKRGKKIGRIVVARLFLRSLHKMLKDQVRFNPAGSGQTKTATATAGIQG

SEQ ID NO: 500309 - protein, 343 aa, unidentified
MKQYVGVSQDQTSICVVDESGRVLWQGKCASTPEAIAATLSSKAPEAERIGLESGPLSIWLCHGLTALGLLVVCLDARHAQAALKLQLNKSDANDARGLAQIVRTGWYREVAVKGLDGQLVRALITARAQLVAQRVDLGNQIRGLLKPFGLLAGKGVGKTFAEKVRSLVPNGPLHDVTEALLRAWEAINKEVATLSRRLVTEARQDDTVCRLMTAPGVGVLVALTYVSTIGDPGRFPHSSSVGAYVGLTPRRFQSGETDYTGKISRCGDRLTRTYLYEAAGIILNRVSRWSTLKAWGTRLARKIGHKKATVAVARKLAVILHRMWRDGTEFRWSTKGAAGATS

SEQ ID NO: 500310 - protein, 386 aa, unidentified
MPKPNDLSRSFTAFEQDSTLVAIIEMSLTSWLVGGILPGIERHPLKKLDVDEEALLQLLHRWRDEAINAGRKITRIVLAFEAGRDGFWLARWLRARNIEAYVIHPNSVAVCREHRRAKTDRLDTELLKRVFLGWLRGESNHCSMAAIPTLGEEDARRPNRERENLLGERTRIVNRVKACLVRFGVRNFKPTLRKAPKRLEALRTPEGGPLPPNSFAELRRDMMRLRFVMGQIKEIEETRLQRLENTPNEGSHAMVRLLARVIGVGIETADMLVHEILSRNLRDQRAVARYAGLTGSPDESGKRRRERGLARAGNARVRRGMIQLAWRFLMFQKESALAQWYRSVTNESRGAIRKTMIVALARKLLIALWRMVRTGEIAQGIALRTA

SEQ ID NO: 500311 - protein, 412 aa, unidentified
MEVVYPCCCGLDVHKKSITACVLWAEVKGKSRKQKKRFGTFTHDLLQLADWLAECGVTHVAMESTGVYWKPVWNILAEQFEALLVNAQHIKAVPGRKTDQKDSEWIADLLQHGLLRGSFVPPQPTRELRDLTRYRVSLVQEINRIANRIQKVLEDANIKLASVATDALGASGRAILEAMLAGEQDAGRLAEMAQGKLRNKIPELQLALEGRMTEHHRFLLRQLFEHLRFTESKRSDIEQEIGRRMLPFEDKVTRLCTIPGVDRVTAWGMLAEMGMNMNQFPSSGHLASWACLCPGSFESAGKRLSGKMRKGNVSLRRCLSQAAWAISMMKNNYLSALYRRIAARRGAKRAVMAVAHALLEIAYHMLKRKEDYRELGADHFDRIDVNRIRRSLVRRLERLGHKVTLEPLALTA

SEQ ID NO: 500312 - protein, 313 aa, unidentified
MSDNLPQTIGIDISKASLDCYAHPIGVERQFTNTAKGHKALIAWLRQWPVERIAYEATATYHRALEAALADWPCVKLNPERARRFAQATGILAKTDRIDAMLLARMAATLQPPVRPARSAQQAQIAELINARDGLVRDRTALKNREKNLTIAFLKRQCRQRLEQIERHIEALDTEIANLIAADAALARRHEILTSIAGVGTLTANQLIATMPELGSLENKQAASLAGLAPVARQSGQWKGKTFIRGGRANVRQALYMPALVAARYNPDLKAKYQQLVTAGKPAKIAITAVMRKLVVTANAMLKADRCWTQSPA

SEQ ID NO: 500313 - protein, 363 aa, unidentified
MMVIGIDPHKQSHTAVAADELGRKKAQKTVRARRDGHRELIAWAREIAPAGRLWAVEDVRHVAGGLIRELLAAGEQVVFVPPKLMAGERRGGRERGKSDPIDALAIARLALREGAGLPAARLDEQVLEVRRLTDYRDGLVAERTRFVNRLRWLVHDLDPELAPPPRSLGSGRARDGLEAGLRALPAGAGRAVALSQLARVTALSAEITGLEKDLAGLVTVLVPELLAIPGAAVITAAKIIGEAGDIRRFRSPAAFARHNGTAPVPASSGTGTGGPQRLNRGGNRQLNAALHRIAVVQARCHPGAAALLERRGQDKHETRRASLRVLKRHLSDVIYRALNADAWRLDQPAPHAASGVPLKAWTL

SEQ ID NO: 500314 - protein, 369 aa, unidentified
MAELGEAFVGIDVAKLRNAIAVAEDGRIGEVRYLGEFDADEGSMRRLVQRLAGKQEKVTFCYEAGPTGYGLYRMMRSMGFEYTVVAPSLIPRRPGDQVKTNRRDAIGLARLLRAGELTAVWVPDEGHEAMRDLVRGRGAAVETQRVHRQHITSFMLKHGRIFPRKRAWSMRYLRWLQEQRFDHPAHQIALQEMVEALRLASERIKRIEAAIEEFVPSWSLEPLVRSLQALRGVDLIVAVTFAAEVGDVTRFENPRQLMSYLGLVPSERSTGASVRRSGITKAGNSRVRHMLVESAWTYRHPPRIGVKKLYIHERVSPVVREIAWKAQSRLTARYRRLTATGKRTTVVCTAIARELAGFMWSVGRVAQTI

SEQ ID NO: 500315 - protein, 321 aa, unidentified
MTYVGIDVSKATFVVAYSSAKSSETKTFKNTTKGIREFIRTISPEENHCVLEATGNYSMLLVYLLSKAGFTVCMENPLKIKNFARVMLSVVKTDEIDARLIALYGERMQPAPFKLRSDSLLLLKQKRTVLRQLKKQLTANRNLEGSLKVLPFIDSKCKKVLEKTIKFLEKQIEEMEEELTSLAEIEYKKQMDLLTSIKGIGATLAAALIIATGGFTYFDNAKQLTRYLGLSPTYQQSGTSVNVKGHINRNGDAYLRSQLYIGAMASLRCNTECKACFDRLRSNGKPGKLAIVAVANKLIRQAFAVVANEKKYIDGYKSVKP

SEQ ID NO: 500316 - protein, 424 aa, unidentified
MKVTYQTCCGVDVHKSFLVATIIKTSSGIEPSYQKRRFSTFNNSILEFKKWLLENECLYVCMESTGKYWIPVFNLLEDEINVTIANPKWVKAVKGNKDDTKDSKWIGDLFRLGLVRGSYIPCKKIRILREFTRYRYKLVSCCSSEKNRYQNALTVCNVALDSVVSDVFGKSSTSIIEYLLEQSGTSIDHEVIASKLLKRLKAKEDAVIESIEGYQMTDSQKYRMHLIRAHMDYITAAINDVDSEIESLIASDPDYENAVELLCTIPGVKYDSAITIISEIGIDMSQFYSSKRLCCWAGLTPGSNESAGKKKSVRITRAGVYLKPALVQCAHAAVKSDKSSYYKKKYESLVKRRGKKRAIIAIARMILTAIFQMLTTGETWNPCDLYKIDMPEALLEKQKQKAIKQAQKLLIREGLLPPTEPIAS

SEQ ID NO: 500317 - protein, 408 aa, unidentified
MISPILKRCCGLDVHKKSIMATLLKEGSQGKITKTTKEFGTFKNDVMKMKQWLLKEKCESVAMESTGIFWSSIYDLLHEELELSVVNARNVKKVPGRKTDVLDSEWLAELLRCGLLKPSFIPSKELRNLRMKARYRFSVLKQYQAEKNRVTKVLEAAGIKLGSVASDIFGVSGLLILKDLLEGNKNLLAIAQTSGKRLKADKVQIAQAIDGDLDNDKKFLLNEMKRHLDWLARKLMKLNNEILGSIEPYKKEWQLLQTIPAIDAISAAEVIAEIGCNMEQFDSDSAHLSSWAGLCPGSNESAGKRKSSKMRKGSKQLRRVLCVIANAASKSKGTQFEHFYKSLLIRRGHKRAIMALAHKILRIIFSVLKNKKPYYEPDVNHEMLTTQRNSQRWIRALKKYGYLTKKED

SEQ ID NO: 500318 - protein, 337 aa, unidentified
MEYFAGLDVSMAETHVCVMNRDGAVVYEVKVPSTPADIAAGLAKAPACGRIVFETGRMAPMLYHGLRQLGLPIFCIESRQAHQALKSLATHKTDRNDARGLAHLARTGFFKPVYVKSLPAHALRSLIIARKKLVGQRVTLENQIRGLAVVFGVRLPRALRPAFVRQALQASEGIPGLSAAMRGLVTARAAVLAAVSAIDADIRQLVRASATCRRLMTIPGVGQLTALAFTAAIDDPSRFRRSRDIGAYLGLVPRRYQSGEVDYTGSISKCGDRRVRTLLYEAANVMLTRYKSALKLKDWALAIAKRSTMRKARIALARRLAIIMHAMLRDGTEFNPA

SEQ ID NO: 500319 - protein, 368 aa, unidentified
MKHVTTYVGIDAHKKDLFIAMLIGNQATPVTWQVPNEPNAVRRLIRKLEREAPGPIRACYEAGPCGYALQRRLTTPRVSCQVIAPALIPRKPGERIKTNPRDARKLVELMRAGLLTEVRPPTMAEEAVRDLCRARDDAREDLQRCRHRLGKLLLRRGLHFSGRNWTRAHRRWVDRLEWTHAAERTVVDDYLLAIDQTEARLIELDARLCTIAATEPYRTPVGWLRCFRGVDTLSAMLILAELHDFRRFASPRALMAYLGLVPGEDSSGEKHRRGRITRTGNALVRRVLVETAWHYQHRPSVGVALTRRRKGQPTRVIAIADKAQQRLCRRFRKLAAEHKPAPKIAVAIARELAGFVWAALQPEPATVN

SEQ ID NO: 500320 - protein, 371 aa, unidentified
MESIIYVGMDVHRDTYSLCSFDAKRNLLFSQTQMKSTTENVVRYLKKVSEMNNGALTVSGYEAGPTGFRLCRELQKQGFACVIIAPTSIARTAKDKAVKTDKSDAQMLAKTLAFHSYKEVVLPSENIEAIKEIVRLRNSALKVCKRAKQNLLSFLLVHGFSYSEGRHWTVKFSSWLKTVHFESEYLTYCFEEYLSEATRQIQRLAQLDKKLKELEDDEEIRDGVKKLKCICGIDTIAAVGLVAEVGDFDRFRAAKDFAGYTGLCPGRHSSGLTDRGTGITKQGNIYLRTLLIEAAKSIKRSASHGHKSKRILSRQEGSSSEIINYADKAGARIRMKMNHLERRGLHCNKAATAGARELACFAWGMMTGHIA

SEQ ID NO: 500321 - protein, 403 aa, unidentified
MNSVGIDISKGRSMIAVMRPFGEVVISPFEVRHTDSELSELARQLKSLDGETRVVMESTGNYHTPVAKLLHDAGLYVSVVNAKLVHGYGNNDLRRVKTDKKDSVKLANYGLDRWLTLTRYVPEEDTRLLLKDCYRQYRQYSKVQTVLKNNLISLLDTVFPNVNRLFSSPIRGDGSEKWVDFVAEFWHCRCVSEKSEKAFTNKYQRWCGKHGYNFSEEKAHTIHAEASGHIGVMPKSETTKLLVEQAAAQLKATSAALTALKREMLTLAEQLPEYPVVMGMFGVGPTLGPQLIAEIGDVRRFYSKKALVAYAGLDAPPNDSGDVTGRHKSMSKVGASSLRRTLFLVMSVYLQNAPLDEPVYQFMDKKCAEGKPYRVYMMASANKFLRIYYATVKAYLESLEHTA

SEQ ID NO: 500322 - protein, 325 aa, unidentified
MKTESSELFIGVDISKKRLDIANDSKSEVWSELNNDDGVSLLVEKLTSLKPRLVVMEATGGLETLLYSSLVSAGLPAVVVNPRQVRDFAKALGKLAKTDAIDAWVLARFGALMRPEIRPIKDEETRELAALVTRRRQLLGMRTAEKTRLRQTSDKWTKKDIKSHIKVLDRHISKMEKEISNNVKNTPGWKEKDKIITSVPGAGPNLSSYLLANLPELGRLNRREIATLVGVAPLNRDSGKFRGTRMVWGGRAQVRSALYMSALSASICNPSIKLFYQRLIEKGKKPKVALTACMRKLLTILNTMVKNNTTWDQNYSINLDFNHGC

SEQ ID NO: 500323 - protein, 352 aa, unidentified
MRFYQQQHRFYAGVDLHARTMYVCVLDQTGAVVFDSNLAAEPDRFRSAIAPFRESPSDLVVCCECMFAWYWLADLCAAEGIPFVLGHALAMKAIHGGKQKNDRIDAHKIAALLRGGLLPQAYVYPKAMRATRDLLRRRMFLMHKRAEAIAHIQNTNSQYNLPAFGQKLVYAANREELHIAERFSEPSVKRMVEVDLALIEHLDQSLGVLELHLTRTAKVDDVHTYERLRTMPGVGPILALVFLYEIQDIRRFPAVGNFLSYARLIRPAKESGGKKTGYGNKKIGNAHLRWAFAEAACLFLRGNATAQKWLEKKTKACGKPKALGILTAKLARSLYGMLCKKEPFDAKKFWAS

SEQ ID NO: 500324 - protein, 341 aa, unidentified
MQQHSPTDPTGARPNDAVLFVALELSRASWLVAIQAPGRDKISRHKLAAGASAELLELVGRQRARAEHRTGGKLRVMSCYEAGRDGFWLHRLLVANGIENLVIDPASVAVNRRARRVKTDRIDVETLLRAMMAHARGERRVCSVVRVPTPEAEDARRLTREREALLEERVRHVNRVKSLCALQGVYDFEPLRPRAAERLDGLMTGDGRPFPERLKAEVRRHLERLGQVVHQIAEVEALRDKPASPLAKGVARLVALRGVGPNVASVLQAEILGRCFANRREVAQYAGLAPSPWASGRAQREQGIGKAGNARVRAAMIELAWLWLRHQPDSALSHWFRERVG

SEQ ID NO: 500325 - protein, 389 aa, unidentified
MTFYVGVDIAKYEHVASILDSTTGEFLVDSLHFDNNLKGFNLLLSNLSGLNKKDVVIGFESTAHYHQTLFSYLSGKKYKCFLINPFMTSRFRSISLRNAKNDNIDSRAIASFLSFEYRNLIEDDFFLNELKELSIQRDSLLKRSSSLKTQLLTYLDRVFPELESIVSKAGIHSKAVRAILKECPTAGDISSTRIDHLQKLAKDASNNRYSSAKVLAIKEAARTSVGFPSEALGLKIRQTILMLEELKKQIDEVNLAICSSPTVIDSPLHKIKGISSIEIAYIMSAIININRFDSPDKLIAYAGLDPIVKQSGTWQAKSTKMSKRGNRLLRFALIWAANNVRKHPSKMKDYYGKKISEGKSHYNALGHCAAKLCRYIFFVLNHPNQDFIN

SEQ ID NO: 500326 - protein, 356 aa, unidentified
MSRDLKYIGMDVHKEAIVIAVLNGSGKLVMESIVETKASSILQFIHGLGGELHVTWEEGTWAAWLYDLLQPQVEQVLVCNPRRNALLKEGNKSDKVDARKLADLLRTGMLRPVYHGEHGLRTLRELARSYQTLSKDLNRVMNRIKALYRGWSIPCAGTQVYAPRYREEWLRKIEHAGVRRRAELLYQQLDGLQALRRTLRPELLAESRKHKAAKLLRQIPCIGPIRAARLIALMQTPHRFRSKRQLWTYSGLGIETRDSAQYRYLHGQLQRTKKPQQIRGLNQNHNHEMKEIFKGAATRASCGVGPLRDFYVALLAKGMKPEMARLTLARKIAAIALILWKKEERFDAEQLKPQAA

SEQ ID NO: 500327 - protein, 409 aa, unidentified
MRYYVGVDWADQTHAVWVVDESGTKITARTVPHTAAGFSEWGRELDEWRAQGIERWAAIERPDGRVVDFLLDHGVVVYPVNPKALDRARDRFRQSGAKSDPFDARVLADFLRTDHLHLQALQPSSEAAQELKLLTEDCQRHIRQQTRLVNQLTTTLKAYYPRALEVAELTTALAREFLHAYPTPEALTVLTERQWQRWARGRRVSEARIGTLWAVLQPPQLPVPAHVVRAKARLMQSLVEQLTPVVAAVVEYRKAIEDFFARMPAAQWARTLPIGKRGITAPSLWARLGDAPGRWESFRHLQAQAGTVPVTKRSGKQRVVHFRFACDKSLRHVVDQVAFLSLLSSEWARAYYDQQRARGHAHHQALRALGAKWLKIIFVMWPRQVPYDEQYHLATMTRQQLRQRQTKIA

SEQ ID NO: 500328 - protein, 324 aa, unidentified
MTDAVLGIDVSKNTFDTNLGAGTKARSKSFANSPAGWHHLIAWLGEHKIGQVHACLEATGRHGLGIALALHEAGHVVSIVNPAQIRDFARTKLGRNKTDQVDAVHIREYAELFKPRPWTPPSPAMRRLCELQTIRAGTVAGLTEWKNRRRSGIMDDLALSLAKTTIQHFTSQLEAVDQAIAETIDNDVELSAKRDLLVSVNGVGEALAGIVLAELPGPDILGSSAAVTAYAGLNPQQHQSGISVNRPVRISKIGNAVLRTALYMPALSAMRYNPAVAALVDRLKAQGRLKGKQIVIAAMRKLLVLCFGVLKTGKEFDPAMAMGK

SEQ ID NO: 500329 - protein, 334 aa, unidentified
MLIIGCDFHTRYQQIAMAREETSELLVERRLDHESGEAHAFYRSLQSSHEPVRVGIEATGPMHWFERLLTELGHELWIGNSAKIRASEVRKQKTDERDARLILDLLLAKRFPRIWVPTPAERDLRQLLWHRHKLVRLRTMLGNQLHFLAMSQGLCRKKKLFTKKGRAELGNLTLGPWASRRRAELLKLLEQLDPPIAELDRAVLEEAQRREDAVRLMTHPGIGPVNALAFVLTIGPITRFPYSRKITSYLGLNPTEESSGGRRRLGGISKQGNTMVRWLLIEAVHHAVRQDPALRQDYQRLKFRRGQCVCIGCSAVERITRSWFAGKAARGPPW

SEQ ID NO: 500330 - protein, 414 aa, unidentified
MEQVHDRVAGLDVHRDVVAACVRVAGPRGGVATEKERFQTTTVALERLGGWLADRQVSLVAMEATGVYWKPVYYALESRFEVWLCNAHHVKNVPGRKTDMSDAEWLADVAAHGMIRPSFVPPPPIRELRELTRYRKTQTDARAAEIQRLEKVLQDAGVKLTSVASKVLTQSGRLMVEALVDGQRDPAELANLAKGKLRPKIPELTEALAGHFGAHHAVAARRILDHVDFLNATIAALTEQIDARTEPFQAAKQLLSSVPGFDRLVIDTVIAETGADMSRFPSPGHLAKWAGVCPGNHESAGKRRRVGITPGNSWLRRALIEAARAAARTRGSYFGAQYRQIAKRRGPNKAAVAVAHSLSDLIWHQLTTGECFHDLGDDYFQRRRDPERETRRLVAQLQQLGFQVALTPSRDPAA

SEQ ID NO: 500331 - protein, 375 aa, unidentified
MKEKLRFLGLDVHAETIAAAVAEPDGEVRSLGTIPNRLESLRKLLKKLGPVERLRACYEAGPTGYVVYWQLAELGVKCDVVAPTLVPVKAGDRVKTDRRDAEKLARSHRSGDLTAVWVPDEGSEALRDLVRAREAAKQDQLRARHRLGKFLLRSGQRPPSGIRPWTRPYLIWVAQLRFTQMAQEATRIDYLHEVEHMRERVARLEQAIAEAVKLASPALQQAINDLQALRGIADISAVTIAAELGQVSRFDSARQLMGYCGAVPSEDSSGKRTRRGSITKTGNAHLRRIVIEAAWSYHRPPCIWYGLRKRQESISEEAKEIAWKAQHRLHKRYMRLAAAGKDKRKITTAVARELLGFIWAIGTRAETTVRPRITA

SEQ ID NO: 500332 - protein, 317 aa, unidentified
MEVSLIFVGIDVSKAQLDVEIRPSGEKESFANDKVGIKALVKRLAKIEPTLIVLEATGGYERQVTRALVSADLPAVVVNPRQVRDFAKATGQLAKTDSIDAGVLAHFAEVIRPELRPLPDEVTLELRALTSRRRQILEMIAAENNRLEMTSKAVRKSIGAHVRWLEQALERANQELDRAIEQSPIWKENEEILRSAKGIGPVTSRTLLAELPELGTLDNKQIAALVGVAPFSRDSGSLKGRRSIWGGRAPVRCALYMATLVATRHNPVIRDFYKRLLAKGKIFKVALVACMHKLLTILNSMIKHKTFWSETFSLQTT

SEQ ID NO: 500333 - protein, 362 aa, unidentified
MRIIGCDLHSRQQTLAMLDTETGEVVKMTLAHEGGNVREFYSTLPRPVRVGIEATGSMQWFVDLMEELGIECRVGNPAVIRAAEPRKQKHDRRDADLILTLLVENRFPAIWLPSRELQDLRALLRHRHQWVRMRTRVQNALQAIALANGMRRGPSLWSHEGQHTIASLPLAPHTAHRRNELQAMYVKFESDIEKLNKQVQEQAGERPGARLLMTHPGVGPVTALATEVFLGDPKRFTDGKTLASYVGIIPREYSSGGRQKFGGLSKQGNPLLRFLWGEAGAHAARRDPELQRFYRRKLVQKGLGKARMAVARKLGIRLWIMLRNEINYHEFCRRGQKQQNSGAACAGMPGTPYGATSHRPVD

SEQ ID NO: 500334 - protein, 367 aa, unidentified
MKKHTPMSVGLTRNRKCEQLTIGLDLGDKWSYYCVLDASGDVLLEQKVSTTPKAMREVFGAMSRCRIALETGTHSPWVSRLLSELGHEAIVAHARSVRLIGESKRKDDRLDAFTLARLVRIDPQLLCPVKHRSAEAQADLIVIRARAALVRNRTTLVNAARGLTKSYGEKLGRGNARSMKPKAAQDLSPELKNALGPLMREIQSVSERIRDYDQLLESMADNKYPETERLKQIKGVGTLIALTYMLTLEDPHRFRKSRDAACYVGLQPGRRNSGQSEPQMHISKEGDPYLRALLVQAAHHILGPWGVDSDLRRWGMKLAEHGGKRGKKRAIIAVARKLAVLLHRLWVSGDVYMPLRRMSQAAVPAVA

SEQ ID NO: 500335 - protein, 427 aa, unidentified
MPYRIAGIDVHKRMLAVVVTDVEVDGDFHFDRQKVGATPVDLRGLAEWLVAQDVEEVVMESTAQYWRPVWEALEQHWRPRRRARDGAPCLAGTLHLAQAQSNRGPGGRKKDFPDAERLVKRLVAQELTLSFVPDTEQRLWRTVMRRKYQITRNRVQLQNRLEALLEEAHIKVSSIVSDLLGISARRMLQALADGETDPAALAALAAARLRATPEQLCDAFQACPTLHPVYRRLLKLTLEELRVIEDHLGQLDQQMADLLAAHHDAVQRLAEVPGLGVDSAQQIIAEVGAAAATFPSPKHLASWMGACPGNEESAGVNYSHRCPKGNRQMRRVLNQAANAAVKAKGTIFAVVYRRIVPRLGHAQAIGAITHRLCRLIWKILHERVRYEERGPAVSAEAKKVRARKMIRELRSLGYRVELLPAPSSSPA

SEQ ID NO: 500336 - protein, 348 aa, unidentified
MVLLGVDPHKDTHTVVAVDQAGLQLGQLTVAAHSQGHTELLGWARRRWPNDRRWAVEDCRHVTGRLEHDLLAAGELVVRVPPRLMAGARAAVRALGKSDPIDALAVARAALREPDLPIAAHDQASFQVKLLVDHREHLVAERTRTINRLRWHLHQLNPDLEHAAQRLPGPNLERVAAWLADTPPTVQVGICQELVATIQTLTARIDQLGMDLRRRAARLAPNLLGLPGCGVLTAAKLLAETAGVARFRSEACFAMHAGVAPIPVSSGRTDRHRLCRGGNRQLNAAMHRIAITQLRLAGPGQTYYRRRRAQGDGTGEAVRALKRRIARAVYQQLKLAEQRPKTSSATAA

SEQ ID NO: 500337 - protein, 326 aa, unidentified
MHYIGIDVSKAKLDCCWLRDVEKNKFKTKVFKNSATDCNALNTWLKAQTKAEPDEITVLMEATGIYHENLAYYLFEHGYQVCVVNPARTKEFASSLGNTHKTDAKDSQILALYCHRMHPELWQPERPEIRELKALLARLEALETDLNRETNRLEKAEFNCSSERVIESLNLMIEQLKAEKKRLEDDIDNHIGRYPQLRKDRQLMESIPGVGPIISRLMLSILHSRSFRTAGQVAAFLGLVPRIQQSGQWKGRSRLSKQGPANVRAKLYMAAVVCLRYNPDIQAQCQRLMENGKSKMQALGAGMRKLVQICFGVVKHQSEYRPQVVS

SEQ ID NO: 500338 - protein, 400 aa, unidentified
MRAVFGIDVSKVSSEVAILVNGEKVHGYTMPNDAIGFSRLLGDLKTVHKPEIIFEATGVYSRRLQAFLEDNGYAYTRLNPLEAKKQLDSLRVRKTDQIDAEKLAQSQFVLNRKPTYVQEEVYQNLRDLSRFYQNLTEDIVRAKNRLHKVLQVTFPELETIISTQTGEQYWNLVIAFPCKDFVLELSKNELSKSIRQSTSKRISDKRVAYLAEKLTALANQSYCAVKKTSPMLEEVRYYAKELLRLSEQRQTVLDQMVELAHPLPEYDILLSIPGITETTATSIIGELGDIRRFQSANQINAFISIDLRHYESGNFLAKEHITKRGNPYARKILFKCIHNIASASHTNHCHIADFYEKRKRQSQTTSTKPHTIASIHRLIRTMYYLITHNKLYDYTLTQNL

SEQ ID NO: 500339 - protein, 502 aa, unidentified
MVPGRRLYIGEALRSSPLDQNPQTASLGGRAQKGWGKEMTGKHEVESSEGSRRQLQGLPVVRRNVAGIDLGSERHWVCAPTVDGSGREITSFGATTPELIRLAEWLNQRQVESVAMESTGVYWIAPHEVLEGQGLQVLLVDTRQLARVPGRDKKTDPTDCEWIQRLHSCGLLRSSFRPEEAVCMLRTLVRDKANLVAECGDWLRRMQKSLDQMNVRVHRAVSDLDGVTGMAILRAITGGERDALKLAKLRDPRCSKTEQEIAEQLSGHWREDHLFSLQQALNMYDAVQERIAAYEKEILRKLGDMEREEQRGQTAPPLQNANKTKAIKKRGQEPKRQALYRMSGVDITHIDAIGVETVEVVLSEYGPDLSRFPTEKQFVSHVTLAPHVPTSGGKPLRKRKRNSASTRVAAALRMAALSLRHSQTALGAYYRKMAQRLGGDIAVFATARKLATLIYRLLRWGQPYVDEGAKAYETRYRQQRIGRLAATAKALGYELAPMLESA

SEQ ID NO: 500340 - protein, 411 aa, unidentified
MQVIYERCCGLDVHKRTITACRLRWLGGGWEKELRQFGTMTKDLLALMDWLVSEGCTQVAMESTGVYWKPVYNILEGQFELLVVNAQHLKAVPGRKTDVRDAEWIAELLAHGLLRGSFVPPPSVRELRELTRYRTSLVRDRARTVNRLQKVLEAANIKLASVVSDIDGVSARLMLEGLVAGKTDTEELAGLAKGRLKEKHAQLVEALSCRLQPHQSFLIAEHLAQIDYLEGAIERLSVQIEEKLRPFEQQIGWLDTIPGINRRTAEVLWAETGGDMSRFASARHLASWAGMCPGNNESAGKRRSGRTRKGSPWLRHCLVEAAHGAAHTKNKYLRSQYHRIAARRGKKKALLAVGHSILVIAYHLLTRKQAYADLGANYFDERDRQAVTKRCVNRLQKLGYQISLEKLQMAA

SEQ ID NO: 500341 - protein, 349 aa, unidentified
MTKYFAGADIGHKFIDICIIGQPQNSDLEKKPLFECRIENKLNHFRAFIKDLRKLNDKLGGDCIFHLAMEATGTYYLKFVTCLASEAEGLVVPYVVNPCQIKATGEVIKAKNKTDKQDALKIASYIRFAHTEPNVHPWELPSPEMEELRQLAHLYEDTRELIRAEKNRIHAIEQSPNMSMPTAKIRLDRIKYLEAQLEEIKKKMEDHIKKNPRLKEQADLLRSIPGIGKISSALLLCEIGDVERFKNKKTFTAFAGIVPSEFQSGSSINKPARITKKGSKRIRRNLYMPAMVAIKWNPLIRDFYLKLKARGKKGKSALIAAMKKLLQIIYGVLKTGQPFNPAYEIQRAA

SEQ ID NO: 500342 - protein, 426 aa, unidentified
MWDARRRVLKIKSLKHGIIQDKRGNIMRTVFGIDVSKASSEVAILVNGEKIHGYTMLNDAIGFNRLLNDLKTVHNPEIIFEATGVYSRRLRAFLEEYGYAYTQLNPLEAKKQLDSLRVRKTDKIDAEKLAHSQFILNRKPTYAQEEVYQHLRDLSRFYQNLTEDIVRAKNRLHKVLQVTFPELENLLSTPTGEQYWNLVMAFPCKEFVLNLSQNELCKIIRQSTSKRISEKRIAYLTDKLIKLAKQSFCAVKKISPMLEEVRYYAQELLRLSEHRQIVLDDMVALAQPLPEYDILRSIPGIAETTATSIIGELGDIRRFQSTNQINAFIGIDLRHYESGNFLAKEHITKRGNPYARKILFKCIHNIASASHTNPGHIADFYEKRKRQSTIASTKPHAIASIHRLIRTMYYLITHNKLYDYSLTQNR

SEQ ID NO: 500343 - protein, 331 aa, unidentified
MKNKTKRKQFGAIIGVDLGDRKHFVCVTDKDGKILAEFSINNERRDLRQLCEDYPEASIALEVGTHSPWISRFLEAGGMKVTVANARKLRAIYQNKRKCDRLDAQMLARLLRAGPDLLSPIQHGTEQAQRDLVTIKLRDTLVRQRVHVISSIRGVIKSLGHRVPTCSTASFHKKAEEFLFQHPELLEAIAPCLEAVKILTEKIKHYEKEIAQATSTHHPEALRLQKIPSIGPITSLAFKLIIEDPARFKDPRDVGAYLGLVPRRDQSGGTDKELSISKAGNPYLRKLLVQSAQYLLGHFGPDCALREHGLKLAARGGKAAKKKGCFGEFSA

SEQ ID NO: 500344 - protein, 376 aa, unidentified
MVDKVTEAAVVGGVDTHKDLHVAAVVDQNNKVLGTQYFSTTRQGYRQMLAWMTSFGTLKRIGVECTGTYGSGLLRYFQNAGLEVLEVTAPDRMERRKRGKSDTIDAECAAHAAFSGIRTVTPKTRDGMIESLRVLKTCRKTAISARRVALQIIHSNIISAPDELREQLRNMTRMQLIRPLGSWRPDASEYRNVTNVYRISLKSLARRYLELHDEIADLDVMIAAIVDELAPELIKRNAIGYESASQLLITAGDNPQRLRSESGFAALCGVSPVPVSSGKTNRYRLNRGGDRAANSALHIIAIGRLRTDAKTKEYVARRVAEGHTKMGNDSNLLIVFYVQIMPDDLVCSSTDFENDSDFRPSLARCCLRFRLCRSMR

SEQ ID NO: 500345 - protein, 336 aa, unidentified
MYSGIDLHSNNSVVAVIDDADRVVAQKRLPNDVTKVVGFLVRWQDELAGVVVESTYNWYWLVDGLQDAGFYVHLANTAAIKQYEGLKHSGDETDAQHLAHLLRLGILPTGTILPREHRAVRDLARKRMLLVHSCTTHVLAVENIMARQLGGRMTSNQIKRLTDDAVDSLPLAADVGLAIKANVAVIATLQSQIEVLEKRLQERVKPQPQYGLLTSVPGIGQTLATVILLETGPIDRFADVGNFASYARCVDSVHTSNRKKKGEGNVKNGNKYLAWAFVEAANFARRFCPEAKRFHERKKARTNNIVATKALAHKLARACYHILKEGKPFDVTRCFA

SEQ ID NO: 500346 - protein, 484 aa, unidentified
MAKRRMSTFERLKTGRMNRAERRDLGRRVAASDPKLAIVHVNAGGIDIGNESHFAAVPPDRDENPVREFGCWTAALNEMADWLKSCRIDTVAMQATGVYWIALCDVLQQHGIKVVLVNAQHTKNVPGRKTDVQECQWLMKLHTYGLMRDSFRLQQEMEYVRTIWRLRDRHVKDAGRAVQHMQKSLTKMNVQLANVISDISGLSGQAIISAILQGERDPHALASLVNYRVKATREEVARSLEGNWRADVLFELQQAVDGYLFAHRQMQQCDDRLAIYLASLPTQTLENPAPLQAAPESVLQKRKKARKPRDNEPQMNLKAELKRICGVDLTSIDGVNVMTAFTVISEVGTDMSRFENEDHFASWMGLAPSKDISSGKVVGRSNKKVKNRVAVVLRTAATSLLESDTHLGARYRHLRRQLPTFKAAVKAMARYLAVLIHRLLTHGQAWVDRGAAQFERKRLERDLAKLHAKAKAKGFALVPITEAH

SEQ ID NO: 500347 - protein, 479 aa, unidentified
MKSTNSASTERTRKSARAVKTAKPDNLEQINLNAAGLDVGATEIYTCVPQGRDEHSVRVFATFTADLQQLADWLANCRVTTVAMESTGVYWIPIFQILEERGFEVVLVNAHQVKNVPGRKTDVLDCQWIQQLHTFGLLQASFRPENSICVLRSFVRQRAMLLHYRASHIQHIQKALEQMNLKLNNVLSDVTGVTGLRIIRDIIAGVRDPEQLAKHRDWRCGKSQAEIAKSLYGDYRFEHVFALQQAMELYDCYTEKLQACDVQIERLFATFSPQVDLNEHPLPPSTRRPCSPQKNHPKSDLRLALYQLAGVDLTQVDGLDVLTVQVILSEIGTDMSKWRTVKQFTSWLGLCPHNDKTGGKVKRTRTKKTDNRANLAFRLAAATLCHSKSALGNFYRRMRSKMGAPKAVVATAHRLARIVYHMLKYRVAFAAVPPEQENTQYRQRALRQLQRKAQQLGAALVIEPIANLTNSLNEAASGG

SEQ ID NO: 500348 - protein, 309 aa, unidentified
MDIIVGIDVSKDRLDVHVLPSAASFAVGNDDAGLDELVVRLRAVKADIVAVEATGGYEMLVVAGLSSAGLAVVVVNPAQVRSYANALGKRAKTDPIDAAVIAAFVAATKPDIRPLRDEESKAFSAIVSRRRQIVQMITAEENRARMALTKETQKSIRRLLAALRRELASLDDELDGRIRASPLWRVREALLTSVPGVGPTTARTLIAEMPELGTLDRRQIASLAGIAPFTRQSGKWRGRSFIGGGRGKVRAVLFMAALVASRHNPVLKAFRDRLVTAGKPKILAIVATMRKLLTILNAIIRDGRPWKSA

SEQ ID NO: 500349 - protein, 486 aa, unidentified
MAMQTSVYERLMGGNRKQRKDLQRRLCSDDPGLGVVHANAAGIDIGNESHFVAVPAGRDAEPVREFGSWTADLERMAAWLQSCGIETVAMQSTGVYWFAVYDVLEKRGLQVFLVNASHTKNLPGRKSDVQESQWLMKLHTYGLLRNSFRPPEEIRPIRAVWRLRDRHVEEAARSIQHMQKSLTSMNVQLANAISDVGGVSGQAIIRSILAGERDARQLARLRDRRIKASEEEVARSLEGTWQEDQLFELQQAVDEYDFRQKQIAECDRKLQDYLAVLPSRPAPDGDAGTVMPPPATPGKKKRRAKKIGGGNAPQSFDLGAELKRVTGVDAIRIEGVNLMTIQTVVAELGTELGNWWPTEQHFASWLGLSPKRDVSGGKVIRHTHGKNPNRVAGILRMAAISLLRSDSYLGARYRSLRTRLGAPKAIKAMARYLACIIYRLFTKGQVWVDRGVEQFEQQRQTRDLARLQAQANSRGFRLVSTADQIA

SEQ ID NO: 500350 - protein, 372 aa, unidentified
MKYIGIDLHSNKFNICIIHDDNTRKVLSFGLSMHAINAFLESVDKETFIMVEASTNTFRFVERIRDKAKEVYVANTHKLKLISLVKKKTDRIDAEKLAIFLKMQIASGEKIIEPVHIPERLIQNLRSLFTTYKIIRKHIASTKNRIHSLYKQELYPFTKEYIFGKKTRTKLKGISINPATDFQLNLLFDSLENREKEIDRLKEYLMYLAKPYFKEIEILTSMKGISVFTAIALIADISEINRFKSSKKLSSYLRSAPGVDISNKTVRNLKTNNLGRKLSITLISQSLNHFRDSNLKLKKWYEIKMEQNKPKGKARMALCRKVFTEIFQMLKKKEYHYYRDEKNHLAKIKMYEKFLNNCEVDEKYEYYIKKSA

SEQ ID NO: 500351 - protein, 403 aa, unidentified
MSSYFAGLDWASRTHAVCVVDVHGAVVERMEVAHDASGLAELQRRLRRLGSPPVAIERPSGLLVDTMVEAGFTVVPIHPNAVKASRPRYRSHGGKSDASDAYVLADLLRTDGHRFKALAPQSDEILALCALVRGRDDLVATRVQLANQLRSLLESFWPGAAAVFADIDSPIALAFVERYSTPESAARLGPKRMSAFCAQHSYCGRRSAEDLLARLHEAAPAVCAELQMEAMGELVRCLARTLKSLVEQIRLVSSRIEHHVASLEDGLILMSFPRAGRICAAQILAELGSVRERFLSDEHLAAEAGVAPVTYESGKSKAVTFRWACNHRLRAAITCMADNSRHASAWAASVYAKAKARGCDHPHAIRILARAWLRVIWRAWTNRKPYDPAKHGAAQLLLETAGA

SEQ ID NO: 500352 - protein, 318 aa, unidentified
MTKNNTEKYVGMDISKTQIDVAMEGQKKTWAFRNDGEGIRELVNLIKKNRPTLIVVEASGGLEQPVVRELYMEQMPIAIVNPTRVRDFARSTGQIAKTDQLDARVIAHFAQAVRPKVRPLRSAEEEHLDALVTRRRQVVQMLTAEKNRRSTTHPGLQTRLQNHIAWLEEERKSLDEAIEDFIQEKAEWKEKAALLRSVPGVGPVTASTLLAELPELGTRNRKQIAALVGVAPINKDSGPKRGKRRIFGGRAAVRRTLYMATLVATRSNPVIRTFYERLLASGKEKKVALTACMRKLLVILNSMICYRRSWQPDFAFTR

SEQ ID NO: 500353 - protein, 353 aa, unidentified
MKTYYVGMDVHRASIVIVVLNGAGKVVMQSVIETGAERVRGYLKQLRGQVNVTFEEGTQAHWLHEVVRPLVTEVVVCDPRHNKLIQSGNKSDRVDAQRLAELLRLGSLKAVYHGDNGMQCLKELVRSYDCLVSDTTRVMNRLKAIYRGRAIGCAGHDIYRADRREQWLAKLTERGTKQRASFLYQQLAALKPLRHEAKRMMVKEARRQRAYPWLMSVPQFGSVSVAQLLAIVSTPHRFRSKRQFWTYIGLAVVTRSTADHEVVNGVLRRRQRPVSTRGLNRNHNHVLKRVFKNAATGACHSGPFKAAYDLRVKQGMVPSLARLTVARQLAATTLALWKSGAQFNPERMTPPAA

SEQ ID NO: 500354 - protein, 304 aa, unidentified
MFGIGIDVSGENLDVAVHEQAFRQFKNSKRGWNSLIRWLQQWPAKQVVLEASGGYEQKALDALHEAGLPMVRINPGRGRSFASATGKQAKTDRIDAMVLAHMADALKLTRYVPPAAWQRRLGELCQRRRHLVQMRVSEHQRMRAFSEPSLISMLNQHLREIQKSIKQLDATIAALLAEQEGWRDFAKLKGAGPVLMATLACELPELGKLSGKAISALVGVAPMNRESGTWKGRRCITGGRAVVREALYMAALTAKRYEPRLKEFFESLVKQGKPGKVALVAVMRKMLVILNARKRDAEAQMASA

SEQ ID NO: 500355 - protein, 407 aa, unidentified
MDVIYPRCSGLDVHKQTVVACVRIASDAPPRQEVRTFATTTSGLLALSDWLDSLGVEHVAMEATGVYWKPVWHVLEGHFELVLANAAHVKNVPGRKTDVNDAMWLADLLAHGLIRASFVPPTAVQELRTLTRTRKQFVRERASHVQRIEKVLEDANLKLSVVISDILGKGGRAVLQALIDGHSNPEHLASCITTRVKATRAELLEALRGRVSAHHRFMLKVHLSHIDALDQAIAAIEKEVGLGLEPFRQAAKLLSTMPGLSAVSANVVVAEIGIDMSRFATPGHLLSWACMCPRNDESAGKRRSTRLRRGGKWLKTTLVQAAWSAVKVKGSYLQAQFHRLRARRGVKKAIVAVAASMLTAAWHMLRDGTEWHDLGAVHFDRADAAKTANRLIRRLQQIGYVVHATPA

SEQ ID NO: 500356 - protein, 353 aa, unidentified
MIVIGIDPHKSTHTATALDSATNTDLGSIRIDASVIEYKRLIVWAKAWPDRRWAIENADGLGHHLALWLLAIGEVVHDIPTTATARVRELSRGGRRKNDRIDAAAAASVAALHGDARQVYPETVNDALALLDERRVNLSSSRTRTVNQLHALLRELMAGGAPTSLTPKKAAAAIRGFRARTAPDKIRLELAKELITDFARFDEQLAANSRKITALLDEHGTHLRNIDGVGPVLAARILGRSGRASRFPTAAAYASYTGTAPVQIASADSSHHRLSRFGDRQLNSALYTIAMIQIRMPSSTGRAFYDKKIAEGKTPRTAARALKRHLATHLWRVMLADEKRGIRAISRESLTAA

SEQ ID NO: 500357 - protein, 342 aa, unidentified
MYYCGIDPHKDNNVLSIINEKGVFLKSESFRNIDSGHESLLKYLKKETDELIIGIENPRSYAINLSQYLISKGEKVLAVSSQFTGEYRKKGSLRQKNDVNDALAVARAVIQEGEKLPEVKVDGIPAGLSFLIENLDNLKTERNQTINRLHAHLRVLESGYDYDLTSKKVIQKIVEKINIEGISQKDSRLFCAKMDCERILGLCDDMKETEDEISKYLEKVKTENLEKIIGVGKYSSAKIIGIVGNIELFRNEGAFASYSGVAPISCSSGKNTRYRVNPGGNRNLNSVFHWIMMTQIRSCPKAKEYYEKKKTEGKTPKEAQRCLKRHISNAVYRALVKDLALA

SEQ ID NO: 500358 - protein, 354 aa, unidentified
MSQKLNSAIAVIGIDIGKNSFHVVGLDKRGAIVLRQKWSRGQVETRLANMPPCLIGMEACVGAHHLSRKLKGLGHDARLMPAKYVRPYSKGQKNDFRDAEAIAEAVQRPTMRFVATKTAEQLDLQALHRVRERLVSQRTGVINQIRAFLLERGVAVRQGLRFLRAELPDLLATRTEALSPRMTRVIEDLAGDWRRLDERIESLSTEIAALAHQDAACNRLMTVPGVGPIISSAMVAAIGTGDVFSKGRDFGAWLGLVPKQISTGDRTILGKISRRGNRYLRVLFVQAAWVVLIRPKSWERYGLKPWIEAAKKRLHHNVLAIALANKLARIAWAVLNKERNFECNSMDKMASRPA

SEQ ID NO: 500359 - protein, 332 aa, unidentified
MRYSYVCGIDISKHHLDLSLIKGAGPQLFSGRCENAPNELEALLNKLPVDDLSCVLFCAENTGMYGYILQQIASNQSLALWIEHPGQIKACNGLQRGKTDPADAERIARYGWRYQDQVRLWQQADSELDQLRYLQSEAVLLVADRAKYKGQLSDQADYMPTAVYQSKQGRLAAVIAVFDEQIAQIECQIKTIIAGSQKLNRQNRLLQSIPGVGPRVALAAMILTKGFTCFDNARAFCCYCGVAPFVWHSGTDTNTKARVSHRADKRMKSLLHMGAMAAVKRPGELKIYYERKCKEGKPKMSVLNAVRSKLVHRMFAVVKQNRMYQPTLPTIA

SEQ ID NO: 500360 - protein, 348 aa, unidentified
MLHAGLDLSRNRLDVCLLSDQGEIVEEFAAPSDHDGVRALARRVLDYGEPVRGVIESMTGARFVHDTLERYGWDVLIADAQKVKGLAPLACKTDKIDARVLAVLSERDLVPAIWLPDPAVRREREQARFRLHLVKHRSMLKHRIHSTLMTFGEPCPVTDLFGAAGRELLDHLEIPQPWRGTVDASIALIDDLDRQIAEVNRQLRAGSAEHPYVPLLLTVPGIGWVLAFTVAAEIGDVTRFPSPKKLCGYTGLCPRVNQSGESDRRGPLSKHGPKYLRWAMLEATMHALRHPAYAERYQRNKRRLGKQRGARVAQIDIARKLTEAIWHMLTNNQPFAPAPGGATHRLAA

SEQ ID NO: 500361 - protein, 396 aa, unidentified
MITVGIDIGGRQHAVARCRAGQDQAEREVLRISQDRAGFDRLDAWLAHQAEPVERISMESSGHYWMPLTSHLKEGPVPVRVVNPLGAKYFAKSRMHRTKSDPADARTLALMAQQDHTIPRDPLEGVELRQASRFAMTLVTEQARVCQRLIRLVELGFPELGELFDDPACRTAREVLRVAPTAAVARKRRTSTLADANAGPGHRRLGATKAERLKEAAATSIAVAELDEEVAFEVGLLLDQYDLYEAQIERAEDHLASLLDGELARRLQTIPGVGPATCAVLIAEIGDIWRFDDADQLLAYAGVHPAERSSGRKGADPETSWHMSKAGNAHLRAAAYRMAVVGVTHNPVIKAHYERKRQAGKSKMNALGHCMSKALNLVWGVWRNEADWDPDWGSRA

SEQ ID NO: 500362 - protein, 361 aa, unidentified
MKKPAQHLIAEVPRRQAKVQITIGIDLGDVWSHYCTLNQDGEVVDRGRFRTTPKAIEKWFTDVSPARVAMEAGTHSIWISAQLQELGHEVIVANVRELRAISHSDRKSDQVDAEKLARYARLDPNILRPIAHRTVAQQEALTLIRARALLVRLRTAAVNAVRGLTKSCGYRMPASATTCFAQRSLAVMPPGLAQALGPVLQQIAEMTIKIKQYDRQIQQLGQTEYPETQALLKVHGVGHLTALTFVLTLGSKERFGRSRDVGCYLGLRPRRSQSGDHDPQLGITHAGNAYLRSLLIECSNHILRPHGRDSALRQWGLRLAARGGKQARSKAVVAVARKLAVLLHHLWSTQEPYMPFYEQAA

SEQ ID NO: 500363 - protein, 384 aa, unidentified
MNKHNILFIGLDTHKVFVEVAYIEDQRGAKSVHLGKQPTTKLAITKLARQFESKYPDATLHFVYEAGPCGYWIYRLLTSLGHCCYVVAPSLIPKKPGDKVKTDKRDAMMLAKLLKSEDLTPIYVPEPEDEAVRDLSRAREVAMKDLKDAKYQLKAMLLRNDINCKVKDNWSAPHLRWLTALVLPHPAQQIVLQECIQIITERTQRVERLVNELTHQVQSWRYYPVVKAVQAMRGVRLLVATGVVAELGDLNRFDHPRKLMSYVGLVSSEHSSGGKRKLGGITKCGNGRARRLLIEGAHSYRYNANISTEIQKRQEGLPKAITDIAWQAQLRLCRRYQRLSHKGKHYNVIITAIAREMIAYIWAISREVVLTPVNPKLRLSRVPA

SEQ ID NO: 500364 - protein, 343 aa, unidentified
MQTVTTIGFDIAKSVFQVHGVDAAGQVVIRRQLKRRAVLAFFQKLPPCLVGIEACASSHYWSRELQALGHTVRLMPPAYVKPYVKRQKNDMADAEAICEAVTRANMRFVPTKTPEQQSCLMLHRTCHLFVRQQTAVINSIRAHLAEFGIVAPVGRKGVMELLHVIADPSDKRVPEVARACLAALGSQLLSLKEQIVEFDRMIMAWHRSDETSKRLRYIPGVGPLPATALVASVADPRTFRSGRNFSAWVGLVPKQHSSGGKDRLGSISKQGDRYLRGLFVAGALAVIRYAKIHGTKHRPWLTALLARRPTKVAAIALANKLARMAWAMMARGERYRNPVALAA

SEQ ID NO: 500365 - protein, 457 aa, unidentified
MGKGSGMTRGDVRRNARRERLRGLLPRDGAVIGIDLGDVKQALAVTDHDVRVLARTTVRVPAFRLGEALDWAVAQARVKGFAHVTVACEPTGARWMQVQRLCAERGLPLVCIQPLVSHIAREQQDYTPHKRDESDSVLIARLAAELHCYVPEELEEAWAHLRHLGRRRAQLIGAATASVLRVRDFLSVAWPVVPAACAEPFGSVTWLAGLQLVAGRCGGQPEKLAAAGLGEFTAAVRAGVGGWGGKRISGRVCRAVFAALADAEGAVTWCRRGLFRRIADELGDLARTRAQLRAVEADMVAVLAELGLSRLGDIPGLSAVGAAAILAETGDPRRYETSSSLVKHAGLSPAENASGAFEGQARISRRGRPGLRLAAWRAVWPMLVHNPVLAAKYAALAGTAAQAGVRSRRGAAAAARAKARVACAASLLRWIWCLVVHGTSWDPAAASGTASCPAQAA

SEQ ID NO: 500366 - protein, 330 aa, unidentified
MSTSMCVLDSTGSVVWEGKAETAPLALLRALHRWAPEAVRVGLESGPLSTWLWHALRSAGISVICIDARHAKAALSMRLNKTDRNDAQGLAQLMRMGWYREVKVKGMAAHADGALLASRALLVTQRCELENQIRGLLKNFGFRVKATKGRAFEPSAVALAAKQPMLGELVQALLTVWSSLRLQIEALTRQVQNQAAGDAVCRRLMTMPGVGPMTALAFRTAIDDPTRFRHSASVGAYLGLTPRRYASGEIDRMGHISRCGDPLVRSYLFEAANVMLGRARKANPLKSWGAKLVKRTGFKKARVALARKMAVVLHRMWLDGTDFGAPKARA

SEQ ID NO: 500367 - protein, 412 aa, unidentified
MEDILTCTMGLDVHRDVIVACLIKGELNQKPEVEIRNFSTLRPDMENLKKWVLEQECKNVAMESTGIYWQPIYEILEDCFDEEINILVVNARHMKNVPGKKTDMRDSQWIATLLRAGLLRGSFIPAKSFRELRHLTRYRKSIVRDITSQKNRIDKLLQSSGFRLSAFISDVFGASGRNIIRHLFTHGSITKEELDKCLRTKTRAKIDQILTAVNGSLSKHQQDFLRLMFEHLEQIEAHKKVIEASIDNEIATHSEALALLCSIPGIDVTAASAIIAEIGTNMEFFPSSQHICSWAGLSPGNNESAGKRKSCHITKGNPYLKSMLCEIAWVIAGKRNTYLANWYWRLKSQKGAKRATIALARKILVVIFNMLKNLVPYDDSTYETLRLKCQKRKTDRFISELTKLGYQVVAPC

SEQ ID NO: 500368 - protein, 338 aa, unidentified
MAVSTVPKWYGIDVSKASFDVAVHQQGGRKVQHHKFSRTRQGCRECLSWIDKCLPAGHHPALVMEATGGYGKEMALWLLDLRAGLHVAVAQPVRVHYFAKGLGRMNKTDAQDAIMLARFGEVHTPSSYQPMSPAYEQLRALGRERAAMVKEAHRQGNRNEIPSGSPIAQSVREQLINHLEGAIAKLEKAMTDVIAGDPQLKMDYRRLQTVPGVGPIVAAVLMGELGDLRDYPSPKALAAFTGIAPALVDSGTSVHQTAHMTKHGSGRVRQVLYLGAMGAVRGKNPLSRSYHHLVASGKPEMVALGAVMRKILACSRAVLVSEQDFDLAYIRKQQEPES

SEQ ID NO: 500369 - protein, 332 aa, unidentified
MNMHPQGGVANRNQRPNAGIDVCKQHLDVCLGTLEQRVANEASGWNELIAKCKAAEVDLVVLEATGGYERGLVCALQDAGITVARVNPRQARDFAKSMGVLAKTDQVDARTLRDFADVLARHKDRAKYITPMIEGHRRQLAELMTRRRQLVDMRVAENNHLEHAGKRSVRSITSVLKTLDKQLAAIDREIDDHIDRHFKDQRTLLDSVKGVGPVTILTLTAALPELGRLGRRQISKLVGVAPLADDSGPRKGKRRIWGGRADVRAVVYMSAVVAMKHNPVIRDFHSRLIAAGKPKKVAIVACMRKLLTILNAMLRDQKLWDAAKHIHSPIAA

SEQ ID NO: 500370 - protein, 408 aa, unidentified
METVYSVCCGLDVHQASVSACLRRVATDGTIGTESHQFATTVQGLTQLSQWLTEAGCPIVAMESTGVYWKPVFHILSATVEVWVVNARDVKQRRGKKTDRADAQWIAELLAYGLIEPSFIPPPQIVALRDLIRMRTALVETRTQVKNRVLAVLEDTNVKLASVVSDPFGVSGREIMDALVRGHRDPEVLSQLARGVLRRKIRELSIALEGAFTDHHALLVRLNLELIDQTNAQICQLDERIEQLTEPLQKEIQQAKSIPGVHHTAARIIISEIGTDMSRFGSGPRLCSWAGMCPGNNESAGKRKSGKTRKGNRYLRRVLTECAWAAGKTDSFLGRTFRRLQARIGGKKAAVAVGHKILLIVYHLFNEGTVYDDGRYNRLNRKQENRQLKRALSALKQLGYQVQLSPAA

SEQ ID NO: 500371 - protein, 341 aa, unidentified
MKVMAGIDLHSNNAMCGLMDMQGKRLAHRKVGCKLKEVLEVFAPYRRRIDTVAVESTYNWYWLVDGLMDQGYKVALANPAQIDQYDGLKHTDDKSDVFFLTELLRLGILPTGYIYDRQTRPVRDLLRRRLSLVRQRTALILSFKNLHVRNTGVDLGLGRVKSLGVLEGKNLFEHPCDRLIAEEQLTVMRQLDRSIDRIEKAVLKVVQALPCYRRLQTIPGIGMILGLTITLETGEVTRFATAGDYASYCRCVKSQRLSNQKSKGQNNRKCGNQYLAWAFVEAANGALRSDGQCRKFYERKKAQRNGIVGIKALACKLSKAAWHIMSQGVDFKSERVFGGRT

SEQ ID NO: 500372 - protein, 430 aa, unidentified
MEVIYSRACGVDVHKRFIVAVICFSDSAKPKYIHKRFSTFNNQLIKFRNWLIENDCQNVCMESTGKYYIPVYNALEGFISNVVVANPKWVKAIKGEKDDNKDAKWIADLFKLGLVRSSFIPEKDIRILRELTRYLFKLINTRSSEKNRFQNALTVGNCKVDMVFTDTFGKSASSIVNLILSDDDYTDEDILSKVHGRCKASPEDILSAVDGTNLNPHQKARINIVKKHMEYIDSLLDEIQLHINEMVAGYENYIQLLCTIPGINRKSAIIIISEIGIDMSQWSSHRKLTSWAGLAPGCNESAGKKKSVKISRAGVYLKPCLVQVAHAAVKDKKCEYYADKFNRISKRRGKKRAIIAVARKILIAVYHILKTGEIFNPSDMADIETTQKQRIEYIKNNLKNAYNQLSRTGLSEEEIINILLRKSSDSPYLE

SEQ ID NO: 500373 - protein, 410 aa, unidentified
MDILYPRCAGLDIHRDTIVACVRLAEAGGVVRFVETFATTTTELERLSEWLTGHGVTAVAMEATGVYWKPVWAVLAEDFELVLANAHHVKAVPGRKTDVNDATWLADLLAHGLIRPSFVPAMPEQALRDLTRARKQLTREKASHVQRIDKTLQAANIKLGSVLSNIMGQSGRALLAALAAGESDPEQLAGLVRTKIRASHAQVVEAVRGRLAAHQRLLLRLYLAQVDALDAAIAAIDHELGERLAPVQETVQRLTTMPGLSPLSAAVVISEIGLDMSRFPSAAHLISWAGLCPKNDESAGKRRSTRLRPGAPWLKTVLVQSAWCAVRVKASYLHALFQRLKARRGPRKAIVAVAAAMLTAAYHMLKRGAAYHDLGPDHFQRTERSRLAARLARKLGELGFDVTLTQRAAT

SEQ ID NO: 500374 - protein, 412 aa, unidentified
MDVIHQRCAGIDISKADVKVCVRVPGPGTRRRTEVRTFSSMTRDLLAMRDWLLSERVTLVGMEATGAYWKPIFYLLESGVECWLLNARHMKTVPGRKTDVKDAEWIAKLVEHGLVRPSFVPPQPIRQLRDLTRYRTQVVRERTREAQRLHDLLEDAGIKLTCVVSDVLGKSGRAMLDALIDGERDPHTLAELALGRLRGKQAVLIDALTGQFTEHHAFLAQAMLDRIDAATAMQTRLTARIDQLVEPYRTRIELLASIPGVSEHTAQVILAEIGADITRFPSAGHLASWAGVCPGNNESAGKHSSGTTRPGDPWLKSVLGQAAISASRGKDTYLAARYRRVMARRGRKRALVALQHSILIAVWHMFTNDTTYHDLGANYFIERAGKARATKRLIGQLNHLGYQVTLNPLGVT

SEQ ID NO: 500375 - protein, 426 aa, unidentified
MKKADLLSTLFVGIDVSSRENVVCAIDFEQQKRLRFSVPNNQPGAIMMAEKLQQFFSNNTDVNKLVVALESTSFYGVHIANYLSSCETLMPFYTHVYCINPKLVANYKKSYVGLGKNDAIDAFIIADFARVGRITSAPWRGSQFLALQRLTRHRLHLAKSLMREKTYMLSNIFLKFSEFSILDDDKQPFSNNYGTTASAILTDFLSTEDIATMSLDALIDYICKKGKNRFVNPEHTAYLLQQAARNSYRLDKCLYEPLTISIASSFNIISAYEAEMKVINKAIEKTLRGLDPNAYQSLLSIPGIGPVYAAGIIAEITSIEAFKSHEALAKYAGLVWKEHQSGNFKADDTILSKDGNTYLRYYLIEATSHVKNHVAEYAAFYQKKYGEVKTHQHKRALALTARKFIRLIFGLLANHQLYSPSRVSQI

SEQ ID NO: 500376 - protein, 418 aa, unidentified
MNVKARRTKKQVNVENQAINLLSKEELNKKIEVVEKELRSYTWRELETNGKFAKNDKLSFITDDMLIVGCDIGSENHYIRAIDVRGRELSRGAFEFSNTSEGFENAKAWVLALAAKHDKKQIVLGLEPTGHYWFALAAWMISNGISVVRVNPYAVKQSKEIEDNSQLKDDRKDPQLIANLVKDGNYGMPYFPEKVYADMRRLSMFRDQLTEDRIRNINRLHRELKIYFPEYMDAFGKIDGAFTLEVLKVSAIPSDITALGAEGIKNIWHNEKLRGRGYSRANEIVSYAEKSVGLTDGIDAGREAVKWYAEQILKLVACSSGKHKGQTKISHRGRKRLRYWLFQAAKSAVSHADEFKQLHEYYTTRTNNPLKKMQSLVVIACKILRVIYTILKTGTTYDPQKLLEDIKRPTASHAPMAA

SEQ ID NO: 500377 - protein, 321 aa, unidentified
MTYIGIDVSKDSFVVAYSPEKNSKTKTFKNTTTGIHEFIQTISKDEHHCVMEATGNYSALLVYLLAEAGITTSLENPLKVKNFARAMLSTVKTDEIDARLIALYGEKMQPAPYKLRSDAILTLKQKRTVIRQLKKQLIATRNLKGSMEALPFFDAKCKKSIEKTIAFLEKQVKDLEEDLASLAKSEYKKQMDLLTSVKGIGITLAAALIMATGGFTYFDNAKQLTRHLGLSPTYQQSGTSVNFKGHINRNGDSSLRSQLYIAACSSLRCNAECRACFDRLRSKGKPGKVAIVAVANKLIRQAFAVVTQEKPYVDGYISSKK

SEQ ID NO: 500378 - protein, 475 aa, unidentified
MADLGGRARKGWEKMQDQGQVNTGSKNRRQVEGLPVIRPNVAGIDLGSERHWVCARTKDGGGREIADFGATTPELIRMGRWLKDRNVESVAMESTGIYWIAPHEVLEAEGFEILLVDTRQLARVPGRDKKTDRTDCEWIQRLHSCGLLKGSFRPREDVCMLRTLVRDKGNLVAESGDWVRRMQKSLDQMNVRVHRAVSDVDGVTGMAILRAIAKGERDPRQLAKLRDRRCRRTEEEIAEQLSGHWREDHLFSLRQSLQMYDATQQRIADYDREIQRKLAEMARDENRGQPAPPVKNPQKAKAIKKRGEEQMREALYRMSGVDLTSIDAIGVETVQVVLSEYGPDLSRFPTEKEFVSHATLAPRRPMSGGKPLRKKRRHTASTRVAAALRMAALSLRNSATALGAYYRKIARRIGGDVAVFATARKLATLIYRLLRWGQPYVDEGADSFEMRYRENQIKSLQVKAKQLGYELAQKA

SEQ ID NO: 500379 - protein, 415 aa, unidentified
MDILFKHCAGLDVHKKIIVACVLLSSPEGVQRFVKHFATTMAGLEALDAWLTGLGVTHVAMESTGVYWKPVYNVLASHFEVWIVNARDMKQVPGRKTDVCDAEWICKLMSIGLLKRSFIPEVEQRDLRDLTRYRRRLVEERTSASNRLEKILEDSNIKLSAVVSKIQGVSARAMLEALISGETDTAKIADLAKARLRSKIPELEAALVGQIREHHRFMWRELLYHLDELNARIAAINERIAAYTAPHEALLQRLCTIPGIQRWTAEVILAEIGPNVTAFPTAQHLASWACVCPGNNISANKRRSGKTRRGQNWLRPALVEAAWATSHTQTYFGSQFHRLRARRGDKRAAVAVAHSILIVVYHLLADPEAVYTELGADYFTKRNPEQEQRRAVRKLETLGFTVTLAPAQAAAPAPS

SEQ ID NO: 500380 - protein, 392 aa, unidentified
MYIVGIDIGKNHHEASIVSPEGKQIGRSLRFATTHKGADSLMSFIFKNIGNSPCVFGLEATGHYWYPIYSFLKAKGYTIYVINPIQSDSLRKMYIRQTQNDSIDSFLIAEVIRFGQFGTTSMADENILAMCQLCRYRDSLISSRTEIKLRIGTIMEQIFPEYEKQFSSLWVSTSMGILEKYLTPENIENAPIDELFEIIKDKSHNRLTRAKAISIKEAAADTFGIKIAQDAFSFQLKQLIDRMNFLDKQIEALDCQILEYYEKFDCYLHTIPGIGMIGAATILAEIGDISRFKNSSSLIAFAGIDPTVRQSGEFNSTHNHMSKRGSPYLRHAIFLAATTCSFHNSPLNAYYKKKRDQGKHHLTATGAVARKLTTVIYAVLRDSKPYEPKKFC

SEQ ID NO: 500381 - protein, 471 aa, unidentified
MSRAKSTISSLAQGEIRSTQGLPVVNPHAAGADIGAQQIFVCIPGPDQTQIVRSFGIYTADLHTLADWLVENGIQTIAMESTGVYWIPLFEVLEDHGIHCCLISGNLARRLPARHKTDVLDCQWIQTLHSLGLLTDSFRPDADLIALRSLLRHRAQLVEHRSPHILHMQKALTQMNIRLDQAVSDVTGQTGLAIIRAIVAGERDPHKLAALRNPRCKKTEDEIAQALTGTWREEHLFILKQSLEFYDFYTHQIEACDLEIERTYSAIRPDWPDPSPDDQEPLPPNKRSSHSKNLSKESPVHVRQHLRRITGIDLTAVDGLSLDLAQKIVSEIGTDMSRFPTEKHFCSWLKLSPNNQITGGKIIRSSTGKSHNRARQAFLQAAASVAQSDCAFGAFYRRLKARVGPAQAQVATAHKIARVVYHLLKYQVEYRQTTAQEYEQQFREREIRHLQRKAARLGFSLTPIPEAGSVS

SEQ ID NO: 500382 - protein, 344 aa, unidentified
MEYYAGIDVSLERSSVCVVDATGRIIGEGKVASEPEALIAWFVGLGLSLARVGLEAGPLSQWLYAALRKAGLVVELLETRHVRSAFKAMPIKTDRKDARGIAQLLRLGWFRPVHCKSLPAQETRALLTARKLVQSKLHDIEMSLRGILRGFGLKVGATTPRTFGARLDELVAGHPTLAVIADALLAARTVLARELDGFERRVRQLARANARARLLMSAPGVGAIVALTYVAAIDDPGRFSSSKAAGAHFGLTPKRYQSGERDVTGRISKIGDGGVRTVLYEAANVILTRLVKGSALKSWATRLANRAGMRKAKVALARKLAVILHRMLADGTTFEPGRAATAAG

SEQ ID NO: 500383 - protein, 419 aa, unidentified
MKLWQEITHYAGFDWAKDHHAVLVVDAQGTIVADFEFDHSLAGWQQWVEKTSAWPNLAVTIETSQGAAVDQLLQRGYTVYPVHPVAAQSYRERKAPSGTKTDHLDAWALADALRVDGQGWKVLEPMDPMTQKLRLLCRDEVVLIEQRTVLVNQLQQALLEYYPAALEAFEDWTDHFTWDFIIQFPTPQSLVKAGKRRWEKFLHVHKLWRPQTVEKRLEIFSKADQFKASEPIIAAKSQLAVSLAKLLLTLSQQLEIYRRQIEALFQDHPDHDLFGSLPGAKKILAPRLLAAIGADPARYGSHDVLQCIAGTAPVSYQSGKINKVHVRWACDKFMRATIHLWTDSFRKGSAWGQTYYQNKRAQGMSHACALRCLGQRLLKIVFCMITHKTPYDAELHALNQKKHGSWVFQLITPAVKTHE

SEQ ID NO: 500384 - protein, 400 aa, unidentified
MNIIGIDVSQGESHATLITEEAEKVAFKFKHNKSGFQILSSYIKFNTIIIFETTGVYSAQLTTYLKRKKVKFYELNPLEAKLRIASLRRNKTDKNDSFKLALLGKTQLAEIKNHCNKQSSSPYESLRILSLRYKQLIKCRTRILNFLRSSLELTFPELNQIFKNAYAVLALQIFRMYCHPDFLVGLTLKEMTDRVYKSVSRRIHKNVIQNYCAQVWLAAKDSYPAVPADSLEIEIISEYCDEIESYNKKIAYLQSKLIKTAVSLNNFKVISSIPGAGQLNSALLLGFTGDLARFDNYKQLNAFLGLDLNRYQSGKYGKGDTINRRGSSQGRAVETDMIRSMLRNQGKIKNHLIDYYYKLKKPPFNKHDKVALIACANHLNRTIINLVHTHQLYNYSKAIH

SEQ ID NO: 500385 - protein, 371 aa, unidentified
MSASVIYVGMDVHKDSIVIAVAGDDREEAKTWQTIPYDGVKLRKVLKSLIKNGEVLRVCYEAGPTGFGLCRSLRKAGIDCIVVAPSLVPSKSGDRVKTDRRDARKLAHFLRSGDLTEVHVPEESVEAIRDLERARDDARCAERVARHQLSKFLLRNERRWDAKAWTKKHLDWIRKQTFAYPAQQRVLEDYVKTVEDLAERVERLTKAMGKLIEETTLAPLVQALQAFRGVAMVTAVTIAAEVGDLKRFQTPQQFMSYVGLVPSEDSTGKRRRQGAITRCGNSHLRRVVVEAAWHYRHLPLMSKELRRRNQGVAEGVRRIAWKAQKRLNERMYHLIHAGKCIHKTVVALARELTGFIWAVGQEETLLEAKSK

SEQ ID NO: 500386 - protein, 351 aa, unidentified
MIIIGVDYHPSFQQIAFLDQETGECGERPLNHSDGEAEKFYRELKPRGVSVRVGMEATGHSRWFERLLAELGIETWIGDAAKIKRQRIRKQKTDREDARLLLKLLLENRFPRIWVPSPENRDLRQLLWHRHRLVQMRTRIMNQLQAVAMNEGYRWKKKLFSAQGRALLENLSLAPWARRRRKELLELLDQLDPKIAELTAAAEREARKQPDVVRLMTHPGVGPLTALAFVLIIGTTVRFRCGKQIGSYTGLIPCEDSSARKQRLGHISKQGNTLLRFLLVEAAQAAARCNADWRRRYVHLAMRRHKNIAKAAMARKLAVRLYWMWRNGWDYSQLVEFGSNAGKLATGHGVN

SEQ ID NO: 500387 - protein, 413 aa, unidentified
MDKIYDICCGIDVHKKLIVACLNHKRKKELREFGATTRELMELAEWLQKNECEIVAMESTGSYWKPLYNIMESYDLHAIVVNPAHMKAVPGRKTDVKDAEWIAELLQHGLLQLSYIPSKDQRELRELVQYRKSLVGERTRELNRLQKMLEGANIKLSGTVTNINGKSARKILEYILSGNEIDEKKYDEMYEEKLIAHNLKASKEQILDDLKGFMSPLQRRMLKELLQHLDELNVHIENLNDEIDNFMKPEEKQASQVIQDVTGIGNTSAQTIIAVIGTDMERFPSDRHISSWAGLCPGDNVSAKKRKSGKIRKGNALLKSTLVLCAHAAVRHKSSYFHAQFKRISTHRGKKRAYVAVAHSILIAIYHILKDGVKYQDLGAEYYNQFNAERKIHAYLKKLKALGWEPPKEAVPA

SEQ ID NO: 500388 - protein, 406 aa, unidentified
MRYYIGVDWADAADAVWVEDEPATKILARSVPHTVEGFTEWGRWLDEQRALGVELWAAIEKPDGRVVDFLLDHGVVVFAINPKAVDRARDRFRASASKSDLFDARVLATFLRTDHHHLSPLRPSSEPAQELKGLTRDYARQVRQQTRLLNQLTATLKAYYPRALELSEDLKHEWVRAFLHDYPTPAALAALTERQWQRWARGRRLSAERIAALWDVLRAPQLPVPPHVVRVSARLVGAVLEQLDVTVRTVQAYREAITDFFARMPAATWATSLPGGRSGTTVPTLYAELGDAAGRWDSFRQLQAHAGSVPVTDRSGTYAAVFFRFACNQHLRQASHQFAANSLAHSEWAKAYYDRCRKRGHRHHHALRALAAKWLKILFVLWTRQVPYDETHHLATMARQHLRRAA

SEQ ID NO: 500389 - protein, 402 aa, unidentified
MTQNQSYADFIGLDKSDKKINVSLQQCAKNKMERSIVKGGAEALHAWVAALCARFPGQAVAICLEQPASGLIHALMSYDFIVLFPINPMTLARYREAFTPSRAKDDPTDADFLCELVALHREQLKAWQPDDVCTRKLRHLTLSRRRSVNMRTRFSNQLKALLKTYFPQALELCGDDLTTPMACALLQKWPSLQQLKKSRAETIRRFYYAQNARRGDVIEKRLALIAQAVALTNDPALIESSIITVQALTLGLRAAHTAISCYDREIARTFAQHPDASLFAALPGSGTAYSARLLAAFGSRRELFESAEAMLNFSGVAPVLKRSGQATITHRRYARPLFVHQSFIEYANESIRHSLWARAFYQMHKAALEKPLGHHPRLGLQMDPYPLPLLAAAHALRRNPLP

SEQ ID NO: 500390 - protein, 465 aa, unidentified
MRTDKKLWRNRKAKKELARRLQSENPGLEVVHAHAAGIDVGNSAHYVAVRPDCDPQPVRRFECFTADLYRLADWLHSCAVKTVALQSTGVYWIPLYDILEERGFEVYLVNAQHTKNLPGRKSDVQESQWLLKLHTYGLLNNSFQPPSQIRVLRTYWRQRLQHVTGAATCVQRMQKALTQMNIQLANVISDLSGVTGQLIVRAIIGGERDPHKLAELSHPRIQASRGEIAKSLEGNWRQELIFVLQQELEMYDTYQRRVAECDQQLQKHLRAFADTVPPPVEEVLPPKKKKKQNKNNPHFHLADELQRITGVDLTRIDGVDVIVAQTLVSEVGLDMSRWKTEAHFASWLGLCPDNRISGDKVLARGTRHVLNRAANALRLGASTLLKSQTYLGAQYRRLRSRLGAPKAITAMAHRLARLVYRMLKYGQHYVDKGAEYYEQRNRQQQIEFLRKKAAKLGLQATPAHA

SEQ ID NO: 500391 - protein, 397 aa, unidentified
MYIVGIDIAKRKHEAAVIDGEGTVIIKPFSFTNNCSGYNRLLAMLTKAKLPLDEVSFAMEATGHYWLALFTRLQKEGFRVQVINPVQTNSIRSFYIRQAKTDPRDALLIAEVIRFGHFSESTLHPENIYELRELCRGRHAIVSMQADVKRKVVALLDQVFPEYETAFTNLFSDTSMAILQTCPTPKELSEMPLEELCHLIEVSSHKRFRMAKAQELQALARNSFGFAMAGDVFSTMIRLYAKHLDFLKQQVREMDLKIAEIMDTLDTPITTITGIGPTLGAYILSEIGDISRFSSAAKLAAYAGIDPTMRQSGEYNGVRNRMSKRGSPYLRHAIWLAASSAVLHDPALKLYFQKKRDEGKPYMASVGHACRKMVSIIYAVMRDNKAYTPCIPNEISA

SEQ ID NO: 500392 - protein, 495 aa, unidentified
MKAKACKAKGKHSNSSKRGAKITVRRGADGMEIVNPHAGGIDCGAQEHYVAVPPQSVEPGEPVVRCFSAFTEGLDALVEWLKACGVTTVAIESTGVYWIALCQKLEAAGIEVFLVNARHVRHVPGRKTDVKDCQWLQRLHSFGLLSASFRPEDAICRLRSLQRHRLNLISTAGAEIQHMQKALQQMNLHLHHVVSDITGVSGLRILDAILAGQRDASQLAKLRDHRVYKSTLAQMEAALVGDYRPEHLFVLGQSLQAYRFYQARTQDCDAEIERLLQQLAERFESSSVLAAELSQPEVLNDAAPSQNPRPVKRKVKRKPQANEPKINLADYLRRICGVDLTQVIGLNVLSVLLIVSEIGVDMSKWRSAKAFCAWLGLCPRNKISGRKVLDTRTCKVINRVATTLRLAAQAVGRTDTALGIFYRRKKAHLGPPKATTATARKLACLVYHLLKYKEQYREPDPATYQLKVQKTILAKIQKQAAALGYKLLPNALVPA

SEQ ID NO: 500393 - protein, 392 aa, unidentified
MMVSVGIDVSKDKHDCFIVNSEGEILADVFTIPNNMDGFHYLLQRIQDCANTQNKIKVGLEATGHYSYNLLGFLLDSGLTTYVINPLHTNLYRKSLSLRRTKTDRIDARTIAMMLMSDVDLKSYSNTAYHNEELKSLTRYRFDKVKERAKLKSSVARLVNILFPELEKLVSSLHIAVVYALLSNYPGASYIANANTEELAETLCTASKGRYTKSKTAEIQVAAGVSIGSKMPAKSMELKHTIALIRELDKEISEVESAIDKITSQMDSPIFTIPGIGRHMGAMILAEVGDFSNFASADKLLAFAGLSPSTYQSGQLQNCYAHMEKRGSRYLRYALFNAAKYVCLWCPTFSAYLEKKRSEGKHYNVAISHAAKKLVRLIFAMQRSGKAFLADY

SEQ ID NO: 500394 - protein, 409 aa, unidentified
MKLFVGLDVSSFDIKVCFLDGEGHELKSFTVSNDLPGITRLRDEILESTKSETVSELRIGFESTSVYSFHPSMFLLNDESLRALGGQVLVMNPKQISNFKKSYSDMDKTDEIDAFIIADYLRFGRLPVSFVREEQYVALQQLTRARYHIVRQQTKEKQRFLQYLDYKCSAFTEEVESSVFGKAMTDLFLENYSIDELANIPLEDLANYLREKGKNRFPDPESVAKSIQKAVKTSYRLDKVVEDSIDTILGTSITLIRTFKKQITELDKAIKRIMKAIPQTLQSIPGMGPVFTAGIIAEIGQIERFADETKIAKYAGLYWRRHQSGRFTAEDTSLSRMGNEYLRYYLVEAANQVRRNVPEFGEYYAKKFKEVPKHQHKRALVLTARKFVRLVDALLRKNQIYTPKRSVNI

SEQ ID NO: 500395 - protein, 378 aa, unidentified
MKIIKESNQSQEELNFSGTNIYVGIDVHKKSWNVTIMIYNQYIKTISMNPSPKELGKYLRKNYPRGNYYSVYEAGFSGTWIHRALLKAGIKNIIVNPADIPTTNKERLTKTDTVDSKKLAKMLSNGSLQAISVPDTKQEAIRGISRMREHFVKTQTSVKNQINALLNREGVEVDPKYKYGRWSHNYINELRKIKFTEEAVKYELEAEIELLIFIRKKLTEILKEIRRIITETEEINKIIKLLLTIPGIGTITAFTLYTELWDIKRFTNKDKLASYVGLSPACHNSGEKERVLGLINRHNARLRNLLIESAWVAIRHDNALTKKYGELLLRSKPQKAIIRIAKKILFRIRTIWINEVPYIKGNLKSPQNRTITHALPEA

SEQ ID NO: 500396 - protein, 338 aa, unidentified
MHNRQNYLYVGVDLHKEHHTAVIINCWQEKLGEIQFDNKPSAFSKFLLEVETYVSDGLSVVFGLEDVGGYGRALAKYLVDHEQVVKEVNPALSFLERKSQVMIHKNDSWDAECVARILINKFNQLPDAKPNDLLWSIQQLVSRRNALVKAQSSLKNQLHIQLNHHYPSYKKFFSELDGKTALAFWEQYPSPSCLEGANIKQLTAFLLDVSNNTCSVKKASEILKLVKEDGQTMKEYQETRDFLVRSIVRDIEFKKKEMKYIERELKQLVKLLDYQLETMPGIELVTASALIAEIGDVRRFPNANKLARFAGIAPVLAEKVRHIKANKETGRYTLYFII

SEQ ID NO: 500397 - protein, 341 aa, unidentified
MAIKVIGLDIAKSVFQVHGVDESGQVVLRRRLRRSDVLQLFQELTPVLVGIEACHTGHYWAREIRALGHDVRLMPPQFVKPYVKSQKNDAADAEAICEAVTRPSMRFVPIKTAEQQSILLLHRTRDLLVRQRSSLVSAIKAHFAEFGIVLGGGARNIDSFIDRLNDASCKLPDIARGMLNLLGAQVRDVEMRARAVEKELLSWHRTNEVSKRLATIPGVGPITASAIAATVVDAQQFKSGRQFSAWLGLVPQQRSSGGKERLGSISKRGDGYIRRLLIHGARAIVGWRKRTTSKPDRWIAGLLNRRPVNVATVALANKSARIAWALMTCGTDYDHRRCRAA

SEQ ID NO: 500398 - protein, 398 aa, unidentified
MTESSDYESVQVFIGVDVGKDTHHAVAVNRSGNRLFDKALPNDENKLRSLISDLKQHGQILLVVDQPATIGALPVAVARSEGILVGYLPGLAMRRVADLHAGEAKTDARDAAIIAEAARTLPHALRTLKLADEQIAELSMLCGFDDDLAAQTTQASNRIRGLLTQIHPALERVLGPRLDHPAVLDLLQQYPSPEKLASLGEKKLATQLCKLAPRLGKRLAADITQALTEQTVVVPGTNAAVVVLPRLALQLITLRKQRDEVALEVEQRVLAHPLYPVLTSMPGVGVRTAARLLTEVACRAFASAAHLAAYAGLAPVTRRSGSSIRGEHPSRRGNKTLKRALFLSAFAALRDPISRAYYTRKMSQGKRHNQALIALARRRCDVLFAMMRDGTFYTPTAS

SEQ ID NO: 500399 - protein, 413 aa, unidentified
MEIVHRICCGIDVHAKNLVACLICNGKKETRTFSTITVDLMRFRDWLTSAGCKHVAIESTGVYWKPVFNILESELEVILINPEHARALRGRKTDVKDAEWLADLLQHGLVKASFIPPPEIRELRELTRYRESLVREHTAIANRIQKLIESGNIKLAQVATDVLGASGRAMLRRLADGEMDASKLADLARGKLKDKHGALKLALEGRLTVAQRFVLKELLKRIEELEAAGSRVDRQIEEAIKDDSHPKLARAWKNLQTIPGVGRRVAEVVMAEIGVQMDGVFPTDAHLASWAGLCPGNKESAGKRMSGRTRHGNTYLRSALVQAAWAASMSKGTYLASQYKRLQRRLGRKKALVAVAHSILVIIYYILDREQSYIELGGDYFDRQHVDRQRDYLLRRLAALGLKVTVEDEAAAA

SEQ ID NO: 500400 - protein, 344 aa, unidentified
MKFTRCGLDIAKQVFQVHGVNEHGVVKARKTLPRAKVLEFFAQLAPCLIGIEACGGAHYWARELSKLGHTVKLMATQFVVAYRKRGKNDANDAEAICEAVGRPNMRFVAIKSEEQQSVLMVHRARALVVSHRTAHMNQMRGLLGEFGLVVPKGVARLRRELPGILETAHNGLPMLAREVLAGMLEQLREFDARMSAYDRQIRALAQASEPARRLMQIEAIGPQTATALVATIGDPRVFKNARGFSAWLGITPRQHSSGGKNRLGQITRQGDRYLRTLLVHGARAYLRVVGKKTDAKSDWARRLMERRHVNVASVALAAKHARIAWAILAHGTEYRPANLSAVAA

SEQ ID NO: 500401 - protein, 357 aa, unidentified
MDQVSTIGLDTAKRIFQVPGVDEAGAVVLRRQLRRSEVLKFFAKLPRCVVGMEACGGAHYWGREIAALGHEVRLMPPTRVKPPAFAGAGSTSNGRKSDKVDAAACCEAVTRPSMRFVPLKTVEQQAALMMHRARQLLVEQRTRLGNAIRGHMSEIGIIAAKGGAGLGALVAFIGNPEDQHLPAVVRTILVPLVEQWRSAGAQIAELDRQILAWHRNNADSQRLETIPQYGPILSSAMAATIGDAARFDNGRACAAWIGLVPTQNSSGGRERSGGISKTGDRYLRQLLVIAATGMVRRARAHPEDHPWFAGLLERMPPKKAAVALANKLARIGWAVLRHQTPYRARRPTAVAPALEAA

SEQ ID NO: 500402 - protein, 355 aa, unidentified
MSQEKYIGMDVHQATISVAVMDAGGKLIMECLLETKAATIVEFIEGLHGTLSLTFEEGTSAAWLHDLLKPHISRLVVCDPRKNALLKDGNKSDRIDARKLAEMLRTQQLHSVYHGEHGVRTLKELGRSYLTITKDVTRVMNRIKALYRSWAIPCAGATVYAPRHRAEWLAKIVEPGVRVRAERLYQQLDGLQPVRLEARRELLLESHKHSAVKLLRQIPSIGPIRAALLVALLQTPHRFRTKRQLWAYSGFAVETHDSGEYRYVRGKLQRNRERFTVRGLNDNHNNDVKNLFKSAAISASTRPGPLHDFYVARVEKGIRPTMARLTLARKIAAISLTIWKKGVDFDAQQLHRQTA

SEQ ID NO: 500403 - protein, 356 aa, unidentified
MSMIKQSVGVDISKGDFVVYAELLFVDQSTKKLGGRKFANTPKGAKEFAEWLGEKTVADVPLQIVMEATGRYHEVLAYYLYENHYRVCVELPNRIKYFAHSLQEFSKTDPIDARMIARYSSSRHLDRWQPSSPGMRRLRELTRERQDLIKMRTQVGNRLCAMRVAAKSMVSIIQRMEAQLVFFNQQMEDIDTEMDQLARQDQVLGQQLERLISIPNIGKTTARTILAETAGFALFNNRSQLIKYAGLDVVERESGTSVRGRGKISKRGNAHLRSALYMPALGAIRQAGVFREAYQRHFAKHKNANKALMAVQRKLLLVVFAIHQSGQMYDVNVHHQSTQNEVGEHNGSPTVARLAS

SEQ ID NO: 500404 - protein, 412 aa, unidentified
MRLFVGDDWAEDHHDVEVMDGAGKKLAARRLPEGAAGMAQLHALIGQFVPEDDMDSAEVVIGIETDRGPWAAALVAAGYAVFPVNPLQASRYRERHGVSGAKSDAGDAHMLADMVRTDSHQLRAAAGDSPAAAGIKVLARTHKTLIWERTRAVQRLRHQLREYFPAALEAFEDLDAADTLELLGKAPDPARAAKLTRAQVSAALKRARRRNIPDKATAILLALRSEQLAQPAALTAAYAATVRSLLAVITVLNEQVKALQGQVGEHFGRHPDAEIYLSQPGIGAILGARVLGEFGDDPRRYRDGKARRNYAATSPLTRASGKKKVVAARFIHNDRLVDALNAQAFAALNASPGARAYYDELRAREIEHNDALRRLANRLVGILHGCLKTRTVYDEATAWGHRENLPQSSAAA

SEQ ID NO: 500405 - protein, 337 aa, unidentified
MHQVGRERTADVVKGDDMALPVLGIDIAKAKFDAYLLLANGMVQRKVLPNTPTGFALLTRWLGQHTSESVHACLEATGTYGAALALHLHAQHHVVSLINPAAIKGFAASRLTRSKTDRVDASLIARFCATQHPPAWTPPAPEVQALQGLVRRLDALVEMRTMERNRLSAGETLAAVRASIEAHLAYLQQEIAQTERLIQQHLRQHTVLQTQLRLLLSIPGIGAATAALLLAEINFAAFGSARQVAAFVGVVPRLRQSGSSVRGRSRLSKLGSSRVRHALYFPAVTALRCSPEIQAWADGLRARGKCEMQIIGAVMRKLVHLAFGVLKSGRPYDPTLA

SEQ ID NO: 500406 - protein, 309 aa, unidentified
MDTIVVGIDVSKDRLDVAVRPAGTTLSCSRDAAGIEGLIGELGRLGAQLIAVEATGGFETVVVASLAAASLPVVVVNPAQVRAFARAIGQRAKTDPIDARVIAHFAEATKPQVRPLPDAATQGLADLVARRRQIIQMIVAEGQRAKRAAPRAKRSIGRLLEALRRELSEIDADIDESVRGSPLWCEKESLLTSVPGVGSGTARTMLAELPELGSLTRRQIAALAGLAPFTRQSGKWRGKSFIGGGRASVRTALFMAALTAMRWNPALRAFHHRLRGAGKPKMVALIAVARKLLTILNAILRDKTKWQNA

SEQ ID NO: 500407 - protein, 366 aa, unidentified
MKKISTVQAFGNEIFKEQKLTIGVDLGDRWSFYCVLDEAGKIILEQKVVTKPEAMKQTFARIPRSLIALETGTHSPWVSRLLTQVGHEVLVAHAQKVQLISKSNRKDDRHDARTLARLARIDPELLGPVRHRSAKAQIHLTVIRARAELVSARTALVNAARGLAKSYGERLPKCGTQQVSQELAAELSVELREVIEPLLAEIESLNERIKGYEVRMEKIARESYPQVELLKQVKGVGTQIALTYVLTLEDPHRFPKSREVGCFLGLRPGRRDSGESQPQMHISKEGDPYLRTMLVQGAHYILGPFGEDSDLRRWGLKLAARGGKTAKKRAVVAVARKLAVLLHRLWVSGEVYEPLRNSHQAMRAAA

SEQ ID NO: 500408 - protein, 351 aa, unidentified
MDTTTTAPLASIGIDIGKEVFHIVGFGTNGKIAFRRKIKRLALVDTFKRLPPSVVGMEACLSAHFVSRTLRQLGHQPKIIPSIYVKPFVKGQKNDYNDAEAIAEAALRPNLRTVREKTQDQLDLQALHRVRSRLVSRRTATINQIRAFLIEQGIAVRTGARALRNSLMAILDNRQDEISARMRGLITGLYEDWVCIDARIETIAGEIETIGQKEANCQRLMSVPGIGPLISTAVVAAIGTGEAFERGRDFGAWLGLVPRQYSTGGRSILGRISKRGSKYLRTLFIQAAKVILMRPHNWERFSFGAWLLNATPRLHRNKLATALANKLARIAWSVLRNEKVFDIPHHEVMAI

SEQ ID NO: 500409 - protein, 401 aa, unidentified
MDPQIRVGIDVGCKAHRVGIANPDGKVLEEFDISHTAAGFCDFFRRIDHHKQELDLPVAVAMEGFNGYARPLDRMIQEHGYTLYNVNNLKLARFKEVFPGAAKTDAIDARKILELFHLKDHLPLAKDALQKVVSAPLVNDKLKRLSRRRRQLVNEKVRVASRIQSDMQAVCPELLAITNNASNLQFLRFLTYRDDLTQLARLQSTTLLKIPGVGQNYARIIQEWQRKASFSAEVEYVGPMIITDARRILELLDQVHILDEAMAALADQSELARRIGSIQGFGKTCIAELAGEIGTTERFAGERSLALYVGMSPLSKDSGQHHGSKCPRSVNHRAKAAMMTAVAHHIRCVPESRAYYDKKRADGKKHNQAIRALGRQLVRVLWSMLKNERDYELREVIPSVT

SEQ ID NO: 500410 - protein, 355 aa, unidentified
MREVRKISFKEKSIFIGIDVHKKSWKVCILCEEIEHKVYTLETSASVLGKYLRRTFPGAKYFSVYEAGFCGFWVHEALKSEGINNIVVNPADVPTTDKEKKRKTDGIDCRKLARSLRNGDLSSIHIPERDKQEDRSLVRLRTLMVKDQTRSKNRIKSVLSTFGIIIPEEKVGSHWSKKYIEYLRQEIKKSATLSHTLEFLLIDLEKNRNMVAEVTRKIRQLSLEPRYLKKVDILRSVVGISILTAMTLLTEFGDFRKYKHLDKLVSYVGITPDERSSGEKENKLSITKRGNKFLKHVIIEAAWTAVRKDPALMLAYKNYSKRMLKTKAIVKIARKLINRIRFVLLNEVEYKLSTL

SEQ ID NO: 500411 - protein, 410 aa, unidentified
MIFVGDDWAEAHHDVYVCDEAGTKLASKRLPEGIDGMAKLHDLVATHAADPGDVVVGIETDRGLWVNALVEAGYVVYAINPKAASRYRDRHSLSGAKSDPGDAKMLAELVRTDRHNHRQVAGDTALAEGIKILARAHQTLVWERTRATNRLRSSLREYFPAVLATFSELADRDTLAVLAAAATPSEAAKLTPGKVRTVLRRAGRQRNIETRASTIVAGLRTEALSAPSAIEGAHGATTRSSVAILTELNTQIETLATELADHFEQHPDSDFYLSLPGVGVVLGARALGEFGDDPNRYADAKSRKNYAGTSPITRASGTRSVVLARYVRNDRLVDALDQWAFSSITVSAGARAFYDRRRAAGDSHHKALRALGNRWVGILHGCLDHRTRYDENFAWGHRIDTDLKQIAQAA

SEQ ID NO: 500412 - protein, 401 aa, unidentified
MISVGIDISKGKSTVCFMKLYGEVLHKPFEVKHTESDLKHLVNQINTLTEETRVVMEATGAYHYPVLAYLKENGIFTSVINPLVMSKYANVAIRKGKTDKLDAIKIGNFGIDHWYHLVDYLPTSDVYDELKTLNRQYLSYISMRIHSKQTLANLLDRTMPEIKTLLCSRSDVPDRDKLCDFVKEYWHFDNITRMSEARYINNYNSWAKRKGYRASTEKAKRIYALALEGIPTLSSTTPSTKMLVEEAVKVLHMIDTTLANILAHMRELAKSLKEYKVVMAMPGVGEILGPRIIAEIGDVRRFHSGGAVIAYAGLDAPPFQSGNFTATKRSISKRGSASLRKTGYEIMRYIKMSKPTEDDAVYQFRLKKEAEGKPKKVAKIAALNKFLRIYYARVKEVYAAA

SEQ ID NO: 500413 - protein, 330 aa, unidentified
MNTAGIDVAHKTLALVISKGEKLGKAREFANSPTGHQALIKALKSVKVQRVCLEATGSYHLDLALAIEAAGLALMVLNPKAAKRFAEALLTRNKTDAVDAGVLAQFAQRMPFEPWQRPAAAALELRACARRLEALVDARTRAKNQLHALQQSHTTPDIVLEDVRLSIAQCEAQIETLRTWALAQIEADVSLAQIYDLLTGIQGIAVASAIQLMGELLVLPEDMRAKQWVALAGLDPRHNTSGTSVNKKPRLSKAGNHHLRKALYMPALSAVRHEPHLKHYYHHLIERRGLKPIQAVCAVMRKLLHAIHAMLKQRQPFDGSRLCMNHECAA

SEQ ID NO: 500414 - protein, 493 aa, unidentified
MQRAPLRARCVRMNPLIKGGVPVSTTPTRGKRRREVSIVAKRKVPLPPQLKRVNLNAAGIDIGSEEHWAAVPPGRDSEGRDVRGFGAFTGDLCALADWLKQCEIETVAMESTGVYWIALYELLVERGFEVLLVDARQAKNVPGRKSDVLDCQWLQELHTYGLLRGAFRPVDQICILRSYLRQRSMLVTYASHHIQHMQKALEQMNLKLAHVVSDITGLTGMGIIRALLSGERDPVKLAKLRDPRCKSSEATVARALQGHYREEHLFALQQAVELVDFYQHQITACDRQIEACLQQFEEKSTEAPVAARSRKRRRGGITFDARSYLYRMTGVDLTQIDSIEANTALTVIGEVGLDMSRWPTEKHFGSWLGLAPGSKVSGGKRLSSRTKPSANRAAAALRLAAQSLNQSQSALGAYFRRLKAHIGAPKALTAAAYKLARILYRMLKYGAGYVDQGEVAYEERYRDRLLRNLKRRAAELGFQLTAIDSNAAQLVLT

SEQ ID NO: 500415 - protein, 352 aa, unidentified
MSYIGLDLHKKYVTLCALDSEGAVLAETRRLEPDLAVLLAWLAPIPKPATVVIEATLYWAWLYDRLTAAGYAVLVAHPQQVKLISHARCKTDPIDARKLADLARTNLLPTIWVPDPATRARRTLLRGRAWLVRQRTRLKVRIHAYVTAENERVPTTDLFGTAGRAWLRTVALPPAVRTQVDHLLHLIEALEAELKPLDREVRRLAARDPLAQQLGSIPGIGPFGALLLGAEIGSITRFASSHEFAAYAGLVPSTRSSGGKTAHGSVGRAGSGWLKWILVEAVQRLKREPGPVYEHYVRLVAAKGKAKATVAAARKLACYIYWMLTEGRSYEEWLRQRVRREVRPEITLASVG

SEQ ID NO: 500416 - protein, 319 aa, unidentified
MSKRYVGVDVGLHSFDVAVRPDGLHWVVEYTPEGVREFVKQMQKLRPQLVVMEACGNLERTLARGLERGSISVAVMNPRQIRDFAKSIGQLAKTDKLDAEVLARFAETMRPEARPLPNEDEEKLRDLLARRSQLVGMITAEKNRLRRASASVRIGIETHLRWLSEELNKLGEEIRQWQKSKAVWEEKTRLLESTPGVGVMVSATLVGFLPELGTLNRRKIAALVGVAPFNCDSGVRKGKRSVWGGRAQVRSALYMSVMAGIRCNDQIRSFYQRLRDQGKPAKVALVACMRKLLTMLNAMIRDQTVWQPQDLALDKQHGC

SEQ ID NO: 500417 - protein, 281 aa, unidentified
MTIIATGIDLAKNVFAVHGVTAGGAVQLKQPKVARGKLNALMASLPPGVIGMEACSGAHHWARQFQAHGHTVRLMAPKLVTPYRMSGKRGKNDAADAAAICEAVQRPNMRFVPVKTVEQQAQLMVHRARQGFVTERTACINRIRGLLTEFGIVLPLKAEVVRRQAREHLQDLPGYANLVIGDLLSEVAHLDERIAQYDKHVRAIARQSTPAQRLMQLMGVGETTATALVAMVGNATEFSCGRQFAAWIGLVPGQYSSGGKARLGRTGASPKPVTRTCAACW

SEQ ID NO: 500418 - protein, 371 aa, unidentified
MESIVYVGIDVHKDTYSICCYKSREDRFYYEKKLVAESKRVIKYLESVEKEFGEDTLFVCGYEAGPTGFGLYRDLQKAGYSCVVMAPTSLKHSANQKIKNDRVDAKFLSKTLFTKDYSSVNVTTEHEEAIKEYCRMRLSLKAELKKAKLVMQSFLLRLGKVYTEGKTWTVRHREWLQKVHFEEEYLNEAFNEYMISINTYENRIKSIENRLTEIAQDKCIKEKVEKLVCFCGIETVSAVSIVSKVGDFNRFEKAYHFSNYVGLTCGEESSGKKEQRLGITKTGDKELRRLLTESAKSIKQTNSQGRKSKRLRDRQKDKDPLVVAYADKCRQRLKNKITHLELRGKSPNVATTAAARELACFIWGMMTNHIA

SEQ ID NO: 500419 - protein, 419 aa, unidentified
MINAGIDLHKTQFTVCVRSRDKKGEVINTFSKYPTTDEGYTAFLNEVAQYQKRGEEVRVGVESTGNTRYFKNRMEAAGIGVTVINPSKLKVINESVKKTDKHDAATIAEFLEKDMLPEANLCSRESEQLRRLLKVRTTMIKAIVVMKNQIHALFTAEGMEDVKAGSLQSKKGRQRVLATLNQCNLGLVVQPLFGMIEGMEENVNSIEKQLRALTKEDRIVKLLLTIPGCGEICAWTIRAYIDDINRFASPKKLAAYAGLVPWVQNSNETIRHGKITKRGPKELRTALVQIVMGLRRMKEKTLAWRLMQQYEVMKASKGSGKSIIAAARKMATFIWHMLSKDVEFDLSLMLDKKLEKKSEAMSRSARLAEAAMIEKTDKPIIKKAANAVIEKTDKPVLKKPGIKTKEKAGVARKKIKKVG

SEQ ID NO: 500420 - protein, 405 aa, unidentified
MDWASEKHSVIVVDQTGKVIEDFEIEHSALGWKKFREKLQAYGSIPFAIETSQGVAVEQLLEAGMLVYPLNPKSAQAYRQRKAPSGVKDDRLDAWSFADALRVDGQDWKALRPEEPLIKELRLLCRDEVSLIEQRTAFVNQLRHALAEYYPAALEAFEDWTSVSAWMFLQRFPTPESLAQAGKRQWQKFLHSRRLWGSDQGPRRMEIFAQATEFAGTPPTTRAKSLLALSLVQMLFSVEKQLALYRQRIEELFARHPDHDLFGSLPGAGPKIAPRLLSEIGDDRERFGGDPQNLQCLAGSAPVTKRSGKQRKYWHVHQRWACDKHLRHAIHLFAEQSLSRCVWAELYYQHHRQKNQSHANALRRLAHRWLKIIYKMWTDRTPYNAELHHRNQLQHGSWIFQLQKS

SEQ ID NO: 500421 - protein, 400 aa, unidentified
MTESLIVGIDPGRYGHGVVVLGVDGEEVLRERVANEAAAIDLLVDRVVKLAGGAGRALWVIEADGGDGAVLIGELLGRDELVAALTPTEVAVRRKGRRQVHKSDLIDAELCARIGREEHATLRRLVAVPEAVAEIRVLARYQEGLIRDRTRLINRLRFLLSQYWPEFLAARAFAALDGDAVTALLAELPTPSAVRSKTPLELARFLASQRYRRRPLERAEQILAAAQVGSRPQEAVYGRLVAEVAGELRALKQRIEALDEEIRDRFLLQPEAPIILSLPGMSHRTGPRFLAEVGALGRFGSPDALAAYAGLTPTLWQSGRSSGTHFLSRRCNLHLRQACWSAALGSLKTPASRRFYDRKRSEGKSHHQAIIALARTQLRVLWTMLRAGTLFSPERALEAA

SEQ ID NO: 500422 - protein, 363 aa, unidentified
MKEKETVTRYVGIDLGKRTYEAAVVENDAVRKSNGNTSAAGRQKLYKKLRPGDKVALEAGNLAFIIAKEIEAAVGCKVYVLNPAQLAVIYRSMKKTDKEDALKLAHILEDCREERLPVVPVPSDKEIHRRKLLAGYRRAQQGRSREINKLHALFLAQGITTIVRADLSTSEQRKEAIKALNGLELEEAEYLVACLDLHEQRINALNRQIKKESCGDEVIKRLQSVPGVGPLVAFAFVAHVGAERFENSGQVSNYLGLVPKVYISGDTVRYGRITKRGNGYLRALLVQAAWALVRTKKKDKLKERFEYMTVEKSKSKKQAIVAVARRIAELLYTLMRDGTGYEARPFVPEKKTAEELVRLAMSA

SEQ ID NO: 500423 - protein, 317 aa, unidentified
MSKSFIGIDVSKNSLDVHILPEGLSLSYRYETKPMKALIKKLKTHTPELVVLEATGGYEITVGIALADAGLPVAIVNPRQVRDYARALGILAKTDKIDAYVIARFAQDVKPEARGQLTFKEQELKSLVVRRQQLVEMRSAEVNRLSRTTIPQVKNGIQKIIRVLDAQIKAIDDDLDNEIKKNPAWNQKLEIITSFKGVGDHTANTLLFGLPELGTLNRQEIAALVGVAPFNRDSGMLRGKRTISGGRANIRKALHMPTLAAATRWNKDMMVFYQRLVSRGKKHKVAMTACMRKLLITLNAMVKNNEPYHPKFREVPA

SEQ ID NO: 500424 - protein, 416 aa, unidentified
MASTDRHVIGGVDTHADVHVAAVLDSATGRHLDTASFPTTLAGYVGLLAWLRGFGVLDRVGVESTGSWGAGLARLLAGEGVEVIEVDRPDRKARRFEGKSDPTDAQAAARAVLSGRARAIPKSHDGLVEAIRSLEVVHHGAVKDRTRATNQFKALLVTCPEALRHKLRGLSFTDQLRRARRFADGHADPVEREVRLALKELARRIGFLNDQTERLGARIGELAAQASPALIGLSGVGPQVAAQLLAAAGDNPQRMSSEAAFAKLCGACPIPASSGKTAGRHRLNRGGDRRANNALFTVVLVRMRHDPATRAYVARRTAEGKTRKEVMRCLKRFVAREVYQAIAHPPGDLPTGPELRELRQRQGFPLATVCNAVGTTPIRLSTLERGLVHDTRLARRARSWLLEHAPDARPCPDATT

SEQ ID NO: 500425 - protein, 391 aa, unidentified
MPHYDVYVGVDVGKSFHHVYATDGDGNRLVSRRVNQDETQLTDVFTRLRTDNKSVLVVVDQPKNIGALTVACAARAGCDTMFLPGLVMRRAAGLLPGDAKTDVRDAQVIAMAARQLPDALRPVSTAGPERADLDALVAWDADCVHDRTRAMNRLHALLAECDPMFEAALYQRLDSPFILALLIRFGGPWGIRAAGEKKVRAWAARQKRVPAGLLDDAIRAAGLMDHKPAGTDAREAGPIPAVCTRITELTRTRTMIEARIDAHLQTNDTYQMLLTMPGVGVHTAASLVTLVDITMFPTCDQLASYAGIAPHTTRSGTSIKGETAARTGNRALKNTLFLSAFASLTHDPVSRAYYDAKRAAGKQHNTALISLARHRLKIMYAIMRDKTPYHT

SEQ ID NO: 500426 - protein, 339 aa, unidentified
MKRYLGVDLHKRCFTVCYLRRKGEYQLQTFRVSVNGIAQFVRTLQKSDALAVESTGNTAYFVDQLTRYVQQVSVVNPSQFKIISQSVKKTDEHDAITLARYLQKGLIPEVRMRNKEERQLHSLIGTRDKFIKLRSALKNKLHNILNANGVVTKPEMFSSEKGLAALSSLELDPAYLFELGIIVDQIRSLNQAIEQMNQELSERGKHLKGHQNLTSITGIGKITATILLNAIGEVEQFSDEKKLAAYLGMVPRVSQSNETSRYGRITKMGNKIARTALVQSTLIAIKYNGYLRSFYERLKAKKGSGKAIIATARKLLTIIYRTLKNNWVFTDFNRFQRAQ

SEQ ID NO: 500427 - protein, 371 aa, unidentified
MEEFSKYVGLDVHKETIAVSVAEAHCGEVRYLGEIANTPEAIEKLVKQLRKGGANLSFCYEAGPCGYGIHRQLTDLGWDCQVVAPSLIPKKAGDRVKTDRRDSLMLARLHRAGELTAVWVPDGAQEALRDLTRAREDMKHLQRQAKQRLLAFLLRHGKRYDGKSNWTQAHYRWLEVVKFDHPVQQIVFQEYVDTVKAMTKRVAAFDKQIESAATESVFWPVIEGLMSLRGVNLLTATTIVAEIGDLRRFASAPQLMAYLGVVPSEYSSGGTTSRGGITKTGNGHVRRVLVEAAWTYRHPARKTTVLQKRAERTSEAVQEIAWKAQTRLCGRYRLLEGRGKLKVQACTAIARELAGFIWAIGQALPQPTVKA

SEQ ID NO: 500428 - protein, 426 aa, unidentified
MKYSQNFKIKQVTEKTLVVGVDIAKNKHYARAFDWRGIELGKTINFKSNYNGFTKFIEWTKGLAEKNGKDKIMVGIEPTGHYWYTFAKAVVDEGMTVVQVNPFHVKRTSELDDNTPSKSDRKDPKTIGMLVTQGRYQIPYLPKGIYAELRKANNLREEWLKKINSIKNKIDRWLDIYFPEFPDVFSSWEGKTALMTLEELTLPSKIAKLKAEEIMKIWRKEVKRGVGIKKAEELIEAARCSVGIKEGEEMSEYEIKLLIKEYKEIRKVIEEIEERLETLVMQIPGAINLLEIKGIGIKTVAGFFAEVGDITRFTHAKQVIKLAGLNVRENSSGKRKGQTTISKRGRSRLRALLFRAMLPLVARNAEFRALHRYNTEERKNPLRKMQSIIALCGKLIRIMYTLVTKNEKYDPERMLGDIHREEHVAA

SEQ ID NO: 500429 - protein, 403 aa, unidentified
MSSAVSYLFRRMKGSTALVIIGVDPHKRTHTASVVETGTDKVLATLQIDASLAGYRRLLKWASGFEQRRWAVENARGLGRHLAQWLVAREEVVDDVPSTATARVRELSRGGRRKNDVIDAAAAASVAALRGDANPVVADDLTTVLALLDERRDNMVTQRTRLINQLHALLRDLLPGGAPTALTAVDASRLLTGVRPAGPIEAARKHLARDLVAEIRDTDQRLKTLTAQIADTLDAHGTRLRDVAGIGPVIAGRLLGRTRRAGRFRSASAFASYAGVAPIEVASGDHTRHRLPRGGDRQLNLALHIVALTQVRMRESTGRAYYDTKVAAGKSHNEAMRCLKRRLADRVWRLMLSDEHRLAAGPGGHSGATLTSSAAGSTPTTSSSDKSLPGPADRNSTTPSPAA

SEQ ID NO: 500430 - protein, 418 aa, unidentified
MGKRKNSVCGADVHKDIIVATILNSDNTEFQGKFGTTSMELGRFRDCLIAHNCEQVAFEATGVYWFPVYDALSPSIDTIVANPWMIKGIPRNKSDTLDSKWIADNCLDGKIKRSRVLPKDDRDLRTLTRARSAYTKTRTQLRNRIHKYLALCGITLSSYISDIFGKSGRHILDGLIESKDIDTILDSIPSGKVKKKRELIKASLGKGLDDVSRMLVKDTLELLHHLEEKVNDTSLVILGRLQERAKDLAIVMSVPGIGFVSASIILAEIGDYHDFQTSEQLVKWCGLAPGLNESAGKKSPCGITKQGSKSLRTILVEIAQVVAKMSNNKLSRFFHRLRARKNYNLAITALARKLISIIFHLLINQELYQENNCTTVKTKPIKKDLLCLSKEEQLKDGVAAIVDAFYHLKKKSSLEGGG

SEQ ID NO: 500431 - protein, 385 aa, unidentified
MSASALGPAQAAIQVDLAAVFVSLELSRSAWLITSLSPGGGEDVQASGPRRRCGGAPGSARQAAKAQARTGKTFPVIVIQEAGLDGFWLHRVLEREGFESHVVDAASILTSRRRRRAKTDRIDGETLLRTLLAYKRGEPRVCSMVRAPCPEEEDRRRICRERKTLVAERVEHVNRIKGLLFAQGIPGYEPLHRDRRRRLEQLTTGDGRPLPAHLKAQIGREIDRLELLLGQLDAVEAERDALMAPMADAAPTPVAALARLRGIGPEFAVVLWLECLFRPFSNRRQVAAYAGLAPTPWQSGSVRHEQGVSKSGNPRLRATMIQLAWLWLRHQPTSALSLWFKDRVKRDGGRGKKTAIVALARKLLVALWKFANDGVVIEGAVMKAA

SEQ ID NO: 500432 - protein, 411 aa, unidentified
MKKELYLGLDVHKDCIITAVAEEGRKGEVRESGAISNDLHAVEKWIGRLRKAHGKETLLRACYEAGPCGFGLARRLRQLGVECQVVAPSLTPTRSGERVKTDKRDARKLARLLRAGELTPVYIPEPTDEAIRDLCRARSDAVDDRRRSRHRLKGFLLRHGYRYQGKSSWSAAHERYLRELVLPHPAMKVILEEYLQAIAATGERIERSEEAMRVLLEQWRLVPAVRALMAMKGFQTVAAMILVSELGEVHRFAHPRQVMAYLGLVPTENSSSDRRRQGHITKCGNAHARWLLVECAQHYAAPPKVSKELSRRQEDQSHEVRAISWRAQNRLHSRYTRLMARRLQRNKAIRGHRAGAVRFYLGTVAHATLLPSPNHISSTRIVRGEQHEGTRRSHTQESAPHIPTPIWKKRI

SEQ ID NO: 500433 - protein, 451 aa, unidentified
MELDIINPKAAGIDVGSRSHYVAVGQSLEDVKQFGVYAEDLTALCLWLLSYEVNSVAMESTGDYWQNLYAELIKHGIDVVLCNGKFTKHAKGKKTDVKDCRHIQKLHALGLLTSSFLPDETTEKLRTYCRQRSNLISSAAGTARKMQKYLKFLNFRLDVVVKDVCGLTGLAIIEDICKGNLDPGSLAEHRHYNCRKSKEEIAKALHGNNREDFLFGLKQEYQAYQFYQKQIKACDKKIDKFVKQELKRWPEKTKLKTTDKPYKRQNKNAISIKNFNQIAYQYFGGVDLMAIEGLSHSTVLSIMSEIGPDGFKKFPTSKQFVSWTRLAPNNKISGGKVLSSKLPKGSNRIKIALRQAANAIGNLKDTHLSDFFRRVAFRKGRQAAVSATARKLGVIIWTMVIKQVPYSPPNKYLFLDQKRKLKMVTRIKKNIAKFDLKPEDVGFCKSMIIST

SEQ ID NO: 500434 - protein, 367 aa, unidentified
MERTFVGLDVHARSVVACALDDRTGELSKARLVPDNETVLTWLQALPGPVAVVYEAGPTGYGLARFLTGRGVRCLVAAPSKMHRPSGDRVKTDAKDALLLARLLRLGEVTPVTVPSLAQEAARDLVRVREDVRADLMRARHRTSKLLLRQGIVWSGGTAWTGAHEQWLGQQCFDLPGLQAAYDTTLETVLLASSRRDRLDKAIIEMAHEPQWWPTVSRLQCLRGVSTLTAFGLAVEVGDWTRFSGSTIGAYLGLVPTENSSGEGRQQGSITKTGNTHARRLLVEAAWHHRRPYRPTKTMRDRWDLAPAAARARGHAGNQRLHDRWLRFELRKKRTVIANVAVARELAGWCWSLAMIDDPSPAPAGRR

SEQ ID NO: 500435 - protein, 425 aa, unidentified
MSSSDAHSSPVDASGFAYVVGIDMGSQAYVYSVLQPDKRPVSKPTELANSRVGFEQLHGCLRQLAVPPQRVLIGLEATSRYSENLYQFLKEQGYALCLLHPRQTHQFAQQRGLRAKTDRLDATTMARLLLSGEARRGYVPDELIATYREVERLHSQLTDDSARYQNEIQALLVVLFPEFVQVFADPCRPTALGVLKRYPSAQAIVAAGVEALTTTLRELAPRHYGRPTAQELVRLASPSAASGLATPARALSLRVLCDQLEHTLANLAQVAQELDQLLDRDQGASGLKSTPEFGRKTVAVLRAELGDVTRFQRVDQVVASVGLDLQVRQSGQWKGQVKLSKRGSGRVRRVLSMAALRCICLPASAFGAYYRRLVARGMKGRRALMAVMRKMLIVAYHLLRSHETYDPTKVCALACTPARTPSSGS

SEQ ID NO: 500436 - protein, 366 aa, unidentified
MPRPAKKAPAQKTHSENPMNNVHYIGFDVHKKSISYCVKTAAGEIVEEGTIPAQRNVLRAWAAARRQPWRGALEATLFSGWIYDTLKAYSGGLEMAHPAKMKAISSGKKKSDTIDARTIADLLRCNLLPACYVAPARIRELRRLLRYRSLVVSEAVRMKNKMAGLLMETGAEYVKEKLHGKKYFATLLEELKEVPESVIDLLRLSRGALEMFEGTQRRLIQELLADAELRERVERLRSIPAVGEITALTWALEIGDPERFGSAGEAMSYCGLTAALKSSAGKQQRGPISKQRNHWLQTTLIEAAKLAPRWNPQLAALHARELERGHRNRATLAVARKLVSYLLAVDKSGLPFQVRSPSQEPTQKAA

SEQ ID NO: 500437 - protein, 370 aa, unidentified
MEKSVLYVGLDVHKMSMNVAIAEPGAAGEIRYYGQIGGDLTALDQVTRKLQAKGAELRFVYEAGPCGYQVYRHLTAQGHHCLVAAPSLIPRRPGDRIKCDRRDALTLARLLRAGELTPVKVPDEDDEAMRDLTRAREDAVSVERRAKQRTGAFLLRHGRRYPGKTTWGRGHWRWLLQQVMEHPAQQIVLQEYLDAVRQASDRVQRLYGQIQELLPQWRRAPFVAAYQALRGVSLIVAATVVAEIGDLSRFTNPKELMAYLGLVPSEHSSGATVRRGRITKTGNGHARRVLVEAAWAYRLRARVTQPLLKRQEGLPESIRQLAWKAQLRLCARYRRLLARGKHKNTIVTAIARELAAFLWAIGQAVEPVTA

SEQ ID NO: 500438 - protein, 408 aa, unidentified
MEVLYDRVAGLDVGKATLTACVRTPGPRGRRSETRTFKTTVGSLRVMRDWLVACGVTIAAMESTSTYWKAPFYCLEDVMEVWLLNAAHMKAVPGRKTDVKDAEWIAQLLEHGLLSPSFVPPPEIRHLRMLTRYRVQLMGDRIRDVTRLEQMLEDASIKLSAVASSLSTASARAMLAAMVAGQRDPAVLAELAKGKMRGKIPQLREALDGHFTDAHARLVAQMLQRLDRVEQALADLDGVIAEACRPWAHQLDLLQTIPGVGPKVAQVILAETGGDMSRFPSAAHLAAWAGLAPGLHESAGRRTPVGVRHGNKWLTAMLVEAAGSVGRSKDNYLSAQHARLMARRGRSRAQVAVAHSILVSAYYMLSRDEPYRDLGPDWLRRRDDDAHARRLVAQLERLGHTVVLDPAA

SEQ ID NO: 500439 - protein, 338 aa, unidentified
MATMPQTLGGVTVGVDTHGKIHVGAVADPLGRILGTIEVTTDERGFRQLENYAKGFGTIERFGVEGTGAYGATLCRWLTSRGHEVLEVDRPDRKMRRLRGKSDPIDACAAAQAVLSGRASGVPKARDGAVEAIRVLRMARGSAVRGRTQTMNQMHALVTSAVDPLRMQLRSCSPAKLVGRCVGMRPGKLDSPAAATKFALRELARRHRALDEELSRLVAKRAPRLVALVGVGTDVAGALLVTAGDNPDRLRSEASFAHLCGVSPIPASSGRIHRHRLNRGGDRSANQALWRIVMVRMSWDERTRAYAARRTSEGLSKREIIRCLKRYVAREVYEVLVA

SEQ ID NO: 500440 - protein, 355 aa, unidentified
MPKTASTQIAVIGIDIGKNSFHVVGHDKRGSIVLRQKWSRGQIEARLANLQPCLVGMEACVGAHHLARKLTALGHDARLMPAKYVRPYAKGQKNDFNDAEAIAEAVQRPTMKFVATKTADQLDLQALHRVRERLVSQRTGIINQIRAFMLERGIAVRQGVRFLRTELPIILATRTDTLSPRMLHVIEDLAGDWRRLDERVENLSSEIEAIARHDSGCDRLMSVPGIGPIISSAVVAAIGSGDVFSKGRDFAAWLGLVPKQISTGDRTILGKISKRGNRYLRVLFVQAAWVVLVKPQSWERHGLKAWIEAAKKRLHHNVLAIALANKLARIAWAVLAKGRGFEVTRKETLAASQST

SEQ ID NO: 500441 - protein, 357 aa, unidentified
MRRYRLAVDKRKGEEGEQIFIGIDLHKIQWHVTIRSEEVELFNGSIPGNWDALKRVLDRYEGCRKQVVYEAGYFGFWLYDHLVDYGVDCVVTPPSLVPQEYGNHVKTDRRDSRKLAHLLAKGLLKRVWVPTPEQRYERQVIRRRKQLIGDRVRTQNRIKAELRFYGIDLPDPTGQWSKAYFGNLQHLRFDNHWMQESFARLLEEYQFLTQQIERQTKLLRAMAETDQYQERVKILRSTPGIGLISSMEYLLELQDVERFRRGNRLAAYVGLTPSQYSSGEKLRMGRITAIGKNDLRGTLVEVAWRLIAKDPAMREKYERIKIRAGSKRAIIAIARTLLLRTRRMLLDRQPYVVGLAA

SEQ ID NO: 500442 - protein, 344 aa, unidentified
MQITTIGLDLAKSVFQVHAINGASEVVVKKTLRRVQMRRFFEQLDPCLVGIEACRTSHYWAREISKLGHEVRLMPPAYVKPYVKRGKSDAGDAEAICEAVRRPTMRFVAIKSPEQQAALALHRTRDLFVKQRTQLVNMIRGLLAEFGIEIRRGIEQALMLAKRIAAHEVPDIPPLAAKVIAGLAGQVLDLQARLGEIERELLTWHRSNDIAKRLSTIPGIGTVCATALAASVTDPHQFRSGRQFAAWLGLTPLHHSSGGKERLGRISKMGDKYLRRLLVVGMTSLIRRAKYKPEAVDPWLADLLSRKPARLVTVALANKAARVVWAIMVRGGVYRMPAGVATPV

SEQ ID NO: 500443 - protein, 363 aa, unidentified
MTRSSLSTGSYREEARFDVVRRFGSQRKRLDFHLLDSEGATVEVGAAPPDADGLLGLTRRLDRHREPIRAAIESMNGARFVHDQLELHGWQVEIADAQKVKGLTPLACKTDRIDAWVLAELTRRDLVPAIWLPDPMVRAERERARWRLHLVRHRSSLKQRVHAVLLTHGKPCPVSDLFGVRGRQLLARLGLPDPWQATIEASLRLIDELEREITDCERELRRLGADHRYVPLLLTVPGIGWVLAYTIAAEIGDIGRFASPRKLAGYTGLCPRVYQSGERDLRGPLAKQGPKYLRWALVEAATHACTAAIYRERYQQTKGRIGKQRGAKVAQIDLARRLSEAIWHMLSREQPFAPKGATDPLAA

SEQ ID NO: 500444 - protein, 356 aa, unidentified
MSHDVKYIGMDVHQEAIVIAVLNGSGKLVMETIVKTKASSILQFLHGLRGELHVTWEEGTWAAWLYDLLQPQVQEVVVCNPRRNALLKEGSKSDKVDARKLAELLRTGMLRPVYHGENGLRTLRELGRSYQTIGKDLTRVMNRLKALYHGWGIACAGTQVYAPRYREEWLRKIAQAGVRRRAELLYQQLDGLQALRRNLRPEFLAESRKHKAAKLLRQISCIGPIRAARLIALMQTPHRFRSKRQLWTYSGLGIETHDSAQYRYVGGQVQRSKKPQQIRGLNQNHNHEMKEIFKSTATRASCGTGPFHDFYAALLAKGMKPEMARLTLARKIAAITLTLWKKEERFDAEQLKTQAA

SEQ ID NO: 500445 - protein, 361 aa, unidentified
MRIIGCDLHARQQTLAMLDTLTGEVVNRTLMHEGNEVRKFYTELPRPVLVGIEAIGPTQWFLNLLEELGIECQVGDATKIRAAEPRKQKHDRRDAELILKLLIEKRFPRIWMPGKELLDLRALLLHRHHWVRLRTQIQNALQAIALANGLRRGHGLWSYDGQAKIAFLPLAPHASSRRSALQTMYRQMKEEIENLNQQVAEQAEQRSGARLLMSHPGVGPVTALATDVFLGDPQRFADGKALGSYVGMIPREYSSGARQRFGALTKQGNPLLRFLWSEAAAHAARRDPDLQRFYRRKLVQKGLGKARMAVARKLGIRLWIMLRDKIDYQEFCRRGQMQYSSAACAGMPEVRNGAHSHRPVG

SEQ ID NO: 500446 - protein, 451 aa, unidentified
MAAKAKRRKHRKLDRSLPEMRPNAGGIDIGATEIFVAVPADRDPDSVRAFPTFTQDLHALADWLQQCRVDTVAMESTSVYWIPLFQILEARGIEVHLVNAQHVHHVPGRKSDVLDCQWLQYLHSVGLLKTSFRPEQAVCEIRSLMRHCESLVQMAGVHVQHMHKALDQMNLQIHHVISDITGVTGLAIVDAIIGGQTNPKQLAQLRDRRIKAPVETVQKSLVGDYRPEHIFTLQQSLKAYRYYQQLITDCNQEIQQRIQVFQTKDDEPTASADSKASTPTAASGFDLRTHFERIFGVDLTQIPGFDIRRIQVLFSELGVDLSKFPTPDAFASWLNLCPKDGFSAGRRIRGPKVKTKNRAALQFRLAILAIHNSQSYLGQYYRSQRARFGAPKALKNAAHKLARIFYHLVTTRQPYDETVLAKLDARQQQRRVRKLQSQARQMGYSLVAVNV

SEQ ID NO: 500447 - protein, 344 aa, unidentified
MTIVEDARAITGGVDTHSEVHVAAALDPVGGLLGTREFPATRAGYAGLLGWLREFGDLAVVGIEGTGSYGAGLARHMAAAGVQVVEVDRADRQDRRRKGKSDPLDAVSAARAAQSGRASGMPKGRDGAVEAVRALMVAKRSARNERTQAVNQARALILTGPDELRARFAGHCAAALAAGITALRPRPGDAADYSVRIALRELGRRVEFLDAQIERLDDLIVPLVTVRAPGLLSLYGVGPDTAAMLLIAAGDRPERLRSEAAWAHMCAVAPIPASSGKTRRHRLNRGGNREANHALWRIVITRMSAHPATRAYVKRRTAEGLSKKEIIRCLKRYVAREVYPHLRG

SEQ ID NO: 500448 - protein, 341 aa, unidentified
MYISTIGLDISKSVFHLHGVDSVGEVALRRKLRRGEVLNFFAKLSPCVVALEACATSHYWGRALSALGHEVRLIPPSYVGAYVKRGKNDAVDAAAIAEAASRPSMHLVALKSEAQQAMLSAHRVRSMLVRQRTMLINLLRAQLAEFGLVSAKGRDGLSRLVALVREPADERLPAVARTMLREPVAAIEGLERQLRRIDKAMGAGVRENAAARRLTTIPGIGVITASALVATVGDPQRFLNGRHFAAWLGLTPREHTTGGKPRLGRISKMGDRYLRSLLVLGATSRLKRIEHTDTPLDRWARKLVEHKPKRLATVAMANKTARIAWALMASGQPYRPERAAA

SEQ ID NO: 500449 - protein, 485 aa, unidentified
MAKRRMSTFERLESGRLNRKQRRELGRQVAVADPGLTIVHANAGGIDVGNESHYVAVPPDRDPNPVREFGCWTAALNQIAEWLQSCRIDTVAMQATGVYWIALYDVLEQHGIQVVLANAQHTKNVPGRKTDVQECQWLMKLHTYGLLRDSFRLAQEMESVRTIWRLRDRHVKEAGRAVQHMQKALTKMNIQLANVISDINGLSGQEIIAAILQGERDPWKLADLKHYRVRASREEVARSLEGNWREDVLFELQQAVDSYHFAHRQMQECDRKLEGYLASLPARMLDIPVQPEDTQAATPKKKTKKAKRPRGNQPHLDLKTELKRICGVDLTSIDGIDVMTALTIVSEIGTDVSRFQDETHFASWLGLTPAKDITGGKTIGRGKRKVKNRVAVALRTAATTLLKSDSYLGARYRSLRRKLPSFASAVKAMGRYLAVLIHRLLTKGEAWVDRGATQFERRHTEQELASLSFKARAKGFKLIPITEAS

SEQ ID NO: 500450 - protein, 329 aa, unidentified
MSDHPQTPVVMGADVSSAQIVIACANANPAVKTIANNRRAIEAWLTQLPKDAVIGMEATGRYHDALADCAAQRGHRVYVINPKHLSLYAKGVGQRGKTDPLDASVIARYVAREGDRLHPYRAPTLLQRTLRDLLSQRASVVRHRGAIHQCLRATKPNGSTALKRAHQKALHSLQALIAEIDSQLKEIVKANAALEPKRVLLQTITGIGVLNSLALTHRFERTPFANSDAVVAAYGMDPRPKDSGNKTGKRRLTKQGNAEDRRLIYLAAQSAAKTKTFKPIYTALRAKGFATTEAIVIIARKLLRIAFAVWTSNKPFDPKKIGFQSCAKP

SEQ ID NO: 500451 - protein, 423 aa, unidentified
MTKHLYSPTDAVLVAIDMSKHRQEVLMERPEGGRRRRMTVMATKNDYDRLVDELAAIGRPIVVGFEATGNYHRTLAHRLLMAGFQLRLISSVALARTREALHNGWDKNDPKDAQVILHMLRIGATQVYVDPLAAGINDLQELSKTHEVISKAKTQTWHRILNHYLPLYFPEIARFACNSRSDWFLALIERFPTPSSMTSLGREGFVAEAWPLVGRKVSKARLINDIYETACSSMALPIAEEAVAISMFRMVIGQARSLIRERNRIEQIAQAMLSDHRDYQLLCKIPGIGPINALTILAEAGDLRCFGHHRQFLKFCGLDLATSQSGTFRGRTKLSKYGNARLRRTFWMAAQVASRQRDNSFRDKLGRYMAGNADDADRRRKAMIALTAKMARVAHAVVKTKTEYRPFMERSGTRWKDPSLQVP

SEQ ID NO: 500452 - protein, 360 aa, unidentified
MKTNTLSHAVKSSTPSTPEVQARIQQLKLGVDWHADHLRVARMCDGQSPQPAQRFTHAAFLEFVRKQLTLADQVLVVYEAGPGGYHLHRQLTALGVFCYVVHPEKLDPRNTGVITDKTDSRELVLKLDRYVNGNARAMSVVRVPTPAEEQRRSLSRQREQLRRERQRLAAQGRSLCLTQGLRLRGDWWKQTLSLPQWLEERLSVWRQLIAAVEAQLETSTQQVEALSPKERPKGLGPLTLGLLIAEMCDWQRFKNRKQVGSYTGLCGGVSSSGPSHCDLSITRTGNARVRWALIELAWRMVLYQPQSKAVQRWRHLLLNPKAAARQKKRALVALARQLAVDLWRWQTGKVTPEQLGWVMV

SEQ ID NO: 500453 - protein, 346 aa, unidentified
MNSNDPHYKLYLGVDTHLELHVATLINGLGQVVKSNAFSANLSGYRELFAWCKSYGFLQKAGIEGTGSYGAELTKYLIKNGVDVYEVMRPNRMERRLKGKTDGIDSENAARSVLSGEVKVIPKSHAGPVESLRSLLLTRNSAVKARTQAMNQIRALLVSGPDELKQSLYLPKPQACATACLAQCSNSSEPLMISLVLLAQRWNFLNEQVKKLDKALKKLTLSAAQDLVSRFGVGANVAATLLVAAGDNANRLRKESSFAALCGVNPIPASSGKTTRHRLNRGGCRRANNALWTVAMVRMRSDPRTKDYVARRTAEGLSTKEIARNLKRYIARELFPLILKDLARLA

SEQ ID NO: 500454 - protein, 355 aa, unidentified
MNSVRYIGLDVHRDTISTAVLNESGRLIQQSILATRAAAILDFIGGMRGTLHVTFEEGTHSSWLYDLLSRRVTRLVVCNPRKNALMKSGNKSDAIDARKLAELLRADMLSPVYHGEKSAMEVQHLARSYALLTEDTTRVMARIKAVFRGQAIACAGKKLYGKKHRDEYLAELGTGALRRRAEFLYQELEAVQQLRRQAKRDMIVECRKYPETKLLCSVPFLGPVRAAVLIGRVQTPHRFRTKRQFWAYCGLALEMRDSGEYRMVDGQVERRKRPAQIRGLNWNHNHELKNLFKAAATSASACEGVFREFYLGLLKKNMQPEMARLTLARKIAAIALKIWKKGEAFDAEHLKLQAA

SEQ ID NO: 500455 - protein, 321 aa, unidentified
MQGKVHVDAMAAVYAGIDVSKERLDIYIHPLGERLALANDAGGWRHLQRRLARLAPALVVMEATSKYHRSVHRRLDAAAIPVAVVNPLRARLFAEACGRLGKTDAIDARMLALMAEQCRPDPTPPLAPEAEALQELVRARAAAVAEKTATGQRRATAATAFLRRELARALASLERHIARLEAEIDRIIAAHPGLARRKAVLRSIPGIGPVTAITLIAGLDELGRCSDKQVASLAGLAPHPRDSGSRQGQRRTGGGRSELRSCLYMAAVAAIRANPDLKAFHQRLSDKGKPFKVAITAVMRKLLVLANSLVAQNRTWTPRPA

SEQ ID NO: 500456 - protein, 342 aa, unidentified
MQKTIGLDIHKKFIYAVVLDSSGDLLLEKKVRNDPYELDKFFKGIDKDSKIALESCSCWEYIYDYLTDKGFTNLVLANPSRVRLIATSRKKTDAHDARVLADLLRTNMLPTSYAPSTVIREQRQITRHRASLGRLKGIVKNKIHAILIRNGINQEFSDVFGQEGTRYLMSLDLSVVDRYQMDQYLELIRHYDIQIRKTEARIEEYVEYTPQVRLLMSIPGVSFYSGLSITGEIGDIKRFSSAKKLTCFAGLNPSVSQSGDRCYTGHIAKQGDSHLRWMLNQCANIAIMHDSTLAKIYQRIKKRRGHNIAITAVARKMLCLIYTMLTHNIKYQALQIHKAKAS

SEQ ID NO: 500457 - protein, 427 aa, unidentified
MNYTQNQKISQITPSTLIVGIDIAKDKHVARAQDDRGVEFGKRLIFENRMHGFQKLVNWAENLRKENDKNYVILGVEPTGHYWFSLAYFLVAKGYDFVVVNPMHVKKSKELDDNSPTKNDTKDARVIGQLIKDGRYSVPNLLDGIYAELREGVKLRDQLINQLMITEGRIQNHIQRYFPEFFDVFGDWEGKAAYCTLRLFPFPSQIKELSPEDVVMKWKPFVKRGVGIKRATKLVEVAKKSIGIQIGIQFAQRELDCLLDQYELYKQQLEELDKELESLVVTLPGAKQMMNITGLGSTTVALFFAEVGDITKYKHPQQLVNLAGLSLREHSSGKFKGQTRITKRGRSRLRRALYLAIRPLVAHNPTFKALHQHYTTRSEKPLKKQQSLIALCCKLLRVLFVIGQRQCEFDGSKLLRGLSQKEALQAA

SEQ ID NO: 500458 - protein, 353 aa, unidentified
MYKIDLTIAKDQEVFVGIDVSKRSYAVMIRSGGQELYGCKVAAAYPHLRALWARLPGCRIHAVYEAGFSGFGLHDQLNTDGIDAWVTPPSKIPRSHDRVKTDRLDARVLARELENGSPRRCRVLTEPARAAREWSRYLSQLTAQQTRLKTQIKMRLAWNGIEPLLDAPRRWSRAYRAQIVTMVGDTGPIAMIIRDMLDRLALLEQRMTIIKQTLRRIGRSEAYCEQVRLWQTAPGIGWLTATRLALEWGDLTAFRNGEAFASYLGLTPSEHSTGEHVHRGPITGQGNGAVRAWLVEAAWKAITIDPALGARFRRLAPVPASRKRAIVAIARTLAMRLRACWLKRQSYVLGIVR

SEQ ID NO: 500459 - protein, 310 aa, unidentified
MEITVGIDVSKARLDVHVHPAGESFAVGNDEAAVQALGERLGQLEGLVRIGIEATGRHERLAVAEFAAAGLPVVVVNPAQVRAYAQAIGQRAKTDPIDARLIALFVEAVRPDIRPMPDTQTLELAALMARRRQIVGMLAAEKARRQQAAAGLARVSIARSVTFLTDELKSLDLEIDKTVRGTPVWRDKEDLLSSVPGIGKTIARTLLAELPELGTLTPKQAAALVGLAPYTRQSGRWRGKSFIGGGRTAPRGALYMGAMVAARFNPTLKAFRDKLVAAGKPKLVALIAVARKLVIILNAILRDAKPWRTA

SEQ ID NO: 500460 - protein, 342 aa, unidentified
MEFYVGLDVSLKQTSICVVDQTGLIVREGVVDSDPEAISVFMKSKAPDAARIGLETGPTSTWLWTELKRLGLPVICIDARHAKAVLKMQINKSDRNDAIGIARIMQTGWFKEVHVKDIDSHSVRALLGSRALLVKIKRDLENQVRGLFKNLGLVIGRGTFNVFAVRAEELIEDRPELVAAVRPLLEARNAVEQQVRELDRKVTKLARRDAQVRRFMTVPGVGPVTALAFKATIDDPARFARSRSVGAYVGLTSRRHASGEVDWSGRISKCGDAMLRSYLFEAAGVLLTRVPKWCAVKAWGRRLAKRNGLSKAKVAVARKLAVILHRMWIDGTEFNWSKEIAA

SEQ ID NO: 500461 - protein, 403 aa, unidentified
MQYLGIDLHRKQMTVSLRNHNGDVFLRRQVSTRWPKLEQFRNQLHQALAAAEKYVAVVEVCGFHDWLVQWLRQDERCHQVLVVQPLGRSASKTDRRDAHGLSELLWVNRERLLRGERVQGVRTVQVPSAEEQADRCLTQTRERLVRRRTQTLNQIHKILRRRNLEWERPTKTFQTVKVRRWLKTLPLDPIDRLAMDHLLVQWSLWDEQLVAADGWIGERFLANRNAQLLATMPGVSRFIGLAIACRIAPMERFPQGRSLANFLGLTPGCRSSGDTERVGSITKIGSRMVRYLLAQAIQHLLRRDGSIRAWYQRLKRRRGSKVARVAVMRRTATIMWRMLSTGEPWRCGRARSEMPEADEPRQTRVPQDGPAEQLAPSADPELAGFNTGSSSLLAGEEVAPCPA

SEQ ID NO: 500462 - protein, 331 aa, unidentified
MNAHVGIDISARSSAMGWRQNGKAAGNGDIQHTPKGRKAAIEKLLRLKPLSVVMEATGIYYLDLAIELHAAGLPVSVINPKSFHNFAGLMLQNSKTDQIDAQLLAEYGERMGPRLWVPPTADQMMLRAIGRHINRLIGHRTRAKNELHALHATETSIALLIEDEKDAIIALDTRIERLKQAARDAIAKCPDLSLQFRCMMAAPGVGEASAIAALAELTTLPVTLRSAQVSRHAGLDVRLTQSGTSVNRPGRMSKCGNAYLRAAMFMPALTAIRCDPYVKAFYEALVGRGKKKMQAIGAVMRKYLTGLWACMRAGEDFDTAKLFSKIHLLKA

SEQ ID NO: 500463 - protein, 317 aa, unidentified
MQTPLHIGVDVAKATLVIACAEHPGAPLTLSNERPAIQRWLRTVPAGSRVGVEATGRYHEPLADLAEAAGLTVFVLNPKDTRHYAQALGRRAKTDRVDATLIARLVAKEHMHLHPYRPPSRATRQVEMLLRRRARLTVLKGAVTMTLLDCPGLAAERRALLRRFDATLAHIDRELKTLMQDGAGMAEAWGRLQRIVGVGPLLGMSLTTVLERVPFRNADAFVAFTGLDPRAHDSGQKLGRRRLSKRGPAELRRLLFTAAMSASRTRAWRPFYERDRAKGLSGTAALVILARRIARTAWSIHHHRTEFNPERLAPGLT

SEQ ID NO: 500464 - protein, 344 aa, unidentified
MEHTTIAVDLAKSVFQVAVSSHRGAVDAERRLSRDRFLTYFAQQPPAKVLLEACGSAHHWARQLQQLGHTVRLLPAHDVHRYVRRSKTDRTDAKALLEADRNEDIHAVPVKTVEAQAIASLHRLRSAWLATRTARVNGLRGLLREFGIAIPIGARHVVPRVRELLVGPTPVPELVWPALANACDEIADLEAKMDAVEHQLLTIGRTMPDVALLQTVPGVGLLTATALVALVSDIRRFRSGRHFASFLGLTPKEDSTALRRRLGAISKQGDVYLRMLLVHGARTVVWHAKTKAQPTALQRFAVETIQRRGPNIAAVAVANKLARIVWAVWAQQRPYEREPRPAAR

SEQ ID NO: 500465 - protein, 311 aa, unidentified
METKPHYVAIDIAKESLQIQTEHAAWSVPHTDTGHRQLLERLRPLGPVQVVCEASGGYEQPLLRFLHQQGVPVSLVNPARVRAFARSEGQRAKTDPLDATMLLRFAHEKHPLPTPPPAPQQAALAAWLDRRAQLSEQLAREKNRLQKSPAVLHPGIRAMIAFIEDQLAEVDRQLHGVVQADATLRDRAAVLQSVTGIGAVTTWSLLAYLSEIAATDWHRNQLVALAGLAPWNRDSGQWKGKRSICGGRAKVRRCLYMAAQSAAQHNPVIREYVQRLIARGKPYKCAIVAAMRKLLIHLQSLLKHHQNALAS

SEQ ID NO: 500466 - protein, 358 aa, unidentified
MRIIGCDLHARQQTIAMLDSDTGELEEKTLEHEGDTVREFYSALPGPILVGIEATGSMQWFLELMEELGIECRVGHPAKIRQAETRKQKHDRRDARLLLTLLAENRFPTIWMPSSEQRDLRTLLRHRHQWVRLRSRVQHTLQSMALNHGLRRGHSLWNRAGQQALRALPLAPYASERRAALLALYPGLQGSIDELDKEVWEEVHQHPQARRLLTHPGVGPITALATAVFLGDPLRFADGKALASYIGMIPSEHSSGGRQRLGAMSKQGNTLLRYLWCEAAMHAVERDPELKRFYRRKLVQKGLGKARVAAARKLGIRLWIMLRDQIDYQEFCRRGKARQESGSVRAGMPDLNSGPAEA

SEQ ID NO: 500467 - protein, 315 aa, unidentified
MSDVPCFIGIDVAKAQLDIALRPSGERWAVPNDTSGATMLVDQLQALCPTLIVLEATGGLERLVTSALATAGLPVVVVNPRQARDFARATGQLAKTDALDARALAHFADVIRPTPRPLPDAQTQELRALLGRRQQLIGMRTAEQNRLAGTSARLTKDITAHMTWRNAGIATLDDDLETLLRASPLWRENDDLLQSAKGIGPVSAHTFLLELPELGTLTRQQIAALVGVAPLNCDSGTLRGKRTIWGGRAHVRTVLYMSTLVATRFNPQIKVFYERLLAAGKVKKVALTACMHKFLTILNAMLKHRTPWQPQEVQS

SEQ ID NO: 500468 - protein, 388 aa, unidentified
MAKIIRIGIDTSKSVFQLHGVDEAERPVLRKKLRRSQMLEFFSKLEPTKVGMEACGASHYWARELTALGHQVVLIPPQYAKAYVKRNKNDPADAEAVCEAMSRPTMRFVPVKTAAQQAALMLVGTRETLIRRRTQLTNSIRGYAAEFGLVAAKGLDKIEPLLARIAKDEKLPALAKEMFATHGKEYERLKEEIAAIEAKQMAWHKENECSRRLVEVPAIGPITASVMVMKVPDAAAFRCGRNFSAWIGLTPKDHSTAGKKKLGVITRAGDEYLRRLLVAGATSVIKQVLAGKCRASPWLAALLKRKPVKLAAVALASKNARVAWKLMVSGERYDRTRYDAGGAPESAAREVHAAAVTGASASRTSLAPRSKPQESRSKSHQRKQMTNA

SEQ ID NO: 500469 - protein, 360 aa, unidentified
MYFAGLDAHLKYVTVAVRDRLGTLVLETTVSTREPERLLAVLAPFRPLEVVVETCPFWPWLSDLLVPAGIGFHLAHAQRLRAIATAPQKNDRVDARLLARMLLAGLIPEAYPRSGDQREQLRLLRHRTALVRARTRLAGRIHSQLHQQRLLLPREQLLRQATRTWLRETAWPRLTAEQQAIVTTHLALIDHLTPLIQALERRIDTAAGANPPAALLATIPGIGPYRSLLLAAELSPLSRFPRVEHLASYAGLAPVTRSSGGHTRHGSIPQGANRWVRGALVSAIPSHVRSAPTSAVTRAYAQLTARLGWRVARVAAARKLLRIVYLMLRRGEPWRGTGRVEDAVRDEVHASHVARRPQYA

SEQ ID NO: 500470 - protein, 334 aa, unidentified
MSNVTTCGIDLAKNVFSLHAVDGRGVVVLRKTVPRARLAAVVAQLPACVIGLEACSGAHEWARRFGQHGHTVKLMAPKFVAPYRKSGKNDGNDAEAICEAVSRPSMRFVPVKSVEQQAVLTLHRVRLGFVEERTATINRIRGLLAEFGVVLPQRVVEVRRGAAATLDQLPTMAQRALNDLLGHLRVLDERIGEYERELEQHARRDERAKRIQKLSGIGPISASAIVASVAEGHEFKNGRQFAAWLGLTPKQYSTGGKTRLGRITAHGDAYLRTLLIMGARSMLQTALRRTDRLARWALGVRARRGYHRACVAIAAKHARIIWAMLAKNQPLQLA

SEQ ID NO: 500471 - protein, 338 aa, unidentified
MNIVFLGIDLAKNVFQLCGLNQAGKPVYTKRTGRKELLQTLANIPACLIGIEVSTGAFYWQREFEKLGHKVKVISPQYVKPFVRGQKNDGNDAQAIAVALMQPTMQFVPPKSPEQQDIQALHRARQRIVNHRTATVCQIRGLLLDRGIPIGSAVSRVRRAIPLILEDAENGLSSRMRRTIAELYELFNDLGRRIHFFDKEIETVFRQSEACQRIARVKGIGPKTATAVVAAIGKGTEFMNGRHFAAWLGLVPRQHSSGDRQVLMNMTKKGDKHLRTLFIHGARAVVRVAKNNNDGHMNQWVNQLKERRGFNKTTVAVANKNARIIWSMLRNETEYQVV

SEQ ID NO: 500472 - protein, 412 aa, unidentified
MDVVNTRCCGLDVHLKTVVACVLLTQDDGTVVRKTHTFKTMTEELLALRDWLDRWGVTHVAMESTGVYWRPIYNVLEDEGRTLLLVNAQHIKAVPGRKTDVKDAEWLADLLRHGLLAPSFIPPQPIRELRELTRYRATLLRERTAEINRLQKTLEGANIKLGVVASDVLGASGRDMLQALVAGERDPKVLAELARGRLRAKLPELRQALTGRMQPHHATLLGHILAHIDFLEETIAALQEEIGQRLGPYEEAVALAQTLPGIKATAAATILAEIGTDMTRFPTHRHFTSWAGVCPGNKQSGGRRLSGKTTPGNVWLRAVLGEVAWAAIRTKDSYFRAQYYRLARRRGKNKALMAVAHSMLVALYHVLREKRPFQDLGADYFDRLDTTRIERHHVRRLEQLGFKVNLTPVAAA

SEQ ID NO: 500473 - protein, 372 aa, unidentified
MGHHTEAFVGIDTSKSRNAVAIADSGRGGEVRYLGEFPATEAAIRKLVAKLAAKCCHLTFCYEAGPTGYGLYRLLKSLGHDCLVVAPSLVPKKAGDRVKTNRRDALSLAKLLRAGELTAVWVPDERHEAMRDLSRARLAVKKDLQGKRQQISSLMLRLGRIYPGKTTWGRAHMRWLMEQKFEHREQRIAFEELLEGIRQESERMERLEDAIREVVPDWSLAEVVAALQAMRGIDLIAAVGVLAEIGDLSRFQNPRELMGYLGLVPTEDSTGDKVKRGGITKAGNGRARRILVEAAWSYRYPPRVSRDKQPKVEAAPRRAREIAWKAQTRLCGRFRSLERKGKRRTVVATAIARELSAFIWAINRELLPPRQA

SEQ ID NO: 500474 - protein, 363 aa, unidentified
MDRAGFEKLVSHLEALSMPQESLLIGMESTACYHMNLFSFLLAGGYTAVIINPLLISNFVKMQLRKTKTDKKDALVIAQFLLMHGDTLAQTSISPHISDLRDLSRQRESLLSQMTALKCDMKRILTMTFPELEKLTGVFTKSILKLVSRFPSAHAIVQSDPAEINQLLVDHSMGRNSAKTTQAIIQAARSSVGTTSPSRELILKQKADVLIHLEGHLKELTALMIELCRSDRGDDIDIMTSLRGIGEKTATNFLVEMGGDIQKFKDHKKLIAMAGLDPAIYQSGKHDGYGRITKRGNRHLRRVIWLMTIRVIQFNDCFRQHYNKRRQDGLPFKKAVLATAHKLLRVIYAMLTQRTSFCYVANS

SEQ ID NO: 500475 - protein, 345 aa, unidentified
MSMVRSVVGGVDTHADTHVAAAIDSNGGMLGIESFPADLAGFEALLGWLTSFGEVSLVGVEGTGSWGVGLARFLAGAEVEVVEVDRPNRQSRRKVGKSDPTDAVAAARGALSGAAAVIPKTRNGPVEQMRVLLVARRSARRQRIQTLNQLRHLVFTAPEEIRVRFKDRYKTGLVTEAAAMRPRKGSDPVTCTTNLVIRSLARRIQGLNTEMADIDDMLTELVAATAPSLLALYGAGADTAASLLVTAGDNPDRLGSERSWAHLCGVAPLPAGSGKTSGRYRLNRGGDRNANSALYRIVLTRMSSDQETRRYVARRRTEGLSTPEIMRCLKRYVARQVFKQLPRAA

SEQ ID NO: 500476 - protein, 352 aa, unidentified
MYYVGLDLHKKYVTGCVLDSQGVVVAEQRRLPPVLETMLGWLAPLGQPVAVALEATLYWAWLHDRLTAAGYQVAVAHPQQVKLICHARCKTDPVDAHKLADLLRTDLLPAIWIPDAATRARRTQLRGRAWVVRMRTRVKARIQAYLAAENERVPVSDLFSRGGRAWLATVVLPAAVREQVDRLLALVEQLDGQIAEQDRAVRELARATPEAALLQTIPGIGPFGALLLLAEIGTITRFSSSHELAAYAGLVPSTRSSGGKTAHGSVGPAGSAWLKWLLVEAVQTLKRQPGPVRSQYERLLRAKGKPKATVAAARKLCCYVYWMMQEGRSYDDWLRQRHQREVRPIQAVAAVA

SEQ ID NO: 500477 - protein, 369 aa, unidentified
MSQNILFIGMDVHKESIEIAIAEGASQEVRRYGKIGGTRDAMRKALRKLVSLGQSLHFCYEAGPCGYELYRYLVSEGHDCWVVAPSLIPKKAGDKVKTDKRDAVQLARLFRAGELTPVYVPDREDEAIRDLSRAREDTMLVQKSARQRLKSFLLRHDIRYQGKTSWTEAHLRWLADEVRCSSPAQQVVFQEYVNAVTEAQHRLKRLDEQIKIFVRQWRLYPVVEALMSMRGVKMIVAVTVVSELGDLSRFDNPKQLMSFLGLTPSEYSSGPRVSRGRITKTGNGHVRRILIEAAWCYRYPAKVSPEIQKRQEKLPLSIRTIAWQAQLRLTQRYQHMQRKGKPHNVTVVALARELAGFMWAITNKVMYPR

SEQ ID NO: 500478 - protein, 407 aa, unidentified
MENRKCGSFLLRFFKNFETRRKNLNKKQTRNKEYSEATQVLYLAFDLGAPNWKLAFSIGSGQKPRQRNVVARDLAGLQKEILKAKKRFGVAEEAAVVSCYEAGRDGFWLDRYLACAGIKNLVVDSSSIEVNRRKRRAKTDKLDAASLLRLLIRHHLHGEHKVWSLVRPPSPEEEDRRQLNRERSTLKKEKERTSSRIRGLLATQGIRLSGPLDLSDRCLESIRLWDGSRLPERLKNRLRREWKHLTFLKEQMAAVEQEGKGELRRGEEPDLEKVEALQKLRGIGPVGSWVLVREMFGWRRLRNRRQVASLAGLTPTPFNSGTSIHEQGISKAGNRRIRAVAIELAWCWVRFQPDSALTRWYIQRFEEGGKRARKVGIVALARRLLIELWRFLETGVVPEGAQLKVQA

SEQ ID NO: 500479 - protein, 455 aa, unidentified
MVSRRRKPKVGLKPAKRGEALTITHPNAAGIDIGSASHFVAVPPDRDDEPVREFPSFTADLNAMADWLKSCGVEIVAMESTGVYWIPAFELLEARGFKVLLVNARHVKNVSGRKSDVLDCQWLQQLMTYGLLAGAFRPAEQICVLRSLWRQRSGLLRDQARKVQHMQKALTQMNIQLANVISDVVGETGLKILRAIDAGERDGHVLAALKGGRIQASEEEIAKSLQGTWRPEHLFALKQALATFDFIGTQLAEVDREVELQMERLKVQDDDPPKGKRRGRAKNAPRFDLRSQLFKMCGVDLTRIDGIDVTTALTVISEIGSDLGRFPTVGQFTSWMGLCPGTKITGGKVMSSKTKRCANRAAQALRMAAAALRSSQSALGAYFRRMCARMDKPKAIAAAAHKLARLIYTMLTKGEAYTDQGQDYYEKRYRDHMVNQLTKRAEKLGLKMVAMEQPA

SEQ ID NO: 500480 - protein, 314 aa, unidentified
MTQASKFPRYIIGCDVGKASIVVCDSRDGRIRSIANRRDALAVFVASLDATCLVVCEATGGYEIELLAATTFAAIPAHRADARKVKAFIRSFGTLGKSDAIDARALTRYGQDRHASLARWQPHDTDRVQLQALMLTRQDLVAARVAFANRRSAPGADAAKPFIDAVLTAFDAQMAAIEATATTLIRSHAPLCAAHKALCSVTGIGAVTAASLLAVMPELGTLGRRQIAALGGLAPHPNQSGATEGYRWTHGGRREVRPVLFMAALSASRHHKTLRVFYNRLLANGKAKLVALTAVMRKLLIICNAMLRTAAAPA

SEQ ID NO: 500481 - protein, 333 aa, unidentified
MAVLGIDVGKDELYVSLRSQKGESQGKVKPFPNTAAGHRQLVAWLRTSRAVVAETQVVMESTSVYWETIAMYLHEAGYVVSIVNAAQIRFFGKSLLKRGKTDVLDAELIAHYGAAMHPACWMPPETELVELRALMRGRASIVELITLEKGRHHAMEHQFQSSPVALRWIEARQAFLAQQLDEADTEIRTLIKASLRLHQHVELLSTVPGIGLLTASVLLTETMTLGQMEHADQWAAYAGLSPMPHQSGHFVGKTRISKIGNARLRRTFYLSALTASRMTTPFGDFYRRLTASGKPKKVALIALARKIIRVCFAVLKSGQAYDPGYTRALQPGA

SEQ ID NO: 500482 - protein, 350 aa, unidentified
MEQISRIGMDTSKHLFQLHGVDAAEKPVLRRTLRRRDMITFFERLAPTRVAIEACGASHHWARLLRGFGHEVQLIAPQLVKPYVKRGKNDAADAEALCEAMSRPTMRFVPVKTADQQAALMLVKLRDRLIRNRTQLVNAIRGYAAEFGIAGAKGIAHVTTLLARLQADVTLPALARELFAMQAGEYAQVQAKIAVVEAKLLAWHRADPCSQRLAGVPGIGPIGATMLTMKTPAPEAFRSGRQFAAWIGLTPKDHSTAGKARPGVITRAGDEGLRSVLVVGATALIRRVREGRCRDGDRFAAWVGKLLERKPPKLVAVALANKLARVAWKLMITGEAYAVKPASTGAASAL

SEQ ID NO: 500483 - protein, 406 aa, unidentified
MVQVYRCCAGLDVHKKTVCVCARVDGKEFTATFGTSTRELLALGDWLASHGVTIAAMESTGVFWKPLWNLLEDRFQLMLVNAHHIARVPGRKTDVSDCQWIAQLLEHGLLQPSFVPARPQRELRDLTRQRTQLLGDRARVVNRIHKTLEDANIKLASVATDITGKSGRAILDALVEGKLSPEQMADLVHKRMEAKKPQLREALLGRVTDHHRFMLRQLLGQIDYLDGQLKSFDGRIEEVMSPLEHDAVKQLDEVPGFDKRTGQNVIAEIGTDMSRFPSARHLASWAGLCPGNNESAGKRKSGRTRKANRWLKAALTQAAWGASRTRRSYFSAQHRRLTTRRGVKRATIAVAHSLLTVSHCLLDRRQPYVDLGVPHIDLSQDRERQAKQMLRRLQRLGYTVELKKAA

SEQ ID NO: 500484 - protein, 320 aa, unidentified
MMAQNGLVVAGIDIAKDKADVSIRGLSQRQTFASTAEGRRQLITWLRKHKVTKAVMEASGGYEREWAKALREKDIEVRIVDPKRVRHFARSAGRLAKNDMIDADTIAWFAETFGEASSQAHDAARETLRQLVNARQGLLDIRTGLSNKGEHDVPEPVQKSHAQLLKAIAVELAKLEAAIAAMIKATPHFAERAAIIESVPGIAGTTSAGLIAAMPELGQVSNEAISALLGVAPYDDDSGKRRGERQIKGGRRKVRNLFYMACLGAATRHNPALKAFYRRLIAKGKKAKVALVACMRKLIVILNIMIARGEKWDASRYAVE

SEQ ID NO: 500485 - protein, 361 aa, unidentified
MRHLGAKVLVGENQPADREPSMSEITTVGLDLAKNVFQVHGVDAEGSTVLRKQLRRAQVLAFFSGLPRCLVGMEACATAHYWARELRALGHEVRLMPAQYVKAYIKRNKNDAADAEAICEAVARPTMRFVPAKTAEQQAAVLLHRGRERLVRQRTMLVNALRGHLAEFGVIAPQGLRNVGRLIAIIRDEKDARLPGLARQVLQVLAVQIEQLEAAIAALEKQLMGWHKSNPVSQRLATIPGIGPIIATAIAAMVAEPSGFRSGREFAAWLGLVPRQNSTGGKNRLGGISKRGNQYLRRLLINGASANLLRSKATNADPWVIGLRRRRPSLVVAVALANKTARIAWAVMHRQENYQRMATAA

SEQ ID NO: 500486 - protein, 361 aa, unidentified
MADTTLLVTGGVDTHKDFHLCVALDELGGVLGTEQFPTTLRGYRSLLRWLGGFGQLGAVGVEGTGSWGAGLARFLNDAGVEVIEVNRPNRQARRKRGESDPADAETAARAVLSGEAVGTPKAATGIVESIRLPRVARRSPMKARTQAAKQVHSVIDTAPEELRAKLIGLKERERITTAARMRSNNTSTPLGSAKLALASLARRWHSLTEENIQLDTHLAELVERAAPSLLDIKGVGVATATTLLAATGDNPTRLRSYRSFAALCGSSPVDASSGRQLRHRLNRGGDRQVNCALYLIVLNRLSWDQRSKNYVARRTAEGKTKKEIIRCLKRYVAREVYEAIMRDMADQVAPITTLKAFRRAA

SEQ ID NO: 500487 - protein, 342 aa, unidentified
MYYIGLDVHKKTISYCVKDASGQVHREGQIGATRWELDGWMNTLPRPWTVAMEATIFTGWIYDHLLPHAQQVKVAHPLMLRAIAAAKKKNDRIDAGKIADCLRCDFLPECHMASTAIRDRRRTLRYRHLLVRQIVQMKNRISGLLMETGVSHNKRRLHKVGYFRELLASNEEVNESIRPLLQVSRDTIVRLQKTEYALVSSLQRDPLLAERIKRLRTVPGVGPITALTWALEMGEVSRFPSIREAISYCGLCGDEKSSADKVTRTPLSKQRNKHIQRVLVEAAKLAPRQDHTLALVYEREKQKGNANRATLAVARKMVAYLLAVDRGQRDFVPFADSRSAAA

SEQ ID NO: 500488 - protein, 437 aa, unidentified
MKKRKDRVCGADVHKDLIVATITGDDVPPIRENFGTTKSELKRFRSWLIANKCEQVAFEATGVYWIPIYDALSPTIDTIVANPLQIKTIPNDKSDSKDSKRIATLCLNGQIKRSRVFSNEDRDLRTLTRARSGYVKTRTQFRNRIHKYLSSSGIKLSSCMDDIFCKSGRHILNGLAEGKCIEEILKGIPSGKIRKKQDLIRAALSNVLDDTNRMLVSDALEILDNLESKTEKLSLEVLKKVQQRSKDLAIVMSIPGIGFISASVVLSEIGNYRDFQTPDQLAKWCGLNPGENESAGKKKKCGITKRGSKHIRVVLVQAAQTISRMKNTRLTRFFQRLSKKKEHNVAIVAVARKLICLIHHLLINQELYQEADCRKRRSRREKSCKEPSFQEEHLADKVAAIVDAFYGLSDSKRKKALMRALEDISAIDQKRSLDGGG

SEQ ID NO: 500489 - protein, 331 aa, unidentified
MFPVGIDVSKNTLDLCMLYDGIKGRLKTRNIQNNRHSVENILRWLRLQHCGPEDVHVVMEATGVYHERLATELHDAGFRVSLANPHRSREFARGMGIMTKTDKVDAYMLACYAFLKKPHRWEPPAPEIRYLGALLRRRDVLLGDALREENWLEKYLSTDTPADIISSCRRMAQLLREEVSNIERQIKAHIKACPALRRDYTLLTSIKSVGPQLGMHMLVVLRSHNFVSAEQAAAFLGVVPIEKRSGTSVRRRPRMSKIGPPQLRAKLYMSALCGKIYNKRMRNIYDEMCLRGKPKMVAIGALMRKLVHWCYGVLKTGTVFNDESLKQVLST

SEQ ID NO: 500490 - protein, 343 aa, unidentified
MKITTVGVDIAKTVLQVHGVDERGAPVLRKQLKRGQVLSLFANLTPCVIGMEACRGAHHWARQLQKLGHTVRLMAPQFVKPYVKTNKNDMADAEAICEAVSRPTMRFVPIKNGEQQAVLALHRARQGFVRARTAQANQIRGLLEEYGIIIPQGIRQISKRLAKTLEDGENDLPGLFRQLLQRLGEHLKQLDLQVSELDSQILLWHRQHEGSCRLAQIPGIGPLTASALVASIGDAKSFQNSRQLAAWMGLVPRQHSSGGKTLLLSISKRGDGYLRTLLIHGARSVLRVAERKADYGTSWIAGLVKRRHPNIAAVALANKNARIVWAMLRHERNYDARYQATAA

SEQ ID NO: 500491 - protein, 349 aa, unidentified
MRTKPKPNATAYGIDIGKKVFHVVSLDADGRPLQRAKFSRETLMSFFEAADSALIGMEACAGSQWLARKLAAFGHDAKIIPAKFVKPYAKSNKSDTIDAEAIAEAVTRPTMRFVQVRSEAQVDLQALHRIRDRLIRNRTGLMNQARAFCIEYGLAMRTGAGGFHADIRRHLADSENDLTGTMRALLSDLLDDLAHIEKRVAELTKEIEAIAHSNETVRRLLTIPGIGALGATALVAAAGDGRQFRKARDMAAWLGLVPAEHSSGGKQTLLGISKRGNGYVRRLIIHGARSCFLHLHRETHALGRWLSGLEERTHRNKAVVALANKLTRIAWAILTRPGENYLRTKGAAA

SEQ ID NO: 500492 - protein, 355 aa, unidentified
MSSEKYIGLDVHQATISVAVLDSTGKLVMESILETKAATILEFFAGLRGTVSVTFEEGTWAAWLYDVLKPHVAKLVVCNPRKNALLKDGNKSDRIDAHKLAELLYLNKLSSVYHGETGVRMLRELARSYLTIVKDLTRVMCRLKAVYRSWAIPCAGRDVYYTRHRDEWLGKINEAGVRRRAERLYQQLDMLQYLRQQARRELLAESRKHAISVKLRQIPSLGPIRSALAVALIQTPHRFRTKRQLWAYSGLALETRTSAEYCYVKGGLRRSKKQISIRGLNKDHNHDLKGLFKGAATRASVLPGPFQDFYQRSLAKGIKPTMARLTLARKIAAITLTLWKKGENFDADKLKSQAA

SEQ ID NO: 500493 - protein, 452 aa, unidentified
MTDVDKISMEIVNPRAAGIDIGSRSHWVAIGQGPNDFKEFGVYNEDLFAIAQWLKESGIKTVAMESTGTYWQSLYAVLMAEGFQVILCNGKFTKNIKGKKTDIQDCQWIQKLHSIGLLSGSFLPDEATEQLRTFCRHRANLLDSAASASKKMQKYLRLLNLRLDVVVNDICGLTGMAIIKAICNGEKNPERLADLRHHNCRKSKEEIAKALHSNGRQDYLFTLKQELEMYELFQTKIALCDIEIEKMLNETIDNDENKKQHYIEKKAYKKINKNTPKNIDLNLMAYQHFEGVDLMAIEGMSYSTVLSLISEVGVDGIKRFPTAKHFANWLRLSPNNKISGGKVLSSKVPKGSNRLKIALRNAANAIGNLKDSTPLRDFFQRINFRKGRVSAISATARKLAVIIWNMVVKRVPYQNPEEYLFRDQKKKLGLLKRIQKQITKFELESTDFQFVN

SEQ ID NO: 500494 - protein, 325 aa, unidentified
MTSHSPLGLDVAKRTFDAALLLDNGRYRHRQFANSPTGFTQLAAWLRQHATGPIHAGLEATGSYGNALALFLHQQGTRVSVINPLRIHAFAQSELSRNKTDPLDAALIARFVATQQPPLWTPPPLEQRQLQSLVRRVEALQAMRQQERNRLDLETDDSLVADSLREHLAHLDAQWRGLQQRLRQHIRAHPPLRHQTDLLQSIPGIGQTTALKLLAEMPVLAQWSSARQVVAYAGLNPQQRTSGSSVRGRSRLSKIGNARLRRALYLPAVVAMRYNPLLKAFAQRLRERRKPPMVIVGAVMRKLLHQAYGVLKHATPFDPNYATTH

SEQ ID NO: 500495 - protein, 406 aa, unidentified
MRYYIGVDWADRDHAVWVEDEQGMKVTATKVTQTAEGWATWGRWLHERRAEGAELWAGIEKPEGRVVEFLLDHGVIVYPINPRAIHKARDRFRTSGAKSDRFDARVIANFVRTDHAHLRPLEPNSEATQELKLLTRDYQRLVRQQTRLLNQLTATLKEYFPLALELFDDLASAAAREFLQQYPTPDVARTLTATQWRRWAREHRVSEARTTALWERLQAPSLPIPPGVVRAKARLVGALLRQLTTTLSAVEEYRAEVDRFFATLPAAEWARTLPAGRSGTTLPTLWAELGDAPGRWQSWQHLQAQAGSVPVTTESGQSKAVGFRFACNAQLRAAVHQLAFLSLQRSDWARAYYTACRKRGHQHHHALRALGAKWLKIIFVMWSRHVPYDETHHLATIARQRMRQAA

SEQ ID NO: 500496 - protein, 428 aa, unidentified
MHSTQNERINQITSSTLIIGVDIAKFKHVARAQDFRGVELGKPITFENNREGFELFVSWFQKILTEQGFKDVIVGMEPTGHYWLNLAHFLREKQVKYGVVNPLHVKKSKELDDNSPTKNDVKDAKVIAQLVKDGRYAVPSLPQGVYAELREAMKIREHLTTDLCVVQARIHNWLDRYFPEFLTVFKDWECKSAIQMLSLYLLPHELVDVPDETLLRHLREVAKRGLGSGRVKNLKEAASCSIGIRQGAELAKMELKLLLTQYEWLQNKLEELGTKLDELLMQIPHVQQLLAIKGIGRDTIAGFLAEVGDMGQYRHPKQITKLAGLNLKTNSSGTHIGQTKITKRGRKRLRALLFRVMMPLVAKNAAFRALHEYYTKRQVNPLKKMQSLIALCNKLIRVFFGILTKGYEFSEEKMMQDMPRFAELPQAA

SEQ ID NO: 500497 - protein, 315 aa, unidentified
MAFLHQQPLNCLGFDIAKDTITVSGGLSKSAHTIANMHGAIRAFLKRAAPDFIVCEPTGGYELALLDEAMRAGIACHRVDLARFKGFIRSLGTRGKTDALDAAMLALYGRERWSALPLWQKPDAHERQLKLLVRRRHELMAIKNAEQNRARAPAHKPLAASFKAIIAVVQRQIEAIEHAIAAVIRQSGSLARRAAIITGMNGIGATTAAALLALLPELGAMSRRQAAALAGVAPHPVDSGTKHGYRKMRGGRPEIRTVLFMPALRAAAGMGEFANNYKRLVANGKKPIVAIAVVMRKIVVTLNARLRDLAPIPQS

SEQ ID NO: 500498 - protein, 395 aa, unidentified
MERLFVGVDISKDSFSAAGLDSEGNESFAKFYSMDFEGFHQFFETLTSRCKELPKVLVAMESTGCYHVNLFSFLTSQGIRALVVNPLLIANFAKLSLRKTKTDKKDALTIARFLSDHHEEISQLSISQDHQDLRDLSRERESLCHLISATKVEIKRVLRTTFPELESIGNLYTGVMLRFLQQYPSARLVRGAKLKAIVKALKGPYVGDKLTFTAEDIVKAAQRSVAVVSPAKEIILQGKIATLLHLQGRLEGLTKLLTDLCKATRVEDLKILRSIKGVGPNTAVPFLAEVGEVKHFTSSKKLIAFAGLDPSIHQSGKFMGVSKLSKRGNRHLRRAIYLMTTSVVSQNAFFKAYFLKRKKEGLPPKKALFAVAHKLIRVIFAMLSQRTYFKVKDAI

SEQ ID NO: 500499 - protein, 371 aa, unidentified
MGESSKKLFVGLDVHKDTIAVAYAPEDRGADVESLGAIGTRQCDIDKLIRRLESKGATLVFVYEAGPCGYWLYRYLTRRGFSCAVVAPSLIPRKAGDRVKTDRRDAVTLARLLRSGDLTSIYVPTVADEALRDLSRGREDAVGDLKRSKVRLKAFLLRQDIRYEGRANWNAAHLRWLARVVCPTPAQQIVFQEYVHTVTEQSERLRRLESELHTAVKTWRLYPVVEAVQALRGLDLTGAGTLIAEVGDLTRFDTPRKLMSYLGLTPSEYSSGAHRRQGGITKAGNGHARRALVEGAWAYRYPAKVSRHLQLRLEHVSPDARAIAWKAQVRLCKRYRLLSARGKHVNQVVVAIAREMAAFAWAIARTVPVAS

SEQ ID NO: 500500 - protein, 373 aa, unidentified
MPRYSTAFGMDVHLRSTTVCALDAETGEAVARRFRRNPWGEVAEWMSGFPGPSLAAYESGYLGFAPQRELSALGVDCVVAAVSKVPRSAADLSSKNDRNDAARMAKAILSHDVTPVWVPSPEIEGLRDLAAAHDAATARLAAAKQRLLAFLARRGYVYGGTTPAGNPRKHWTYGFLRWLDKVRPADDGGIRALAALRNEVEAANEAREALLAEYRAAVAAGPLSAEVEALQSIKGCGFALAAAFASEVGDFSRFRSGRQVTAYFGLAPKQRSSADSVRLGGISGAGDALVRRLAVEGSWSYVQANHQPKLMPKGSGVPLEIRMHGRKGSERLLRRREEMLARGMPQAKANAATAAELVRWLWALGMMCREATE

SEQ ID NO: 500501 - protein, 403 aa, unidentified
MAIDVAKGKSMFYILSIHGEVILDAIEYKHNLNNFKLVELKIREEKIKQDLAVFMESTSIYHYPVMRYFLEQAYEVIVVNPNLVKKSSTSFRKTKTDRLDCIKIAQTYFKEEIKSNAIKVGDIYNNLMNLNRQYLSLEKSLTALKNRYVRLLDICIPEHEEFYKNNNGKMNRKLKYHKKYLSLYYYLPHSEYLQKTRIDRIANVLNLAFNRNFHERLKKEAIKLKAISKTSYPGVSKHSYEVENLQQIIRIIKNLMAEQDIVKTKLITLSKQAKEFTHINSIPGIGELTAAQLIAELGDMSRFRNYKQINAYCGLEPSIYQSGKAYINGKISKSGNGFARKVLYTTILSIVRYSAFYCETHPIYLYYSKQKENKSTKASVIPTSTKLIRIIFSLCKNETYFTL

SEQ ID NO: 500502 - protein, 366 aa, unidentified
MKKISTMAKRGNEIFKEPKLTIGLDLGDRTSHYCILDEAGNVILEHRLPTTPRGIRQVFCRIPRSRIALETGTHSPWVSRQLTQLGHEVIVAHARNVRLIGESSRKDDQLDARTLARLARIDPGLLGPVRHRSAKAQIHLTVIRARAGLVSARTALVNTARGLTKSYGERLRKCGSGQMNREIAKGLSQELRDALDPLLGEIESLNERIAEYDRRIERIAKEVYPEVTLLQQVKGVGTLIALTYVLTLDDPHRFRRSRDTGCFLGLRPGRRNSGMSEPQMHISKEGDGYLRTLMVQGAHYILGPFGEDSDLRRWGLKLAERGGKNAKKRAIVAVARKLAVLLHKLWVSGEVYEPLRNNHKVVSAVA

SEQ ID NO: 500503 - protein, 321 aa, unidentified
MNTFYLGIDVAKAKLDCALLRPDGKWRNKVVANTPAGFQTLASWLEAQGAAEIHVCMEATGIYWEEIAEFLASRNIVVSVMNPAQIKAFGASRLVRTKTDQVDAKLIAEFCRERRPDPWKAPPYCEQTLRALVLRLDALQAMRTQESNRLAVAWDAVRKGIEGHLAWLDKEIKALAKAIQDHIDSHPDLDNKRALLDSIPGLGERTIAVLLAFFGSPERFQNARQAAAFAGLDPRQHESGSSVKAKPRLSKIGHAFLRKAMYMPAMVALHKTSWGKSFRDRLTASGKPPMLIIGAMMRKLVQVAFGVLKSGKLFNQQLHTA

SEQ ID NO: 500504 - protein, 332 aa, unidentified
MLNCIGIDVSKSTLNIHISKNSQDLQIENTIQSVKKLYSKLKKIYKKEIEEIIFIFEPTGSYSELLRKFCFEQKIRCFIINPKQFANYAKALGEEVKNDEVDARVLAQAIVLAKENQITVPHYDATVEQIKELMSFYKFTTKQTSQLRNHLESLVSKNGDKFAIKELKKSIKLSKEKEKRIIAEVQNIIDSNPTYKEDFKNITSITGVGQIGGIALLHLFIKYPEANQRQIVSLVGLNPIYRKSGSSIQSLHRISKSGSILYRGSLFMGVMTAIRYDDNFKAFFERLKANGKHTTQAQIAIMRKIIIVAHSLYKNKQQYVKKIVESEVIVMK

SEQ ID NO: 500505 - protein, 337 aa, unidentified
MDREYVGIDLHRRRSVIIRKNAAGELISKVHIDNSPETLAAAVAAAGPEPEVVVEATFGWYWAVDLLQEMGAHVHLAHPLGNNWGNRRVKNDERDAADLVDLLRLGRLAESWIAPPEVRELRELVRYRHKLVRLRAGLKAQVHAVMGKHGVLPDRVDMFGPGGTAQLDALDLPEAYARRLASLRAMVKTFDTDIVELDHTIASSLANHRGYHAIQKLNGVGPIVAAVLVTEIGDIGRFPSPDRLCSWAGMTPRHRESDTKVHRGSITKQGSRLVRWAAVEAVSKNHGDDMIKSAYRRIAERRGRNIAKVAAARKLLTLVYYGLRDGEVRCLASSACG

SEQ ID NO: 500506 - protein, 343 aa, unidentified
MNQYIGLDVSLKDTAISIREDGKRIWRGKCPSDPKLLAEMIRKHAPYARRVVFETGPLSTWFYHVLTSEGVPAICIEARHAQKVLNETLNKTDANDADGLAQLAEAGFYKAVRVKSFDAMMTRSLVAAREQLLYISTQLGNQIRGLMKTFGLIIPKAKGRVFDGDVRKLLDGNNELAKIILPLLDAWHDIRKRAADLGRQLLIVARQSEATKLLMTIPGIGAVTAVSYVTAIENPENFRTSRSVGAWLGLTTRRYQSGEVDYDARISRRGDNRLRGLLYEAATVLLTRTSARAESSLKSWGLKLRERLGFKRAAVAVARKLAVIMHSMLRTGEVFNASAGAAV

SEQ ID NO: 500507 - protein, 320 aa, unidentified
MSARARSYVGIDVSKAALDVAILPARVHFVVGNDEAGIDELLGKLLAELSGEALVVLESSGGFERPVAAALAASEIALFVVNPRLARDFAKATGKLAKTDRLDAFILAHFAQAIRPTPRAIPDQEAREFQEILARRRQIIRMMTAEKNRLGASTSKAVRGRIQAHIRWLEKELARTDRGLDETIEESPTFKANEALLRSVPGVGPVLCRTLLAELPELGSISPRELSALVGVAPLNRDSGTLRGRRTVWGGRARVREALYMGALIASRFNPAIKEFYERLVGAGKPKKVALVACMRKLLTILNAVMRERIPWRYPHALNS

SEQ ID NO: 500508 - protein, 420 aa, unidentified
MRNAGIHANSLLEVRRMYNAVGIDVSKGKSTVAVLQPGGTVIRKPFDISHTSQNLNELADYLSSLDGTTKIVMECTGRYHEPMVKALSEAGLFVSIVNPHLIKNFGNNSLRKVKSDPADARKIARYTLDNWTELRQYSGMDNTRTQLKTLNSQFSFFMKQKVAAKANLIALLDNTYPGVNKLFESPTREDGSEKWVDYAYSFWHADCVRKIGLKAFTERYMSFCKKHHYIFQQDKPEKLFNASKELVAVFLKEKTYKLLIQQSIQQLNLASEHVERLRREMNELASTLPEYSTVMGIYGVGKTYGPQLIAEIGDVSRFTHREALTAFAGVDPGVDESGQHKSKSNRASKVGSARLRKTLFQIMTTLLQNAPEDDPVYRFINKKRSQGKPYYVYMTAGANKFLRIYYGKVKECLRNLEQTE

SEQ ID NO: 500509 - protein, 337 aa, unidentified
MVYVGVDLHRKRSHVVALDPTGEVVLSRRIGNAPAEFLRIFGELEPQPVEVVFEATYGWSWFADLLADAGIPAHMAHPLATKAIAAARVKNDAVDAKTLAHLLRTNLLAEAWIAPPDAREARRLVRTRAGLVRMRSRVQSQLHALLADLGVIPELTTLFGPAGRRWLAELPMPASARGRLDAGLRLIDAITVEVAHADADLRTTFANDRRVQRLLPIPGVGLVTAATVVAEVWDIQRFPSPERLCSWAGLTPGERTSDAHTRRGHITKQGSRWLRWMLVEAATTAVRDPQLGRFTTQIAQRRGPKIARVALARRLLTLCYYALRDDGGCRAYPVPAR

SEQ ID NO: 500510 - protein, 407 aa, unidentified
MSTRLKYHVGVDVSKDKHKVCIRNLSQDSYSGVSSISVNRQGFEKFLSTLEKLSQNKEDFIIGIEATGNYGITLAYFLLAQGYKVVEINPYRASQFRKAQGKKAKSDRIDARSLATLLSLENHKSLSLPDPVLDNLRELTRFRADMVKDRTSLVNQLREALSTLFPELAAIFSQLDSPTCLSLLIAYPGPGYISRAGETKVAESLRIASRGRIGEALAKTLVEIAQDSVGVVQRQSALALRVSILGERIVALAGAIEKVEKEIADLFHKLPYKPEDFPVGNITSLAALISEIEDINHFPTLKQFLSHFGWCPQSLQSGSYRLEHPRMSHAGNKYVRRLIWMLSIVAVRTIPRYRTYFERRVAKGKSKMHILVAVGRKLLSVFYAILKKGVPYNPNWEVNHHFALARS

SEQ ID NO: 500511 - protein, 391 aa, unidentified
MVCVGIDVAKDKHDCCILDSDGMVRADCFTIPNNMDGFKQLLQTIRDCTKKSDKIKVGLEATGHYSYNILGFLLDNDLAVYVMNPLHTNLYRKSLSLRKTKTDRVDARTIATMLLSDVDLKSYTDIAYHNEDLKLLTRYRFDKVQERAKLKQSVSRLATILFPELEQLVSSIHGTSIYALLGEYPGAKQISEVHLTKLTNLLTTASKGRYGKEKAIQIREAARTSIGSVMPAKSLELKHTIKLIQELASEINEIEDSIQKIIDELNPPILSIPGMGVNSAAVILAEIGDFSNFSSPDKILAYAGCSPSTYQSGKLTNCYAHMEKRGSRYLRHALYNATKYVCYWNPVFAEYLAKKRAEGKHYNVALSHAMKKLVRLIYALQKSGKAYLATA

SEQ ID NO: 500512 - protein, 413 aa, unidentified
MEVLHACVAGLDVHKDTVVACVRRVGEGGRVWKEVRTFQTATRHLEALRGWLQAQGVTHVAMESTGVFWRPVYNCLEEHFEQVLLVNARDIKQVPGRKTDVKDSEWIAQLLQFGLVRGSFVPPRPQRELRDLTRHRTTLVQEHNRVVNRLHKVLQDANIKLSSVVSDILGVSGRGMIEALGRGEDDPAALAELARRRLRGKIPQLRVALEGQVREHHRFLLRLLLEQLDFLAEAIEEVSQRIVEVSDPPVQAAVALLTTINGVGQRVAETIAAELGTQMTPFPTHKHCASWAGICPGNNESAGKRRSGKTSKGNRWLRRALAEAAWAASHTKGTYLAAHFRRIARRRGSKRAIVAVSHTLLIIIYHMLSKQLPYSELGADHFDRLQPERLTRYHLTKLHSLGYKVTIVPLEAA

SEQ ID NO: 500513 - protein, 416 aa, unidentified
MSITPSAPSSEGATIKYVCGIDIGSQSCAGCMCRPDKSVVLKPITFANAREGWQIWEEKLNRLDALPNQILIGMEATSRYGENLYHELEQRGYVLRLLHPGQTHHFHQQQGLRAKTDRLDAMTIARVLLSGEARIGYVPSEQIATYRELVRLHTQLSDTAAGYQNEIQALVVVLFPEFTQVFADPCLLTALAVLKAFPSAQALAEAGVEPLFQLLRAQPSAHYGRPTAQKLVAFAKQSVSSGRAIAGRSVSLRILCDQLEHTRANLARLDAEIEQHLRTDPGAKGLQQVPEFGPKTLAVLRAELGDVQRFARTDEVIAYGGMDIQIKESGLWKGKAKLSKRGSGLLRRMLYMTALRCIHREDSAFGVYYQRLVERGLKKGSALMAVMRKLLAVAAHLLMHEGEEYDPRKVCGSSAG

SEQ ID NO: 500514 - protein, 416 aa, unidentified
MLFIGDDWAEDHHDLEIEDQDGHRLARARLPEGLEGITRLHALVARHAPAVWADLPPEQVAGQVVVGIETDRGPWVTALRAAGYQVFAINPLSAARYRQRHSTSGAKSDAGDAHVLAEIVRLDRDHHRAVAGDSDLADAIKLLARAHQSAVWERTRQVLRMRSTLLEYFPAAVQAFADLAAPDALALLGRAPDPDRAAKLTRSQLVSALRTARRHHVEVKADMLLAVLRAPALRQPGTLQGAYAAVVTGQVGIIAALNEQLAGLHEVMAEHFGRHPDADIYLSQPGFAVVLAARTLGEFGDDENRFASSRARKNYSGQSPITRASGKKSVVLARYATNRRLGAALHLQAFAALGASPGARAYYDALRARDVGHHAALRQLANRLVGILHGCLKTGTVYDENTAWQHHQITTQTVAA

SEQ ID NO: 500515 - protein, 354 aa, unidentified
MKRRTKYVGLDVHQAMTVASVREEGGRVIARTVVATEEAALVEFFSGMRGAVHVALEEGTQAQWLHDLLVPVVDRVVVCDRRGESRHGNKGDQVDADQLSELLRRGGLRAVYHGSADRVTLKELTRTYQNVVEDMTRAMLRLKALFRARGIKTPGKRVYHPKQRAQWLAKLPERGARFRAETLYAQLDVLRELRPEAKAAMVAEARRDPAWSVLRSIPFLGPVRVALLMAIMRTPWRFRGKRNLWGYCGLAVVTSSSSDFTLVEGRPVRRRRKPLTRGLNRNHNPVLKDVFKGAATAATGRSGPLQDFYHAMIARGMEPELARVTLTRKLVAVTLRLWKTGERYDPKMLTVQAR

SEQ ID NO: 500516 - protein, 413 aa, unidentified
MAYTVAGIDIHKKVVMVVVLQQIAGRAEELARRRFGTATSELHRLTAWLREQGVEEAVMESTAQYWKPVWYELEPHMRLQLAQAFSNRAPRGRKHDFRDAERLVRRLLAEELILSFVPQPEQRAWRMMTRTKVQLARDRVRLHNQLEGLLEEMRIKLSSVLSDLLGVSGLRILRALAGGETDAKKLAALGDDRLHCSQEQLVDALSGTFQPMHQKLLTLYLDRLQLLDKQMAELNEATAEAMREHGEAVARLAEVPGFGADSAQQVIAEVGVQASTFPSAAQLASWVGTNPGRQESAEQNQSSRSAKGNKYVRRILTEAAQAAVKTKGSHFQVVFRRLLPRLGYQQALWAIAHRLCRLVWKILHEKVRYIEQGAQRDPKALKQRLYGMARSLRQLGYNVNLDIAPPDSAPARG

SEQ ID NO: 500517 - protein, 366 aa, unidentified
MKQSISSHMTQTTMSTTASGLTVGIDLGDQWSQVCLLDTAGQIQQEGRVRSTRSAFQARFGALAPARIALETGTHSLWASELLMELGHEVIVAHVREVRAISGSDRKSDQVDARKLARYARVDPEILHPVRLRDSEQQRDLVLIRARAALIRARTLLINAVRGLVKPFGDRVSSCDADSFAVRCREELSPEMQVSLWPVVEQIAQLTEQIQDYEVQIRAVAEKKYPDIAPLRSVFGVGPVTALTFVLTLADPQRFAKSRDVGCYLGLRPERSQSGEHDPQLGITKAGNRYLRWLLVECAHRLLRVDAPDSTLKRWGQKLGERGGKNAQKRAIVAVARKLAVLLHRLWVTQQRWEPLYGVRPVTATS

SEQ ID NO: 500518 - protein, 392 aa, unidentified
MRYVGIDIASEKHFVAVVDEASEVLLKSTQVGEDEAGYSKLFQLLGEPPETLVAMEATGHYWKNLYAALAARGFAVALLNPVRTRRFAEEDLQRTKTDAIDALGIARFAAQKRPPASRMPDSATDELRELVRHRDRLVQEFGDKTRQLHRLVDLGFPEFKRYVRELDSALATAILADYPTAQGFAQARPRGLANLKYDGRHFVGLELATTLIEAAKHSVGAHHGYAYRLQVKHACQDLDLLRQRLRDIDRDIEAKLDEHEIGSLLTTIDGIGPTTAAKLIAELGNPADFTSPAALAAYVGVIPATRQSGKALGTRAGITPMGHAELRHALWMPVLTAVRVNPWLGQHYRRLRANGKPAKVALVAAMRKLLHAIYAVARDRQPFSPRLARVPA

SEQ ID NO: 500519 - protein, 304 aa, unidentified
MKILKQSVGIDVSKSDFKVCLGKLDEQLSVAFSFQKAYDNNLKGVTLFLKEVSHLFTAEVTVQFILEASGVYHELLAHKIYQHGYEVSIILPSKSKAFFKSITQKVKTDKVDARLLSQLALERQLDNWVPADPIYTQMRSLTRERESLIKEKTVIINKIHAQQSAYQIAKSTLRRSKQRLKLLQKQITSIDLELKTFVESSEMLCSKVNRITKVKGLSLLTVATVIAETNGFGIIRNRRQLVGYAGLDVIINQSGQKSSKGRLSKKGNPHIRKALFMPALSSSRSNELMKIIYQQLSGSTVFVP

SEQ ID NO: 500520 - protein, 336 aa, unidentified
MYSGIDLHSNNSVVAIIDDADRIVAQKRLPNDITKIVGFLARWQDDLAGVVVESTYNWYWLVDGLQDAGLHVHLANTAAIKQYDGLKHSGDETDAQHLAHLLRLGILPTGTILPREHRVVRDLARKRMQLVNCRTTHVLAVENIMARQLGERMTSNQIKQLTADTIDSLPLAADVGLAIKANVAVIATLQSQIEVLEKRLQERVKPRPQYGLLTSVPGIGQTLATVIFLETGPIDRFADVGNFASYARCVDSVHTSNRKKKGEGNVKNGNRYLAWAFVEAANFARRFCPEAKRFHERKKARTNNIVATKALAHKLARASYHILKEGKPFDATRCFA

SEQ ID NO: 500521 - protein, 322 aa, unidentified
MQGKVSPDPNATRVYVGIDVCKEQLDIYLHPVGQKLTANNDESGIRRLKRLLKDYDVALVVMEATGKLHRLAHRSLSASGFRVAIVNPLRSRLFAEAIGTLAKTDLVDARILAIFGESLHPAATEPPSELLESLQELARGRQMASEERTALLNRLGASKTKCLVRELNRQLRTLDASIANLDLEIKRLIKGDPCLTRRFEILVSIPGIGDTTAAVIIVELQEIGALSAKETAMLGGLAPVACDSGETNGARHIRGGRWHLRNALYMPAQSAARHNPDLKAFYDRLVAKGKEAMVALTAVMRKLLILANTLVREDRLWEPNHA

SEQ ID NO: 500522 - protein, 408 aa, unidentified
MNPLYVGIDVSSKSNVVYFMLPDGSKHSNFSVANSHTGSSQLVKRILSAMTSCSLDTVLIGLEATSVYGDNLVYFLREDAALARFNSKIHVLNPKQVSKFKEAYNDLPKNDLIDSFVIADCLRFGRINKEVYIGDYRYKALQNLTRARYFAVSNLIKEKQRFMNILFKKYSTMTQEKVFSDTFSTTALAVYDEFESAEALADMDLHELTAFIMEKGKNRFPNPNAVAKAIQKAARSSYRLPKTVNDSVNQVLSISITSMKALESQIKEFDKAIAAQMELLPNVLTSIPGIGPVFSAGIMAEIGDINRFGNHAQLAKYAGLAWKQHQSEGFEAQTTRLINSGNRLLKYYLCEAAFSLVRCDKEYSDFYHLKYKEVNRYQHKRALALTDRKFVRLVFRLLKDNRLYTSAE

SEQ ID NO: 500523 - protein, 322 aa, unidentified
MERRGFVGIDVSSGRLDVAFRPGTELFQVSNEPRGIARLVRMLERRQPELVVLEASGGYEIAVLERLLAKEVPVALLNPRQVRQFARASGRMAKTDAIDAEVLAHFAEVMRPRPRRWADLETRQLRALVNRRHQLVQMVTAESNRRRLALAVVRDGFGATLRCLKLQITAINKQLSALIRQIPTLRQKAELLRSVPGVGEVATATLLARLPELGSLDRKKIAALVGVAPFNRDSGRFNGKRAIWGGRGDVRTVLYMSTLVGVRRNPSLRDFYQRLRGAGKTPKMALTACMRKLIVTLNAIVKHETHWYCPLSLSGKASPNAT

SEQ ID NO: 500524 - protein, 383 aa, unidentified
MGAVARTQLRETPVKPNRTCVGLDVHARSVWACTVDDESGEMRTSRISPKTAEIVKWAKALPGEVEVAYEAGPTGFGLARALIAAGVQCFVLAPSKMERPSGDRVKTDKRDCEWIARLVRLGELPAVVIPSEGQEAARDLVRAREDVRGDLMRARHRLSKLLLRQGIVYEDTAWTTAHGKWLRSQSFDKPGVQFAFDEAYDTVLTTLARRDRLDTAILAMAAEPTWAPVVARLGCLRGVATLTGFGLAVEIGDWHRFTGNSIGSFLGLTPSEHSSGGSRSVGSITKTGNGHARRLLVESSWHHRKPYRLSAEMIRRRDGQSPLVRARADRANRRLNQRWRTFDARKKRPTVAAVGVARELAGWCWSLAVMDEDNDNSAMKRQR

SEQ ID NO: 500525 - protein, 344 aa, unidentified
MEYFVGLDVSLRSCALCILDGKGAVMFERELPCEVGDIADCLASFPHPIERVGFEAGTMSQHLFFGLTDAGFDVVCMEARQVNAALSAMRNKTDKNDARGIAQVLRTGWFSPVHIKSREAHGIRALLSTRKALLKKTMDLANEVRGLLKIFGIRLRKTVKHGSFDGVVRPMIEMDDVLAHALVPLLDARVALYQHYLELDRRVKRAAAHDEVCMRLMTVPGVGPIAALTFKGAIDDPTRFKRSRTVGAHFGLTPRRYQSGEHDNPGRISKAGDRDARAALYAAANALLMRTMAGSQIKSWGTRLLRTKGRRRAVVAVARKLAVLLHRMWIDGTEFRQDQMGGTA

SEQ ID NO: 500526 - protein, 325 aa, unidentified
MECSYLGLDIGKTKIHAALLVGVRSAKRKVVANDERGHQELVEWLKRQRVEQLHACLEATSTYGHAIAHCLHACGYRVSIANPKAVQAYGQSRMSHTKTDAVDAVLIAQYCRDLKPHAWTPPAPEVEQLQQMARRLQALDGMIAQEKNRLETVSQDLRADIECHIAFMAQQQDKLRQQMQQHIDQHPHLKGQQQLLDSIPGIGKDTAARLLGELGNWQTFASARQLAAHAGVTPQEKTSGTSVHGKPRLSKLGNTRLRKLLFFPALTLLRWNDSIQHWRDSLLKRGKTKKQVVGAVMHKVIRWIFAVLHSHKPFDPNLAFPVQPA

SEQ ID NO: 500527 - protein, 344 aa, unidentified
MDNFMGIDLHRKYFVATIVDEDGEVIRRDRVSTDRLAIGGYLSGLDGERPGKAVMEACYNWSYLYDQLEGEFEEVLLAHPLKTKAIAEARIKNDTLDSETLAQLLRAGLIAQAYAPPKETRDVKNLLRYRSSIVGARTAFKNRVHAVLARNHVEHPALRELSDIFGKKGMTIMRSLELYGHDTAILNGFLDIVDEFGERELELRKQIKAMNREDDITRLLMTVPGIGDITALLIRYEIDDIDRFLSPGKLCSYAGIVPCTHSSGGKTYHGRITKQGNRWLRWGIIEASHKATVTSPSLAAYHARIKGRRCSSDATMALARKLLKIVYYVWKERRPYYEGPIAIR

SEQ ID NO: 500528 - protein, 425 aa, unidentified
MNYKQNEKINQVKESTLVVGIDIGSTTQYARAFDWRGIELGKVFTFSNSREGFEAFKAWMQRLQDKYRKSDVIVGIEPTGHYWFDLGAYLEDEGILLVMVNPYAVKQTKELDDNSQSKNDRKDPKVIAKLVTEGRYSAPYTPDGVYADLRIMVANRKRLIREMTQIKNRFARWFAIYFPEYTDVFGDYEAQSSMLLLKKVCTPEAIVELGAEKINQIWRDAKLRAVGMKRATTLCETAKRSIGLKKGSSAAQYEMKLLLEDYEYKKAQLDAVMEEIEKLCRKIPESEQMLAIKGIGVITVAGFLAEVGDVRRFESPRQIQKLAGLSLRENSSGKHKGQTTISKRGRSKLRAVLFNAAIPLIAKNPEFKSLHEYYTTRANNPLKKKQSVIAISCKLIRVFYAILANGVTYDAQKMLSDIHRQPQAA

SEQ ID NO: 500529 - protein, 344 aa, unidentified
MTYYTALDVSLRSVSICIIDEEGSIQYEGKVDSEVNKIIACLKTFSTDITTVGFEAGTLTQYLTYGLQASGYEVICLEARQVNSALSAMRNKTDKNDARGIAQILRTGWYSRVHVKSFESHLVRALLTSRTAVLKKCVDLENEIRGLIRLIGVKLPGTLKHGIFDTTVRALIERNNTLASALIPLLDARLVLYKTYLKLDNQVKALVREDPVCQRLMTVPGVGAITALTFKAAVDDPARFRSSRTVAAHFGLTPRRFQSGEVDNPGRISKAGDPDVRAALYIAAHSLVVRSSEWSSLKIWGLSLMKTKGHRRAVIAVARKLAVILHKMWIDGTDFHHGSVQTTG

SEQ ID NO: 500530 - protein, 398 aa, unidentified
MINGHDEIAVFLGLDVGKSGHHAVAQDRSGKKLLDRALPNDEAKLRELYGRMKAHGPVLLVVDQPATIGALPVAVALDEGVTVAYLPGLAMRRIADLHPGSAKTDARDARVIADAARTMPHTLRALKVDDETIAELTVLSGFDDDLAGQITATSNRIRGLLTQIHPALERVLGPHMDHPAVLNLIETWPTPAALTTAGKTRVRTRLLKKAPRLGGRLTEEIFAALAAQTVVVTGTNAAGIVLPRLATQLAALRQQRAEVAEQVEELVAAHPLSKVLTTMPGVGVRTCARILTEVVGKDFPTAGHLASYAGLAPVTRRSGTSIRGEHPPRGGNKILKRALFLSPFAALSDPVSRTYYDRKRTQQKKHNAALIALARRRTDVLYAMLRDNKPYAQPAAAA

SEQ ID NO: 500531 - protein, 322 aa, unidentified
MSKIILGIDISKSKFDVALLFLDNKLKTKKFNNKLTGFYEMIEWLDKKDAKANDLHICMEATGIYSEALSTYLFDAGYTVSVVNPARIKGFAQSELSRNKTDLADSQLIARFCRAMEPKPWKPKPFHIRELQGLVRRLEALQDMYYQENNRLEIADFHVRTSIEAVMKKLTDEIELVKKKIQEHIQQNGDLNEKSKLLETIPGVGEATISQVLAFISNVEDFKNAKQFAAFIGLNPTQRQSGSSVQGRSRMSKMGNSNLRKAFYMPAVCAKRFNPIIKEFCDKLKISGKPTMLIVGAAMRKLAHIIFGVLKSGKPFSVIAMA

SEQ ID NO: 500532 - protein, 356 aa, unidentified
MLIIGCDYHPSFQQIAWLDSGTGECGEQPLTHSNGEAEKFYRGLKLRGVLVRVGMEATGHARWCERLLAELNQELWVGGLAQIRATRVRRQKTDRRDADHVLKLMLENRFPRVWTPSPENRDLRQLLWHRHRLVQVRTRVMNQLQALALNEGIQRKAGLWSQKGRAQLESLRLAPWATRRRQDLLELLDRLSPSIEELSRVIEQEGQQRPEVQLLMTHPGVGPLTALAYVLIIGSPGRFRCGKQIGSYLGLIPCEDSSGGHQRLGHISKQGNALMRFLLMEAAQVVVRYDPDWRRRFLHLAMRRDRRIAKVAMARKLAVRLYWMWRKGWNYQQLRKFGSHAELPVADNGGGRSPSP

SEQ ID NO: 500533 - protein, 392 aa, unidentified
MTYFIGIDLAKYKHDCFIMDENGEVIRDSFSFNNDKEGFNTLLNVLNSLDLNQEKRIGFESTGHYGSNLKIFLERNGYSFMEFNPLLVHRHFKCETLRRTKNDKVDARKISSYLYTREYKPNPNSSYHLNCLKSLTRTREALIKDRTRHIIHMTNVLDKMFPEFKPQFNNQGLNAASAMYLLENYGSPSKMANMTRASYDKMKSELRRTISYAKFLRIKELARNTIGNEDEILVFELNTYLELFKELDKKILEVEDKITKEFSIMKCHIASIKGIGIITAAGILAEIESIDRFDNPGQLCAFAGIEPSENQSGTHDGGGKMVKHGSPHLRNYLMQSAGYMLIHNPVLYEYYLKKRNEGKCHTVALSHVAKRLTRIIFYLEKNDTDFNIDKMR

SEQ ID NO: 500534 - protein, 343 aa, unidentified
MDKVSGREGFFLNGVTIMVYLGIDVSKAKLHACLLNEPDPCKTKVVENNPPGIARLLAWAARHGAPTAQVHAVMEATGGYHEVAAHTLFEAGVTVSIVNPAQAKDFARGLAVRTKTDGVDSHVLARFGALLKPPAWQPPDPAVRELQALLARREAVAQDLRREQNRREKALATVTPLRVHQSINDAIAFLEKALAPLQQDIDQHIDRHPGLKADLALLTSIPAVGPQVGCQLLAILQSHAFVSAEQLAAYVGLVPVERQSGTSLVGRTRLSKAGPARVRAVRYMAAVVAIRYNPHVKALYERLVARGKAKKAALGAAMRKLVHLCFGVIKTRQPYQADYALSA

SEQ ID NO: 500535 - protein, 352 aa, unidentified
MIVLGADTHKRSHTIAAVAAVTGELRGEQTVAVGRRGFDALLRWARRLDGERVWALEDCRHVSGSLERFLIGRGERVLRIPTHLAANARRSARQRGKSDAIDALNVARAALREGLDAFPAAHLDGPELDLRLLVDHRERLIRHRVELNSTLLWHLHDLWPELMLPGGALFSRKWSTRVGRRLARAEQSMRVRIARDELRRLRELTLAVRGLEREITALVTSIAPQLLSEPGFGPLIAAKLVGEIAGAQRFATAAKLARAAGVAPIPASSGNTQRQRLDQGGNRQINAALHRVIVTRARCHQPTRDYIERRRGEGKSTRDAIRCLKRYLTRHVWRLLQPPHPIKGTTPHPSTS

SEQ ID NO: 500536 - protein, 438 aa, unidentified
MPTIAYVGLDVSQDDASVCFLLPDGKEPLPAWTIPNTQPGADALATRLAQLAQTYQIDQLRIGMEATGLLWWHLACALKDAPALAAFAPRIYALNPHLITTFRKNFGALPKTDCADAFLIAERLRFGRQLPSPFQLDARYAPLQRLTRFRCHLAQNLAREKSYFLSFLFLTFSTYGQIAPFGDPFGATSSAVLDEFTTEELAQQGLEELAAYLEAKGRGRFADPDALAATLQRAARDSYRLDKVLQQPLRLVLGTTLATIRTLQGQFKTLDKTIAQELAAIPQTLASVPGLGPVWTAGLIAELGDISRFDDEAAIAQFAGLTWEAKESGNFQAEDTALSKRGNSYLRYYLVEAANSVRIHCPEYAHYYAAKYAETPKHAHQRALILTARKLVRLIDVLLRDGKRYLPPSERPARHGSTTPHHARPAPQRRRKRAAAVE

SEQ ID NO: 500537 - protein, 366 aa, unidentified
MEVLVTRCAGLDVHKKSVMAAVRAPGPDGKRLQVVREFPTFTRNLVQLRNWLVSQGVTEVAMEATGVYWQPVWHVLEDMPGVELKLVNAEHVKNVPGRKTDVSDAAWLAQLLECGLLRGSFIPEPAMARLRDLTRYRKKLVEERAREVQRIQKLLETAGIKLDSVATDIVGKSSRRMLEALIAGERDPDALAELALTRMRAKLPALRLALEGRFSEHHALMARLYLDHSDHLSKAIDRLDAQVVSETAPFAQQIDRLCTIPGMGRRVAEVVIAEIGVDMSRFPTAGHLASWAGMCPGNHESAGKRRSGRARRGNDDLRTALCEAAWAASHTKDTYLSAQYRRFVARFGKSNGGETKAIFAVGHTCS

SEQ ID NO: 500538 - protein, 350 aa, unidentified
MRKHSKRKAGMQMETIGIDLGDKISRYCILDADGNEVEEGCFRNQISSLEKHFAGVRRRIALEAGAQSAWISRELKRLGHEVIVANARELKWITASDCKNDPVDARKLARLARADVKLLAPIEHRSAEQQTELALIRARDAVLRARTLLINSARGIAKGFGVRLPKSITLRFGARALATLPEFLKTALAGLLEQIDALSRQVSAYDQRIVALAERHPEIERLTSIPGVGTLTALTFVLTLGRAERFAHSRDVAGFLGLHPKQRQSGARDPQLGISKSGDPYLRKLLVQCSHHILGHWGPESALRRWGLAKAAGGKRASLRAIVAVARKLAVLLHRLWTTGDFYKPFPQSA

SEQ ID NO: 500539 - protein, 314 aa, unidentified
MEQIYIGVDVSKDTLDISAYPSKQIWQYKNIPKGIAKTVAKLKVLNPKLIVMEATGGLEKPLSEALHESGLPVAVINPRRIRDFGRAMGLLAKTDKLDAQAIAYFAAKIEPAPRPGADETSQKLERLVTRREQLSEMVTAEKNRLKQSKDELIRCQIKEHIAWLEFEIKGLERGLKENLKQNPAALAKFNLYRSMPGVGHILSYSLVAELGELGCLNQREIAALVGLAPFNRDSGHYRGKRTIWGGRARVRKALYMPVLAAIRCNAVIRSVYQRLIARGKLHKVALVACMHKMLTILNSMAKNNNPWRCAETMT

SEQ ID NO: 500540 - protein, 438 aa, unidentified
MADPNERCEPDFAAFIGIDWADQRHAWALQTTIKGAIEHGDLDHTPEAVDAWATELGRRFGGRPVAIALEQSRGALVFMLTKYAHFVLYPIHPTTLANYRLGFRPSGAKSDPSDAGLLLDLLVRHREKLRRLNPDTVETRTLQFLVEGRRKLVNDKTRYSNRLTACLKMYFPQVLDWFAEVSSKIAGDFLERWPTLPKLQKARLDTLRTFFIEHHSGRPESIQRRLEEIRRGVPATHDQAVIDSCVAAVTALVPLLRELRRAIQSYDEQIETTARQHADFVIFDSLPGAGAALVPRLIAALGTQRDRYSSASELQCYSGIAPVLASSGKQSWVHWRWACPKFVRQTFHEWAAHSIGSSAWASAYYTQQRAKGKTRNTAVRALAFKWIRILFRCWKDHTPYQEELYGQALARRATRTNGAVNVQWKTGEGLSKISGFIS

SEQ ID NO: 500541 - protein, 343 aa, unidentified
MKLHVIGIDLGKTVFHLVGLDSTGRAVIRKKCSRKQLLAFTANLEVELIGMESCSGSHFLGRALREQGHEVRLMPAQYVKPYVQTNKSDFLDAEAIAEAVQRPRMRFVPIKTEEQLDLQALHRVRERWVMRRTAVVNQIRSLLLERGLTLPKGRRYVDQQLPRILEDAELRLSGSFRVLLAQLKLELEQLGARIEEMDRVIQKTAKENEDCQRLTEIPGVGPVTATALIAAVGNASTFRKGRNLAAWMGIVPGEYTTGGKQKLLGISKRGNKYLRTLFIQGARSVLQQRDKQSPALSSWLAQLLVRAHQNVVIVALANKLVRMAWAVLCKNERYRAPVLAVAT

SEQ ID NO: 500542 - protein, 387 aa, unidentified
MQKPHDNSKARPAAFMQDNTLIAVIELSLSNWLVAGLIPGVSREPLKKLEPNPEDLLKLLHGWRDEAIKAGRPITRIAVAYETGRDSFWLARWLRERGIDAHVIHATSVTVSREHRRAKTDRLDTAMLKRGFLGWLRGERGHCTVAIVPTMEEEDAKRPHREREGLVHEQTRVVNRMKSALIQFGVRNFNPKLRKARVKLETVRTPEGKSLPPNTIAALRRDMERLKIIKEQIKAIEQARLQQFEQKPEALANRMVYLLVRIYGLGLETADLLAHELLSRTLRDRKAVARYAGLTGSPDESGSKRREKGLSRSGNARVRKIMIQLAWRMVKFQPDSALVQWFKQRTENAKGSRKPMIVALARKLIIALWRYANDGVIPEGFRLHSAA

SEQ ID NO: 500543 - protein, 330 aa, unidentified
MSQNNITNSNLNTIYAGVDVAKATLELHLGGVIYNLANETKDHTRILKLLAGAEKAQPGTKVHVILEATGGYEAALVCALHEAGQPVSVIQPSRVRHFAYAKNQRAKNDPIDARILSQFGEAIRPAPTAAPSTAQIHLGGLVTRRAQLVETRIGELNRAAHYSDKMLCRQSRGLLALLDRQIAACDKAIAAQIAADETMKARAQRVRQVAGVGPVVAAVLQAGIPELGTLTPCEAAALAGLAPYDCDSGPRKGTRRIWGGRASVRCALYMAAMTAIRHDPILKAFYIKLRTAGKKPMVALTAVMRKLVVLLNHLLKNPKFELASARAGTN

SEQ ID NO: 500544 - protein, 340 aa, unidentified
MKDTVIGVDLAKNIFQVHGASRAGEVMFRKKLRRQQFMQFMATQPPALVVLEACGSAHYWARELAGAGHEVRLIAPQYVKPFVKRQKNDAADAEAIVIAARQPEMRFVEPRTEAQQARGVLFRVRQRLVHQRTELVNALRAVLYEFGLVVPQGIAHIRHIEAMLDEAVLPEAVKQECLDLLRQISEQSVRIDVRTKKIRMLAQESENTCRLQSMPGVGPLTALAIEAFAPDLQCFRRGRDFAAWLGLVPRQFSSGGKERLGKISKAGQADIRRLLIMGAMTQVNWASRKAPAPGSWLARMLARKPRMLVAIALANRMARAIWAMATKQEDYRDPALSVAA

SEQ ID NO: 500545 - protein, 349 aa, unidentified
MVADELDYVIGVDTHLDEHVLAVIAAPSGVVVAQRSIHASARGYAAALRFAADKANGARVWAIEGTGSYGAGLARFLAGAGETVLEVSRTPRAERRLRGKDDALDATRTARAALASETLALPRSGQRREALRLLLVARRSAVDVRREALGQLRGVIVTAPDKLREELRGLPVGRLLDRCSRLRRSRSASADELATRLVLRSLARRIQAATLEAAELERELLGHIRALAPPLLEEPGVGPIVAAQLIVAWSHPGRLRSEAAFARLAGVAPVPASSGKTTRHRLSRGGDRQLNRALHTVVLHRRQHDPQTKDYIARRIAEGKSRRDATRLLKRYLARHLYRLLQQQAPQMT

SEQ ID NO: 500546 - protein, 306 aa, unidentified
MLDTTTFVGLDVHARSIKAVSLDVMTGEVRCATFGYDAGAVAEWVRSVDPGARCVYESGVTGFDLQKRLSGLGVDCVVGAVSKMIKPSADRRRKNDRNDAEFLARMLSVGNVVEVWVPDDECEAARDLTRALEDARDDLSRSKQRLSKFLLRHGLVFGERTPTGRRKGNWTRAHWSWIESIRFAEGADNDALAYYVDAVRRAAEEKARLEGLVEAEARKPRWRKRVDSLRCLKGVDTASAADLVFEAGEFSRFRNARSFAAWVGLTPSEHSSGESDRRGAITKAGNKHLRKTLVEAAWHYLTCSGC

SEQ ID NO: 500547 - protein, 373 aa, unidentified
MENSITYVAMDTHKKEHKIALHYPRHEEIVRFVVKNTARDIKRLVSKIKKQALADVKFCYEAGICGFTLKRRIEALGCECAVIAPSLTPQKPGDRIKTDRRDAAKLLAMFKAGLLTEVHAPNKKQEAGRDLTRCRQVAQENLKRVRHQLETFLTRHGYIYTDGIHWTQKHLYWLRSLEFEQSLLRDVFDSYFTEMQHCIQRLASLDKEVERLAESESYKEVVDFLRCFHGIDTLTAITIITEIFDFGRFSRPGELMSYLGLTSSENSSGQKERKGPITKTGNKRVRRLLVETSWHYRHPYSVSSILRQRRKDQPQWVIDIADRAGQRLRKRYWYLVNKGKMPCKATVAIARELTGFIWSVFGEYEVRNGKEAA

SEQ ID NO: 500548 - protein, 342 aa, unidentified
MQELFYVGLDLGSSLCYQSVIDADGTLCCSRSIPTSEQYLRSAFVNLSGDVRVHLEAGEISDWVAGVIAPLVQSVIISHPRSLAWIGKDSQKDDKIDARKLAELLRLNRVHQVFRQTDDLRRTFKYLVTHYEQLSREQARYKSKIKARLRTLGIIRKDSRLFSISGQSALLDEIESVAVKLMLTQSFAVLNQMLASLEQAKRAMIEAAKQFREVKLLQTAPGVGIITACRFVAYLQTPKRFSNKHKLWRYCRLGVTRRESNGKRLAHPKLDSAGVGSLKDVSRKVFEAARRTKTDNSFKQFYEQSLANTKNAVHARLSTQRKILAALRAMWIANQPFRNDLG

SEQ ID NO: 500549 - protein, 417 aa, unidentified
MNELRWFVGIDWARKSHCVCLLDSEGNRVRERDVSHEGTALNELCVWLEQTTGASPGEIAVAIETPRGPLVELLLERGFKVFALNPKQLDRFRDRFTVAGAKDDSRDAQVLGHSLHTDRAAFRHLSIDDPLVIQLREWVGMHEDLTQERTRLANRLRSQLWRYYPQAEELTQDVVDNWFLDLWELVPTPAEAERTSEKAVARILKAHRIRRLDAAQVLGVLRKPPLTVAPGTVEAATAHIRTLVARLRLVNQQLKESEQRLDQFCEAIEAAAEQTPGQICEQRDVAILRSCPGLGRINIATLLAEAGEPLQRRDYHVLRTLSGVAPVTRRSGRTHIVVRRHACNNRLRTAMYHWARVATQHDPVSSRRYKDLRRRGHSHARALRGVGDRLLQLLCMLLERQTLFDPDQRKHQALKAA

SEQ ID NO: 500550 - protein, 345 aa, unidentified
MSTIMIGLDLAKNVFQLHGVDGEGKVTMRRQLRRSQVEPFFAALGPCVVGMEACGGAHYWGRTLQRLGHEVRLMPAHYVKPYVKRNKTDGRDAEAICEAMSRPTMRFVSVKSEDAQAVLAMHRTRTLLVRQRTMAANALRATLAEFGIVAAQGNAGLRTLLEQVASQTCPIPAPAQTALSLLARQWEQVDAAVRELDRGIARVAREQAAAQRLMEIPGVGPLGATAVLAKVADVSVFRTARDFAAWLGLTPRESGTGGKQRSGGISKQGDCTLRQLLIMGARSRLNQVRVRGTDDRWLLDLLARRPAKVAVVALAAKMARIIWALLTTGQRYRANAHGVATAAAA

SEQ ID NO: 500551 - protein, 316 aa, unidentified
MTRIICGVDVASKSLEARIGQQGAAGSFANSPEGIAALGTFCQVHQVELVAMEATGGYEQQAFAQLSEQDLAVAILNPRAVRQFAQSMGSLEKTDGIDAGMIAWYAEVKKSPPLCLAPQSQQHLRALVTRLRQLTEVRTAQLNQQRLVTDRAVAASFRKVLAFLAKQIGALEQAIAALIEADPLWRELNQTFRSIKGVADRTVARLMAEMPEIGTLSNKTISKLAGVAPLANDSGQYQGKRRVRGGRPAVRQILFIVASVVGRHEPDFIAFQQRLRAAGKPPKVVRIALAHKLLVRLNAKAREVRQMLNPVSCPAT

SEQ ID NO: 500552 - protein, 379 aa, unidentified
MDFSTVALPPVSDKPATLFVALELSKATWLVALHSPSADKVSLHRLAGGDTQELLTLIARKRDQAQTALARPVHVMSCYEAGYDGFWLHRLLCASGIDNRVLDAASILVDRRSRRAKTDRLDAAALLRTLMALDRGEPRVCRVVRVPSPEHEDERRRSRERARLVNERGQHASRIKGLLMTQGIRDFAPTRRNWRERLAELRTADGRALAACLTAEIERECRRLWQVIGMIAEVEAEQVHAAEKAATGAVQLSRLRGIGLTSASILANEVFFRAFQNRREIAGYLGLASSPWNSGSVSRDQGLQRSGNPRARRTAIELAWLWLRHQPESDLARWFQERVGAGKGRIRRTMIVALARKLMVALWRYVTQGLVPEGAVIKG

SEQ ID NO: 500553 - protein, 346 aa, unidentified
MSVSRPAPQYHLYVGVDIAAKTLTAAWMAPGAAPSRPLTVDQTPQGFATLQERLLATGHGAATILVVMEATGSYWVGLATTLAQAGFKVSVVNAAQAHHFAKALLKRAKTDAIDAQTLTQLAARLEPTPWTPPPAIYTDLQQRLTQRDSLVTLRQQVRNQRHALQHLPVVIASVQERMEALIATFDAQIEAVEQEIEQVLAHDSSWATTATLLLSITGIGLLTAAWLLVTTLNFTICATAEEATAYAGLAPHPYESGTSVRGRAAIGHGGNGRLRTALYLATLSAAQHNPHIKPFYARLRAAGKPKKVARCAAARKLLHLAWAVATKGVAFDPLYQTHHACSGSST

SEQ ID NO: 500554 - protein, 464 aa, unidentified
MRQPSKTRKNKRSAVARNQDWSLGLAVVNSKAAGIDIGNEEHFVAVPPSMDPQPVRMFGCYTSELKRMATWLRSLGITTVAMQSTGVYWIAVADTLREQGMRVTVANGRDTKNLPGRKTDIQECQWLLKLHVYGLLKDSFVADEQLLAMRRYWRQRQQHIADASTAVQRMQKTLTQMNVQLRNAISDITGTTGISIIEAILSGERDPEKLAQFRDPRVKKSKRELAQALEGNWREELLFILQQEYETYCMYQCKAAECDAALERHLARLQQRADPAELPPCPRHKKPRSGDNVPSNFDLREELFRVSGADLTQIDGINVLTAQTILAEVGWDVSYWPTEGQFVSWLGLAPNHKISGGKIIGRDYRKVVSGAGQALRMCATTLLRSKTYLGAQYRRLRTKLGAPKAIKAMAARLARIVYRMLKFGLDYVDKGAHYYEQKYREQQIRQITKQARKLGLHIVAPKAA

SEQ ID NO: 500555 - protein, 335 aa, unidentified
MALYCGIDLHSNNHVVVVIDDEDRRILERRLGNDVTLTLRALEPYRSELAGVAVESTFNWYWLVDGLQAAGYPMRLVNTTAVQQYAGLKYTDDRYDAYWLAHLMRLGILPTGYIYPKEQRGIRDLLRRRMQLMQAASKQLISLQSQIWRQTGERISSSRLKQADFVVELPGAAQRLSAQSALLVYRAIHEQLELLESVLLQVVRPRSDYQLLITVPGIGAILGMTIALETGDIGRFPAVGHYASYCRCVKSEKVSNGKKKGEGNAKSGNKYLSWAFAEAAHFAVRYEPLAKRFFERKQRKTNGIVAIRSVAHKLARAVYYMLRDQVPFDAHKLFA

SEQ ID NO: 500556 - protein, 400 aa, unidentified
MRVIFGIDVSKASSEVAILVNGEKIHGYTIPNDAIGFNRLLGDLRTVYQPEIVFEATGVYSRRLQAFFEDNSYAYIRLNPLESKKQLDSLRVRKTDKIDAEKLATSQFILNRKPSYVQEALYQELRDLSRFYQNLTEDIVCSKNRLHKVLQVTFPELENILSSPTGKQYWNLVMAFPCNSFVLELDDAALRAIIRQSTSKRISEKRVTYLVDKLTKLANHSYCAVKKTSPMMEEVKYYAGELLRLSEYRQSVLEEMITLAQPLPEYEILLSIPGIAETTATSIIGELGDIRRFHSANQINAFIGIDLRHYESGNFLAKEHITKRGNPYARKILFKCIQNIASASHTNACHIADFYEKRKRQSQVTSTKPHTIASIHRLIRTMYYLITHNKLYDYTSTQNR

SEQ ID NO: 500557 - protein, 366 aa, unidentified
MITSYPCESTGIMFQSHVGTDLHKTVLTFATRDSSGQLINTASIDCKCVNKITDYITSLPRPIHCAIESVGMYEWLWEFLEPMVEKLTLADAVELKYRAGRRQAKTDKIDAKFISLLTYKNDLPVSFVPDKTTRQFRRVCRHWHATSEMLSDIKIRMRWILLQHNLKGPEHLNGNSARRWLKAHGHLMDSIAFFSFSQFLDTVEHIELQQLTIRRQMRQFSQLPQFKDDIELCCTVPGIAEILASIIVAEVAGFDRFDSAQAIACYTGLTERTQESSGKRSQGHVSCAGPSSLRWALCEAATTLVRSDPSYRGIYNHLIKNTGNKSKAKVAMARKLITWLWKMSQTREPFIRGGSTNHNRNANIAF

SEQ ID NO: 500558 - protein, 342 aa, unidentified
MSGMIIGLDLAKSVFQVHAVDAEGKVVISRKVRRSQMLEFFTRLEPCLVGMEACPSAHHWARELSALGHEVRLMIASYVKPYVKRQKNDMVDAEAICEAVTRPTMRFVPIKSESQQAILMVHKTRALLVRQRTMLVNALRGHLTEMGVVAPKGIRRHADLVERVLAHGADEIDLPPLVRDIVLSSARQIGSLNAEIKELERKILEWHRTSEASQRLATIPGVGVITASAMAASVVDPAAFRSGRDLAAWLGLTPRSNSSGGKERLGRITKAGNRYLRTLLVIGATAVVGFSRRTAEGPLMSWVRKLLQVKSARLTTVALANKMARICWAVMARKTVYGEAAA

SEQ ID NO: 500559 - protein, 444 aa, unidentified
MAMRKREDEVFPSAAGIDIGASSHWVAVPRQLAEGAGCEPVREVGAMTEDLNALAAWLVSLGVDTVAVESTGVYWIPVFEVLEQHGLKVWLVDARQLKYVPGRKSDVRDCQWLQKLMSLGLLRAAWRPSAEVCVLRAVARQRETLLTEQASWVQRMQKALVQMNIQLTEVLTDVMGVTGQAIVRDIVAGVRDPVQLARHRQRRVKASQAEIARALQGNWREEHLFVLGQSLALYDDIGRHLADCDARLDGLLDARARTEVALGKLPRAGSKTRVEHDVRQRLANWAGVDLTRINGLGVTVVMKLLTEIGPDVSRFASVKHFCSWLGLCPGTKISGGKVLSSGTKRSANRARQALKMAAQSLWRSESALGAFYRRLSARMDKPKANTAAAHKLARMVYFMLTRGEAFVDQGQQRYEEQQRQRSIAALKRRAAALGFQINPVGTAA

SEQ ID NO: 500560 - protein, 378 aa, unidentified
MIVHRVGVDLHSDNAVVVMIDDSERWVLKRKFKPDLSNILSALEPYKETIQDIGVEATYNWYWFVDGVEEAGYKVRLAHPPAIEGKSGKKRTNDFDDAANLAHLLRMNNFPDAYIYPKKDRPLRDLLRKRALLVKTRTQYLLSLINFFNRNLGIAMSGNEVKKLSDEDVEKMLANEYLVLSGKANISVMEHLKAEIGKLEKAILKEARLKPEFIRLLTVPGIGQVIALTICFEIGSLSRFKDVGNFVSYCRCVDSAQLSNEKKKGEKNRKSGNRYLCWAYIEAANFVRRWCPYAAAYYKHKLKESGKMVLATKALASKLSRATYYMLKNEEDYEPEKVFERFKAEAKALALIEKKGHGSKPRYVPGSGSPSQNQKPTA

SEQ ID NO: 500561 - protein, 400 aa, unidentified
MNAVGIDVSKGKSMVAVMHPFGKAVAAPFEVGHTESELKELARFLKSLPGETRVLMEYTGRYYEPIARYLHEAGVFVSVVNAILAHDYSGNTIRRAKTDRKDATKLANMAIDRWLDLKEYIPEDEIRHTLKICNRQYSQYSKLKTMLKNNLIALLDQTFPDVNRLFTSPARKSDGHEKWVDFALKFWHAECVCGISVKQFKDKYERWCKRSGYHYTQAKAEEIYARACDNVGLLPMCESTKMLITQAIIQLQAIEESLATVQSEMQRLSSSLPEYDTVLSLYGVGRVLGSQLIAEIGNVCRFESKKSLIAFAGIDAPPYQSGTLNVQSRSISKRGSALLRKTLFQVMSVILQNAPADEPVYSYLDKKRSEGKPYKVYMIAAANKFLRIYYARTKLALVNT

SEQ ID NO: 500562 - protein, 405 aa, unidentified
MTVLVGVDWGDGSHAVCVINSGGEVLDRFAVNHDRQGLGDLVRRLRKRQGEIRIAIERPSGLLVDTLVDAGFTVVPIHPNVVKACRPRYRAVSAKSDPGDAYILADILRTDGHRLRSLEPQSDAIKALRGLVRGRDDLVATRVAMANQLTAVLQSFWPAAATLFNDLTCRIALAFIERYPSPEAAARLGPKRLAGFLARHPYYGHKKPQALLAHLHTAPPGCAGKAESKAKAELVGALARTLQTLVAQIATIGSRIEHMIAELPDGRIIMSFPRAGRICAAQILAELGDVRQRFQTEQQFAGEAGLAPVTYQSGKSRVVAWRWACNKRLRVAFTCFAGNSRRQSPWAADIYKRARARGCDHPHATRILARAWARVLWRAWTDRQLYDPTKHAGAAAFLSSPQPSG

SEQ ID NO: 500563 - protein, 421 aa, unidentified
MYQLAGGPYTAYVGIDWADAKHDICVQAAGSEERYFDLIVHKPERIDAWAQALYQRFGGPVAVALELTKGPIVSALQKYDFFVIVPIDPIRLASYRKTFTPSGAKDDPTDAEFALDYMMRHPEKLKVLKPQSVPMRKLTYLVEARDRLKGDQSRFVNRLIQALKQYYPQPLDWFSERNTVVFCDFLIQWPTLQKVKRARKTKLETFFKAHNVRFAHVIEARIDAIKAATPLTHDEAVIQAHQLQVEALVEQLRLTIQAMKRFDTEIETTAEHLADYKLLFTPLPGAGKVLAPRLLAAFGEDRQRYPCAEELQQRTGIAPVTKRSGQSQWVHWRWQCSKFLRQTFIDWSAQTINKSAWAGAYYRQQRAKGSSHQAAVRALAFKWIRILYRCWQDRSPYDESKYLEALRRSGSPLLQQLAEAA

SEQ ID NO: 500564 - protein, 353 aa, unidentified
MSIISPCLGVDVAAKDVQVCFMVKTDTGHCKIKGSRSFANTVKGISSLEQWLKKRHQDGLILSVVMEATGVYYENLAYTLYESGHRIHVLLPNRVKGYMKFLNLKSKTDKIEAKALAQLGMNQQLPNWQPATPQMYALKRVCREKTMLTDEKTMISNRLHAEQSCKDPQKTIIKRLKQRLKLVDKQIDEVESQVRKMCTQDEQLNQRIENITTIKGVGFMTAITLIAETNGFELITHKSQLVSYAGYDVIERQSGSSVKGKTRISKKGNSHIRRCLHFPALSAVKYNDEFKALFTRVFDRTKIKMKGYVAVQRKLLVLVYTLYKKNQPYDPKYAQKQAQEQNCRQDTMPAYAG

SEQ ID NO: 500565 - protein, 464 aa, unidentified
MALVNIGVDLGVTAKHHAEIKNSEGIEVCSPVTFAGTKEGFDMVSEHVLKHVDEEAKLRFICEPTSMSWFPLAVYAKRNGHEIMRVKAQKSHDLRKYYSRHTKSDKLDAKALAMMPIVDREAIEEVYLPDKVTNALDRRCRQREKISKEIGSIKTRMKSLYHWVMPGLTDCFENPYGKRAKAFYKKYSNPFKVKHLGISRLHRVLEKAVRQQSSEGLAERVYEAAIRGCELYGHLGEYIDFDELQKEVECELQLLESHEKVQKEVDEAINRLYKQAHPTKNIETIPGIGETLGPVFFGIIGNSERFSSQSKARGYSGMIPRQKDSGESSKKGLNITKDGPSRYRRALYLASDTGRQWDPQLAKVYYDQMVHKGNCHNQAVCAVSTHLIGRIIRVLKDKRPYERRDLEGKPITKKEAKILIKRELTVPEETRKRTRSRRKTKGYKRNHIRGIAQKQSSRSAPYPS

SEQ ID NO: 500566 - protein, 346 aa, unidentified
MPIVGGLDIHRKQITFDYVDTVTGELERGRICPADRRHLADWLRRWPAADRVDVDLALEGCTGWRYVVEELARAGVQPHLAEPADTAGLRGRRRHAKTDRADAQHLRQLLGDGRLPECWIPPGHVIEARALLETYRDVRVEHTAWVQRIHAVLFHQGARQLVGDLGSAEGRLDLAVIAATQLSPAGQRQIKVAMDMLTATETQLTRLRHDLVTAARHLHGARVLTDRLYGVGPITGLALTCWLGGAGRFSSARQAVRFAGLDVTVYSSDGKRSPGRLSRQGPPVLRWCLYEAGKTHARTSAPDHAYYAQVQDRVDGKRAALSEARKLVRQACHILTELGDDALAII

SEQ ID NO: 500567 - protein, 354 aa, unidentified
MASMPPQLDPVSRVVVAGIDTHKDLHVAAVVDTDGVVLGTESCSTTRAGYRAMVRWMRTFGDVRKVGVEGTGSYGAGITRHLGEAGIEVLEVDRPDRADRRRRGKSDTLDAEAAALAALAGRRTSIPKRKDGLVESLRVLRLTRATAIRSRTKALQLLRMHVISAPEELRDQVRNLTRMQLLRTCACWRPDTIGFRDPVVATRIALKSLARRILELNDEIATLDELINPLVAELAPRLLARPCIGVEIAGQILVTLGDNPARIRTEAGFAMLCGVAPLPASSGKTQRHRLNRGGDRQANRALHMAAISRMRTDDKTKAYVARKTAEGHSKLEIIRCLIGGLSRSRLVGRAVASR

SEQ ID NO: 500568 - protein, 478 aa, unidentified
MAAKKKDARTGPDRTTADAAAEHGGEGAEVAEDRVQVVEYAAAIDVAKGSGMVCTRVPGSRPDRRRQTVWRVEATYAQVTALMDHLRCEGIQRLVLESTSDYWRIWFYLAEAAGLEVWLVNAREVKHLPGRGKSDRLDCVWHCKLNERGMLRRSFVPPEPVRDLRALTRTRARLAQDQARHQNRVEKILEDAQLKISVVISDLFGASGRRFLDALVAGERSPKALAALGDPRLKATRQQLEDALTGRFRDIHAFEISTHLRIIDAINEEITRLDGKIEEQLALVPRTAPACVACGLAGGGHAPGCADEQVPLLGLAARLDEITGIGECNARAIIAELGTDPSQFPTPGHAAAWARLTPRTRQSGETARPGRTGKGNRYIRGALGQAAMTAAKTDTRLGAMYRRIARKRGKQKAIVAVSRIICEIAWILICDPAARYHELGPDYYTPRSPARQTRDKIREIERLNPGKKVILADAAAAA

SEQ ID NO: 500569 - protein, 408 aa, unidentified
MSQNIIFGIDVSSRSSTVCVVIDRVKQGNPFTITNDSFGYQDLLDHLNQYLFTPLVVFEATGVYSLSLQAFLEDHHIKYLRLNPLQAKKLMDNNLRHNKTDKLDAYHLALIQFSAPQKLQAPQSREYHELQAASRYYEELTRALIVNKNQLHRNLQSTFPQIEHILSNPSGKIYWTIVSLFPHAQYVLDMNEDQVKQRLLSISGIGRQRAQYLTARLYAFARQAYPYDRKDGITVRAIQRTISNLLSLSNERDQVINYMEKLTKVVNARALTIYLSIPGIARTTALRLIAELGDLRRFNTSAQVDAFVGIDPGRSQSGDKDSRLGITKHGNHIARKILYRVITQMETVRATQPCHITDYYDKKKQSSHSPGYKKIAIASVHKLIRTLFALIKHNQLYDYNIATKNQRL

SEQ ID NO: 500570 - protein, 329 aa, unidentified
MIPNGRKGRVASPHVQGRGKSLMFVGIDVSKDRLDVHLRPSGEAFAVPRDSEGVEVLAGRLQELDPELVVLEATGGFETVVAAGLAAAGLPLAVVNPRQIRDFARAVGRLAKTDPLDAAVIAHFAEAVRPQSRPVPDEATRALGELVARRRQIVEMMVAERNRRRQMTQPKAIRTIERVLTTLQAQLSDIESEIDDAIRGTPAWRDKEDLLTSVPDIGPKIARTLIAELPELGHLDRRRLAALAGLAPFNRDSGKRCGRRTIAGGRGPVRAALFMAVLVSIRRNTPLAQTYHRLVQAGKPPKVAIVACMRKLLAILNAILREQNPWQTT

SEQ ID NO: 500571 - protein, 343 aa, unidentified
MTDPAPAYRLFVGIDIAAATFAAAWMPPGGAAPGSPVSHPQRPEGYTALQRQLAATGSVPAATLVVLEATGSYWVALAVTLHTAGYAVSVINPLQAHHFAKAQLRRAKTDPLDAQNLAQLAAALQPAVWTPPPAVYHEVRQRLTARDALVAMRQQTRNQRHALVQWPVVVASVQDHLDAVIAMLDARIADLEVEIATVLQASDWAESLACLTSAPGIGVLTAAWLLVSTMNFTLCATPEAATAYAGLAPMPHVSGTSVRGQARIGHGGHGRLRTALYMATLAAVRHNPELKTFYARLRAAGKPSKVARCAAARKLLHLAWALVTKQQRYQSNYRIVDPVVAAA

SEQ ID NO: 500572 - protein, 423 aa, unidentified
MQPQKSTACGIDIHKDFFVAAIVNRDGSAAIQKFEHTQDGLLALKSWVLSAHCPVVAMESTGNYWRPLHLTLEGYVELILANAYVIKRIPGRKTDAIDAQWIAELALNGLLSPSRVFPKDAREIRELTRARERLVDQCTKCKRVIHDVFDEACIKLSSVITDIFGKSGRFLIQGLLKGKTIDELIAGIPSKRVQKKERELKNAIKSGLSSSQVIVIEQNLQLIDRMTEQISQLDDEILCRMKDREDLQIAMSIPGIGTIAAVTILAELGDYRDFDSPDSLASWAGMVPSVYQSADKLRTGSITKHGSKHLRRILTEVAQAAARTKNTRFSAYFRKLKNRIGYPKAIIALARKILCILWHLLINREFYIDALNTRPNSQNLIQKTVTPQSIERSIDILVKAGYCIQKSENSKNIQRFQGAADPS

SEQ ID NO: 500573 - protein, 335 aa, unidentified
MTLYCGIDLHSNNQVIVVIDDKDKRLLEQRVPNELGATLSALEPFRKDLLAVAVESTYNWYWLVDGLGDHGYSTRLVNTAAVQQYSGLKYAGDRHDAYWLAHLMRLGILPTGYICPLEIRDVRDLLRKRLGLVRERARNLTSVQNILARELGHRVATAQLRRILDTDEHFRPGVRTAIAANLAVIETLDTVITGIQAQVLEVIKSTSRHRQLKTICGVGDVLAPTIALETGEIARFKSVGNYSSYCRVVDSRRESNDRKKGEGNKKCGNRYLAWAFSEAAHFAVRYNDRARRFFDRKAARRNRMVAIRAVAHKLARAAYFVQRDRVEFDAMKLFG

SEQ ID NO: 500574 - protein, 328 aa, unidentified
MRRFGTFTTDLDTLADWLMDCGVTTVAMESTGVYWMPLFELLEARGVQVLLIDPRQAKRAPGRPKTDRLDCQWRQRLHAYGLLAGAFRPDDQVCVLRSSLRHRQMLITSAAHHIQPMHKALQQMNLTLTQVVSDITGATGMAILKALIAGERDPVTLATLRNPHCQHDEDTIAKALQGTWRAEHLFALRQALALYEFYHQQIAQCDQQIKAHLETFGDTSEGQPLPPKARRHKKTNAPRFDARTSLSRMAGVDLTTIEGIEEGTALVILSEIGTDMSRWPSVKHFCRWLGLCPQHKISGGKVLSRRVHPGAHRVTVALRLAARSLHHS

SEQ ID NO: 500575 - protein, 348 aa, unidentified
MIVIGVDTHKRSHTLVAVDAATGGVLGERTVVASDDGALTALRVMTGLGDERVWAIEDCRHVSGRLERTLVAGGERVIRIPPALTANARRSAREPGKSDRIDALAIAHAAVREGLDRFPAAFLDEQAMEIRLLCDYRDQLVAERTRAINTLRWHLLALDPELEASLRPSGLQGPRIRARIARRLTKLGDGAQVTIAKGLLRRINEITRQELELRAQMHALIAAHSPQLLAEHGCGTITAAILIGHTAGAERFPTDASFARHSGTAPIPASSGNTTRHRLHRGGDRQLNRALHTIALSRARTDPLTRAYLDRRAAEGKTKLEALRCLKRHLARHFWRQLYRNPQIASPA

SEQ ID NO: 500576 - protein, 389 aa, unidentified
MNEPTHNKHTMKKELLFVGLDVHAKTVTLALAEGGGGEARLYGAIANDLHALEKVFGRLKKAHPDTELRVCYEAGPTGFVIARRCAQLRIPCTVVAPSLIPTRSGERIKTDRRDALKLARLHRAGELSAVHVPEASDEAMRDLCRARTDAVQDLRRGRAQLKAFLLRNGYRYTGKSAWSEAHRRYLRELVLPHPAQRVVLEDALGAITGAGERIGRLEEQMRALLASWPMKPVVEAVMGLRGFAVVGAMVLVSELGGAWRFAHPRQLMAYLGLVPTENTSCDKRRQGQITKAGNGHARWLLIEAAQHYRLSPKVSKELSVRQQGLSAEVKACSWKAQTRLHQRMLQLLARGKERNKVTVAVARELCGFVWHIFRLMAPRLTQSSTAGKP

SEQ ID NO: 500577 - protein, 347 aa, unidentified
MLHAGLDLSRKKLDVCLLSDRGEHIDQLAVPPDVDSLKTLARRIDEVHREPVCAVVESMTGARLVHDTLEAEGWDVEIADAQKVKGLAPLACKTDKIDSLVLAVLSHRDLVPAIWLPDPRVREERELARFRMHLVKHKSALKCRIHSTLINFGRPCPVTDLFGVEGRQLLARLDVPEPWRGNVTASIELIDDLERQIDQINRRLREGQADHPYVPLLLTVPGIGRVLAFTIAAEIGEIERFPSPQKFAGYTGLCPRVNQSGDKDRRGPLSKHGPTYLRWALLEATMHALRHPAYQERYQRTKKRLGKQRGAKVAQVDVARRLAHAIWHMLTRNQEFAPRGAAFRLAA

SEQ ID NO: 500578 - protein, 343 aa, unidentified
MGEVITIGLDIAKSVFQIHGVDGDGAVVIRKRVSRGKVLEFFADLSPCLVGIEACPTAHHWSRELQSLGHTVKLMPPSYVKAYLKRAKNDANDAAAICEAVTRPSMRFVATKSKEQQGALMLHRTRQLFVRQRTMLSNAIRGQLAEFGIIAPVGRLGFARLLEMMDGPEELGVPKTAWVCLMGLAEQYQRIQGEIGKLEQCIQAWHRSSELSRRLEEIPGVGPIVATALVGTITDPHAFASGRHMAAWIGLVPQQNSTGGKDRLGGITKQGNRYLRWLLVAGAMAVIRYAQKHGTAKRPWLARLIERKPTKVAAVALANKIARIAWVIMARGERYRGPAPLAA

SEQ ID NO: 500579 - protein, 342 aa, unidentified
MEYFAGLDVSVKETSVCIVDDTGRIVREVKVASEPEDLLRVLANPGYHFKRIGLEAGPLSQWLFSALADAGFPVICVETRHMRAVLKAQINKTDRNDARGVAQMMRAGLYRPVHVKTLRSQKLRMLLTHRKLLQSKAIAIDNDLRGTLRNFGLKVGIVGTVKFEARIKELVENLPDLAELVEPLLVVRRVLREQFVIQHRRLLAIVRDDEVCRRLMTVPGVGPVVSLTYRATVDVPARFRNSKAVGAVFGLTCAKHQSGEVEWSGRISRCGDEMMRVMLYEAAQSMLRSKKWSWLKAWAMQIARRRGMKKAIVALARRLAVIMHRIWVDGTEFRWTREVAAA

SEQ ID NO: 500580 - protein, 403 aa, unidentified
MNMNAVGIDVSKGKSMVAILRPYGEIISKPFEVKHTVSGIRSLIEQLQSIDGESRIVMEHTGRYYEPLVRELSKADLFVSAINPKLIKDFGDNSLRKVKSDKADAVKIARYTLDSWTELRQYSLMDEIRNQLKTMNRQFDFYMKHKTAMKNNLISILDQTYPGANTYFDSPAREDGSQKWVDFSATYWHVDCVRKLSLNAFIDHYQKWCKRRKYNFSRSKAVEIYEASKELVSILPKDDLTKLIIKQAVEQLNTASQTVEQLRTMMNEAASKLPEYPVVMAMKGVGKSLGPQLMAEIGDVSRFTHKGAITAFAGVDPGVNESGSYEQKSVPASKRGSSTLRKTLFQVMDVLIKTKPQDDPVYLFMDKKRAQGKPYYVYMTAGANKFLRIYYGRVKEYLSSLPE

SEQ ID NO: 500581 - protein, 321 aa, unidentified
MTYVGIDVSKATFVVAYSSAKSSETKTFKNTTKGIREFIRTISPEENHCVLEATGNYSMLLVYLLSKAGFTVSMENPLKIKNFARVMLSVVKTDEIDARLIALYGERMQPAPFKLRSDSLLLLKQKRTVLRQLKKQLTANRNLEGSLKILPFIDSKCKKVLEKTIKFLEKQIEEMEEELTSLAEIEYKKQMDLLTSIKGIGATLAAALIIATGGFTYFDNAKQLTRYLGLSPTYQQSGTSVNVKGHINRNGDAYLRSQLYIGAMASLRCNTECKACFDRLRSNGKPGKLAIIAVANKLIRQAFAVVTHEKKYIDGYKSVKP

SEQ ID NO: 500582 - protein, 376 aa, unidentified
MSTVRFLGLDVHAETIAVAVAEAGGEVRSMGEIPNRLESVRKLVHKLGPVQYLRACYEAGPTGYVLYWQLTQLGVACEVIAPSLVPTKAGDRVKTDRRDAEKLARCYRASELTAVWVPDAAHEALRDLVRAREAAKKDQLKARHRLGKFLLRHGRRPEGLKAWTKKYLEWIKTHVHFDQPALEVTLADYLEEVDHVAARIVRLEKAIDEAVQQAPPETRVVIEALQALRGVAQTTAATIVSELGSLSRFQSPRQLMGYSGLVARECSSGNRVQRGAITKTGNAHLRRVLVESAWAYQHRPNVTGFLLRRQKNLALSDEVKKIAWKAQQRLHKRYQALAVRGKNKNQIVTAIGRELLGFLWAIAVAAEKRDKLSQAI

SEQ ID NO: 500583 - protein, 342 aa, unidentified
MKFYCGIDLSARDCQVCVMDEQLKIVIEQKLRNELTKICQLLEPYKANLKIVVESTFNWYWLIDGLQAEGFDVVLAHTLGLYLITGAKVKTDRRDAYSLAKLLLVGAVPAAYIYPVETRPVRDLLRRRMHLVQVRAGEYGSLRRLLLRQGILSSKQQEIKTATEAELEQWFEHPLVRLHASQELQRIALYSQQIAELEKTILALAQTEQSYELLLKLPGVGQTIALTILYEVGELRRFANVKVFSSYCRVIPGIAQSGNVTRRGRASKQGNHYLKAAFSQAAVHAVRCYPKVRRYYERQLKRHQGRGRQMICYNIIAHKLAQAAFHVLKEQTEYREELLFGR

SEQ ID NO: 500584 - protein, 406 aa, unidentified
MISKLFAGIDISSKDAVLCCMDQDGHQLGPSRSFTNDFDGANQIFDVISDFKTAEVHVGFEATSVYGAHLRDFLISSGGISHGWFVYEVNPALVAGFKKSFPKKPKTDHFDSWLIAERIRFGRLQPYSHQQKLTEPLLQLTRHRLHLIELVTAEQNRAGNMMFLKFSNYRRDNPFSNTFGKASLALLRDFSPDELANMDTQELANFIANNGNNRLKDIEGMAAEIQAMAKKAFRLSPKMKNSIDVTLSMTLHNIEFFKSQVKKLDKAIAQEISAIPQTLTTIPGIGPVWGAGILAEVGDITRFRNEAALAQYAGLTWSRYQSGDFDAEDRRLTKHGNRYLRYYLVEAANSLRVHNEEYKAYYQTKYKEVTKHQHKRALVLTARKFVRLVYALLSKGQIYKPEVMKN

SEQ ID NO: 500585 - protein, 375 aa, unidentified
MEHHTEAFVALDTAKLRNAVAIADAGRNGEIRYLGEFDNTEAATRKLVTKLASKHARLTFCYEAGPTGYGLYRLIKSIGHDCIVVAPSLIPSKPGDRVKTNRRDAVNLAKLLRAGELTAVWVPDERHEAMRDLVRARDAAVKDYKIKRQNVSSLLLRLGRHYPSKKNWGRAHINWLTSLKLEHREQRIAFEEMLLAVRQVRERIELLEQAMREAVADWTLAPVIEAVQAMRGIDMVGAIAFLAELGDLSRFENPHQLMAYLGLTPSERSTGQSVKRGGITKAGNTRARRLLIEAAWSYRFPPRVSKDMQIRIGAAPRTAREIAWKAQMRLCGRFRTLTRKGKRPTIVVTAIARELSAFIWAINREIVGSHATANQ

SEQ ID NO: 500586 - protein, 379 aa, unidentified
MQPINTVNPTIYLAIELSASTWLIAARLPGSEKPHLHRIEGGDTAALFALISSLRARVARRLDAAIGVVCCFEAGRDGFWLHRLLTAHGVANYVLEPTSILINRRARRAKTDRLDAIGMLRVLAAYLRGDRQSCSMVRVPTPEDEDAKRIHRERENLVQEKLRIENRIEALLFTQGIRKRPSLRSWERDLAVLRTGDGREMPRHLRAELDRLRRRLVTILELIREVEAERDEVVTTNPEHQTSRKIVALCRIRGLGENFAGVLTREVFYRSFDNRRQIASYVGITPMPYQSGSMDRDRRISRAGNPRARTTMIQLAWLWLRYQPGSELAEWFRKRVGTLAGRTPIVAMARKLLIALWRYVETGVLPAGAEIRPESVAAA

SEQ ID NO: 500587 - protein, 359 aa, unidentified
MREYISFDSHKHYTLAEREDVETGRTRQCRIAHARGAIREYLRRCEPGTPVAVEATANWYWIAEEIEEARLKPLLVHPRKAKLMMGLINKTDKLDVHGLNRLQRNRTLPTVWIPPAELRDLRELTRVRMVLARHRTRMKNRIQATLSKYGLVVEGFSDPHGKRARAEMNRQIARLPPQARYVTETLCAQLDFVERQIHEQEQRLKGLVPITPEIQLLMSLPGIGVILGAVCALEIGEVGRFPSAGHLAAYAGTTPRVHSSGDKTRYGGLRPDVNRYLRWAFIEAGHSVALNCERRSERHVSRLYRRLRARRGHYKAVGAVARHLAEAAYYVLSKKEPYRDPPLHTEGGQALAQGRTREA

SEQ ID NO: 500588 - protein, 399 aa, unidentified
MKKNLPLELRVGVDVGCHSHNVAIGLSTGEILEEFSIAHEPEGFRQFFSRIEKNERNYGCPVAVAMEGYNGYARPLDTLVRTRNYRLFNINNLKLARFKEIFPGAAKTDDIDARKALELFQLRDHLPIAKDVLQEVKATPQENDILKRISRRRRRLVNERVRVLNNLQADLQSVCPGLLEITGEAGNLWFLRFLTSTDDLRKLTRLRETTIRKIPGIGAKYTSIILKWQQAAEFSHETEWVSDMIQQDAERVLALHDQIETLETQMAEMAANSNIAQLLTTMPGFGPITTAELAGEIGTIERFESESSLALYLGMSNLDNSSGKHKGSKAPKQVNERAKAAMMIAVDRHRKPVAQSQKFYEKKRAEGKKHNQAVRALGRHLCRVIFKMLKENRGYFFTQ

SEQ ID NO: 500589 - protein, 402 aa, unidentified
MNAVGIDVSKGKSMVAIMRPFGEIVSAPFEIKHTASDINSLVELINSVEGESRIVMEHTGRYYEVLAHQLSEANLFVSAINPKLIKDFDNDSLRKVKSDKADAVKIARYALDKWQNLKQYSVMDELRNQLKTMNRQFSFYMKHKTAMKNNLIGILDQTYPGVNTYFDSPARSDGSQKWVDFASTYWHVDCVRKMSLNSFIDHYQNWCKRKKYNFSQSKAEEIYGKAKELVPVLSKDAITKLIIKQAVDQLNSASTTVESLRTLMNETASKLPEYPVVMAMKGVGTSLGPQLIAEIGDVSRFTHKSAITAFAGVDPGVNESGSYEQKSVPTSKRGSSDLRKTLFQVMDVLIKTHPQDDPVYQFLDKKRAQGKPYYVYMTAGANKFLRIYYGRVKEYLSSLPES

SEQ ID NO: 500590 - protein, 353 aa, unidentified
MTSLTDLREVVDVVIGVDTHVLTHSAAVVDARTGGVLGEVTVEATADGYTQLQAFADEHAPLRAWAIEGTGGHGAGLARHLARREEIVVELDRPERARRRNGAKSDPLDAIRAAREALSRARLGTPRGGGDRQALSVLLAARRSAVEAGTEAQRQLFSLVIAAPEPIRARFRGLKLPSMLRVAAALRVSPSWDTETTVTVTTLRSLARRARALAQEAAEHEKNILAIVRSWRPDLLEQPGIGPIVAATVLCAWSHPGRIHSEAAFAMLAGAAPIPANSGQVTTRHRLNRYGDRQLNRALNTIALSRIRYDRATRDYVTRRTTEGKTSREIKRCLKRHIARDLFRTLEHPPATT

SEQ ID NO: 500591 - protein, 411 aa, unidentified
MNYNVAGIDVHKKVLMVVVTDATAEELTFEGRRFGTTASEREHLVAWLQERGVQEIVMESTAQYWKPIWLDLEPHFGQLRLAQAHSNRAPKGRKHDFADAQRLTRRLIAGELILSFVPGSEQRSWRTITRAKVQLVRDRVRLQSQLEALLEETRIKLSSVISELLGLSGRRILRALAEGESDPAELAKLGDFRLKCSTEELTDALRGQWQPLHRQMLKLFLERLDLLDRQRQQLDQMAAAAMQPYEDAVIRLAEAPGFGPDSAHQVIAEVGAQAQSFDSAAQFASWAGVCPGREESAEHNHSSRSPKGNKFLRRILTQAAQAAVKKKGSHFQIVFRRWIPKLGYQAAIWAIAHKLARLVWKILHDQVHYIERGHQSDPKVQRRRANKMVQALRRMGYKVEISFLNPQPAQG

SEQ ID NO: 500592 - protein, 318 aa, unidentified
MEQQSQWVGIDVSKANLDVYLRPSAQQVQVKNQASGIVELIQKLQLFKIQQVVLEATGGLELEVAQALQGQGFAIAIINPRHARDFAKASGKLAKTDRIDAAVLAHFGEAMRPAITVLASAHEQALQEAVTRRRQLVEMLTAEKNRQSSLRGKMRQNVDEHVAWLEQRIRALDDEIEQLSQVHAHWRARMALLTSVPGIGKVIATTLVADLPELGKVSDKRISALVGVAPINRDSGKYRGTRTIWGGRANVRAALYMGALVAVQHNPVLKVFYARLVSQGKAKKAALTACMHKLLRILNAMIRDGKPWQPPTLATEKN

SEQ ID NO: 500593 - protein, 371 aa, unidentified
MKYVGLDWAYRTAQWCALDPGGEIAGEGRFAADRDGLARLVLELGDEVTACLEMMSGALWARDELVACGWQVQVADARKVKTVAPLAAKTDKVDARLLAELSRRQLVPALWLPSLDERALRERLRRRMHLVRLRTSAKGRIFGLQTQWGIRISLRRLRRADGMTLLERAGMPAVWRHSINGMTLLERAGMPAVWRHSISECLALIDFLDARIVPLDAELRPFAQADPRAVLLDTIPGVGELLALTIAVEIGEISRFAGPQKLVSYGRLAPRVRQSGEGRPHTGPLNKSGSRLLGWAAVEAAQQAWRESNPWHQLYLDVSRRSRNHNSAKAAVARKILIAAWHMLSRNEPFKPAPRTGATSVPASSRLALAA

SEQ ID NO: 500594 - protein, 353 aa, unidentified
MERYIGMDVHAASCTLAVISEKGRKLRDFPVETNGQALVEAVRMIPGHKHLVLEEGLQSAWLYETLSPHVDELVVAGIMQSRGPKSDKRDAYGLAEKLRVGNLDKSVFKAPRQFTRLREFSRIHMTLVGDVVRTQSRIKSLYRSRGILVSGANVYGVRHREEWQQRLCSSAQARAARLYDHLDFLLEQKKQAEADLLREAKKHPIVRVLETTPGFGPIRAARLVPIVVTPHRFRTKRQFWSYCGLGIVTRSSSDWVQAADGGWIQARVPQTRGLSRQHNRVLKSLFKGAATTVITQRNKDPIYARYERLLDGGTKPTLAKLSLARMIAATVLRMWKDEKEYDPRRGDPSAATR

SEQ ID NO: 500595 - protein, 417 aa, unidentified
MQDDFQWYVGIDWAAEKYDVCVLDAGGKTIAKRVVPHSGVGIAGLLDWLQRLAGGTPEAVAVAIETPRGAVVEGLVERKFAVFAINPKQLDRFRDRYTAAGAKDDSRDALVLGDSVRTDQACFHRVRLDNAQQFRLRELSRIEEELQVQENRLSNQLWEQLHRYYPQMLALSPGADEAWLWDLLEMAPHPIEAGKLKLVEVEGLLRRYRIRRLSAEQVLEIVREPALRLAPGAAEAASEHVLLLLPLLRSLHQQRSQVGKRIQRMLEEMSADGGKEETTTKHSDAAILLSLPGVGQCVGATMLAEASQPLAERDYHALRCYGGSAPVTRQSGKRKVVVMRQGCSERLRNALYYWSFGSIQTDDWARGYYADLRARGHTHGGALRVLGDRWLAVLIAMLKTGTLYDSKRKAAVQAKAS

SEQ ID NO: 500596 - protein, 355 aa, unidentified
MNDTKYIGMDVHTATISAAVRDSSGNLVMEATLETKAETILEFVHGLRGSLHVSFEEGTCAAWLHDLLKPHVTEVLVCDSRKNALLRVGNKNDREDARKLSELLFLNKLHPVYHGETGIRTLKELARSYLTITRDLTRVMNRLKAIYRGWGIACAGQQVYAPRYRAEWLAKITEAGVRRRAEIYYQQFDALAALRQEVRRELLAEARKHPAMRLLRQIPSIGPIRAALLIALMQTPHRFRTKRQLWAYCGLALRTYDSGEYRFVGGQLKRSKKAVTIRGLNKNHNHDLKNIFKGAATRAAATAGPLQNFYEARIANGMKPPMARLTLARKIAAITLLVWKKGVRFDAEQLKQQAA

SEQ ID NO: 500597 - protein, 375 aa, unidentified
MEHHSEAFVALDTAKLRNAVAIADAGRNGEVRYLGEFDNTEAATRKLVAKLASKHARLTFCYEAGPTGYGLYRLIKSIGHDCIVVAPSLIPSKPGDRVKTNRRDAVNLVKLLRAGELTAVWVPDERHEAMRDLVRARDAAVKDYKIKRQNVSSLLLRLGRHYPGKKTWGRTHINWLTGLKLEHREQRIAFEEMLLAVRQVRERIERLEQAMREAVADWTLAPVIEAVQAMRGIDMVGAIAFLAELGDLSRFENPRQLMAYLGLTPSERSTGESVKRGGITKAGNTRARRLLIEAAWSYRFPPRVSKDMQTRIGAAPQTAREIAWKAQMRLCGRFRTLTRKGKRPTIVVTAIARELSAFIWAINREVVGSHATANR

SEQ ID NO: 500598 - protein, 418 aa, unidentified
MKEVYRRCCGMDVHQQTVVVCVLPPVGSEGKLIRKVYGTFRNDLIRMRVWLKQLKVTEIAMESTGVYWRPIWNVLEEHGFQRLLLVNPLQVKALQGRKSDGRDCQRIAEFLQDNRLDGSFIPPPEIRQLRLMLRHRVALLEQRNEVHNQIRDLFETVGIKLSSVMTDLMGVSGRGIIEALIAGIDSPELLSWKVRGRLRKKEKLVRESLKGYFNEFHRTMLQSYYEHYQFLTRQIAWLEVKVEEHMHPYAELVALLMTIPGVDRIVAWTLIAELGTDPSVFPDAAHCASWAGVVPGEDESAGKQRSRRCRKGNKTLRRILTQAAWAASHCKHGYLRALFYRIKARRGWGKAILAVGHKILLIAYGIIKDRVPYRDLGDDYFDKLNPARTVKRLVHRLERMGLEVQVSEVRSDASTPNL

SEQ ID NO: 500599 - protein, 344 aa, unidentified
MDHFAGLDISVKETSVCVVDDTGKIVREVKVASEPEALLAVLKNPAYRFKRIGLEAGPLSQWLFSALAEAGLPMVCVETRHMQAVLKAQINKTDRNDARGIAQMMRVGIYRPVHVKTLRSQKLRMLLTHRKLLQSKAIAIENDLRGTLRNFGLKVGIVGKVRFEARIKELVENIPDLAVLVEPLLLVRRTLREQTIVLHRRLLAVVREDEVCRRLMTIPGVGPVVALTYRATVDVPARFRKSKAVGAVFGLTCSKYQSGEIDRTGRISRCGDEMMRVMLYEAAQSMLHSKKWSWLKAWAMQIARRRGMKKAIVALARRMAVIMHRIWIDGTEFRWTREQPAAAA

SEQ ID NO: 500600 - protein, 407 aa, unidentified
MTKVIIGVDPHKLSATIEVVDGHEKLLGSGRFSTDQAGYTAMRRYAKTWPNRVWAIEGSNGAGRPLAQRLLEAGEHVVDVPAKLAARVRLFDTGHNRKTDARDAHSIAIVAVRTKDLRVLRADGELEALRMLCDRREELTRLRVQTVNRLQRLLAELVPGQAKKDLTALQAKAILATVRPRDIAGRTRRRIAAEELADLVAVEAKMKKATAELKVLVKARGTRLMDLRGVGPVVAARTLADVGDIARFADRNRFASWTGTAPLDASSGEQNRHRLSRAGNRRMNHMIHIAAISQIRLDTEGRAYYRRKLAAGKTRMEALRCLKRRISDVLYRQLVADAQRAATADSPDTVEAGPGGHCGATQESSAADLPPHIDTSDKPLPGPANPTLQASRPVRKSPPRKSPQTTG

SEQ ID NO: 500601 - protein, 437 aa, unidentified
MSEEKSKELRVSVDVGYRRHSVAIGLPSGEVLEEFEIEHRLEGFQDFFSRIEKHNPEQSYSVAVAMEGYNGYARPLDSMVRQLGYRLYNINNLKLARFKEIFPGSAKSDRIDARKGLELFQLRDHLPLAKEVLQEVSGTPQHNEVLKRLTRRRRRLVNERVRVVNNLQADLQSVCPGLLEITSEASNQWFLNFLLSADTLPQLARLRKVTLLKIPAVGRKYASLIEAWQKRAHFGAEVEWVSEMIQEDAQRSLDLEDKIKALETKIKQVAKDSKIAKILLSIPGFGPVCTSELAGEIGTIERFSKEGSLALYLGMSTLDNSSGKYQGSKAPKHVNTRAKAAMMIALDRHRKYVPQSQRYYEKKRSEGKKHNQAVRALGGHLCRIIYKMLKEEREYEIRPEKGNTKTKVGSRSSLKTQIRKPKISDKGKNNKIYHQGA

SEQ ID NO: 500602 - protein, 322 aa, unidentified
MHESGEVLRVLQIKHTIAGFRELDQARQSLGVEQPEIWIGLETAHNLLVDYLWDQGYAQIYILPPNAVKSSQKRFRQSGAKDDPWDARLIADMLRTDHNRYTPWKPDCSLTRQIRAEVRFATQLGQQVVRDGNRLRSVLLRYYPAATEAFSHLAGLVSLAFVQAYPTPQQAESLSFEELKTFLRQHHHTQPRFWATTYARLHNDHPRPNPEVQAAYLPLALAQARILEQLVRSHKESLARLGKLYLQHPDHEIYDSLPRAGALLGPALLAKLGDDRGRYPTPAVLQAVAGTCPVTNRSGKYSRIYFRTACDHDFRHIVQQWA

SEQ ID NO: 500603 - protein, 412 aa, unidentified
MRVVHERCCGLDIHKKFVVACLLATESDGTVHKEVRTYSAMTNDLLALADWLRGEDCGPVVMESTGSYWRPVFNLLEEQCEVLVVNAYHVKAVPGRKTDVKDAEWLADLLRHGLLRASFIPAPTQRHLRDLTRYRIHLVDERARLINRLQTVLEDANIKLASVVSDVRGLSAREILQRLLEGETDAQALAELARGKLRAKRDALAQAVVGRLQEHHVFLLREQLAHLDYLDAAIARLDAELAARLAAEQEALALVQTIPGVARRTAEVLVAEIGTDLTRFPSAEHLASWAGMCPGNAESGGRRLSGRTRRGNAWVRRTLAEVANVVSRMKGTYLAAQYRRIAARRGKGRAVLAVGHSVLVAFYHMLTRHQAYRELGADYFDDRQRDQVQRRLVHRLERLGYAVTLEALTTSS

SEQ ID NO: 500604 - protein, 409 aa, unidentified
MDIMYERCCGLDVHKQTVVACVLLPGSGRQPAKEIRTFGTMTAELLELGDWLAEKGVTQVALESTGVYWHPLWNLLEGQVELLLVNAQHIKQVPGRKTDVRDCEWIANLLRHGLLRASFVPERPQRELRELTRYRTTLIRERAAEINRIQKTLEGANIKLGDVASDILGVSARRMLEALIGGATDPVVLADLAKDKLRKKIPQLQQALKGQFGAHHRFLLAQQLAHLDGLDELIDQLGSEIAERVQPVEHVVERVDAIPGFGRRTAEIVIAEIGTDLSRFPSFKHLASWVGLCPGNNESAGKRMSGKTRKGDVWLRSALIEAAHAASRSKDTYLAAYYHRIAARRGKKKAIVALAHTLLTIIYYLLTRDCDYKDLGPEYLNEHDREQTERRLIRRLQGFGYTVTRETAA

SEQ ID NO: 500605 - protein, 448 aa, unidentified
MITGPPSQDLPKRKDQVWAGVDAGKGAHWAALVDETGATLWSKKVDNDESAILTALGEILDLADRVHWAVDISGTSSALLLALLAAHGQRAVYVPGRTVNRMSGAYRGEAKTDARDAYVIAETSRHRNDFATIDVPAQLAADLALLTAHRSGLVADRVRMINRLRDVLTGIFPALERAFDYSAHKGALVLLTGYQTPAVIRRRGRARLTAWLANRSVRGADAVAATALEAAQAQQTALPGEDVAAQIVADLATQILDLDDRLKRIDKQVCETFRSHPQAEIIESLPGMGPILGAEFVVAAGDLSAYADAGHLASAAGLVPVPRDSGRRTGNLHRPKRYSRRLRRVFYMSAQTSIIREGPNRDFYLKKRGSSATGSRAFLRPWEPSGLARLSRRAWFTCCAIRSVTPPVRTGTRSPRHSSLSTLHPARTRRRSGSWSSRNPGAGSIRRS

SEQ ID NO: 500606 - protein, 368 aa, unidentified
MKKNNSKKQMASKGEKETKQDFAFYVGIDLGDKNSDVCVLDPRGEVSKEFRLRMKEDAFRKYFASIPRSRVSIEAGGQSRWVAEAIEKCGHEVYVSNTRKVPYIHQSDAKDDRGDAYKLAELVHFKPQLLHPIQHRSREAQADLSWIRAREVLVESRTQLINAVRGLSKAFAGRLEKCSTESFTAKLAGQVPEEIRGAVAPLLETIDHLNEQIRYYDQMEEHIARERYPKYRLLEQVNGVGVHTALSFMLTIGDAERFEKSREVGSFLGMRPRKQESGESKPQLGITKAGDGYLRKTLVNCAHYILGPMGQDSDLRRFGQRICERGGKNARKRAVIAVARKLGVLLHCLWVSGEVYEPLRNSKRAKAA

SEQ ID NO: 500607 - protein, 438 aa, unidentified
MYIPTDILAVGIDPAKIEHQGVALMYPEVLVFKKRFKNTIEEISAFDNEVIAIAKEHNLKVVYGLEDSGIYGKGLKDVLTSRGHEILEVNPVKTNRQRDFYGEDNSDEIAAKAIAAIVLRSKEKLPKVKRGDETINTIREVSRERGRLVKNKVQNINRLHFFLTKVYLSSYKEFFKNLDGKVALEFFSSFPIPQALKDLTEEGLSEFFYACCKKRFRKRAKKILNAVGVLREKECLPQDKYLGSVIKGLAMMIKDAKEVIEGCERYLEQLLLRLPSKLTTFKGMDVVLASVIIGETRDISRFKDRNAYAKYNGTGATQDSSGKRKKWIATKWCNRRLKVAFYQLSLSSLRLSPISKWYYKGLIKRGLNKQEALKRLSRRLSDIIFAMLRDNSKYDPSRFLKREGQGGNCKENSYTVKEPCITPLANYNLNEKFFKKRC

SEQ ID NO: 500608 - protein, 351 aa, unidentified
MKSINKQIQSEELFAGIDLHKHRWHVTIRTADVEIFSNSIAGRWQELKKVLNRYKGCRIHAVYEAGFLGFWLFDHLTQYGVDCIVTPPSLIPQEHGNRVKTDRLDSRKLARLLAKGLLKGIWVPSAKERFHRQVIRRRRQLVGDRVRTQNRIKSELCFYGIDLPTPRGPWTQVYFANLQRIKFNNRWMQQSFNRLLEQYEFLSAQIDKQTQLLKQLSQLALYRDRVKILCSIPGIGLLTAMEILLELQDFTRFRRAEQLAAYVGLTPSQYSSADKIRMGRITGAGKNTVRSALVESCWQLIRKDKAMRKKYEQIKARAGGKRAIVAISRKLILCIRRLLIDNRPYEYEPIS

SEQ ID NO: 500609 - protein, 319 aa, unidentified
MSARGKRLSVVRIDNSPSALAEAVVAAGDHPQVVLEATYGWYWAVDVLQELGATVHLANPNALNWGERRVKNDVVDATDLADMLRLGRLPEAWIAPPALRELREVVRYRAKLVQLRSGLKAQVHAVMAKEGVLPTVLDMFGPGGQVQLDQMGLGRNYRVRVESLRDLIEVYDREVAMLERDIHRHLRHHSGYQAVQAINGVGRTIAAIFVAEIGDVTRFPTPRHLCSWAGLTPGRRESDVKGHDQGITKHGSKLLRWSLIEGISRYHGGPHLTPTFHRLAERRGKNKARVAIARRVLTLAYYGLRDGEIRCLTQPVEAA

SEQ ID NO: 500610 - protein, 352 aa, unidentified
MDITTAGADLAKNVITVCAQDRSGRTMERRDLRRDAFLAWLRRLPAGCIVGMEACSASHYWAREMGAIGLQPRIMAAEFVQPYRKSRAGKNDRNDAEAIAIAVRDPNMRFVAVKSVEQQARLARHRVREGWKEERTALGNRIRGLLGEFGLVIPKSRAALAKALVEALHDERVPEPVRELVRATREHLDLLGKRIADCDRAIGLACRGDPAAKRLQEMFGVGPTSADAVVATAGDARAFRNGRQFAAWLGLTPRQFSSGGKTRLGAITRRGDAYLRTLLVQGARSALKAAQRCAPERASRLQQWIVQLHARVGFQKTLVAIANKNARVIWALLAREETYNPEAWKAYAPAKG

SEQ ID NO: 500611 - protein, 338 aa, unidentified
MIVIGVDVHKQSVTAVAVDEAGRMLDEKTIAVGSDKLIGWAAGLADERLWAVEDCRQLTRWLERQLRNLGEELVRVPPKLMAPERRAGRARGKSDPIDALAVARAALREPDLSRPRPEEAVFRDLKLLVDHRDDLVDERRRTQQRLRWHLHQLDPTFAVPLRMLGRSSHLERVSRWLARQEQELQVRLARELVIRIRSLTRAITELDQELEQRTAQTAPTLLELPGCGAVTAAKLLAEIGPIDRFKTDAQLARHSGVAPLEASSGRVQRHRLDRGGNRQLNSALYRIAITQARYHPGARAYLERKQAEGKSRREAIRCLKRLLVRTVFNTLKASPALT

SEQ ID NO: 500612 - protein, 357 aa, unidentified
MPIVGGLDIHREQITFDYLDTVTGQVRRGQIAPADRAHLRAWLARFADREDVAFAVEGCAGWRYVAEELAAAGATAHLAGPADTAAARGRKRHAKTDKTDSRHLRMLLAEGRLPECWIPPGHILGCRALLETYHDLRREHTAWVQRIHAVLFHQGAPALGAGTLRTGRGVAALRAAAAHLSPAGQLQVATALEVIEALEARMHVVRHQLLDAARHLTGAKVLAARLYGVGPFAALAMTCWLAGADRFSSSRQAVRFAGLDITVSSPDRKGPPGRLSRQGPPVLRGALYEAGKTHARSSAPGHRCYATVKDRCNGKRAALSEARKIVRQACHILAELGDDALAPVAGDPPFQDMVTSS

SEQ ID NO: 500613 - protein, 341 aa, unidentified
MKKLFVGIDFSKEKIDVAIIFAEGLTETSMRLFNEFKNSVSGYKQLVKWVEESSNETEPSLWLFCGENTGDYSKPLCNFLYGRGFDMWLENAKSIKDASGIRRLKSDRTDANMIAEYAMRNNDKAIVYEPLSESLSQLRELFLYRQMVVRHRCSFQVRRGEKRLNMEKSPVKTMISQSGRHIVTELNKEIEKIDKRIAELIDSDEELAQVFTIVTSIPGIGTQNAVCLMVYTDNFRRFNFDSRKIACYYGIAPFGRDSGTSVHSDPHVHYMANRQIKAMLSQAALSAAKFNPVIASYYSRLIERGKKRQIVLNNVKNKLVHIVTAMVRNKQLFDKDYKISA

SEQ ID NO: 500614 - protein, 412 aa, unidentified
MLFIGDDWAEGHHDVVAQDDAGKTLARRRLPEGTDGIARFHELVASCLGEDAEPDPARVIVVIETDRGPWVKALAAAGYRVYPANPKQAARHKETITMSGKKDDFFDAGALADMGRTRRHQLRELAADSDIAEAVKIAARAHQKLVWERTRHLLRMRSALREYFPAALEAYADLTLTGPDALELLGRAPDPDSAARLTVTQITAALKRAGRRGDLPQRARDIQAALRAPHLPQPAVIAEAYAASVQAGAAVIRALNEQCKILEAKVSELFRRHPDAGLYLSQPGIGDITGARILGEFGDAPGRYATAKARKNYAGTSPLTIQSGKKKTVHARYTRNRHLIDALHAQALSALTASRGARAYYDELRAHDAGHDDALRRVASRLAGILHGCVKTGCEYDETTAWSHRAESPQAA

SEQ ID NO: 500615 - protein, 373 aa, unidentified
MPKYSTAFGMDVHLRSTTVCALDADTGEAVTRRFPGNPWGEIAGWMDGFPGPSLAAYESGYLGFAPQRELAGLGVECVVAAVSKIPRSAADSASKNDKNDAARMAKAILAHDISPVWIPSPEVEGIRDLAGAYDGATARLATAKQRLLAFLARRGFVYGGTTPAGNPRKYWTYDFLRWLDKVRPEDDGGVRALAALRNEVEAAAEARADLLSEYEAAVDASPIAAEVAALQSIKGCAFALAAAFSAEVGDFTRFRSGRQVTAYFGLAPSQRSSGDSVRLGGISGAGNALVRKLAVEGSWCYAAARHQPKLMPRDTGVPLEIRMHGRKGSERLLRRREEMLARGTPAAKANAATAAELVRWLWALGMMCREGAE

SEQ ID NO: 500616 - protein, 342 aa, unidentified
MQITTIGLDIAKNVFQVHGIDATEKVVVRRQLRRSQVLAFFKPLPPCLIGLEACATAHYWARELTKLGHQVRLMPAKDVKAYVKRNKNDAADAEAICEAVRRPTMRFVQIKSAEQQGRLMLHRTRDLLMHQRTQVINALRAHLAELGITSAQGREGLKELLKIVASDADERLPADARASLVMLAAELRAMQTLIGLIEKRIVTQHRENKASKRLLTIPGIGIIGATAIADTVTDPKAFRSGRDFAAWIGLVPRQDSTGGKQKLGPISKQGDRYLRRILVVGAHSVLRRAKLNPQKHPWLTQLLARRPFKVVAVALANKMARMAWALLAKGGAYRAPALAATA

SEQ ID NO: 500617 - protein, 300 aa, unidentified
MWPRPSWSSTSPASSTSCPTRPPATAAWSAPSKKHPAVQLVCEASGGYEQAPVRALWAAGIPASIVEAGRIRHYARACGRRAKSDPIDAAVIAEFGAAVRPRPTPPPSPLADRLAALVQRRRQLQRTLVAETNRAAHYTDPLLRRQTAQLARLLRAQIRTCAAETARLIAGDAGLAAKVHRLNTVPGIGPVVAVTLVAELPELGRLRDEALTALVGVAPYDRDSGLLQGSRRIAGGRRTVRCALFMATLSAVRHDRILKAHHQQLLARGKPPMVALTACLRKLLVLLNRLLKNPNFTLVG

SEQ ID NO: 500618 - protein, 408 aa, unidentified
MTVVGIDVSKGKSMVAAMKPGGELVAAPYEVRHSDIELSRLALDVLCMEPDTRVVMEATGRYHEPVATLLHSEGIFVSILNPLLIKQSGAGSLRKVKSDPKDALKIAKYGLDNWSTLREYTPMEAIRQQLKLCERQCDLYSKNIVMLTNNLISLSDKTFPGVNELFSSPEKADGHLKWVDFYRTFWHCDCINRMSPDAFGERYKKWCKRKGYHFSADATDALYASGCGLYTTLPRDNNAKLLVTVAADQLIALRENQSKLEAEMLNLCKQLPEYETVMAMYGVGKSTGPHLMAELGDVRRFPHRSSIVAFAGVDPGVVGSGKMQLSSVATSKRGSPQLRKALFQVVSTYVKCKPENEAVYQFYVKKRNEGKPFYVCTTAAANKFLRIYYARVKECLNAAESAVQTEEG

SEQ ID NO: 500619 - protein, 341 aa, unidentified
MKQFIRIGVDLAKNYFQIHALPSEGAPAIKRKATRRKMREFFSQIAPCCVGMEACASAHYWARELKAIGHEVRLMPPAYTKPYVKRGKNDAVDAEAICEAVSRPGMRFVPIKTAEQQAALMLHKTRELLVKQRTMSVNAVRSHLAEFGIVAAKGIGRVDELLELAKEDATLPSATMMAVKVLGRQIEELEKGIEDLEKEIAKAHARSETSQSLSEIPGIGKLVASVIAASIPDPSVFRSGRDFAAWLGLTPRQNSTGGKRSLGAITKAGNRYIRKLLVLGATSLLNVVSKRKGGLRDWIVGLLAKKPARLVTVALANKLARIIWAMMKNGECFRTEMFAKA

SEQ ID NO: 500620 - protein, 352 aa, unidentified
MVTLISDELPRIVVGVDSHKETHQAAVLDTTGALLGNERFAASLAGYRELEEWLATLGTIQRVGIECTGSYAAGLTRFFLERQVDVFEVNTTHRATRARRGKDDAIDAEMAARKVLSGEARARAKDTTGDIESIRLLKLSRESAIKARTIGLLQIRDVLITAPAELREWIESAGGARHRVNRAWALRPDLERLGEPLQAAKFTLRQLSRRVKFLDEEIATVDRQLATLVERCAPSLLQCRGIGTQHAAQLLITAGQNLERLHSDGAFARLCGVAPVPVSSGKTNRMRLHRGGDRQANRALHLIVIARLRLDPKTQVYMARRRAEGLSKMDAVRCLKRFVAREVFQALKRDLL

SEQ ID NO: 500621 - protein, 346 aa, unidentified
MLYVGLDLSRKRVDYCVLDEGGAIVEQAAAPPDRDGLVGLAGRVGGRGQPIVAALESMNGARFVHDQLESHGWRVEVADAVRVRGLAPLACKTDRIDAWVLAELCRRELVPAIWLPNGEVRAERERARFRLHLVKHRTSLKNRVHQTLVAFGTPCPVSDLFGQRGRRLLERLALPEPWSGTVAASLRLIDDLDHEINEIEAELRRLGADHPYLPLLLTVPGIAWVLGYTIAAEIGDINRFASATKLAGYTGLCPRVYQSGEHDRRGPLSKRGPRYLRWALLEASIHASRHPLYHERYQRTKQRLGRQRGPRVAQVDLARRLAEAIWHMLTRNQPFAPAGASQVLAA

SEQ ID NO: 500622 - protein, 430 aa, unidentified
MKSNTQNAKIEAITEKTLVLGIDVGSEMHYARAFDYRGIEYSKKPFKFSNTEAGFVTFKEWILDLKERHEKDKVVPGMEPTGHYWFNLGKFLQDNEMKPVLVNPHHVKKSKELDDNNPTKNDRKDPKVIAGLVREGRYMIPYLPDGVYADLRTASNIRFQLQAELTRIQNRISRWFNIYFPEYKTVYGKPDAKSGMLILKAAPLPEDILTLGIDGVNQIWRDAKLRAVGKARAKTLIEAAEHSVGSKEGAVSARMEIRMLLEDYESRNTRLQEVMVLIEELVKEIPMAEKLLEIKGVGIRTVSGFLAEVGDISRFNNPKELQKLAGLALVENSSGKHKGETTISRRGRKRLRYLLFEVAMSLVAKNPEFRELHNYYTTRRLNPLKKMQSLMAIAAKLIRVFYAMLTKGVDYDPKKMVSDIKRPAVYLQAA

SEQ ID NO: 500623 - protein, 410 aa, unidentified
MSVFCGIDWAEDHHDVAVVDEEGKLLAKRRISDDAEGHRLLLEVLAEYDDRATALVPVAIETSHGLLVAALRAAGRLIYAINPMAASRYRDRHAVSRKKSDHGDAVVLANILRTDKASHRPLPAHSELSQAITVLARAQQDAVWNYQQLSNQLRSHLREYFPAALIAFQHLQGGLTRGDARAVLAIASTPGKAIRLSRSQLRAALKRGGRQRGIDADAERIQDVFRAEYLRHTPMVEEAMGLQMLALLRQLDAACKAADELAESLQVRFREHPDAHIVTSFPGLSDLAGARVLAEIGDDRSYFTSARALKAYAGSAPVTRASGKVRIVTHRVVKNRRLASCGYVWTLTALRASPGARAHYKRRREVGDRHSSAQRNLFNKLLGQLHHCLQTRQTYNESRAFSQPAQALAA

SEQ ID NO: 500624 - protein, 324 aa, unidentified
MVLIGIDPHKATHTAVAVDETENSLGVLTVKADRTQIERLLKWAIDFPERVWAIESANGLGYLLSQQLLAAGEDVVDVPPTLAARVRVLGSGKSQKNDPNDALSTAIAALRATRLRTVARDDHRAIFRMLGDHHHELGALRTQAICRLHSLIRCLVPGGTGIRLSADRASGVLRKVKPATSAEAERKRLALGFVADVRRLDAEIADSKARIIKAVRASGTSVVELNGVGPIVAAFLIGHSGDMQRFKNRDHYASYNGTAPIEASSGPKTRHRLNPRGNRQLNHAIHVIAVAQIRHPTEGRRYLDRKVSEGKSNKEALRALKRQI

SEQ ID NO: 500625 - protein, 324 aa, unidentified
MIDGILGIDVSKNTLDASISSCTKVRTKSFANSSDGWHHLLDWLIAQKIQRVHACLESTGRYSLGIACSLYEAGHVVSIINPAQIRDFVRTKLGRNKTDGIDASRIREYCELFKPSPWAPPSEAHRRLGELQTIRAGIIAGLTEWKNRKNSGIVDTEAQALADATILHFTSQLGAVDKAIALTIDNDSDLRSKRDLLLSINGVGDTLAGVVLAELPGPDVLRSSGEVVAYAGLNPRQHQSGTSVDRATRISKIGNAVLRAALYMPALSAMRYNPAIVALVTRLKSRGRLKPKQIVVAAMRKLLVLCFGVLKTGKPFDPAITMGC

SEQ ID NO: 500626 - protein, 346 aa, unidentified
MDVIIGIDPHKSSHTAVALDAAGEVLAELRVTAGKHQIHQLQTFAAAWPDRRWAVEGANGLGRLLAQQLIAAGEPVTDVPATLSARVRLLSGGSARKSDSHDARSTAIAALHGRQLRQVGPEDVTVVLRMLSDRRDQLSASRNRIVCRLHNHLRHLRPGGAPLHLTAERASRLLQGIRPEGVVAVQRKQLARELVADLRKIDRQLVDIDGRIVEAVTASKTTLTDIVGIGPILAATIIGHAGDIDRFPSRAHFASYAGTAPIEASSGDVSRHRLSRRGNRRLNAAIHMVVLSQLSHTSPGRAYVDRRLAEGKSRREAMRALKRQLCNVIYRQLLADSATTEEIAAA

SEQ ID NO: 500627 - protein, 368 aa, unidentified
MPPYLDRHLMGWTVPHPAFTLVAPTKEVVMANVAVLGIDIAKNVFQLHGIDADGQAVLKRRVMRDQLLQVTEAMPPCLIGIEACTGAFHWQRHFEAQGHTVKIIAPQYVKPFLKGQKNDGNDAQAICIAVQQPHMRFVPKKSIIQQDIQGLHRARQRLVNHRVALISQMRGLLLERGVAIAKSASVAQRTIPEIINNPMIDITELTRDIIGTLYAFLLQINEKIRYFDKQIDAVFRESDVCQRIAKIRGVGPKTATAVVAAVGDGADFKNGRHLAAWMGLVPRQHSSGDRRVLLGISKRGSQHLRTLLVHGGRSVVRTAQRKSDPASEWVNELRERRGYNRAAVAVANKNARVIWALLQHGGEYRANP

SEQ ID NO: 500628 - protein, 318 aa, unidentified
MNTKTKQNINVCVDTGKYQLDIYIRPLDIYFTVPNDDKGIKEAVKTIKKYKPERIVIEATGRLEMPFILACANANLPFTIANPIHVKRFAGAIGQRAKTDKLDAQLIAHYSEAIKPKLSQLKPDTMQAMSDLVTRRNQLLTMQTMEKNRLQIMPKALAMTIKPVLTLFNNQIKKIEEKIVKLIESCPEYQAKNMILQSMTGIGKIAAASIISNLPELGYINSKQASSLIGVAPMNRESGRYKGHRKIQGGRPQVRTVLYMAMMSAMQSNPVFKVTYQRLLAAGKPKKVAIIACIRKMIVILNSMLRDGVMWEAPKVNN

SEQ ID NO: 500629 - protein, 586 aa, unidentified
MSSSTSCEPVAIGVGLDTARYGHHATFLREDRQPAIEPLEFLECQAGYQELEKVLSKLAQHHGNIHFHIRVDAASQYATNLLAFLHRLPWPKTISVGEPRRNKQYREVHFPKRKADATESHACARFAIVERPLSSATVDPEVLALREVASWLEFQVKQSTRLVNRLHNLLSRVFPELATLQNDLQARWVLRLLEKYPTAERIAKARLSSVTGIPRLPSEKGQQVHQAAAQSIAAERGAVIEEVVRESVRALQASLDAEKRLEKLLIQTFRELPDERAKQVATIKGIGERTAAVLVAKIVSIDRFPTASHLTSYFGVFPEEKSSGVDRDGNPNPSRSKRMSRQGNDLVRKYLWMSAMSAISGCNPVVVALYARLRQRGRRGDVALGHCMKKLLHQVFGVWTSGKPYDANLASKSTCGRPSNEEQVAEKKEAEGRKTGNTPVRKTVTSTSADIVPAKAQLVKQTTPSSDGDGSIDLAYLRSQITMEQVLRHLGYFGRLRGNGSQRRGPCPVHGSKRARGRNFSVHLGKDVFQCFHPPCGAAGNVLDLWCAIHHLTPNEGARHLADTFDLELTRDREEEPVTEPVALNR

SEQ ID NO: 500630 - protein, 416 aa, unidentified
MMHPKMQYTYVGIDSHKETHTAVFLNCFFEKLGEIQFNNIPSSFDEFIAQAQTYLMDGTVFLFGMEDCSSYGRMLMVHLTQHGYQVKHVNALLVARERKNQNTTQKTDSIDAECAARVLLSKFDQLPDAVPEDKYWALRALVTRRALLVKHHIATQKYLHGLLSQNYPKYRSFFSEIDGKASRAFFKQYPSPGTLQHTNAEELAAFLELHSNKVLGMPKAMTILAIIKESASAIPIQHQHIQDSVVQSAVRQLEFTLDEVERLEDSIRAFLTQFDCTLTSMAGIDTVTAAQILACIGNIKKFSTPAKLARYAGIAPVTYASGRKDLQFSSQRGNRELNSVIFWLAIRMAKPMGSRQRVMNSFFYDYYNRKISEGKTKRQALKCVERRLVNIIWTMLYRNENYINPPAYDLRQDSDA

SEQ ID NO: 500631 - protein, 316 aa, unidentified
MEVTPIFVGIDVSKARLDVSIRPTGKRDSVVNDKVGIKALVKRLEEIRPTLIVMEATGSMERQVSAALGGAGLPVVVVNPRQVRDFAKATGQLAKTDSIDALVLARFAEAVRPAVRPLPDEVTLELRALTSRRRQITEMIVAERNRIANASQAVRKRIDAHIRWLEAELERADKDLDQSLRQSPIWRENEDLLRSVPSIGPVVSRTLLAELPELGKINRKQIAALVGIAPLNRDSGTFRGRRGIWGGRATVRAALYMAALVASRRNAVIRAFYKRLRDGGKAPKVALVACMRKLLTILNAMIKHKTRWSEITLQST

SEQ ID NO: 500632 - protein, 410 aa, unidentified
MRRVIGIDIHRTFGEVVIWENGVLRREGRVEMTRTALEGFGRRLEKSDEVVIEATGNCMAVSRVLSPFVARVVIANPLQVKAIAHAHVKTDKVDAGILASLHAAGYLPEIWTPDAATERLRRLVARRYQVVRHRTRIKNEVHSILHAHLIPKCPHADLFNRPGREWLARQPLPEDERAAVIRHVRELDRLGEDLAALDRDIAETSLEDVPTNRLLTITGVNLAVAAGLMAAIGDIGRFDSPQKLVSYFGLNPRVRQSGLGAAHHGRISKVGRSHARAMLVEAAWAAAKAPGPLRAFFIRIRARRGHQIAAVAVARKLTVLCWHMLTKEQDYLWGRPSLIAHKRRAMQLQAGQPQTKGNARGPAYAYNVKTLRDQEARIAEHAEKGYEKFVAAWRLRPPKDRVAPQAKRST

SEQ ID NO: 500633 - protein, 361 aa, unidentified
MNAVGIDVSKSKSMVAIMRPFGEIVSTPFEIKHTASDIRSLVELINSVEGESRIVMEHTGRYYEVLAHQLSEANLFVSAINPKLIKDFDNDSLRKVKSDKADSVKIARYALDKWQNLKQYNVMDELRNQLKTMNRQFGFYMKHKTAMKNNLIGILDQTYPGVNTYFDSPVRSDGNQKWVDFASTYWHVDCVRKMSLNAFIDHYQNWCKRKKYNFSQSKAEEIYGKAKELVPVLPKDAITKLIIKQAVDQLNSASTTVESLRTLMNETASKLPEYPVVMAMKGVGTSLGPQLMAEIGDVSRFTHKSAITAFAGVDPGVNESGTYEQKSVPTSKRGSSSLRKTLFQVMDCLVKTKLPPPYMVY

SEQ ID NO: 500634 - protein, 474 aa, unidentified
MPRKTSSPASPESFSLLAQETLYVGVDIGKRAHVAGFLSVTLLTRHQRFEHCPALSFDNSREGFRSLIDRIQTFVPLTQVQVLLEVTGHYHRALMQYLQDLDIPVYIIHVQKRREGLLKSDKRDALGLANMLFNQLEKGIQVDDPLQAVRKLAPPTEAAAQLRGMVQHHAELVRESTQRKNKLTSICDELFPELTRLLRNPNLPTALALRSRFPTPSDLALASFAELRAARGRTCSVSDAKLVELQRLAAHSIGAKDPARVHALVFEQKQLIAELNLLGDHLQLLEAEIIQVVEHSREGKILTSIPGIGPQAAATLIATIGTIANFERPAQLKSYFGWVPKVAQSGSSLDWTRLSPRGVRQMKQTMYLIVWRAMQWDSDWKEIYERLVARKCHTDERTRRLVGREKVIGRLAGQMTAVVYVLLKRDQELLAHLAPGAKPPEPQLYDSALHRQHRMGHYQPVRERSREEIQLPTK

SEQ ID NO: 500635 - protein, 322 aa, unidentified
MTEEAVYVGVDVAKHILDLAVTNSKETKQFNNDHKGITSAVSYIAGLKPVKVILEATGKYEIPFAAELQANRLPVVIVNPRQVRDFARATGVLAKTDRIDARILALFGLQVQPEIRLLPDQKAREMSSLLARRRQLIEMHTAEHNRFIQADDSISQGIEIHIKWLEEAISAINNDLDRQIRSSPSWCEKDNLLKSVPGVGKVVSTTLLIELPELGILNRRKIAALVGVAPLNRDSGTLRGKRTVWGGRAKLRAVLYMAALVGVRRNPVIAAFYQRLLNAGKAKKVALVACMRKLLTILNAMIRSKTFWSSDNIIQCVTVEAK

SEQ ID NO: 500636 - protein, 353 aa, unidentified
MHTHQKSSDPLATIGLDIGKNTFHLVGLDKPGAIALRIKVSRNQLVRRLVNLPRCLIGMEAGSGSHHIARQIEPLGHDVRLIPAQYVKPFLKGHKNDFRDAEAIAEAVQRPTMHFVAIKTPEQSDLLSLHRVRSRLVRQRTAIINQIRGFLLERGITVRQGPAPLRKVLPEVLSSPPEALSSRLVRLIAELDEDWRRLDERLAALSAEIESLSENDAACQRLMTVPGIGPIIPSAVVAAIGTGSGFKQGRDFAAWLGLVPKQESTGDRTKLGRISKRGNKYLRTLFVQAAHVVLERRPAAAVRVLLPWIDRASKRLAHRNLLAIALANKLARIAWAVLARGRDYEPRITSNAA

SEQ ID NO: 500637 - protein, 339 aa, unidentified
MKEVSTVGLDIAKRVFQVHGVDRDGAVVVRRSLRRCELLAWFGKLAGCVVGLEACATAYYWGRELQKLGHEVRLIPPAYAKAYVRRNKNDAADAAAICEAALRPSMRLVAMKSVEQQAAAGVHRVRDLLMKQRRMLGNQIRGLMAEFGMVAAKGRRGLGELRAILADKEDRRIPALLRESLLRAAQSWGDLERELAGLDRQIVASGRSDATYRHLITAPGYGPILSSAMSAMVVNPAAFRRSGDFAASLGLVPRQEGTGGRVKLGPISKRGNAYLRRLLVNAAMSVLNSKWARRDPWLARLLASKKRKVAAVALANKMARIGWALMTRQEDYRSLPKAA

SEQ ID NO: 500638 - protein, 412 aa, unidentified
MSVVQFTQVLSRGCGMDIHKKVVVATVQGEGLCKETRSFDTFTRSLTQLREWLVSLGITHVAMESTGVYWKPIYNVFEGFIPHIWIVNARHIKNVPGHKTDKNDSEWICQLLVAGLLKPSFIPPKAQRELRDLTRYRRKLIQSVSANKNRIIRILEDGNIKLSSVLSDTSGATAVKLIDMLCDGKQITLSDIESVRHGRCQHTKEEMLEACTGCLDEHKVYMLGKIRECNASLKEDILDFDKRIKDVLSPYHDAIERMCEIPGIQNRVCEDLVAEIGLDMSNFPTSAHLCSWAGMCPGNNESAGKKKSSRTNHGDKQVKETLVEAAWAASRAKGTFFMERFNRLAPRKGSKKALIAVGHSLLKCIHYVLSTGGRYKELGDNYVPNKKEQKRKEYLKKELQKLGYSVTLSKED

SEQ ID NO: 500639 - protein, 413 aa, unidentified
MATPSSPTRFVALDIHRKYLVVGAVASHQQVVLPPRRFGFEAFSAWASTHLTSSDAVVLEATSNAWLFYDQLEPLVGSITVAHPLAVKLIAAARVKTDSRDTIKLAHLLAALLVPAVWVPPVPVRELRALVNHRKRLVTQRTQVRNRLHAVLHRHNLMPPPGQPFAAHQQEWWLSLDLSSSEKLRVQQDLSLLRSLEELVAAVEAELGRLSTCDPWVKQVPFLIQLPGLGMLSVMSILAAIGEITRFPSANKLVGYAGLGASMHASGETHQSGHITKEGRRDVRCVMVEAAWVAVEHHPHWKAQFEHLTRRMGKQKAIVAIARKLLVVVWHVLTEQQADTNAQAQAVARKLLNWMSYHGIVPGQHRDRLLLLYQHLDQLGLSEELEEIDYYGTTYRLSPRQRLLREVQKSKSN

SEQ ID NO: 500640 - protein, 350 aa, unidentified
MSIIGCDLHTRYQVVAMLETEGGKIVTRRLEHENGEAKAFYAGLPKPSLIGIEATGYTQWFERMVADLKHELWVGDPAEIRARAVRRQKTDTRDAEHLLELLLTKKFPRVWVPTPEERDLRELLKHRNKLVRMQTSVRNQLHFLAMSQGLCRKRKLWSAKGRAELEALNLGPWARQRRQELLELLDSLGPRIEELNQAVKGEAERRPEAGELMKQKGIGPVIALAYILTLGPVERFPNSRAVVSYLGLNPSEHSSGGHHILGHISKQGNEMMRWLLVEAAQSAAQFDPELRRHYQRLKYRRGGPVAKVALARRLAVRLYWTLRQARGATPPVRMPGSPSSAVVDRGPSRV

SEQ ID NO: 500641 - protein, 421 aa, unidentified
MDRKGEAWVLFVGDDWSEEHHDIEVQDEAGRVLVKTRLPEGVAGIDRLHTLIATHATDDVDLDDVDLEVAVGIETERGPWVQALVASGYRVQAMNPLQVARYRETHHISGAKSDKTDAHILAQMVRTEGHRLPTVAGDSEQAAAIKVVARGHKRVIWEQTRHMLRLRNMLREYYPAALAAFGDLTAPEALELLAKAADPAAGARLTITQITAALQHARRRQVAAKAQAIQYALRSPQLRLPELVTAAYAATVGSQVAILVTLNAQIQALEEQVEAHFGQHPDAETYLSQPGLASILGARVLAEFGDDPHRYPDARSRKNYAGTSPITRQSGKTKLVAARHVHNDRLVDALGQQAFSSLSCSPGARAYYRQLRDRDVGHHAALRQLGNRLVGILHGCLKTHTRYDEATAWSHHGQHELTNAA

SEQ ID NO: 500642 - protein, 421 aa, unidentified
MEAENMDYAAWIGLDWGSQKHAICLKPADSEAVEHYTLEQKPETLHSWFMNLIARFGGRMMAVGIEQTRGAVIHFLLGLASVHIFTIHPKSLKNYRDAIHPSGAKDDPTDAELLLQFLTLHQHRLNPWIPDKPEVRLLLRLVEFRRKMVGKRVRLTNELTQLLREYFPAALDCAGDLDKVMACDFLSKWPTLEKLQQSQPETIRKFYQEHGSRSRSVIEGRLKQIHSALPLTTDEPVIEPSVALVQCIAPQLCSVIDAIAQFDRRIKEVFERHPDAQIFSSFPGAGAALAPRLLAAMGSDRSRFGSSLEVAAYSGIAPVTERSGKSKWVHRRFACAHFVKQSFHEFAAQSILFCDWARCYYDQKKKEGKLHNSAIRALAYRWIRIIYRCWKDRVPYDEGKYLKALEQRKPDWLQSSPLNES

SEQ ID NO: 500643 - protein, 345 aa, unidentified
MAAYVPIDLHRHRSVVMHMADDGEVLGWTRLANDPETLVAEVLKAGEAPEVAIEATYGWYWAVDALQAAGANVHLVAPSKLTAFEGRRVKNDQRDCQVLGDLLRSGMLPEAWISTPQVREWRELVRYRAKLVALRTGLKSQAHAVLAKLGVHVPMTDLFGVGGRQLLAHLCTTDARFHSAYGQRIESLVVLVDAIDGEIHDLTDSIAHLFRDHVGYRAIQQVPGIGPIIAAIFVAEIGDVHRFKSAAHLASWCGLTPRHRESDTTVRRGPITKQGSKLIRWAAIEAAQRLGHDTWLHAERERLAERRNSRAVAKTAIARKLITLTYYGLRDGEIRCLNQHLSRAA

SEQ ID NO: 500644 - protein, 344 aa, unidentified
MQLYTYYIGVDISNTDFCGSIYQTPDIPVKTLTDIENKLSGFNKFEQWLTNQQITPNNSVICLEATGVYAEQLCYYFTAKGYPVALEPPLKVKRSFPDKRHKTDKVDSREIAEYAYRFSDELRIWQPKNEIIEQIQVLLMAREQLVVHKTALLNTRQALTKKVIQTPLANKIYDQNIARLKKQIKDIENELNKLIDKHPDFRNAVQKLKSIPGVAMLMACNFLTVTNGFENEMATNYRKAAAFISICPYEHQSGTSIYKKPRSVKYGPARLRKLLHLAARSAITHNANFRKYYELKKAQGKSRRLILNNVANKILKIMCAIIQSQRTYVDNYVSIHPNLLSMNT

SEQ ID NO: 500645 - protein, 486 aa, unidentified
MATQTSVYERLTGGNRKQRKDLQRRLHSDDPGLGVVHANAAGIDIGNESHFVAVPPARDAEPVREFGSWTADLERMAAWLKSCGIETVAMQSTGVYWFAVYDVLEKNGLKVFLVNARHTKNLPGRKSDVQESQWLMKLHTYGLLRNSFRPPEEIRPIRAVWRLRDRHVEEAARSIQHMQKALTSMNVQLANAISDIGGVSGQAIIRSILDGERDARQLARLRDRRIKASEEEVARSLEGNWQEDQLFELQQAVDEYDFRQKQLTECDRKLQAYLAVLPSRPVPAADTGTVIPPPAAPGKKKRRAKKTGGGNAPQSFDLAAELRRVTGVDAIRIEGVNLMTIQTVVAELGTELGKWWPTEQHFASWLSLSPKRDVSGGKVIRHTHEKSRNPVAGVLRLAATSLLRSDSYLGARYRNLRARLGAPKAIKAMARYLACIIYRLFTKGQAWVDRGAEQFEQKRQTRDLAKLQAQAHSRGLRLVPATDPIA

SEQ ID NO: 500646 - protein, 346 aa, unidentified
MEHYVGLDISLKLTAICIVDRTGKIQREGVVPSDPEAIAAFIESHSSNVARVGLEAGATSTWLWTELNKLGLPVICIDARHAKAVLKMQINKSDRNDAVGIARIMQCGWYKEVRVKDLDSHAVKALLVSRALLVKIKRDLENQIRGLLKNLGLVIGRAKMNVFAARAAELIQDRPELTAAVIPLLKTREVIERQIADLDRKVLRLARNNALVRRFMTVPGVGPITALCYLATIDDATRFKKSRSVGAYAGLTTRRYRSGEIDWTGRISKCGDAMLRTYLYEAANVLLTRIAKWSALKSWGMRIAKRSSLRKAKVAVARKLAVILHRMWVDGTEFNWSSKEVAAHAA

SEQ ID NO: 500647 - protein, 433 aa, unidentified
MSQQNISTPSTPPVYAAFVGLDWGDEKHALSLCAADATVIERITLPQTPEALADWANVLRSRFPSGKIALCLEQARGALLAGLMQYEHIVPYPVNPKTLARFREALYPSRSKDDPVDADLLLDLLLKHRQHLRPWQPDTVQTRQLALLNEQRRHFVDHRTALTNELLAHLKAIFPQALELLGESLASRLATDFLKKWPTLQAVQKVKPAVLRQFYYGHNSRSEELITQRLERVKNAVALTSDPALLAVHSLAIQTLAAQLQALRPFLDQHEQQIAALFAAHPDATLFESLPGAGSALAPRLLAALGSDRSRFPDALSIHCYSGIAPVTEKSGKTQYWVHLRWSCPKFMRQSWHEFANCSLKFSTWARACYDDLKKRMKHHEAIRKLAYKWQRIVWRMWQERQPYDETRYLRSLQKRGLKIYADLVPQHVAAGE

SEQ ID NO: 500648 - protein, 407 aa, unidentified
MRLFVGDDWAEDHHDVELMDEQGRVLARKRLPEGVAGMARLHELIGEQLGEDADDAEVIIGTETDRGPWVAALVAAGYTVYGVNPLPASRFRERHGVSGAKSDTGDAHMLTDMVRTDSHQLRAVAGDSPGTGAVKVVARTHKTLIWERTRQVQRLRHQLREYFPAALGAFEDLDAPDALELLARAPDPARAAKLTRAQISAALKRARRRDIPGKTTVIMAALRGAQLGQPPAITAAYAATVRSLIAVITTLSEQVKILQRQVAAHFGQHPDAEIYLSQPGLGPVVGARVLGEFGDDPHRYASGKARKDYAGTSPITRASGKKKMVMARFIRNDRLIDALMAQALSALGSSPGARAFYDAQRAAGVEHNAALRKLANRLVGILHGCLKTRTLYDESTAWSHRENKRAA

SEQ ID NO: 500649 - protein, 520 aa, unidentified
MATARFRKRPSTRRPPTSLSKPRGILHPRVQLVGPEHFGIVCFDCAKARSKFLLADFYGRVLIPPTVVAHNRPDLDAAVAQLRAAFDTHQLHDGLVAIERTGRYHRLVQRTCAAAGFETRILHPFVTKQYRQPVDPGNKTDDADLAAIHRATVTGCALLEATRDEAWASLLLLIRQRRDLVRKGAALNCQIRDHLEAALPGFAACFDKLWDSPLPWHLLQHFPSAGQLRQAGLTTLCQSLRQADIRFQQRTVQAVLDWADQAAPGDVAADLHRRIALAYYRDRQQKTQEILALERDIAGRLVQTPYVLLLSFPGINVASAADFAGEAGPVTDYANPKALTGRAGLRPSRYQSDQVDKANGPLVRNCNRSLRAAILGIADNLIVCNHHFHVLATRWQAQGKDPRHTRVKVALRFCRIAFQMVAGRQVFRHPSIQGRHYILDKLTAFHRDHDTGMAEVLRDLQAAVGQLPPREHAAEARPLAEELQKIQDGHRRGPQLLGDILPMVLARLGVGAVQSTESGE

SEQ ID NO: 500650 - protein, 313 aa, unidentified
MSEYYVGVDVCKEYLDVASSDGTSLRVGNDEAGHQELVTRFGAAPPALVLMEATGGLERALAVQLSAAGVALRIVNARHVRHFAKATGLLAKTDRLDARALVHFAQTLKPEPRAIQPEQTLALQALIVRRRQLVEMLTMERNRLRTAHRGVRKDLQSSIRWLEKRLAGVDDDIDGALRECGVWREKVELLESVPGIARVISVSLLASLPELGQLNRNQISALAGVAPFNRDSGRWQGRRSIYGGRPLVRSALYMAALVGARRNPVLRNFYQRLRGAGKPAKVALTACMRKLLVILNTMLKNGQRWGDHVQLQA

SEQ ID NO: 500651 - protein, 303 aa, unidentified
MGEYIGLDVTLKDTAICVRRDGKRVWRGKCASDPAVIAGVLRKHAPEARRIVFETGPLSIWFFHALKAEGLPAICIDACHAKAALVMAANKTDANDAEGLAHLAEVGFFREVRVKGYDSMLVRTLIAGRSKLVRVATELSNQIRGLMKTFGLIVPGAKGGSFEAEVRRLLSGEDGLARVILPLLEAWGTVRRRAAELGRELLAGARQNQDCRRLMTIPGIGAITATTFVTAIEDPTNFRSSRSVAAWFGLTTRRYQSGEDDYDGHISQRGDAHMRGPLYEAATVLLTRSRVDSDLRTWGLKLR

SEQ ID NO: 500652 - protein, 350 aa, unidentified
MQYLGIDWSYRRAAWCALSEGGGLVGEGAVPADEEGLARLVLEVGLEVKAVVEMMSGAIWVRDTLTAAGWEVQVAHARKVRDVAPLACKTDKVDARVLAELCRRDLVPELWVPSLADRELRERLRRRMHLVRMRASAMNRIFGLLTQWGLRLSLKRLGEPDAMVLLAQRGVPEVWQRSIAEAIAVIDLLDARIGPLDQELGPLARADQRVVLLDTIPGVGELLGLTIASEIGDVARFSSPRKLIGYAGLAPKINQSGDRSRTGALSKAGSRTLRWAAVEAAQHAWRPSNPWHQLYTELATRAGKNPAKSAVARKILIAAWHILCRQQPFTPPAPRRRDSASASSRCFLAA

SEQ ID NO: 500653 - protein, 411 aa, unidentified
MRVHHTVCCGIDVHKRSVTACLMWGPADREPQYEIRRFGTMTSELKTMVEWLKQRNCEIAAMESTGAYWKPVWNVLEGEMELVLANAKQVRSLPGEKTDNKDGKRLASYLRHGLIRSSFVPPRDIRELRDLTRYRQKLLANGAAERNRIQKVLEDANIKLGSVLSDVFGVSGQRMLQALVNQPTADVEQVAALAHWRLAPKIEQIKQALEGHVTSHHRFMIDLSLGHMQYIEQQILRLDEEIARHIEPYQKQFQLLQTIPGIGGNASAAVLAEIGPDMSPFDDDGKLASWSGICPGNNESAGKKFSSNTRKGNPHLVSTLVESAWASTHAKNCQFKSRYHRLRSRRGSQRAIVGVAHALLRTIYVVLKTGEPYQEPLRLALTQNRRSRKAERLTRELRHLGYEVTLKIKTA

SEQ ID NO: 500654 - protein, 425 aa, unidentified
MDFKQNQKINQVTEKTLVVGIDIAKLTHYACFVDDRGRVLQKSFSVTQSGGGFELFYQRVLAAMRENGKTEVLIGIEPTGHYWLNIAYFLEERGIPLAMVNPMHVRRSKELDDNLPTKHDRKDALVIARLLKDGRFSYPRILKGLEAELRVGSTFRSKLTDELGAVKNMIIRWLDRYFPEFVQVFPTFGKMAMAVLEYTPFPSDLHEKQPDEILTLYRKAEGLKSPQRPKALRLMEVAANSIGITEGREMARIEIATLVRRFHQLEKDIENITQHLVELVKTTVEYEWLSTVPGLGDTTIVDLLAEIGSFSHYEDPRQLIKLAGLTLRENSSGLHKGQKRISKRGRRKLRALLFRVMMPMIRHNEAFKKLHEYYTNRQVNPLRKKQSIVVLCGKLLKVLHGISTKHKAFDAKRMMKDIPSLAEAA

SEQ ID NO: 500655 - protein, 395 aa, unidentified
MKRVCGLDVHKDTIFACVRKGKYQTEVRTFSTFSCGLAELKHWLKGERVGRIAMESTGVYWMPVWRALEDDFDLLLVNPYFIKQAPGRKTDVKDAQWIAQLLDKGMLKGSVVPEKTIRILRAYLRRYVQLQGQMTRCLQQVERHFSQCNIKIASLTSTINSKTVIDILASIVEGKYSVEELVALVHPRIKNSKGEKVKQSLEGIIEAHDIFLLRQIYEDYLHINRQCFELLAQAEQLADEHYKEQIELLQTIPGIKKLSAVIIWAELGGNIGLFENANRLTGWCGLRPNNDESAGKIKSRKIGKGNKYLRRILVQTGWAASRTKDCYLKNKYEQLAIRKGNKKALIAIARKQLVIAFNVLSKKETYQEPKIVLSEKQIERKRKYYEEKLTKLKQQ

SEQ ID NO: 500656 - protein, 408 aa, unidentified
MESQIIFGIDVSSKSSTVCVVNDRIKQGESFRISNDSLGYQKLYEQLNQYLITPLVVFEATGVYSLSLQAFLEDYHIKYLKLNPLKAKKLMDNNLRHNKTDKVDAYRLALIQFNAPQKLRDPQPREYHELQNASRYYEELTRSIVTTKNQLHRNLQSTFPQIEEILSHPSGRIYWALVSLFPHAGYVLEKNETQVTQMLNSISGIGQQRARYLTTRLYAFAREAYPYDSKDSIIVRAIQRNISNLFSLQQERDYVINYMEKLAKAVNARALSIYLSIPGVARITAVRLVAELGDLRRFSTSAQIDAFVGIDPGRYQSGEKDSSLGITKHGNHIARKILYRVITQMETVKATQPCHITDYYDKKKRSSNSQGYKKIAIASVHKLIRTMFALIKHDQLYDYNIATENKRL

SEQ ID NO: 500657 - protein, 438 aa, unidentified
MSNKVFFNLNDLFISVGIDVGADFSWMSIALPNQQFVGKPYKILHNSIASLTTAVSKIKEAEELYSLESRIFLESTGIYHYPLFCYLRDKGFNCSVINPIITKNSTNINIRKVHNDRFDSKKAALVGLKPDLKVSLMPSDLALNCRNLCREYYDLMDNRSAYVNKLQGELRMAFPQYLGIFSKVTINTSLTLLETYTSPSAFLKADKQEIIDIIKSTARFGLTYAQNKYNAIIQAATDANQFGYIIDSNIKRIRLYISFIRKYDEEINNILESLHELVDANEDADFVKQIHLIETFKGAGFLSAVSIMGEIGDFSAFSKPKQLFAYFGLDPAVKQSGKFEGTKVQISKRGSAIARRVIHTLTLQSISISRNGEAKNPVLREYYLKKCDSKPKLVAMGAVSHKVCNMIFAILRDNKPFKIIAPQEHIKQYNAAKCDIAA

SEQ ID NO: 500658 - protein, 354 aa, unidentified
MKRTTKYVALDVHQATTVAAVREESGRVIARSILPTEGVALTEFVRGMRGAVHVAFEEGTQAQWLHDLLVPLVHRVVVCDRRGAPRQGNKGDQVDADQLADLLRRGGLRAVYHGSAHHATLKELTRTYQNLVEDATRVMLRLKALFRARAIATYGTKVYQARERAGWLAQLADPGARFRAEVLYDQLDRLRALRPTAKATMVAEARRDPAWPVLRAIPYLGPVRVALLLATMQTPWRFRTKRHLWAYAGLAVVTRSSADYRLVAGQPVRRRRAPLTRGLNRNHNRVLKDVFKGAATSATARPGPLQDFYASLIARGLRPELARVTLTRKLAALTLRLWKKGERYDPTKLTMPAR

SEQ ID NO: 500659 - protein, 362 aa, unidentified
MIVLGADTHKRSHTIAGVGATTGELLGERTVQVGRAGFGALLAWARALGGERVWALEDCRHVSGSLERFLIERGERVLRIPTNLMAETRKSARQRGKSDAIDAVNVARAALREGLATFPAAHLDGPELDLRLLVDHRERLVIHRVELNNTLQWHLHDLWPELELPGGALFSKKWSTRIARRLSRAEQTMRVRIARDELRRLRELTETVKALAREITQLIEQIAPRLLAEPGFGPLIAAKLVGEIAGAQRFATDAKLARAAGAAPIPASSGNTRRQRLDRGGNRQINAALHRVIVTRARCHQPTRDYIERRRREGKTTRDAIRCLKRYLARQVWNLLRASPPEHDLDHTIKFLDIGATDPRAR

SEQ ID NO: 500660 - protein, 459 aa, unidentified
MGRKQSQVSAWEGLKVIHPNAAGLDIGSEEIWAAVAPERTAEPVRKFGTFTPDLQALADWLIACGVDTVALESTGVYWIPVYEILEARGLKVYVVNARHVKNVPGRKSDIQDCQWLQGLHSVGLLRGSFRPAGEIVALRAYLRQRATLIEYRAAHIQHMQKALQQMNVQLTQVVSDITGVTGLTILRAIVAGQRDPQQLAALRQPGVKKTEAEIAKALTGNYRPEHVFALQQALALYDFYTAQMVACDAEIERQFANLKPVSDDLPPLPPSTKRDTHSKNAPRYDARSYLYRLTGVDLVAITGLNESTVQAIISETGPDLSAFPNEKHFTSWLSLAPHNDISGGKLLRSRTLPGHNRAGQAFRMAAQSVAKSPNSAFGAFYRRLKARLGAKQAIVATAHKIARAFYHILKHRTPFHDLGGEEYERRAREREIKNLQKRAAKLGLVVTETPAAPALAGSF

SEQ ID NO: 500661 - protein, 414 aa, unidentified
MHPGSPFANFGALDWAKQNHHAVIVNPPGQIVAEFSFAHTLEGWQQWRQQAARFAPLAVAIETSQGTVVDQLLQTPDCTIYPLNPKAARSYRDRKAPSGTKSDHLDAWSFADALRVDFSNWKPLLAQGPLLEQLRLLCRDEMALIEERTALVNQLQAALHEYYPAALAAFDDWVCPGAWAFVEAFPTPQTLLSAGKRRWEKFLHTHKLYRAQTYQKRLEIFSKATDFCASDALTQAKSRLAVTRAKQLRVLQTQLADYRQQIEKLFAQHPDHDLFGSLPGAGSKIAPRLLSELGEDRHRFEAPEILQCHAGTAPISYQSGPIHKVQVRWHCNKALRHTVYLWADLSRHACPWADIYYRSLRKRGKSHACALRCLGQRWLKILWKMWQTRTRYNAELHQQNQLRHGSWVLQLQTS

SEQ ID NO: 500662 - protein, 345 aa, unidentified
MGNEKKIKFTYFLGVDVSRDKLDFALIKDSKQILHSVIENEKSSITFFLKSLKEFDRFTYRKCLVCMEDTGFYCNHLTDCLNKHHMLFVKENALKIKRALGVQRGKTDKADALRIAQYGQRHQDDLYFKKNRRPVIFKLAGLCSLRNRLGLLHNSIKIPLNEQRHFIKKSAARQDGKLCEGTLKAINEDLRVIEKEIDQTIRTDERLSHLMKIIQSVPQIGPVTAMHIIISTNEFKDINTAKKFACYSGVAPFPNESGTMRRKMRISHIANKKMKALLHICALGAIRNITEIREYYQRKTILEGKPKMSVINAVRFKLILRVFTCVNHNRQYSLEYKSSNLSSHH

SEQ ID NO: 500663 - protein, 332 aa, unidentified
MNLVSTLGIDLAKSTFSLHGVDAVGAVVLRRTLSRAKLTELVAQLPPCLIGMEACSGAHEWARRFAASGHTVKLMAAKFVTPYRKSGKNDGNDAEAICEAVARPNMRFVPVKSLEQQSDLTLHRVRQGFVEERTATLNRLRGLLAEFGHVLPLRAIEVQRRVPQLLGKLPTRVAACARDLLEHAARLAAKTLEYEHQIKVHVSCNALARRTQTRMGIGPITASALVATVGNGRDFKNGRQFAAWLGLVPRQYSTGGKTRLGHITKRGDPYLRTLLVMGARAVLQRAASLTDPLSHWALAVRERRGYHRACIAIAAKNARVAWALLAKEPVTA

SEQ ID NO: 500664 - protein, 353 aa, unidentified
MKPRMESNTSPPTVVGVDIGKDVFHLVGFGAGGKIAFRRRIRRLGLKDAFEKLPPCIVGMEACLSAHFVSRTLRALGHEPRIVPAIYVKPFVKGQKNDYNDAEAIAEAALRPNLRFVQEKSQDQLDLQACHRVRSRLVSRRTATINQIRAFLIEQGIAVRTGPRALRNSLFAILENRKDEISARTARLIRGLYEDWCYLDERIETVSGEIEALSRTEAKCRQLMSIPGVGPLISTAMVAAIGSGEAFERGRDFAAWLGLVPRQYSTGGRSILGRVSKRGSKYLRTLLIQAAKVLLMRPHNWARYSFGPWLNSASARLHRNKLAVALANKLARIAWSVLRNDKAFDTHLEVAAI

SEQ ID NO: 500665 - protein, 312 aa, unidentified
MITLGVDPHPGSHTVVALDTNGCLLAEATVPNTPAGLLELHRFGEPFNLRRWAIEGAGNHFIASFVSELLHRGEAVYSISPSVTSQYRSRRGRKKNDVVDAANVARALLANPELPALLKSVGQQRELQELSRARERLSDQLKSNRLALAELTEHSRVREILKQVIQTIASQLKELERRLHGLVTALKPHLLDLDGVGAVIAGTLLAEVGDVQRFPNEDHFASYCGAAPVERGSGQNSRMQVNPGGNRRLNRALHLVALVRLRVDERSKQFVCKRIEAGKTKRAALRLLKTYIAREIFKTMSQPATLEPESRP

SEQ ID NO: 500666 - protein, 388 aa, unidentified
MLPMINALEVQKGKPAMKKNTTELEKPRRLVLRKNKQGELTIGVDLGDKTSRYCVLDREGNVLFERSTATTKKGLAQAFASMGASRIAIEVGTHSPWVKRLLESWNHEVIVANAHRVKLITESTRKDDRLDARQLARLARVDPELLSPIRHRSEGAQAHLVMIRARAALVEARTKLVNSARGVTKSFGERLASCDPDQMRVKCLVGLPSSLQSALQQLVTAVESLTRQIHEYDNKIAQIARSGYPETARLRQVTGVGELIALTYVLTLEDPQRFRRSRDVGGYLGLRPKRRDSGASRPQLRITKEGDVYLRMLLVQGAQYILGRHGVDTDLRRWGLKLAARGGKNAKKRAVIAVARKLAVLLHRLWVTGERYEPLRHSQIASSLQVAI

SEQ ID NO: 500667 - protein, 338 aa, unidentified
MKLYGGIDLHSNNCVVVLVNEESGVVLRKRIDNDLSKMIALLEPFRNDITGLVVESTYNWYWLVDGLMESGFKVHLANTAAIQQYSGVKYTDDNSDARWLADMLRLNILPEGYIYPKTQRTARDLMRKRMQLVQQSTLNLQSIQGLYARHLNKKISANKVKQLTEQQVNLDFPASNVALAVTSNLVVMNCLQEQIKVLEKALNKELRLEPAFEQLTSIDGIGLILALTIMLETGDISRFSEVGDYASYCRCIGGAKYSNGKKKGYTNSKNGNKFLSWAFTEAANFSIRYNETIKRYYQRKMAKTNSIVAIKTVAHKLARACFYVLRDQTEFDVQKAFM

SEQ ID NO: 500668 - protein, 339 aa, unidentified
MSNRFWIGCDISKETFWVALAEVNDPNMDWTKLPHHEFEHTTQGMSAFLKWLKGLGIDKQAVVGICLESTGRLSLRWAMLLGDSLATASIVNPVGPKALGASLGIRDKTDRVDACLCAMFGRMKRPAPTNFRSPGRLELCEQFRCYIALDRQRIANEQRLDDGPSSKSVRDILRKVIKALERQIANLEQAMDKSIHDDPDLNTDAKLAKTVKGIGDKSVWAILGEFGDLRQYKRNELVALAGLFPKEFTSGTSVHRRPRLARGGGGRVRHVLYMSAMSAQQHNPHLKQFSERLASNGKMPMQILAALMRKLLLIVRAVVISGQAYDPEYGKICVGLSGG

SEQ ID NO: 500669 - protein, 338 aa, unidentified
MSIVMGLDQHRAQITAEWIDTEAGEVSRSRVAPADRASVRRFLGRFSGRELEAALEATTGWRFVVEELLRVGAGVHLAEPAETSGLRGPKRRAKTDWADARHLRELLMIDRLPESWIPPDHILDLRARVRLRHTLSHQRCEWQQRIQSVLYHHGVPARRQLMVGDGREWLAAQPLPPAAREQVTVFIAIIDALDLLISPLDKELRSYGRRQAGCKALQGQYGIGELTAVTILAELGDASRFSSSRDVVRYAGLDITVKQSDQRRSPGHLSRQGPPALRWALYEAAQVARRPGSPDRAYYVQAAERIGGNRACLAVARKLLKRCYHTLRELGEEALQPA

SEQ ID NO: 500670 - protein, 367 aa, unidentified
MKHYIGCDAHKKYSVFAAVDEGGHVTFAKKVEHDRKIFRSFLETLPPASPIAIESTGNWYWLVDEMEKAGHKPSLVHAAKAKLMMGQINKTDKLDAQGLATLARNGTLPVVWIPPGELRDQRELPRMRMVLVSMRTKLKNRIHATLAKYGIMVDGEVSDLFGGRGRRLLEKVLSQLPSETTHSVQEQLQLLDQIEQSITQAEKRIHKVIKEDHTMQLLCTIPGVGPILAIVIALEVGDVNRFSRAEKLASYAGKVPRVNSTGGKTYYGKVRPDVNRYLKWAFTEAANVIVLQQHRMPDCHVLHLYWRVRKHKGHAKAITAVGRHLTEATYWMLKNDVPYQEPRAKQPVSSTPGQARRSHEFKEEFVH

SEQ ID NO: 500671 - protein, 352 aa, unidentified
MSIIAFDSHKRYTLARVENENGEHPKEFRIEHRRGNIIGFLSSQQPGSLVAIETVGNWYWLVNEIEKAGMKPRLVHARKAKMMFGCINKTDKLDVKGLNKLQRSGTLPTVWIPPNKVRDGRELPRTRMVFARERTRLKNRIHSVLDKYGLQDKFKGISDIFGKKGRKVLDNVIGQLPSHTHYTTKLLLEHLDQTEQNIQAIEARMKELFKETEQHMLVQSIPGVGFILAVVILQEVGDIGRFGSSERFASYSGVTPRVHSSGGKVRYGRLRSDTNHYLKWAFSEAGNSVAVNRNRFPTRHVCKLYNRIRGRKGHAKAVGAVARHLAEATYWVLTKSETYRDRGLLEVSSTGS

SEQ ID NO: 500672 - protein, 410 aa, unidentified
MEVLYLHCAGLDVHKDMVVACLRHVVDGTIKREVRTVKTTTKALLDLSQWLASEGCTHIVMEATGVYWKPVWHILEDGDFDLALANAAHVKTVPGRKTDVNDATWLADLLAHGLVRGSFVPNAQTQEMRGLLRTRKQLVRERTSHVQRLQKTLEDANIKLDSVISDVMGLSGRTMIEALIAGETDPNTLAALAHRRIRAPAEELCEALRGRVTKHHRFLLRLHLQQIDIFDAAIVAIDQEVDANVEPFRAAITILTTIPGVSDLSARTIVAEIGTDMSRFPTDGHLISWAGLCPRNDESAGKRRSNRMRKGAPWLKTTLIQCAWSATRKKASYLQAQFHRLRARRGAKKAIAAVAASILTAIYHMLTNGTLYQDLGADHFDRRGKTAQTKRLVAKLQNLGYAVQITPLAA

SEQ ID NO: 500673 - protein, 388 aa, unidentified
MSIDDRDGAPEAPVQTTLAAIFFSMELSRSTWLITSLSPGGGEKMSKRAVPAGDMAGLLTLLGQIKEKTRVRTGESYPFVSIQEAGLDGFWIHRMLEREGVDSHVVDPASVTTSRRRRRAKTDRLDGETLLRTLLAYKRGDPRICAMVRPPSPEEEDRRRNCRERRAMVVERVKLVNRIKGLLFCHGIVDFQPLHQDRRARFDALRTAEGLPLPCHLKAELERMLERVELLLKHIKANEAVRDTLVAPTTDTAMLPASAANLMLLKGVGPDFAETLWSEGLYRHFDNRRQLAAYAGLAPTPWQSGNVSREQGVSQAGNPRLRTMMVQLSWLWLLHQPESALTQWFRERTRLDGRRKPALIALARKLLIALWKFAHHGVVIEGAVMKRA

SEQ ID NO: 500674 - protein, 351 aa, unidentified
MERYLGGDVHAASVTFSVLNESGKQLRRDVVETNGQALVGYLKQQPGNLHLCIEEGEWSQWLYEILSPHVSELVVYRSKWEPGVKSDAIDAHGLAEKLRTGALGRPVYKDAKRFTALREQARTYAMVTRDVARVKSRIKAFYRSRGVPCAGEAVYRPAERAKRAQVLPPATRRAVELLGRELDALVVLKAEAERAMLRESHRHRIARVLETAPGFGPVRVGLLLPIVITPWRFRTKRQFWAYCGFGIVTRSSADWIRVDGRWVKARMIQTRGLNFNHNHTLKALFKGAATTVIAHSGPTPLREGYDRMLANGTKPNLAKLTVARQIAAIVLAMWKTEAKYDPGRIQASLNR

SEQ ID NO: 500675 - protein, 412 aa, unidentified
MRRVIGIDIHRTFGEVVFWEDGRLRHGGRVDMTRTALEGFGKTLTSTDDVVIEATGNCMAVSRVLSPFVRRVVIANPLQVKAIAQAHVKTDKIDAGTLANLYAAGYLPEIWTPDTATERMRRLVARRYQVVRHRTRIKNEVHSILNAHLIPKCPHADLFNGRGREWLKRQPLPDDEQIAVQRHVRELDRLGEDLAVLDRQIAEGTMDDPAVKRLLTITGVDLTVATGLMAAIGNISRFESPQKLVSYFGLNPRVRQSGLGAAHHGRISKIGRSHARAMLVEAAWAAAKAPGPLHAFFVRIRAKRGHQVAAVAVARKLAVLVWHMLTRQADYLWARPSLVAHKIRALELLAGKPQKKGNKPGPAYAYNVKKLRDQEMRVAEQAQKGYERFVDTWRPRPPDQKARGRLNPARLE

SEQ ID NO: 500676 - protein, 425 aa, unidentified
MYFTQNEKISQVTNETLVVGIDISSETHYVRAFDWRGLELTKTFKFESTSCGFRHFMDWLEETCKSNNKTKIIIGAEPTGHYWFTLAEYLKENDIKFVFVNPMHVKRTKELDDNHPSKNDRKDPKVIAKLVIEGRYLTPYIPEDIYAELRVANESRVRINREIVAIKNRIQRWFAIYFPEYTRVFSSWECDSSIEVLKHCPLPADAVSLGAEAVNQLWREKKIRAVGIKRANALVETAKTSVGVKQGANAARLEISMLIADYLIKKEQEARIIEILETLCTQIPNSEKLLSIKGIGTLTAASFFAEVGDIRRFESPKQIQKLAGMAITENSSGKYKGKSGISKRGRKQLRYTLFQAVMSLIIHSPEFRFLHHYYTTRANNPLKGKQSKVALCCKLIRVFYAILTKGVEYDGEKLLSDIVRPELAA

SEQ ID NO: 500677 - protein, 371 aa, unidentified
MKNNTTPSVVSNSLTPAPVIPGGFTPGLDLGDRHHHVCVLDAAGQIIHEGALVNTRPALAKLMAEFPRATVAIEAGTHSPWISRFLTGCGATVLVANPRKLHAISRNERKCDRRDAQMLARLARVDPALLHPIQHGSAQAQHDLLGIKLRDALVRTRVNLINTVRFTLKSLGYPVRNPSSESFHKMVLADVPADCLPVVQPLLTVLAQVTEQIKGMEHDLVQRSRTDYPVTQRLQQIAGVGPLTALCFVLKIGDPARFGRSRDVGAYLGLCPRRDQSGGTDKQLRISKCGDALMRRLLVSAAHYLLGPFGPPCALREHGQRLTGTGSAREKKRAVIAVARKLAVLLLSLWKHGTDYEPRATIAPALVMTPA

SEQ ID NO: 500678 - protein, 326 aa, unidentified
MEHELHYIGIDTAKEKLDVDVLRPDGRHRTKKFANTTKGHDELVSWLKGHKIDHAHICIEATGTYMEPVAECLYDAGYIVSVINPALGKAFAQSEGLRNKIDTVDARMLAEFCRQKRPATWEAPHPLERALRALVVRHQALTDMHTQELNRTETAREVQRPSIDAHLLWLEAELKRLEKQIKDLTDDDPDMKHRRKLLESIPGIGEKTSAVLLAYIGLKDRFAHARQFAAFAGLTPRRYESGSSVIGTSRLSKAGHVSLRRALYMPAMVATSKTEWGRAFRDRLAANGKKGKVILGAMMRKLAQVAYGVLKSGVPFDVSRHNPVAA

SEQ ID NO: 500679 - protein, 416 aa, unidentified
MNAVGIDVSSRKSTVAVLRPLGEVVCLPFDVTHDIAGLASLVEKLKALDGETRVVMEHTGRYYEAVEKALHEAGLFVCAVNPLLIKEYGANSLRRVKTDKADAVKIARYALDNWADLRDFTPMDAIRYDLKTLNRQFQLASKQRTASANNLIALLEQSFPGIRKCFDSPVRSDGTQKWVDFAHSFWHVDCVRKQPFPAFCERYRKWCKRHAYLFKLSNAEEVYALAKRAVVLTPKSKVVKVLVQEAANQLISISRSVEVYRAEMDRLAAMLPEYPVVMAMYGVGKSYGPQLMAEIGDVRRFERKQALVAFAGIDPMPNQSGDKNVRSNKSSKRGSPYLRKTLFNVIRTYLQCAPQDEPVFQFLNRKRAEGKPFYVYMLAAANKFLRRYYAKLRDFFASLDTLQPVDPIPTILKATL

SEQ ID NO: 500680 - protein, 366 aa, unidentified
MKKISTVARNRNEIFKQPKLTIGLDLGDRISHYCILNEAGAVILEQNLPTTPKGIQQAFNRVRRSRIALETGTHSPWVSRQLTQLGHEVIVAHARNVQLIGESSRKDDQLDARTLARLARIDPGLLGPVRHRSAKAQIYLTVIRARAGLVSARTALVNTARGLTKSYGERLRKCGTGQMNREIAKGLSQELRDALEPLLGEIESLNERIGEYDRRVEQIAKEAHPEVALLKQVKGVGTLIALTYVLTLDDPHRFRRSRDVGCFLGLRPGRRNSGMSQPQLHISKEGDRYLRTLMVQGAHYILGPFGEDSDLRRWGLQLAERGGKNAKKRAIVAVARKLAVLLHKLWVSGEVYEPLRNNHAVVNAVA

SEQ ID NO: 500681 - protein, 340 aa, unidentified
METSIKFYLGIDVSKSWFDVSVLKVVNHEKQPMLTEQFVNTKEGIGSFQKWLEQQGVLFDENTLIVIENTGVYHRPIWEFCSKHNLPLHIGNAAHIKWSLGITRGKNDQIDSKRLCNYCYKQSDELKAMPVLNPVFMNLKDLMTSRTRLIAQLQATKSYVKELLCTNDKALLKTLEKAHKAAIDGIEKSIAQIEKAINDLIVSDEKINRNYELIKSIPGIGSITAIYIICCTNNFANKPSGKQLASYAGVVPFEHSSGSSVRGRNKVHKMANKELKKLIHMCAVSSIRYSSEMKAYYDRKKAEGKPGLSVVNAIKNKLLLRVVAVVNKQEKYVENYQKVA

SEQ ID NO: 500682 - protein, 367 aa, unidentified
MKKISTVTTKKVEKNASQKLTIGLDLGDRFSWYCILDEAGEVVLEQKVATTAKAMKEVFSGMPRSRLALETGTHSPWVSRVLSELGHEVIVAHARNVRLIGESRKKDDRLDARMLARLVRIDPQLLAPVKHRSAQAQADLMAIRARAGLVRARTSLINTARGLTKSYGERLRGCNPRNMNLEKAQELSPELKTVLEPLLGEIESLSERIGEYNERIEQIAKQSYPEVARLTQVKGVGTLIALTYVLTLEDAHRFGKSRDVGCYVGLQPGRRNSGQSEPQLHISKEGDPYLRTLLVQGAHHILGPFGADSDLRRWGLKLAERGGKNGKKRAVIAVARKLAVLLHRLWVSGEAYEPLRNQRQVALPVAA

SEQ ID NO: 500683 - protein, 400 aa, unidentified
MLSIGIDVSKGKSTVCGMKPGGEIVYAPFEVQHTREGMSELVSLLRSSGEEVRAVLESTGSYHCPVVAALLENGIFVSVVNSLRMKRFCSQSIRKVKTDRIDAMQIALYGLAYWQELQPARLPEDTYRELQLLARQYYQMTSMLIKAKVDFNAICDQVLPGMQELMSDHAGRHKLSDFVLRYCHTTHILEMGETRFRKDYCKWAEKKGYRNCERMAVLIFATAQNGIPVLPNAPSTQIVITEAIRVLHTVEASRDAILTQMQALAKTLPEYSLVREMPCIGDTLAPRLIAEIGDVRRFHSKRALIAYAGIDAPPYQSGKFCANNRHISKRGNRYLRKTGYEVMQSYVMHKPANDPIFTFIEKKRGEGKSGKLAMVAGLNKFLRVYYGKVTELYRSLPAIE

SEQ ID NO: 500684 - protein, 350 aa, unidentified
MCSLPVFVGLDYHDSSVRVCVLDSDGSELANADRANDWKAIANFADRFGRPVRAAIESCCGAADLAEELVSCAGWSVDLAHPGYVQRMKQNPDKTDCQDAQLVADLERIGYLPRVWLAPQHIRELRQVVRYRLQLTEQRRATKLRVRALLREQRCRAPQGVNAWTKAWDHWLRHSAELSAEGRWVANQHLQELACLATRIRQVEKRLERLTANDVEVQRLQQQVGIGPVTAWTIRAEIGHFDRFRTGKQLARFCGLSPRNASSGQRQADAGLIRAANPALRAVLIEAAHRLVNYDRYWQKFAQRLRAAGKPGSVVAAAVANRWIRRLYHEMKTPSGELAVAVRSARSEDS

SEQ ID NO: 500685 - protein, 339 aa, unidentified
MAIVCGLDIHRSQVTFDWVDVDSGEGARGKLAPANRETFRRWLEQFAGHDVDVVVEGCTGWRFIVEECRAVGITPHLADPAEASVRIHGVKRRAKTDKVDAKGLRDLGVQGRVPESWIPPAQVLEIRTAVRLYHDLMTDRAAWLHRIHATLFHQGAVAQSQLLRGDRDRLHDSELLSAEGKAAVQAILRVIDALDGEINRIRQQLQRFAGKQPGCKELQKEYGIGKLTSVIIWSEIGDCRRFSSSDGAVRHSGLDVTVYSSNGKRSSPHLSRQGQPLLRWALYEAGRCGARPTSPDHAYWLQAAQRVGKKRAGISVGRKLTRRAHHRLRALGDEAFAEV

SEQ ID NO: 500686 - protein, 323 aa, unidentified
METPQVSFKQVVSRGCGLDVHKKVVVATIDGEGLKKQTREFGTVTSSLKELRDWLLENGITHMAMESTGVFWKPVYNILEPAGITVWVVNAAHVKYVPGYKTDKKDSAWLCKLLLAGLLKPSYIPAKEQRELRDLTRYRTKLIQSNASNKNRIIRILEDANIKLSSVLSSTNGAVGTKLIDKICDGEEITMQDVDEVYHKKLAATKEEIYEACQGFIAEHHVYMLQIIRQEIAGTQQTIESLTQRIKEVLSPYENALELLTKVPGISSKSVEDLVAEIGLDMGVFPTEKHLASWAGMSPGNNESAGKKKADEQPGETNKLKLC

SEQ ID NO: 500687 - protein, 347 aa, unidentified
MNYNTIYVGMDVHKESFTFCAYTIDAEKGSHFQRTEADYKNVLKYLEFLRIIYGNEAGFICGYEAGCLGYTLYHQLTEHHVNCVILAPTTMLEQRSKKRIKTDKRDAEIIAKCLAQHNYSPVHIPTAADEETKEFLRMRDDHKLALKKVKQQILAFCLRHNYRYDGNSHWTAAHIKWLKSLKPEALYKEILDEYLLTYTALSDKLERLDKRIEELASKDEYKESVKKLCCFIGVKTHTALSVLVEVGDFHRFASAQNFASYLGLVPGEDSSGDGQTRLGITKAGNRHVRMLLTEASQCYARGQIGFKSKKLKSRQAGNSPQVIAYADKANERLRRRYWFLEKARNPM

SEQ ID NO: 500688 - protein, 338 aa, unidentified
MKLYGGLDLHSMNVVIQLINEKDEVMYRKKLGCDLDRILAGLEPFKGSIEGLAVESTFNWYWLVDGLMDAGYPVHLVNTAAVKQYEGLKYTDDDSDAFWLAHLMRLGILPIGYIYPKATRGVRDLLRKRGQLVQHRTTHILSIENLYARNIGSRLSANATKQLKEEDIRSRFNDANIVLAIESNRLMIVALDQQIKVIELAVLKQAKLDPRYQCLLSIDGIGKILALTIMLETGAIERFQRVGRFTSYCRCVGSEKLSNGKKKGQGNTKNGNKYLSWAFVEAANFAIRYNDKAKRFYQRKCAKSKQVVGIKAVAHKLARASYYVMRDQVPFDEAKLFG

SEQ ID NO: 500689 - protein, 350 aa, unidentified
MKVTTIGLDLAKNVFQVHGADGHGAPLLRKQLRRTQMAEFFAQQPPCVVAMEACGGAHHWGRKLRALGHEVRLIAPQYVKPYVKSQKNDAADAAAICEAATRGHMRFVALKTVDQQSVLALHAVRSGFVKQRTALSNQIRGLLAEFGVVVPQGLSKLAEQLPVVLADQNNELTSVMRELLQMLQTQLAHIDELVARLDRQIRVWANQDEATKRLQQIPGIGPITASALAASVGDARQFEDGRQMSAWMGLVPRQHSSGGKSVLLGITKRGDKYLRTLLIHGARAALKAYQRNPAKMPEHLAQLLQRKHPNVVCVALASRNARVAWAMLSRREDYRGRDTLKLPSLPAAMA

SEQ ID NO: 500690 - protein, 345 aa, unidentified
MKVTKVAERLGIDIGKNVFYLFGVDAQGTPVLRKKLRRGALLEFLAQQPSCLIGMEACGGAHYWAREIRELGHEVRLMAGQFVKPYVKGNKNDYNDAEGICEAVGRSTMRFVSIKTVEQQDVQGFHRMRQAAIKARTALVNQMRGLLAEYGIVFATGVAQARRRVPEILEDGENGLTDRFRRWLNGLYEQLREWDRRIDEYDREIDALFRADERCGRIAEIPGLGPVGATALVGAYGDARPFESARQFSAALGLVPRQHTTGGKPRLLGISKRGDRYIRTLLIHGARSVVCRAMNKTDARSRWIQRLVTERGKNRAAVALANKNARIIWAMLTRGQAYRPAAPAT

SEQ ID NO: 500691 - protein, 468 aa, unidentified
MLGVGVDWAESFHDIAIGVPGKGVIDQFRIEHGPAGVGRLVARCLELEPDPAEVRVVLETRHGLLVEALLDAGFTVLPVNPDLIARRRGPAKKKDDAEDARICCLLAFDQYLDLRRLIPHGPVGAELRAIARDDERAARDERRLGNRLRADLLAVFPAALDIADGDLGAAVFLKLLERWPSAAELAAASREEIAAFARAARHGWPDRFADRVAAALAASRLPVRPELAQAKAGSIRLAAAQLLLLRAQRRVWERRMGELLLGAPRTGREKTAKDPDLGKAFPGGEIYLSFPGLGDRLAARVAGEIGEHIDQFPSPNALQCYAGRAPVTRRSGRSEFVVARRPAYNRYLGEAVQQWAFCSLQRSAWARQFYDQKIAAGKSHHTALRALGNRWLEVLWHCLRLGIPYDEKIHTANRTRALAKEAASWLLPGVGGGRAELGRGGDDGEEAFLADAGVAVHVAADVLPDAQG

SEQ ID NO: 500692 - protein, 352 aa, unidentified
MIVLGADMHKRSHTVAAVGSTTGELLGERTVQVGIRGFGALLVWARALDGERVWALEDCRHVSGSFERFLIERGERVLRVPTRLMADARRGGRERGKSDSIDAIAVARAALREGLDELPVAQLAGPELDLRLLVDHRERLVRHRVALNNTLQWHLHDLWPELTLPGGALFSTKWSTRIGRRLARAEQSARVRISRDELRRLRELTQTIRALEAEIAGLVATIAPQLLSEPGFGPLTAAKLVGEIAGASRFSTDAKLARSAGLAPIPVSSGNTNRHRLDRGGNRQINAAIYRIAVTRARCHPETKAYIARKTAEGKTHREAIRCLKRHLARRIWHLLQPPTPSPNTTLPTSIS

SEQ ID NO: 500693 - protein, 350 aa, unidentified
MDALNKTKRYVYFIGIDISKETLDIAVMVQGSILVHNTIPNEPKSIRDHMLHLKASLKFTTRNAVVGMENTGIYGNHVINKLKTLKIDTVVDPPLRIKNSSGLIRGKTDKKDAERIALYLYKSRDILRLRIPRRPIIEQLAGLSALRKRLQSLHIAMRVLLKENTGFVKKGLIEQSNRLCSRSIDALKLDIKDVEDSIEATWKADEETNRLMTLMQSVPCVGPVVALEILICTNEFKNVRTIKQFASYAGIAPFPYKSGTTVRKKTRISKIANKKMKALLHTSAVLARRFIPDIKAYYHRKMDIEGKHKMSVLNVIRLKIAARVYSCVKNNRLYEKKYEYKPVTDLHWPT

SEQ ID NO: 500694 - protein, 312 aa, unidentified
MKNDTIGVDVSKDHLDAHRLADGAARRFANDKGGHKALIKWLAEMPLNRVVFEPTGPYHRAVERALGASGVPFVKVNPRQARRFAEATGKLAKTDRLDAAILARMGALLELEARPARSEVLLELKELYVAREALVKDRTAAKNRGKALTLSLLKRQNAQRLEQIDRQIATVEATILQIVEADASLSDRFAILTSIPGVSNITAFALLIAMPELGALEAGQAANLAGLAPIARQSGRWTGRSFIRGGRADVRQALYMPALVAARFNPDMKAKYTHLIKTGKPAKVALTAIMRKLVVLANALLKANRPWTPRTA

SEQ ID NO: 500695 - protein, 391 aa, unidentified
MIYIGIDVAKDKHDCFITNSDSEVLFKAFTIFNNLDGFNDLYQKIESVMDDVTKVKVGLEATGHYSYNLLGYLIDKGLPTYVINPLHTNLYRKSLSLRQTKTDKVDARTIASMLMSDVNLKSYSDTSYHNEELKSLTRYRFDKVKERAKLKTSVSRLVCILFPELEKLVPTLHIASVYALLSEFPSAKHVATAHLTRLTNLLSKSSKGRYGKDTAITFRDSARASIGSNMPAKSLELKHTIKLIQELDSEIDEIENEIKIIMDEINSPILSIPGINYRMGAMIIAEIGDFNRFDSPDKILAYADFSPSTYQSGQLDGAYAHMEKRGSRYLRYALYNATKYVCHWDPTFAAYLAKKRAEGKHYNVAISHAVKKLVRVIYHLEKTKQQYIKAA

SEQ ID NO: 500696 - protein, 379 aa, unidentified
MSKIRFVGLDVHADTIAVAVAEPDGEVRSLGTIPNRLESVRKLMVKLGPAKELKACYEAGPTGYVLYWQLTALGVVCEVVAPSLVPVKPGDRVKTDRRDAAKLARSYRAGDLTPVWVPDEAHEALRDLVRTREDARQDQLRARHRLSKFLLRHGRRPPEDVKKAWTLKHMTWIQEHVHFDQPALEATLLDYVHEVEHMAGRIQRLETAITEAIQKAPPEIRAVVEALQALRGVAQLTAVTVVAELGSLSRFQNPRQLMGYSGLVSSEYSSGNRVQRGGITKSGNAHLRRVVIESAWAYQHRPWIGGFLLRRQRDLQLAPEVKEIAWKAQWRLHTRYKKLASAGKKKPQIVTAVGRELLGFIWAIAVQTEANFKPDRKAA

SEQ ID NO: 500697 - protein, 318 aa, unidentified
MTHTTQTTALYVGIDVSQNTLTVAIYPTDEVWTLVNDPHSHTALVQHLAQLPVQRVLLESSGGYEKAVVSALQQAGLPVVVVPAQRARYFAKSMRGDLKTDRADARMLAYFACCYPVQPVAPCSPVQAELKELWARREQLVQQVEREKKRLQTGMSEAVRASLERMIAVLKEEIAQIEARVAELIASDADLSQKAALLQTAVGVGRVVAYGLVAELPELGQVSHRAIAALAGLAPVRCESGAWVGRARVRGGRPRVRRLLYQAAVVAATHDGRWRAVYEALVGRGKAKKVALCAVARQLLVVLNAMVRDGRAYERVQE

SEQ ID NO: 500698 - protein, 406 aa, unidentified
MHPTPTTTYAGIDWATKSHAICVVDATGSVLERYEVEHREAGLRSLVRRLTAAHVDGVAIERPDGPVIDALLEADLRVVVIASRHVKALRSRYGLAGNKDDRADAYVLADVLRTDGHRLRPLLPDSDATVALRALVRARKDLVRTRVRLVQQLSAHLELVFPGAVDLFDDLASPIAQAFLARFPSAERAAWLSPKRMAAWSRAQGYCGRRSGKELHTRLVAAPRGRVGEGADAMAAITLAFVRAIGEIRQQADALAGRIGEQLALHPDGHIFTSLPRSGSVRAAALLAEIGDCRERFPTVESLACLAGAAPSTRQSGQHRVVTFRYACDKKLRDALIDFAGDSRRASPWAADIYRRARAGGKRHPHAVRILARAWLGVIWRCWQDHTAYDPNRHRALQRVLLAPAA

SEQ ID NO: 500699 - protein, 341 aa, unidentified
MSSLVCGLDVHKDSVYATVMSYGGEVVERRKLLDKDEVVSFLGRYPIDKVAMESSTSIVPVYRALRGKGYNVLVSHPKKTRLIAESRIKTDRVDSWALTELARLDALPLSYVPPDDVAALREKVRRRAFMVRMRSKLKVKIKAHLTINGLTPPSEYGLFTRKGLEWLHGLQSDAVESYLPVLSTLTLQIERLSKELRRMAPEDEDVRLLMTIPGVGYYSALLVKSEIGTIDRFPDGEKLCSYAGLVPSVSSSGAHKRYGSITKEGSRWLRWIMVESVRIHLKYDTGITRAYHAIAERKGSGIAKVAAARRLLMCCYAVLRNHEPYHDPAGHYQPSRSGRGE

SEQ ID NO: 500700 - protein, 343 aa, unidentified
MYYIGLDVHKKTISYCVKDAAGQIHQEGKIGSTRRELDAWIKTLPQPRMMAMEATIFTGWIYDHLLPHAEKVKVAHPLMLRAIAAAKKKNDKIDAGKIADCLRCDFLPECHMASTEIRDRRRTLRYRNLVLKQMVQMKNRVSGLLMESGVSYDKQRLHKMGYFSELFSTNEEISESIRPLLRLGREHIQRSQRLDRALTSSLERDPLLSERLRRLRTIPGVGPITALTWALEIGDYTRFHSVKEAISYCGLCSAEKSSADKMMRMPISKQRNKHIQHVLVEAAKMAPRYSHELALLRDKEILRGNKNRATLAVARKMVTYMLAVERRQQDFVPAEEMAGKEAA

SEQ ID NO: 500701 - protein, 375 aa, unidentified
MNNNNTLYVGLDVHKESITVAYAINSEPVELMGKIGTSPTDIQNLCKRLRSKSSQVSIVYEAGPCGYGLYRRLVKSGFDCMVCAPSLIPKKPGERVKTDRRDAIRLVRSLRAGDLSAVYVPGIEDEAFRDLARAWASARDDLRHARQRLKSFLLVHGVHYVGRADWGPAHRRWLSKYSFESPWRQLAFDEHRRTIEDRQAQCERLESALKEAVTEWRLYPVVEALQAMRGIQFITAVGLISELGDLTRFEHPRQLMSWFGITPSEYSSGGSRHQGSITKAGNSYAVKLLVEAAWSYRHPARISPAIQKRQENLPRPVIDRAWDAQLRLCKRYRKLQAKGKNVNITPVAVARELAGFIWGYRPNSNVRRTTNQCHK

SEQ ID NO: 500702 - protein, 322 aa, unidentified
MSDPIKYTMIGVDVAKLKLDVAIGDDKVLTLDNNEDDFKKLLKIIPDSAPACFVMEATGGYERKLVSFLQSKNIAVAVINAKRVRDYAKAMGAYAKNDRIDAQMIRHYAQVAFAKGRLKLRESRTEIAQQLEDLLRRRHQLVGQRTVEKQHLEAAINKESVRSITRMIKQLDKEIERIEGRIKAYIEEDANLAKHKEQLMRVQGVGEVTALALLTQLPELGKLSNKEIAALVGLAPFCQDSGKKTGRRVIFGGRELIRSTLYMATMSAISFNKPIREFYQRLLAKGKLKKVALIACMRKLLTILNSMTKTGSEWNPDFAKTV

SEQ ID NO: 500703 - protein, 316 aa, unidentified
MEPTLLFAGIDVSKAQLDVALHPTAGAFAVANDEAGIATVLTTFQQQRPTLIVLEATGGYELPMVRALVAEGLPVIVANPRQVRDFAKATGQLAKTDRIDACLLARFAEAVRPSLRPWPDAATEALRALLARRRQLVEMLTAEQNRLGHASPSVRQRIQAHIRWLRAELAGVDTDLDAAIRHSPVWREQDNLLQSVPGVGPVLSRTLLADLPELGTLTRKQIAALVGVAPLNRDSGTLRGRRTCWGGRASVRAVLYMSALASLRFNPMIRTFYQRLRAIGKPAKVALTACMRKLLTILNAMMKHRTPWCAMGVQST

SEQ ID NO: 500704 - protein, 345 aa, unidentified
MKIVGCDLHTRYQQIAMLDTETGEVIERRLEHANGEARAFYASLPGPVRVGIEATGHTRWFERLLAELGHELWIGDAAQIRAAMVRKQKTDANDAAHLLQLLVEDRFPCIWRPSLAERDLRQLVWHRQKLVWMRNAIGNQLHALAMGEGLCRKKQLWTKQGRAELEGLGRDEWASYRRQELLQMIAQLDHSLKKLDEAVEKQSQQNAAAVLLRTHPGVGPVTSLAFVLTLGPVTRFACSKQVASYLGLNPREHSSGGKQRLGAISKQGNPMMRSLLVEAGHSAARLDAELRKDYQRLKLRRGSGVAKVAIARKPAVRMYWMLRQQANYAQLVRMQGSPWATLVQK

SEQ ID NO: 500705 - protein, 429 aa, unidentified
MNWQDERAVWKRQYGALIGIDWADEEHVYHLTESMTGESETATLLQRPESLDEWAAELSARLDKPVAVCLEQKKGPLVAGLMKHDFIELYPLNPKKLKEYRQAFTTSGAVDDPTDALSLWSYLDTFGHRMKAWKPDTVETRLLGELTEDRRHEVEEIKRHTNELRARLKRYFPLALDVLCHLNTAMACDFLEKWPANEKLRRAQPKTLQKFYTGHGCRDQTLIEERIKTIKSARPLTTDRALVESGALRVQKLACQIRVLIESVNAYDEKIAEVMSEHPEADFYSNLPAAGNALAPRLLAAMGTDRERWESAKEIQVFHGTAPVTEKSGKNKHWVHWRWACPKFLRQTWHEFADHSRKKSDWARAFYQMKRDEGKGHHHTLRALACKWIRVLYACWKNRTQYDETQYIEALNKRGSKIINYMSKNGEKD

SEQ ID NO: 500706 - protein, 422 aa, unidentified
MCLPFILARGLLWFWPEQSRTNGRDTRVPERCSLNNSKRANTPMKTELHLGLDVHCQWILTAVAEQGRTGEVRDSGAISNDLHALEKWIARVRKRYGPEVLIRACYEAGPCGFGIARRLGQLGVECAVVAPSLTPTRAGDRLKTDKRDARKLARLLRAGELTAIYIPEPTDEAIRDLCRARSDAVDDRCRSRHRLKAFLLRHGYRYQGKSAWGAAHERYLRELVLPHPAMKVILEEYLISVQLATERIARCETAMSDLLGKWRLEPAVRALMAMKGFQTVAAMIVVSEFGALDRFTHPRQVMAYLGLVPSERSSSERRRQGAITKCGNAHARWLLIECAQHYAAPPKVSKELSRRQQNQSRVVRALSWKAQNRLHQRYRRLMARRLQRNKVIVAVARELCGFIWELLRSQECYHTPVPSEMN

SEQ ID NO: 500707 - protein, 315 aa, unidentified
MTSAGIYVGVDVAKDWLDVAQRPEGATWRVSNDERGIADLVERLVQLRPALIVLEATGGIEMPLVGALVAAHLPTVVVNPRQARQFAGATGRLAKTDVIDAQVLAQFGEAVKPEIRSLPDAATQQLSALLLRRRQLVDMLTAEKNRLRTAAPSVRPDIQDHIRWLERRLSELDGQLAQAIRSSPNWRERDNLLKSTPGVGPVLSVTLLAELPELGTLNRKEIAALVGVAPLNWDSGHFRGKRSVWGGRSKVRAVLYMAALVAARHNPVIQAFYQRLVAAGKPKKVALTACMRKLLTILNAMIRHQTPWSVEHHAS

SEQ ID NO: 500708 - protein, 347 aa, unidentified
MSNCNTIGVDLAKLVIQVCVVSPKNKELQNKELTRKKFAEFLARQKPGLVAFEACATAHYWARVAQAHGHTAKIIPAKAVTPFRQGHKTDSNDALAVAEAASRPNIKQAPMKSIEQQGLQAIQRSRELLIQDRTALSNHIRGLLMEFGIVIPRGFAALHQQIPEALEDGENELPDLYRPTLQMLYGRLITLKADIDALNKQIHALVKQNVACERLTRIEGIGPIGSVLLYATLGTGEAFTNGRQFSAYLGLTPKQYSSGGKTVLIGISHHVANKRLRSVLIQGARAYVHKMKEPRTPKDQWLWSLIQRAGYGRASVALANKNARTAWALLTQGEPYNRDYGSSLAAA

SEQ ID NO: 500709 - protein, 399 aa, unidentified
MAASRRVVIGVDTHLDTNHLAVITDAGKPLADAEFPTSPAGYDDAVSWAQSFGTIVIAGVEGTSSYGAGLTRVLQAAGIEVAEVSRPDRAARRRQGKSDPLDAYAAARTALAGNGLAVPKDEHTTTLRALLIARRSAVKARTAATNQIHALLVTAPAELRERHRHDSTTALVKALARCRPTTYRDATTAAVLTAAKALARRVEFLDHQEHDLTAQLDALVRQINPALRAAYGVGPDTAAQLLVTAGTNPHRLRNEASFAALCGAAPVPASSGKITRHRLSRGGDRAANSALHRIALVRMSGHPQTRDYVEHQGGKNRTKKEILRLLKRAIAREVFRLLTRPGPIDDYNDLRPARQAKKLTLAAVAHHFGVPIITISRLERGHQRNDILASNYRQWLNAA

SEQ ID NO: 500710 - protein, 345 aa, unidentified
MANLKLFRDFTFIVGIDIAKEVFQVYCCNTETGECTNRQVTRDKLLKHFANRDKCLIGMEACGSSQYWARKLLELGHSVRIMDSKRVKPYVRGNKSDSADAEGIFNALLHGEPAVVVKGPTERDIHALTTMRTKMQDQRTANINHVRGLLAEYGQVIPKSVNQFLKRVDECINKLEGDAVQLVIDTMREIVAGIRVAIEKIAALDKEINRLAMQTKHAKNLLTIPGVGPVIMAHMCVLLADPTVFATARQFAAYQGLVPMHFGSGGKTINKGIPVRCNKRLRALLIEGAQAAARSRRRPEWMSKILARKPKKVALVAIANRIARQCWAVASKGQEWSITPIASAA

SEQ ID NO: 500711 - protein, 470 aa, unidentified
MAAVMIGVDPHKASHTAVAISAAEEPLGELRVRACAVQAERLLAWAAAWPQRTWAVEGAGGLGHLLAQQLVSAGERVLDVPPKLGARVRLLAAGDTNKNDPNDARSVAVAALRSPGIREVRPDDHAAVLKIWSKRYRDLGRSRTQVVCRLHAVLCQLIPGGISKAITAAAAARLLESIAPAGAVEAARCELAAAFLEDLRGIDARIRETRKKLAVAVAATGTSLTGLYGVGPVIAAAVIGDVRDVSRFPGRDHFAAYNGTAPIEVSSGPRKIYRLSRRGNRRLNHAIHMAAVTQIGHRHSQGRACYDKKLAEGKTPKEALRSLKRQISNAMFACLQADARRAAARAKGPGGQQGNDSVASAAGSHPRHRLFGQATPGPGDQTTTAAGTPVPGPARAQGRDGHSPIAATLPSVTPQVQVERPQRSEDERPGGAARRRPHSAARKARSQRSPVKTQRPKGTSYTAKKTNGTS

SEQ ID NO: 500712 - protein, 358 aa, unidentified
MAKLSLSRLEAFVLGFETTRFKVGIDVHKNSYSLALVREDGACSTWTGPARAETLLEPVQRFGLRIKAVVYEAGPTGFSLARRLEEAGLRVMVVAPSRVPRPVRAGAKCDRLDCIKLAEYADNRRARAIAVPTESEEAERSLLRRRHALADGRRRCKQRIKAHLLYLGVDAPEGLDHWSQKSVASLGGLCLKPSARLTLESLMRELAFHIEELRQVEGQLVELIASGSQRKRLVYLRTVPGVGLLTATTYLLELFRPERFANARQLASYLGLAPMVRHSGARKPRGKITPVGQTRLRTLLIEASWVWKSRDDYAAKLYNRLLSQMGIAQKAIVAVARRLAIILWRLLIEGRSYRPDPV

SEQ ID NO: 500713 - protein, 413 aa, unidentified
MDLLHDRCAGLDVSKKDVKACVRSPGARANQRHTEVRTFATTTNALLELRDWLVQQRVTLVAIEATGDYWRPPFYLLEDDVNVILVNPAHAKGLPGRKSDVTDSMWLAQLGECGLLKASFVPPQPIRQLRDLTRYRTTLSREHTREASRLEKELEDAGIKLSSVASDILGVSGRAMLEALIAGERDPQVLAQMAKGRMRTKISPLTQALVGRFGQHHAFLCRMHLDRLDALDQDIAKLATRIQEALEPFRDQLARLDTIPGVGRDVAEVIIAETGADMSRFPTAGHLASWAGVAPGLNQSGERNKPAHTRHGDHWLTGALGIAAMAANRTKDTTFLGARYRRLSRRIGKLKALVAIEHSILTATWHVLSENTDYHDLGGDYHAKRDPQRALRRITRDANRLGYTVRFDPIQAA

SEQ ID NO: 500714 - protein, 319 aa, unidentified
MINYTTLGIDISKKKFDVALLNNNKLKNKKFTNDPKGFESLGQWLEEQDALSVHVCMEATGVYGEALSEYLYDASFTVSVVNPARIKGFAQSELLRTKTDKVDAGLIARFCHAMQPQPWSPQSKEIRQLRDLVRRLDALQGMRQQERNRLEAASEIVETRLLCHIDYLDKEIKDIKHLIHQQIDNHPDLKNRKCLLESIPGIGEATICVILAEFGSITQFKNAKALAAFIGVAPRTRQSGSSLRGRGMMSKTGRSKLRKAFFMPALVALRYNPVVREMKIRLTKAGKSKMAIVGAAMRKLVHLIYGVLKNGVPFDEKFA

SEQ ID NO: 500715 - protein, 387 aa, unidentified
MPQPNDLSRSLVAVDQDSTIIAVVEMSQSSWLVAGMLPGIERQPRKKLEPSAERLLGLLHRWRDEAVKAGHKITRIALAFEAGRDGFWLARWLRARGVEAHVIHASSVAVSREHRRAKTDRLDTELLKRGFLGWLRGERGHCTMARVPTIAEEDAKRPNRERECLVGERTRIVNRMKGTLARLGIRNFKPTLRKAAERLATLHTPEGSALPPNVSAELQRDIARLGFVISQIKEIEEARQERLEQEPETGPHAMVRHLARVVGVGIETADMLVNEVLSRPMRDRKAVARYAGLTGSPDESGAKRREQGLARAGNARVRRGMIQLAWRFLRFQKESALARWYQARTADSRAGTRKTMIVALARKLLIALWRFVTTGETLDGVILRPAG

SEQ ID NO: 500716 - protein, 424 aa, unidentified
MLKIVHATCCGIDIHNKFVVATIAKTDPKGVTRYQTKEFKTFNHDLERLREWLTKNECKQVCMESTGKYWIPVFNYLENTCTVTLANPKYVKAINGKKTDKKDSRWIADLFKHDLVPGSYIPPKEIRMLRELCRYENKLVANRSSEKNRIQNSLTISNLAIANVVSDAFGKTASRIIEYVVNCDVFDPEHCKTLIDKKIKASHDEIIKSVLGYNLMPSQASKIRISQSHLNFIDNAVVNLNDTLDELTKPYESQIKILTSMVGVNEKSAVKIISEIGADMSVFASAKHLCSWAGLTPQNNESAGKKKSSKISRAGVYLKPLLVQCANAAIKSTKNSYFRDKFLKIKKRRGHKKAIIAIARMMLTCIFHMLSKGEMFAPSDVNYSDMPTEAFEKRRHKMIQSAILLLQKQGFQISKTTDNELLVS

SEQ ID NO: 500717 - protein, 314 aa, unidentified
MDQQTEETFFGIDVSKTALDLARWGQKEVTRYENEATGIAAVVERLSSQMAVTLIVVEASGGFEQAMVTELAAASLPIVVVNPTRVRNFARAKGQLAKTDKIDARMIAAFAQAIRPEVRALGTEEQQLIKALVTRRRQLIDMQTAEKNRCTSINPELLPRLEKHLDWLEIELAEIEEDLNDWIDQNAQWRENRANIKSVPGVGEVTAFTLLAELPELGTLSRQKIAALVGLAPFNRDSGRFRGRRHIFGGRSDVRSVLYMAALSGIRHNSVLKAFYDRLIAKGKLFKVAITACMRKLLTILNAIVRDGSTWQAT

SEQ ID NO: 500718 - protein, 359 aa, unidentified
MLYVGIDQHRKQLTVCVRSEEGDVILGRQVSTEWGRARAFLKDLGQRAGSEGFVVILEVCGFNDWLLKLLEEYGCRETILIQPEKRSKKKTDRRDANALCEILWVNRQRLLAGKKVQGVRRIQLPCEEDAEARQVTELRKRLGQLCTRTINRIKHLLRKHNLEQECPTKGLDTIRGRKWLATLALGVMDRLEMDLLLEQWELWRKQIETLDGQIRQRQRKSDRAAVIATIPGCAAYSSLALASRIGAIDRFPRPASLANYWGLTPGCRNSGEATDRLGSITKQGSAMARFILGQLVLHVLRRDATMKGWYQRIKKRRGSKIARVAVMRRLATIIWQMVKNHEPYLIGGPPRRRLKSQVA

SEQ ID NO: 500719 - protein, 337 aa, unidentified
MGLYCGIDLHSNNHVMTVIDEGDRRLYERRLPNDLAITKAALEPFRAQLVAVAVESTFNWYWLVDGLMDAGYEVRLVHTGAVVQYAGLKHTDDQHDAFWLAHLMRLGILPTGYIYPKGKRGLRDLARQRMRLVQHRASHITSVQSQVWRSTAVRLSGHTIKGEGKQPWPELRDADLALSIETGRAAIDALTVQIERLEEVLLKRVGLSPQFQVLKTVTGIGPILALTIALEVGDIKRFPGVGEFASYCRCVDSQRLSNAKKKGEANRKNGNPYLAWAFMEAAHFAIRYLPAARRFYERKCRQRNALLAVKALAHKLARACFYILRDQVPFAPERLFV

SEQ ID NO: 500720 - protein, 428 aa, unidentified
MNEVDSIRLEEFRQLKREIRGSKQYLVVGIDVAKDKHNAFFGTPTGKTLLKRLVFENTIEGFEKLLIQADALKVQHALKKTVFGLEPTANYHKPLGEFLIKAAHMVVLVSGVAVKRNRELLDGRWDKHDTKDSANVADLISQGKCLFYEYPPMALRELRNLLSLKRRLKKQEHGLKARIRNHLLAQYFPELDRYFAQSGSEGMEIVRWCLEPSVIAGLEYGQFVQLVAPRIRSIGQQERLKAIWKKAVDSIGCIAGEAVEFEAKVLVEALEQLRDTIAHSDAKIKEISLQFPEYKYILTIPGFGADVSSNVLAGIGTPSRFNTGKQVLKMAGMDLSAARSGKRSDAASPVLSKKGKADLRYALYQAALIASTKNQHFIAYYTNRLRGREKEKAIKIKMRVKLAAKLLIIAWTLMKKKEPFNPDYLKTD

SEQ ID NO: 500721 - protein, 385 aa, unidentified
MSELNDLSRSLTSLEQDKTIIAVIEMSQSSWLVAGIVPGIERHPLKKLEPSEEELVRLLMRWRTEATKNGHTITRIAVAFEAGRDGFWLARWLRARDIETYVIHPTSVAVSREHRRAKTDRLDTGLLKRVFIGWLRGEPDHCHMAAIPTLAEEDAKRPNREREGLVRERTRIVNRMKSCLARFGIRNFKPTLRKAPERLATLATPEAVPLPPNTLLELRRDMARLRFVMDQIKEVEEARAQRLEQAPQEKTHAMVRLIARVIGVGIETADMLVHEILSRQLRDRRAVARYAGLTGAPDESGNKRREKGLAKAGNARVRRGMIQLAWRFLVFQKDSALARWYRARTESAGKKRKTMIVALARKLLIALWRLVTIGEVPAGVLLRAA

SEQ ID NO: 500722 - protein, 330 aa, unidentified
MKQYDHVFGVDVSKKTVDITHVINQQFTHRQFTNNEVGMEQLMQWFKELTPEFDRTLFCMESTGLYCFTLTHFLASYSIDTWIEHAAQIKKATALARGKNDKVDSHRIALYATKNFDRLRLWKPVNATLEKIRHLASLRERLVDTKKRLSVPIKEFEEVGNLAMAKLLTKTIKSSLAAIDKDLKNIETKIIDVINEDDNLKLLYKLITSVVGIGFVTAVNLIVHTNGFTMLKDTRKLACYCGVAPFEYSSGSSIRGRTKVHYMANKKLKCNLHMASLTAVKMDSDLKAYYERKVGEGKSKLSVLNAVKNKLLARVIAVVNKQQEYVKKTA

SEQ ID NO: 500723 - protein, 356 aa, unidentified
MRSPAGGAAIHCSKLEPLNERARMHRAGLAFASMSQNNIPTLYAGIDVAKDTLQLSLCGASENLPNEAKGHARILRLLSAAEAARPGAKVHIILEATGGYEAALCAALHAAGKTLSLLQPARVRHFARAKGEQAKTDPIDAAVLAAFGEALRPAPTPAPSAAQTHLGELVGRRAQLIETRTAETNRAAHYTDTLLCRQSRALLALLDKQIAQCDDAIAALLAADEAMNARAQRIQQVPGIGPVTAAILQAGMPELGTLNDGQAAALAGLAPYNRDSGPHHGARSIRGGRTPVRCALYMAALSAVRHDPILRDFYARLRAAGKKPKTALAAAMRKLIVLLNRMLKNPRFRLQNPTCK

SEQ ID NO: 500724 - protein, 367 aa, unidentified
MQRQADPAHDRPDAPEVRVTLGVDTHADVHVGVALDHLGRRLGTHTIPTTPAGYAELVAWAGAFGTLERIGLEGTGSYGAGLARWLRERGFPVLEVERPNRQTRRRRGKSDPIDAEAAARAVLAGTATGQPKAGDGPVEMVRALQVARRSAVRARTQAANQLHALVVTAPARLREQLRPLSLRRLVATVAVFRPGASLATPTAATKLALRCLARRSQQLSAEIEALDTHLARLLASVAPALLAVKGVGTDTAAVLLATAGDNPDRLRSEAAFAHLCGVAPIPASSGKTTRHRLNRGGNRDANRALHLLAVRRLAWDPRTRAYAARRAAQGKTKPEILRCLKRYLARELYPLLTSPPAAALEAPPLAA

SEQ ID NO: 500725 - protein, 344 aa, unidentified
MYFIGVDHHKQVSVMTVLDEDGRELRNERVVNLRSHVQRFLEPYRPFTAVLEAGRASYVMADLLRELGGEVKLANPLQVKAIAHARIKTDKRDSRTLAQLLRADLIPEVYQRGEWNRRAQRVMRMRAYWVGKQTEVRNKIRALLAQQGEEVRLEVEERGEGLFRPKGLEFLSLLVLEGQDQLVLVDLLQGHREIRAHIQVTDGFVKALYGELEDAVRIDTVPGFAKTLSVLVAVEIADIRRFPRPADLHSYAGVIPSTHASGGRTVHGPITKQGSAWLRWAVVEAVTPAIKKDLALRALYQRLARRKGANVAKIAVARRLLTIIYRVLSERRNYIPGLMKQSAA

SEQ ID NO: 500726 - protein, 342 aa, unidentified
MIALLFSCGLNGYVGLWARMTSRGPGKDDKHHNPNVGVDISKATLDVYLHPAGNARQFTNDAKGIKALLAWLDGHAIARVVFEPTGPYHHGFERRLGEAGLPLAKVNPLQARRFAQAAGAHAKTDAIDAAMLARLGALLTPPVRPVNSQIIDEMKELHIARLALVKDRTAAKNREHACRSPLLKRHAAQRLAQINRQIEAIDAALNASLHSDLDLAARFKIIVSIPGIGTLTAITMLIEMPELGQIDNKQAASLAGLAPQARDSGQHRGKRHIRGGRAILRQALYMPALVATRYNADMKAKYQAMTAAGKPAKVAITAVMRKLIILANALLRANRPWTQNMA

SEQ ID NO: 500727 - protein, 424 aa, unidentified
MTHTEIQSTEFAAYVGLDWADEKHDLCILEAGSNRIETLKLDHKPESICNWVAQLRQRYQSKPIAIALEQKRGALLYSLMHYEFIVLYPVNPKALASYRDVFATSGAKDDPADAALLLDMVRLHRNKLRPWIPDDPLTREIGLLVEHRRQLVNDKTRLTNRLQALLKQYFPQALDWAGELDSLTAIDFLTRWPQIEALQKASPGELLDFYRQHHCRLGEKLPLRIAEISAAQPLTNDTAVVNASSTMVQALLAPLRGLIAGIETFDQQIEACFQQHSDKDIFSSLPGAGRVLAPRLLAAFGADRERYKSAEQILCFSGIAPVTQRSGKTRFVRRRLACPKFVRQSFHEFAKSSIKWSRWARAYYDQQRQRGNKFHEAIRALAYKWIRIIYRCWQDRKPYDEAIYIAELELRGSPLAKLIKAQAE

SEQ ID NO: 500728 - protein, 347 aa, unidentified
MQFYTQTHQHVCGIDLHTKTMFLCILNQSGDIILHTNIPARAKAFLEVIQPFRDDLVIGVECMFSWYWLADLCLQENIHFILGHALYMKAIHGGKAKSDKIDSEKIARLIKGGTFPLAYVYPPELRPTRDLLRRRRMLVRMRSEVLAHIKLTHYQYNAEFFQKNINKKGNREGIDSLFSDPTIRKNIEVDLSVADHLQEEIVQLENYIIRKTKAFDPRTFYRLQTVPGIGPVLALTILYEIGDIERFPTVQSFASYARLVKCSKESAGKLYGYGGGKIGNPQLKWAFSEAMCLFMRESERAKAYVAKLEKKHGKGKAMSILTHKLGRAVYFVLKRKDAFDEKYFFNA

SEQ ID NO: 500729 - protein, 339 aa, unidentified
MKLYTGIDLHSTNSYLAIVDETGKRVFKEKSPNDMPAILRSLEPYRNEIIGTVVESTYNWYWLVDGLMAEGFAVHLANPSAIQKYSGLKYADDKHDAFWLAEMLRLDILPTGYIYPKDERPIRDLLRKRGHLVSLRSSLMISLQNIITRNCGMKMKTNDIKRLRENRVYPLLADNEDLALAGQVSKDSIDFLTRQIRAIETFLEKKLEIKDAYKGLVMLPGIGKILGLTIMLETGPVTRFEKVGNYASYCRAVSSQWTSNGKSKGKGNKKNGNKYLSWAFSEAAEFARRYDDKARAYYNRKLRKTNFMVAHAALAHKLVRAAYYVMRDQVEFIPEKIFT

SEQ ID NO: 500730 - protein, 382 aa, unidentified
MKKILRFVGLDVHKDTIAIAVAEQGHDGEVRAYGTIASSLHAVDRAVAKLRADGAELHAAYEAGPTGFGLYRHLRKMHIDCLVVAPSKMPVPGGRRQKTDRRDAELLARLLRAGELTAIHVPDEVDESIRDLTRGRADAVDDLRRAKQRLKSFLLRTGYHYAGKATWGEAHVRYLRELRLPLPAHKAVLEEYLIALDQGCERVARFDDLLAAQVPQWCHFPAVQALMAMRGAQLVAATVLVAEIDDIHRFSHPRDLMAFLGLVPHEHTTGSTRRIGAITKAGNGHARWMLIETVQSALFPPKVTAALTLRQEGQSAAVKQLAWKAQLRLHRRGWHLMARGVMKPKVIVALAREMAGFVWAMLQLVPPPAANPPPAGPVLRRA

SEQ ID NO: 500731 - protein, 426 aa, unidentified
MHNKNYISVGIDVGSAFSFMTILAPDETVILKPFKITHNNKDSLERAVSEIKKAEELYSLESRTFLESTGIYHFPLFCYLVDCGFNASIINPIITHSTKNGNIRKVKNDKIDSKGIAKLGLSKDIPVSQFPAKLVLELRSLTRKYYDLTDERSAHINKLKGDLHTVFPQYLDVFCDVTGKTSTMILRQYGTPDKILRGHKKTMIEKISKASRKGLAKASERYEKLCAAANAAKTFGCQIDSIYFNIFLTLDLVEKLDSALDSILNRIRQLITFNKNEKFIQQIKLLNTIPGVGFLTAVTIMCEIGDFSAFRNPKQLFAYFGLDPEVNESGKFVGTQLHRSKRGSRIARRAIFAVALASIRTKRNGEGINPYLRKYYELKSGQKPKMVAIGAVMHKVCNIVFAVLRDEKAFELRSPEETVSSIKDLL

SEQ ID NO: 500732 - protein, 355 aa, unidentified
MIDYTGKKVYVGIDVHKKTYAVTCTCEGAVVKRTGMKADPEQLVTFLQRYFPGSQLKTAYEAGFSGFVLHRHLLNKGIENIVVHAASIEISARDRVKTDKRDSLKIATQLEAGRLRGIGVPSIEREAFRELSRLRAKVAKDKRRIGNRLKSLLHRQGLLGAEKTPVVGKVWIEKVVNEYSGHAAIKLVLKRLQKQWLYLRDEIKALDAELALQAQDDGAIDMIYQSAPGIGPHNARVLANELADMHQFKNEKQLFSFTGLTPSEHSSGEHKRQGHITRQGRPVLRMVLVQAAWVAIEHDTALLRIYERISKTAGKKRAIIGIARRLIGRIRSCFVNGTLYEYDKENTSVPAAVIA

SEQ ID NO: 500733 - protein, 373 aa, unidentified
MPRYSTAFGMDVHLRTTTVCALDADTGEAVTRRFPGNPWGEIAGWMDGFPGPSLAAYESGYLGFAPQRELAGLGVECVVAAVSKIPRSAADSASKNDRNDAARMAKAILAHDISPVWVPSPEVEGIRDLAGAYDGATARLATAKQRLLAFLARRGFVYGGTTPAGNPRKYWTYDFLRWLDKVRPEDDGGARALAALRNEVEAAAEARADLLSEYRAAVDASPIAAEVAALQSIKGCAFALAAAFSAEVGDFARFRSGRQVTAYFGLAPSQRSSGDSVRLGGISGAGNALVRKLAVEGSWCYAAARHQPKLMPRDTGVPLEIRMHGRKGSERLLRRREEMLARGMPAAKANAATAAELVRWLWALGMMCREGAE

SEQ ID NO: 500734 - protein, 344 aa, unidentified
MYFIGVDHHKQASMMTVVDSEGREVRTGRVPNRRLYVERFVGEFRPFMAVLEAGRSSYVMVDLLRELGGEVKMANAVQVKAIAHARIKTDKRDSRTLAHLLRAGLIPEVYQREAWNRRAQRVIRMRAFWVRKQTEVMNKVRALLAQQGEEVRVEVEKREGGLFSLRGLEMMSRLPVEGQDKEVLEDLIEGYREMGVHIKKSDGLVRALYGEVEEARRIDTVPGFATTLSVLTAIEIGDITRFRRVEELHAYAGLIPSTYSSGERTYHGRITKQGNAWLRWAALEAAYPAIKKDLGLAVLYNRLTKRKGPNVAKIVVARRLLTIIYRLLTEHREYIVEMKIRSAA

SEQ ID NO: 500735 - protein, 380 aa, unidentified
MTSMHDSVRFKTTVYAAIELSKKSWVVGIAHPDRDRPSIHRIAGGNLADLIGRLRKTAGEKRRIVVCYEAGYDGFWLARSLAKIGIDCRVLDPASIQVNRRARRVKTDRIDSLALLRALIAIDRGERHVCAVVRVPTVEEEDARRSHRERQRLVRERTGHINRIKGLLFAQGIRGIEPKRRRTRIDFSKLTTAEGRPLAERLRRELEREYQRLELVQSQLRIVEKERDIADAQDPAVERKRELLCALQGVGGASAAILAREVFARPFASRRQLGSYLGLTPSAYDSGSTTRCQGISKAGNSWARRVLIEVAWLWRKYQPGSPLSHWYARKTADQSPRIRRIMLIALARKLAISLWRYVETGLVPDGAVMAKTTSHMAPAM

SEQ ID NO: 500736 - protein, 425 aa, unidentified
MKITQTAQKIKVNFAMDVSVDVHKDILNFFFETKGKEYVDECRNRTTVIQKKLKAYHAVAQENGLQTIRIICEPTGEYQNKMFRTARKMGFLTCFVNAESVSKFRQVETNDNGKTDTKDPKVIRTLGQLNKTMKHRILDDDYLTLRKLNKVLDEVDETKKDIRCRVSTLLVELFCDYSFEKDFLYGSSGKALMDKYGCNPYRIVNAGYKRFSNYMKKTVPRIRQTTLKRLWEDAQSSALNEQPETYIEVIETQLKQLLEDYWRHEIRGNEIVEKMVEILNRLRKKDPMIPEATKGVINDKHIARLLGETGPLDDFANSRMLVRYAGLNIRMRQSGKFRGQNKITKKGRSLLRKVLQRIIFPLVRKNSMYGSYYHGKKEIDKMPGNKIMTCVARQFLKKFYGWYKSGEAFNQQRFFSCETQYKKAA

SEQ ID NO: 500737 - protein, 427 aa, unidentified
MREESSRVEAFWQLKKEIRGSKDYLIVGIDVGKNRHSAFMGTATGKTLLKGLRVENSDSGFEHLLAHVQFYQGRDGFNRVVFGVEPTSVYHKPLAEFLIEHDFMVVYVTNEAITKNRALLDGRWDKNDDKDAANVADLISQAKCHYYDLPHINLRDVRGLLSLRRRLKRQEHGTRIRIRNNLVAQYFPELDKLWNQSQPESLAIVRWCLAPEKLRRLAFEDFFQMVTTRYRGNRQYQRLMKIWSMAPYSIGCKSGKALDVEARILVEGLKQVQEQIREVDKAIENICASFADYKLLLSIPGFGPYVSAVVLAAIGNPRRFRNVNQVKRLAGLDLSASRSGNTSRTAVPVLSKKGKAELRYAVYQAALIASTANTLFMFYYQKLLKGREREKGIRTKMRVKLAAKLLVIAWTLMKKKEPFDLGYLKVE

SEQ ID NO: 500738 - protein, 346 aa, unidentified
MLHAGLDLSRKRLDFHLLDREGATVEVGSVPPDADGLRGLTERLHRHGEPIRAAIESMNGARFVHDRLELAGWQVEIADAQKVKGLAPLACKTDRIDAGVLAELSRRELVPAIWLPDPSVRAERERARWRLHLVRHRSSLKQRVHAVLLAHGKPCPVSDLFGLRGRQLLARLQLPEPWQGTVAASLRLIDELDREIAACETELRRLGADHRYVPLLLTVPGIGWVLAYTIAAELGDIDRFPSPAKLAGYTGLCPRVYQSGESDRHGPLAKQGPRYLRWALVEAATHACTHPAYRDRYQRTKTRLGKQRGAKVAQVDLARRLALAIWHILTRNQPFAPASATDPLAA

SEQ ID NO: 500739 - protein, 308 aa, unidentified
MIIIGCDYHPGFQQIAFVDTETGDYGEQRLEHSEGAETFYRDLAAQGKKVRVGMEASGHARWFERLLAELNCELWIGDATEIARKRERKQKTDRQDAQHILQLLMENRFPKIWVPSGENRDLRQRLWHRHRMVQMRTRIMNQLQAVALNEGLRCKKRLWRQHGREQLESFRLAPWASRRREDLLQLLDRLNPTITDLTQVIEQEVEKCPEARRLRTHPGVGALTALAFVLIIGRAERFQCGKQIAAYLGLVPLEDSSGNRRRLGHITKQGSSMLRFLLVEAAQVTARSIPEWRNKYFHLAMRRGRKRY

SEQ ID NO: 500740 - protein, 459 aa, unidentified
MAQRKPKSSRSKPTLPPQLAAVNLHAAGIDIGAEAHWVAVPPSDDLQPVRCFGACTADLEALADWLATCGITTIALESTGVYWIPLFELLETRGFAVLLVDPQQVQKITGRPKSDRHDCQWIQRLHTFGLLAGAFRPADQICVLRSYLRQRAMLLTSAAQHIQHMQKALTQMNLKLQHVVSDITGVTGLAILRAILAGERDPEKLAQLRDYRCKHDEATIARALQGNWRDEHLFALAQAVALYDVYHQKITECDQHIEAYLQTFADRSDGQPLPPPSRPRKRGGNQPAFAVREPLHRISGVDLTQIEGIDETTSLVILSEIGLDMSRWPTVKHFTSWLGLCPHHRVSGGKVLSRRTKPCANRAATALRLAAACLHHSQSALGAFFRRMKARLGTPKAITATAHKLARLVYSMLKHGTAYVRQGMEEYEQQYRDRMVQNMTRRAKALGYTLVKATEGTPV

SEQ ID NO: 500741 - protein, 332 aa, unidentified
MNMDPQGGVANRDRRPNAGVDVSKQHLDACWVSEQQRLVNDASGWNELIAMLRRADVDLVVVEATGGYERGLVCALQSAGVAVARVNPRQARDFAKSMGVLSKTDRIDARCLRDFADVLARHQNRLKYITAPVEAERLELAALMTRRRQLVDMRVAEGHRMEHATQLAYRSIKRVLRLLDAQIGEIDKQADDHLDRHFKDQRKLLNSVKGVGPVTILTLTSALPELGRLQRRQIAKLVGVAPLADDSGQRKGARRIGGGRSEVRSVLYMAALAAIRHNPVIRLFHSRLIDAGKAPKVAITACMRKLLTILNAMLRDQTVWNALKHAQNPQTT

SEQ ID NO: 500742 - protein, 369 aa, unidentified
MSTRRPLLEVEEEDEVNDVLGADTHKRSHTIAAVSAATGGLLGERTVQVGRRGFGTLLQWARCLEGERIWAPEDCRHVSGSFERFLIERGGRVLRIPTNLMPRHARAPARRGKSDHIDALNVARAALREGPDSFPVAHLDGPELDLRLLVDHRERLVSQRVGLNNTLQWHLHDLWPELELPGGALFSRKWSTRITRRLARAQQTMRVRIAREELRRLRELTHTINALEREITELVGQIAPQLLNEPGFGPLTVAKLVGEIAGAQRFATSAKLARAAGVAPIPASSGNTRRRRLGRGGNRQINAALHRVIVTRARCHAPDARLHRPQTQRRQEHPRRDPLPQALPRPPRQAPAPAAPPDRRTLPSDQFLS

SEQ ID NO: 500743 - protein, 414 aa, unidentified
MKVFCGIDWSERHHDVALVDQDGTLIAKRRIGESVEEFTELLTLLAEAGDNAEEPIPVAIETSRGLLVAALRATGRPIYAINPMAVARYRERDCVSRKKSDHADAMTLANILRTDAHAHRRLPADSELAQAITVLARAAQDAIWRRSKAIQELRALLREFYPGFLAAFAHGSITNLASPEARAILAIAPTPAAGARLSPARIATALRRAGRKRGITTLAAHIQHTLRSPQLHQPPLVENAMGCQLSALLATLATECANADQLTAAATEAFTQHPDHDIITSFPGLADLTGARVLAEIGDDPTRFTDARALKAYAGSAPVTRASGRSLSITRHRIKNDRLNAVGFLWAFATLPKPGPPKDHYARRRTHGDRHAAALRHLFNRMLGQLYHCLHTRQTYDPIKAFGQPATTTNQATT

SEQ ID NO: 500744 - protein, 465 aa, unidentified
MKHPQRRPRKPSASGSSLLERIQPNAAGIDCGSAEHYVAVPADRDATPVRSFPTVTAELDRLADWLAACGVTTVAMESTGVYWIPLYEILEARGFDVVLVNAHHVKNVPGRKTDVVDCQWLQELHSVGLLRGSFRPTAAIAALRAYLRHRETLVQSAATHVHRMQKALVQMNLQLPTVISDITGVTGLRIVRDIVAGQTDPHVLAQHRDGRCRASEAEVAAALTGHYRPEHLFVLQQNLELFDTYQRQMTACDAAIEAHVLTLAAQAPAAAGPLPAPRTKNKPRDNEPRFDIRTPLHQLTGVDLTQLDAIGPYSALRLLAEIGTDMSRWPTEKHFTSWLTLAPHNKISGGRLLSSKTQPSANRAAGVLRMAAMTLGRTETALGAFYRRLAYRVGKAKAITATARKLAILVYRTLKDGLVYHDPGAAAYDAQHRQRVIHRLRQRAANLGLALVDRSTGEVLEGAVS

SEQ ID NO: 500745 - protein, 408 aa, unidentified
MSSHRQPVRPGPGRSSTLLTPDRAGNVVGVDPHKRTLTATVVDPRGGVVASEHFRVSGDGHRALEAWARQFGPIVRWGIEGASAFGRHTAIFLAGRGYDVRDVCPNRTGRQDRARQRGKSDVLDSERVARETLAHPMLPKAFKRAGQDAGPDQQAELLAIWWQARCSLRQRRQHLLSEADALLGGLPLELIERLPETQKVRPRLAALRHVIGRRRFDPPTALRVRTLGGYRAEIAKLDTEDKQVTRELATLIQASGTTLHELRGLSTLSVAELLVEVGDPRRFTDGGFARFNGTAPLAASTAEGSGGPVRHRYNPGGNRRVNAILYRMAITQLRCEPRAQKLYADARANNHTKKEARRILKRHLSDVVYRRMIRDLAALPAQPLLVAEPRAAAAQSRVARQGRAQRAA

SEQ ID NO: 500746 - protein, 341 aa, unidentified
MQITTIGLDIAKNVFQVHGIDVAEKVVVRKQLRRGQVIAFFKSLAPCLIGMEACATAHYWARELTKLGHEVRLMPAKDVKAYVKRNKNDAADAEAICEAVRRPTMRFVAVKSAEQQARLMQHRARDLLMRQRTQLINALRAHLAELGIAAAQGRAGIKELLAIVAQDGDTRLPVDARASLMVLAAQLQAVQAMIGSIEKRIVAQHRSSEESKRLQTIPGIGVLGASTIAAVVPDPKVFRSGRDFAAWIGIVPRQDSTGGKQKLGPISKQGDRYLRRILVVGACAVLRRARQEPGKYPWLTQLLARRPFKVVAVALANKMARIAWALLAKGGTYRAPQLTAA

SEQ ID NO: 500747 - protein, 360 aa, unidentified
MVAEVRLKRRYARMKVLIGVDPHKTSVAVAAVDEASGELVERAAFPQDRTGLRRLERWAKRFPERRWAVENAGGLGRHLAGRLAAAGESVVDVPPKLSARVRLLSTGNARKNDELDALATALAASRNERLAAVDHEASSEVLRLLSERREDLVAERTRALNRLHALLRDLVPGGVAGKLSAHQAARILRGIRPRGGASAHLRRRLASEVLADVQTLDRKIADLNGRIEAEIEASGTTLTEIFGIGPILAARIMGTVGDVGRFPTRAHFASYSGTAPLEASSGEVVRHRLSLAGNRKLNYALHMVATCQARSDARGGTYYRKKIGEGKSRKEALRCLKRRVCDAVFRSLLADLQAPSRSAA

SEQ ID NO: 500748 - protein, 377 aa, unidentified
MERLKFVGLDVHAETIAVAVAEEGGEVRALGIIPNREESIRKLVRKLGPVEQLRFCYEAGPTGYALYWQLTRMGAKCEVVAPTLVPVKAGDRVKTDRRDALKLARNYRAGELTPVWVPDAAHEALRDLVRAREAAKKDELRARHRLNKFLLRHGRRPPMGVKAWTMKYLEWIKREVHFEQMAQEATLLDYLHEVEHAGARIMRLDGAIEEAVKCVPPKMRAVIEALQALRGIARVASVTIVAELGELSRFARAKQLMGYGGIVASEHSSGECTRRRGITKTGNAHLRRVVVEAAWTYRHRPAVGTSLRKRQEKVSEEVKEIAWKAQERLHQRYRKLLAKGKNKGIVVTAVGRELLGFIWAIGIKVEAAQKESLQQAA

SEQ ID NO: 500749 - protein, 343 aa, unidentified
MQISTIGVDLAKNVFQIHGVDKDGKVVISRQLRRKQVIEFFSNIPPCLVGMEACGTAHYWARELTRLGHTVRMMPPSYVKGYVKRSKSDAADAAAICEAVTRPSMRFVPIKTAEQQAALMLHRTRDLLIRQRTQLINALRAHLAELGLVAEKGREGVVELAAIISDERNSHALPPAMKQALQAILDQLTALQQQVGQLDRCIHAQHRASDVSRRVETVPGIGVIGATAITSTVTDPSVFKTGRDFAAWIGLVPRQYSTGGKEKLGGISKQGDRYLRRLLVIGATAVIQHARRHPEKHPWIMRLLAKKPAKLVAVAVANKMARIAWAIMAKGGTYRAPALAAAA

SEQ ID NO: 500750 - protein, 344 aa, unidentified
MELFVGLDVSLNSVSICIVTADGVAQWQGKSLSEPAALITALSPYRNEIKLIGIEACPLSEWLYGALIESGFPTVCIETRHAQRFMSSRPNKTDRSDARGIAEMMRLGHFRPVHVKSKASQLVRTVLIARQKFVDHLVAIELTIRGLLKVHGLKIGAVHRCAFAAKVEALLADAPELRLAIEPLLESRNAMRKQKVLLDRRLSQLAREDEICKRFMTIPGVGPIVSLAFKATIDDPRRFQNSKGVAAHLGLTPRIYQSGEIDRSGNISKCGDKLMRHALYEAANSHLRISKKWSSLRAWGVKLAKRVGAKKACVAVARKLAIVMHHMWMEETDFRFGKTPMASA

SEQ ID NO: 500751 - protein, 412 aa, unidentified
MKRGVSKVKEAKGSASRSTVGCAIARAEPHVERHKGVIYTEHRRQTMDEITYVGLDAHAQTTAIAVAEGGGAAPRFIGTAGARFAELTKVLGKLGKPGRLRVFYEAGPCGFAMVRQLRHAGYHCEVVAPSKIPRKPGDRVKTDRGDALSLAGLARAAQLTFVTVPDERGEAMRDLSRARVDAVRARLKARQQLKALLLRHDRRYTGKTSWSAAHERYLAQMSFAHRAQEIAFVEYRRGIGEAQARVELLTQALSRELVGWRMRPLVQALMTLRGVDELSATSLVAELGEMKRFAHPRELMGYLGLVPSEYSSGQKRALGAITKTGNSHARRLLIEAAWNYRFPARITLPLQKRQEGQPAAIRDIAWRAQLRLTQRYRRLTARGLQHNKVCVAIARELAGFVWSISQQVSIAN

SEQ ID NO: 500752 - protein, 279 aa, unidentified
MLTQGKTLVGLDVRAAQTHAAVLDTGSGELRVQKMWGAPEEVVSFLQALGPGVRAVYEAGPTGFGLARAARERGIEVQVVAPGSIPKGPTDRVKTDRRDAARLARLLAAGELRFAYVPSVADERFRDLTRSIEDVRGDLMRARHRLGKFLLRRGERYGGPGGAWTSKHMSWLRSLRFEDACSQASFADYLAAVELLLGRRASLLEALEQAVPDSSHAAVIGRLRCFRGIDTLSAAGIAAEVGDFGRFAKPSLLSGFLGIVPSERTSDLKRRQGSITTGS

SEQ ID NO: 500753 - protein, 355 aa, unidentified
MDSKKYIGMDVHKESISIAVMNGAGKIVMECVIETKASMILQCIDGLRGDLHVTFEEGTSAAWLYDLLKPHVTKLVVCDPRKNASMREGNQNDKIDARRLAELLRLNHLNPVYHGEHGLRSLKELVRSYLTITKDLGRVMSRVKAIYRSWAIPCTGKQVYALRHRAEWLGKITEPGVRRRAEFYYQQLDALRTVRQEVRRELLAEGKKHQAWKRLCQIPSIGPIRAAVLLGILQTPHRFRTKRQLWTYSGFGIETQSSADHRSVDGQLERAKKQISIRGLNRNCNHDLKNLFKGAAIVASSKPGPFQEFYTALLARGIRPEMARLTLARKIATIVLIVWKRGACFDAQHLKPQAA

SEQ ID NO: 500754 - protein, 397 aa, unidentified
MNRLLYIGMDVHKESFTLSTYHVTLDESELTQDFIGAPLKITDATASGVEKYVKNLKTMLNIKATDNVWIQCGYEAGCLGFDLYFQLKAKGIECVILAPSTIQKSANAKKKKNDPLDSKAIAMALANKTYKSVHVPDKDDLNVREYLRMRNAHRDAVKKVKQQILAFLLRQGIKYSNTNWTKAHITWLHGLKFDHALLKETLDEYITSLENYVAKLERLDKRIEEFAQGDKYQEKAAELGCLLGIKTQAAMTMMSEISDFSRFRTASEFASFLGLVPGENSSGEKTQRISITKSGNSQCRKTLIEAAAGICRGKVGHKSKELMRRQALCNNPIAISYADRANERLRSKFYRLNLRNGKPANVAKTAVARELACFIWGIMTDTYNGKVPRNDEYALGK

SEQ ID NO: 500755 - protein, 344 aa, unidentified
MTKKCMAGIDLPSNNLFCAMVDRDGKRVLEKKLPCDLASVLAALKPFKKRLEKIAVESTYNWYGLVDGLQDHGYTVVLAHPAAMQQYDGLKHADDKSDGFFLAEMLRLDMPPTGNICARAVRPVRDLLRRRTGLVPKRTSLILSLKSLPPRRTGRDLGTGRIKAMEPKEAEKLFEHPADRLITRLDLQLVEPLGQSLEQIEAAVLAQVKGLPNYQVLQTMPGVGKILGWTITLETVDPQRFASPGDYASCCRCVDSRRLSNGKKKGQNNAKCGKAHLAWAFVEAAQFARRHDDRCRKFHDRKSAQVNGIVAAKALACKLAKAAWHRMSHHTHDDAGRMFPGAKP

SEQ ID NO: 500756 - protein, 427 aa, unidentified
MKDRDIKLEAVTPNTLVVGVDIAKETQWARFVNYRGLELGKALKFRNNKNGFDSILASIKAICKNKRFDDVIVGMEPTGHYWKPLANYLLMHRTKVVLVNPYHTKRAKELDDNSQTKNDKKDALTIAKLVCDGRYYTVYMPQDIFAELRVLTNSRMSLMQRHNALKNTITAVMDEYFPEIVTVFKKPLKGKASMQILKSCPFPSLILELGVDGVLAEIKKAVKKTVGRKKAEQLVETAKTSIGVSYGIASAKLKLELMIEELELLNRQLVQIEEAMDQALADTGFRETILGIPGIGVVTAASFLGEIGDPMRFDHPRQISKMAGYNLVEDSSGKSKSGTVISKRGRKNLRNILYQMAMTMVAINPEMKALYNYLKTRQKNPLKKKQALVVISKKIITVIYNLVKKQTEYKAELVLGEFRKNQFKQAA

SEQ ID NO: 500757 - protein, 318 aa, unidentified
MAQKTRFVGLDVAKSKVDACIRSEGLRLSAPSTPEGRAGLVAWVRANRVGRAVMEASGGYERGWAEALRAAGVEVRIVDPKRVRHFAKAAGRLAKNDPIDADTIAWFAEAFPDREAQPHDPARDEIDRLVAARTALKDAEDRIKQQGEHRPPAVVAKALAAIAKTIRAELRKVEGAIAAKIKANPGFARRAEIIASVPGLAGQTAAGVIAWLPELGHVTNQAAAALIGAAPYDDDSGGRKGQRHIKGGRRKLRNLLYMPVMGAATRHNPMLKAHYQRLRARGKEAKVALIACMRKLIVILNTMLARDQTWNPPVRAAR

SEQ ID NO: 500758 - protein, 414 aa, unidentified
MDRSYLVAGIDVHKSMLAVVVSDVAREGEFQFQRRKFGATASELKALTVWLDQQDVREAVMESTAQYWKPVWQQLEGHCELFLAQAHSNRAPRGRKRDFADAERLLRRHAAGELILSFVPNAEQRLWRTMTRSKHQLTRDRVRLHNQIESLLEDGRIKLSGWVSDLLGVSSRRILQALSTGETDVTKLAALADPGLRATSEQLQDALSAAATLGALHRQVLGLFLERLALIEKHMEMLDKSIAGALHRYREAVERLAEVPGYGIDSAHQVIAEVGAGAESFPSPEQLSSWVGTCPGREESAEVSNNNRSPKGNRMMRRVLTLVANAAVKSKGSVFQNLYRKWVVRMGHNKAIWAVAHRLCRLTWKILHQSVRYVEYGTRANPQAVKKRANKLLRDLKALGYQVQITPTQPEATA

SEQ ID NO: 500759 - protein, 340 aa, unidentified
MNKVTLLGIDLAKNVFQLLGLNSSGQVVFKKRISSREKLINFIAGFPVCTIAMEACGGSNYFARKFLSFGHEIKLIHPAFVKPYVKTNKNDSNDVEGICEAASRPTMRFVTPKTIEQQDIQSLHRIRSGFIEERTALTNKIRGLLMEYGITIAKGIRHIRKLLPDFLEDAENELSHVAREFLNDLYQQLIKKDENITKYDKLLQNILHENEDCKKIEKIEGVGLLTATAVIASIGDAKEFKNGRHLAAFFGLVSRQQSSGNKQKMLGISKRGNSYTRTLLIHGARSAILASSKKNDPKSKWIQALVERAGQNKAAVALANKNAIIIYALIANQTQYQKAG

SEQ ID NO: 500760 - protein, 370 aa, unidentified
MGKSVLYVGLDVHKMSMDLAIAEAGSGAEVRYYGRIGGALEALDKATRKLNAKGAELRFAYEAGPCGYQVYRHLTAQGYSCLVVAPALIPRRPGDRLKNDRRDALALARLLRAGELTPVKVPAEDDEAMRDLTRAREDAISVERRAKQRTAALLLRHGRVYPGKTTWGRGHWRWLVEQVMAHPAQQIVLQEYLDAVRQASARVERLTGQIRELIPQWRRAPFVVAYQALRGVSLIVAATVVAEVGDLNRFNNPKELMAYLGLVPSEHSSGASVRRGHITKTGNGHARRVLVEAAWAYRLRARVTRPLLQRQEGLPESIRQLAWKAQLRLCARYRRLLARGKAKQTIVTAIARELAAFIWAIGQAVELVTA

SEQ ID NO: 500761 - protein, 444 aa, unidentified
MIRKVMAAIYQCVAGLDVHQGTVVACRRRLIGNGQAELEIRTFKTTSAGLRELAQWLLEWNVTHVAMESTGIYWVPVWNVLEGQFKLVLANAQHLKKVPGRKDDQSDAEWIAQCQQCGLLRSSFVPPSEVRQWRHLTRQRVKLTDQRTGVINRIHSVLEQGNIKLSNVASNIMGVSGRAMIKAMSNGESDPAKLAALSQGRLKADFEQLVAALDGQLNENQRWLLKRLLGQVKTLEDEIAIYSERIAEQMRPYQTQLERLDTIGGIGQRSAENLLAEIGPDMSPFPTDDQLVSWGGLCPGQNQSGGKNRSGKTPQGNKWLKRTLTEAAWAAKLKKGSYLAALYHRLAPRRGKKRAIIAVARTILQSAWHVLKEEVDYKELGGDYLDHLNEEKTTKYFVKRLEKFGYEVELRPKKDKPAKAELKPKPAKKVTVRRKPKPATQATA

SEQ ID NO: 500762 - protein, 453 aa, unidentified
MSRMRKNNKKKVSAPTLYCLNPNAAGVDVGATQIYIAVPVDRDPQPVRHFSTFTEDLHAAADWLKACNIETVAMESTGVYWIPFFQILEARGFTVLLVNARHVKNVPGRKSDVSDCQWLQYLHSVGLLRGSFRPEQEVCTVRSILRHRDSLVQMASSHVQHMQKALDQMNLQLHHVISDITGVTGIRIIEAILAGERNPHTLAALRDGRIKATADTIAKSLVGDYRREHLFTLSQSLTAFRHYQELIGACDSEIAQLLGAFESKVDPPEGSATESQDGQKPSGDAPRFDLQSHLYRIFGVDLTRIPGINVLTTQTLLAEIGPDLSCFDCAPAFTSWLGLCPDNRVTGGKVMSVKTRQVKNRAATALRMAAQSLHRSQSYLGHFYRRMRAKLGAPKAITATAHKLARIIYHMVRTRHAYDETICAQNEKRNRQHLEARLRRQARELGLQLVAAS

SEQ ID NO: 500763 - protein, 431 aa, unidentified
MSERDYSKQVAKRQRIKNTTLVVGVDVGKACNAVGFMNKEGKVLGSCAKVYNSCEGFEQFTKMVEDLKARHGLKDVLIGMEPTGHYWRKLAYFAKEQGYEVRFVRTTALKHHRELDESASAKSDPRDALTITNITREGKYIDTVIEDGPLRQLRTLSKARERLLRYSVSAKNSLHAALDDYFPELHELFWSMGSRSLWAILDRCPFPEDVLSIQVSTLKDLIVQSSRKKAGGSQKAKALYQAATKSIGLRPIGSADRYRVQMCLEEVKRTVRTLKSMDQQMKSMLQDIPAAPYLLSIPGIGALSAAVFLGELGNPSHFHNARQIVKYAGYDPQESDSGSWVSRKFISKKGRWLMRKYLFFMSMRVVVLTHYFKTYYERKLETKNRVGQLPRRKEILCAVAIKLIKVIFALLRDKRRFDDTRDTVMALSQAA

SEQ ID NO: 500764 - protein, 354 aa, unidentified
MKYYTSTTQFNCGIDLHARQMYVCLMDRDGKKLVHTNVRNNDFAFFLKLVAPYRHDLTVCAECMFGWYWLADACQAAGLQFVLAHALYLKAIHGGKNKNDRIDSEKIAHLLRSNLIPPAYVYPADKRPLRALLRQRLLYVWNRSELLARLQSHQLAYNRPTLHPTPYNRQACEDKLLAQEDHPVRRLALQNDLALIGHYDTQLARLDKDLLQLTKQSASRDFTLLQTTPGIGDYLGLTLLHEIGDIARFPTVKNFLSYCRLVKGTVASAGKIKGLRGAKLGNPYLRWAFGEAAVIAKRDIVLGPLAQRLEARMGGNKFKANTVLAIKLARAVYFMLKNKTVFDPERLVAALSKN

SEQ ID NO: 500765 - protein, 415 aa, unidentified
MDVVHPRCAGVDISKRDAKVCVRIQGAGRARARSTVTTWEAVTNRILALRDHLIAEEVTLVVMEATSDYWKPFYYLLEDAPFEVMLVNARHTKGIPGRKTDVSDAAWLAELGAHGLVRGSFVPPEPIRQLRDLTRTRTAITRERGREVQRLEKLLEDAGIKLSSVASDITGVSGRAMLEALIAGDRDPAGLADLAKRRMRSKIPELTEALTGRFGEHHSFLARLHLDLIDGHSRAIEELDERIEEAMQPFRATRDLIVTIPGISTVVADVIIAETGGDMSRFPSAGHLASWAGTCPGSNESAGRVKSTHTRPGNPYLKGALGAAAMSVARSKNTYLAAKFRRIASRRGPVKALVALEHAMLVAIWNMCSTGTYYADPGEDFFTRLHPDRARDRALEQLHRMGYAVTLEPLPAQAG

SEQ ID NO: 500766 - protein, 343 aa, unidentified
MNEVTTIGVDLAKTVFQVHGIDALGQVVVRRQLRRSQVLPFFEKQASCVVGIEACATSHHWAREIAKLGHDVRLMPARYVKPYVKRNKNDAADAEAICEAVTRPTMRFVAVKTEEQQSVLMLHRTRQLFVRQRTTLINAIRAHLAEFGIVAGVGRNGVERLLRLIDDGSDERVPPVARECLQALRAQLVLVKRQILEADRRILAWHRSNALSRRLETIPGVGPLIATALVASIPDPHAFGSARDVPAWIGLVPKQNSTGGKERLGSISKAGNRYLRSLLVVGALSVIRRAKQVGYTRRPWLAELMARRPVKVAAIALANKIARIAWALMVSGKHYKEPVPQAV

SEQ ID NO: 500767 - protein, 341 aa, unidentified
MNKHNVIAVDLAKRVFQICVLDKANKVISNKEIRATRFHQFLARQPTSLLAFEACARAHHWARIAENYGHQVMIIPAQVTANYRQGQKTDHNDALAIAVASRQPSLKTVGIKSLDQQSLQTNLRLMQHVSDQRTATGNSLRGLIAEFGIEIPQGISALKRHMPTILEDAENGLPLSCRDALYEVWQLWLKLERSLSQIEGKLVELVIALPVSKRLLALEGVGPKNAAALYAELGNGSHFNNGRNAAACIGLTPKQHSSGGQVTLGGIGRHCGNQRLRSTLITGAHSMIQALSRRSAKTVKEQWIVDLVARRGKGRAAVALANKNVRTAWAMLKNNESYQAV

SEQ ID NO: 500768 - protein, 335 aa, unidentified
MQVYGIDLSKEKFDVNFIDSKGKEKNREVKNAIVSISRFLSSVSKDSILCAEHTGAYGDLLVYLCNQLNIPIALVPGYTIKHSLGLLKGKSDPLDSRRIREYGERFTDKLEYAEYDEENIVELKQLYTLRNQLVKQRGALRTVDTGRGHLPMQSISVHNHIHAIFSSLDNEITAVEDEIETLIKANQDLYENYKLAKSVFGIGTVIATDLLIKTGNFKAIDTHRKAASYAGVCPFPNTSGKMVAKSKTSPFADKKLKSLLYMGAKSAVRNNKEFRLYYQKKQLEGKPHYLIMNNISNKLLRIVFSVVRNKTPYTSDHVCIDPRERNINSSTKKVA

SEQ ID NO: 500769 - protein, 357 aa, unidentified
MYEYFAGCDTHKAEHSVCIINQTGEILESFSIQNNLKGWMQALNTFQKYQNILCGIENHANYAKLFSKFLISNKIQLKEVNPVFTGKTRKASTRRDKTDEIDAFVVAKITRDEKNYLPDIAFDDRQEQVKSISNQRDNIIEEKVRLVNRLHSKLIHIDTSYKKRYGNDISNPKAITLMENDFSKLDNIQSLLILKDIKRLKSIIEEILELDLLMNEYAKKDSLIENLDSIDGVATITAFKLVALIGDISKFKNENNFASYAGAAPVKFASGNFSKIVKNRGGQRKLHCLMIQITRSQKRYNLEAMKYFEKKLNEGKTEKQAMISLQRKVVRIVYMIYKHNEPYNYQKSEPTRLLQVA

SEQ ID NO: 500770 - protein, 314 aa, unidentified
MSQPIFVGIDVAKDTVEVACSDASSQSFTNNEAGHAKVLRWLARKSVALLVLEATGGYEQACAVALAAAGLPVSVLNPRQARAFARAMGRLAKTDRIDAGVLAEFAAVLHARGHQPRPLASVEQRELGALVARRRQLVVMLVSERQRLGVAHARAKPSIEAVIELLLKQLADIDDDLKRTLKDRHADLSALLQSVKGVGPTTTSTLIAELPELGALTRKQITSLVGLAPLNRDSGTLRGQRHIFGGRASVRRVLYVAALVASRFNPAVKACYERLLAAGKPKKVALVACMRKLLITLNAIARTKTPWRSDFGST

SEQ ID NO: 500771 - protein, 414 aa, unidentified
MNTDDQIVERVIGLDAHPDSFTAAALRGATPAAAVTEKTFNQVPLAQLPRWAKKHTTPQDRFVLEASGNSFQIVRTLASIGRKALVLESCQMGKLKEAHANNDKISAVRIAKAYLAGTAKEVWVPDTRTQERRDCYHAHRKAHKRTTQLRNRLQSYLSDNGVRLKKGTRLTQRLQASPLIQKARDWSPLQWRVIEGILLELDHAEKQRQHWRSLIAQEVLSDPTLLSIVRLCGVREMIAFALGAFIGDIQRFAEPKKLVKYIGLNPAFDHSGKGEWEGGIGGHGHKELRCLLIEGAHAILRSSRTALAQWGKKLLARKGEKNLVAAAVARKLTVAVWYLLMGRWTELEEIDQPLALKVSKIISQLGTDELKKLGKKRRDFREEIYQRLKTGRAYVLELKKTFTPQSAPSTGATR

SEQ ID NO: 500772 - protein, 417 aa, unidentified
MNESAKLLPQKYMEGDKVHVLGIDVSRGKSNCALLHDHTVIKEFQIIHNKSGLAKLKSIITSDLPVMAVFETTGIYSRVLTRFFSEEGMNYLEINPLESSIRMAGLRRQKTDRSDAVKLALLGIDQKSLIHGRRPYSRPYEQLHLMAHRYLEITKERSRIINHLHAALDQTFPELNDIFNPIRSVLGLTFVSLFPHPDFLTGYIPGTMAKQIIGLVSPKIHSDLIVRRCNEVWQAGQLSYPAQPANSFLTNQIHSYCEEIQRYNQAHDLLKRQLITYAKTFPEFKLIASISGAGEISTALLLGFTGKIARFPSYKQLNAYVGIDLRRTQSGGLKEADRINRRGQSSARYIMFEMIRSMLRNKARIDNHIVDYYYKLKKGPHPKPDMVAMIACVNRLDRTIMNLVRTNQIYNYARTSH

SEQ ID NO: 500773 - protein, 361 aa, unidentified
MGAVTIGMDIAKGSVQLFGEGLKKKLYRPEVLTYFGKLEALTVALEACSGSHYWGRELAKLGHTVRLMPPQYVKPYVKRNKNDAADAEACWEAAQRPSMRFVPVKTAAQQAALQLHRERERLICERTKVVNQVCGFLLEFGIALSRGVSKFAMNVREALSKHTERIPPLSSNMLNRCVGDFNRLVERIEECEELIKTQLRNDPVAQKLDTIAGVGPIIATAARASVPDIGHFKNGRHFATSLGLVPLQASSGQTIRLGKMSKRGNPYLRKLLIQGAHAVLNTVGRKDDAHSRWLQELVRRRGRCKAAVALANKNARIMYVILAGKAERFSPDAAHQPRENEKPALGAGPRVDGQEGVTMAA

SEQ ID NO: 500774 - protein, 320 aa, unidentified
MLSYCGIDVSKDCLDVAVLPDGECFSVCNDTAGWAELVERLRSFSIAAIGIEASGGYERGVMRALLAAGMPVRQVNPFRLRQFAKASGVLAKNDPIDARMIASFVAIMPTRPAQRHAPAIERLTEMLAIRRQLSAEKVAAENASRLLENAMLRRLSRRRIARLTADIDTLDKHLLAIVVSDAALGHRYELLPSMPGVGPLLACTLIALLPELGTMSRKQVAALVGVAPYAFESGTLKGKRCIWGGRAPVRHMLYMAAMSASNWNPVLRAFHARLKGAGKLPKVAIVAVMRKMIVALNAMVRDDVAWADRYRGRHPVPSAR

SEQ ID NO: 500775 - protein, 343 aa, unidentified
MQTITTIGLDIAKSVFQVHGVDAAGRVVIRRQLKRRHVLAFFEELPPCLVGIEACASSHHWSRELQALGHTVRLMPPAYVKPYVKRQKNDMADAEAICEAVTRANMRFVPTKTPEQQSCLMLHRTRHLFIRQQIAVINSIRAHLAEFGIVAPVGRKGVTELLQIVADPSDQRVSEVARACLAALGTQLLNLKKQILDFDRMIMAWHRSNQTSRRLHYIPGVGPMLATALVASVADPSTFRSGRNFSAWIGLVPKQHSSGGKERLGGISKQGDRYLRGLFVAGALAVIRYAKIHGTGHRPWLTALLARRPTKVAAIALANKIARMAWAMMAKSERYKQPAALAR

SEQ ID NO: 500776 - protein, 455 aa, unidentified
MDGSYAGVDWASEKHDVLVADAAGEKLLAATFKHDEKGLRLLCRQLVRLKVRLVAVERPDGLLVERLLDAGLRVLALHPNQVAAARDRFRVSGGKSDGFDAFVLCELARTDHRRFRVLEPDSDATKAIRALTRGREDLVAARTALVNQLRAELERFWPGPVGLFSDLHSQISLAFLERHPSPADARGLGEARLQAFLARQRYSGGQKPAQLLAKLKAAPTGRVGELELATRRQLVCGLVAMIKALNAQIAELERQIATAIREHPDGAVFTSLFKSAVITAAELLAEMGDCRARYPTRDTLAGDAGQAAVAIESGKRKAACFRWGCNKRLRQAFHTLADTSRHHNPWAQDLYAQAIARGHDHPRALRTIGRAWCRIVWRCWQDGVPYDPARHRALQRHVIVTIPTPSGPVPDIAATQRMSGSAVTRRAARRAERAALDRKPTSAKPPARPAKRRRA

SEQ ID NO: 500777 - protein, 374 aa, unidentified
MDSSLSNDGIMMCQTGDVKFFQLTEREESEMKISVFSVDLAKGKFQVHGFDALGERRLAKTLGRAGMQRLFSAQEEQGEVVMEACGSAHYWGRYLERLGYRVRLIAAQHVKPFVVGNKTDANDADAIYEASRRAGIRSVSIKSIAQQDALVVHAHRERLVKARTALVNQLRGELAERGVVFGKKTGVLRRGVVAVLEQEAGGEVTEYLQRWVSERLDEWRSLDERIKACEREMQHTYRTNPACVQIGAVEGIGVITATATVATVGDARQYESGRHFSAWLGLTPKERSSGQTRHLGGITKRGNSYLRKLFVHGARAAVRAAQRKTDARSRWINALVERRGHNKAVVALANKNARIVWALLSSGECYRTPMAAAA

SEQ ID NO: 500778 - protein, 343 aa, unidentified
MEESQAVVVGVDTHKDSHSAALVDELGGLVASTDVGANQRGYVQLLDWARSRSSHRTWVVEGTGSYGAGLASFLAGCGEVVYEGDRPQRRKHGAGGKSDQLDAIKVAREALAREHHALPRQRGNREAIRVLLSTREGVVTAYRQALNQLYALVVTAPEPIHERLIRLKGEQLVNACFRLRCTAGDIETSVTTRVLRRVAHRIRSLQVEAADYESQLEELVAETVPALLSEPGVGAITAAQLLVSWSHAGRIRNENAFAAMAGVAPVPASSGRVVRYRLNRQGDRRLNRALHVVAVCRSGFHTPTKNYIARRTAEGKSSREIRRCLKRYLARRFFRLLQGLDTP

SEQ ID NO: 500779 - protein, 401 aa, unidentified
MSVSGVGVARPTLLERGLLGWAEPIPSAGGRAVGHSTEVFIGIDVAKTRNAVAIADGERGGEVRYLGEVDASEESMRRLIKRVAAKHDRMHFCYEAGPTGYGLYRLITTLGYACTVAAPSLVPRKPGDRVKTNRRDAVALAKLLRAGELTPVWVPDETHEAIRDLVRARAAAVETVRVHRQQVSGFMLKHGRIFPRKTTWGARHLRWLQEQSFDHPAHQIALQEMVEAVRTSKERAERLEAAIEEFVRTWSLAPVVRALQALRGVDLIVAVTFATEIGDMRRFDNPRQLMGYLGLVPSERSTGHTVRRGGITKAGNGRVRHMLVESAWTYRHPPRIGKAKLYRLDAAPPRVREIAWKAQSRLTARYRALSGRGKKTTVVCTAIARELVGFMWSVAREAQTA

SEQ ID NO: 500780 - protein, 305 aa, unidentified
MHGIGIDVSKATLEVAVYHGPWRQFDNTVAGHRKLAAWLKPLAVRRVVLEPTGGYEQQVLDALHAAGLPVVRANARQVRDFARATGQLAKTDRLDAAVLAQIAQVLDLPLYQPAHPWQRRLAEYVQSRRQVVQMLVSAEQQLGWVKDRQLRGALQANVLQLTKSKAFLDQQIAQQVRQQPQLEAIQTLKGVGPVLLAVLASELPELGRLDGKAIAKLVGVAPLARDSGTLRGTRSIWGGRADIRQALYMSALSALRYEPRLRQFYQSLRARGKAAKVAIVAVMRKMLVILNARARDAWTVLPAGE

SEQ ID NO: 500781 - protein, 364 aa, unidentified
MVEDRRTIGVGLDVHKSSVRLAAVSGGELLGELSLPYDHEAVERELGAWPDARVCYEAGPTGFGLYRHLVAAGVDCVVVAPGLVPSKPGDRVKTDKRDARRLAALHAGGLLTAIFVPSPEQEALRDLVRAREDARLDRMRARHRLGKFILRHDRRMPTTCWGVTRRAWLGRQAFELPGQQQAFDDYLFAVDQVDRRIEGLEAELSRLAKDGPHRELIARLRCIRGIDTLTALGLAAEVGDFTRFRTAAQFMGFVGLVPSERSSGESRRQGSITRAGSAHARRLLVESAWHARRRPTVGYELGRRHRGQDPAVLERAWRCQQRLHRRWQRMAGRGKPSQKIVVACARELAGFVWAIATDQPMRTR

SEQ ID NO: 500782 - protein, 325 aa, unidentified
MAKQQQEVSFAEVVERGCGLDVHKKEIVATVAGSGIKSETRSFQSTTRSLTELKDWLLELGVTHVAMESTGVYWKPVMNILEPGGFTILVVNARHIKYVPGHKTDKKDSAWICKLLRAGLLKGSFVPERSQRDLRDLTRYRRKLVQRQSAEHNRMIRIFEDANLKLSSVFSNIRGKTCTAVIDAVIGGETNPEKLAELCTHWRLKSTREEIALAVEGCFTEHHKFMIGEIRANIKSIEESIERLDAEIEARMKPFDAQIHAICEIPGMDMKSARELLAEIGVDMEVFPTADHLASWAGLCPGNNESAGKKKVHTPTTATKPQRQY

SEQ ID NO: 500783 - protein, 364 aa, unidentified
MYYPISIGLDVHLNSISASSLDSDTGEVTQRGFAGADTEGLVRWILSFGQKAQAVYESGFCGFALKRELDAAGIPCKIAAISKLARPAGDRVKTDKRDATFLARQLAVGNIVAVHVPDIDREGMRDLSRALDIVRANLTAAKQRVMQTHHRYGLRYSGETKKAWTIAWLSWAKSLKMPSVGARQAYDFHLAEALRLIDEKKRIEALINDWCNDDSIKWKVAALTAIKGISQRTAFCLISEIGEFSRFSKGSGFSSFLGLVPSENSSGETIRRGSITRTGNEHVRKTLIESAWCFTRIKTPYKKTPDGVKPEIAAIAQKANTRLFEKRRRMGNVKNPCVINAAIAREMACWIWALAVAADIDMAN

SEQ ID NO: 500784 - protein, 311 aa, unidentified
MNNTIGIDISKDTLDAHRLADGQHKQFLNGKTGHAQLVKWIGKQSDPLIIFEATGAYHRQLERVLGTHIIPFVKVNPKQARRFAQASGKLAKTDRVDCEMLAKMGAALQLMPKPFTAENLYDLRELLSARRALIKDRTAAKARKATVINALIKQQLEKRLRQIKNDIAKIDALMLDVAREDQYMSERLDILFSIPGIGVITALMILVDMPEIGALNNKQVASLAGLAPMSQSSGKWMGKARIQGGRPNLRNAIFMPALVAIRHNADLKTKYDQLVAAGKEKKVAITAVMRKLLVLANALLRDNRKWAEKAA

SEQ ID NO: 500785 - protein, 410 aa, unidentified
MGLYCGIDWATQHHDVAVIDDDGRVIARGRVSNDAAGFAALLTLLAEAGDSAAHPIPVGIETDRGLWVGALRETGRVIYPDHPLTASRYRARYAVSGAKSDATDAVLLANIIRTDPDAHRPLPADTELAQAIRVLARAQQDAVWARQQVGNQIRDLLKDFYPAALAAFDQLPEGGLARADARTILAAAPTPAQAAALTPARLRRLLVKAGRRRHLDRDVERLREIFTDTYLHQPPVVENAMGIQLSALLRQFDAAATAADELAEAAIAHFERHPDAAIITSFPGLGMLAGARVLAEIGDDRSRFADARGLKAFAGSAPITRASGKKTVVLHRHIKNRRLAAVGPIWALSSLRASPGARRHYDTRRAAGDWNHQAQRHLFNKFLGQLHHCLQTGQHYDEHRAFPPPLLLAA

SEQ ID NO: 500786 - protein, 391 aa, unidentified
MIYVGIDVAKDKHDCFITNFDGEVLFKAFTIANNLDGFNDLYQKIVSVTEDITKVKVGLEATGHYSYNLLGYLIDKSLPTYVINPLHTNLYRKSLSLRQTKTDKVDAHTIALMMMSGVNLQSYSNTSYHNEELKSLTRYRFDKVQERAKLKTSISRLVNILFPELEKLVPSLHMVSIYALLAEFPSSAQIASCHLTRLTNLLANASKGHYNKEKAIEIRNAAKHSIGSNMPAKSLELKHTIRLIQELTSEIDEIECFIKSIMDEIRSPILSIPGINYRMGAMIIAEIGDFNRFSSPDKILAYAGLSPSTYQSGQLDGCYSHMEKRGSRYLRYALFNATKFVCIWDNQFSAYLAKKRSEGKHYNVAISHAAKKLVRVIYQLEKSGQLYHRAA

SEQ ID NO: 500787 - protein, 348 aa, unidentified
MLADQLDYVVGVDPHRDSHALAVVQVVSGVVIFEATVVASSDGYAQALKLADQHAPGRRAFAVEGTGSFGAGLTRFLTVRGEQVLEVGRLRRERRSGGKTDALDAVRAARNVLTSERPATPRAGGERQALQALVAAREGAVNAKRAGLCQLRDLLITTPEPLRSELRPLTRARLLQRLAATRPDGRRDPELRGSMLALRSIARRVLQLTAEERELAREIETITCRLAPQLLDQPGVGPHAAAQLVLSWSHRGRIGSEAAFARLAGAAPIPASSGQTVRYRLDRSGDRKLNRALHMILVTRKRSHPATIAYIERRLQEGKTRREANRCLKRYLARNLYRLLEHGAPPAT

SEQ ID NO: 500788 - protein, 418 aa, unidentified
MVHVHGRRVQQLVEPLRKIPPEQVIAVTVDAGKATAVALVADFTGERLCPPFTFGLNRSGIGELVARVGSATEERLARLVRVGVEASGYHLPLVAPGVLPSAWEAVEFNPAHVAEQRKTNGKRGVKTDVIDATAMFDLLVAGRGSPVHASNPAIVELAAWARYRRSRAALGRDITRHLVSLLDRAFPGLTGCLHRVMVTRVGRLVVTDFRDPARLARLGVARFRRYAATRGLRVTTDVAERLVSAAREALPAADAAVAREAIGWDLALLVEINRQVTHADEHLVRLLPATPYQVLTTTPGWATIRAAGYGGAVGDPSRWATAAQVYRASGLTPAVHESAGRRVDGEISREGSVGLRWALLELALGLRHHDRAARAYAAQLADRGKHSMIIWTALANRANRIAFAMVRDQTVYDPACWR

SEQ ID NO: 500789 - protein, 403 aa, unidentified
MSIDGAPVKAASVVAVDVGKNTVTLSVTDAARRRLLGPVDFAMTAPAVAVVLERVCAVLPAAPVKVGVEAAGHYHRPLLGSGVWPAGWELLELSPARVAEQRRVQGRRRVKTDAIDLEAITELVLAGHGVPVTARSAAVTELTGWAMHRSRRVQTRTATKNQLLAQLDRCFPGVTLALPDVLGTKIGRLVAAEFADPHRLAALGVTRFVRFAANRGLRVRHSAADRLVAAARAGLPTPEAAVARQVLADDLVLLADLDAQIVAAEAKMAGLMPDTPFAPLLTVPGWGTVRAGNYAAAVGDPQRWPGARQLYRASGLSPAQYESAGRRRDGTISREGSVALRRALIDLGIGLWHADPAAKSYGQALRARGKKGGVIGCAMAHRANKIAYAMVRDQTGYDPTRWA

SEQ ID NO: 500790 - protein, 364 aa, unidentified
MKRKVYVGMDVHKETIQIAILPSNTKALVKEQQIKHEEGQIKKFIQKLKSEGTEIHCCCEAGVTGYPLYRYLKILGVNCTIVAPGKIPRQNSDKIKTDKRDAIKLARLLRSGELESIHVPSEEDEAVRDYLRSRDSLRLDLGRNRQRLMKFLLRKGITYSTTKYWTASHYKWLNNLHFENEILQATFNDYYSRVRVQEENLKAMDQKIREIAESEPYREKVGILRCFRGVDYLTAMFLLSEVNDFKRFKTAGSFMSFLGLVPGEYSSGSKRKQTGITKTGSPRLRRILVEAAWQHRFPGTGSKVVVARRVGQSALVVSLAEKASLRLHKKFKSMQLRGKTPQVMITAVSRELSGFLWAAMNLVA

SEQ ID NO: 500791 - protein, 394 aa, unidentified
MKLIGIDIGKNKHFFCVMDQQTGEIISQPVSFSNDKEGFDFLVQEIKSYPKDSILIGMEDTGHYHFALLKHLLDLQYTVALINPKTTDFNRKMQGGITKNDKLDTINICDVLDTPERKKQYRITKVNKFDLYEQKQLTRQHHNLKEELNVYKNRLQKSIDIVFPEFNSLFKSKYGTVYINILKTFGSAENIANTDIRTIRKCFEIDGRGNRISLTPERLKERARSSIGISSLAEVIQIKHLSAQIDLIEEQLSEIDKKIEEFSIQNNSPILSIPGISHFSGTSILAELGDISNYSKPSQIIKFAGVAPLHYESSQFNAQHTAITKKGSKYLRKTLYQIILPVIRHNPVFNKYYQLKISQGKGHRCAQGHCVRKLLRIIYHLLKTNQQFDPQLLR

SEQ ID NO: 500792 - protein, 396 aa, unidentified
MLYLAIDQHRDQLTINLRNEQGDVIQKDQISTKHDDIKDFFDKLARQAGKHRGFMAIVEVCGFNDWLIEKLKEYKCSEIVVMQPNGSSNKKTDKRDANALGELLWNNRKRLKNGERPNGIRRIIPASQKDAEARQLSNFRQFLITQRTRLVNKIKGILNKHNMLQDAPTKLSWTNKFRKWLETVTLPSVDRLEVDAHLELWKTCDKQIITIEMELAKRTEDNKEVAKIAAIPGITAMGASTLLSRIGDIKRFKNPDSLANDFGLTPGCHNTAGKQRLGGITKAGSSVARQVLNFAVIHIVRKDPEMKAWHKKIKTRRGAKIARVAVMRRLATIIWHMLRWDKPYQFRYEVVQPQKKRKTKSKAKKVFKASDNSNHQRRKEKTPLKSKGKTPVKTKA

SEQ ID NO: 500793 - protein, 430 aa, unidentified
MGLIMATPIPPEHDEPPISYDWFVGIDWGSQKHQVCMLDGNRQVAGERVADHDGASLAQLVTWLLTVSHGQPQRVAVGIEVPRGPIVEGLIERGFHVFAINPKQLDRFRDRHSVAGAKDDRRDAFVLADSLRTDRPSFRRLRLEAPQLFMLRELSRAEETLLEEFRRTTNRLREQLHRFYPQMLQLSSAADEAWLWDLIELVPTPAHATAVTAEQVHQVLTAHRIRRVTADDVLVCLQAQALPAAPGVREAAQVHCAFLLPCLRVLAEQLRSCAQQVEALLHTLAAAPGEAGGPSDVAIVQSLPGVGRKITAWLFAEAAQPVAERDYQVLRTQGGVAPVTKQSGKRRQVVMRRGCNPRLRHALYHMARVAAQRDPHFSGVYEALRAKGQRHGQALRNVGDRLLRILIAMLRDGACYDIARCRREPVGQRG

SEQ ID NO: 500794 - protein, 347 aa, unidentified
MVAVVIGVDPHKGSHTAVAISPAEEPLGELSVRASAAQAQRLLDWAAAWPQRTWAIEGAGGLGHLLAQQLLAAGEQVVDVQPKLGARVRLLAAGDTNKNDPNDARSVAIAALRSPARRPVQPDDHAAVFKVWSKRHRDLGRARTQVVCRLHAVLCELVAGGVAKAITAGHAARLLESITASGAVAAARCELAAAFLDDLRRIDAQLLDANKKLTTAVRASGTTLTSIFGVGPVVAATVIGDVRDVARFPGRDHFAAYNGTAPIEVSSGPRKIYRLSRRGNRRLNHVIHMAAVTQVRYRHSAGRAYYERKLAEGKSPKEALRALKRRVSDAIFAQLQADARRAAAGSR

SEQ ID NO: 500795 - protein, 365 aa, unidentified
MRKPSTTAGRGRGKLQGEQLTIGLDLGDRSSFYCVLNGAGEVIVEERVATSPEAMKKTFGKMPRSRIALETGTHSPWVSRVLSDLGHEAVVAHARNVRLIGQSRRKDDRLDAQALARLARIDPQLLSPIQHRSAQAQADLSVIRARYALVRTRTALICAARGLTKSFGERIRSRYVRGFKPSMGETLSPQLQIALTPLLSALETITARIREYDAQIEELAENSYPDVALLKQVKGVGTLIALTYILTLEDPRRFRKSRDAGCYVGLQPGRRNSGQSEPQLHITREGDSYLRMVLVQGAQHILGPFGEDSDLRRWGLKLAERGGKRGKKRAIIAVARKLAVLLHHLWISCEAYEPLHNTRKRRLAA

SEQ ID NO: 500796 - protein, 338 aa, unidentified
MDNYIGMDAHSSICVFSIVDANGKEVNQAKIATNGQLLVEYIRSIEGSKKLVFEECELSAWLFETLRGEVDELIVCNPTRNQQYKKAKTDKLDAQNLARLLRGGFLTPVYHDGSKTEHLRALMSGYQDIVDTGVSIKNRYKSLFRKAGLPARGAGLYDDSSLLENLSRPDQRFIGRGFYRLLETLEKEREQYIVAIRKSSRAFPEIRLLKAIPGIGDIQAAKIVSQVISAQRFRDKHKFWSYCGLVRHRMESGGHIYGSKRSRGNRILKCVFKMAAQTVVRGENEFRAYYDELRLKGTSDRAAKNAVSRKLAAISLSILKTLRPYDETRIMPQTEQAR

SEQ ID NO: 500797 - protein, 348 aa, unidentified
MTNQPHIIGVDLGKHWFHVMGLDREGAIVLRKKLSRAQLRAFAATIPRSIVAMEACCGSQYWGRVFAHAGHEVRIMPAQFVKPYVKTNKNDFNDAEAIAEAASRATMRFVPLKTTEQLELQASHRIRRRLVHERTAVVNQLRALLLEYGIVTPVGRETFARRWSQTLGSAREQLSPRLLVLIQRLRAHWVTLDGQIAEATQELTAWADGSPLCQRVATVPGVGPMIATALVSAVGDARMFARGRDMAAWLGLVPRQHSTGGKSTLGRISRRGNGYLRQLFLQGAVSAYLWMKRDRSALGAWLQQLDRRRHRPVVITALANKLVRICWKVLTSDTPFRLHPARPVEHAV

SEQ ID NO: 500798 - protein, 347 aa, unidentified
MTIVDTSRPVTGGVDTHLDVNVAAVLDGIGGMLGVESFATSVEGNQKLLAWMAGFGPVARVGVEGTGSYGAPLARFLRQAGVEVLEVDRPNRQERRRKGKTDIVDAIEAARAAQGQRQLGAAKTKDGNVEAIRALMVAKRSARDQKIAAMNQIRHLGFTAPEHIRQSLQGVSRQLIGKKAAGMRPRADTDVVTYATKTALRALGRRVLELDAERKQLDHLLADLLAETAPGLLELHGVGKNSAAALLVAAGDNPDRLRSEAAWARLCGVNPIEASSGKVIRHRLNPGGNRQANAALWHIVITRMGSDPRTLAYVERRSKEGLTKKDIIRVLKRYVAREVYPYITAAV

SEQ ID NO: 500799 - protein, 353 aa, unidentified
MKKVIMCSADVHEKNISVEIAVHRETPMVKDYPYAVKGRQKLLSDLKTLAKKNQADRIVVVYEASSLGYGFYDDCQAAGVECHVLAPTRMAKSAQDRKRKSDRWDAKKMMELLRGHVLAGNELPSVWVPDHPLRDDRELVRTRIDIGEKKSAVKAQVQMLLKRTRTKRPPECKNWTLAYRAWLKMVELPSGTRTALDSLLRQLHHLEEESDQMDVGIETLSQTPRYLKLVEALQKVKGIGVLAAIVYLTEMGDLSRFANRRKVGAYLGLAPACYESGERSDRKGHITREGPSRLRKILCQAVWSRVRCDKQEQVAYDRIVSRNPKHKKIAVVACMRRLGVLLWHKGLEVKAAA

SEQ ID NO: 500800 - protein, 482 aa, unidentified
MKPKQQEKTKEATCRATQGNWQQMNRKQRREMTRKIQSEDIRLEVVHCDAAGIDIGNESHYVAVPPARDSQPVRRFGCTTAELKEMAVWLKQCAIRTVAMQSTGVYWIAVYDILEEAGLEVYLVNARDTKNLPGRKSDVQESQWLMKLHTYGLLRNSFRPSQEIRTMRTYWRQRNDLVQSGGRHIQRMQKALTQMNIQLANVLSDVSGMTGQAIIKAILAGERDPHKLAAFRDPRVKASEEEIARSLEGNWEEDLLFVLQQEQDGYEFCHKQMAECDQRLAQYLERREDRSAGAHLPEEKRKGRLKKKSGNKPRFDLRTGLFRMSGADLNRIDGLDVMTAMTILSEAGWDMSKWETEDHFVSWLRLCPDNRISGDKIIGKGRLPTNNRVTTALKMAANSLRTSKTYLGAQFRRLRSRLDTPVAIKAMAAKLARLVYRMLRYGMKYVDRGAAFYEAQHRQLQIKHLKSKATKLGFQIIQVPTA

SEQ ID NO: 500801 - protein, 340 aa, unidentified
MEITTIGLDIAKNVFQVHGVDREGRAVLRRKVKRDQLLALLGDLAPCLIGIEACATAHHWARQLQGLGHEVRLMPPAYVKAYVKRNKNDAADAEAICEAVTRPTMRFVPIKSADAQSVLMLHRARHLLVRQRTSQVSAMRAHLAEYGVIAPKGRSHVRELVETLTSGTAPIPDLARQTQLLLAGMIDALSRQIRTIEIELLAWHRANAICRRLETIPGIGFITATALAATVGDAKVFRSGRQFAAWLGLVPKQHSSGGKERMGGISKMGDRYLRHLLVVGATAVIRYTRRKTTTVSAWAAQLLERKPARLVSVAVANKTARIAWAVMTREENYRAAPVTA

SEQ ID NO: 500802 - protein, 355 aa, unidentified
MDSKKYIGMDVHKESISIAVMNGAGKFVMECVIETKASTILQFIQGQGGSLHVTLEEGTWAAWLYDLLKPHVARIVVCDPRKNASMKQGNKNDQIDARRLAELLRLNHLNPVYHGEHGLRTLKELVRSYLTITKDLGRVMTRVKALYRSWAIPCTGKQVYAPQHRAEWLAKITEPGVRRRAEFYYQQLDALRSLRRQVRRELLEESKKHQAWKLLCQIPSIGPIRAAVLLGILQTPHRFRTKRQLWTLGGLGIETYSSADHRYVEGQLQRSKKPALIRGLNENCNHDLKNLFKGAAILASTKPGPFQEFYAALLAKGMRAEMARLTLARKIATIVLIVWKKGVCFDAQHLKSQTA

SEQ ID NO: 500803 - protein, 349 aa, unidentified
MILVGCDLHTRKQQVALLNTDTGELRDEELSHVGDDVERFYAALSPPVTVGIESTGYSLWFHALLQRLGHTLLVGEAAKIRAMVVRKTKTDRRDARHLRDLLKDDRFPVVWIPDPTTRDLRALIKHRLRLVRIRTMVKNGLHAIALNQRLALGPSLWSRQGLAQLQALVLLPHTRRRRDDSLELLQWLNGHIDALDLHVATAAAADPDARRLMTHPGVGPLTALATVLVLGPVGRFPGSKHVVSYIGLAPAVNASADKYRLGHISKQGSALLRWVLGQAAPLATRGDAGLKRIYFAVLRRRGRPKAKVALARRLLIRLYVMLRDQIDYDEFCRRGRARRGGLELAGTPV

SEQ ID NO: 500804 - protein, 395 aa, unidentified
MEFLKYGLGIDMAMEKFDACISIIDQQQHVMIRSQCSFNNNKKGFETFILWVSKNTKLAIPAVYLMEATGIYYEQLAWFLHNKNCSVSVVLPNKAKKYKEALGLKSKNDRIDAKGLAQMACEQSNTSWKPLTSNIYLLRLITRQIQSISEQSTVFKNQLHALQYGMYRDKAIEKMHVRQLDLLQKNKKSLQLRVEQIVEKDEILKRKFKHIGKIKGLGLQNLAVIVAETNGFTAFENVAQLVSYAGYDVVENQSGKRSGKTKISKKGNSHIRRCLHFPAFNMITYEVAPFKNLYERVYEKSKIKMKAYTAVQKKLLEFIFILWKKDEAFDPNYQDKTSGDVKPAPSFASVPQEPSLTCGDQEEKTKPVKQKITPAITRVTQDKHPSKYRRMPSFA

SEQ ID NO: 500805 - protein, 351 aa, unidentified
MNILAMDLGKSNTVVCFYDNQTAKHRFGKVRTTPQQIHDLLADYKPDRVVFEICSASGWVYDICRGLKIETQVANPNTAAWRWKNVKNKNDRKDALKLAQLSAMHQLPVVHMPKADVRRKRALIQYRQTLVGRVVQIKNSIRAILDKQGYSMSSGKTGWTKKSVELLNEMAMPIEKCDTNNLWRGQLYVELEMFTANDKALSDVTGKLDELSKSDSQIKLLRTAAGVGPRLAEAVVAFVDEPGRFKSGKAVGSYVGLTPRQYQSGSMNRQGKISGQGNKLLRALLVEVSWLGLRYNRWMQETYQRILRGSPSRKKIAITAVARKLLVRCWAMLRDGTQWRDKETETDRQAA

SEQ ID NO: 500806 - protein, 424 aa, unidentified
MKVTYQTCCGVDVHKSFLVATIVKTTGGIEPSYQKERFSTFNNSILEFKQWLLDNDCHDVCMESTGKYWVPVFNLLEDDINVVIANPKWVKAVKGNKDDTKDSKWIGDLFRLGLVKGSYIPCKKVRILREYTRYRYKLVSCRSSEKNRYQNALTVCNVALDSVVSDIFGKSSTSIIDYLLEQSGSSINHEEIASKLLRSLKSKEDAVIESVEGYQMTDAPKYRMRLVRAHMDYITAEINDVDKMIENMISSNTDFENAVQFLCTIPGVKRDSAITIISEIGTDMSQFSSSRRLCCWAGLTPGSNESAGKKKSVRITRAGVYLKPALVQCAHAAVKSDKSPYYKKKYESLVKRRGKKRAIIAIARMILTAIYQMLSTGEQWNPSDLYKIDMPVALVEKQKAKAIKQAKKLLQREGLLPPDEPLAS

SEQ ID NO: 500807 - protein, 399 aa, unidentified
MLEQAWAGVDVGKEHHHCVVIDAEGRRLLSRRVANDEAVLLALISDVTGFAGQVRWAVDISTGEAALLLALLAAHDQPVCYLSGHQVNRAAGGYRGSGKTDAKDAAIIADQARMRRDLAPIRVPDEVIVELRMLVARRRDLQSDRVRAVNRLHETLLTISPALEKALDLTNQGPLILLTGYQTPAAIRQLGVTELTEWLRARKVRSAGELATRAVAAANAQQIGLPGEALAAHLAAQLAEGVIALDEQIKHTDKLIEGRFHHHHAAPVILSMPGIGVLLGAEFLAATGGDTAAFATSDRLAGYAGLAPAPRDSGRISGNLYRPKRYNRQLQRVFYTSALISIRCCPESRTFYDRKRAEGKRHNQAVLALARRRVNVLWALLRDHRPYQARPPASTATAA

SEQ ID NO: 500808 - protein, 344 aa, unidentified
MIYIGMDTSIKSFEVYAINDRKKVVFRDEIPATRSALRLTVRGLGEEPKLVVFEAGNQLKWIASTLKKLRGVHVHVVHPNVVKWISQSSGKTDKIDARKLAQLARGDLLPKKVHIVEGKVRQLRELLSARSKLQSKRVALINTIRGYMLQEGYKLPKKFFDRRDWKEQLNKSKVGQTTKLIIASFMTSIEALLESERQLSKELLKIEDDRLDKLESIPSIGGITSRTLLSAIDDAKRFVDKKAAAKYGALTPRIFQSGEMVHLGRINQDGRHEVRRVLLQCAHTVARMKTLAAKPLQEFFFRIMKRRGKKIAIVALARKLMTIAYAVLKTGEYYDPAKLVSQHR

SEQ ID NO: 500809 - protein, 311 aa, unidentified
MTLPQTIIGVDVSESWIDVYHLADGRHDRISMTAAALGRFARKARGALVVLEASGACERPLLAALARAGTAHVRVNPGRARDFARASGQLAKTDRVDAQVLARMGAALQLKPQPVPLEHQQTLAERVARREDIVKMITAETNRARRVSDPVVRRDIATVRRALKARLKAVEAGIARLIDAVPELAEARDRLTSVPGIGPVIAATILARLPELGQLGRREIASLAGLAPRARDSGIMRGRRTIWGGRADLRRSLWLASFVASRHDPTLKAFRARLEAAGKPPKAAITACARKLVTILNAMFKTQQSYRALTV

SEQ ID NO: 500810 - protein, 352 aa, unidentified
MKVYAGIDLHSSNNYVGIIDEQDRRLYQKRLPNQLDHILCALEPFKETLEGVVVESTYNWYWIVDGLQEHGYRVHLANPSAIKQYEGLKHTDDKWDSFWLAHMKRLNILPEGYIYPKEERSVRDALRRRLFFVRHRTSHILSIQSTIIRNLGYKVSARDIKRLDESDVDKLFDDPYLRLVVRNGISAVRFLKERIKEIERAVTSHAEVKPEFEYLQTMPGIGRILGLTIMLEVGDINRFPSAGNYSSYCRCVKSEKLSNNKKKGEGNRKNGNKYLGWAYVEAANFAVRFYPEFQRFYQRKKAKKNGVVAIKALSNKLARASYHVMRDRVPYDIDRHFYNYSACGRESEKGLV

SEQ ID NO: 500811 - protein, 427 aa, unidentified
MHYNQNEKIMSITEKTLVIGIDIGKEVQYARFFDYRGIELSKIQSFENTLEGFKIFEEWIKSIANKNDKDNIIVGLEPTGHYWFNLGNFLRNIGIKIVLVNPFHVKRSKELDDNSQLKNDLKDPKVIAKLVIEGRYSEPYIPEGIYSDLRIAMDMKQSLGKNLNIIRNKVGQWLDKYFPEFNDVFADWQGKCALISLNKFSTPEEILSAGVQQIFVEWKMKIKQGVGIKKAVMLVESAKNSVGITEGLGMAKKELKLYLDQYELYIKQQEQLEIEIEYLALQIPGVKEALTIKGVGIMTAAGFVAEVGNIKRFTHPRQIQKLAGLGLIENSSGKHKGKTSISKRGRSRLRALLFRVVMPLVSKNDEFKMLHKHYTTRKENPLKKKQSLILLCCKLIRIFFAIMNKQIEYNPQKLISDIGFELPPKVA

SEQ ID NO: 500812 - protein, 345 aa, unidentified
MEIHTIGIDLGKTTFHLVGLDKRGEVVAKKRFSRNQLLTYTANLPLCLIAMEACCGAHFLGTALVAQGHQVRLIPAQFVKPFVKSNKNDYVDAEAIAEAVQRPTMRFVPIKSTEQLDLQALHRVRDRLIGRRTGVINQLRALLLERGATFRKGRTYLRRQMPQILEDAEQNLSPRMRCLLQDLWQEWKGLEEQIQTLIDEIEAIARQDPACQRLLEVPGVGPLVATALVASVGNGTAFGKGRDFAAWLGLVPKQYSTGGKPKLLGISKRGNPYLRRLFIHGARSVALNLNREGHFIGPWMNQLEPRVHHNVFVVAVANKIARISWAVMAKGKTYRSSPLIPVSTI

SEQ ID NO: 500813 - protein, 394 aa, unidentified
MILVGIDIGKNKHTFSIIDKNSGEILLSPSDFSNNLKGFLFLIQKLSSYTKSKLLIGMEDTGHYHFALLKYLLDRRYTVALINPTTTDLTRKLQGGITKNDPLDSLTICDVISSNHRNKPYRVTKLNRFDLYEQKQLTRHHHNLKEELNTYKNRLQKCIDIVFPEFNSLFHSKYGIVYMNILKTFSSAKAIANADIRSIRKCFEFKGKGKRIFLSAEQLKLTAKSSIGIPSVAEEIQIRHLVSQIELLEKQLSEIDKRIEEFSLKNNSPILTIPGISHFSGTSIISELGEICNYTKASQIIKFAGVAPYHYESSQFTAQHTAITKKGSKYLRKTLYQIILPVISNNKVFYAYYTKKLNEGKGHRCAQGHCIRKLLRVIYHILSTGQPFNPELLV

SEQ ID NO: 500814 - protein, 408 aa, unidentified
MKLLVGIDVSSEKLDTCFLDSEDHILLEESLSNNIVGASKIKEYILQLNDSNPYDRIIVGMEATSVYSFHPSTFLAEDDELKVLNIEVVVMNPKAIHRFKGLFEEDKTDQIDAYRIADFLRFDRFNVSLLKEEQYMALQRLTRSRYQLISQLTEMKQHFLENLYYKCNTLTKEVDTSVFGATMLDLLTDSLTLDEIADMPLEKLADILQERGRGRFSNPDKLAKSIAKAIRDSYRLGKVMQSSVDVVLASYAMMIKTIKDQVKTLDKSIQNLIVTLPESQSLLSIPGVGPVYAAGILAEVGQIDRFEDEAKIAKYAGLYWKRKQSGNFESERTTITKTGNHYLRYYLVEAAGSVMRNEPVYREYYLKKYHEVPKHQHKRALVLTARKLVRMVDVLLRNHQLYAPERSV

SEQ ID NO: 500815 - protein, 359 aa, unidentified
MRNAGIHANSLLEVRRMYNAVGIDVSKGKSTVAVLQPGGTVIRKPFDVSHTSQNLNELADYLSSLDGTTKIVMECTGRYHEPMVKALSEAGLFISIVNPHLIKNFGNNSLRKVKSDPADARKIARYTLDNWTELRQYSGMDNTRTQLKTLNSQFSFFMKQKVAAKANLIALLDNTYPGVNKLFDSPTREDGSEKWVDYAYSFWHADCVRKIGLKAFTERYMSFCKKHHYIFQQDRPEKLFNASKELVAVFPKEKTYKLLIQQSIQQLNLASEHVERFRREINELASTLPEYSTVMGIYGVGKTYGPQLIAEIGDVSRFTHREALTAFAGVGPGVDESGQHKSKSNRASKVGSARHCFRS

SEQ ID NO: 500816 - protein, 319 aa, unidentified
MTPITPQDPAPIEVAGGVDTHQDTHTAAVIDQVGRVLGTECFPAGPAGYTALLAWMRSFGRLVRVGVEGTGAYGAGLARQLRDEHVEMVEVDRPDRKARRYQGKSDPIDAIAAAKAALAGDRTGTPKHRDGRIEALRTLRVARRSAVDQRAQAQRQIKALIVTAPDDLRERLRGLPVKELINVCAGLRPERADAASPVTAAKIALRSLARRHQQLTEEIDDLDDLLEPLVAAINPALVAANGVGTDVAGQLLVTAGENHGRLRSEAAFAMLCGAAPIPASSGKTTRQRLNRGGDRQANAALYRVVLCRLRWDPRTRAYM

SEQ ID NO: 500817 - protein, 407 aa, unidentified
MTQSSSTTSPTMWVAIDIAKAHNEVLIESPQGRRRHFRLANTLQDFAKFAAFLSGSGYSCRIAFEATGDYHRPLAYFLGAQGFALSLVSSIAVARTRDALYNSWDKNDPKDAQVILHLLKTGAVQVYYDPLTNHYHDLQELANTYQQISLWKVRLYHSIVTHHLPLYFPEAERYLHSTRAEWWTQLLLLVPCPAAVLSYSPEEFLQVARRLPGQKIDKTRWLADFYEAARTSIGLPVAEDSEAIRMFRVVLNEYLHLCRLRRELEEQVVARLAGHPDFRRLQTIPGIGPILALIILAEAGDLRRFHHNRQFLKYCGLNLSTEQSGQFRGTTRLSKRGNARLRYAFWMAGAVAVRARQNSFCQKFQDYIRRDPLNPDLRRKAYTAVAAKMARVVYGIVKTDTDYRRFH

SEQ ID NO: 500818 - protein, 345 aa, unidentified
MEYGAIDLHLRRSQIRILDEDEAIVLDRRVDTTREDLDRVFATRPPMRILLESSTESEWVAQHLESLGHAVIVADPNYAPMYGSRSRKVKTDKRDVAALAVTCRQGIYRAAHRASAAARTLRQTMRVRRQLVQVRSGLISLLRSILRQEGLRLPSGSAERVLPRLERLAVPPALAAVLEPLRTTLAQLTATLTTADEAVEARATSDPVAQALMTAPGVGPVLALTFHAVLDDPARFGGDAARASAFVGLVPSEDSSAERQHKGHIPKTGPGDLRALLVQASWVIWRGRSAAGAALRLWAQALAARRGRRIAIVALARRLTRILYAMWRDQHDFAPRHRAAVAVAA

SEQ ID NO: 500819 - protein, 342 aa, unidentified
MTTIKYSVGVDIASSTFTAAVGEIPWQVVLKPETFENTEDGYQALLVWFAQHHLPVSEMVVCMEATGVYSEGLAYFLYAKGYRVAVQSPLEVKRTFKPYGPKSDAVDSLQIAEYACRHTDKLSFWKPRSEVLEQVKALLAVREQFVAQNTAHQNALRAIQRKVVRTPFAEQAYLQLIEQVKKQIKAIDTEVRRLIESDPTFKEMLLLLLSVPGVGLLLAAHFILLAQFSLEYKVLASFLGICPNEHSSGTSVFKHATSRHFGPSAIRKLLYLAACSICTHRPQFGMYLARKTKEGKPARLVLNNVENKLIRIMCAVLQSKTAFIENYHSVQPLVFQKALTAS

SEQ ID NO: 500820 - protein, 324 aa, unidentified
MQGKEASEQETIKSTVGIDASKCWLDVHISPAEERLRVTNDDAGIRQLKHRLARLDIALVVVEATGKWHRQVHRSLVASVPIAVVDPYRVRMFAKAHGVLAKTDRLDARVLALFAATMAPSIRAPAPQAMAELAELVVARASAVDAQTALKNQLCTAESKFLKHQLNHRIHRAAQDIAELESELLRRINADGGLARRYAILTSIPGVAFVTAVTLLACLAELGRLNAKQVGMLAGLAPIADQSGQRDSIRVIWGGRSAVRRILYLAALSAARFNPSLKAFYQRLRVSGKPAKIALIAVARKLAVLANTLVHQDRTWEPRLSEHT

SEQ ID NO: 500821 - protein, 342 aa, unidentified
MEEVTIIGIDLAKNVFQLHGAAADGRPVFRKKLTRLQFQRFMAAQPPRIVAMEACPGSHYWAREMAALGHTVKVISPQYVTPYVKRQKNDAADAEAIAEAATRPHMRFVEPKSAEQQARAVVFRVRQKAIAQRIELVNALRSHLYEFGYIAPVGLQHLPKLVAVLEDETSDLPGPARIACRGILRQIESLGREIAALDAQIAELSKESRWARLLQTMPGVGPITAMAIEAFAPPMETFRRGRDFAAWLGLVPRQNSSGGKARLGKVSKAGQHDIRRLLVVGAMAAMVGACRRGIPEDTWLGKLMLRKPRILVAIALANKMARRIWAMLTKGESYRDPALAEV

SEQ ID NO: 500822 - protein, 368 aa, unidentified
MKKNSTCLKSPKRSKSRERSITIGMDLGDKTSHYYVLDSEGEMVRESTVATTKKGMKQRFGHLPKCRIAIEVGTHSPWVSRLLSSFGHEVIVANARQVKLISASSRKDDRLDAQTLARLARMDPELLRPIRHRGEKTQGDLMQVRVRAALVDTRTGLVNTARGLAKAMGERLPKCDADQMGVEKMQGLPAVLVEALTPLLETVQSLTQQIKASDQKLEQLAGRDYPETELLRQVSGVGSLISLTFVLTIEDPNRFRKSRDVGCYVGLRPRRSESGESRPQLGISKEGDVYLRKLLVQGAHCILSQKSPDTDLKRWGLKLAGKGNKNAKKRALVAVARKLAILLHHLWVNGEVYEPLRNSRSLEPKAAA

SEQ ID NO: 500823 - protein, 355 aa, unidentified
MNQEKYIGMDVHQATISVAVMDAQGKLIMECLLETKAATIVDFIRGLQGTLSLTFEEGTAAAWLHDLLNPHVSRLVVCDPRKNALLKDGNKSDRIDARKLAELLRGNQLHPVYHGEHGVRTLKELGRSYLTITQDVTRVMNRIKAVYRSWAIPCAGTTVYAPRHRAEWLAKITEPGVRVRAERLYQQLDLLQPVRLEARRELLAESHKHSGVKLLRQIPSIGPIRSALLVALLQTPHRFRTKRQLWAYSGFAVETHDSGEYRSVRGKLQRNRERMTVRGLNDNHNRDLKNLFKSAAVSASTRPGPLRDFYVARVEKGMRPTMARLTLARKMAAISLTIWKKGVDFDAKQLDQQAA

SEQ ID NO: 500824 - protein, 467 aa, unidentified
MAIRKIKKRKHRKLERSLPVMRLNAAGIDIGATEIFVAVPADRDGETVRSFPTFTEDLHLVADWLHHCRVDTVAMESTGVYWIPLFQILEARGIEVHLVNAQHVHNVPGRKSDVLDCQWLQYLHSVGLLRASFRPEQAVCEIRSLMRHRESLVQMSCVHVQHMHKSLDQMNLQIHHVISDITGVTGLAIVDAIVAGNTSPEELAKLRNHRIKASLETVTKSLVGDYRPEHIFTLEQSLKLYRYYQQLIGDCEHEVQQRIESFETKTDGGSASAADSSQSKAEGSASAADPSQSKTSNDSPFDLRRHLERIFGVDVTAIPGFDVLRTQTLFSELGADLSDFRTDSRFASWANLCPKDGTSAGRRIRGPKIKSKNRVTQTFRMAAQSLHNNMSFLGDYYRRERTRFGAIKAIKNAAHKLARIFFHVVTTRQPYDETVFAKLEARHQNRRLRKLQNQAKQMGYSLMAIPA

SEQ ID NO: 500825 - protein, 363 aa, unidentified
MQNSITWVGMDVHAENIVLVAVRGRSDAVVFRAEFPNTPKGRERLAGKLAENAPVRCVYEAGPCGYELRRFLEGRGIECDVAAPALIPRKPGDRVKTDRKDAEKLARCHRLGDLATVFVPTPAQEALRDLLRTREDAREDLLRRRHRLSKFLLRRGRRYTEGNRWTTRHWDWIRAQTFTDKNAETVFREYIVAIEQEVERIRRIEQQIVEESRSPEVGRAIARLRALRGVDTITAMTILTEVIDLNRFRSPRELMAFIGVVPRERSSGGRERRGSITKTGNAHIRRVLIESAWHYQRLPAGTPKAILARREGQPPEVIETARRAELRLHRKFMKLLGRGKPKGIVAVAVARELAGFIWALGRG

SEQ ID NO: 500826 - protein, 378 aa, unidentified
MAYAFSFINISNNIIMAKKAKKVKTAKGAELRIVNPDAAGIDIADGIMQVCVPTDRTKDNNRAFGAYTSDLHAISEWLRECGIKTVAMESTGVYWIPLFCRLQDDGLDVVLTNARDVKNITERKTDESDAEWLMLLHQYGLLKASFQPHNDAKRMRTLTRHRDTLSREASSIVLHMQKAMQQMNIKLTLVLFDITGKSGIRIIEAILAGERDPKKLAELADIQCKTPKEEITKALEGNWEEDLMFVLRQNYDTFKHFCAQLDRCDTELEKLMENYRTEVAETGRPSYSPTKKRRNYHKRKRKRTVGFDVERKAYDMWGVNVFEIPGISHLTALELMSELGHYFTRKSLSTKQFCSWCNIAPNTKISGGKRISSHVPHH

SEQ ID NO: 500827 - protein, 394 aa, unidentified
MASARRAAGREVVVEVRSFATTTAGLLALSAWLAERGRTHVAMEATGVYWKPVWHVLADGDFTLVLANAAHVKNVPGRKTDVADATWLAELLAHGLVRASFVPDAPTQTLRALLRTRKQLVRERASHVQRLQKTLEDANLELASVLTDITGTSGRAILEALIAGETEPATLAAPANQRVRAPRGTLEEALRGRVTSHHRFLLRLHLRQVDALEAAVAGIDREVEADLEPFRAAVRLLSSIPGVSALSAEVIVAEIGTDMGRFPTAGHLLSWAGLCPRSDESAGKRRSTRLRKGAPWLKTTLVQCAWASTRKKASYLQAQFRRLRARRGPKKAICAAAASIPTAAYHMLRGGTFYQDLGPDHFDRRAKGDRTARLVKQLTALGYTIKPSACPAPA

SEQ ID NO: 500828 - protein, 343 aa, unidentified
MQIRSVGIDLGKTTFHLVALGDNGKVLLKKKFTQKQLIAFTANMQTCLIGMEACSGSHFLGRALREQGHDVKLIPAQFVKPFVKSNKNDFIDAEAIAEAVDRENMRFVPIKTDDQLDLQALHRVRDRLMARRTSLINQIRAFLLERGIVFAKSPIRLREALPEVLENVNENLTPSMRNLVAMLWSEWKDLELQIVQMNDEVERIASSDAACRRLRQIPGIGPLVATAIVASIGNGAAFRKGREFAAWMGLLPKQHSTGGKARLYGISKRGNSYLRKILIHGARAVVLRSKRDRIAMGAWMTSLETRAPRNVLIVATAHKLARIAWAVLSTGQDYRAVPEALTV

SEQ ID NO: 500829 - protein, 417 aa, unidentified
MLKIVFPICCGIDVHKTFLVATIASTDRSSVTTYQTKRFSTFTKDLENLSKWLLDNQCTDVCMESTGKYWIPVYNVLELTCEVILAHPKYVKSLRGKKTDRKDSVWIADLFKHGLVKASFIPEKAIRDLREVMRYRTKLVSMKSSEKNRYQNALTVSNVQLASVVSDTFGKSAQALINQLLQQPKDTSFDVLPFLHGSLKKKAEQISESLNGSIDDIQAQKIRSCTSHMAELDSHIEDLQVAADLIASPFTAALRIIESVPGIGHLSALTILSEIGTDMSKFLSAKHLCSWAGLTPCNDQSAGKKKSTRISRAGCYIKPILVQCALAAIKDKSFPYYGQRYKVLKHRRGHKKAIIAIARMMLSVIYTLLSRGELFSKELYEESLKNPMVILSPEEQFQRLAKKFGYVVVKVHEPVPV

SEQ ID NO: 500830 - protein, 370 aa, unidentified
MGNGSTLYVGLDVHKDSIAVAYASDDGRTDPVHLGAIGTRQCDIDALVRKLQSKAAQLVFVYEAGPCGYWLYRYLIRKGLTCFVVAPSLIPRKAGDRVKTDKRDALTLARLARSGDLTPVYVPAVPDEAIRDLARAREDALKDLNAARFRLKALLLRNDLRYTGRANWSAEHLRWLARLVFPTPAQQIVFQEYVRTVTERTELLQRLEAELLAHARPWHFYPVVEALQALRGVQFTVAITTIAERGDLTRFDNPRQLMSYLGLTPSEYSSGDRRRLGGITKSGNGHARRVLIEAAKAYRHRAKVSEQIQARQQQLPKTICDIAWRAQVRLYGRYRRLLARGKHPNTVAAAIARELAAFMWAIARVQPVTV

SEQ ID NO: 500831 - protein, 338 aa, unidentified
MTIVMGLDQHRAQVTADWLDTETGELKRGRIAPADRTGVARFLSRFGGQELDVALEATTGWRFVVEELHRTGARVHLAEPAETAARRGKKKHAKNDRADARHLRELLMVGRLPESWIAPEHILDLRARVRLRHTLGEQRSEWQQRIQAVLYHHGCPQRRSLMVGDGREWLASQPLTATAREQVAVALGMIDALQAQIAPLESHLRAYARRQSGCRALMAHYGIGELTAVTILAELGDCRRFSSSRHAVRYAGMDITVHESDQRRAPGHLSRQGPPALRWALYEAAQVARRPAGPDRCYYEQAAERLGGNRACLSVARRLLKRSYHTLRELGEEALQPA

SEQ ID NO: 500832 - protein, 408 aa, unidentified
MEVLYPRCSGLDVHKDSVVACVRCVSPPGHQEVRSFQTTTTGLLALADWLTSHGCTHVAMEATGVYWKPVWHVLEGDFELVLANAQHIRNVPGRKTDVNDATWIADLLAHGLIRSSFVPPARIQELRDLTRTRKQLVREISQHSLRIQKVLEDANIKVASVLSDILGRSGRAMLAAIIAGENSPERLADLAQGTARKKTAELVEALRGRVTDHHREMLTLHLDLIEALESALQKVDAAVGKALAPIQARAQLLTTMPGVSDIVAQVVVAEIGVDMSRFPSARHAVSWAGLCPRNDESAGKRRSTRVRKSGTWLKTTLVTAAWAAVRVKDSYLRVQFLRIKSRRGPKKAILAVAASMLTAAYYMLRDGVEYRDLGPSHFDRHDRAKTIHRLVKRLKDLGYGVELQTGTA

SEQ ID NO: 500833 - protein, 341 aa, unidentified
MEKITTIGLDIAKHVFQVHGINGAGATVSRRKLRRDDVVGFFKALPPCLIGIEACATGHHWARVLMALGHEVRLMPASYVKPYVKRQKNDATDAEAICEAVTRPTMRFVPVKSEEQQSVLMLHRVRELLIRQRTMLVNALRGHLAEFGIVTRQGFAGVGMLIALVDDDDHDLIPPLSRSALLPLIGQLREVHEKVSELDRQIHAWHRSNELSRRLETIPGIGPITASAIAATVTDASLFKSGRQLAAWIGLVPRQNSSGGKDRLGRISKQGDPYLRRLLVVGAHAVLRFSGKAKVAPTRWAAELLVKKPYNVVAVALANKMARIVWALMTTGRRFEATAAL

SEQ ID NO: 500834 - protein, 310 aa, unidentified
MGESFVGIDVSKDHLDIAALPEDRRWRVTNDDAGVSALVAALVPLAPACVVVEATGGYETAMVTTLALAGVPVAVVNPRQVRDFAKGLQRLAKTDAIDAWVLARFGEVTRPAPRPLDDAATLDLSALVHRRRQLVEMLVAEKNRRSVARPAVRRRLEVHIAWLAREVATADTEIATRIRQSPVWREREQLLRSVPGVGPGTASLLLTGLPELGDASPRQLAALVGVAPFNADSGRWRGQRRIWGGRADVRAGLYMAALAAIRCNPVLKTFYQRLRTTGKAPKVALVAVMHKLLTVLNAIVRRGQPWALPA

SEQ ID NO: 500835 - protein, 366 aa, unidentified
MTPDFKVGKDNKWFRQCVGIDIAKEKFNACLFMYDIASDMGCGTKSVEFKNTKQGFNQLVKWARKECIKEYPLTFLMEPTGVYYEPLAYHLCKIQQTVYIVMPNKARDFCNYEGIKTKTDEMDARCLALLGCVNRKLTPWQPPKAIFHELRQMTRFVEEMQKVRTMFTNHLEALTHSAEPVSSVVKHYEKLIADIDKLLETNLKNIKAKIATDKELEEKVERICTIKGIGYLTVVTIIAETNGFNLITSRKQLASFAGLDVIARQSGNEDPKHVISKKGNTHIRRVLYWPGISSSRFNPQMKDMYGRICKRNPKVKMIGITAAMRKMLLLTYTLWKNGEVYDENRKGTCTPDKRNVDEDGRQLVQD

SEQ ID NO: 500836 - protein, 337 aa, unidentified
MRIIRVGLDTSKHVFQVHGVDEADQPVLRRQVRRGEMEKVFAKLPATRIGLEACGASHHWARVLRGLGHEVVLMPPQYVKPYVKRSKNDAIDAEAICEAMSRPGMRFVAVKSAEDQAGLMLLSVRDLLVKQRTMLINAMRGHAAEFGVIAAKGPVKIAELLQRAHAPEAGVPALVLELLNLLSNQLDALEARLKTIEAQLLVRHRSNPVSQCLATQPGIGPIGAISLALRVPDPKTFRSGRHFAAWLGLVPKESSSGGRRRLGAISRQGDAALRKLLVLGATAVIRFAKPGKASPWLVNLLARKPKKLAAVALANKMARTLWAMMVSGEVYRRPRPA

SEQ ID NO: 500837 - protein, 305 aa, unidentified
MDAIRERCAGLDIHQETVVVCLLSGPLEKKPRSVTETFGTTTRELLRLQEWLEQQGCTEIAMESTGVFWKPVWNILESTCTITLANPHRIRNMPGKKTDVKDAEWIAKLHRCGLIEGSFVPDEPIRDLRDLTRYLRKLKQNATQEKNRIHKILQDANLKLTTYVSDLFGVSGRALLDSMVNGEVLDVHEVRKLVHTRLKMKVPSLVEALNGRLRLHHRKMIRRHLEHLQYLESEIQTLEAEIEELVQPYMKEIELLDTVPGVSTDAAASIVAELGTDMSPFPSEAHLASWVGVCPANHESAGKKK

SEQ ID NO: 500838 - protein, 349 aa, unidentified
MTKTSHDSAIATIGIDIGKNTFHLVGLDKAGAIVMRQKLSRGQLERRFANLAPCLIGMEACVGAHHLSRQLLALGHEARLMPARYVKPYLKGQKNDFRDAEAIAEAVQRPTMRYVPTKSVAQLDLQALHRVRARLVRHRTSVINQIRALLLDRGIAVRQGYRHLRAALPDILAQDSDRLSPRMVAMIGDLSGDWHHLDVRLATVTDEIETIAMADEDCRRLMTVPGIGPIIASAMVAAIGEGAAFVCGRDFAAWLGLVPRQISTGDRTILGRISKRGNTYLRTLFIRGAKIILMRPKNWPKHSFGPWLETASRRLHRNVLAVALANKLARIAWTVLAQERDYEFRRLAA

SEQ ID NO: 500839 - protein, 368 aa, unidentified
MGKCITYVGLDVHKKSIAVALADEGGVEVRSYGTINSDLSSLDKVTRKLVSRGSQPRFVYEAGPCGYKIYRHLRQQNFECVVAAPSLIPKKSGDRIKNDRRDAMMLARLYRSGDLTPVHVPSSEDEAMRDLSRAREDAKKAERKARQQLNAFLLRHGLHYCGKSHWSLAHWRWISDIRMEHEAQQFTLQEYVDTVRSGSERVERITEQIRLLVGKWRLGPVVEAFQALRGVSLVVASTVVAELGDLTRFDSPRQVMAYLGLIPSLYSTGETIKRGPITKTGNGHARQMLTEAAWSYRMPARVSRRLRDRQQNLPEKVWQIAWKAQVRLCARYRRLVARGKLSQVAITAIARELAAFMWAIARTVEVGA

SEQ ID NO: 500840 - protein, 345 aa, unidentified
MNIATIGIDLAKNVFQLHGVNGHGKVVLRRQIHRGQMRGLFINLPPCLIGMEACASAHYWARTLESYGHRVRLIAPHFVKPYVKTHKTDATDAEAICEALSRPNMRFVPIKSIEQQSALSLHRVRQGFVRARTAQACQIRSLLAEFGLVMPPGIANIPKQVPKLLQVAARELPAPFCRLIERLLAHLKELDRQARELEAQIVDWHERSEPSRRLAKIPGIGPITASALVASISAVRSFTSGRQLAAWLGLVPRQHSSGGKPTLLGISKRGDRYLRTLLVHGARSVIVRARKRDDEKGSWLKKLLERRHVNIATVALAHKTVRTVWAMLAHDREYCANYQSPPVAA

SEQ ID NO: 500841 - protein, 332 aa, unidentified
MHLLAIDLGKQSFHIHGITDEGEVISKKVSRSKLEATVLELAPESLAMEACASAHHWGRRFEAKGYRVRLIHPRFVKPFVKGSKNDAVDAEAIHEAALRPTMRFVPVKTIEQQDLQMLHRTRDRLITQRTGLINHIRGLLGEYGVVIPVGAFRFRKNIRSAVEDAPLSELASDNFNALIAEFQVLDARITAIDRKLAAICRKDERCKRLSTLPGVGPVVATALIAAIDDGRHFASGRALAAWIGLVPRQYTTGGKPRLGGIGKRGNHYLRRQLIHGARSVLIRVANRNDLRSKWAKDLLARAGHNKTLVALANKTARIAWAILRKGENYKSA

SEQ ID NO: 500842 - protein, 345 aa, unidentified
MIIGCDFHPSWQQIAWLDSETGETGERKLVHASGDAKAFYQQLAAPALIGVEATGNSQWFIELVQDLGHEIWIGDAAQIRASYVRKQKTDKRDAAHILKLVVEGRFPRLWTPDREQRDLRQLVLHRHKLVEIRSRVKNELQHLSLNKGMQRKAKLWSQAGQKLLRELPLKPWAACRRENLLGLLAMLNQQIGTLDQAVQQAADEHPQAKLLMTQPGVGPNTALAFVLTIGDVSRFARGKQVASYLGLIPREESSGGRQKLGAITKQGNRLVRSLLVEAAQIAVRFDPGMKKQYLHRCHQKPKGVAKVAAARKLAVRLYWMLRTEKPYPEIVRIESSPRVPLVGAS

SEQ ID NO: 500843 - protein, 400 aa, unidentified
MRSIGMDVHRSFAQVAIHENGEIAETFRVDMEHDAVVAFGRRLRADDEVILEATGNTATIVRLLTPFVSRVVIANPLQVKAIAHARVKTDKVDAKILAQLHAAGFLPEVWAADDETLALRRLVSERAAVVRSIRRSKSRVQAVLHANLIPKYIGHLFSKGGRRWLAKAPLPKTERDLLERHLDELDWLAGRLETLERDLIHISLDDPRMRKLMTVAGISSVIATAVIASIGDISRFQTPEKLASYFGLTPRVRQSGDHGAIHGRISKQGNATARTMLVEAAWGAASVPGPLRAFFLRIKDRKGANVAVVATARKIATLIWHLLTKDAPYQWARPAFVAMKMRRLELRAGAPKAHGKAGPGRDYWIKELRHREMELVANAENAYAKMVEAWKERPPNPKKD

SEQ ID NO: 500844 - protein, 408 aa, unidentified
MDLTPMHKRVIALDVHQAKITACAVVEHDDGRVEVTKRDFGAFKRDRRALAQWALEMAPEVVVMESTGVYWKSPFAALEAVGLIAWVDNARHVKAVPGRKTDMADAQWLATLARAGLLRASFIPPVQMRQLRLVARQRQKLVGMCSAEKNRLHKVLVDAGIRINVLVADIHGQSARAMVKALIAGQPMHEVLDHKGRLRASRQELCEALSTEQFSAVHRFVAQEIVQHIEQIEQRIARMDQYLLQGLQPWQPQLRLLQTLPGIDEQGAAMLLVEIGADMSVFGSAERLASWVGICPGNNESAGKRKTGRIRKGNAWVRRLLCEFAQAAARTRCALKAKFDALTIRKGHKKSVVALAHKMLRTIYAMLSNGSHYQDKEVDYEALNVQRNAPRWIKMLRKHGFIATPAAA

SEQ ID NO: 500845 - protein, 458 aa, unidentified
MKGKRTSAENHSGMVTVHPNAAAIDVGATMHMAAVGADCTSDPVRSFGTFTGDLHRLADWFAECGVKTVVMESTGVYWIPIFELLDERGVEVFLVNARDAKHVPGRKTDVSDAQWLQRLHSHGLLRASFRPKGEIAELRAYIRQRERLLDYAASHIQHMQKALTEMNLQLHHVVSDITGATGMRIIRAIIAGERDPTVLALLRDTRCHAGVDIIEKALTGYYRAEHLFGLEQALALYDEYQQKVSACDMRIEAVLMTLASLRGNRGEPLGSPRRRMPRQANGPAFDVREALYALLGKDLTQIHGLGPYLALKLVAECGDDLSAWPSAKHFTSWLCLAPSNKISGGKVLSSRTRRSGSRVAALLRLAAVTVGRTETALGAFYRRLSTRIGKAKAVTATARKIAVLFYNALRHGMDYVDPGASYYETRYRERVIGNLHRRAKAFGFILQPDTVASEVAVS

SEQ ID NO: 500846 - protein, 375 aa, unidentified
MRHFVGIDLHWNNTCTLISDDQDRCVLKKKFPNQLAVILEFLEPYKDTIVGIVVESTPNWYWLVDGLMEAGYSVHLAHPAGIESYSGKKHTNDFDDAAHLAHLLRIGKLPKGYIYPKAERPLRDLLRKRMLLKRNRTQHILSFKSLVNRHLGEEIGTNEIQRLQVEDLEAKFKQEHVILSAQANIATIGYLSNWLLRLETSILEVASLKPEFEVLLTAPGIGKIIGLTIALETGEINRFARVGNYASYCRCVESKCVSNNRKKGENNRKNGNKYLAWAFVEAAQFARRYCPYAKAFYERKKKQSGKVVLATKALANKLSRACYHMLKKQQPYDVNKIFGRRKVTIQVKSGSEPKQGTDQNHPPDWTTAASTKTSR

SEQ ID NO: 500847 - protein, 462 aa, unidentified
MTHPTYCPHRSQAPAQALAVVHPHAAGIDIGATEHYVAVPADADPQPIRRFGACTADLESLADWLQACAVTTVVLESTGVFWIPLFELLESRGLEVRLVDARQMRRIPGRPKSDVHDCQWLQRLHSYGLLAAAFRPDEPVCVLRSYLRQRQMLITYAGQHVQHMQKALTQMNVKLQHVVSDITGVTGLAIIRALVAGQRDPVQLAKLRDERCGHSQADIARALQGNWRAEHLFALKQALALYDFYHQQITACDRQIERQLKQFEDKSGGQPLPPKARRQRRGDNRPSFDARGALYRMAGVDRTVIEGIEESTALVVLSEIGTDRKRWPTVKHFCSWLGLCPNHRISGGKVLSRRTKPCANRAASALRLAAYALHRSQSALGAFLRRLKSRVGAPKAITATAHKLARLVYSLLKHGTSYVTQGMAEYERAYRERVVGHLSRRAKELGYALVESVEPAVEPRPT

SEQ ID NO: 500848 - protein, 354 aa, unidentified
MASKSKRTTLTFASVGIDIGKEVFHLVGFNADGKITLRRKIKRQALINEFKKLPPCIVGMEACLSAHFVSRTLRKLGFEPRIIPAIYVKPFVKGQKNDYNDAEAIAEAALRPNLKPVTEKTQDQLDLQALHRVRSRLVSRRTATINQIRAFLIEQGITVRTGAHSLRNSLFAILDNRADEISLRMNNLIIDLHEDWAGLDQRIETITGEIEMISKGEENCQRLMSVPGIGPIISTAVVAAIGNGDAFGRGRDFGAWLGLVPRQYSTGGKTVLGRISKRGSKYLRTLFIQAAHVILMRPHNWGKFSFGPWLTEAATRLQRNKLATALANKLARIAWSVLANEKTFDTHRQEITAI

SEQ ID NO: 500849 - protein, 413 aa, unidentified
MDKIYDICCGIDVHKKLIVACLNHKRKKELRKFGATTRELMELAEWLQKNECEIVAMESTGSYWKPLYNIMESYGLHAIVVNPAHMKAVPGRKTDVKDAEWIAELLQHGLLQPSYIPSKDQRELRELVQYRKSLVGERTRELNRLQKMLEGANIKLSGTVTNINGKSARKILEYILSGNEIDEKKYDEMYEEKLIAHNLKASKEQILDDLKGFMSPLQRRMLKELLQHLDELNVHIENLNDEIDNFMKPEEKQASQVIQDVTGIGNTSAQTIVAVIGTDMERFPSDRHISSWAGLCPGDNISAKKRKGGKIRKGNALLKSTLVLCAHAAVRHKSSYFHAQFKRISTHRGKKRAYVAVAHSILIAIYHILKDGVKYQDLGAEYYNQFNAERKIHAYLKKLKALGWEPPKEAVPA

SEQ ID NO: 500850 - protein, 438 aa, unidentified
MAGPHAGGAAMEEKAMDILHERVAGLDVHKNTVVGCVRLKAGGETQRECRTFATTTEGLLALGAWLKESRVTHVAMEATGVYWMPVWKILCDGDFELIVANAAHIKNVPGRKTDINDAMWIADLLACGLIKASFVPPEELQELRSLTRTRKQLVREQTRHTQRIQKTLAEANIRLDSVLSDIMGASGRRIIQAMIAGVRQPRKLADLASKQIKATPKELYDALHGRLTDHHRFLLELHLRQWDGLDVAIRKIDLEINQRITQMDAQIKPDTPPFRDLMDLLGTAPGISNVAAPAILSEIGADMSRFPTAGHLVSWVGLCPGHNESAGKRKASRLRKGAPWLKTMLVQCAWAAKRKKGSYYRAQFFRVQSKRGPQKAICAVAASLLTAIYHMLKYGIPHHDLGSDHFDRRPPELKAKRLVAQLAKLGFAIQLQPAAQVA

SEQ ID NO: 500851 - protein, 384 aa, unidentified
MQNACLMTFRAAEARRDRCERVAALSTVARVGSGTRGPFEGSCDSWIGPRLFLWPERIPGGEPRMTSRGAEKMQNDTIGVDVSKDHLDVHRLYDGASRRFANDKRGHKALIKWLAETPVSRVVFEPTGPYHRAFERALGAAGVPFVKVNPRQARRFAEATGKLAKTDRLDAAMLARMGAMLELEARPARNETLLELKELYMAREALMKDRTAAKNRGKVLMLSLLKRQNAQRLEQIERQIMTIEAAIFQIVEADVGLADRLAILTSIPGVSNITAFALLIEMPELGVLEAGQAASLVGLAPIARQSGRWTGRAFIRGGRASARRALYMPALVATRFNPDLKAKYRQLVEAGKPAKVALIAIMRKLIVLANALLKANRKWAPKSA

SEQ ID NO: 500852 - protein, 361 aa, unidentified
MTTSKVTVNSKLSFENTEIFVGLDVHKKSWKVTIRFNDIEMKAFSMNPDPVALKTHLDKNYPKGTYNTVYEAGFCGFWIHRKLTKLGINSIVVNPADIPQTNKDKQFKTDTRDSKTLAKTLENKQLTPIHIPTVEEERFRSIYRLRNQFKKDMTRTKNRIKSHFALYGIEFGGWSVKNLTILRKKSEEHDEGFLILELLDMHDLLKLKIKQQSAKIKQQLKVLKKDKECDILESVPGVATLTSELLIAEVISPTRFESDDQLSSYAGLVPSTASSGEKDISRGITSRRKGALRHALVEAAWKATNCDPELALAFSKLCLRMTKNKAIIRIAKKLLIRIKRVWTKMEPYKKNVNMTTQTIIN

SEQ ID NO: 500853 - protein, 369 aa, unidentified
MDGPRRHRLCQNEVVADLKQRGPSVEQISRIGMDTSKHFFQLHGVNAAEKVVLRKKLRRKEMVAVFEALAPTVIGIEACGASHHWARILRSFGHEVKLIAPQLVKPYVKRGKNDTADAEALCEAMSRPTMRFVPVKTAEQQAALMMAGLRDRLIRNRTQLSNAIRGYAAEFGFTSARGMAHIDPLLDRIQADESVPVLARELFAAQAEEYAQLQAQIAEVDAKLMAWHKTDECSRRLANIPGIGPIGATLLLMKTPAPEMFRSGRQFAAWIGLTPKDHSTAGKVRLGVITRAGDEALRSVLVVGATAVIQHVRRGGRGSPWIVGLLKRKPPKLAAVALANKMARIAWKLMVTGNSYAAKSAPAALMGAA

SEQ ID NO: 500854 - protein, 397 aa, unidentified
MFYVGVDVSKDSFNFCIVEQNKSVLKQGSFPMCMEGFSSFISVISPFSPCTVVFESSGRYHIPLAIFLSTKGFSVSVVNPKTIHSFIKFFSANNPSKSDKKDAFYIAVFSASQPELISKHFSDSSLPSVKFLARELEKIKQEIATCKTQIKYCLSVLFPEAEKNFNVFSSAFLSILKVFPSSSQISQAGIEGVRNCIVKTKGRNPSFSAKDVVATARSSIGISNEGMETALVYYIEKLEFLLAQAKKIAASFVREVKRFFSREVEIISSVPGISVTLACRFIAEVGNIERFDNWKKVVKYAGTDPVVKESGKWRVECGISKQGNPHLRNVLFQMAVGVVKWCQVFRDYFNHKFSQFGSYKKAMIAVVNKLIRVLFAMISRGQSFKHPDHAPASISHS

SEQ ID NO: 500855 - protein, 354 aa, unidentified
MPKTASAEITVIGIDIGKNSFHVVGHDSRGAIILRQKWSRGQIEARLANMPRCLIGMEACVGAHHLARKLATFGQDARLMPAKYVRPYAKGQKNDFNDAEAIAEAVQRPTMKFIATKTADQLDLQALHRVRERLVSQRTGIINQIRAFMLERGIAVRQGIRFLRTELPIILSTRSDVLSPRMLRVIEDLATDWRHLDERIETLAREIETIARQDAGCDRLMSVPGIGPIISSAVVAAIGSGDVFPKGRDFAAWLGLVPKQISTGDRTILGKISKRGNRYLRVLFVQAAWVVLVKPQSWERHGLKSWIEAAKKRLQHNVLAIALANKLARIAWAVLAKGRGFEATRTIDGSTQPA

SEQ ID NO: 500856 - protein, 441 aa, unidentified
MVDTAVTTPEPVWAAFLALDWGSQKHAWILQPADGGKRNEGFVDNTPEAIAVWAAGLYQRFGGRPVAVALEQKRGSVVNLLLPYAHLVLFPVPPSMSASYRKTFVPSGAKDDPTDAGWILDLLLRHRDRLRRLAPDDANTRLLLMLVEDRRQLVDDKTSLTLRLQDCLKQYFPQLVRWFDVDTALVADLLQQWPDLQHLQRCHDGTLRKFFRQHHGGEKLTGERIETIRAAVPATNDPSVLEAGSMKARHITESIAALRGQITQLERRRDELVADHPDAPIFASFPGAGPATVPRLIAAFGTCRERYQCAFDVECDSGIAPVHIRSGKVDLVSMRRACQKFTRQTFHEFAGQSIPQCEWASAFYHAHCTKPEEHHAAVRALAFKWIRILFRCWKDRKPYEEQLYLTSQRRRGALLGPGLASVTSLEWHNVAGFSKLSEKNS

SEQ ID NO: 500857 - protein, 409 aa, unidentified
MICIGIDWADDKHDICIRDAQDRRILAEFTITHDAEGVEQLDQTVAMLGFQPADCLVAVETPHGLLVGYLLQTGYIVYAIPPRAVDRYRDRHRCSGAKSDQIDARTLSDILCIDREYHRPIPEDSPLAQEIKWVSRQRQKLVQEQTRLKNQLTACLKAYYPVALGLFSGLDCAIAWAFLRAYPNAKAAAQASLAELKGFFKQHGYTCKRKIPEIYAQLQASVIPVAEWQMRVSQRPMLLLVDLMATLTPQIKAYERELTRLLDRHADAFIFRSLPNAGDVTAAWLLGEMGDCRDKFEDASAAQALAGSCPVTIQSNKRRYIKFRVACCKSFRNALQQFARLSARGKKGSPWAKGYLSDQLARGHSVSRATRALGNRWLAIIFRLRQDRVAYDEEIHLRNRALRGHRVAA

SEQ ID NO: 500858 - protein, 341 aa, unidentified
MQIAVLGIDLGKNSCSLVGLDQNGAVVMRRRMRPGSIVGFTRSLSACIVAMEACCGAHHLGRQLVAQGHAVRLMSPEYVRPYVKAQMNDDRDAEAIAEAATRPTMRFVTLKSEAQLDLQILHRARERLVGERTALINQLRAILLERGITVPQGRRKLEQYLAALPEPEDDTSVSPRVRRLIEDMRTEWQALDQRINALDAEFTTRAREDADARRLTSIPGIGVLNATALTAAIGTGETFTRGRDFAAWVGLVPRQVTTGGKPRLLGISKRGNKYLRKLLIHGARAALPALASSGTPLGHWLRALMQRVHKNVAVVALANKLARIAWAVLRRGVAFDAAAAA

SEQ ID NO: 500859 - protein, 422 aa, unidentified
MVLKGVPMALKIVYKICCGIDVHKNFVVACIAKTDKQGITTYERHHFSTYTKGLKQLLKWLLDRNCKDVCMESTGKYWIPVYNVLEHDCSIVLAHPKYVKAIRGKKTDKKDAKWIADLFKHDLVAGSFMPPADIRQLRDLMRYRFKLTCFKSSEKNRYQNCLTVSNIQLASVVSDTFGKSSQKIIAKILENPDNTSFDIESLIHGSMKDKLPELELAIDGYITPEQAAKLKIIKEHFDNLESRKAELEELILALANPYQQEISIILTAPGFKNTFTAIGIISEIGTNMEAFPSAKHLCSWAGLTPTNNESAGKKKSVRVSKAGCYIKPLLVQCANAAIKSKKHPEIRDRYLRIKKRRGHKKAIIAIARMLLTALYHMLKNGENYNSDLYQKSDILPTTREITVEQAILMAQFQGYRIKSATE

SEQ ID NO: 500860 - protein, 471 aa, unidentified
MAVRKDKADGAGVPGHGGDGAEVAEESTQVVAYAAAIDVAKGSGMVCTRVPGSRPDRRRQKVWRVEATCEQVTALMDHLVCEGIQRLVLESTSDYWRIWYYLAEAAGLEVWLVNARDVKHLPGRGKSDKADCVWHCKLNERGMLRRSFVPPEPVRDLRALTRTRSRLAQDQARHQNRVEKILEDALLKISVVISDLFGTSGRRFLDALVAGERSPHALAALGDSRLKATRKELEEALTGRFRDIHATEIAVHLRLIDAVNAEIALLDEQIAKQLAAVPGTAPACTACGLAGGGHAPGCDDQDVPLPDLATRLDEVTGIGAVSAPVIIAELGTDPSQFPTPGHAAGWARLTPRSRQSGETARPGRTGKGNRYLRGALGQAAMTAAKTDTRLGAMYRRIARKRGKQKAIVAVSRVICEIAWILICDPCARYEELGPDYYRPRSPARQTQARIREIERLNPGKKVILADVGAAA

SEQ ID NO: 500861 - protein, 356 aa, unidentified
MENNKLNFSGQTLYIGIDVHKKSWQITIILNGMKVKAFSMNPNPKELYSYLTTHYPNASYNSVYEAGFSGFWADRKLQSLGINNIVVNPADVPTKSKERRTKTDKIDSTKLARELSVGHLEGIYIPSSKAEALRTLVRLRRQLVTDQTRQKNRIKSLLMFLGYSVPEDIQTKHWSQRYIKALRNLDIQHEESKATLNELLNNLNFLRSQLVEILKQIKGFIAKDPEAEKTVRLLKTIPGIGSILAVILYSEIIDINRFKRLDELANYVGFSPAVYSSAEKEINLGITKQKNKYIRNYLIESAWTAIRKDPALQMAYGKLCQKMPPTKAIIRISKKLLNRIRSVWINQQEYVIAIVK

SEQ ID NO: 500862 - protein, 348 aa, unidentified
MRYVGIDIGKQRCRAAVMDENGFLVEEFSFRNNSGGIEGLASKLSVDDRVVMESTGSVWMNLYESLEEMRVQVVLANPLKTKAIASARIKSDKIDARILAHLLRGDLVAESYVPPKHLREIRALVRHRMSLLKVRTMVKNRVHALIDKYGYKHGFSDLFGRKGVEWLKLLEFGSLDRLMLSNYLEHIECLNRQIERIDLEILDEASHDEDVKLLLSMTGIGVYTALLIKSEIGDIHRFPNYKKLVSWAGLAPSLHQSGNVKFHGRITKQGSKTFRWAMVECARIAVRFDGRMGSFYERVKHRRGDQKAIVAVACKMLKIIWTMLMRGEPYESRNQRRYDEKLNFITKQ

SEQ ID NO: 500863 - protein, 343 aa, unidentified
MDHFAGLDVSVKETSICIVDDTGKIVREVKVPSEPEALLQVLMNPAYHFKRIGLEAGPLSQWLFSALAEAGLPVICVETRHMRAVLMAQINKTDRNDARGIAQMMRAGLYRPVHVKALRSQKLRMLLTNRKLLQAKAIAVENDLRATLRNFGLKVGMVGTAKFEARIKELVENLPDLAMLVEPSLIVRRVLREQIDILHRRLLAVVRNDDVCRRLMTIPGVGPVVALTYRVTVDVPARFKNSKAVGAVFGLTPTRYQSGESDRTGGISRCGDEMMRVMLYEAAQSMLVVSTKWSWLKAWAMKIAKNRGMKKAIVALARRLAVIMHRIWVDGTEFRWTKEVVAA

SEQ ID NO: 500864 - protein, 424 aa, unidentified
MSQSEFTAYVAIDWADRKHYWQLADADGQHGEHGHLLNTPEAIDSWVAGLLARFSDGPVAVCLEQSRGSLVYQLGKYAQLVLFPVHPAAMASFRQAFFPSGAKGDPSDAGLLLEMLLHHRHRLRRLEPDTAETRLLGMLIELRRRLVDERTRESNRLTAWLKMYFPQSLNWIDNIDSPLGCDFLDRWPTLQQLQRAHAETIERFFREHNSRSQARIDERMEAICKAVPAVQDTAILQAGAAATSSLVALLKALNGAIASVDPLIAQQVAQHPEACLFAELPGAGPVLLPRLIVAFGTRRERFQSASELAAYSGIAPVTKQSGKSKSVHFRFACPKFLRQTFHEFAAHSIARSQWARQFYQLLRDRGMGHHAAVRALAFKWIRVLFRCWQDRTPYDEARYLQALEQRRALRNSTPESTPAAERGD

SEQ ID NO: 500865 - protein, 426 aa, unidentified
MHDNRNQRINQISETTLVVGIDIAKRNHYACAVDERGRELKKSFVIRQSLQGFESFYATILKLMSIHNKKEVIVGFEPTGHYWMNLAAFLADHDIPYVLVNPLHVKQTKELDDNLQSKNDLKDARVIAKMMPQGYYSMPREMTQIDSELRRGTAYRVRLKEESASIQNRIRRWIDLYFPEFASVIKGLGKQAQAILKYAPLPEDLLIFSPEELIDFLQTKGVRYLSKKKVERLLQVAKHSIGLKDSPEMARMEIRMLLDQLFMYESQIQELTENLVTLARQLPDFDYLTSIPGISETTVLELLSETGSLKRYKDPRQLFKLAGLTLVTNSSGESKGRKRISKRGRRRLRALLYKAVFPLLHSNSAFRALYDYYSNDREKPVTKKEALVILCRKLLQICHGLSHYETTFDLERMMGDMPFLSHPKAA

SEQ ID NO: 500866 - protein, 461 aa, unidentified
MRKARRSRRKPGKKIADVTAGLEILRPQAAGIDVGNAEHYVAVPPGRRDPSVQTFGSFTADLHRMAQWLQACHIETVVMQATGVYGMALYQVLESYGFQVLVVNAKYTQTLPGRKTDVLECQWLQKLHTFGLLNNSFLPPEKIRVLRTSMRQRENLVAAAGTCIQQMQKVLTERNVQLANVISDLSGTTGMAMVQAILDGQRDPQRLAALADPRVQASRKEIAQSLEGHWREDRLFVLPQVHDLYFTYLESITACDRRIEAHLKTLEAKADVAAQPLPEMPRLPRRKHIPQTNLREELYRVTGEDLTRINGIQVQTAQVVISEVGVDMTRWPDEHHFASWLGRCPHHRITGGKVIRRGTKKVLNRAATALRLAAQSLHRSKSYLGAQYRRFRARMDGPVAITAMAHLLARLIYRLLRYGTQYHAQGVEHYERKYRETQTKWLKKQAALLDMQLIPAPGVAK

SEQ ID NO: 500867 - protein, 413 aa, unidentified
MDVLHPRCCGLDVHKSSISACILLREAGRVQKHQRRFGAMTQDLRELAEWLRQFGVTQVAMESSGVYWKPVWNILERQFTIVLANAQHIKNVPGRKTDQKDAEWIAQLLQYGLLRPSYIPCEIIRDLRDLTRMRASLSQEASRISSRIQKVLEDANIKLASVATNVLGKSGRAMLEDIITGEDDPEHLAALALGHLRVKIPQLRLALEGKIRSHHRFLLRRLLDQMQFVEHEIALLEDRLEDIGQQRPELSQAVARWDTIPGIDRVAAWALLAEVGDNMAQFPTAEHLASWAALCPGNHESAGKRLRGATRQGSPWLRRMACQCAWAAARTKNTYLSSQFRRLAARRGKKRAIIAVAHTLIVIGYLLQKNQSNYDDLGGNYFDRIHSDGLKRYLVKRLQQLGHKVTLEPIEAA

SEQ ID NO: 500868 - protein, 412 aa, unidentified
MEVVYPCCCGLDVHKKSITACVLWAEARGKSRKEKKRFATFTHDLLQLADWLAQCGVTHVAMESTGVYWKPVWNILAEQFAVLLVNAQHIKAVPGRKTDQKDSEWIADLLQHGLLRGSFVPPRPTRELRDITRYRVSLVQEINRIANRIQKVLEDANIKLASVATDALGASGRAILEAMLAGEQDSARLAEMSKGLLRNKIPELKLALEGRMTEHHRFLLRQLFEHLRFTESKRSEIEQEIDRRMHPFEDKVTRLCTIPGVDRVTAWGLLAEIGLDMNQFPSSGHLSSWACLCPGSFESAGKRLSGRMRKGNVSLRRCLSQAAWAISMMKNNYLSALYRRIAARRGAKRAVMAVAHALLEIAYHMLKRKEDYRELGADHFDRIDVNRIRRSLVRRLERLGHKVTLEPLAQIA

SEQ ID NO: 500869 - protein, 349 aa, unidentified
MIIIGCDYHPGFQQIAFVDTDTGDYGEQRLEHREGAEKFYRDLAAQGKKVRVGMEASGHARWFERLLAELNFELWIGDATEIARKRERKQKTDRQDAQHILQLLMEKRFPKIWVPSGENRDLRQLWHRHRMVQTRTRIMNQLQAVALNEGLRCKKKLWREKGRQQLEAFRLAPWASRRREDLLQLLDRLNPTISDLTQAIEQEVEKCPEARRLRTHPGVGALTALAFVLIIGRTERFQCGKQIAAYLGLVPLEDSSGNRRRLGHITKQGSSILRFLLVEAAQVTARSIPEWRNKYVHLTMRRGRKIAKVAMARRLAIALYWMWRKGWDYEQLRKFGSHAGKLGTGDGVQ

SEQ ID NO: 500870 - protein, 409 aa, unidentified
MLLVGDDWAEAHHDIEIEDESGRRLSRGRLPAGLAGMSRFHELIADHLDPDSEPSEVLVGIETDRGPWVQALVAAGYSVYPINPFQVSRYRDRHAASGAKSDPGDAHVLAEIVRLDRAHHRPITGDSDIAEHVKAAARAHQSMIWSRQRQVNMLRSTLREFYPAALTAFGDLSSADALAVLAAAPSPEQGRRLTQRQVEKLLAQAGRQRNITAKATEIRAALNTDQLAARPGMVGAYAASVSALVAVITVMVTQTEVLAGQVEQGFGQHPDVEIYRSQPGLGTILGARVLAEFGDNPDRYADAKGRKNYSGMSPITKASGTKRIVLARHARNRRLADALYQQAFCALSSSPGARAFYDRQRDRGATHHQALRALGNRLVGILHGCLRHHTIYNEDTAWPTLTKNEQQAA

SEQ ID NO: 500871 - protein, 331 aa, unidentified
MKNLSIIGIDVSKLVLDVFILSIKFHFQVENSPAGFAQLLETCCNKLMVSRKQLYICFEHTGRYSRLLAVFLEQSEITFSQIPALDIKASKGISRGKTDKADARDIALYAWRKKGELEPTKLQSPQTSELRQLVALRDKLIKHRTAYKNSIRDLQDCYYEGETDFIRISQVKMINHLNEEIKNVEDRMDQIIGSMPEWKKNYQLIISVRGIGPVISRYLIIYTENFTRFANYKKFACYAGIAPFEYASGSSVKGRTRVHSCANKQLKSLLNMAAMNAIQINGEYKQYYQRRQKEGKNNMSTLNIIRNKLLSRIFAVVKRQTPYVDLYKFAA

SEQ ID NO: 500872 - protein, 388 aa, unidentified
MRKPNDMSRCLAALEQDSTLVAVIELGQQSWLVAGIVPGIERHPLKKLAVDQEALLKLLQRWCDEARDPIKRICVAFEAGRDGFWLARWLRMHSIEAYVIHPTSVSVSREHRRAKTDRLDTELLKRAFIGWLRGETDHCSMAAIPTLEEEDGKRPTRERESLVGERTRIVNRLKSCLVRLGIRGFNPKLRKAAECFANLRTPEGAPIPPNTLEELKRDTVRLRLVRDQIKEIDEARLMRLQAVPQRGANAMVLLLARILGIGVETADMLVREVLSRQWRDRRAVARYAGLTGSPGESGKKRREKGLAKSGNARVRRGMIQLAWRFLRFQHDSELAQWFRARAVEGRRDIRKKMIVALARKLLIALWRLVTTGEMPAGVALRASSSLPR

SEQ ID NO: 500873 - protein, 316 aa, unidentified
MTQDFFVGIDISKATLDVAILPGDQPWSLANDEQGLQQVASRLAELGSPQAVIMEATGGLERPVLAALAAAGLPVIAVNPRNVRDFAKSMGLLAKTDRIDARVLALFGERVRPACRPLPDEQTRTLQDLVVRRRQMLDMFSAEQSRLSVAINPKVHREITRHLDWLKKRIDRIDDDLDQAIKDSPVWQEKADLLKGVPGVGRVTALTLLGQLPELGTLTHKRISALVGIAPFNRDSGTLRGKRRISGGRAPIRAVLYMATLTAIRFNPSIRAFYNRLREAGKPSKVALVGAMRKLLTILNAIARDGEPWATAEVSA

SEQ ID NO: 500874 - protein, 340 aa, unidentified
MEDVSVIGIDLAKSVFQIHGVDARGEVVVRQRLTRAKLLPFFARLPRCLVGMETCASANYWARELVALGHEVRLMPPQYVKPYVKRSKNDASDAEAICEAVTRPTMRFAGVKSPEQQSVLVLHRTRSILTRQRTQLGNAIRAHLAEFGIVAPVGRQGLDRLMAIIGDESDDRLPQAARACLTMLVDQYRLVLAHLLETDRAIRADSRATELGRRLQEISGVGPLVASALVATVPDPQMFKSGRSLSAWLGLVPRQHSSGGKERLGGITKAGDTYLRRMLFVGAMAVIRHAERHGTRRPWLAKLLSRRHPRVAAIALANKIGRIAWALMTSGEQYREPVAA

SEQ ID NO: 500875 - protein, 402 aa, unidentified
MREHERVGELWAGIDAGKGHHWITVVDGTGGRLWSKKVENDESAILDALGEVLALAGTVHWAVDISGTASALLLALLAAHGQQALYVPGRTVNRMSGAYRGEAKTDARDAYVIAETARHRRDLTMIDVPAQLAADLALLTARRTDLVADRVRMINRLRDTLTAVFPALERAFDHSSQRGALVLLAGYQTPDGLRRTGQARLERWLTKRKVRNAEQVAATAIEAAKAQYTTLPGQAVAAEIVADLAAQLLALDERISRIDKQITAVFRTHPQAQIIESMPGIGPILGAELVVAAGDFASFADDGHLASAAGLVPVPRDSGRRTGNLHRPKRYNRRLRRVFYMSAQTSIIRDGPNRDFYLKKRAEGLKHVQAVIALARRRVSVLWALLRDNRCFTPTLPVAQAA

SEQ ID NO: 500876 - protein, 345 aa, unidentified
MRKDIILAVDYHQKACVVRRLNTATGEETVLKDLATRPAMIRRLLRDAREDLAPGGRIVWIMESTTGWPRVQALVDKEGAAFVLANVLQMPLPPKAFRKKTDKLDTGRLLREYLNGSLPEAFQPDAEWRRLRRLTGLREDLVRRQTAVRNWINRYVAHETWGPPPRLKSIRGRALMRRLALSGTDRFVMQSRLDELEQIETRLKAVEAELLRVCAAWPEAQRLDAIQGIGEVAAVSILSRIGPIRRFASAEALIAYAGLAPGVQQSDRTCRTGRLGGGGTDASLRFYLLEATMWARREERYRAVYERVLRKRGKKIARLVVARALVRSLYRMLKDDVAFSAAAVA

SEQ ID NO: 500877 - protein, 347 aa, unidentified
MAFIGVDLHQNSFTVCRLDCDGSETFATYQLCRADLDRFCLGLDGDDEVAVEATGNSAWFRDEVISCVGRVVVVNPRQFQVIRKSVKKTDRNDARALAVFLSKDMLPATRVKSKAENELASLVHTRDLLVKQRTRLLNKIHALFNRHGVKLKKAGLSSRRRLLVLESGHFSTLEQVELKVLRDQALSLTATIAELDGEIEHAAQGLAGYESLVSIKGIGPRAAAVFLSGIGNVDDFENADKLAAYCGIVPRVSQSNETDNRGRITKRGDKLMRTTLVQCTLIAIRYSGYLNAFYRRIKNRRGAGKAIIATARKLLKIIYDTLKNGWVFEDFPAFKIAGETIPAGQSS

SEQ ID NO: 500878 - protein, 391 aa, unidentified
MIYVGIDVAKNKHDCCILGSSGTVLREAFTLSNDRKGFQELFSAIQGALHQEGTDQIKAGIEATGHYSENLVAFLRNSGIQPVVFNPLQVNLFRKSQSLRRTKTDKVDAKCIAQLLMSAESTPVYASYQIQELKTLTRHRSRLVSQRTKLKQYISRLVDILFPELPSVCCSATQASMRTLLLELPSARQIASCRIDRLTNLLYAASKGRYSREKALEIKQLAQQSIGANSPASELELRLTLQQLDFLLAQLKQLEKAIQTIVAAIHSPILTIPGIGPTLAAIILAEIGDIHRFSSPDKLLAFAGMDPSTYQSGKFTAGHTPMVKHGSTYLRWALMQAARLASIHCDTFRDYMDSKLAQGKHYFVALGHVSKKLVRVIFHILTTNEAFVPQA

SEQ ID NO: 500879 - protein, 346 aa, unidentified
MLYAGLDLSRKRLDVHVLREDGSTALVTAVAPDTDALRTLVRHVGHNGEAVRATIESMNGARFVHDTLEFAGWEVLIADAQRVRGLAPLAAKTDKIDARVLAELTRRALVPEIWLPTPEVRAERERARFRLHLVQHRTALKNRIHATLIAFGHPRPMADLFGVAGRKLLDSLALPEPWQSNILASLVVLDDLTARIDALELELKQLGAHHPAMRLLMTVPGIGWVLAYTIGSEIGDIGRFASPKKLAGYTGLCPLVRQSGGKDRRGPLAKNGPTYLRWALIEAATHAARDARYVERYERTKQRLGRQRGAKVARVDLARQLAEAIWYVLTKNEPFHPAGPTIRLVA

SEQ ID NO: 500880 - protein, 495 aa, unidentified
MAKRKQSTFERLKNGTLNRKQRKQIMRRLSSDDPGLEIVHRHVAGIDVGNESHFVAVAPGDDAQPVREFGSWTEDLHKMVEWLKACGIQHVVMQSTGVYWIAVYDVLEKAGFQVCLANARDTRNLPGRKSDVQESQWLLKLHTYGLLRNSFRPPEEIRMVRTIWRLRTRLVQDAAREIRHMQKALTTMNVQLSNAISDISGTTGLAIIRAILQGQRDPFQLAKLKDYRIRAGEEEIARSLEGNWQEDVLFELRQALGTYDFHQQQIADCDVQLQKYLAALPDHAPAEVVKSEAGTGEQSENAPAAEKSEKKQKKSGKKSQRNQPKFDLEAEFTRICGVNLRCIDGVDVMTIATFVSEPGTDMSKWKTENHLVSWLKLSPFQATSGGRPVKQKRPKFRNRVADVLRMAASSLINSDSYLGARYRYLSNRRGAPKAIKAMAAHLARIIYRMLKHGQAWVDRGAQQHEAKRAERERLSLQRKAAALGFRLEPAARVVH

SEQ ID NO: 500881 - protein, 261 aa, unidentified
MRIIGCDLHARQQAVAMVDAETGEVVNMTLKHEGNNVREFYSSLPRPVRVGIEATGSMQWFVNLMEELGIECLVGHPAEIRAAEPRKQKHDRRDADLILKLLAENRFPAIWLPSKELQDLRALLRHRHQWVRMRTRIQNALQSIALANGLRRGTALWSHDGQNTIASLPLAPHTAYRRSELQALYQKFEAEIEKLNQRVEEQACGRAGARLLMTHPGVGPVTALATEVFLGDPARFADSKALASYVGIIPREYSSGGRQRR

SEQ ID NO: 500882 - protein, 369 aa, unidentified
MGEYNEAFVAFDVAKIKHAVAVAEGGRTGEVRFLGEIENREGPIERTVKKLAGRYGRLHFCFEAGPTGYGLYRQLQALGHDCMVVAPALIPKRPGERVKTNRRDAVTLARLHRAGELTGVWVPDAVHEAVRDLVRAREAAADDLRRKRQQLLSFLLRHSRIYSGSGHWTLAHRRWLANQAFEHAAQQIVFQDGVDAIEDAIARLRRLEEQLVAIVPSWSMAPVVEAYQAMRGASFLVAVTFAAEIGDVRRFDNPRQLMSFLGLVPAESSTGDTVRRKGLTLAGNRRARRALVEAAWTYRYPARVSETLRARLEGLPKAVRDIAWKAQVRLCARYRRLSATGKKPPVVVAAIAREMAAFLWAIGREVAPG

SEQ ID NO: 500883 - protein, 358 aa, unidentified
MAATEGTRGIVGGVDTHKDLHVAAVVDEQDRLIDTRCFATTRQGYRQMLAWMRSFGELQRVGIESTGSYGAGLLRFMQQAGITVLEVTTPDKQDRRRRGKNDDLDAQNAAHAAFAGQRTVTPRSRDGMVESLRVLMACRKTAVSARRVALQMIHNTIVCAPDGLRDQLRSLTRMQLVRTLAAWRPDLTAYRDLDSAYRIGLKSLARRYLELHDEIADLDVMIAAIVDELAPNLVARNSIGHVGAAQLLLTAGDNPERLRSEASFASLCGVSPVPASSGKTVRHRLNRGGDRAANSALHIIAIGRLRTDQRTKDYVTRRIAEGHSKLDAIRALKRYLAREVFTLITQRRREINATRIAA

SEQ ID NO: 500884 - protein, 464 aa, unidentified
MTEKKLWRNRKERKEWGRRLQSEDPGLEVVHSHAAGIDVGNGMHYVAVRPDRDPQPVRRFECFTADLHCLAEWLQQCGVKTVAMQSTGVYWIPIYEILEERGIQVYLVNARHTKNLPGRKSDVQESQWLLKLHTYGLLNNSFQPPSEIRVLRTYWRQRAEHVHGAATCVQRMQKALTQMNVQLANVISDVSGLTGQAIIRSIIAGEHDPRKLAELSDPRIHASREEVAKSLEGHWRPELLFVLQQEVVMYDTYQQRIAECDQQLQKHLASFADTIPLLPTAEEPKRKKSKPAKNAPRFELRSELQRIAGVDLTRIDGIDVMVAQTLISEVGLEMSRWKTEAHFSSWLGLCPDNRTSGDKVLARGTRRVVNRAATALRMAAVTLMRSRTYLGAQYRRLRTKLGAPKAITAMAHRLARLVYRMLKYGQHYVDKGAEYYEHRYRRQQIEFLRKKATKLGLQITLAQT

SEQ ID NO: 500885 - protein, 317 aa, unidentified
MSEHSIVCAGIDTGKHKLDVAIDESLEQVQVENTAEGHGKLSAWLRQRRVKRVGIEASGGYEQDVVAQLRRDGFVVIVFQPAQVRAYAKFHLQRAKNDKIDAALIAACTAATKEVHAPPDPRLAPFAGPLTMIEQITDDITRLKTRRESCRDPRIRRTWSEQIAGLKALQRRELKDLVAAIRQHPDLAKRLKLIASVDGVGLRTAVAILVRMPEIGSVTREQAAALVGVAPYDDDSGKHAGARHIAGGRERLRGSLYNAAFAAAFHWNPQLIAFYTRLIAAGKTHKAALIACARKLIIFVNTVVARGTPWTKVPNAI

SEQ ID NO: 500886 - protein, 447 aa, unidentified
MKQKKPNKRKSVKLPKHLQNLNPYAAGIDIGSKSHFVAVPEGTDDQPVREFSSFTDDLERLAQWLTACGVTTVAMESTGIYWIPVFEILESYGLEVRLVNARHVKNVPGRKSDVLDCQWLQQLHTYGLLRGAFRPADQVCALRAYVRQRSTLVRSAASHTQRMQKALAQMNLQLHNVVSDITGVTGMRIIKAILAGERNPKVLSAMRDPRCKNTEETIARSLQGNYRQEHLFSLRQAVELYEFYQEKVSDCDQQILAQLKDFDAPDNHDPDQKPPRTVGEALQRMSGVDLATINGIDTNTALKIIAEVGVDMSRWKTAKHFASWLGLCPGAKISGGKVLSSATKQVANKAAAALRMAAFALINSKSALGAYIRRQRARLGAAKAITATAHKLARLVYSMLKNGTAFVDVGQEYYEERYRTRVVQNLKRKAQDLGFELVAIQGATPTT

SEQ ID NO: 500887 - protein, 361 aa, unidentified
MFRQRTFVGLDVHARSAVGHAMDEHTGEVWQQQLPADPPGIWGWLESLPQPVKVTYEAGPTGYGLARFLRGRGIACPVAAPSKLTRPTGNRVKTDAKDAEHLCRLLRLDEIVEVRLPDPEQEAARDLVRAREDVRGDLMRVRHRASKLLLRQGIVYPGRKTWTATHQRWLQQHRFDAPPRQLAFEDAVEAVLLTTDRRDRLDAAIEAMAADSSYTPLVRRLGCLRGISTLTGFGLAVEIGDWHRFSGSSIGAFLGLVPTEDSSGESRSQGSITKAGNGHARRLLVEAAWHHRKSYHHPGRQMRNRWQLAPAPARVRGHEGNRRLHSRWETFQGRRKKDTIAAVAIARELAGWVWSLAVMDD

SEQ ID NO: 500888 - protein, 459 aa, unidentified
MAKAKARKSGKNELQVINSHAAGIDIGSKFHIVAVSPEHDPNPVRKFNSFTTDLHRLADWLKAVGITTIAMESTGVYWIPVFEILESKGFDVILVNAREAKRVPGRKTDIKDAQWIQQLHQYGLLSASFHPSEKIASLRSYLRHRERLTEYAAAHIQHMQKALMQMNLQLQHVVSDITGETGMRIIRAIIEGERSATKLASYRHYCCKESETTIAAALTGNYRAEHVFTLKQAVALYDFYQEQIKECDQEIEKALDALNVDRQAPLGPLPEARRKRKQKKEPGIPIREKLFTLTGVDPTQIYGIGPHMALRLVAECGTDMTKWPTSKHFASWLTLSPGNKISGGKILSSRTRRTKNRATALLRIAAVNIGKTQTALGAFYRRLAARVGKAKAVTATARKLAVLFYTLMRYGKEYVEPGAEYYEEQYKKRLLRALSRKAASLGYSLVLKQQDSPAMGNVS

SEQ ID NO: 500889 - protein, 386 aa, unidentified
MATPAARRIEQDSFPGPTLYLAFALGKNTWKLGFTIGVAQQPRERMIPAGEVERLQQEIARAKQRFGLPEEACVMSCYEAGRDGFWLHRSLVAHGIQNHVIDSASIEVKRRQRRAKTDRLDVRKLLTMLLRHSAGEKKVWSVVRVPSVEEADRRQLHRALTTAKQDRTRMMNRIQGLLVGHGVQLVLQGDVEAQLDQTHQWDGAPLPSALRSRLKRAWQQVGFLTAHMQTLEAERRALLRHRTDPIIAQVRQLFTLRGIGINSAWLYIMAFFAWRAFQTAKQVGALAGLTPTPYQSGQSRRELGIAKAGNRHIRAMAIEIAWAWRRFQPDSARSQWYERRFGAGSARLRKLGIVALARELLIALWRFVKTGVLPEGAVLTTAPPRP

SEQ ID NO: 500890 - protein, 412 aa, unidentified
MKRIRERVAGLDVHRDTVVACCQVKQPDRSIEVTKQTFATTANGLGELAAWLSDSGVETVAMEATGVYWKPVYYCLEGLFDELWLCNAQHVKNVPGRKTDLSDAEWLADVAAHGMVRPSFVPPAEIRELRDVTRYRKTQVEARVKEIQRLEKTLQDAGIKLSSVASKVWSQSSRAMIEAMIDGERDPSVLAQMAKSRLRAKIPQLEEAFSGRFDSHHALVCRQVIEHIDFLDRSIATLTADVTERLCPFESAVTILCSIPGVSRTTAEVMIAEMGVDMTRFPTSGHLCAWAGVAPASHESAGKRHPVGTRKGSTWLQRALVEAARGASRTKGTYLSAQYSRLARRRGSNKATIAVAHSILDVSWHLLTNGALYDDPGAQFFELRHDPAVEAKRLQRRIEDLGFDVSIAPAAA

SEQ ID NO: 500891 - protein, 343 aa, unidentified
MAVGDVRAFGQIVNNPAALAHMLSRLSQPGRILKFCYEAGPCGYGIQRQLSAAGHDCVVVAPSLIPRKPGDRIKTDRRDANNLARLHRAGELSAVWIPDTAHEAMRDLVRARLAAVRSLRQARQQLSGLLLRHGCNYGRPAWTQMHRRWLAGLRFEQPVHHIVLEDHIATIEAATDRRDRLTKQIEIMLSDWSLAPVVHALQSLRGMALVTAATTIAELGDISRFTNPRQLMAYLGLVPSEHSSGGTRRQGGITKAGNGTARRMLIEAAWSYRFPARISREQLLRQEQLPKTIRDTAWKAQMRVCSRYRKLTKAGKPATTVTTAIARELSGFVWEIACQVAPR

SEQ ID NO: 500892 - protein, 381 aa, unidentified
MRQVCGLDVHKDSVFVCILNENGIVFQEKFGVLTPELEQMLSVMLQYHVEEVCMESTSIYWMPVWRVLENYVSLKLVNPYFIKQLPGKKSDVKDAEWIATCLLKDLIKGSYVPEDLIQQLRQYDRRISDLNAEIVRKLGKLDAALQRCNIRISNYVSSTDGKSYKEVVRLISEGIRDPSELTKVIHGRTVNRVGRDVVLASLTGVISDTDIDVMRQLREEVELVEKHKDECQSKMDAICRQYFPDQLKNLQTIPGIKGRSATAIIAEVGTDMSSFEDAAHLVSWCGLKPRNEESAGKIKARGITHGNRYLRKTLIECAWAASKTQDCYFSKFSYHQVVVRRKSKMKVQMAIARKVLTAVWYVMHDNVAYRDFTPDIAPAAE

SEQ ID NO: 500893 - protein, 347 aa, unidentified
MSEYIGIDLHKAKSFVTRVDRHGRVLEQVELRHAAGELQRYVEKIPGDTRIVVEATGNWMWLYELIEDRHPDLVLAHPLKTKAIASARIKTDKIDATTLAHLLRADLVPAAYIPPRAVRDTREILRYRASLVRLRTQVKNKIAAILSKNGIVTPTKTAFGVKSRQFLATVAVRPCYRLALDGYLRQLAHLTDEITQAAQTIEAQAQADPEAQLLCTMPGIGAYSALLILSEIGNVHRFPDSRHLCSYAGLVPSVHASGGKTRLGRLTKQGSTWLRWILIELSMHAIKGAPQFRQLYHRVARKHGRNAGRTAVARAMLKTIYAMLKHQEAFRPIEQGSTGQRLGAMAG

SEQ ID NO: 500894 - protein, 483 aa, unidentified
MAAKKDGKTGTDPEGAGAAPEHGGDGAEVAEDRVQVVEYAAAIDVAKGSGMVCTRVPGSRPDRRRQKVWRVEATYAQVIALMDHLRCEGIQRLVLESTSDYWRIWYYLAEAAGLEAWLVNARDVKHLPGRGKSDKADCVWHCKLNERGMLHRSFVPPEPVRDLRALTRTRARLAQDQARHQARVEKILEDALLKISVVISDLFGASGRRFLDALVAGERSPKALAALGDPRLKATRRELEDALTGRFRDIHAFEISTHLRIIDAINEEITRLDDKIEEQLALVPRTAPACTACGLAGGGHAPGCADEQVPLLGLAARLDEITGVGECNARAIIAELGTDPSQFPTPGHAAAWARLTPRTRQSGETARPGRTGKGNRYIRGALGQAAMTAAKTDTRLGAMYRRIARKRGKQKAIVAVSRVICEIAWILICDPGARYQELGPDYHTPRSRARQTRDKIREIERLNPGKKVILAPIDPGPEAGAAA

SEQ ID NO: 500895 - protein, 466 aa, unidentified
MSAEKPLRNRKERKELARRLQSENPGLDVVHPDAAGIDVGNEAHYVAVRPDRDAAPVRRFECFTADLYRLAAWLKQCKVKTVVMQSTGVYWIPLFDIMEEQGFEVYLVNARHTKSLPGRKSDVQESQWLLKLHTYGLLNNSFQPPSEIRTLRTYWRQRAEHVAGAATCIQRMQKALTQMNLQLANVISDLSGTTGQKIVRAIVAGERNSQKLAELRDCRIKASQEEIAKSLEGNWRRELIFVLQQQIDIYDAYQRRIAECDQQLQKHLAEFTDHLNGVLTPFPTEQGNKKKTATRHTPKFDLGGELQRIMGVDLTRIDGIDVMVSQTLLSEVGLDMSRWKTEAHFASWLGLCPDNRTSGDRVLRRGTRHVVNRAALALRIAAHSLLRSQSYLGAQYRRLRTKLGAPKAITAMAHRLARLVYRMLKYGQQFVDKGMEYYEQRYRNQQVQLLQKRAAKFGLQLVAVET

SEQ ID NO: 500896 - protein, 323 aa, unidentified
MDYYMGIDISKQTLSLFDGKEDGIVANTPKLEEFQAYLQESYGKRWKKVRLIYEPTGPYAYALRRFASGQGMKVFVLNPKQSAHFKRALGLRSKTDVMDARMLYRFKDLLKEEEAKVPTIDPTTARLSSYLKTYALIQKVRKIVGSHLYAHGYDEHFPIPLAQAMQAEASRLQQLETALVEALKTFAETTEELREDFALLQSIPGVGTLSAAVLLELFRRYPPTNRSRIVALAGLDPTRKESGTSLHGRSRISKAGSDLLRRILYFSCLSAVRSNDRLQAFYQHLLEEHKPKKVALIACMKKMILIAHQIYTKKEGYRPMVLT

SEQ ID NO: 500897 - protein, 345 aa, unidentified
MTTMNYIGLDVHKKTISYCVKDVSGRIQQEGKVGSTRRELGCWMKTLPQPWTVAMEATIFSGWIYDHLLPHATQIKVAHPLMLRAIAAAKKKNDQIDASKLADCLRCDFLPECHMMPRAIRDRRRTLRYRHLLVRQMVQMKNRVSGLLMETGVEYNKQRLHKVSYFRELLSANGEVPPSIRPLLKLSRETIERCQKTEYALVSSLQRDPVLADRIKRLRTVPGVGPITALTWALEIGDVSRFGSIKKAISYCGLCGDERSSADKAMRMPLSKQRNKHIQRALVEAAKLAPRQNHEMAVIYDQERQKGNSNRATLAVARKMVAYLLAVDRQQRDFVPAEERRTTAA

SEQ ID NO: 500898 - protein, 445 aa, unidentified
MSDLPVLEPRATFVDVGSEQLHVSIAGGPPRVFGTVTAQLAALRDWLLAEGVQAVAMEATGVYWLPLYGVLEDAGLAVTMVNGRQIRNLPGRKTDMLDCQWGATLHAHGLLQAGFVPPAQIRRLQDYLRLRADHITLAASHVQHLQKALERMNVKLHDVISSLTGVSGLAVVRAILAGERDPQRLLALCDVQIQRRKAEQVKESLRGTWAAEHLFALKQALRSWEHYQEQIAECDREIETLLHEMNGGDDPPAAPPKRRQSPGVNAPAIPQLRELLVQLCGGQDLTSLPAHGAYSVLQLVGEVGTDLTKWATAKRFTAWAGLAPGSHQSGKRHHVVRRKRNRAGRLFCVMARALARSKDIALGGFYRRLAARRGGLVANIALARKLATLFWQVMVKGMDYVEHGLAAYEAKVLETKQRALRRLAADLGQQLVPVPNTAAPTPVHG

SEQ ID NO: 500899 - protein, 353 aa, unidentified
MNKFRKPKADGDVCNSMFVGMDVHKSYLQVAVMDEKGKVLNNSRVDNDLAKVNEFFDSLHPNSKTKVVMESSGMWYKIYECLSKRHLDVRLSNPVKTRAIASAKIKTDKLDAVKLADLLRGGYIAECYVPNKRIMGLRDIVRHRAALVRMRTKLKNKVHGITVMNGIDDDASEVERTGTFTKRHMDRLEESDDYRINGCLRVIKSLNNEVNTVSKKILLLAKEDEIAKLLMTIPGVGYYSALLIVSEVGEINRFPDSYHLCSYAGLVPSTHSSGGVTRYGSSITKAGSKYLRWIMLECVHAHIRSEKNSNIAQFYFRIARKKGNSKAAVAAAAKLLKVVYWIMKERRTYERLG

SEQ ID NO: 500900 - protein, 342 aa, unidentified
MQIRSVGIDLGKTTFHLVALGASGKMLVKKKFTQKQLLAFTANMQTSLIGLEACSGAHFLGRALRQQGHDVRLIAAQFVKPFVKSNKNDFVDAEAIAEAVERKNMRFVPIKTDDQLDLQAMHRIRDRLVSRRTAVINQIRAFLLERGMVFAQKPAKLKAGMADVLENADNALTPMMRNLIGLLWDEWKTVEGQIDELTDRLEQIAESDAGCCRIRQIPGIGPIVATAIVAAIGNGAAFRKGRDFAAWLGLVPRQYSTGGKTKLLGISKRGNIYLRKVLIHGARAAAMRIKRDRFPIGAWMNALEARAPRNVLVVAMANKLARIAWAVLSSGEDYRPAVNAAA

SEQ ID NO: 500901 - protein, 405 aa, unidentified
MNDELAEGYVPEIWAGVDIGKTHHHCVVIDTEGKRLLSRRVANDESELLALISDVLEISREVLWAVDLNHGGAALLIGLLVSHGQPVAYLTGLAVHRASATYRGEGKTDAKDAFVIADQARVRRDLGLLRPGDEIAVDLRTLTTRRLDAVFDRTRQINRLRAQLLEIFPALERALDLTNQGPVMLLTGYQTPAGIRRAGASRIGTWLKNRKVRGAATLAKTAVEAAQAQQTALPGEKLAAAMVVRLAKGVMALDEEIAELDALIETRFREHPHAEVIRSLPGMGTKLAAEFIAATGGDMDAFGSSDRLAGFAGLAPRPRDSGRVSGNLRRPRRYHRGLLRTMYLSAMVSLQCCPVSKAFYDRKRSEGKGHKQALLALARRRLNVLWAMIRDGKQFHASPPVTLAA

SEQ ID NO: 500902 - protein, 458 aa, unidentified
MRKPDKKQLQVKRREKSGLALLNPNAAGLDVGAREHYVAVPADRDPQPVRCFGAFTQDLHRLAQWLLQCGIKTVAMESTGVYWIPLYQMLESYGLAVKLVNARHVKHVPGRKTDVQDCQWLQQLESFGLLSNSFRPEAKICVLRSYMRQREMLIRNAGRYIQQMQKALTQMNLKLHHVISDLSGQTGLRIVRAIVAGERDRLKLAALKDRRVKSDVSTIARALEGDYRAEHLFALKQGLELYDYYQQKIAECDTEICKEMQTLETRSNASAVLKRKPRSRHATGFDSQAELYRVLGVDLTSIDGLNESTAQLIVSELGLDICQKWPTEAQFTSWLGLCPNNEISGGKLLKRGTRKVVNRVANALRMCAQSLLKSKSALGAYARRMRSRKDTPVAITAIAHKLARLIYRTLKYGQEYVDTGSDLYEAKYKATMVKSLQRKAKLLGYQLVSSQTLDAVVP

SEQ ID NO: 500903 - protein, 382 aa, unidentified
MQTIAPVNPTILLAIELSTSTWLVAARLPGLDKPRLSRIDGGDTAALLALISSLRARAACGLDTTMGVVCCFEAGRDGFWLHRLLTAHGVVSYVLEPTSILVNRRARRAKTDRLDAEGMLRVLAAYLRGDHQACSMVRVPTPDQEDAKRTHREREHLVQERLRIENRIEALLFTQGIRKRPSLRSWERDLTVLRTGDGRKIPRHLRAELDRLRRRLVLTLELIREVEVERDQVTKTKPQDQAHHKMTALCRIRGIGENFAAVLTREVFYRSFDNRRQIASYVGITPMPYQSGGMDRDRRIGRAGNPRARTTMIQLAWLWLRYQPDSELAEWFRERVGTLAGRTRRIAIVAMARKLLIALWRYVETGVIPTGAEIRAETTVAA

SEQ ID NO: 500904 - protein, 420 aa, unidentified
MPNIEIGVDSMVKENFIYVGIDLHKETHTAVMIDCYNQKLGEITFPNRPAAFPKLVTKVKKCNTDGKEVVYGLENAYGYGRALAVWLIDKGYLVKDVNTAISHRQAKHRGAMYRKSDSDDAEAIALATLNMLDKLPDACPNDAYWSLGQLVHRRDNIMKQRTRLVNQLHEQLCIAYPSYKQFFNDISRPTALYFWEHYPSRKYLKGKSVEDLRAELVPVSHNKCSTKTCEKILDAVASDKVKNNAYQDARDMVTLSIVSDLQYYDKQLAEVDKMLEQMYKMLGCTLTTIPDVNVITAVKILAEIGDIKRFSNANKLAQFAGIAPLHLSSSGKGKDLATKQGNRRLQATIYFLAIQMVQVSSKGTPRNSVVRAYYEKRKAEGKTSQQALICISRRLISIIYGMLKHGTEYRMPVVESAGEK

SEQ ID NO: 500905 - protein, 382 aa, unidentified
MIGAWPSCPNSGMSPDRTESPVEEEETGSMVTLGVDCHKKSHTVVAIDEHGGVLRTRTVKATSAGHLEALRFAEQWKERCWAVENVRSLSRRLEAELLQAGEGVLHVSPHLMAGQRRSGRERGKSDAIDALNVARVLLREGGDLPIARLDGPSREVKLLVDHRDDLVQERTQKINRLRWHLHELEPEFEVRARSLSGPRALKRVSEMLQHHQGLVARIGSELVEDIGRLNERVKGLEKELEGLVKALVPKLHELEGCGALTAATLVAETADVTRFRSRAAFAMFNGTAPIPASSGNTTRVRLNRGGNRRINAALHIIGLTQIRQGGPGLEYFQHRLREHDTEVEARRALRRKLSDVVYARLLQDHAAHVTPGGGGGTSKLAA

SEQ ID NO: 500906 - protein, 322 aa, unidentified
MSAPILGIDIAKQRIEVALLVEGKIKNRSFKNVPDGFESLALWLRKWGIERVAACMEATGNYGEDLAIYLHEAGHKVSVVNPARIKGFAQSELIRTKTDKVDAGIIARFCLAMKPGSWTPPSHEIRSLRALVRRADSLIGMLTQEKNRLGTGHESVIPLIKGHIDYLDKEIEKVRGQIADLIDGDPNLRQKKDLLASIPGIGTATIPVILAELDKVEKFKNVRELVAFIGLAPKERLSGSSIKGKPRLCKTGNARLRKALYMPALVSIRYNPLIITFYNRLKEKGKNGKVIVCAIMRKLVHIIFGILKTGKKYDPNHKPAFA

SEQ ID NO: 500907 - protein, 353 aa, unidentified
MSQNLNCTIAVIGIDIGKNSFHVVGLDDRGAIVLRQKWSRGQVEARLANIPPCLIGMEACVGAHHLSRKLKALGHDARLMPAKYVRPYSKGQKNDFRDAEAIAEAVQRPTMKFVATKTADQLDLQALHRVRERLVSQRTGIINQIRAFLLERGVAVRQGLRFLRGELPRILATPPEVLSPRMVRVIEGLAEDWHRLDERIDHLSGEITALARQDAGCERLMSVPGIGPIISSAMVAAIGTGEVFSKGRDFAAWLGLVPKQISTGDRTILGKISKRGNRYLRVLFVQAAWVVLVKPKTWERHGLKPWIDAAKRRLHHNVLAIALANKLARIAWSVLAHGRNFETRTSVAAVQPA

SEQ ID NO: 500908 - protein, 413 aa, unidentified
MGDSVGRSGVWIGIDVSKATLHLCAIDRSGHVLWQRRISNDEDMIREVIAQVRGPRRRRVGWALDMTSGATTLVITLLLGARQQVVYVPGRLVSRIGSGLAGGAAKTDARDARTIAEIARMRTDLRPVTTDTLLVAELRVLLAHRDDLVGEWVAGINRLRQHLAAIFPALEAEFDYSTRSALILLTAYQTPGPLRRRGAAGRVAALLRRHGARGVIPGGVEAMAHRAVAAAARQRTVLPAQQITAELIGRHAARLLELREEIATCTTRIQTQFATHPWSPILTSVPGIGVLLAARYLVETGGDLQARFGTENRLASYAGLSPVPRSSGTTLAKQHRPVRYNHALRQMFYLASTAAIRTTDGPGRAYYERKRAEGKLHGQALLCLSRQISRLLWALVRDHRVYTPTHDKPPHTD

SEQ ID NO: 500909 - protein, 356 aa, unidentified
MSTYYIGADVHSNSTELAIEKRGKIVARYSVPTSIPAIINVLDSLQGKKYLAVEEGPMSGWLYRNLNEKLEQFISSDPRRNKLIASDGDKDDKIDAVKLASLLRGGFLREVYQSDDDSRAELKHWVSLYHDRVRDAVRGINKIRARCRMHGVTISRATLRDPVSRLKWLLKKNYTPLDSQLKMLWIGYDATVQQVMFSKRQLSTLSKKYNIIQHWSQLQGIGLIRATTIFAYLDTPWRFKKKNKLWKYCGVGLQRTTSGTDKKGRPKPARLKLPWAVNRTLKNAVLGAALSAINQKDNVFKDHYERMVQNGMITSNARHAVARKMLTVMWAMWKTNTPFDEKVVCNKLNKPTVQVL

SEQ ID NO: 500910 - protein, 364 aa, unidentified
MSEITRVGVDLAKQVLQVHAVDASGQRVAARSLSRDKFMPWCAQLPAGCLVAMEASSSAHHWARKLVALGLDARIIAAQLVTPYRLQGKSGKNDANDAAAICEAASRPQMHFVPIKSIEQQSMLCVHTLREGIKADRTACINRIRAMLSEFGLVFAQKTCNLRQALPDVLEDAGNELNGVARLAIQRAWANWQELDEHMAWCDARIAAHGKTNAQVHQAEQLMGVGPVTASALVAAVGDFKQFKNGAQFGAWMGLTPKQNSSGGKTSLGSITKRGNIYLRTLLIQGARSAVLTAHKRDDPISKWAYQLREKSGWQKAVVALANKNARILWAMFVRGAAFDARHVSVKPGAAQAALAPPLAAVSM

SEQ ID NO: 500911 - protein, 307 aa, unidentified
MKKVMAGIDLHSNNVVIGIMDTDGKRVTSAKLPCELKEIAKFLAPFKKRLEQVAVESTYNWYWLVDGLQGLKYPVVLANPAAMQQYSGIKHADDTNDAFFLAELVRLKILPTGHIYDAQLRPVRDLLRRRMTLVHQRTALMLSFKSLYTRTTGQEMTLSQLKELEIKEAQDLYAHPANQMIAGMQIKHMDQLTESIEKIEKVVMASARELPSYAKLTTLPGVGIILGMTMTMEVGDIKRFASPGDFASYCRTVQAQRTSNRRKRERTIPNAGTSIWPGHLSRQRILRGVMMSSAASGTIAKRLRPAR

SEQ ID NO: 500912 - protein, 383 aa, unidentified
MKKTQATLRRKANTGLAVLYTAFELSNTKWKLAFSNGDKTRQVTVVARGLSQLQREIGKAKKRFRMPEKVRIVSCYEAGRDGFWLHRYLTTHGIANLVVDSSSIEVNRRKRRAKSDRIDAGTLLRMLMRYRAGEKKLWSVVRVPTREQEDAKHIHRELETLNKERTSHRSRIRAFLIQNGIQITNPSRLNFLNTLVSLRTWDGQALSWDLKARVVREYERLRVVEEQIKALHKEQEQRVKTADSSSLCKVAALKKLHGIGPRSSWVFAMEFFGWRKFDNRREVAGAAGLTPTPYTSGRTRREQGISKAGNRRIRTMAVEMSWCWLRFQPRSKLSRWFNKRFANGGSRMRRIGIVAMARRLLIDLWRYLEHGTVPEGARLTSLA

SEQ ID NO: 500913 - protein, 376 aa, unidentified
MSEGISFAGLDVHKKSISVALLKPGAREPIEWQQANDAQSVKRLVRKLKREGGETVRCCYEAGPCGFGLQRTLCSAGIECEVIAPALIPLKPGERIKTDRRDARKLAELHRADLLTAVRAPTPEEESVRDLCRCRDDVREELMSARHRLGKFLLRRNLRYGEGRAWTQKHRRWLKSVQFEHRAAKATFDSYLHAIEVLEERMRAVDKELAAVAAEEPYREPVAWLRCFHGIDTVTAMTIVAELHNFRRFETPRALMAYLGLVPGEHSSGAKTSRSSITKAGNKHVRRILIETAWHYRHKPTVGANLRRRREGQPAAVIAIADRAQHRLHRRYWRLLLHNNKVPNKAVVAVARELVGFLWAALYDGDWSASGGCPTS

SEQ ID NO: 500914 - protein, 384 aa, unidentified
MQASTVSTPIRNGISTIFVAIELSRKSWLVTIHSPDKDRMSHHKVESGDHAGLLALIDRLRERAARALGTVPAVVSCYEAGYDGFWLHRLLLAAGITNHVFDPASIMVDQRARRTKTDRLDGEQMLRTLMAHCRGEPRVVRIVRVPSPEQEDARRASRERDRLIKEQTAHTTRIKALLRLLGMAVGNPHRRDWLTWLSAQRDWQGQPVPPRIRAELEREHARLMLVRQQLDALAPAEAELTPAAAEMAQRSDLLLRLKSLGPAFAGTLTQEAFYKDFRNRREVASYFGLTPSPWQSGGTDREQGISKAGNRRARVKTIELAWLWVRHQPDSALTQWFRQRTLNASKRIKRIAIVALARKLIVALWRYLTTGLVPAGAVLKTVKA

SEQ ID NO: 500915 - protein, 527 aa, unidentified
MRLYSPPDGRTSRNPVTQWCSCEPAFQHGTRHCDQISGDVAARSTSGCDDLVWEIASIFAAWPSLPSEKGAMSKRKYRKRQTSNKVFVRPILNPDTAGIDVSPYCMYVAVPPDRDPDPVRKFSAFTTDLRAIADWLKNCGIRSVAMESTGVYWIPLYQILSDEGFDVCLVNARHCKNVPGRKTDVCDAAWLQYLHSVGLLLASFRPAQEICAIRSIARHRETLIRQAGEQIQRMQKALDEMNLHLHHVIDDLTGKTGLAIVKAILAGERNPRILAKLREKNVKATPDVIEKALEGDYRPEHLFVLRQALESWGHFGSLIAQCDQQMERMTAALVSTVDTSAYVPVQKGKSKNQPQGDWGRLLYGAFGVDLTAVPSINVATTLVLFTEIGTDWSRFPSASRFASWLTACPDNETSGDKVLRRRTRRASQRLKRALRIAAQSLRQSKTALGEKFRRLRAHLGTPKALTAMAHALARILWYMVTHKTPYDESIFAENERKYQERRRKRVLKEARALGLQITEVNNCECTT

SEQ ID NO: 500916 - protein, 366 aa, unidentified
MPSVSSAAGPIHLGMDTSKNTIVVGVLMPGEEVPVIDRVWNEEGSVRHLIGRFGDPAALRCCYEAGPCGFELHRLLASMGVACDVVAPSLIPRRAGDRVKTDKRDASRLARLHRAGELTPVRVPSETEEAVRDLVRARAALLADRKRAQQRITAMLLRHGRVWRSGSYWTQAHEQWIAAQRFGEPALGAALAHYRAALDTRRAELDAVEAELSVWAGREPLAPAVARLGCYRGIAGLTGLVLAAEVVDWRRFPSARAFMGFTGLVPSEYSSGDKTRRGSITKAGSEPARTALVEAAWTYQHKPAIGVALRRRQRDASPDTLARSWKAQRRLHGKYKAMTARGKPTGMAVTAVARELAGFVWAEMTS

SEQ ID NO: 500917 - protein, 340 aa, unidentified
MTVMGGLDIHRAQLTFDYVDLDTGEVQTGRVTPAGRASLRNWLRRFDDQSDVVFALEGCTGWRYVVEELVRAGVEAHVAEPAETAALRGKKRRAKTDRADARHLRQLLVDDRVPDSWIPPAHMLDARVLVRLYKDLLDERTGWFQRVQATLFHHGVPQLAARLVTAAGRDHLDRAELPDAGRRAVETGMRQIDRLNAELDPLRAQIIAIGARQPGCKALRANLYGVGPLTSVIIWEELGDCRRFTSSDDAVRHAGLDVTVWSSDGKRTRGHLAKQGPPALRWALYESAVYAARPSSPDYPYYLQLKSRLDGQLALLTVARKLARRCYHTLRNLEGAALTA

SEQ ID NO: 500918 - protein, 323 aa, unidentified
MNTLDFLGIDIAKKTFNVALLRNDKLRHKKFENSPEGFKQLDSWLVKQGVIEIHACLEATGSYSEGLALHLHQAGHKVSLVNPARIKAFGQSELRRNKTDRADATLIARFCSMHRPAAWVPPPAEIRELQALVRHLDDLIGTRTQLGNRFTDGPKIKSVLESLKTLIEAVDVEIKLTRKKIREHIDQHPGLKEDCELLETIPGIGAQTATTLLAEIEHLRHYKHARQAAAYAGLSPRLRESGTSGKRSRLSKTGNSRVRKALFMPAISAKQHNPVLRQFSERLARRGKPKMAIIGAVMRKLLHLAFGVLKTRKPFDPNHPVAA

SEQ ID NO: 500919 - protein, 371 aa, unidentified
MYTIVYVGMDVHKESYTLCCYSYDRDKVEFKQTIPSDYRLVLKYMERVRDQYEGEVKFVCGYEAGCLGYSLYHQLTDHAVDCKILAPTTMAITNTNRIKTDRRDAGNIARCLAFHTYSEVYVPDDKDNAIKEYIRMRDDQKLMLKKIKQQILAFVLRKGKRFEGGKTYWTIAHLKWLKNLELEGLDKETLSEYMITYEYLTDKIQRLDERIQSLAEGERYCEQVQNMSCLLGIKTHTALSLLVEIGDFDRFEKASKFAAFLGLVPGENTTSDNVIRLSITKAGNSHLRRLLVEAAQSYTRGTIGHKSQDLKRRQSKCSPEVIAYADKANERLRRKFYRMTLQKNINRNVAATAIARELACFIWGMNTGNIA

SEQ ID NO: 500920 - protein, 510 aa, unidentified
MTTTSTSQTVSIGVGIDTSRYGHHVTFLNADLQPATAPLQITETRAGYDRLLATLNKLKQRQPAAVFHIRLDAAGQYAANLETFLHKLPFEKTLSIGDPVRNKNYRVAHFPKRKSDAVESHCVARFAVIEQPKTTSEYPAELLALRETASRLEAQTREVTRHVNQLHNLLARVFPELATLTSSLAANWVLLLLAKYPTPAKIARARLATIREIPRISQEKAQRIHQAAQTTIASLTGDIAEQLIKSLVRQIQASQRERREFERLLIHAYETLPFSNQLDTIIGIGVPSAAVLTAKIISIDRFDSPDRLVGYFGIFPQEVASGIDADGNLRPRRNTRMSKKGNDLVRSYLYNAAMSACRYNPACRALYQRLKAKGVSGNAALGHVMRKLLHLVFAVWKSGQPFDSNHYPWDQPHVGKSQDQPLRKNKAAGHKQETSPERRVVTAAETVNVSASDTRVNAAARAIPSLLRSPNSEQASEAPPERIRPKDFRTESSTPTKERNKKGVITPDTT

SEQ ID NO: 500921 - protein, 414 aa, unidentified
MDVVYQRCAGLDVHKKTVVACRIIPNAKGDWDKQVRTFGTMVDELFNLADWLRAGEVSHVAMESTGVYWKPIFNILEGDFQVLLVNAKHIKFVPGHKTDVKDAQWIGELLQHGLLKASFIPPAPQRDLRELVRYRSHLIDERTREVNRVHKVLETANLKLASVASDIMGVSGREMLAAIIAGQTDPTALAQLAKGRMRPKIAELERALKGYVQDSHRFLLRLHLEHIDDLNAKLVELEEEIGKHIPPFDDNNLLERLQTIPGVGPKVAQSVVAEIGVDMSRFPTAGHLASWAGLVPGKNESGGRTHSSRINKANRYLKAVLVEAAHAIGRTRDTHLATQYHRLAARRGKKRAAIAVAHSILIIAYHIIQRGTSYIDLGANYLDERKAETVQHQLVNRLEKLGFKVILETQTQAA

SEQ ID NO: 500922 - protein, 340 aa, unidentified
MDKITKKRWFIGIDISKVNIDAAMVNENEPKRFQNGRFSNDLKGFEAMENWLSKHDVKVKDCLFCMEHTGTYGLLLFAWLSKQNADFCVEPGLQIKRNLGMTRGKADKIDARRIATYAMEKKAKLKQYELPSENLIRIKQILTYRDQLVRLRTSLKNSLQSHQEYQQISSLDFVTKDIQKQIMQLDESIESCVKQIKEIIKSEEDLKQNFKLATSVKGIGLVIASFMLVSTNNFTGFENGRKYACYAGIAPFPNESGSSIKGKTKVSHLANKKIKTLLSNGANSAKSHDPEIKAYYERKIEEGKDHKSVINAISCKLVNRVFAVVKRQTPYISTYQQKIA

SEQ ID NO: 500923 - protein, 342 aa, unidentified
MTAKVIGIDLGKTLFYLIGMDSHGNIVLKKRFSRAQLFKFLVNLPACLIGMEASCGCHHIGRKLQLLGHDVRLIPAQFVKPFVKSQKNDYRDAEAIAEAVQRPTMRFVPIKTEEQLDVQAVHRVRERLMAQRTSLVNQLRAFLLERGLIVRTGRAYLWRALPDLIAQTEQVVSPRMFRLLLSIVQQWRELEAQLTEIEAEIARLAVADPSCLRLQTVPGIGPLAATAIVAAVGRGAAFQKGREFSAWLGLVPRQHSTGGKTKLSGISKRGNEYLRRLLIHGARSVCLHVNRAKHVWGDWITDLKSRKPSNLATVAMANKLARIAWAVLSRDQDYCSQTSTIC

SEQ ID NO: 500924 - protein, 413 aa, unidentified
MEVMYPRCAGLDVHKETVVACVRLAAGSDTSHVVRTFATTTADLIVLSEWLEENGCTHVAMEATGVYWKPVWQVLVDSSCFELILANAAQVKNVPGRKTDVNDATWRAELLAHGLVRASFVPEPAIQELRGLLRTRKQLVREKASHVQRVQKTLEEANIKLESVLSDVMGRSGRAIIQALIDGETDPAKLAALAHWNVRASTETLSEALRGRIKRNHRFLLRLHLQQIQALDAGIAEIDREVDDGLACFRDAVDRLSTIPGISQLSAQVIVSEIGTDMSRFATDAHLRSWAGLCPRNDESAGKRRSTRLRKGAPWLKSMLVQCAWAAIRSKGTYLHAQYVRLRGRRGPKKAICAVAASILTAAYHMLKDGTFYNDLGPTHFDRRRPETQARRLIKRLAELGFSVELKSMATAS

SEQ ID NO: 500925 - protein, 414 aa, unidentified
MDEVHEVFVERCAGLDVHQKTVAATVRLPGPDGGRRTETKTFGTTVKRLTELADWLASFKVTVVGMESTGVYWKPVYYLLEDRFGCWLLNARHLHNVPGRKTDVADSVWIARLVEQGLVRPSFVPPPQIRDLRDLTRYRRALTEERSREVQRLDKVLQDASIKLSAVVSTLQTKSARDMLAGLVAGRPPGDLAGLARGRLKDRQAELAEALSGRFRRAHHGLLVAHILAHMDFLDDQIAQLDARIEDLVTPFEDLVGLVATIPGVSERGAQVLLAETGTDMTRFPDAAHLASWAGICPGNNESAGKTRSGKTRKGSVWLRTELTGAAKAAGRTKRSYLAAHQAQIRARRGHPKAIGATRHDILTAFYFIVRDHIPYHDLGPAWAEQRNATEQRTRRLVTQLEQLGHTVTLTPAA

SEQ ID NO: 500926 - protein, 412 aa, unidentified
MDNIVAYIGLDWADERHSVHLQPADGKIEHHELEQKPTVLHEWVAQLQQRFAGGKIAVALEQRKGAVIHALLMYDCFVLYPINPKALARYREAFTTSGAKHDPRDSELLLDLVVRHRDKLRAWVPDTVESRKLQALCEQRRKLVNQRVALTNRLTSLLKQYFPQALEWVGDLASVQACDFLVQWPTLAAVQTVRPSRVRQFYCDHNCRKRAVIDARLAAIASARPLTTDAAVIEPLSLSVQTYATQLRTLIAAIATFDARIAAVFAEHADHDLFGSFPGAGDVCAPRLAAAFGTDRSRWASAAELQAHSGIAPVTERSGKSLWVHHRLACPKFVKQTFHEFADQSIRFSRWARAYYDQQRARGNDHHAALRALAYKWIRILFRCWKERRPYDEDTYIDALRRRGSPLAKHFA

SEQ ID NO: 500927 - protein, 331 aa, unidentified
MKIKQTIGIDISKLTFDVRIHSNQFYQAFDNNLKGFKELVKWVEKNNPISKEQTLFILEHTGLYSEQISLFFDENNISFALIPGLEIKKSLGISRGKDDKVDATKIALYGYRLRDEIKPYKLPSKSINQLKRLLTLRERLVKQRAGHKSTLKEQKRIYIRKDNKLLLETQDKMIKFLTKQIRNIELEMSEIIKSNEQLKQQYKLIVSIKGIGNQTALFMIVTTNGFTMFASWRKFASYCGIAPFPNRSGTSIRGKTKVSNLANKKLKSLFDLCAKSAIQNNPEMKIYYNRRIEQGKNKMSTINIIRCKLQARIFATIKRQTPYVNTLKFVA

SEQ ID NO: 500928 - protein, 404 aa, unidentified
MRRTDHRAAHPRSAAHAHDTALFVALELSRSTWLIGSSRPGSDRISKHQVRAADTTALLVLLKRLKARAERSCSTTVRVISIHEAGLDGFWVHRFLEANGVESHVVDAASIAVNRRSRRAKTDRIDVEKLLDTLMEWARGGRRACSMVRPPSPTEEDERRLTREREALVIERTRHVNRIKGLLATQGVFGFEPMRKSHRKQLEQLRGWDGQTLPPRLKAELVRELNRLELVISQVAAVEDERDRALKAQQHPAPSISAPEAATGAQPVATEHAGRLLLRLRSIGPEFASVLSSEAFYRNFGNRREVAGYAGLVPSPWKSGGIDVEQGISKAGNARLRKTMIQMAWLWLRHQPGSTLSRWFHERVGDRRGKIRRITIVAVARKLLIALWRYVTLGLVPEGAELKV

SEQ ID NO: 500929 - protein, 422 aa, unidentified
MNIVCKTKHVCGIDLHAHTMAVCIMDKNGKVLVRQSIKCEIEPLMNILKPYHKSITVGVESTFNWYWLLDGLKRYNIPCHLGHALYIKRMSGNKHKNDSNDARALADLLRTNRFPSAYDYPSEMRGTRDLLRRRHSFVRQRAGTYTHLQNTLNSNGFTQPFRDAVRRKGDRRTLEKLPHQKDVGKNIACDLDYIESLDSIILDLEKTVIDSAHHHNRKHYKLLHTMPGVGKITALTVLYETHTVERFKNVQCYSSYCRVVQASNESAGTSYGRTSNDKIGNPYLKWAFSEIGIKMVEQSELIGEWFRKQVDVHGKGGAMARLRHKIAIAVYYMLKHEIVFDEYKFLGIEQSRAVTPALSGTDTSGKKSKPSSVTGDRPALLKKKRGRPPLSADKKKTKVPQRLSLRTTGKRKILTKRKSVVG

SEQ ID NO: 500930 - protein, 349 aa, unidentified
MRFYTKQHTFYCGVDLHADAMYVCILDAAGEIVVHQNIPTRPKTFLRLIKPYRKDLVVAAECMFTWYWLADLCADEGITFVLGHALYMRAIHGGKAKNDKIDSHKIAVLLRGGTLPQAYVYPKGMRSTRDLLRRRNHLARKKAELVAHIQNTATQYNLSEPLGRIAKPSERGDLPAKFSDPAVRRMVEVDLATIEHYERLLDSLERELERMATAHDPVNLALLKSIPGVGRILGLVMLYEIEDIARFPRVQDFASYCRLVKPTKESNGKSYGHSGKKIGNAHLRWAFGEAVVLMLKGNKPAQAVVQKLASKHGKGKALAILSHRLGRAVYYMLKNQVPFDPQRFLRQGT

SEQ ID NO: 500931 - protein, 386 aa, unidentified
MQTVADRPEAPIAIRTNLGAIFVSLELSRSTWLITSLTPDGGEKMSKHVVRGGDVAGLLQRFVQLREKTRARTGKVFPFVVIQEAGLDGFWIDRALQNEGIESHVVDPASIATSRRRRRAKTDRIDGDALVRALLAYKRGEPRVCAMVKAPTPEEEDRRRLCRERKVLIAERVRHVNRVKGLLFSQGISGYEPLRRDRRERLDTLQTGDGRLLPDHLKAQVRRELDRLELLLKQIKAVEAERDVLLAAQQVAAPAAMLLDIKGIGPEFAAILWSEGLFRHFDNRRQVASYAGLAPTPWQSGSVGREQGVSKAGNPRLRTTLIQLAWLWLRHQPQSALALWFEERVRRNGGRLKKTTIVALARKLLVALWKYVTAGVVIEGAVMKAA

SEQ ID NO: 500932 - protein, 326 aa, unidentified
MQGKESSEQETAGKSNVGIDVSKSWLDIHVLPSTVTLRVPNTGHGLRKLKRWLARFDVALIVVEATGKWHRQACRSLNADGFRIAVVDPFRVRAFAKAQGILAKTDRLDACVLASFAAVMNPAIRPPAPEALENLAELVTARESAVAEQTALKNQLAAAAMSFLKRQLERRCARIAKDIEDIQCEIERRVAADEGLARRYAILTSIPGFGPVVAVTLIACLAELGTCSRRQIGMLAGLAPIADQSGKREGIRVIWGGRAKVRRTLYLAALSAAVHNPAMKILYQRLISKGKEAKAALIAVARKLVVLANTLIEEDRTWQPRSPENA

SEQ ID NO: 500933 - protein, 386 aa, unidentified
MGTQTFIPRDYDVFAGLDVDKKSISVTFTDHQGFLKSLTMPYSVEYLVNHVRKHYGDKKVAFGYEAGPTGYGLYDGLEAQAYTCVIASPSMIPKAPGQRVKTNRLDSRGISENLRGGQLKGIHVPTPLYRELRHLTQLRDTLVSEMVGMKQRIKSLLLLEGLEFPPAPAGSQWSFLVKKKLRKLPCSSTVRFKLDRLLDSLEFDEKQVLKTTQEMRRFCQTDPELSQCINYLKSLPGIGWIVSSQMMARVGDWRQIKNIRQLPAFLGLVPTERSTGERIERGSITHTGDGRLRSKLIQASWSAIRQDGELREFFRTVAKKHPRHCAARVAIVAVAHKLCVRASVVLMQQRPYEVRQKVKSAPLTQEETVPQGTTRRRAEAGESRTP

SEQ ID NO: 500934 - protein, 394 aa, unidentified
MKLIGIDIGKNKHFFCVMDQQTGEIISQPVSFSNDKEGFDFLVQEIKSYPKDSILIGMEDTGHYHFALLKYLLDLQYTVALINPKTTDFNRKMQGGITKNDKLDTINICDVLDTPERKKQYRITKVNSFDLYEQKQLTRHHHNLKEEENVYKNRLQKCIDIVFPEFNKLFNSKYGIVYMNILKMFGSAENIANTDIRTIRKCFEIEGRGNRISLTPERLKECARSSIGISSSAEVIQIKHLTAQIELIEEQLTEIDKKIEEFSIQNNSPILSIPGISHFSGTSILAELGDISNYSKPSQIIKFAGVAPLHYESSQFNAQHTSITKKGSKYLRKTLYQIILPVIKHNPVFNKYYQLKISQGKGHRCAQGHCVRKLLRIIYHLLKTNQQFDPQLLR

SEQ ID NO: 500935 - protein, 340 aa, unidentified
MTPIRIGLDIAKNVFQAHGVDDKGTVVIRKRLRRPDMLRFFASLPPCLIGIEACSASHHWARELIRLGHDVRLMPARYVKPYVQRGKSDALDAEAICEAVSRPTMRFATIKTTEQQSVLTLHRSREILVKQETMLANLIRGCLGEFGIVAPLGIRRVADLIAVIKDDADPRILPEARIAMRAVADQLCDLQKRIKEIEQAIRAWHRSNETSRRLATIPGVGSITASAIVATVANATEFKSARHFAAFLGLTPKECSTGGRQRLGRISKQGDVYIRRLLVLGGTSLVRYARAAGGSVWAKQLLARRPTRIVTVALANKAARVIWALLTRGGVYRAPQPQAA

SEQ ID NO: 500936 - protein, 418 aa, unidentified
MKFTWKLRETICNDPQVCRIVDLPVYYELETNNGNRDYRIQIGGHYMNYNTVYVGMDVHKESFTLCSCKYEDEKASHYQRTPASYKNVLRYLAFLRTIYGEYTRFVCGYEAGCLGYSLYHQLENFNVECVILAPTTMLEQRSKRRIKTDKRDAEIIARSLAQHNYSPVHIPTETDNQTKEFIRMRDDHKAELKKIKQQILSFCLRQGYQYDGSGNWTAKHVKWLRSLKPAGLYKEILDEYLLTYTILTDKLNRLDQRIEELASKEEYTESVSKLTCFLGIKTHTALSVIVEVGDFQRFVSARKFAGYLGLVPGQHSSGDDRNGLGITKAGNTHVRRLLVESAQSYTRGKIGYKSRVLRSRQAGNSPQVINYADRANERLRRRYYKMVLKDGKKYNIAKTAIARELACFIWGMMTDNIY

SEQ ID NO: 500937 - protein, 412 aa, unidentified
MNLVYERCAGLDVHKKTVVVCAIIAGVKGQRSKEWRTFSTMTPDLLRLRQWLKELGVTHVARESTASYWKPIFNVLEGHLEVLLVNAQHLKAVPGRKTDIKDAEWIADLLQHGLLRPSFIPPASQRELRELTRYRISLSEERSRLINRLQKTLEDANLKLASVASDIMGRSARDMLAALLVGEVDPTVLAELARGRMRSKRDLLAQALQGQFKSHHRFLIAEHLADIDALDEAIERMSTEIAERLRPYEPQIQHLSTIPGIKRRLAEVILAEIGSDMSRFPSSRHLASWAGMCPGNSISAGKRLSGKTRKGSPWLRSALVEAAHAAIHTKDSYLSAQYQRLFVRRGGKKATIAVGHTLLVIIYHLLSEDTDYQELGGNYFDEWDRQAVQKRLVRRLEKLGYQVKLELTSPAT

SEQ ID NO: 500938 - protein, 430 aa, unidentified
MTKRISTPADAVLVAIDMSKHRQEVLIERPEGGRRRRMTVMSTKADYDRLAADLGEIGRPIIVGFEATGNYHRTLAHRLLSAGFELRLISSVALARTREALHNGWDKNDSKDAQVILHMLRIGATQRYVDPLAAGINDLQEMSKTHEAISKAKTQTWHRILTHYMPLYFPEIERFAGNSRSDWFLALLERFPTPVSMTALGQEAFTREAWSLVGRKVSKARLINDIYETACASVALPVNEDSVAIAMFRMVIAQARSLIRQRDEIERTAHALLADNRDYQLLRMIPGIGPINALTILAEAGDLRRFAHHRQFLKFCGLDLATCQSGTFRGRTKLSKYGNARLRRTFWMATQVAIRQRDNSFRDKLGRYVAGHGNDPDRRRKAMTALTAKMARVAHAVIKTGAEYRPFVERADTRWKDPSLLCREGATATL

SEQ ID NO: 500939 - protein, 422 aa, unidentified
MQTLLSQKFTAYIGIDWADTKHDVCLQVAGQAQRCFSVIRHNPEAIDQWAHALYQRYGGPIAIAVELDKGPLIAALQKYDFFCLFPINPATLAKQRKAFVPSGAKDDPSDAQWALELLLKHPDRFPQQEKQSPAIRSLASLTEHRRTLVDERVRTSNRLVCMLKQYYPLALELFHDHDTQVFCDFLERWSTLETLKRARPTSVLKFLNAHNVRHAELNQQRLALILKATPLTEDPGIVTPSALYVRTLASQLSGMLVAIKQFDAAIEETANTLADYSLFKSLPGAGQQLAPRLMVAFGEQRDRFKDAGAMQRYAGIAPVTERSGKKKIVRWRYQCSTFLRQTFVEWAAHSINQSVWAGAYYRQQKAKGCSHQAALRALAFKWIRIVYRCWNAGSQYDESVYLQALARHDSPLIRAPEATNAC

SEQ ID NO: 500940 - protein, 343 aa, unidentified
MELYVGMDVSLKETSICVVDGSGEIVSEGTVISEPAAIAEFIEARAGCALRIGLETGPTTTWLWHELRALGLPVICIDARHAKAALSMQINKSDRNDAVGLARIMQCGWYKEVQVKSVSCHELRAVLNSRAQLVKIKRDLENQIRGLLKNLGLVIGKAGGTVFTRRVEELLGRHGLLWEAVRPLLEVREKVRREIAGLYRRLLGLARNDIDSRRSMTVPGIGPITALAFHSAVDDPTRFRRSRSVGAYFGLTPRRFASGEVDWSGRISKCGDAMVRSYLFEAAGVLLTRVAHWCKLKAWGHRLWRRIGFKKAKIAVARKLAVILHRMWRDGADFIWSSKEAAA

SEQ ID NO: 500941 - protein, 398 aa, unidentified
MFYGLDVHKLFIQVCELSADGKRRRDFRIEASAEAIEAFAKTLQRSDAVVLEATFHTWAIHAILSRYVERVAIANPIQVKAIAHAKIKTDKVDAHTLAQLLRTDFLPEVQLPSRKTWALRQLMAHRRHLLKRSTASKNALHGVLNRSLVQYPGRWLFTKKGFQWLEKLELPAVERMVLDHQTELFHEIQKRLKAVDEELLRHARLERDAKLLVTIPGVNIIVAMGLLAAIGSIDRFPSPQKLAAYFGLVPKVRQSAGSCHHGRITKAGSRSARWLAIEAAHTLARSGSPLAASYHRIRHRKNHQIAVTALARKLTVTVWHILTKGEPYRYAAYPRTRLKLRKLNPTSRTGPRQVTPKTLEELYDEAGFELSPPTPGERRVARNNRIAIKKLTREPAAG

SEQ ID NO: 500942 - protein, 317 aa, unidentified
MQQHNTIFVGIDIAKFKFDVAFSHLSKGTTYDYTPDEIKKFIQVLREIQPQLICLEATGGLERKLVACLHKHQFAVAVVNPRQIRDFARAKNQLAKTDQIDARIIMQFAQLMQPRITPALTQAQQKMHEFSSRRQQVSKMTIQETNRLASTADREVGKLIQQSIRAYKKQIKVIEKKLKQLIAADEQALERAAILQSVPGVGEITAALLIAELPELGSLNRKQIARLVGVAPTNRDSGTMRGKRTIGGGRVHIRNGLYMPTVVAQKHNPKICAFYKRLVESGKPKMVALVAAMRKLLIILNVMIKEGRKWDEKVINI

SEQ ID NO: 500943 - protein, 336 aa, unidentified
MNTVCAVVGIDVSKKKLDVAILIDGKTKAKVLENSATGHRALLDWLGKCKVPLAALHVCMEATGAYSEPVALALHHAGLLVSVVNPACIKGFGHSENIRNKNDAIDAGLIARYCAAMKPQPWSPPPLEQRQLRAWSQRIQALKDIRQQEENRLEALAVSDMGQVAQHVKQHIVWLNTEIDKLERDISDHIDRHPGLKRDADLLASIPGVGMATVAKILGQLGDIRRFDNAKAFAAFLGLTPRQRSSGSSIKGRTVISRTGNTSLRSALYMPSLVARRHNPILQRFAQRLAATGMAKKAVIGAVMHKLAHLIYGVIHNGKPFDPNYLAKGLAIQDGI

SEQ ID NO: 500944 - protein, 387 aa, unidentified
MTKKRGRVIGLDVHPDSFAGAVVEGSDPASAKVLSTSSRVELEQLEQWALRYTRREDTLVLEASGNAFAVATRLRGIGREVEILDSHRAGKVGKVYCANDRVDAVKIARIYLSALSPIVWQPDQKTLERREVFSAYQAVVKESTRAQQQLRSMLNEHCVRLEKGFRLCHPNAIRRLLALRKWTPARRMLLQQLHGSLVAARARRTLLRRHMAQEIVAEEALLRLTRLCGINLITLYGVVAAVGDVRRFTHSKKLVAYLGLNPSVSQSGNFEGSGALRRHGRGALRALLIQSGKKLLEVNNSLQKWGLAVAARRGRNKAAVAVARKLCVALWHVMMGHAIGALERLDTLAIKLNKFATEIGPAALTAFGYNNKADFVEKKLYVLRSYP

SEQ ID NO: 500945 - protein, 370 aa, unidentified
MLDTTTFIGLDVHARSIKAVSLDVMTGEVRAATFGYDAGAVAEWVRSVDPRARCVYESGVTGFDLQKRLSGLGVGCVVGAVSKMIKPSADRRRKNDRNDAEFLARMLSVGNVVEVWVPDDECEAARDLTRALEDARDDLSRSKQRLSKFLLRHGLVFDERTPTGRRKGNWTRAHWSWIESIRFAEGADNDVLAYYVDAVRRAAEEKARLEGLVEAEARKPRWRRRVDSLRCLKGVDTATAADLVFEAGEFSRFRNARSFAAWVGLTPSEHSSGESDRRGAITKAGNKHLRKALVEAAWHYLTCSGRPKDLARGQAPDRVARRHAAKGVRRPVERREALLARGVHGNKANVATARELACWVWAVGLMAEEA

SEQ ID NO: 500946 - protein, 377 aa, unidentified
MKYVGVDLHKQTISACVVVKECERRQVAVRKRLECRDESAMAAWFRELGPFEVVVEATSSYEWFVKLVEPLAHRVVLAHPKKLRVIAESKRKSDKLDAQVLAEFLASDEIPLAYRPAPRVREHRTLVRYREYLQRRITGVKNKLRHILAKYNADVPHLFTDAGQEHLATVGLSSGDRLVADALSVELNQHGQRLTKINRELRRFAAKAPLPEREARAVLDSIPNVGPVTADIVLAELGDWRRFRSQADVVSYAGLAPGYRESAGKAKQLGITKEGSRMLRWAMVELAWRMVRTSRKWGRQFTRLEVRVGAKKAIVAIARRLVGVIFALLRDGKRYSLALDSSPPASRRNQSPRDTHPSDPACLRSQPRQASSLGAGG

SEQ ID NO: 500947 - protein, 464 aa, unidentified
MPTAPTHRQRALDALACVHPDAAGLDIGSEEIVVAVPSDRDPQPVRAFPTFTTDLHALVAWLVACGIDTVAMESTGVFWIPIYELLESAGITPYLVNARYVKTVPGRKSDWSDAQWLQKLHALGLLQGSFRPDAEIRTLRTLARYRAELIERRAPHINHMIQALKHMNLQLNLVLTDITGVSGLAMLRAIISGERDPHQLAVFRQPGCKHSEAEIVKALTGTWDDAQIFILTQSVDVFDYYTTKIDACDRQLEQQYQAMESRWAPNAPLPDLPPAKGESKSKNAMTFNARAQIARVIGVDLVAVMGLSAITVQTIISEIGTDMERFPTVKHFCSWLGLAPHNDISGGKVLRSRTMKVHSRANQAFRQAAHSVTRSHSSIGAYYRAMRARLGPKQAIVATAHKIARIVYHLLKTGEPYREQSDVEYERKRQEREIKHLARRAHKLGYTLAPVPVTASESQPEGGG

SEQ ID NO: 500948 - protein, 434 aa, unidentified
MEEITDEPLYRDRVCGIDIGKAGLVATIRVPSDANPARRAAETRSFGTTRREVLALADWLRCWQVPAVVMESTGDYWKGPFYRLEAEGLECVLADAKQVKHLPGRPKRDPSDSRWLAACFERGAVTACFVATEEFRVIRLHTRYRRDLTEERTREKQRAEKLLESAAIKLSSVVTDLHGVTGRDIMDHLIAGERNPKVLAQLARAAARRKITELEAALEGAEFFTPAHAALLATMLDRIDHLNAEIARLTEMIEHLLAPYEEQLAQAESMPGWGRRSAQDALAETGTDMSRFPTPSHLASWAGRTPLDNSSGKRKGKAKSKKGNRYLAAVTGETAVAAGKTQTREGARYRRLARRRGKAKAQVALGNTQLKVYHALLSHPGTRYQDLGPDYYERQAGTRRQIAHHVGKLAALGFEVTLARLPEPDPTGPDNQAA

SEQ ID NO: 500949 - protein, 399 aa, unidentified
MNARYTPHELQIGIDVGSINHSVAVSDGYGNIIKEFEITHTQQGFDYFFKIIEDEASKRDASVAIAMEGYNGWARPFDNLILQKGYKLYNVNNVKLARFKEIFPASAKTDSIDARKIVELFSLQKHLPIAKKVLQEVTISDDINAQLKKLTRRRKQLVEERVAISNRFSSDLQAEAPDLKIITASVDNLWFLRFFTLRESIVFLSRVHKSTIEKIPYISHKNVEKILTWQKSAQFTSSIAYTSEMLYEDALRILELNQKIKALEIQIKKLIPSSKIARIIQTIPGFAHISAGSLAGEINNLERFESEASLALYLGMTNLDNSSGKQKGSKKNLSTNRHAKMTMLTATMKHVQHVEESKKYLEKKISEGKKYQQAIRSIARHLVRVIWNMIQQNREYEIR

SEQ ID NO: 500950 - protein, 355 aa, unidentified
MDSKKYIGMDVHKESISIAVMNGAGKIVMECVIETKASMILQFIDGLRGDLQVTFEEGTSAAWLYDLLKPHVTKLLVCDPRKNASMREGNQSDKIDARRLAELLRLNHLNPVYHGEHGLRSLKELVRSYLTITKDLVRVMTRVKAIYRSWAIPCTGKQVYAPRHRVEWLGKIGEPGVRRRAEFYYQQLDALRSVRQEVRRELLAEGKKHKAWKLLCQIPSIGPIRAAVLLGILQTPHRFRTKRQLWTYSGFGIETQSSADHRSVDGQLERVKKQSSIRGLNRNCNHDLKNLFKGAAIVASSKPGPFQEFYTALLTKGLRPEMARLTLARKIATIVLMVWKRGACFDAQHLKPQTA

SEQ ID NO: 500951 - protein, 343 aa, unidentified
MQVSTIGLDLDKDVFQGHGVSAEGKVVLTKQLPRGQVLSAFAKLPPGLVGMEACAGAHYWARELRKLGHDVRLMPARDVKAYVKRDKTDAADAAAICEAVSRPSMRFVALKTPEQQGRLMQHRVRDLLLRQRTQTINALRAHMAELGLVAATGRQGLGLLLAILADAKDERLPQDARASLKLLASQITALQAQIDSLDKRLHAQHRQCPASRRLETIPGIGVIGATALAATITDPKAFKSGRDLAAFIGLVPRNNSSGGKQRLGPISKQGDRYLRRILVVGAHSILKQARTRPDKHPWLARLMARKPGKLAAVALANKTARIAWAVLARGESYRAPTAPAAAG

SEQ ID NO: 500952 - protein, 342 aa, unidentified
MSVSYVGVDLGSSNFHQVALNHRGAHTLNREFTTSEANLIKAFSDMRGEIHVHLEAGELAPWASEIIRPLVTRVVCSHPQTNAWIARDRDKCDRIDAYKLASLLRLNEFKEVHYPREQSRRDFKTLVQHYDELTQQQARLKTKLKARLRMQGIIVRGEEVFSARGRQAVLEQVKSPAVRTAIKQLYAVLDQSIASQTEAQMLMLRAAQALPEIRIMRTAPGMGPIGACRFSAYIHTPQRFSSTRKLWKYCRLSVSHRSSNGKPLRRPRLDRMGCGRLKDVSRKAFEAALRRWDNNGFKRAYYRALETTHDATHARLTVQRKIVSTLRAMWINQTPYCDELMR

SEQ ID NO: 500953 - protein, 319 aa, unidentified
MAEKKSETFIGIDVSKQQLEVAAHQRDYQFRCANKLSAFGELVAELISWRPALIVLEATGGLETRVVSALQGAGLPVVVNPRQVRDFAKALGQLAKTDRLDARVLAHFAAAIKPPLRPLKTKEQQELDALTGRRGQLVEILADEKNRRAATASDTIRDQIQEHIDWLEDRIAELDKQIKAQLQTSPRWQLKDQILQSVPGIGPVASFSLLADLPELGTLNRQQISKLVGVAPLNRDSGQQRGTRHIYGGRARLRRVLYMAALTATRHNARLKEFYQRLRANHKPFKVAITACMRKLLAIINVMIRDNTCWKIKEAPVSP

SEQ ID NO: 500954 - protein, 340 aa, unidentified
MSEITTIGLDLAKHVFQVHGVDGKGATVLRKRLRRGQVLAFFSRLPRCLVGMEACATAHYWARELGALGHEVRLMPAQYVKAYVKRNKNDAADAEAICEAVLRPTMRFVPVKTADQQGALLLHRGRERLVRQRTGLVNALRGHLAEFGVIAPQGLRNVGQLIAIVRDESDARLPVLARAVLQVLATQIEQLDAAIAALERQLMAWHKSNPVSQRLATIPGIGPIIATAIAATVVEPSGFRSGREFAAWLGLVPRQNSTGGKTRLGGISKRGNQYLRRLLINGASANLLRSKATNADPWVIGLRRRRPSLVVAVALANKTARIAWAVMCRKENYQRVAAAA

SEQ ID NO: 500955 - protein, 370 aa, unidentified
MKYVGIDLHTNRFTCCYLFDEQSKKQTETFNLDKEGLKDFYSTIDKETYILVEATINTFAFVSLFKALVKEVIVANTYQLKSVGIPGKKTDKLDAFKLAEKLKAQIVSEVKQIVPVIVPPKEIRDLRALFATYGTLRKEIGRTKNRIHSLLKENLYPFTKEYIFGKKTRKEIRVISDDTVLSFQINMLMDTLEYLEDTFEKLVIKIKKAGSIFISHIEVLTSMSGISVITALAVISDVFDVTRFRNSKHFASYLRSVPRVESSNDKTIIKSTTKAGRKLSIVLLSQSLNHFRDNNKTLCNWYEKAKVNKKKGVVRMALCRRVITEIYQMMKKQEYHYFRNHILHEKKLIEYRRFLEKEGLFIEKNYLNVA

SEQ ID NO: 500956 - protein, 392 aa, unidentified
MIYVGIDVASQKHDCFLLKDTGEVFSKTSFTIKNDFEGYKKLHNSILQFVESTKDSNVRIGLESTGHYSKNILLYLIKQGYQTTLINPILTNMDRKASTVRKTKTDKIDAEAICKFLDKNRFDFKPYTLLSYHIDALKSLTRQRFSLVKQMTQQKLIFQRLVNVIFPELLSHFSNDYGESVLNILYSYPTPKKLAKAHKESITKLLHSRCKITSSEILELAKNSIGQSEEYLGFELKHTIDMILFYQSQIEIYNKQIEIELNETEYGKIITSIPGVGIITGAMIISEIGDINNFTTSDQLLAYAGLDPSVYESGKFESSHNKPSKRGSKYLRWAIHQASSVIWQHDNTFKDYYLKKIKESKHHYVAIGHIDKKLIRVIFSLLKNKSMFIPQK

SEQ ID NO: 500957 - protein, 346 aa, unidentified
MKQIKRIGMDTSKHIFQLHGVDAAEEVVLRKRLGRQQIVAFFAKLPPTAIGMEACGASHHWARVLEQLGHEVKLIAPQHVKPYVMRNKNDGRDAEAVCEAMSRPRMRFVAVKTAEQQAALMLTGLREQMVARRTQLSNTIRGYAAEFGITAAKGLDKIEPLLAQIAQNESVPTMARDLFAMQGREYAQLQIELKAIEAKLKAWHCTNADSRRLSKIPGVGLIGATALVMKTPDPRAFPSGRHFAAWLGLTPKDHSTAGKTRLGKITRAGDERLRNVLVAGATAVIQQARRGRGHPSPWVVALLKRKPPKLAAVALANKIARIAWKLLATGESYDSARMFAASPSAA

SEQ ID NO: 500958 - protein, 415 aa, unidentified
MEGSPRYLIGIDWASVKHDICVLDPAGAIQAQFVISHTAEGLADLLRQLRRFGDRQRLPIAIERPSGLLVDTLVEAGLPVVPIHPNALKATRPRYSAALGKSDPGDAYILADLLRTDGHRFRPLRVPSDPTKALRAAVRTRDDLVATRVQLANQLRSLLESFWAGAAVIFADIDSPIALAFLDSYPTPSSAARLGEKRLERFLKRSAYCGRRSAAQLLDRLRSAPSGHAEELESETKGQLVRSLAAILKLVVVQIRDLDGLITAHLAQHPDGTILQSFPRTGTINAAQILAELGDDRLRFASEDQLAGEGGVAPVTHTSGKHRGVACRFACNKRLRQALTTWADNSRHAHPWAASVYRNARARGCDHPHAVRILARAWIRILWRCWQTRTPYDIHKHGRALPFLHAPSPPASVAA

SEQ ID NO: 500959 - protein, 344 aa, unidentified
MKITTIGLDLAKSIFQVHGVDATGQVVIRKSLRRSQMLPFFAKLPSCLIGIEACGTSHHWARELIKLGHEVRLMPPAYVKPYVKRGKTDAADAEAVCEAVTRPTMRFVHVKSPEQQAALSMHRTRDLLVKQRTQLINMIRGLLAEFGIDIPKGLERALLMARQIVEGRAPDVPIEAAKIVGTLSQHALDTDVRLREIDRDLLIWLRSNDVARRLTTIPGIGPVGATALAASVTDPHQFRSGRQFAAWLGLTPLQKSSGGKERLGRITKMGDKYLRKLLIVGMTSLVRRAKYNPATIDPRLADLLARKPTRVATVAMANKTARVIWAIMSRGETYRTGHRPTLAA

SEQ ID NO: 500960 - protein, 332 aa, unidentified
MTTLNATDCIFAGIDVSKLKLDLAQTGIQQVATFTNDPAGISQLVELLLKAPPKLIVVEATGGLERPLLDALLEANLPVHLANPKQVRYYALSLGILAKTDPIDAHVIERYAAQLSPRLLQKRSEKQGELEALVTCRRQLLHVRTEQTNRMGQTTSRPARKSIQAILKVLEKQLKSLERQIRQLIESDDDLDDIDKLLRSVPGIGPVASATLLCEMSELGKMDRGQAAALVGVAPFNRDSGRFKGKRVIRGGRRAVRSVLYMSALCAIRCNPILGAFAQRLQKAGKLPKVIIVAAMRKLVCFINAMIRDGLRWDQLNIVKKLNSVKTLPQNT

SEQ ID NO: 500961 - protein, 474 aa, unidentified
MAARKDKADGAGVPGHGGDGAEVAEELTQVIEYAAAIDVAKGSGMVCTRVPGSRPDRRRQKVWQVGATFGEVTALMDHLRCEGIQRLVLESTSDYWRIWYYLAEAAGLEVWLVNARDVKHLPGRGKSDTADCVWLCKLNERGMLRRSFVPPEGIRDLRSLTRTRSRLAQDQARHQSRVEKVLEDALLKISVVISDLFGASGRRFLDALVAGERSPAALAALGDRRLKATAEQLAGALTGRFREVHAFEIATHLRLIDTINDEIARMDARIEQQLASIPGVAPACTSCGLIGGGHSPGCLSDGTPVLGLVERLDEITGVGVRNAQVTIAELGTDMSVFPTPGHAAAWARLTSRTLQSGTTARPGRTGKGNPYLRGALGQSVMAAARTDTRLGEQYRRIARRRGKQKAIVAVSRVICEISAILIADPGARFTDLGAGYYSALNPRRQTRSRIRELERLNPGMKVTVTPVETAETAA

SEQ ID NO: 500962 - protein, 331 aa, unidentified
MKITETIGIDVSKATLDVCIHSNQELATFENSGKGFAKLLKWGYRSSSHQKEHIFIAFEHTGLYSERLSEYLSKKEIPHAIIPGLEIKRSLGIARGKNDRIDASKIALYAYRLRDEIQPSIVQSKEIKTVKKLLSLRDRLVRQRAGYKASSREHKSILKRKDNELLFKVQDRMIKELSKQIKELEKEMQRIIKIRPELDHMFNLLKTIKCIGDQAALFLIVYTEAFTKFKTARQFAAYCGVAPFPNRSGTSLRGKTQVSHLANKKMKSLLDMCAKSSICYNMEIRDYYYRRLAEGKNKMSTVNVIRNKLISRVFAVINRDTPYVDLWRHAS

SEQ ID NO: 500963 - protein, 362 aa, unidentified
MFDNQLWCSRPIDTWSSKTVLERGSLHRLPSNPNGCKGIEARILQGRVQEDLMETKVFVGIDICKDSLDVAIGPGKEIITFANDQKGVNALIKELSRIGPELIVLESTGGYERLATSSFVEAGLPVVIVNPRQVRDFAKSVGILAKTDAIDARVITRFAEAVKPDVRQLKDRETSELTALVTRRRQIVEMIVAESNRLKLANKRNKKDIKDHIRWLEKRLDKIESDIGKMIQNSPIWRCKYDILQSVPGIGPTTSAVLICDLPELGLLSPKKIAMLAGLAPLNCDSGKFRGRRRIWGGRASVRSALYMGTLAATRYNPAIKAFYQRLTAAGKCHKVAITACMRKLLIIANAMLRDQTLWQQN

SEQ ID NO: 500964 - protein, 340 aa, unidentified
MDCIGLDLHKRDSQLCVLTEAGEVIERRVRTDPARFAAVLGGRPAARILLEASTKSEWAARCLEELGHEVVVADPSYAPVYATHARNVKADRRDARALAEACRVGAYRPAHRLSEARRHVRAELMGREALVRTRTRYAILIRTLTRRDGLRLPSGSAEHLAARAAALAMPDALRAELVPLVALLAPLQAEIDAAGRRLAALVAAGPVMRRLTSVPGVGPVTAAAFVAALDDVGRFGRAHEVEAYLGLVPRERSSGERQRRGAITKAGNPRVRWLLTEAAWNVLRSRRPEAEPLRAWARRIAARRGAGVAVVALARRLAGILFAMWRDGSAFGQRRRRAAA

SEQ ID NO: 500965 - protein, 351 aa, unidentified
MPRTSTVRAVTTIGIDMGKSTLHMVGLDSLGAIVLRERVSRGRITSRLANLPPCLIGIEAGMATHYVARDLAALGHDVKQVPPGYAKPFRQGHKNDFRDAHAVAEAVQRPTTRFVPAKTNEQLDLQALHRVRSRLVGERTAVINQIRGFLLERGIIVRQGHRFLRHLLPDILAKRTDVLSPRMVRIVSDLVGDWRQLDERIETVTDEIETLAKSDDNCRRVMTVPGIGPLISSAMVAAIGNGTAFAKGRDYSAWLGLVPKQMSTGDRTILGRLSKRGNGYLRMLFMQAARVILLRPTNWPKHGFGAWLVRAAQRLHPNVLAAALANKLARIAWTVLAQQRSYEARVTKAAA

SEQ ID NO: 500966 - protein, 399 aa, unidentified
MISVGIDISKGKSTAYILKPEGEIVDGPITFKHTTSGLKTLTDQIPRGEDEIKVVMEATGIYHLQVAMYLQEHGYFVSVINPLEMKRFRTFGLHGVKTDKVDAMKIAEYGLARWNQLSAFQIAEDKYAELSILSRQYRHHMENRIRNLQDLIHMLDQTMPGIKKEFNSLNEANGKDKLLDFAKKYWHFDTITKKSERAFVNSYVKWAKKMGYRPNPNKATKIYSIAKEGIPSLPANQTTKMLVEEAADVLKRANEALIKIITRIKTIAKSLPEYQVVRDMGGVGDTLAPRLIADIGDVRRFKSAKSLVAYAGIDAPPYQSGQFTGTRRHISKRGSSAIRKTGYEVMRSLKSHAEPKDNAVYQFILKKEAEGKAKKVAKIAGLNKFLRIYYARVMAVYSS

SEQ ID NO: 500967 - protein, 391 aa, unidentified
MTKPKTKTVNDFSRCLDPLDMDATLIAVIEMSQSSWLVAGIVPGVERQPLKKLAIDEHALLSLLYRWRAEAEKQGHRITRIAVAFEAGHDGFWLARWLAAQGVEAHVIHASSVAVTREHRRAKTDRLDTELLKRAFLGWLRGERGHCKMVAVPTLAQEDAKRPSRERETLVGEASRIITRVKAAFVRLGIRGFNPKLKAAATRLETLRTPEDEPIPPNTLAALKRDLERHQIVKKQIREIEQTRLDILKQAPEKGPHAMVLLLARVIGVGVETADMLVQEVLSRTMRDRRAVGRYAGLTGSPDESGAKRRDKGLARSGNARVRHGMIQLAWRFLLFQKDSALAQWYRQRTADAPSTRKTLIVALARKLLIALWRLARDGVVPEGVRMRPAA

SEQ ID NO: 500968 - protein, 336 aa, unidentified
MKESYLGIDFHKKWCVFAEIDSTGKLLRQGRFGNTFEEVSTFASSLTQRVQVVLEPVLSYLWLLDQLEPYAGSVHVATPHKVRVIAESKSKTDRYDARMLAELLRTNFLPESWVPPAEIRLLRGLVRQRYHLVKSVIMNKNRIRYLLFQHGVDLKVFNIASPKARLMIQELCLPEITRQTIEECLQVIALLNGLVAEVDQRISRCVEGNPIVVLLQTIPGIGTLRSAVIYAEVGDIARFYSAKALASYTGLTPTVRSSGESVWRGGITHLGSRPLRHARVEAAIDVIRKSPALRRMYCRILYRSNVQKTRVAIARKLSVIIYAMLNHNEPFRIEAV

SEQ ID NO: 500969 - protein, 343 aa, unidentified
MKYIGLDLHKKSIFATVLDGDGKILSKTKIGSKSRDILYYLKSQGKKDELSVAMEASYNWPYYYRAAEEAADTIVLAHPLKTRIIGEAKIKTDKIDSSVLAYMLKADMLPAAYVPSRATMENKLLLRARISLVRIRTQIKNKIHAIVDRNTDSYFGLENMTDIFTKTGIKILRDTTICPTDHKILIGYLDLISEIDKKIKDIESQIDKKSIEDKDIELLKTIPGIGTFTAFLIKSEIDDIERFASKEKLSSYAGLIPSTHSSGERLHHGRIVKQGNKFLRWALTEAAQTSIRCSEYFRYHYSRIRSRKNANSATIAIARRMLEIIYVMLKENREYIEKPVDIK

SEQ ID NO: 500970 - protein, 343 aa, unidentified
MECYVGLDVSLKQTSICVVSGTGSVVREGVVASDPDAIAAFVRSKAPGAIRIGLETGPTSTWLWTELKRLGVPVICINARHAKAVLKMQINKSDRNDAAGIARIMQTGWFKEVRVKDLDSHTLKALLVSRALLVKIKRDLENQIRGLLKNVGLVIGRAKFNVFAVRAAELIEDRPELIAVVGPLLKARKAIEQQTDDLDRKVVKLARYDAQVRRFMTVPGVGPITALCFKATIDDPTRFKRSRSVGAYVGLTTRRHASGEIDWTGRISKCGDAMLRSYLFEAAGVLLTRVPKWSALKAWGMRLAKRNGLRKATVAVARKLAVILHRMWIDGTEFNWSKQEVAA

SEQ ID NO: 500971 - protein, 387 aa, unidentified
MTRNARIPVPITALDQDSTLVVVLELSAKSWLLGARIPGLSRLSRYPLKPSVDDVCDLLGKMKERAAAQGKTVTRVIVAYEAGRDGFWLARYLEARGVEVYVIQPSSVLVDRRARRAETDGLDVEMLMRTLLAWLRGEAGVCSMVPIPDEAEEDGRRPTRERQGLVTERRSLANQIDGLLATLGISGYKPLRRDRRVRLAELRTPEGMALPANAVARIERMLDRLELVMKQIADLEAARDAVVTKEAAEGEAEELIRILVQLKAIGPELATLLVWEAYIRSFPNRKALGSYSGMTGTPFKSGGLDREQGISKAGNHRLRAALVELAWMWLRYQPDSALSKWFRARVGDGRGRIRKVMIVALARKLLVALWHFCRHGVLPEGAALKAA

SEQ ID NO: 500972 - protein, 346 aa, unidentified
MMIIGCDFHPSWQQVSWLDTKTGETGEQKLVHAEGQAKTFYQQLTAPALIGMEATGNSQWFIELVQELGHVILIGDAAQIRASYVRKQKTDKRDAAHILKLVVEGRFPRLWTPDREQRDLRQLVLHRHKLVEIRSRVKNELQHLSLNKGMQRKAKLWSQAGQKLFRELPLKPWAACRREDLLGLLTMLNQQIGKLDEAVQHAADEHPQAQLLMTQPGVGPNTALAYVLTIGDVTRFPRGKQVASYLGLIPREESSGGRQKLGAITKQGNRLVRSLLVEAAQIAVRFDPGMKKQYLHRCHQKPKGVAKVAAARKLAVRLYWMLRTQKPYPEIVRIESSPRVPLVGAS

SEQ ID NO: 500973 - protein, 327 aa, unidentified
MPQAERIVGIDVSKRWLDSHVLAGAHERRVTNDPAGHAELVDWLTSLGVTMAVLEASGGYEQAVVKTLRRGGLIVRVVDPKRIRHYAKAAGQRAKNDRIDARVIAEFGAVINLAARCEIDLEDPAREALGALVGARQDLIEHHTGLLQQAASAADGPARCALGAAAQAMARQIARVDQRIATTIAHHPPFAALAKRLDTMPGIGPVAIAAIIAWLPELGRLDRGKIAALVGVAPYDADSGERRGQRHIQGGRIKLRNILYMATMAAATRHNPVLHAHYTRLRANGKEAKVAIIACLRKLLTILNTMIAREQDWQPNLATFHALAMPA

SEQ ID NO: 500974 - protein, 333 aa, unidentified
MTSKGQEKMSHPIARTSDDVTIGIDISKDTLDVHLHPEGNARQFSNDRNGHAQLIAWAKLHQPTRIIFEATGRYHRALELALGNAGLPAVKINPLQARRFAEATGRRVKTDPIDAATLARFGAIMRPEIPPAKDEIIDVLAELLAARRGLIKDRTAASNRGKGLTLPMLKRLCQQHRKQIDSQIEAIDREWMSILAANPTLKARLDILLSIPGVGPATAIALLVDMPELGTMDAKQAASLAGLAPVTRQSGTWKGKSFIQGGRASIRRAIYMPALVAIQHNPQLKEKYEALCRAGKLKKVAIVAIMRKIVIIANALIRDNRKWTLDMASVGAK

SEQ ID NO: 500975 - protein, 341 aa, unidentified
MFNNNVIAIDLAKTSFHACNLNKHNKLTTNKAFTRKKLQEWLIKQPKSTVAIEACGSAHYWARFVQAHGHTAMLLPPKLVTPFRKGHKTDKNDALAIAIAAKQPEIKTTAIKTVEQQGLQGIERMRQHHSDFITATGNMLRGLVYEFGIVIPKGKAALSREIPFILEDAENNIPDAFRHQFADMFSFYQKSEKAMAKVEKKLAQLIKQQKTCQSLINLEGVGPVNALGLALALGERGESFKNGREASACIGLTPQQYSTGGVVVLGGIGKKRGNKRLRSTLIQGALAVTKVLKNREPRNSKEAWLKALMERCGVRKAAVALANKNIRTAWAMIRYDKAYQK

SEQ ID NO: 500976 - protein, 349 aa, unidentified
MTKVISASGANFLLPVFAGLDVGAQELVLALRMDGCPQDGGSFPNSPAGIRSLVKRLKALKRPVFACMEATGVYFLQAAKALAAAEGISVMVANPRTIKDFARAMNRRSKTDRVDARVIALYAQKADFVAWAPASDNHHHLRLISRRIDERVRQQAADKNRLHSLRAGGSCPRCVQQDVLANIKHHQRSIKRMRQAAVAIIKSEEALLGRYQLMLSIPGVGAATAVRLLAELCVMPDCLTARQWTAYAGLDPVHNESGTSVRTPSRISRAGNSRLRNALFFAAMVACRTDPHVRAFTEMLKRRGKKKLQALVAAMRKLLHAIWGMFETNTTFNGSLLFPQLTPEPLTSQ

SEQ ID NO: 500977 - protein, 342 aa, unidentified
MEHYAGIDVSLECSSVCVVDGNGKIVREAKVASEPQALIAWFGALGFGLERIGLEAGPLSQWLFAAMKAAGLAVELLETRHVRKAFEAMPVKSDRNDARGIAQLMRLGWFRPVHCKSMSAQEIRSLLTARKLVQSKLLDVENSLRGILRGFGLKVGKTTKQTFAGRIEELVAGHPHLQMIAKALLAVRAVLRTEFAAFEKQTRRMVRSDMQARLLTSVPAVGPIVALTYASAIDDPARFKSSKQAGAHFGLTPKKHQSGETDYTGRISKIGDASVRTALYEAANVMLTKPVKGCSQLKSWAMRIKRRAGTNKAKVALARRLAVIMHRMLADGTPFNAAAAAA

SEQ ID NO: 500978 - protein, 314 aa, unidentified
MDETKHFVGIDVSKAALDVHVLPVGKSQRFPNDGDGHAALAGWLSSHPVERVVLEATGGYERKAVQALQQQGYHVCVVNPTRPRDFAKAGSRFAKTDRLDAAVLAHYAQVFDPPSAPRPGDVEAKLARYASARDSFVAEKTRLRNQLGLNDDADLERMHRDILETIEAKLAELDRMIQSCIREKAELSQRYDQLRAVPGIGPVAAVSLLAFLPELGQVSRRAIAALVGVAPFARDSGMMRGQRRIAGGRAKVRRMLFMASLSAARHNPIIKTFYERLIKGGTGKKQAIIACSRKLLTILNAMVRDNREWQPMST

SEQ ID NO: 500979 - protein, 352 aa, unidentified
MSQRITLFVGLDVSDRYTQVCVLDDAGVVLEESRVATAKEPVLARFSHRPRTRIALEAGTHSPWMSRLLEGCGHEVYVADSRRIPLISASVSKDDRRDAESLARLVRSDPLLLSPIRHRGEQEQADRMTLQSRDALVQSRTALVNRVRGLVKPFGAQLPRSSTRAFTRKVRDHIPAGAKEAVAPLLRVIDALSEEIKLADRQVEQIAAERYPVTEQLKQVNGVGPLTSLAFVLTIANPHLFRKSRSVGSYLGLRPRRSASGASDPQLRITKAGDPWMRKTLVQSAQYMLGPHGQDSALRRFGLALAARGGKAAKKRAVIAVARKLAVLLHRLWVTGETYEPLRGARELVVAQ

SEQ ID NO: 500980 - protein, 319 aa, unidentified
MFVGIDVAKAELVVSVLPSAERFTVANDERGARTLVERLRPIGAQLIVLEATGGYELLAVAALVAAALPVIVVNPRQVRDFAKATGQLAKTDRIDADILARFADVVRPALRPIPDEHAQELEALLTRRRQLLDMLQAEKNRTGQVFGNGKRLVKKSLKAHIAFLERELRMTDTDLGEMVKASPAWRERDELQQSVPGVGSVTSRTLLAALPELGRLSRREIAKLVGVAPLSRDSGTMRGRRFVQGGRSTVRAVLYMAALVATKRNAAIRVFYLRLVAAGKPKKLALVACMRKLLTMLNTIVRTQIPWSDAIANGVLAGA

SEQ ID NO: 500981 - protein, 364 aa, unidentified
MAVSGLSPKELTKEAPNIMLHVGLDLSRRRLDFDLLCEDGSRIERGAAPPDADGLRGLVRRVDVYQEPVCAAIESMNGARFVHDRLEELGWQVELADAQKVKGLAPLACKTDRIDAWVLAELSRRDLVPAIWLPSPTVRQERERARWRLHLVRHRTALKNRVHATLIAFGKPCPVSDLFGSRGRQLLARLDLPDPWAQTVSASLSLIEDLDVQITDCERELRVLGADHEYVPLLMSAPGIAWVLGYTIAAEIGDINRFASPTKLCGYTGLCPRVNQSGEHDHRGSITKNGPKYLRWALIEAAVHAVCSPVYRERYKRTATRLGRQRGKKVARVDIARKLAEAIWYMLTRSQSFAPAGATTPLAA

SEQ ID NO: 500982 - protein, 397 aa, unidentified
MYIVGIDIAKRKHEAAVIDGEGAVIIKPFSFTNNCSGYNRLLAMLTKAKLPLDEVSFAMEATGHYWLALFTRLQKEGFRVQVINPVQTNSIRSFYIRQAKTDPRDALLIAEVIRFGHFSESTLHPENIYELRELCRGRHAIVSMQADVKRKVIALLDQVFPEYETAFTNMFSDTSMAILQNCPTPKELSEMPLEELCHLIEVSSRKRFRMVKAQELQELARNSFGFAMAGDVFSTMIRLYAKHLVFLKQQVQEMDRKIAEIMDTLDTPITTITGIGPTLGAYILSEIGDISRFSSAAKLAAYAGIDPTMRQSGEYNGVRNRMSKRGSPYLRHAIWLAASSAVLHDPALKLYFQKKRDEGKPYMASVGHACRKMVSIIYAVMRDNKAYTPYIPNEISA

SEQ ID NO: 500983 - protein, 341 aa, unidentified
MKSKFPTDRYFRQCVGIDVSKNKFTACMCMLSWGCPAQFTEPIEFVNTKTGFNQLVKWARKEAEKGQPLLFLMEPTGTYYEDLAYHLHKFSFTVYVIPPGRVHAFFKEEGIKTKTDFVDARGLALMGSSKPALKEWNPPCRAYRELRQLTRLQVHFKDIRTMLTNHKEALSHQHAPSPDAVSQINALIKSVDLRIEKNKASIEELAGNTPEIKEKLGYIQSIKGLGFLAAITILAETDGFANMSSRSQLASFAGLDVVAKDSGKSTPSRHISKAGNTHLRRITYLCALSAAVYNPQMRALYSRVSQRNPSKVALVAVMRKLLLLAYTLCKSEQMYDPGKIK

SEQ ID NO: 500984 - protein, 371 aa, unidentified
MGESSKTLFVGLDVHKDTIAVAYAAEDRGTEVVSLGMIGTRQCDIDKLIRKLESKGATLAIAYEAGPCGYWLYRYLTRRGLSCSVVAPSLIPRKPGDRVKTDRRDAMTLARLLRSGDLSSIYVPTVDDEAIRDLSRAREDAVRDLKRSKVRLKAFLLRQDIRYEGRANWNAAHLRWLARVVCPTPAQQIVFQEYVHTVTEQTERVRRLEAELHAAVKTWRLHPVVEAVQALRGLDLTGAVTLIAEVGDLTRFDTPRKLMSYLGLTPSEYSSGERRRQGGITKAGNGHARRALVEGAWAYRYPAKVSRHLQLRLENVPAEVQAIAWKAQLRLCKRYRLLSARGKHVNQVVVAIAREMAAFAWAIARTVPVAS

SEQ ID NO: 500985 - protein, 343 aa, unidentified
MKVIRVGVDLAKNVFQVHGVERNEKAVWRRKLTRESWLKVLLETVEPGCEIGMESCGGAHHWARKLQAHGFRVRLIAPQFVKPYVKSNKNDAKDAEAICEAMSRPHMRFVSVKTVAQQDIQAVHRVRAELTKQRTAKANQIRGLVAEYGLVAPKELVHLRRALPCWLEDAENGLSDRFRRLLNGLWGDLRTLDARMAELDREITVIAQSDPAAKRLQQLRGVGPIIATALVAAVGNGEQFANGRQMSAAFGLTPRQHSSGGKERLLGISKRGDAYLRVLLIHGARSVIHHSKDKDDRLSQWVTRLAARRHTNVAAVAMANKTTRMAWAMLKKGADYQPAMAAS

SEQ ID NO: 500986 - protein, 477 aa, unidentified
MVATSPTGLNRKQRKELARRLRAQDPGLDIVHPHAAGIDVGNSAHYVAVRPDRDPDSVRRFECFTADLHRLADWLQQCGVTTVAMQSTGVYWIPVYEILDARGLEVYLVNARHTKNLPGRKTDVQESQWLLKLHTYGLLRNSFHPSADIRVVRTYWRQRGDHVHAVSTCIQRMQKVLTQMNIQLANVISDLSGWTGQRIVRAMLAGERDPQKLAALSHPGIHATRDTIAKSLEGTWQPDLLFVLQQEVTMYDAYLQRIAECDQALERHLKGVADKVADTPSATEPSSPAAHRETRVKHRRKAGSHSPQFDLGRELHRITGVDLTRIDGIDVGVAQTVISEVGFDMTRWKTEAHFASWLGLCPDNRITGGRVIRKGTRHVVNRAATALRLAATTLLRSQSYLGAQYRRLRGKLGAPKAITAMAHKLARLVYRMLKWGHEYVDKGLQYYEDRHREQQVRLLQKKAAKLGLLIVEPYAAD

SEQ ID NO: 500987 - protein, 319 aa, unidentified
MDVKVIGVDIAKRYFQLHGVSASGMATIRRKISRDGFLKLLADLPPCLIGLEAGSGAHHWAREIARLGHEVRLMPPQFVRPYVKTNKNDAADAEACCEAVQRPGMRFVPVKSLKQQAAMALHRVRDHLVRQRTGTINALRGHLAEYGIVARALRGGLNQLFSIVEAEDDDEYLPSSVKQLLRTLVAEIRAADAHIAELDRKLKDDARVDEDCRRLIEVPGIGPVIATVVVATVPDEQRFSSGRHFAAWLGLTPKQHSSGGKERLLGISKRGDAYIRRQFINGARSLVRNRIRANWGLLGLDQRAPYPTRLQRRHRRARE

SEQ ID NO: 500988 - protein, 350 aa, unidentified
MARSIVAERDAVVVGVDTHAEIHVAVVLSSLGARLGSTVVATTPTGFGELVAWARGFGPVRCFGVEGTGSYGAALARHLRAVGHTVVEVDRPDRRTRRLQGKSDPVDAEAAARAVLAGTASGCPKAGDGRVEMIRSLRVARRSALKARTQATNQLLALVLTSPERLRGSLRGLSVPSVVRVAARFRPGPLVDPAAATKLALRHLARRHAALSAEIAELDRDLGLVVAAVAPALIALPGVGTDVAGALLVTAGDNPERLSSEAAFARLCGVAPLPASSGKTNRHRLNRGGDRIANNALWRIVMVRMSTDARTRSYVERRIKEGLSKKEIIRCLKRYVAREVYRRLVGVDEQ

SEQ ID NO: 500989 - protein, 377 aa, unidentified
MEKDSRFVGLDVHAETIAVAVAESGGEVRSLGTIPNTPEAVRRLAKKLGPPETLRVCYEAGPTGYVLYRQLTALGVPCAVIAPTLVPVKAGDRVKTDRRDAEKLARSYRSGDLTPVWVPAPGHEALRDLVRAREAAKKDQLRARHRLGKFLLRQGRRAPTGSKAWSVKHRAWLQTIRFAHAAQDATLLDYLTEIDHAADRIVRLEHAIATAAAVAPAPVRAVIAGLQALRGIAKLSAVSIVTEVGALSRFAKPRQLMGYSGAVASEHSSGSHLRRGGITKTGNAHLRRIVIEAAWAYRHRPAIGGTLRTRQQGLSEEVKALAWKAQHRLHGRYARLLAKGKAPTQVVTAIARELLGFIWAIGVHIEHHTAGGAPAAA

SEQ ID NO: 500990 - protein, 355 aa, unidentified
MNVKKYIGMDVHQETISIAVMAGDGKLVMESIVETKASTILQFVQGLHGDLHVTLEEGTWAAWLYDLMKPHVTELVVCDPRKNALLKEGNKSDKIDARKLADLLRGGYLRSVYHGENGLRTLKELARSYLTISQDLTRVMNRVKALYRSWGIACGGQQVYAPRHRSEWLNKIGEAGVRRRAEFFYQQLDAVRGLRQAVRRDLLAESRKHGATKLLRQIPYIGPIRAALLVALIQTPHRFRTKRQLWTYSGLAIETRDSAQYRYVAGQLQRSKKPQQLRGLNENHNHDMKAIFKSAAAMASRREGPFQDFYLALITKGMKPAMARLTLARKIAAITLILWKKGAHFDAEQLKPQAA

SEQ ID NO: 500991 - protein, 405 aa, unidentified
MKKFNKDEHTVETSLSDLPLLSAIEHRMHNGLYGAYIGLDVHKKTISISVAENGNTEPEYLGVIQNTGYEVSKLIKRLNKKYFGQILLFCYEAGPCGYTLYHQIIAASHDCQVIAPSLIPTKSGEKVKTDRRDSLKLAKYLRGGDLTAVWVPDKEQEAMRDLTRARDDMKSQERKAKQQLSGFLLRNGQVWSSDKQKWIKAHYSWLEDIKFEHNFQQIVLQEYINAVKAACQRVSDITDEMMKALTQWSLAPVVDSLIALRGIDKISAMVLLSELGDISRFDSPKQLMAFLGLVPSEHSSGPRRKQGGITLAGNSHARRALIESSWSYRFPARQTKHIKSKLVNASEEAKAISWKAQKRLCGRYRTLVDSGKNTKVVCVAIARELTGFIWDIVCHEMPRLQGNKV

SEQ ID NO: 500992 - protein, 344 aa, unidentified
MDHFAGLDVSVKETSICIVDDAGKIVREVKVASEPEALLAVLKNLAYHFKRIGLEAGPLSQWLFSALAEAGLPVICVETRHMQAVLKAQINKTDRNDARGIAQMMRAGLYRPVHVKTIRSQKLRMLLTHRKLLQSKAIAIENDLRGTLRNFGLKVGVVGKVKFEARIRELVENLPDLAVLVEPMLIVRRTLREQIVILHRRLLAIVRDDEVCRRLMTTPGVGPVVALTYRATVDVPARFRKSKAVGAVFGLTCAKYQSGEVDRNGRISRCGDEMMRVMLYEAAQSMLRSKKWSWLKAWAMQIARRRGMKKAIVALARRLAVIMHRIWVDGTEFRWTREQPTAAA

SEQ ID NO: 500993 - protein, 328 aa, unidentified
MYRFFVGIDVSKNVIDVAVKETDQVQFFGQFKNDHSGFKRMLKEICKITSCKSTQGFFCFENTGTYSKSLLEFLISHQISCREENPIQIKRSMGLKRGKNDQIDAKCICQYAYEKRETIQPSKLDKPLIVKLKCLLSRRDLLVKQKVALDLSVKERAPRLDLKLKELFLHQNESLLTLFRNQIKEIECEIGKTIRQDDDLRISNELIQSIKGIGPIIGAYLIAFTGNFSRFDDARKFACYCGIAPFPNQSGKFLGKTKVSHLANKKIKSLLSNAVPVAIRLDPQIQKYQKAKLNEGKARGIIVNNIKNKLIQRVFAVVKRQSPYVILQ

SEQ ID NO: 500994 - protein, 341 aa, unidentified
MEKPKFFIGIDVSAETFDAAVFQENKPVITAKEPFVNNPDGYGLFCSWLASLNINNQNSAMCLEITGAYSECICYYLHEKGFVVWPEAPHKVHRAFYRQVKNDKVSAMQIAEYIYRFFDKINPFQPNESIVEQIKTLLATREQLQKQSTASQNILHSIKRKYYQTPLANDILADTIKNLKSSIDKIDKELNSLINNNSKFAPIAKALDSIPGIAMLFIANYIVITDGLTRHMEYKELASYIGICPNEQRSGTSVYKKPRSSGYGPSRLRKLLNLASKSIKHHNPKFHNYFVLKQAQGKLETLIINNIANKLLRIVCAISKNGLTYNKNYTSVHPRFLMQNA

SEQ ID NO: 500995 - protein, 387 aa, unidentified
MFYVGIDISKYKHTLVIASHLGEIIQKPLDFDNNQVGFKLLLEKLKPYDSNLLKIGFESTGHYSANLRQFLIDQGYSFYQLNPHLVKKFTLSLSTRKAKTDKIDALAIAKFLMTIDSKSFTSLSYHMSHLKSLTRHYYRLNKYIGKTKLELVNLLDKAFPEFSNYFSSIYGKTSLSILSKANSLKSIANMSESRFDSLRKMSMGKFKYSTFIKLKQTAKQSVGIKDNYLWIQLHLVIKRIQSFQEEKDLITESISAIMKDIDTPILSIPGLATTTAAIILSEIGDIFKFSSSRALIAYAGLDNSVYQSGTESHNGRISKRGSKYLRTALYNTSLTVVNNSKVFYDYYFDKKSKGKSHTLSLIWVSRKLLRVIYHLLKHDEPFIDQVI

SEQ ID NO: 500996 - protein, 407 aa, unidentified
MTNETLQVIAGIDTHADTHHVALITEYGKQLGDRKFLAVGAGYREIAAYLTSFGPVTAVGIEGTGSYGAELSRVLANRGFTIKEVNRPNRAERRLHGKSDPLDAYQAAESVLAERGTSTPKSRNGFVEALRVLRTARTSAMKARTAVLSQISAVLTAAPEHLRAKYRGMTSEARVKVMTATRPTGYPADPGVATALTLKRMGSRHLFLSEEIAAIDLELSQIVTVHAPALLEVNGVGAVVASQLLVTVGDNPERLSSEAAFAALTGAAPIPASSGKTTRHRLSRGGDRAANASLYRIVLVRMSRDRRTKEYVVKRTADGKSKKEIIRCLKRYVAREIYRVLQNPRLAPPTNDLQPQRIALGLTMTAAAMDLGVWPTTILRIERGQMRDHYSIERYRDWIEHKTLINA

SEQ ID NO: 500997 - protein, 346 aa, unidentified
MQTIVKQVVGIDVAQKELVVCLGRMDSDLSSELYAYHVFGNTAQGMNSLINWVKQRTDAGVSLRFVMEATGVYHESLAYFLNAQGYRQTIVLPSKINHYAQTLAVKTVTDKTASQAITRFGLERQLTDWVPPTPAYKKLRQLTRERDQVVQFRTMAKNHIHAEKAEAQPDEQSLRRMQQQIDFFNQQEKEIKVQIKELVKQQEKIKNEIAIITSITGIGELTAVTILGETNGFELVSNKKQLASYAGLDVKEKQSGTSVKGKPRISKKGNRYLRKAMHLPALAAIRSDERFKAIFTRLVAKHGIKMKAAVAVQRKLLELVYTLHKTGSKYNPEYLKKLENSNGAVL

SEQ ID NO: 500998 - protein, 343 aa, unidentified
MELYVGMDVSLKETSICVVDGDGEIQREGTVISEPEAIAGFIKTNAASAKRICLETGPTTTWLWHELRALGLPVICIDARHAKAALSLQINKSDRNDAVGLARIMQCGWYKEVQVKSVSCHEIRAVLNSRAQLVKVKRDLENQIRGLLNNLGLVIGKASGTAFRRRVEELLGRHGLLREAVRPLLEVREKVRREIAALYRKLLTLARNDVDSRRSMTVPGIGPITALAFHAAIDEPSRFRRSRSVGAYLGLTPRRFASGELDWSGRISKCGDAMVRTYLFEAAGVLLTRVPHWCKLKAWGLRLAKRIGFKKAKVAVARKLAVILHRMWRDGTDFIWSTKEAAA

SEQ ID NO: 500999 - protein, 344 aa, unidentified
MNVSVLGIDLGKNVCSLVGLNASGAVVLRRRVKRETLIGLAAKLAPCIIAMEACCGAHYLGRIFAARGHDVRLMSPEYVRPYIKAQKNDDRDAEGIAEAATRPTMRFVELKSQEQLDMQTLHRSRDRLVAERTALINQLRAILLERGIAVPRGKRKLEQYLAALLDEQNGQDLGPRMRMLAADARAQWLALDRRIASFDAEFVAFGKQDEDARRLVTIPGVGALIASALIAAIGKGQAFEHGRDLAAWLGLVPRQATTGGKPMLLGISKRGNKYLRKMLIHGARAALPHIAERDTSLGRWAKGLLARVHKNVAIVALANKLARVAWAVLRRGEKFAAKGLPVAA

SEQ ID NO: 501000 - protein, 450 aa, unidentified
MARRQKSTQNLPVIEPNAAGADVGATQIFVAVPADRDPEPVRCFDTFTTDLEALADWLEACGIRTVVMESTGVYWIPLFQILEKRGIEARLVNARHVKNVPGRKSDVADCQWLQYLHAVGLLRGSFRPDQEICALRSLWRHRDSLIQMASVHLQHMQKALDQMNLQIHHVISDIAGTTGLAIIDAILAGERDPKRLADLRDWRIRATEETIMKSLVGDYRDEHLFTLRQSLVAYRHYQQLIGEVDEKVKQLLSELPAQVDPAEDPIPKARNPRKTPWRNEPIGLREDLYRAFGVDLTQVPGIDSLTAQRLLTEIGPDLSAFPNVAAFASWLRLCPDKRVSGGKVLSSRTGPTKNRAALALRMAAQSLNRSETFLGEYFRRMRARLGAPKAITAAAHKLARIIYHLLTSRQPYDESIFIVQEIRFRKRKEARLRAQAHELGFQLVPVQAVP

SEQ ID NO: 501001 - protein, 337 aa, unidentified
MTIIRIGLDSAKHVFQVHGVDENEQPVLRRQVRRSEMEKFFGGLAPTRIGLEACGSSHHWARVLRGLGHAVVLLPPQYIKPYVKRGKNDAIDAAAICEAMSRPGMRFVPIKSAEQQAGLMLLKVRDLLVKQRTMLINAIRGHAAEFGLVAAKGPIKVAELLQRAHAEAAGVPALAREMLSLLSSQLDALEAKLQALETRLIALHKQNPVSQCLATQPGIGPIGALSFSLKVSDPKGFRSGRHFAAWLGLTPKENSTGGRHRQGRISRQGDEALRKLLVLGATAVIRFATAGRASPWLINLLARRPKKLAAVALANKMARTLWAMMVSGEIYRRPQQA

SEQ ID NO: 501002 - protein, 419 aa, unidentified
MLKIVHRICCGIDIHKKFVVATIGKTNKQGVTDYETRDFLTFTENLTQLRDWLAKNNCKEVCMESTGKYWIPVFNILEDTCRVFVANPKYVRGIRGKKTDKRDSLWLCDLHKHGLVQNSFIPPLRIRQIRDLMRYRYKLTNFKSSEKNRAQNSLTVSNIMLSSVVSDTFGKSSMQIVRHLLDNPSDTNFDVSAMMHGNMKASAEEITKSLQGTLTKPQAEKIGVCLNHMSEIDAHKQIIESAVLELAEPYMEQVELLLTVPGIKDVYTAIGIIGEIGADMSVFLSARHLCSWAGVVPANNESAGKKKSVRCARAGTYIKPLLVQCAHAAVKSKECPYFRVRYEQISRRRGKKKAIVAVARMLLNCIYHMISRGEAFNCDLYRIENAPGLKVLKKTEISKEEAIALLESLGAQVILPEAA

SEQ ID NO: 501003 - protein, 366 aa, unidentified
MGKSSTVFVGMDVHKESIELATADELEARHYARIGGDAASVDRAVRKLRSVHRELVFVYEAGPCGFWIYRRLTTQGLSCMVVSPSMTPRRAGDRVKTDRRDALMLARLARAGELQPIYVPDALDEAIRDLVRAREDAVCNERQARQRLQALLLRNDIRYAGRTAWTSAHRRWIAGLKLPHPAQQIAFEEYVQAVQEANARVMRLGASIQAQLEPWRWQPLVQALQALRGISVIHAARIVAELGDLTRFVSPRKLMGYLGMIPSEDSSGSRRRQGSITKAGNSSARRALIEAAQAYAHPARVSWVIARRQTGLTQSTTDLAWKAQLRLCARFRRLAARGLPRNKVVVAIARELSGFVWAIGQNVKPA

SEQ ID NO: 501004 - protein, 430 aa, unidentified
MSVDRSGEHEPLFAAFVGIDWADQKHVWCLQTADSQKRESGELEHAPEAVEVWVAQLCQRFGQGPIAVALEQSRGALVFMLSKYERLHLFPVPSTMAGNLRDALYPSGAKDDPRDADLLLDLLLKHRDKLRRLSPDTEATRRVQNLVEERRKLVDEKTEQINRLTSHLKIYFPQMLDWFDRLDREAACALLERWPTLEELQKVPPVKLRTFFCKHHCRDQEVIERRIVGIRQAVPAIRDGAVIEAKSAVVQVIAQLIRILVQGIGELDRKIEEEMAAHPDFFIFDSLPGAGPALAPRLLSAFGSQRARYGSAREVQAYSGIAPVIERSGKKKWVHFRWAAPKFLRQSFHEWAGRSIAQSQWARAYYEQQRQRGKGHHAAVRALAFKWIRVAFRCWKNGVAYDESMYLATLARRASLQSGSAIALSPAKTL

SEQ ID NO: 501005 - protein, 417 aa, unidentified
MRVNEKIERITSDTLICGIDVGKTKCCARFCDYRGLEVYHKVWFDKTENLDAIGCQITAAMYKENKTDVIIAFEPTGHYWLNIDKYFKDCGQETVLMPTYTVKQAKEMHDQNPTKSDLKDALLIARLTSEGKYVKPIERNELYQNIYSGYNIYNDIQKDISKIRNKIHVWNDKYFPEIEKVYKIDSVGVKPIYENQLLPNEIKDMTLEKFTEIMTKDNSRANKKSIMKLKELCEKSNGINSDAFTKKEIKRLYERFIELLKELDEYEKELIELASQIDYVEEAVQITGVGYMSMVGIIAETGDLKNYEHAKQVLKMSGLSLKESSSGQKKGKKHISKRGRSKLRRNLKQIGICLVGKNNFFLQLHNYYTTQREHPLTKLISINAIIRKFMYILMAIVKSGNSFDEEKAIRESCINFS

SEQ ID NO: 501006 - protein, 359 aa, unidentified
MYFAGLDAHLKYVSLAVLDRRGQVALETSVSTREPEQLLAALAPYRPLDVVVETCPFWPWLYDLLVPAGIGFHLAHAKQLRAIAAAPQKSDAVDARLLARMLLAGLIPEAYPRPADQRELLRLLRHRTTLVRYRTRLAGRIHSQLHQQRLSLPREQLLRQATRVWLEETAWPRLTVEQQAIVTTHLELIDRLTPLVQALERRIATAAAGHATAPLLATIPGIGPYRSLLLAAELSPITRFARAEHLVSYAGLAPVTRSSGGHTHHGSIPQGANRWVRGALVSAIPTHVRWAPTSPVTMAYAQLKARLGWRVARVAAARKLARVVYVMLTRRTPWCGAPVAGDVRDEVQNSHVAATTSFC

SEQ ID NO: 501007 - protein, 345 aa, unidentified
MKYFAGLDVSLEETAICVVDESGRIVKEGRAASEPMALYEALGKIDLPLERIGLEACSLTAWLYDGIRAQGLPAICIETRQANAAMKTMPNKTDRNDARALAQIMRTGWYRQVHVKSQQCRIWRSLLVARRTVLNEMRTIENVVRAILREAGIKLGTPGRAAFAPRVRELIGTDTVIMALVEPLLAIVATMLGEFGRLTKQVLNIARKEQVCRRLMSVPGVGPITALAFRATVDQPDRFRRSRDVGAHLGLTPARYQSGETDIQGKVSRCGDELARTALYEAAHSLLVLSKKWSSLRAWGMNVAKRRGMARARVAVARKLAVILHRMWSDATEFRFGKAPGLVSA

SEQ ID NO: 501008 - protein, 344 aa, unidentified
MDISTIGLDLAKSVFQVHAVDASGAVAIRKTLRRGQVLPFFAKLPPCLVGMEACGTSHHWARELVKLGHEVRLMPPAYVKPYVKRGKTDANDAEAICEAVTRPTMRFVAAKSREQQAALALHRTRELLVKERTQLVNMIRGLLAEFGIDIPRGVERALTMARQIAEGEILDVPDEASAALFQLCGQALDIHERLRVIDKAMLASHRANDVAVRLATIPGIGPVGASALAASVADPHQFKSGREFAAWLGLTPLQKSSGGKERQGRISKMGDRYLRKLLIVGMTSLVRRAKYKPESVDPYLANLLARKPVRVATVAMANKTARTAWAIMVRGGTYRAPAQRLLAA

SEQ ID NO: 501009 - protein, 336 aa, unidentified
MQITTIGIDIAKNVFHVVCCNAKNKIVRKKAVKRRELLHYVTNLPKSIVAMEACSTSNYWGREIASLGHKVKLLPAQHVKAFLTGNKNDYNDAYAIVVASQQAHIKAVPIKTIEEQDNQLIHKVRELAIGQRTALSNQIRGLLLEYGVSIKQGIKNLRKDVVDLLDETSSLSSTFRQVLAQLYSQLVHLDKTIKQYDEHIKKQVASNDACQRLQTIPGVGPIVASGYYNEVGNGRHYKRGRDVSASLGLVPRQHSTGGKDILLGISKRGNRYLRYLLVQGAKAVVSRAKNKTDKLSQWINRIVATRGHNKACVAYANKMARIAWAITVSGESYQAL

SEQ ID NO: 501010 - protein, 343 aa, unidentified
MQTMTTIGLDIAKSVFQVHGVDADGQVIVRRQLKRRYVLTFFQKLSPCLVGIEACGSAHHWSRELQALGHTVRLMPPAYVKPYVKRQKNDATDAEAICEAVTRANMRFVPTKTAEQQSGLVLHRARHLFVRQQTSVINAIRAHLAEFGIVAPVGRHGVEELLNVVTDPNDKRVPDIARACLSALGDQLQSNKQQILEFDRLIRAWHRSNEMSMRLEAAPGVGPVLATALVAAVADPKSFRSGRNFSAWIGMVPKQHSSGGKNRLGNISKQGDRYLRGLFVAGALSVIRYAKVHGTKHRPWLTALLARRPTKVAAIALANKIARMVWAMMATGERYKEPVALAR

SEQ ID NO: 501011 - protein, 419 aa, unidentified
MALKIVYKICCGIDVHKTFVVACIASTDKHGVTSYERHRFSTYTKGLKNLLQWLLEHNCKDVCMESTGKYWIPVFNILEQHNLWVTLSHPKYTKPMKGNKTDRKDAKWICDLYMCGMVKPSFIPPADIRQLRDLVRYRFKLTCMITGEKNRAHNCLTVSNLKLDDVFSDIFGKSSRSITEQILQHPGEVFDVAPFVDSRCKTPIEEIQAAVDGAISHEQAVKLRQCLKHIDELEMHKAEIEREIFRLSQKYESVLDLIRTIPGFDKNPLTAIQVLSEIGADMSVFPTAKNLVSWAGCCPRNDQSSRKIKSTRISRAGSYFKPVLVQIANALIKSKKHPEFTTRYRRIKAHRGHKKAIIAICRMILTAIWHILSDLKPYTSEGFLESRPVNKSKILTTSQALNLLKQRGYIIKDDVVPVT

SEQ ID NO: 501012 - protein, 358 aa, unidentified
MEKLYLGVDLHKRSCWVTVLDADGHLVESRRMGTEKLELLEYFSEVRKPAAVAVEATLNWYYFLNVMEPLGLELHLVHALKTRAIASARIKHDRLDSRVLAELLRTGFLAEAWIAPRQVREERQLLRYRVHTVQWATRAKNSIHGVLNRNGIRSPLGSPFGPKGRQFLEEVDLARTDRWEVDGQLERLDLLSEQLAALDREICKRAKASPVARALEQIPGIGPFIASLVIAEVGDIRRFPTAKHLVSYTGLAPSLYASGEHRWGGPITRQGSSVLRWALVQAAHRAALNPRFCGFYQRQRERHGASRAAVALARKLAVIAFYRWRHALHVQESLPHVEKVRERTSGGAWSEHRPLASD

SEQ ID NO: 501013 - protein, 405 aa, unidentified
MAVVMIGVDPHKGSHTAVAIGSDEEPLGKLRVRASVTQAQRLVTWAADWPERTWAVEGAGGLGHLLAQQLVAAGERVLDVQPKLGSRVRLLATGASNKNDPNDALSVAIAALRSRTQRPVTADDHDAVLRVWSRRHRDLGRAKNQVACRLHAVLCELVPGGVPEEITAAQATRILERSTPSGAAGQARRELAAELLDDMRGLDTQVRESKKKLAVAVRASGTTLTDLFGVGPVVAATVIGDTGDVNRFPSRDHFASYNGTAPIEVSSGNRKINRLSLRGNRRINHAIHMAAITQIRHAHSDGRAYYDRKLAEGKTHKEALRCLKRRISDALYARLCADARQAAETPVAGPGGQPGNDSDASAAGSHPVNRLFGQAPPEPSLTLRPATTPAKRTSPTPTPKTRRSP

SEQ ID NO: 501014 - protein, 341 aa, unidentified
MKKFIRIGVDLAKNFFQVHGIVREGAEAVSRKFTRTKFREFFSSVAPCRVGMEACGSAHYWARELRSMGHDVVLIAPAYVKPYVKRGKNDAADAAAICEAMSRPDMRFVPIKSADQQAALMLHKTRELLVKQRTMIVNALRGHLSEFGLIAAKGIQRVHELVALALGEEGLPEAARQAAALLAEQSEQLEGTIDTLEKKIAETSAKYPMVRLLKEIPAIGPLISSAMAASYPDPGVFASGRDFAASLGLPPSQHSSGGKEKLGSITKKGNRYLRKMLVVGCTSVLRVAHKYKGALAEWIVAIKARKPERVAAVALANKLARICWAMLSTGEGFREELYTRA

SEQ ID NO: 501015 - protein, 354 aa, unidentified
MTPNYSSRDYNIFIGIDVDKNKFSITVKDDHLKNMSKTMPADPQMLYNYIQNQYADQKVICAYEAGPTGFDLYDYFHQRRQLCLVTSPVSIPRARNQKVKNNRIDSNTISHYLRSGELKAVRVPEGEYRELRHLIRSREQYANDRKKAKQRIKALLLYTALHKTIKDPDQNWSGRYIQELKELLCAEAVRQRLDMLLTDLDYARRQTCLILRKLRTFCKEHTEIQKYLNYLQSIPGIGFIIASTILANVGDPKNLKDVRELAGFLGLAPREHSTGDTVSRGSITHLGNQILRTLLIEASWVAIRYDQQLDQFYHRIKAKHHHQFAARKAIVAVARKLTQIIYCVLTEQRNYIKH

SEQ ID NO: 501016 - protein, 312 aa, unidentified
MEARYVGVDVSKDRLDVHVLPEGAAFAVARDGKGLAELVERLSALQPQRIAVEATGGFETIVAAALAGASLPLVIVNPAQVRHFAQALGRRAKTDPIDASMIARFVEATKPDLRPLADEATQLLADLVARRRQIIEMIVAERNRENRVAVRRIRNSIARLIAALEKELSEIDAEIDASVRGSPAWREKEDLLASVPGVGPITARTLIAELPELGTLDGKRIASLAGLAPFTRQSGQWKGKAMIAGGRKSVRSALFLASLVACRHNPVLKAFRQRLIDAGKPKMLVVIAAARKLLTILNAILRDKQPWRPESA

SEQ ID NO: 501017 - protein, 436 aa, unidentified
MANQVLNVGIDFSQRRADFGLYGPEGEFIDGHIAVDNSRAGYAQFKARLLAAMEAHELEEIKITGEATSMYWLPFFMQMVKDQELNEHTVRPYLLNPRWVKWYKKSLPPDHKTDARDCFFIADRTRTMGGLHEWQLDESWLGLRFLTRLRYHLVQDLTREKNYYQAYLFVLNSAYTQQKPFSDLFGATSSKILADLEQVEAFSQLDTYSLADSLQKMSGNGLKDPLKNARKLKTIAAKYFQMDPGLAQVLQGMLNLVLEHIQFIENQINTVNRLMAAEAKSHPEVALLRTIPGIGPVFSCGIAAELGDINRFLKGRKYDQKKKRYRPKNLRDADASVAKIAGLWWPRAASGSFEAQDRKLSKTGNRYLRYYLIEAADRLRQWEPHYQAYYQKKHAESRKFAHKRALVLTARKSIRLYVGLLHRKEPYCSKENLKRH

SEQ ID NO: 501018 - protein, 318 aa, unidentified
MGNSPSIFVGIDVSKKKLDVALLPSGEFFQVVNSPDGLSLLLEKFKGHAIAAIVVEATGGYEQPCVAALADARLSVAVINPRRARDLANGLGKLAKTDRIDASVLAYYAQHGEIHKALQTPEKQAQLEALVTRRRQLVSMRAMEQTRLEHTTFPKARSDVQEMLAFLSRHIEQIEEQIAKVIDSDDHWSDLARRLQTVPGIGKATAQILLAELPELGQLNRQEIAALSGVAPYHRDSGQRKGKRVIRGGRSALRTTLYMAALTARTWNQKIKTFFERLRAAGKPFKVALVACIRKLLTILNQIAKTGRAWNEHLPKTS

SEQ ID NO: 501019 - protein, 407 aa, unidentified
MTDKVAGIDVHKKVLMVVVRHPAASEQEWERGRFGTTTEELRRLAAWLQARGVEEAVMESTAQYWKPVWYELEPHMRLHLAQAHSNKAPRGRKHDFGDARRLVRRFVAGELILSLVPGPEQRGWRTLTRMKVQLTEDRSRLHNQVECLLEEMRIKLSSVVSDLFGVSGYRILRALAAGQTDPGDLAKLADGRLQCSREQLVEALRGKPAPIHLQLLALYLERYRVLEEQIEKLDRMAAEALTPHRDAVARLAEAPGFGVDSAQQVIAEIGSRAVTFPSAANLASWVGTCPGQNESAEQNHSSRSAKGNRWMRRILNQAAHAAARKKGSHFQAVFQRLLPRLGYKAAIWAVAHRLCRLIWKILHEGVRYIEKGTESDPVTRRARAQRLLRSLRRLGYQVEIQPIAETL

SEQ ID NO: 501020 - protein, 370 aa, unidentified
MKPNFEPGKWFMQCVGIDIAKGTFTACLCMYEFDQGCSTAPVVFNNDKTGFNQFIKWSRKEALRGYPLRYVMEPTGVYYEQLAAHLSKLGLDVCVVLPNKAREFAKYEGILTKTDNMDAYTLGMLGCLDKRLKPWTPPSPIYRELRQMTRFVADINKVKTELRNHLEALTHSETAEKSIVKHYNKLIDEIDKQLVSNQKAIREKIKQEPGLFERIDRITTINGVGFMTVVTVVAETNGFALITNRKQLTRYAGLDVPAHQSGPVDPKRHISKQGNVHIRTALYFPAIVSTQCNPQMKDFYGRLCARNTQSKMIGVTATMRKLLLLIYSLWKSGEKYDPTRDKPACGRQKKEAETTEGQPHGIDVGTLAEE

SEQ ID NO: 501021 - protein, 401 aa, unidentified
MKEFNAEQVRIESASALETVQQAESEKQYGAYVGLDVHKDTIAIAVAWPGRDEPVYRGEIKHSRKAVEKLIGQLSEACGGALLLFCYEAGPCGYGLHRQIVESGHDCEVVAPSLIPNRPGDRIKTDRRDALKLAGLLRAGELTGIWIPDEEQEAMRDLCRARADMKSQERKARQQLNAFVLRHGHHWPSNKARWTATHYNWLEALKFTHDWQQVVLQEYINAVKAAEARVADMTAQMMRVLPQWRMAPIVDALTALRGIDKLSAMTLLAELGDISRFQSPRQLMAYLGLVPGEHSSGGRRRQGAITLTGNSHARRTLVESAWSYRFPARQTAHLKRKAAAASAEAKAIGWKAQKRLCGRYRTLTQAGKNTKLVCVAIARELAGFIWDIVCHEMAKMKMAAR

SEQ ID NO: 501022 - protein, 387 aa, unidentified
MIYVGIDIAKLNHFASVISSDDEVLIEPFKFTNDNDGFLLLLSKLSSFDKSSIIIGLESTAHYGNNLLAFLVPKGFQVCLINPIQTSILRKNNIRKTKTDKVDTFIICKTLMMQPHRFVTLYDIGLLQLKNLGRFRQKTVKQRTRLKIQLTSYVDQVFPELQYFFKSGIHHKSCYALLKEAPSPEAIASMHLTHLTHLLKSSSHGHFKRETAVELRVLAQKSVGNSDKSLSIQVTHSIEQIELPDRQLEQIEAEMTDIVKSLDSVIMTIPGIGYVNGGMILGEIGDISRFTSPSKLLAFAGLDPSVYQSGNFEAKHTRMSKRGSRALRYALINAAHNVVKNNNTFHDYYIQKMSEGRSHYNALGHCAGKLVRIIYKMLTDNIAFNLA

SEQ ID NO: 501023 - protein, 413 aa, unidentified
MDAIVERCAGLDVHLDTVVACVLYGKLDIKPKKEVKTFSTTTKGLLELLDFINQKECTHVAMESTGIYWKPVWNILESGAFELIVANAKKIKNVPGRKTDVKDAEWIASLLRGGLIEKSFVPPERIRDLRDLTRLRKELLGEVNRNKNRIHKVLQDANIKISSVLSDVFGETGKSILNQIIGNQCITEEFIYSLYEGRGKSKLKSTLMEMYEALNGKIRGHHVILLGMHNSNIVFLEKQINELEKEIDILLQKERDSLELLETIPGISKISASSIIAEIGTSMDVFKTEKHISSWAGLCPKNNESAGKKKRSGIKSGNNWLRSMLCECAWSATKKKDSRFKNKYWSMVPRMGRKKALIAIANMMLRLIYHLLKTKSTYKELEIQYFIDKDKRREDRIIKELKSKGYLVEKDSL

SEQ ID NO: 501024 - protein, 338 aa, unidentified
MEEVSTIGMDLAKSVFQVHGADASGAVLFRRKLRRHQVLTFFAAQAPCTVAMEACGSAHYWAREIARLGHRVRLISPAYVKPFVKRQKNDAADAEAICEAVSRPSMRFVPVKSIEQQAVLTLHRVRLGFVEERTATINRIRGLLSEFGVVMAQRAIEVRRNAASSLDGLPCQAARAVRDLLEHLRVLDARVAEYEREIEQHARRDEQAKRIQQLNGIGPISASAVVASVADAREFKNGRQFAAWLGLTPKQYSTGGKTRLGRITAQGDPYLRTLLIMGARSMLQTAMRRTDRLARWALSVRARRGYHRACVAIAAKHARIVWAMLAKNEPLRLARAED

SEQ ID NO: 501025 - protein, 365 aa, unidentified
MKKSSTARAASNKNLHGKLTIGLDLGDRSSWYCVLDEAGEVISEQKLGTTPKAMKEVFVAMPRSRIALETGMHSPWVSRLLSELGHEVIVAHARNVRLIGESRRKDDRLDARTLARLARIDPQLLSPVKHRSAQAQADLTVIRARASLVRARTALVNTARGLTKSYGERLRGCNPRNLNTEKAQALSPELQAALGPLLQALESLSERIAEYNQQIEATAQQSYPQTALLKQVKGVGTLIALTYMLTLEDPHRFRKSRDVGCYAGLQPGRRNSGQSEPQMHISKEGDPYLRTLLVQGAHHILGPFGADSDLRRWGLKLAERGGKNGKKRAIIATARKLAVLLHRLWVSGEVYEPLRNTKRTMVAAA

SEQ ID NO: 501026 - protein, 349 aa, unidentified
MRFYTKQHRFYCGVDLHARTMYLCILDADGQVVFDKNLPARADAFLAAVAPFRDGLVVAVECLFCWYWLADLCAKEHIAFVLGHALYMKAIHGGKAKNDKIDAGKIARLLRGGTLPQAYVYPAGMRETRDLLRRRQYLVRKRTEALGHIQNTNSQYNHPPFGKQLGPAANRAELAVADRFTHPSVHKTIAIDLALIDYYEELIDDVERYLIDTAKVDDLQAYYHLQTIVGVGKILGLVLLYEIHDIRRFADVGHFLSYARLVRCAHTSAGKKQGSGGKKIGNPHLRWALGEAACMMVCHSAQAKKWMQRQEKKRGKGKAMGILAAKLGRAVYQVLTKNVAFDERRFWNN

SEQ ID NO: 501027 - protein, 393 aa, unidentified
MKQRKNAGSEPTIDTESSSSIFISGLPACLNPDPDSRLTSIVKVIRLSSSPFFLKSVKDKSMENFYFIGVDVSKKKLDFCVMFEGKVVHEEETANHQGAIIALLHQLEEEYGIAGGQMLVCAEHTGQYTFPLACACKAVECKLWLENPAEIKYSSGVQRGKNDKVDAKRIAIYAKRFQDRVQYYERPTEDIERLKQLEAERTLYVTDLAKYKGQLKDQKDYMPRKLYERKMKRLQALMDDLEEAIQAITDEMDEVIASCPVLSRQRELLMSIDGVGCVVATNMIITTEAFTRFDDPRKFNCYAGVAPFSYSSGSSQHSKARVSHRADKVMKRLLHLAAVAVTHRVGGELKKYYERKVAEGKNKMSVINALRAKIVARMFAVIKRNEKYKPILS

SEQ ID NO: 501028 - protein, 422 aa, unidentified
MDAVIGIDAHKRSHTLVAVNPLGRKLAQLTVATTSEGHSDALRWARLRFGRDVVWGVEDCRTLTARLERDLLAAGQKVIRVPPHLMSRSRASSRELGKSDPIDALAAARAVLREPDLPVACHDACSMELRLLVDRREDLVQHRVALISRMLERIHQLDPAWAEPRNWENRKPREELGAWLATQHGLLAELARDEFAEIVRLIDAAQALEGRIAGRVREAAPALLGIQGCGNLTAAKIVAEVAGIDRFKSEAAFARHTGVAPIPHWSGETTRPLRPIRHGNRQLNVALHRIATVQITHPGPGRDYFQRRIDEGDSRQRALRSLKRRLARVVYTRMKADNRDRGHGSHFPTLPRVMMLPLADLDPAGQPPPGRARVGRSRALDSYQAALARRMRSYGEKPAYIAAQLGVSVSTVKRALARDKDG

SEQ ID NO: 501029 - protein, 372 aa, unidentified
MENIIYIGMDVHKESFSLCALHGTTGEIVREARCASNVSLVKKFVEKLKTKYGEDIKIKAGYEAGCLGYSLHNLLEKNGIDCDILAPTTMYSSSKNKMVKNDRFDAKMIALNLANGTYKEVYVPEEEDVAVKEYIRMLGDFKTSLKKIKQQIKAFLLKHGYIYEGKSSWTIAYMKWLKNLDLQGLFKETLDEYLLQYDVLVDKIERFSLRVEELSHSERYEEPVGKLRCLKGIDTTSAMTVHVEIADFTRFPTAKAFMAYVGLTPSESSSGEKISRSSITKQGNSTVRSTLVECANSLVKGTIGLKSKRVKARQKDQRSDVISYADRAVERLQRKYHRMMYQGKPRNVAITAIARELGCFIWGLETGKIHYK

SEQ ID NO: 501030 - protein, 339 aa, unidentified
MTEISRVGIDLAKNVFEVHAVNAEEHVVVRRPLRRNQVLTWFARLPPCLIGMEACGTANHWARELAALGHTVRLIPPSYAKAYVRRNKNDAADAAAICEAVSRPSMRFVPVKTVAQQAEALTHKARELLMKQRTMAMNSLRSLMAEFGVVVPQGPQHVGKLGLILADPEDTRIPDLARPALNTLANILAALEQQIETLDKAVKVQARHNATARRLDTIPGFGPILSSAIAAIVTDPRHFDSGRDFAASLGLVPRQDSSGGKLNLGPISKRGNGYLRRLLVNGATAVLNGKNARNDPWRAKLLDSKPRKLAAVALANKMARIAWAVMTRQEDFRPRVTAA

SEQ ID NO: 501031 - protein, 330 aa, unidentified
MDEKGTLVNKGRFPMKRAAITEYFEKVKGDEPAKAVLEASYGWEFLYDVVHDIIDEVILAHPLKTRAIAEARIKHDLLDATTLAHLLRADLVPPAYAPPKGIRSTRNLLRFRFTYTYLSVEVKNRLHALLDRHHLEDPEWSTLGNRFGKKGKAYLETLTLPGYDTFILKRSLELLNYCEERIQEIDTMLHSILTEDPIAQLLDTIPGLGPFFALLIRYELGDITRFPSAKKLCAYIGIVPSLSSSGGKSYTGRITRQGNRLLRWAFIEAVFPAIQKDAELRQFYERIAAVHGVKGAKVATARKLVSIVYRIWTDQRPYIDRVDAVALVRH

SEQ ID NO: 501032 - protein, 345 aa, unidentified
MQLFVGLDVSQVLTHLCVVDPDGRQVWRGKCSTAPDVLAQTIETYAGSAAKVGIETGPLTPWLVHTLRAAGLDVVCIEARHAHAVMSAAQVNKNDRNDAKALAQLLRTGWYRAVHVKSYSAHQLRAVLGARAQLVTMTTRISNHIRGVMKIFGLVVASATKTTFAARVEELVADRPEVGSVVGPMLATWRHLRGQIVAFDKQLMAIARARPECRLLMSIPGIGYVSALAFMGAVDVPERFASARAVGAHLGLTPRQHQSGEVDRLGAISKCGDPYVRTILVEAANSLISRYRKPSPLRDWALALQRRSGPKKARTALARKLAVIMLAVWRSGKPYAHSVPAVAMT

SEQ ID NO: 501033 - protein, 358 aa, unidentified
MNEGKDIILVADYHAQNIEFRWFNQATGEERTGKYATSRAGILRQVEQAAQELEPGGRVVWIMESTTGWAKVKDLIGVRAQFILGNVLQMPLPPKAKRRKTDKIDTGRMLREYLHGSLPTSFQPSAWWRQVRRVVDCRQDLVERQTGIKNWIGSLLHHETWHDRKNLWSGKGRVRLRAMKLPASDRTLLELRIQQLEQLAKQQEQIEGRMWEIYNAWPQAQWVDEVRGIGMVTAVSLLAHIGPIERFARAEDLISYAGLAPGIRKSDGTCHHGRIGGGGTDGHLRYLLIEATTWLCQIARYRPAYERVLKKRGKKIARIALGRMLLRSIHKMLRDRVRFHPMALSRPPAPATTAGCSR

SEQ ID NO: 501034 - protein, 445 aa, unidentified
MAEKRLYSFADKQAGKTRLKERSIAMKNINTKKVRRLNEETLLVAVDIGMTMNTGYCRCPDGAEVKPFDFSNGRNGFEEFWRRVCQTKKANNLRGVIMGFESTGPYAEPLLSFLRRKEVNIVQVNPFHTKRLKELQGNSPAKTDKKDPKVIADIIELGHALTVIIPEGSAAELRRLTAARERGMQRRTALLNQLHSLLFLIFPEFLRVMKDIGNKTSQYLLKLCCIPEGIIELGIESLAGILKKISRGNMGRERAEALYKAAQESVGVGEGQRSIELEVGALLSVLEETERFVAILEVEMDKQLKEIPYSKSILSIKGIGTIITAGLIGEIGDFKQFRTIGEVLKLAGLDLYEISSGQHKGKKRISKRGRYLLRKLLFFAALGAVRKGGIMHECYQGYIKRGMLRMKAMIAIARKLLGVIFAVVRDQSVFESAYSEKPDELKEAA

SEQ ID NO: 501035 - protein, 402 aa, unidentified
MLYLAIDQHKEHLTINIRNEQGNVIQKGQIRTVPADINAFFDDFVKKARKCRGYMSIIELCGFNDWLLAKLEEKDCKEIVVIQPEGSALHKTDKRDADALGALLWNNRKRLEGGQRPHDIRRVFPASPADAQIRQLANLRQRLVKLRTMVINKIKGIINKHNLSHDAPTEDSGTQKFRKWIKAVQLPVVDRSEVNMHIQSCELYDKQIFEIESDLAKRSEESKTKMADVYRLKSIPGISAMGAITLLSRIGDIKRFKNPRSLANYFGLTPGCQNTAGKHRVGGITKRGSAMARNILNFAVNHIVRKDPAMKAWHKGIKKRGGAKTARVAVMRKLATIIWHMLRWEKPYQFRYDPPPKPAKTQKKDDLRSSEEVLGGIGNRNHSRKKEGTPLDANAKQGRDSR

SEQ ID NO: 501036 - protein, 400 aa, unidentified
MISVGIDVSKGKSTVCILKPYGEIVSKPFNITHTQKDLSELSSMLFRLNDEVKIVMEATGIYHLPVLTYLQEKGFFVSVINPYLMKSYRNESLRKAKTDKIDSRIIANYGIDHWFKMKEFQTSGEIYEELKLLGQQYRHYMKLHLLSLAELTHLLDLTMPGIKNLLASWNETNRKDKRSDFVERFWHYDVITSMSEQEFTEEYILWAKEKKYVPSQEKAKVIYTLAQESIPTLPSETSSFKMLVTEAVRVLKEVDATLGLILSRMQEIAKTLPEYSVVREMGGVGNTLAPKLIAEIGDVRRFRNGKALVAFAGIDPPPYESGQFVGCNRKISKRGSASLRKVGYETMRSLKMRSRPEDPVYRYVVKKESEGKSKKSAKIAGLNKFLRIYYAQVTELYKNI

SEQ ID NO: 501037 - protein, 338 aa, unidentified
MRRTTPAPLCGIDVSAAQLVVALEGEGGRGLRRSFPNRASGHEALILWLQKNGTRVRVCLEATGLYSLDLALALHAVAGIEVAVLNPKKVNRFAATLCRSKTDPADAQVLAEYARRMPFQRWHPPQAAALELRAITRHIAALTQQHTQQSNRLHAVSASRAGARCVQQDLKRSLRDLEHRVEKMRRAALAVIEQDAELRLRFALLLSVPGIGEVSALSLLGELALLAPSLTVRQWVAHSGLDPAHHDSGTSVHKRSRISRAGNRYLRRALYMPALVAVRHDPHLRAFYQALVARHKAKLQALIAAARKMLHAIFGMFRGRTGYDGSRLFPAIELAAAA

SEQ ID NO: 501038 - protein, 411 aa, unidentified
MSLPESSFYVGVDWAAETHADCVLDAAGKIQTEFTIAHTADGFADLLRRLGRLTDDPMDVPVAIERPDGRLVDALLEAGYPVVPVSPNAIKTWRDGEVLSGAKSDAGDAAVIAEYLRLRAHRLRPATPFTVETKALRTVVRTRDDIVEMRVAATNQLAALLDAHWPGARAIFADIESPIALEFLTRYPTAAHAQRLGEKRLTAFCVKHGYSGRRPAAELLHRLRQAPAGTTDDTLVEAVRDAVLALVTVLKALGAARKDLDRSVAAHLGEHPDGPIFTSLPRSGQVNAAQMLAEWGDSRVAYDGPDAVAALAGLTPVTNQSGKHKAVHFRWACNKRFRKAMTTFADNSRHASPWADQVYRQAIARGHDHPHAIRVLARAWTRVIYRCWLDGTPYNPVKHGNANEINQPTAA

SEQ ID NO: 501039 - protein, 409 aa, unidentified
MDIMYERCCGLDVHKQTVVACVLLPGSGRQPVKEIRTFGTMTADLLELGDWLAEKGVTQVALESTGVYWHPVWNLLEGQVELSLVNAQHIKQVPGRKTDVRDGEWIANLLRHGLLRASFVPERPQRELRELTRYRTSLIRERAAEINRIQKTLEGANIKLGDVASDILGVSARRMLEALIGGATEPVVLADLAKDKLRKKIPQLQRALEGQFGAHHRFLLAQQLAHLDGLDELIDQLSIEIAERVRPVEHVVERVDAIPGFGRRTAEIVIAEIGTDLSRFPSFKHLASWVGLCPGNNESAGKRMSGKTRKGDVWLRSALIEAAHAASRSKETYLAAYYHRVAARRGKKKAIVALAHTLLTIIYYLLTRDCDYEDLGPEYLNGRDREQTERRLIRRLQGFGYTVTRETAA

SEQ ID NO: 501040 - protein, 427 aa, unidentified
METDRSSIERFRQLKKEIRGSEEYLIVGIDVAKDKHHAFLGTATGKTLLRRLVFENNKVGFEKLLTHVEAIRVQHALSKVVFGLEPTGNYHKPIGMYLIRLGFNVVFVSGSAVKNNRALLDGRWDKHDTKCAANVADLISQGKCLYYESPSATISDLRDLLSLRKRLKKEEHSLKMRIRNGLIAKHFPELDRYYNRCESENLAIVRWCLDPRTIVNMEFNRFFQIVTSRERGTAQRRRLFAIWKMAWDSIGCVTHEACEFEAKLLVEKLKQVRAFILETQQMIETVSRRVPEYRCLLTIPGFGPYISSRVIATISNPYRFESQNQVLKMAGYDLSANRSGKNSDKAVPVISKKGNGDLRYALYQAALVASTRDCDIILYYTKMLRGRERERGIKTKMRVKLAAKLLVIAWTLMKKKESFNPGYLNIE

SEQ ID NO: 501041 - protein, 526 aa, unidentified
MKAKAQPKPSNAKSPLGRGHGKAKSVKSTGSRTKRRLQVVNRHAAGMDVGASEIWVAVPPDSVEPGQEDVRCFSTFTEGLDDLVEWLKRCHITTVAMEATGVYWIPVYQKVETGGIEAVLVNAKQTKHVTGRKTDLSDCQWIQELHSYGLLQASFRPADEFVVWRTLQRQRRQLVQQSGEHIQHMQKALRQMNVLLDRVVSDVHGATGLRIIEAILAGERDGDKLLALRDARCTRATQQEMKQALCGDYRREHLVVLRQSLEAYRFVQRQVQELDLEIKQVMSEIASRAVAELQPEVSTQQAVSAEAGTGAGVRQPGATPGRVYVLKPAPAEAKAEAGQPVGKKKKKRGRGYRNEPQVDFEGELRRIAGVDLTQIPGISVISAMMILSEIGTDLRRFRSSRAFCSWLGLSPNVKISGGVVLSSHTAHVVNLVAVALRMAALTLRSNEGCLGRFYRRKQAHLGAPKAITATARKLACIIYRMLKDRVEYREPDPNAYDANVRAHQLAQLQKKAKTLGFIVVPVVKAA

SEQ ID NO: 501042 - protein, 362 aa, unidentified
MRNITIGIDLAKSVFSTCTVDATGRVLQRQDLRREAFASWLVQLPAGTLIAMEACSGAHHWARRGIDHGLQPRLMAAQFVKPFRKSQAAKNDRNDAEAIATAARQGNMRFVPVKSIDQQARLAEHRVREGYKADALAASNRLRGILAEFGIVVARSDAALRRLLARLDELAIPASTREALDQLQRHWSSLREHETTCSRRILAQSHDDERCTRLRRIIGIGPLTADALVATIGNGHDFRNGRQLAAWLGLTPSQHSSGGKARLGTISCRGDGYLRTLLIQGARSSLQRAQVVAVAKATPEQIWIRDLASRLPFGKVVVAIANKHARQAWAMLARGEDYDAHAWLKHPMVQRPASKRRQQACS

SEQ ID NO: 501043 - protein, 407 aa, unidentified
MDPMQERRVFAGIDWGGHEHQLCIVDADGRKQLESRLTHDVAGLGELVRQLGKHGDSVPVAIERAEGLLVEHLQAHGHPVFPVSPRISARARERYRVAPVKDDRFDAFVLADTLRYEHGHWRPLAVPSPLLAELRALTRDRGRLLETQQATEAQLRAILESYHPAPARLFSSLDRQIALAFIADYPTPAVASRVRTTRMAGFLRRNAYTGRVPAQVLAERMRANLLSGSVGTVGGKAHSAKTFAHLLGEMNEALAEFDDAISSVLAEHPDAEIFASLPGVGPILTAVLLAEIGEDRRRYPNPQTLLAESGLAPVTRSSGRSRSVRFRYAANTRLREAAMWWAFNSLKTSPWAEAAFRQARDGRGQRYHRALRGLAARWMRVAWRCWQDGVPYDPALHTGAAIAERSA

SEQ ID NO: 501044 - protein, 349 aa, unidentified
MERPLFFVGIDIASATFTAAVGVEPWRLIIKPEEFLNELDSFPKFLHWLQKNKLPPEQTVLCMEATGVYGEALAYFLNSQGYRLAVETPLKVKRAFKPFGPKSDPVDSQQIAEYACRYWDELHLWTPNQQVLEQIKTLLNTREQFVAQSVAHQNALKSLQRKVVRTPLAEQVHIEALKQIKKHLRTIEDEIRRLIDQDPTFGQMLGLLLSVPGVGLLLATHFLVSFYSAQRELNYKEMASYLGICPHEHSSGSSLHPHPTSRHFGPPDMRRLLYLASMSVRTHHPDFNHYFLRKAAQGKPKKVILNNIANKLLKIMFAVIRSQTPYIPGYRSVNPIFLKKALTVSSYSE

SEQ ID NO: 501045 - protein, 367 aa, unidentified
MSNSRIQSKALNAKLSWEIIGLDLAKNDLSFVGITLEGEIIRIDRLSYEQLVEFSRDTDPTTFAMEPCCESHYLTNQLELYGHQCRIIPGKAVQNYIDTYFSGQKNDLNDAEALAFLGQQKRLKFVRAKNRDEMQLQTLLTVREHYIDEYRKTLTSLKGVAQYWGLRLAKSLSSEMRLIALIEDADLPEDVKGIFKEMVKRYKDLQKKARELTKKIEAFTQGDEFCQKIRKIPGLGPISSAGLKVAIGDIARFPSPRTLPAYFGLVPRNITTGHSLKMGKITKRGDKLVRTYLVQAASSLLMLDGKGKFRDCQLRRWIQRKRQTLNHGKLVVALAAKLLRIVWAILSKNEAFDYRKAGVAKCSLPKT

SEQ ID NO: 501046 - protein, 422 aa, unidentified
MIQPTEPAYAALIGMDWADQKHDYYLGVVGTDTVECGTIESRPETVAAWINQLRKRFQGQPVALCLESSKGALMHQLMSVEFMDLYPLNPQALANFRKAFAVSRAKDDPTDAQLMWEYLLKHRDRLRLWTPEDVDTRRLALLVEDRRKMLDLRTKLSNKLTATLKGYFPQALELIGTKVASPMACDFLQRWTSLEQIKKCRDHTLETFYRQHHVRSSQRIQARIGLIRNSVALVEDPAIVETSALKVKSLSRQMACLNEDLEEYDQCIEALYASHPEQALFDSLPGAGPALAPRLLVAMGTDRERFDSADEVATFSGIAPVTERSGQHTWIHWRLACSKFLRQTFHEFANMSRHQSPWAHAYYEMQRARGKSHHAALRALAFKWIRIIYHCWKQQEVYDEAKYRAALEKRNSPLIALMAEAA

SEQ ID NO: 501047 - protein, 375 aa, unidentified
MSDHSEAFVAFDTSKLRNAVAIADGGRAGEVRFLGEFESSTTATSKLVRKLAAKYQRVTFCYEAGPTGYELHRQIKALGHECLVVAPSLIPKKPGDRVKTNRRDAVSLAKLLRAGELTAVWVPDCRHEAVRDLTRGRETAVIDLRSKRQQLSAFLLRQGRWYPAGKKTWTKAHMNWLASQKFEQPERSIVCEEMMFAIRQAQERVERLEQAIRAAVPDWSLAKGVTALMALRGIDLISATGLLAELGDLSRFRTAPELMGYLGMGCSESSTGDTIKRGPITKAGNRRARRTLVECAWSYQHPPRIGIAKQEKVAAAPPKVREIAWKAQSRLNRRYRALIRRGKLKTVAITAVARELAGFVWAVAREAGSAEAATK

SEQ ID NO: 501048 - protein, 336 aa, unidentified
MATLPVFVGLDYSDAAVRVSVMNQQGQELANRNCPNRWDALAAFVAPFGNSVRAGIECGTGAVDLAEEMNQHAGWCVDLAHPGFVKRMKQNPDKTDKQDATVLADLVRVGYIPRVWLPPTYIRELRQLIRYRQQLVNQRRQAKQRLRTILRDARQKPTEGVNPWTLKWWAWVEHLAKLEEHSRWVLNQHRRTIARLNEEVRLVEQRLQEVTGADLQVQRLLKHAGIGPVTAWTLRAEIGVFDRFRTGKQLARFCGLSPWNASSGSRQADAGLIKAANGTLRAVLIETAHRLGRLEPRWIAMKQRLKKRGKPGSVIAAAIGNRWVRWLYYQMVGQAA

SEQ ID NO: 501049 - protein, 374 aa, unidentified
MNYNTVYVGMDVHKESFTLCAYTIDAEKGSHFQRTEADGHYSKVINYIEAMRFHYGDDALFICGYEAGCLGYTLYHQLTEHDVNCVILAPTTMLEQRSKRRIKTDRRDAEIIGKCLAQHNYSPVHIPTATDEETKEFLRMRDDHKLALKKVKQQILAFCLRHNYRYDGNSHWTAAHIKWLKSLSPEALYKEILDEYLLTYTTLSDKVERLDKRIEELASKDEYRESVKKLCCFIGIKTHTALSVLVEVGDFQRFASAQNFASYLGLVPGEDSSGDGQTRLGITKAGNRHVRMLLTEASQCYARGQIGFKSKELKSRQAGNSPQVIAYADKANERLRRRYYKMVLGKSKKPNVAKTAIARELACFMWGMMTDHVA

SEQ ID NO: 501050 - protein, 320 aa, unidentified
MKNSPVYVGIDVSTTTLDVAVVPGCTLWQVSNDSAGIAVLVERLVALRPAGVVMEATGGIEMPAAVALYEANIFAALVNPRQVRDFARSLGMLAKTDKLDAIIIAKFAEAIKPEPRPLPTTTDQELKALVARRRQLVEMLTMEKNRLHTAITPLRARIQINVEWLRKQIEEVDHDISNLIQSSPLWRAKDNLLQSVPGVGPVLSETILAELPELGQLNSKQIAALAGVAPFNRDSGTLRGKRSIWGGRAHLRKMVYMGTLVATRFNPVIRSFYQRLIDGGKAKKVALVACMRKLLVILNAMLKHGTLWTYSEPKILVCYP

SEQ ID NO: 501051 - protein, 423 aa, unidentified
MNASTLCVGADVHLDEIVLRAVDKADGHEVVQRFRVTNNLPGAYSAAATIAQTATQGGYTHLEIGWEATGLLWVPFHRLLSTSSLLQPFKPQLICFNPKLVANFKDGLVLRRPKNDDRDAWDIAARLRFGELPLSYVPSDFWQGLRRLTRDRFRLAQMLTREELRFQSYAFLKASDWKRVRAFSNVLGATSVALLTEFTVAELTTMSHDALADVISRRGRKHFDDPDATARLVQEALHTSYPIDPQMDELVTLTLATLWEHIRFIKRLMKRLDHQIAHYIAPFPNPLISVKGLGAVITAGILAEIVDITRFPTHKQVAQYVGLTWEKRSTGQSVSQTTRLTKVGNVYLRYYLILGADKLRQFNLEYKTYYWRKHQEVSKYQHKRALVLTARKLVRLVFALLTKNTFYVRPKTLTQVQEEPLLQ

SEQ ID NO: 501052 - protein, 455 aa, unidentified
MYLPDWKWIPIRKGLLLMSNKVIFNLDELFISVGIDVGADFSWMSIALPNQQFVGKPYKILHNSIDSLTTAVSKIKEAEELYSLESRIFLESTGIYHYPLFCYLRDKGFNCSVINPIITKNSTNINIRKVHNDRFDSKKAALVGLKPDLKVSLMPSDLALNCRNLCREYYDLMDNRSAYVNKLQGELRMAFPQYLGIFSKVTINTSLTLLETYTSPSAFLKADKQEIIDIIKSTARFGLTYAQNKYNAIIQAATDANQFGYIIDSNIKRIRLYISFIRKYDEEINSILESLHELVDANEDADFVKQIHLIETFKGAGFLSAVSIMGEIGDFSAFSKPKQLFAYFGLDPAVKQSGKFEGTKVQMSKRGSAIARRVIHTLTLQSISISRNREAKNPVLREYYLKKCDSKPKLVAMGAVSHKVCNMIFAILRDNKPFKIIAPQEHIKQYNSAKCDIAA

SEQ ID NO: 501053 - protein, 411 aa, unidentified
MGLLHEALPASTLVVAIDPGKVSNRVWLSTGEAGEVVPPLSLPVLRPGLEQLHRLVLDHAGPIAPVFAIEATGGLHQAWLRELNQRFPGSVRLFAPSETTAARAQLGSRRFKTDDRDCAALTYLARQGQGRPVPDQQQDALAAAVRHRRGLIGEHKVAQQRLHDQLHALCPGLAAPEGHGRALPADSVIGQAVLDCAAAFAGRPPSVRSLRARARGRVLTSEAEFWVQRWRTCLPPPADAPSRAARLARSLARWRAIDADIAAVDAEITALLAGSDGQILTTLPGVATSRAAAFAAFSLPIARFPTAEHLYSATGLAPGSYKSATINRRSPISRQGLPEHRDALMNLAWGLSQHCGPFIDRAGELRARGLRPIPVRIALARHACRLAYTLLKTQQPFDEQRYRRARHQSER

SEQ ID NO: 501054 - protein, 334 aa, unidentified
MNFKNFIGIDISKGTFDVALIKDNNLLVLASDDFPNTSSGIVKLEEFLKNQELDMTETLFCMEHTGIYCRLLSHYLTESNYHVWLEMPVNIIRSLGMQRGKNDKIDAKRIAEYACIRKDKAVLWEPPREIVMQINDLLTLRDRLVESRKSLKQPIKELMDTGFTDAARLIESRCKITLNAIDKEIKQIEKDLDNTINKDTNLKKLFGLATSVPGIGKITAMYMLYFTNEFTLYLNPKQLACYCGVAPFEHRSGTSVRGKSRVSHFANKKLKKLLHLVAMSTLGKDRDLTAYYVRKVSEGKGKMLVINAIRNKILHRLCAVIKRGTPYQAEYVLA

SEQ ID NO: 501055 - protein, 421 aa, unidentified
MTINFNNAQGVALVAIDVAKAKNDVLVQLPNGTRKKFKVANKMKDYREFITYLSSLGCQCHIGLEATSNYHRPIAYHLQMAGFTVYFVSSLAAARTREALHNSWDKNDPKDAQVILHLLRTGVVQIYYDPLINKYNDIQELAKTYQQISLRKVRVQHSIMNHYLPLYFPEVEMFFHSSRALWFTHFISHYPTPSSVLKYTQDEFIKVAWEVVGRKVDKRNWLINFYQTAQESIGLPLEENSQAIDMFRVILHEHQGLCKRLKEIEETADSFLQGNNDYKKLLSIPGIGPILALMILAEVGDLRRFKHYRQFLKFCGFNLSTHQSGYFRGTSKISKYGNSKLRYAFWLAATVAIRMRENTFRKKFENYIKQDPNNDDLKRKGYTAVAAKMARVVFGIIKNETNYRCYFESVIPSGRIPSVGP

SEQ ID NO: 501056 - protein, 407 aa, unidentified
MEVFAGVDWGAGSHAVCVIDVKGAVLDRFEAGHDRAGLAALVARLKRHGPPKGLPVAIETSCGLLVDHLVEAGFVVVPIHPNAVKACRPRYRAVSAKSDPGDAYILADVLRTDGHRLRPLQSQSDAIKALRALVRGRDDLVAARVALANQLTALLDSFWPCAARIFAEVDSLIALAFLDRYPSPDAAACLGPKRMARFLTQHHYSGRRSPEILLKSLRAAPSGHAGAAEREAKSELVRALTRALASLVHQLGQLTRRIEQAVADLPDGRLIMSFPRAGKICAAQILAELGDVRGRFQTNDQLAAEAGVVPVTYQSGKARGVGWRWACNKRLRKAITCFADNSRHASPWAASVYAGARQRGKDHPHAIRILARAWVRVLWRAWTDHKLYDPDRHPPARSHMGPELMPG

SEQ ID NO: 501057 - protein, 349 aa, unidentified
MLADQLDYIVGVDTHLDEHVLAVVASPSGAVVAKRSVRASARGYASALQFALEAGNGARVWAIEGTGSYGAGLARYLVGRRETVLETSRLPQSERRLRGKDDALDAVRTARAILASDTLALPRAGERREALRLLLVARRSAVDVRREALGQLRGVIVTAPDSLREQLRTLPVGKLLQRCSRLRRSSAMSTDEVAVRLVLRSLARRIEAATVEAAELERELLVHVHALAPQLLDEPGIGPIVAAQLLVAWSHRGRLRSEACFARLAGVAPVPASSGKTARHRLSRGGDRQLNRAIHTIVLHRRQHDPATRDYIERRIAEGKTRRDATRLLKRYLARHLYRLLEQQQPLMT

SEQ ID NO: 501058 - protein, 411 aa, unidentified
MNPVVGLDVAKGESQVQAFLDKKKPYKRSFKVAHTIEGLESLHQYLREIENVTGIRPPVVLESTGHYHTPVVQYFEERGYLLIIVNPLISYRAKSSSLRKVKTDLIDARHLCELYYKEDLEPYKKRGIQLLNLRNLSRQHANITGIYVQTKLQFQAVLDQVFPEYRGVFGDLYSVVSLLTLLEFPTSEDISAVDEETVANRINELCPSRSRKWANTKAEKLMAASARNPFQRTLYQSHILSLEMYIKMLLEYQKHLSKFEEEINALAKEMEEYRIIQSIPGIGEKIATTIISEIGEIDRFNHPKKLVAFAGIDPSIFESGKFKGSVNRITKRGSGRLRHALYMAVRCAIRDCRKKKTTDEIIPRNKRLREFYDKKREEGKPFKVAVIACANKLLQWIYALLQNNSTFQDLT

SEQ ID NO: 501059 - protein, 338 aa, unidentified
MTIIATGIDLAKNVFAAHGVNDAGKVELRQPKVARAKLNALVAALPPGVIGMEACSGAHYWARLFQSHGHTVKLMAPKLVTPYRMSGARGKNDAADAAAICEAMQRPNMRFVPVKSEDQQARLMVHRARQGFVTERTACINRIRGLLSEFGIVLPLKAEVVRREARNHLEDLPGFANLVIGDLLSEVTHLDERVKQYDIHIRTMARDCNAAQQLMQLMGIGETTATAIVAMVGNASEFTCGRQFAAWIGLVPGQYSSGGKARLGRITKAGDPYLRSLLVMGARAVLNAAKGKQDSLSRWAVAVAERRGYWKAVVAIAAKNARMAWAVLTRGAQFKLPA

SEQ ID NO: 501060 - protein, 369 aa, unidentified
MTTRQCSTSSSTDPPVPGEVVLGVDTHGETHTAAVVSPLGKVLGTESFPATAAGYRRLLVWARKLGTVRRAGVEGTGTFGAGLSRYLLAQHVQVYEVNRPDRTARRLLGKSDPLDAQAAARAVLSGRARARAKTGDGPVHSARMFKLAKDSAVKARTQAINQLKAVLVIADPALRERLSSLGNRELFRTCARLSLPEGDDEDAVAQATRITLSLLAQRIEQLTGQIDELNQRLTKLVERHAPQLLIPVGIGPDSAVTLLITMGDNPERLNTEASFAALCGVSPIEYSSGRRTSRRLNHGGDRQANAALHRIVFTRLRHDPRTQAYYERRTQEGKTRREIIRCLKRYAAREVFWSGWSLPTPRYRGVRDR

SEQ ID NO: 501061 - protein, 335 aa, unidentified
MNEITTLAIDLAKTIFQLHGVDARGVCVLRKQLRRAQLLSFLAQLPACLVAMEACGGAHDWGRRIRALGHRVKLIPPQYVKPFVRGDKTDRNDAQGICEAALRPDMPEVAVKSEEQQAMLAVHRLRELVDKQRKQLANQLRSLLAEFGEVMACGIPTLRRELPERLERVPALLRGVLRDGYDRLIELQAQSAAHTRRIEQLAKNDPLCQRLMRERGIGPICASAYVASIGDPTRYRNGRQVSASLGIVPRQHGTGGKEVLLGISKRGDRYLRTLLIHGARAVIRTVRGKSDPLSLWLQQLIARRSVNCAAVALANKTARRLWAIWRAEQPQLLPA

SEQ ID NO: 501062 - protein, 349 aa, unidentified
MHYVGLDVHARRSSLCILDSCGRPVKRLEVRGPWPKLLAQVAAQVPRPFAVCFEASCGYGYLHERLSALAGRVAVAHPGRLRLIFRSKRKHDRADAEKLATLLYLDQVPGVHVPAAGVRAWRGLVELRRKLVGRRTAVKAQLRALLRSAGACDAPAGKALWSKRGLKWLAAVALSAEADALRRDLLLEELGQAEARLARVTAELDKRAAAHPGVALLRTIPGVGPRTAEAFVAYVDDVRRFARTRQVGCYLGLVPCQDSSAGRDRLGHITGDGPATVRMLLCEAAWQAVRRSPSMRAFFERVTHGEPGRKKIALVAAAHKLARAMAAMLRTGEAWREQEQEQEQEQEPA

SEQ ID NO: 501063 - protein, 366 aa, unidentified
MTDGSKGTLKMTAGLDLGDRYSYLCLLDNESGEVIEEGRLRTTPEAFKRRFDSERPLRIAIEVGTHSPWVSRVLKECGHEVLVANPRRLPLVYGERRKTDKLDAEKLARLARVDPKLLAPLQHRGEASQAHLALIRSRQALVNTRTQLVNHVRGSVKSFGGRLSRCSTASFHKKVAEQILQELRPALEPLLETIASLSACIQHYDRELETLAQEHYPETKLLRQVQGVGTLTALTFVLTLEDPERFEESRQVGAYLGLAPSKDQSGERDPQKRISREGDEMLRRLLVGSAHYIVGPFGEDCDLRRHGLKIVGGAAGKNARKRAVVAVARKLSVVLHRLWISGEVYEPLYNAQRSKDRAASENLCIL

SEQ ID NO: 501064 - protein, 335 aa, unidentified
MDTLAWLGIDIAKDTFEACLLQQQRSAHGSFANTRAGYTKLDHWLKKRKVEQIHVCLEATGRYSEGVAEHLHAAGHTLSVINPARLKAFGQARLTRTKTDQTDAALLAEFCRSQQPPAWTPPSAERRELRALVRRRESLLQLRQQEANRLSSGEDSPAVITSLEAVLAVLRDELAKVEQAISAQVARAPELQRQHQWIDSITGIGPTTAAALLGEIDFGAYPSARQVAAQAGLTPRQRQSGTSVHGKPRISKQGASQLRRILYFPAIVAMRHNPVIRAFAERLAKAGKAKMAIVCACMRKLLHLVYGVLKTRLPFDPNYQSVRGRPLPVKQLQPA

SEQ ID NO: 501065 - protein, 423 aa, unidentified
MAYRIAGIDVHKKKLAVVVADVEVEEEYEFEGRWYGSVPQQLQLLCEWLIEQQVDEVVMESTAQYWKPVWGALERWWKPICEKREGAGRMSGSLHLAQALSNRGRRGRKRDFRDAERLVKRLVSQELNLSFVPDTEQRLWRTLTHTRYQRTREKVRLQNQLEALLEEAHIKLSSLVSDLLGASARRMLKALAEGETDPAALATLGDRRLRATPAELHDALGACTELNPVYRRLVKMTLEELHLIEEQIGQIDEDVASLLREHQDAVQRLAEVPGLGVNSAQMIIAEVGAKAAAFASAKHLSSWVGASPGEEESAGVNRSKRSPKGNRQMRRVLNQAANAAAKHKGSIFEIVYRRLVLRLGHYKTIAAIAHRLCQLVWIILHKGVRYEERGPAVREKSKRARTVRMIRTLRTLGYRVEPLENPA

SEQ ID NO: 501066 - protein, 309 aa, unidentified
MDLFIGIDVAKDRLDVHVRPAGEAFGVAREAKGLAELVERLRSLTPALIVLEATGGFERTVAAALAAAKLPLVVVNPRQIRDFARAIGRLAKTDAIDAAVIAQFAEAIRPEPRPILDAEAQALDDMVSRRRQLIEMIVAETNRKKATTNKRIAREIDRHLLYLQKRLTGLDGDIDTAIRSSPVWREKEELLVSVPGVAQKTARTLIAELPELGSLTRRRIASLVGVAPMNRDSGTMRGKRRITGGRATVRSALYMAAITAARCNPTLSSAYQRLRHAGKPPKLALIAILRRLLIILNAILRDKTPWRPA

SEQ ID NO: 501067 - protein, 322 aa, unidentified
MSLPGPLCVGIDVSKATLDIAASSAIAQFSVANDADGFDSIIAELRKHTVALVLMEATGGLEAAVACALQAEGFELAVVNPRQARDFARAMGYLAKTDRIDARALAQMAEVINRHPERGRFIRALPDAERQVFNAIVVRRRQLIAMLVAERNRLHLAHPQSRKSMNIVIKALKDELARIDDDMNNHIRSHFKALSERLSSIKGVGIMTVAALLAEVPELGHLSRRKISALVGVAPVNRDSGTMRGRRTIFGGRAGVRTALYMAALVANRFNPVIKAFYTRLVAAGKPKKVALVACMRKLLSILNAMLRKNEEWNESYHRVAP

SEQ ID NO: 501068 - protein, 446 aa, unidentified
MRIVYQRCCGMDVHKDSVTACLLVINQSGALQTEKRQFGTMTRDLRQLASWLASEGVQAIAMEARGVYWKPVWNILDAEKKFELLLVNAQHIKCVPGRKTDPKDSEWIADLLQHGLWRASFVPPVEIRRLRDLTRMRTKIRQTLASFANRIQKVLEDANIKLGSVASDVLGVSGRHMLKALLAGEQDPQKLANLAQGHLRKKLVPLQRALEGHFTEHHRLQLKFLLEFVEFGEKQLSNLDSEIQLLLTPVQAEPSVPQGDGTLGESKGSPPHATSRLQTAVELWDSIPGIDQLAATTLVAEIGANMDQFPSARHLAAWAGLCPGNDESAGKRRSGKTRKGSVWLRRALCQAAWAASRTKNTYLAAQYRRLIVRRGKKRTIVAVAHSRLIVAYCLLKRQCVYQDLGANYFDRVDERALTHRLVRKLIGLGYQVTLKPGGAEAAPETA

SEQ ID NO: 501069 - protein, 310 aa, unidentified
MDAIYIGIDVSKDRLDVHMRPSGQAFGVTRDGKGLSELLDRLRSVAPSLIAVEATGGFETIVAAAIAGARLPLVVVNPAQVRHFAQAVGKRAKTDPIDAAVIARFAEAVKPEPRELPDEAGRLLAELVSRRVQLIEMLVAERQREKRTTAVRVRKSLARHIAALEKELPIIDRDIDTMVRGSPVWREKEDLLVTFPGVGNRLARTFLADIPELGRLTRRQIASLAGVAPFTRQSGQWKGRSMIAGGRPITRSAIFLAALSASRCNPVLRTFYQRLLAVGKPKMVALIAVGRKILTILNAMLRDKQQWQPA

SEQ ID NO: 501070 - protein, 352 aa, unidentified
MRFYKRQHRFYCGIDLHARSMYLCIRDHDDVVLLHQNLPAQADDFLRAIAPYRDGLVVGCECMFAWYWVADLCADHDIPFVLGHALYLKAIHGGKAKNDKLDADKLSALLRGGNFPIAYVYPKGLRETRDLLRRRLFLVRQRAHFVAHIQNTNSQYNLPVFGKKLVFARNRDELDVAERFKDPSVRLSIETDLQMIDKLDEQIYAVELHLERHAKVDDPNTLARLRSIPGVGKILALIFLYEIHDIRRFPDVGQFLSYARLVRCAHESAGKKKGSGGKGAKKIGNAHLRWAFAEAVCLWLRQSDRAKAWMKRHEKKRGKAKALAILGAKLARAMYHMLRKKEVFDEAKVLGG

SEQ ID NO: 501071 - protein, 324 aa, unidentified
MKYQNTLFLYAGIDVSKYTLDLGIYPTEEHVQVSNDKNGIRTIIKRLKKLKIVLLALEPSGGYERELIQSLHKNDIPFVAVNPRQARDFAKSIGKLAKTDKVDAIMLAHFAEATKPEPRVQPDEQTSILQALVTRRRQVVEMKVAEKNRLSSAHPCMKKDISDSIARLEADEARLSKEIDAYIMQNEMMKTKKDILMSVTGVGPVCANTLLAELPELGTLNRKQIASLAGLAPFNCDSGRKQGKRMIWGGRASVRTALYMASHSACHHNKIIKPHFEKLTNAGKSYKVAVTACARKLLCILNAMIMTMTYWNPELARSKCDQKP

SEQ ID NO: 501072 - protein, 410 aa, unidentified
MGQAAKQCTIDVAETLNGVRAMSQVNDLSYSPTAFEQDSTLIAVIELSLKNWLVAGLVPGLARRPLKKLAADRDALLRLLERWRTEAEKAGKVIKRVAVAFEAGRDGFWLARWLRRQGIEAYVIHAASIAMPRQHRRAKSDRLDTESLTRGFLGWLRGEKRHCQMCHVPSLEEEDARRPGRERDRLTREQTRLVNRIKALLSWLGISGFNAKLRGAEDRLAQLRTPEGLPLPENTAAELRHYVERLQLVRQQIKEIERQRAARLAAEPNQPNQPNQAIKLLQQIVGIGPETADTLTNEVLLRPLRDRRAVARYGGLTGAPDESGSKRREKGLARAGNLRVRHTMVQLAWRWLMFQKDSALACWFFQRTQNASPLVRKKMIVALARKLLIALWRYVTTGEIPQGVALRPAV

SEQ ID NO: 501073 - protein, 363 aa, unidentified
MRRVIGIDIHRTFGEVVIWENGLSRHEGRVEMTRTALEGFGRQLKKTDEVVIEATRNCMAVSRILSPYVKRVVIANPLQIKAIAHAHVKTDKVDAGTLASLHAAGYLPEIWTPDAATERMRRLVERRYQVVRHRTRIKNEVHAILHAHLIPKCPHADLFNKRGRDWLARQPMPEDERAAIARYVRELDRLGEDLAQLDRGIAQDALEDEEIQRLLTITGVNLAVAAGLMAAICSIERFKSLQKLVSDFGLNPRVRQSGLGPAHHGRISKVGRSHARAMLVEAAWAAAKAPGPLRAFFIRIRARRGHQIAAVAVARKLATLCWHMLAKKEDYRWARPSLVTHKRRAMELAAGQPQKKGNRRGPS

SEQ ID NO: 501074 - protein, 326 aa, unidentified
MDRQYVGIDFHRRRSVIVRKNAAGDKLGSVRVANDPLALATAIAEAGPEPEVVIEATYGWYWIVDWLQEQGATVHLANPSGLNWGTRRVKNDERDAVDLVDMLRLGRLPRAWIAPPATRELRELVRYRAKLVALRSGLKAQVHAVLAKEGVLPATRDQFGQGGNSQLDALELSDAYALRVRSLRELIDVYDTQVAALEQKIHDWLRDDRGYRTIQQINGIGPTMAAILVAEIGDVSRFPQRRGVMFMGGADAQASRVGHDRAARRRDEAGLAAGAVGGDRRHRPLSRRPQTRRGLASDRRTTRQTQGHRRDRPQSPHARLLRLARR

SEQ ID NO: 501075 - protein, 313 aa, unidentified
MNAEKKYLGIDVSKNSIFAFMYPTGEEWIVKNEPRELAKWIKTLPEDIELAVMEATGKFEQLVAKQLDMAGISVSIVNPRLIRSFAHFMGISAKTDKIDARVIAMFGNTRKPDPTKLPDEMESSLKELVIRRSQIVDLIKEEKNHLSTSNDKLVQKDVKENIENLEKRLDKIEAQIKTMINENPIWKEKVKILTSIIGVGIITAFSFIATFPELGSISRKEAASLAGLAPMTRQSGDWHGKSFTQGGRKLIRSSLFMAALSAIRYNKIIADFYQRLIDKGKPKMIAITACMRKILTILNALVRDNSIWNFAEI

SEQ ID NO: 501076 - protein, 408 aa, unidentified
MTAGEFPLLLERCCGLDVHQKTAVATIKGKDIVTQTKTFGTFTSDLYELVGWLQNHGVTHVAMESTGVYWKPVYWILEEFFTILLVNARHIKNVPGQKTDKKDSEWIAQLLISGLLKGSFVPPEKIRELRVLHRHRRNLIGQRTAEKNRLQNVLEDANIKIKSVVSNVFGKSGTAMIAAIIDGETNPDVLADLAKGSLVKKKEELRKALNGRITDHHRFMLNMIRENINYISNQIAQLEARMDTYIKHMEQQVRLLKTIPGVSDGIATGIIAEIGIDMFHFPSHRHLSSWAGLCPGNNESAGKKMSGRVTHGNKYLKTTLVEAAWVASRSKVNQALSQKHKSLSIRRGSKKATIAIAHKILIAAYHVLRDHTPYLPSIQDKKIAEMRRIKRIERLERQLLALKQTSYK

SEQ ID NO: 501077 - protein, 344 aa, unidentified
MDYFAGLDVSVKETSVCIVDDTGKIVREVKVASEPAALLAVLNNPAYHFKRIGLEAGPLSQWLYSALAEAELPVVCVETRHMQAVLKAQINKTDRNDARGIAQMMRVGLYRPVHVKTLRSQKLRMLLTHRKLLQSKAIAIENDLRGTLRNFGLKVGIVSKSKFEARIKELVENLPDLAILVEPLLIVRRALREQIVILHRRLLAIVRDDAVCRRLMTTPGVGPVVALTYRATVDVPARFRKSKAVGAVFGLTCSKYQSGEIDRSGRISRCGDEMMRVMLYEAAQSMLRSKKWSWLKAWAMQIARRRGMKKAIVALARRLAVIMHRIWVDGTEFRWTREQAAAAA

SEQ ID NO: 501078 - protein, 360 aa, unidentified
MKTLRNSEAKTIPSRTTVGLDVGDRHSWFCILDAAGEVVAEGRARTTTEALNEHFTRWARSRVVLEAGTSSGWISRLAMAAGHEVIVANPRELRKIHQSDRKNDRSDALVLARMARFDPQLLAPITHRSAAMQNDLAVVRARDVLVRARTQCVNAVRGLVKTAGGRLTTCSTESFARKAATELPSGLESALEPMLKTIEALTEQIRAYDRVIDQLASRYPATEVLSQVTGVGALSAVAFALTLGDPSRFGSSRDIGAYLGLVPRQHDSGNHVSQLSITKAGNTLLRRLLVGSAHYILGVHGPDCDLRRYGERLMTRGGKNAKKRALVVVARKLAVLLHRLWVNGEVYDPLHSEQKSRQAA

SEQ ID NO: 501079 - protein, 341 aa, unidentified
MTHTTIVGLDLAKNVFQVHGIDAEGKKTFNKKLRREEVKEFFENLPSCTVAMEAGSACHFWAREISALGHRTLILPGQYVKPFVKREKTDALDAQAIAIAATQPDIQGVPAKSAEHQTLTVLITTRALFVRQRTKAFQAFRGQLSEFGIIAGTGTAKLERLAMDLRAGVLKEIPTAVRDVLLAIYDEIKALTMKIVRIEKELAALSKHEGDARRLQTIPGVGPVTAATIKAYVPDALLFKSSRQFASWLGLAPRAHNSGGKSRSGSISKRGNPVLRALLFISGMTLVRQAKAKPQSVDAWLTRLVERRPYKVAAIAAANKIARIIWALLSRGGIYQSPQHA

SEQ ID NO: 501080 - protein, 414 aa, unidentified
MLKIVYHVCCGMDVHKSFVVACIASTNDQGVTTYKSKRFSTFTGDLRRCAAWLAENNCKDVCMESTGKYWIPIYNILEPTCNVVLAHPKYVKAIQGKKTDKRDAKWIADIFKHDLVAGSFIPPVDIRQLRDLFRYRWKLTNFTTGEKNRAQNCLTVSNLKLDDVFSDVFGKAASAITARILENPTEKITDVSAFRTKRIKATDEEILAAVDGEMCVEQAEKLRIIRSHMDSLELCKLNLESLILSNAEKYLPQLNLVMTAPGIQSFAAIGIISEIGVDMSVFPTSKHLCSWAGLTPQNNESAGKKKTTRISRAGAYIKPLLVQCALCAIRAKRFPEVRNRYLALKKRRGHKKAIIAVARMLLTAIYNMLKKNEPYNPELYRQTDRPPAHREVSVEEAIFILQRQGYLVTAPQTL

SEQ ID NO: 501081 - protein, 415 aa, unidentified
MKVVFPTCCGVDVHKTFLVATIITTPADSLQPNYQKKRFSTFNSDLNRFADWLLEHNCLDVCMESTGKYWVPVFNILEKRGIRVVIANPKWVKAVKGNKDDTKDSKWIGDLFRIGLVKSSFIPDLNIRILREFTRYRYKLVSMKSSEKNRFQNAFTVCNVALDSVVSDMFGKSATAITDYLTSDESFDPEHCVSLLQRSLKKKAEQVLESIEGFSIADEQKARIKIIREHHDFIEEMIATVDTRVNEMVAKYEGNINLLCTIPGIDRRSAITIISEIGTDMGQFGSSKRLCCWAGLTPGNNESAGKKKSVRISRAGVYLKPALVQVAHAAVKDNDHPYYKLKYERIAKRRGKKRAIIAIARMILTAVYSMFCTGEVWNPVDLYKVDMPGCLKEQQLAKAIKQATRFLEKQGLSVA

SEQ ID NO: 501082 - protein, 347 aa, unidentified
MSEDYAGRQVVGMDLHRHRSVLVRMTEDGRKLGIARITNSPAALRAEIARAGENPRVVLEATYGWYWAADTLAAAGAEVHLAHPLGVKAYGYQRVKTDARDAANLADLLRMGRLPEAWITPPEIRDLRELTRYRQKLVGLRSNCKDQVHAVLAKLGLAVPCSDLFGAWGRSWLDGLALPQPYAGKVTSLRQLTGELNTEITMLNEVIADLLAAHSGYQVIQRLPGIGPVLAAVIIAEIGDVTRFKTAAQLASWAGLTPKHRESDINVTRGRVTKQGSRLLRWALIEAIQRARAGSWPGDAKDAIIARRGKQARNIAKVAAARRLLTLVYYGLRDGQIRCLPEPAAAA

SEQ ID NO: 501083 - protein, 343 aa, unidentified
MEYGAIDLHTKESEIRIIDEHGAVVFERRIATTRTRLTDVFGSRAPLRILLESGTGSEWVARHLEGLGHAVVVADPNYAPMYGQRTRRIKTDRRDVAALAEANRLGVYRKAHRVSALQRDIRRRLRVRDQLVHVRRQAINLLRAQLRSEGVRVPTGAAETFAARFQASEASGAVRAAMAPLLELLAALAPLLGQAEHWTRHVAKADPVARRLMTAPGVGPVVALAFQATVDDVSRFATPGAVTSYLGLVPREDSSGERQRKGAITKAGPSRMRVLLIQSAWHLWRSPTGSATLHAWARRLGERRGRRIAVVALARRLARILWAMWRDGRDFEPARVGRLAVAA

SEQ ID NO: 501084 - protein, 440 aa, unidentified
MYPQLSLAGQSSPCPGDPTAEARPFHLGLDVSLHSGTACLLDHLGQEVVPRWAFHNNRPGAEELVGKVAELLQRHRATTLLVGMEATGIYGWHLACFLSEAAPLRPWAARVYVFNPYRTLNFKKALGDRGKTDWVDALVVAQWLRVGLLPAPFAVDAVYGPLQRLTRFRYHLSETLTREKIYTLGLLFLAFSEFGAAAPFKDTFGATSQAVLEDFSVDELATKPLEELADYVARKGRGQFAQPQEVAQTLQQAARDSYRLDKIHDGALRLVLSVSLTNVKTLAQQLREVDTVIARELKAIPLATCLLSVPGLGPVHAAGLLAEIQDIHRFKDHAALAKFAGLTWRTHQSGDFAAEETPLTKTGNTYLRYYLVEGANSVRVHEAEFQAYYQAKYREATKHHHRRAVTLTARKLVRLVDALLRNAQLYLPPEQRHGGRAVMA

SEQ ID NO: 501085 - protein, 339 aa, unidentified
MEALSPTRYGLYVGIDVSLKTLSVAWGESARAIGRAQTYPQTHAGYAALQRALRQTGVAPAAVVVVLEATSTYWMQLAVALWRAGYAVCVVNPKQAHHFRLACQQQTKTDAIDAQVLARLAASQALPRWQPSSTVGEAVYQRLVEHDQVVKLRQMARNELHALQQRDQPDPVVVARHQQRLDTFDQQLKQIKRELRALLKDSAWAPLFKCLCGITGIGLLGAAWLLVITEGFTTCESPEQLAAYLGLVPHRQDSGQRQGHKPLATTGHARARRTLYQACGSAIRYNPPIRDFYQRLRDRGKLVKVARCAATRKLVHQVFAIVRQSQAQARVLPPTPLTP

SEQ ID NO: 501086 - protein, 430 aa, unidentified
MEYVDGIRLCEFRQIKKEIRGSEEYLIVGIDVAKERHNAFFGTAIGRTLHKGLIFDNTVEGFRKLLTLTEALKVQHDLTKVVFGVEPTANYHKPLGEHLIKCGYQLVLVSAAAVKNNRSLLDGRWDKHDTKDSANVADLISQGKCLYYEYPDPRVRDMRNLLSLKRRLKKEEHGLRVRIRNQLLAQYFPEMDSWFGPAVSLAVISRCLDPSVIAGMEYDDFCRSVVPGKLTIAQQKRLQAIWRMAPESIGCRLGDAVPFEAKVMVSKLHQVRETIKAVENKIEDICVQFPEYPYLLSIPGFGPDVSSKLLGAIGDPFRFSSGKQVLKMAGFDLCANRSGKTSYSATPVISKQGKADLRYALYQAALVASYSNKDFMTYYTNKLRGRQREKGIGTKMRVKLAAKLLIIAWTLMKKKEPFDSKYLNKGDTQV

SEQ ID NO: 501087 - protein, 369 aa, unidentified
MGDVIDIFVGIDVAKVRNAIAIADGERGGEVRFLGEVDASEEGMRRVVKRIAAKHSRVQFCYEAGPTGYGLHRLITSLGHSCIVVAPSLVPRRPGDQVKTNRRDAISLAKLLRAGELTAVWVPDEGHEAMRDLVRGRAAAVETLRVHRQQVSAFMLKHGRIFPRKKGWTMRYLRWLQEQQFDHPAHQIVLQEMVEAVRLSKERVDRLEQTIEEFVPNWSLAPMVRALQALRGIDLIVAVTFVTEIGDVRRFESPRQLMGYLGLVPSERSTGATVRRGGITKAGNGRVRHMLVESAWTYRHPPRIGTKKLYLLQQVTPRVRDIAWKAQTRLTGRYRALSGRGKKTTVVCTAIARELVGFMWSVAREAQSD

SEQ ID NO: 501088 - protein, 393 aa, unidentified
MKEEFSFYVGVDWGVEFHQACILDAQGEKICQRRIEHSGPGMLEFCDFLQALTNGEASALAVAIEVPRGPIVEALLEHNYAVFSINPKQLDRFRDRHTVAGAKDDRRDAFVAADSLRTDQHCFRRVRSDHPDVIRIRELSRSEENVGIDLRRCVNQLSQLLLRYFPQLLRLCSTPDEPWLWALLELAPTPQRAAKLTEKRLKQLLGKHRIRRWTAEEVGEILSAPPLPLAAGSAEAISEHALLLLPQLRLLHLQRKQVADRTQQLLDHMAASTADFPESQEHRNIPVLLSLPGVGRIITATMLAEGAHILSLRDYHALRAHAGIAPVTKQSGKSRQVLMRYRCNQRLRNAFYHWARTSIQHDPRSKHHYAHLRQVGHNHGRALRGVADRLLCS

SEQ ID NO: 501089 - protein, 362 aa, unidentified
MKKHIFVGIDLGDKNSVARIGVDLEKSERFGFVNTRTGRQRLLDEVKRRAAQAGGATMVMAYEASSCGFVLRDQAQAAGIDCRVLAPTKMEKSVEQKRNKNDDRDADDVLEKLRGHVLAGNRLPTVWVPDLETRDDREVLRTRLALSERQTQVKTQIQMLLKRHGLEKPSDLGSTRSKPYRQWLESLSQWESLGWGTRQSLASLLRQLSGIEAEMENLEKRIRQLGSQPRHKPIVEALMKEKGVGLLAALVYRTEIGQASRFHRGRHVGKFVGLTPTSHESGQQNDRKGHISRQGPPRLRKVLCQASWVHVRYDPYSREAYQRLVAKNPKKKKIALVAVMRRLAVRLWHRMREAELQQQSPS

SEQ ID NO: 501090 - protein, 354 aa, unidentified
MSQKLDTSPAVIGIDIGKNSFHIVGHDHRGAIVLRQKWSRGQVETRLANLPPCLIGMEACVGAHHLSRKLQMLGHDARLMPAKYVRPYSKGQKNDFRDAEAIAEAVQRPTMKFVATKTADQLDLQALHRVRDRLVGQRTGVINQIRAFLLERGIAVRQGLRSLRSELPGILATRTDVLSPRMLRIIEDLAGDWRRLDERIEGLSSEIETLARQDKACERLMTVPGIGPIISSAMVAAIGTGDVFSKGRDFGAWLGLVPKQISTGDRTILGKISRRGNRYLRALFVQAAWVVLVRVKCWERYGLKSWIEAAKKRLHHNVLAIALANKLARIAWAVLNKGRAFECVKTEETASLPA

SEQ ID NO: 501091 - protein, 412 aa, unidentified
MEILYRACAGLDVHKETVVVCVRRSGAAGQVHQEVRTFGTMTRDLLALSDWLTTQEVTHVAMESTGVYWKPIFNILENQFQVILVNAQHIKHMPGRKTDVKDCEWIAQLLQLGLLRASFVPPRPVRELRDLTRQRAQLVQERARTANRIQKVLEDANLKLGSVATDILGVSGRDMLEAIVAGETDAEKLAELARQRLRAKIPALRLALEGRVTEHHRFLLRTLLDHVAHLETVIGQYSARIEAVLSPFEAAVDRLKTIPGVDRRAAEVIVAEIGKDMSQFSSDDHLSSWAGVCPGNDQSAGKRRSGRTTKGSRWLRTLLVPVAWAASRTKGSYFSAQYRRLAPRRGKKRALAALGHAILVIAYHLLKDGTTYQELGADFFEKLEPERLVRYLVRRLEKLGHKVTLEPREDAA

SEQ ID NO: 501092 - protein, 360 aa, unidentified
MFCERTSVGLDVHARSVVAAAIDGRSGEVFRARLTPSHAEVIEWVGKLPGPCAVVYEAGPTGFGLARALSAVGLRCQVAASSKLLRPAGDRVKTDARDALNLARLLRLDEVVPVRIPSAAEEAARDLVRIREAARADLMRARHRLSKLLLRHGIVYYDGKAWTERHDRWLHHQRFDAAPTQSAFEDAYEAVVLATARRARLDEKITALAADSEFSPLTRRLACLRGISTLTGFALAVEIGDWDRFTGASIGAYLGLVPSEYSSGTSRTQGAITKTGNSHVRRLLVEAAWHHRSTYRPGAVLRHRWDQAPAAARARAHAGNQRLHARWVGLNLRRKPAVIANVAVARELAGWCWSLAVLPD

SEQ ID NO: 501093 - protein, 356 aa, unidentified
MGKGSRVDFTGQHIYVGLDVHKRSWAVSILSQHCEHKTFTQPPEADKLVCYLRRQFPGAWYHSVYEAGYSGFWIHDQLKDQGIDSIVVNPADVPTKDKERRGKGDRTDCRKLARNLRNGELQGIYVPCRSKLEDRSLVRTRQSMVRKQTRCKNQIKSMLFFYGIHLPEETVMSHWSRRFIRWIETIQMDRASGNTALKIHLEELTHLRQIIASVNRAILALSRTEPYRAQVRLLRTIPGISTLTAMILLTELDDINRFRSLDELLSYAGLIPDTHQSGETTHTGGITHRRHPQLRWLLIEASWVAARKDPALMMAFHQYLKRMRKTRAIVKIGRKLLNRIRYVLKNQTEYVLCVIE

SEQ ID NO: 501094 - protein, 314 aa, unidentified
MILALRCVGIDVSKHRLDIFDDAIGTAESIANAPRPITEQVARWRCGDVFVVFEATGVYDRELAEQLHQAGIRFARINPARARDFARASGRLAKTDAIDARMLADFARVMLPQQDPAPEPARDALALLAKRRDQLVQMRAQEKNRRSEARDRTMIEGIGRLIDFLDAEIAMIEARIAAFIEAQAPIAEDARLIRSIPGVGPVACMQLIAQMPELGHIGPKQVAALAGLAPLNVDSGTHRGKRTIGGGRKRVRDALYMAALNAIRRSGSFRAFYQRLRTAGKPAKLALIAVARKLLTVLNAMLRDRKPYMAAPST

SEQ ID NO: 501095 - protein, 481 aa, unidentified
MGEYSEAFVAFDTSKTKHAVAIADGGRGGEVRFLGDISSSPAAVERLIRKLAGRYGKLHFCYEAGPTGYGLYRQIQTLGHACLVIAPALIPKRPGERVKTNRRDAVTLARLHRAGELTGVWVPDAVHEAVRDLVRAREAAADDLRRKRQQLLSFLLRHGRIYSAGGHWTLAHRRWLAKQAFEHAAQQIVFQEAIDAIEDALQRLRRLEQQLVLIVPNWSMASVVEAYQAMRGASFLVAVIFAAEIGDVRRFDTPRQLMSFLGLVPAESSTGDTVRRKGLTLAGNRRARRALVEAAWTYRYPARVSETLRARLDGLPKAVRDIAWKAQVRLCARYRRLSTTGKKLPVVVAAIAREMAAFLWGSAVRWRPCKAARLIPAAQRRGWSHGGELPSLVMWPGLLPDARPLDRGKPRDEDTEGGTQPADKSLINRRLQLHPQLCAVLSLPTPTSIPRPCREIVALPLTGDIRATSPTRTRSGSGTNW

SEQ ID NO: 501096 - protein, 356 aa, unidentified
MSQKLDNSPAVIGIDIGKNSFHVVGQNQRGVIVLRQKWSRGQVEARLANLPPCLIGMEACVGAHHLSRKLQALGHQARLMPAKYVRPYSKGQKNDYRDAEAIAEAVQRPTMKFVATKTADQLDLQALHRVRERFVSQRTGIINQIRAFMLERGIAVRQGLRFLRAELPGILATRTDVLSPRMLRVIEDLAGDWRQLDVRIEGLSSEIEALARQDTHCERLMTVPGVGPIISSAMVAAIGAGDAFSKGRDFGAWLGLVPKQLSTGDRTILGSISKRGNRYLRSLFVQAAWVVLVKIGPKHWDRYGLKSWIEAARKRLHHNVLAIALANKLARIAWAVLHKGCAFACIKTNEAASQPA

SEQ ID NO: 501097 - protein, 327 aa, unidentified
MMFIGIDISKEKIDLSWLRDQLTNKIKTKVFKNKHQDFLAIEKWLLNTTKSAANELVITLEPTGVYHEALMYFLHEQGFNIILANPGKAKKYADALNIIHKTDKSDATMLAHYGCAKHAVVSYWQPDALEVRELKALIRRLDALESNRQREVNRLEASEFSNVSARVCQSIKVTIAFLDDEIKQLKSDIDNHIDNEPDLKRNRKLLESIPGIGPVLSRELTYLFAAKKFNKAKEAAAYCGLIPRHNESGKLKGRTSISKLGPARIRCKLYMAAIVAGQWNKTIKRHKLTLINNGKTPMQAVCANMRKLIHICFGVIKNQEAFKLQES

SEQ ID NO: 501098 - protein, 340 aa, unidentified
MRAKSGKSFWLGVDLGQEILEVSLAAVGTPLERWRTLPLGRFDNTLSGLQEMIVWVGRQLPKGGRLAGICVESTGRLSFRFAEALASLEPLSPAVSIINPKRSLDFARSLGVGDKSDRIDAAILALFGVTYQPSVTMALPESYRRLRELGRLRERLQTELFGLENTLRDSDDAFVCQSLSRCIAPLRKEIERIEAEARRIVREDPQLARDVRLLDSIKGIGFLTAWILLAELGDLRHYSRTQIVARVGLYPRLYASGKSVWRKPRLVKGGGALVRKALYNAARSIFRSKDNTLKTYLDRLGDRNKSAMDCLAALMRKLLLIARSVLIQEKPYDPHYRQNP

SEQ ID NO: 501099 - protein, 332 aa, unidentified
MYYVGIDLHKRDLVIAVEDERGPVGKPRRFACRDEAAIVAHLSALRPFRAVIEASASYRWLYDRLKPLGEVILAHPLRLRASIARPAKTDKLDAALLAHLLRMGQIPEAYAPPAAYQELRDLTRARARLSRSATEAKNHLHGLLAARNIHPPYRNPFGVRGRRWMRSLELGVVGNLERDELIGRLEHYDAQRDRLDGALEESAASFPQIESLQDIRGIGTYTALLVVAEIGEPERFSEPGQVASYAGLATRVYQSGGHDYHGHITRQGSPWLRWVLVQAAMKAIGRDRRLANFYERVRKRSSRHIARVAVARKLAEICWIRLRRWHRERAAA

SEQ ID NO: 501100 - protein, 421 aa, unidentified
MSRSQRIVGFDCGEDEHSAVLLDAAGEFEERHGVANERGQIQELLAELLLGVRPEEQLVVVVESKRSHGRIVSDVAVELGCDLRQVNTVALNHYRDLEGQPRKDDEWDAYLAARMVFLKMGGCREAIKATEEERTLSRLTRTHRRLVDERRKHLARLRAVLLELAPEMLHSSWEGPKPGRKAMLYLLERWPGFEGLERAQLRSIEKILRRCRYGPRATRVAKLIRKMARGISIAAEERHAFTLELDLLAQQIRFCDESRDRLRAEIVHRIERHPVGQKLLEMQGNGPVITGVLVSELLPVARTSTEPKCATYAGVTPLSRKSGKSLDNDKLAQGVNPRVLYALYTSSVVAVKHSAIDRAYYQKKLRGYAGHPKPHVAAFIALSRQRHKLVFKLMTTDVRYDKEILIARHLERIEQSRKAAA

SEQ ID NO: 501101 - protein, 345 aa, unidentified
MQNMYYIGLDVHKRTISYCVKDGSGAIHAQGTIPATRFDLDRWMRTLPQPWTAAMEATVFTGWIYDHLQPHAAALKVAHPLMLRAIAAAKKKNDRVDASKICDCLRCDFLPECYMASTAIRERRRTLRYRNLLVRQMVQMKNKIGMLLMEAGVSYNKQRLHKASYFRELLTTNPDIDEGLCSLLRLCRETVVRLQKTESALVRSLERDSLLMDRVERLMTIPAVGPITALTWALEVGDVQRFSSIKKAISYCGLCGAEKSSANTVQRTPLSKQRNKHLQTTLIEAAKMAPRNSSELAMLYDKEKQKGHANRATLAVARKLVAYLMAVDRGQRDFQVLEASHCTAA

SEQ ID NO: 501102 - protein, 364 aa, unidentified
MKLVQDIANRVVRYIGMDVHKDSTTAAVVDAQGKLVMEVTLRTEGSVLVDFLRGLRGRLQLTFEEGTYSAWLYTLLSPQVEKLVVCNPRQNALLKQGNKNDRLDARKLAELLRLGSLTAVYHGSPGLRTLKELAASYATLVSDGTRVMNRLKALYRGRGIGCGGTQVYSPRHRDRWLEQLREPGARQRAKLLYQELDLLLQLRPQARRALLAESRQHSAQKILRTIPGLGPIRVALLLALIQTPHRFRNKRHLWGYGGLGLLMRGSAQYRLQQGELVVSAKGLRVRGLNPAHNARLKEIFKGAALVASRRPGPLREAYERCLREGMKEHLARLTLARKIATLVLTLWKRGERFDAPRLSREQAA

SEQ ID NO: 501103 - protein, 412 aa, unidentified
MLKIVYPICCGIDVHKTFVVACVASTNDKLVTTYQIKRFSTYTKGLRELSEWLALNNCKDVCMESTGKYWHPIYNILETSCEVVLAHPKYLKAIRGKKTDKKDAKWIADVFKHDLVSGSFIPPADIRELRDLMRYRIKLTSYTTGEKNRAQNCLTTSNIQLDHAFSDVFGKSATAILDHMLSHPDNLNFDVSPFVDRRCKTPIEEIQLSIEGKLSPEQTEKLKIIRSHMDNLAVCKTNLESAILNLAEQFLPQISLVSTVPGIREFSAIAVIAEIGTDMTVFPTAKHLCSWAGVAPQCNESGGKKKSSRISRAGVYIKPLLVQCANACVKSNKHPEIKNRYLAIKKRRGHKKAIIAVARMMLTAIYNILRKNEAYNPELYRKAYIVPINREDQAILLLQRRGYNISKEEIPA

SEQ ID NO: 501104 - protein, 313 aa, unidentified
MRSSFIGIDISKNTLDVHVLPEDKRYSYPYEPQKIKALIRKLKQLKPALIVMEATGGYELAVASKFAEAKLPVAVVNPRQIRDYARAIGKLAKTDAIDAYVIARFAQDVRPEARQQLTLKEQQLKELIMRRQQLIDMRTAEKNRLSRVFSKEVIKGIQKIIKTLDEQIQALDEQLDREIKGTPAWEHKIELITSVPGIGSNTAHTLLFCLPELGKLNRRQIAALVGVAPMNRDSGLMRGKRSIAGGRAAVRKALHMPILAAATRWNKKLMLFYNQLLSKGKKHRIAITACMRKLVILLNTMLKNDRAYDPKFC

SEQ ID NO: 501105 - protein, 428 aa, unidentified
MTAQRECSEEVARVAIDVAKAWNAVLMETAAGRRQRFRVANNRSDHDRLVQLLKNQNVRCQIALEPTGNYHRPLAHRLLSEGFEVYLVSSVAAARFREAMFNSWDKNDPKDAAVILELLKQGKVQHYHDPVAVGIHDLQEISKTYVQVTMARTRLQHSILTHHLPLYWPEFGRYWHSSRADWFVRFLIRFPVPTAVRRLDREAFIQEAWPLVGRKVNKRAQLDEIYELAGETIALPIDPGSFAIQAFRLQLERYLSLNGLRKRLEEWTEEALAASEDFLLLRTIPGIGPVLALIILAEAGDLRRFGHHRQFLKFCGLDLAKSQSGASRGREKLSKRGNARLRYAFWMAGTVAVRMRENSFREKYQRYICSDPTDPDLKRKALTAVMAKMARVAYAVVKTKTPYRTYFEAAVPSGSIPLSRAVEAVRTS

SEQ ID NO: 501106 - protein, 338 aa, unidentified
MFYVGLDIHVKHITVCVLDDCGKVYRRGQVKTIALMMDVLESLPGPFQVCYEASTGYGCYYEVLSKAANHVAVAHPGLLKWIFRSKQKNDRRDAEKLAKLLYVGEVPTVHVPTPQVRAWRELITFRRRLIEKRTRAKNGIRGLLRSLTIQAPRKPGLWTRVGMAWLKQFPFENFMHALKRNMLVEEITTLSEQIRRVEKELERYAANSPAVQLLRTIPGVGPRTAEAVAAFIDNPERFPHSKKIGAYFGLVPSQDQSGNTNHLGHITKEGSATVRQMVTEAVWQAVRRSPTVKAYLERVQRGEKERRKIAIVATAHYLVRVMWSMLKHGKPWQETVVA

SEQ ID NO: 501107 - protein, 385 aa, unidentified
MTQPSQVSSFIPRDHDIFGGLDVDKKSIAVTFTDHGTMRKSLRLPYSTEQLLNYTRKHFPGQRVAFVYEAGPTGFGLHDELRAANHPCLVVAPSMVPTAPGQRVKTNRLDSNKLSEGLRGGQLRSIHVPATSYRELRHLVQLRDTQVAELRATKCRIKSLLLYEGIPFPAANGKWSGRVLRKLEALPCSAVVRFKLDQLIDALQFHFESAAKVQKQIRHYTQNDPELRQCISFIASLPGVGSITATHALARLGDWRQIKNVRQIAGFLGLVSSEHSTGDKQNRGAITHIGDSRLRNKLIQCAWVAIRKDPELRAFYRSVYQRQPKKVAARKAIVAVARKLTTRMYAVLKEQRPFVIRPDSSVAPLTAEETVGPRERLDAAQNEQL

SEQ ID NO: 501108 - protein, 342 aa, unidentified
MADVAVIGIDIGKTSFHLVAVDASGAIQWKKKLSRSQLMRHMEGSPTCLVGMEACCGAHHLARELSSLGHDVRLMAPQFVKPFLKSNKNDYLDAEAIAEAVQRPTMRFVPAKSVDQLDLQALHRVRERLVSRRTAVINQIRAFLLERGIVFRAGRRHMAREMPLLFTDERTTLSPRMRLILQQLWDEWRNLEADIASVTKEIETIAAADEGCRRLLAIPGVGPLVATALVAAVADGTGFKRGRDLAAWLGLVPRQHSTGGRSTLLGMSKRGNSHLRRLFIHGARSASLHMNRERGHGPWLSQLEMRTHKNIAVVALANKIVRISWAVLARQEEYRPPVPIVA

SEQ ID NO: 501109 - protein, 345 aa, unidentified
MSKIIVSIGIDMAMDKFDACIMVGERGSHAPIKGTHTFPNTAAGFKEFLAWMLARAVAGAVFKVTMEATGSYYERLAYYLHSKGIEVSVEVPNKVKYYAKSLNTKGKNDKKDAKTIASLGLSRDLRIWKPMEKDLRSLRDLMREILSLKDCHTAAKNQMHAMDHSNDKLAAVSKQKQKQLDFYTSSIADLEAEVKALLKRNAGLKKRIENVATIKGVGIHTALVVIAETGGFELFSSIRQVVSYSGLDPIENSSGKHVGKTRISKNGSKRLRTCLYMPSLSAGRHDKRMKDHKDRIIERNPTIKMKGQVATMRKLLVLIYTLWKTGEKYDPDYRWSGAASGSGEN

SEQ ID NO: 501110 - protein, 350 aa, unidentified
MTEAYDGRQVVGMDLHRRRSVLVRMTADGKRLETARITNSAAELRRVIAKAGHHPTVVLEATYGWYWAADELAAAGAEVHLAHPLGVKAFAYRRVKNDEKDAGDLADLLRMGRLAEAWIAPPEVRELRELTRYRIKLVRIRSSGKEQVHAVLAKLGIPVTCSDLFGTWGSAWLDGLALPQPYAGKVASLRELIGWLTGEIGLLDAVIADLLGSWPPYYAVRALPGLGPVLAAVAVAEIGDISRFPSPGRLCSWAGLTPRHRESDLKVARGRLTKQGSRILRWAMVEAIQHQPAASPARELKDRIIARRGAQARNIAKAAAARKLLTCVFYALRDGQVRSLAAPGRAAEAG

SEQ ID NO: 501111 - protein, 335 aa, unidentified
MHYLYYVGLDVSKETFDASLVAFEDANEMAHRKFANSRKGICSCLHWVEKRHGILLDDVSFCAEDMGSYISEMAVCASDRTLTFNFSLISPLVIKYSMGIARGKTDRVDARRIAEYAITHYRKIALYLPAEKELCQLRTWLILRAHLAKQRVAKLVLLEKLDYKEKFADVSIQRSMLQEEIAYAETHMKTIEREMKELIAADSNICRNYKLLTSIKGVGPITAIVMLCSTLNFTKITDHRKFACYCGLAPFEHSSGTSVRGGCHTSSMANRDIKVQLNRSALIAIRCDPQLKAYYERKVAEGKHKFSVLNAVRAKIAARCFAVVRRGTPYVALQI

SEQ ID NO: 501112 - protein, 343 aa, unidentified
MNVFIGLDVSLASTAICVLGPQGKIVEEVQAESEPEALVRAIGALPYSIDAIGLEAGPLSQWLSKGMEEASFDVVMMETRLVKAALKAMPIKTDRRDAQGIARLLQLGWYRPVHRKSVSSQEIRALLTARKSVQQAIINLELSMRGVLRNFGLKLGHVTRIRYEARVRELVEQNEILSASTEALLRARAQLRAELAELDAKIASLAKHDDVCRLMMTMPGVGPIVALTVKSAIDDPTRFARSKDVGPWAGLTPRRTQSGEMDIVGQITRAGDRALRAALYQAAMILMHRGSPNWLQAWALRVAHRRGSKRALIALARRIGVVLHRMWRDGTPFRYAPSPTATV

SEQ ID NO: 501113 - protein, 347 aa, unidentified
MLYAGLDLSRQRLDVHLLDEDGRTIEVTAVRPDADALQSLVARMDRYGQPVSAAIESMNGARFVHDVLERAGWAVEIADAQKVKGLAPLAAKTDRIDAWVLAELSRRELVPAIWLPDPANRAERERARFRLHLVRHRTALKNRIHATLIAFGHPVPVSDLFGVSGRELLDRLAIPDPWATTLATSLRFVDELDREIDACEAELRAIGADHPYLPLLRTVPGIAWVLGYTIAAEIGDISRFSSPKKLTGYTGLCPIVRQSGGRDDRGPLAKNGPTYLRWALIEAATHAARHPMYKDRYERNKKRLGRQRGSKVARVDIARELATAIWHMLSKNEPFAPGRSPATPLVA

SEQ ID NO: 501114 - protein, 347 aa, unidentified
MSRISRIGLDTSKAVFTLHCVDEADQVVLRLNLRRAELLRYFRKLPPTMVAMEACGSSHHWARKLSELGHDVRLIPPQYVKPYLKRGKNDRNDAEAICEAAGRPGMRFVVPKSAERQADAMVLKVRETLVGQRTQLVNTLRGHASEFGLIAPKGRCNITDLLAAVEADGEVPPIAKAMMALLGREIDRLEATIKEIEVQVHAMHKLNELSQLLAGVPGIGPIIALTMTLEIDAAAFESGRHLAAWLGLTPREHSTAGRQRMGGISRAGHERLRALLVSGAMSVIRVARQPGNKLATPWLLNLLGKKPDKLVAVALANKMARIVWAMMTRGTPYRRQAAGGACTPVIS

SEQ ID NO: 501115 - protein, 372 aa, unidentified
MAVKKSSKKKSEQLSEKTMKDGVAAIGVDLSDRTGKFYAIDDEGKKIAEGTIALRTPDLERWAMSIARTVIAIEAGTHSLWISRLLTRCGHEVIVANPVKVALITKNVQKTDPVDAEYLARLARLDRKLLFPIQHRGEQAQIDLQVIRTRDVAVQVRSKLISHLRGAVKSFGARLSKCSTEAFVNTTREEIPEALKTALDPMFDQIDRLTKTINGYERQVLKLVEQRYPEVERVTQIKGVGALTGLAFVLVLEDARRFASSRSVGPYLGLTSKKDQSGDSDPQRGITKAGNRLLRRLLVQSAHYIQGPFGEDSDLRRHGEKIAARGGKRAKKRATIAVARKLSVLMHRLWVSGETYEPLRNYFNSVPVTKAA

SEQ ID NO: 501116 - protein, 438 aa, unidentified
MWRNSQWLLSIFQKGALPVKVVYQTCCGIDVHKSFLVATIIKTTSGVQPSYQKKRFSTFNNSILEFKQWLLDHSCRDVCMESTGKYWIPVFNLLEDELNVTIANPKWVKAVKGNKDDTRDSKWIGDLFRLGLVPGSYIPCKQIRILREFTRYRYKLTSCRSSEKNRFQNALTVCNVALDSVVSDIFGKSATSVIDYLLEQSTGSINHEEISSRLLRSLKKKSESVIESIEGYQMTDAQKYRMRLVHAHMDYITSTISEIDSMIDSLVEPYENAVQLLCTIPGVDRSSAITILSEIGTDMTQFSNSKRLCCWAGLTPSNNESAGKKKSVRITRAGVYLKPALVQVAHAAVKSNKSPYYKAKYERIMKRRGKKRAIIAVARMILTAVYHMLSTGEAWNPTDLYKIDMPEPLKNKQKEKAVKQAMKLLIAEGLIKESQLAS

SEQ ID NO: 501117 - protein, 478 aa, unidentified
MNGKGRKAKNQANINNSINVLSQEELGRRIAAVEADMKASTWKDLEVGGKFDKNAKLTFISDDMLIVGCDIGSETHYMRAIDTRGRELSKDAFSFSNNAEGFSSAKAWAMQIAAEHGKKQIVLGLEPTGHYWFCLTAWMITNGVSVVQVNPYAVKQTKELEDNSQLKDDRKDPKLIANLVKDGNYGMPYLPEDVYAELRRLSMLRDQLTEDRIRYVNRLHREMKIYFPEYMDAFGKLDGVFTLMILKKAPFPADILELGADGLREIWSEAKLRGRGYSRAEHIVKFASESVGLKHGTGGSKEAVRCFVEQILYLTAKLDEIEENLHQKCREIPYAENLLEIEGIGENILAGILAEMGDVRRFDDVKETQKLSGLGLVACSSGKHKGETKISHRGRKRLRYWLFQAARSAVSHAEEFKTLHVYYTTRPDNPLKKMQSLIVIACKILRVIFTILRTGQKYDSAKMLRDIKHPSVAAVQAA

SEQ ID NO: 501118 - protein, 322 aa, unidentified
MTKETVYVGVDVAKDTLGVAVSGSQETRQFTNDHEGIVQAVHYLASLQPAGIILEATGNLEMPLAAALQVKSLPVVIINPRQVRDFARATGALAKTDAIDARILALFGLRIKPEVRPLPDKQAREMGSLLTRRRQLMEMLVAERNRLFRADEDVRPNIKNHIKWLEEALSDINDDLERRIQSSPSWHEKDNLLRSVPGIGKVVSSTLLIELPELGTINRRKIAALVGVAPLNRDSGTMRGKRTVWGGRAALRATLYMAALVATKYNPIIANFYRRLLDAGKVKKAALVACMRKLLTIINAMMRTMTMWNPELINRYLVMEAK

SEQ ID NO: 501119 - protein, 422 aa, unidentified
MSKRRNKVCGADVHRDLIVATIRDDDDLLFQNEFGTTHAELKRFRDWLVANNCKQVAFEATGIYWLPIYDFLSPSIDTIVANPWKIKNIPKDKTDSKDSQWIASLCLNGQIKRSRILSKNDRDLRTMTRARSGYVKTRTQFRNRIHKYLASNGIKLSSCISDIFGESGRYILGGLVEGRSIDTILDGIPSGRVRKKRDLIKAALGSGLDGISRMLIKDTMDLLDHLETKVEAASHEVINKLQTKSKDLAIVMSIPGIGFVSGSVILAEIGDYHDFKTPEQLAKWCGLSPGENESAGKRRPCGITKQGSKYLRTMLVQIAHVVAGKSNTKLSRFFQRLSKRKEYNVAITALARKLICLVYHLLINQELYQEENCERRKSKPAKSDLTSSYSPEDQLEDKVAAIVDAFYHLKAHGRKRSSDGSG

SEQ ID NO: 501120 - protein, 339 aa, unidentified
MLYAGLDYHLRTSDLCIVNEDGKVVKRQRIKGRFGEVAEELSRLDQPVEVVFEATGGYGPLHEKLSQVARRVVMAHPAALALIWKSKRKNDRIDAQKLAKLLYLDAVPEAHVPAAATRQWRRLIELRRSLVRRRAALKNQVHALLRTCGIATPSTAKSLFGRQGIAWLLQQELDEASTLERSVLIEQMRSVKEQLNAVEKTLAKTSDQEPRVTLLKTIPGVGRRTAEAFVAYVDRIDRFGSSGKIGSYFGLVPCEDSSAGRERMGHITKQGPPAMRQLLVEAAWMAIRKSPTLRRRHEQMCHEDPDRRKIAIVGLARHLSQVMAAMLRDNQPWREEMAS

SEQ ID NO: 501121 - protein, 343 aa, unidentified
MDYFAGLDVSVKETSVCIVDDAGKIVREARVASEPEALLQVLTNTIYRFKRVGLEAGPLSQWLYSVLAEAGLPVICVETRHMRAVLKAQINKTDRNDARGIAQMMRVGLYRPVHVKTLRSQKLRMLLTHRKLLQSKAIAIENDLRATLRNFGLKVGMVGTVKFEGRIKELVENLPDVAVLVEPLLVVRRVLREQVGILHRRLLAIVRDDDVCRRLMTVPGVGPVVALTYRATVDVPARFRNSKAVGAVFGLTPSKYQSGENERTGAISRCGDEMMRMMLYEAAQSMLVRSAKWSWLKAWAMKIARHRGIKKAIVALARRLAVIMHRIWVDGSEFRWTREVAAA

SEQ ID NO: 501122 - protein, 343 aa, unidentified
MKLTRIGVDVAKQVFQVHGVDRHEQPVWRRRLSRERWLRAVSEVAEPGCDIGMEACGGAHHWARQLQALGYRVKLIAPQFVKPYVKSNKNDANDAEAICEAMSRPSMRFVSVKSVAQQDLQAMHRVRASLVEQRTAKGNQIRGLVAEYGLVAPKEIASLRQAIPCWLEDAENGLSILFRLVLEGLWRDLRTMDDRVSELDGQINEAAKADPAARRLQQLRGVGPVVATALIACVGDATQFANGRQMAASLGLTPRQHSSGCRERLLGISKRGDAYMRSLLVHGARAMLRTAPRHDDPLSRWVTRLSARSHPNVACVAMANKTARMAWAMLRHGTNYQPTLAAA

SEQ ID NO: 501123 - protein, 417 aa, unidentified
MATVEIVYPTCCGIDVHKNFLVACVAKTDEHGHTSHVMKRFSTNSGDLRKLADWLVAHNCKDVCMESTGKYWISVFNILEKTCNVCLTHPKYVKAIKGKKTDKKDAKWIVELFKCDLVRSSFIPPFDIRQLRDLCRYHAKLTYMMTSEKNRSQNCLTTCNFKLDAVFSDVFGKSASRILDNVIALGNSDFEIAPLLHKGCKATIEEVQAALDGELTFAQAEKLKIIRKHMENLENLKDALESLIYKLAEQYQSEITLLLSVPGISSPLTAIRILAEIGNDMSVFETAKKLCSWAGVTPQNNESAGKKKTTRISRAGAYLKPLLVQIALAISQSAKHPEIRDKYQALKKRRGHKKAVIAIARRLLTAIWHMLSKSELYNADLYRKADEPPANRVLTPEQAFALLRSKGYQIAEPEPAA

SEQ ID NO: 501124 - protein, 434 aa, unidentified
MTATDSSARPRILVAIDIAKAKHEVLVELPTGKRRKMIVHNQLSDFRQLAAYLKRLEGALEIALEPTADYHRNLAYFLKVQGFAVKLVSSIAVARTREALHNSWDKNDPKDAQVILHLLRNGNTQYFYDPVIEQTNDLQELSKTHFQVSLRKTRVQHSLLNHYLPLYFPEAERFLSTSRSSWFTRLLFEFPTPQAITQLTENEFLERGSQLLRRKQSKAAVLRALYAKAQESMALPVPLDSQAIATFRLTLAQHLELCRIRTELEETAHELLQSQLDHQILRSVPGVGPIIALTVLAEAGDLRRFGHERQFLKFCGLDLATSQSGAYRGRTQLSKRGNSRLRSALWMAARRATHMQENTFRQKFSRYLRADTTNTDLKRKAYTACTAKMARTIYGLIKHQQFYRAYREDAIPEPGGRTRSHGPLRQAASGGLTS

SEQ ID NO: 501125 - protein, 357 aa, unidentified
MESTITAPSTQPQVTVGVDTHKHVHVAHAVDQLGRPLGSHRIAVNALGYRELVSWARRYGPICQVGIEGPGHYGAGLARHLRAEGIHVTEVGRPKKQRRARYGKTDEHDAAGAAAIVLAGEALGEPKTADGPAEMVRILRVARASAVRARGKAFLALKDLIVTALEELREELSGVYRKTLIYACRMLVIPEMPCTPTDATKIALKSLAARCYELDAETERLGHQIDVLTAAAVPALRSVYGVGPDCAATLLSATGDNPHRLRSDAAFAKLCGVSPIEASSGKVVRHRLNRGGNRDANRALHTILVVRMRRHQPTRYYIARRLADGKTRKEAMRCLKRYIAREVFHALQESSETAPPT

SEQ ID NO: 501126 - protein, 334 aa, unidentified
MEESSVCVVDGAGRIVRETKVASEPEALVRFFRGLGIRMIRIGLEAGPLSQWLHAGLVAAGFEGVLLETRHVKAALSAMVNKTDRKDARGIAQLLRMGWFRPVHAKSPGAQEVRALLVARKLLQTKLLDVESSIRGILRGFGLKMGAVSKGRFVARVRELAAGHPMLERITEPMLRAREALRTEYARLHGEMLAIAKPDPVCRRLMTAPGVGALVALTFKSAVDDPGRFTRSRALGAYFGLTPKKYQSGEKDVTGAISRVGDPMVRVTLYEAANIMLSRVTRFSSLKRWALDVAKRRGLKRAKVALARKLATVLHRIWIDGTTFHWGKQADAAV

SEQ ID NO: 501127 - protein, 353 aa, unidentified
MTTHYIGLDVHCQFTEFAVVTSSGRLTKRGQCPTTIPALVAAIESVKRPRYVAFEESPMAEWLYRNLLASADGVTACEPRRNRWIAQEGEKDDPLDAAKVAQLHRGGYLKAVHHPESEERSILKGHVGVYHDRVRQRVRTANRIIAQFRSHGVVIQEADFATPGQRQGLLRRLPADPLLQKDLDVLWESYDLTAFHAGELERSLRQLVRNYEILRRFQAVPGIGPVWATTFYVYVDTPWRFRSKEALWKYLGIGLERRHSGNGPVQVRVSKSANRRLKWMILSAAESAIRSLDSPFAAHYARGRNAGLPHHSARRNVARSLAATLWGMWKSGDKYHPEWVGRGATVGAGSGSR

SEQ ID NO: 501128 - protein, 334 aa, unidentified
MDTHADVHVAAALDPIGGLLGVQEFPATPEGYGRLLGWLGGFGTVSLVGIEGTGSYGAGLARHITWAGVRVVEVDRSDRQDRRRQGKSDPLDAISAARAAQSGRARGASKGRDGAVEAIRTVMVVKRTARSERTQTINQARSLVLTGPDDIRVRFIHHTTAGLVAGLAGLRPRPGATVGYATRIALRELGRRAQFLGGQLASLDELIIPLLTAHAPGLLALYGVGPDTAALLLIAAGDHPERLRSEAAWAHLCGAAPIPASSGKTVRHRLNPGGDRQANHALWRIVITRMSSHPPTRAYVERRVKEGLSKTEIIRCLKRYVAREVYPHLRPPAR

SEQ ID NO: 501129 - protein, 323 aa, unidentified
MFYIGVDISKSRLHIAFFKDGAWRKLEVANEAKSIQRWIKSLGDGAVQVIFEATGSYGAKLLWLLHLGGVPFTVLNPSQSKGFARVQNNHSQTDERDAVSLAEYGACIRPEPSVAAAQQWEKLRQARRALRQMKKYERMLGNQLHALEQFPFQEPTAKTALSQTLAAVRGQMTALEAAICDLTDDEMGEMARKIATVNGIGPHTARELVISTNGFRHFEHAKQPAKFVGIAPATKSSGSSVRKKGRISRSGDPGVRGALYMAALSAIRCNNACKELYKRLKDKGKSSKQALVAVAHKLLRQAFAVAKSMQDFDNDYYLKFQRT

SEQ ID NO: 501130 - protein, 347 aa, unidentified
MYQDNVIALDLAKNVIQVCILDKQNEVKTNRELRRQQVLNWLAKQAPSIVAMEACGSAHYWAKQARALGHQPILLSARFVKKFVEGHKTDKNDALAIGIAARQPNLKPVSLKSDDQLALQAMEKIRKHYQDTAIATSNLVRAIAFEFGIVIPKGEKAFRERLPDILEDAENGLPMMIREPLHQQYQFWISLKQQVRQAEKQLRVQLNTHEQCNELQKLDGVGPVNALNLYLALGTRGEAFKNGREAAACIGLTPKQHSSGGKVVMLGISRRIAKKQLRANLIQGALAKIKIVAKRAPRNTREVWMKQLIERRGLRRAAVALANKTVRMAWAMVHYQQPYQAPESVTI

SEQ ID NO: 501131 - protein, 1207 aa, unidentified
MTERQRRCRVAIGVDTHKHVHVGVALDELGGRLGDITIPVDRAGYERLLQWATTLGKILAFGIEGTGSYGAALASLARRRGHTVIEVARHDRRERRLQGKSDVLDAENAAGAVLSGAAKATPKSADGVIEMLRQLKVAKDTAVKARTAAMITLKALIVTAPPELREELQSLAKMQLVDRCAGLRPGSLETPLAAAKHALRALARRWRDLNVEIKEHEALLEQLTRQVAPQLLDAFGIAADTAAEVLIVAGDNPERIRTEAAWARLCGVAPLPASSGTTTRHPLEPRRPSPSQRCSLPDGHRSHATPRSHPHLRRAPDGRRSDEGGDHPLPEEVLGSGDLGVDEATPPAHARCPHAGLTPIGASTRSPRRSSGSTRPSSSAGVVRGRASTTSSTPPSSGSTGSTIADSSNPSVTSRLLSSKLPTTERRSPATLPDSSNRASGEPGTVHLRRPGGGPLPTSKAPTVFRPRLKASVRPWPLWLLTTTPTPRAISPLTGRATACHRAVLRPVVSRRSIKLAERTTHHRIRCVTRIQPNAGPWRPPSMWTWCRRLVRTARFCWLRPTRRIRLTWERRWTRPCNSEPGIVSASYGYSESADEIGLDVHYNHPGVMIAVASGDGGYAGSVDCPGTQYPAASPYVTAVGGTVLSSGGPGNWSETTWPSSGSGCSVYESKPNWQSDPGCLNRTVADVAAVATNVSICDTYKTGGRWGLGAGTSVAAPITAGVYALAGQEQRLSGASYSYGHAAELTDITSGSNGSCGGSYLCTAGVGYDGPTGNGSPLGAAGFGQDFKWAGIVDNASNGAQALSADGSTVFITGIDVSNGPQNDHVTTAFDAASGSELWVQHYDDPWGYAAGAAAITVSPDSSEVFVTGFSDSKTGFGYPNITTVAYDAHTGAQLWSARFSRPGEGVFVAVSPDGSRVFVTGLSCILPTCWNQFTTIAYDPLSGAQLWLKTYGGNGFQSIPYLVTVSPDSTRVFVTGSHQDLANYVGATVAYDAGTGSQLWARGYKQEVGETLAVSPDGTKLFVTGSGSPYPTVIAHDAATGKQLWAKPYSSSAYSDAVGIVVNPSGAAVYVTGKAPSPTGIVQVTTVAFDTSTGRRLWRSEYGVNAYTGAGGTPTPIITSGDGSLVYVLGSASPDQASSPDYVTLTYEAGSGQQDAVRLYAGPPDDGCFGTSIARSPDDSRLFSAGFCNGISGPSFIATVAYGIP

SEQ ID NO: 501132 - protein, 288 aa, unidentified
MKITTVGLDLAKSVFQVHAISNTGDVVVRRSLRRAQVIPFFTKLPPCLIGMEACGTSHHWARELVALGHEVRLMPPAYVKPYVKRGKSDAGDAEAICEAVTRPTMRFVPIKSVEQQAALALHRTRDLLVRQRTQVVNMIRGLLAEFGIDIPKGITHALAFVRRAVAGDAHEVPDLATKVIGALAEQAIEVQGRIRQLERDLLAWYRSNDLARRIATVPGVGLLGATALAATVTDPTHFRSGRQFAAWLGLTPLNNSSGGKERLGRISKMGDQSPAASPGRRHDLTRQA

SEQ ID NO: 501133 - protein, 360 aa, unidentified
MSKMQSFIAKDKKIFVGLEDSKRTWKVAVRSEKMLIHQTCMNSDYSSLKGYFTNKFPGCTIKVMYEAGFHGFWLHDLLRKDGISCIVVPPHTVTEEKTSKVKTDKRDARRLAQNLENDDYKSCFVPDRERREDRQISRTLEDVQIDIVRTRNRIWKMLDFHGIATQIGNKIPTKKDICNLRELKVSEKIAIALHSYIAQLEFLWKQQISLRNQLREMTKKDRYKKTYEIIHRVPGIGWFTAIRLVLEWGDDLSRFANKRKIASFIGLTGREYSTGEIVRKGSLTGLGHKRCRTWLIECVWVALRHDPVLKDKFLAIVRNTGSKKKAIVAVARKLVGRILYCVNNNQPYIVGLVAAGNEPA

SEQ ID NO: 501134 - protein, 343 aa, unidentified
MYYIGLDVHKRTISYCVKDAAGQVHQEGKIGSTRRELDTWIKTLPQPRMMAMEATIFTGWIYDYLLPHADKVKVAHPLMLRAIAAAKKKNDKVDAGKIADCLRCDFLPECHMASTEIRDRRRTLRYRNLVLKQMVQMKNRVSGLLMETGVSYSKQRLHKLGYFTELMSDNDEVNESIRPLLKLSRETIVRSQRLDYALINSLERDPLLAERLKRLRTIPGVGPITALTWALEIGDVSRFQSIKQAISYCGLCSAERSSADKEMRMPISKQRNKHIQQTLVEAAKLAPRYSHELALVYERERQRGNKNRATLAVARKMVAYMLAVERRRQNFVLKGEFSGTAAA

SEQ ID NO: 501135 - protein, 386 aa, unidentified
MPQLNDLSRSLVTLEQDATLIAVIEMGQSSWLVAGIVPGVERQPLKKLAVDESALLKLLHRWREEAEQAGHKIKRIAVAFEAGRDGFWLARWLRARDIEVHVIHASSVAVSREHRRAKTDRLDTELLKRVFLGWLRGERHHCKMVAIPTIKDEDGKRPNRERESLVGEQSRIINRIKATLVRLGIRGFNPKLKKAAERLEGLRTPEGEPIPPNTLSELHRDMERRRLVRDQIRQIESARLDHLEHEPGEGAHAMVRLLARVMGIGIETADMLVQEVLSRNLRDRRAVARYAGLTGSPDESGKKRREKGLARSGNPRVRRGMIQLAWRFLMFQKDSALAQWFRARTENARGTRKTMIVALARKLLIALWRLVRDGVVPDGVILRPAQ

SEQ ID NO: 501136 - protein, 348 aa, unidentified
MKSSEYWIGVDLHSRVIQVCVLDARGELVVEDRCMGGGLAEGQKLVRELALRFAGAQVAVEALGCNRWFVAACQEVGLQVTVANAAKLQLKMAGRKTDRRDAFELARRLRLGDITRNAKAYHPTDDEYGLRQLLRRRHGLVQSRTALVAQIRAMLRSYRTPQPRGDLYGKQALKSLRAIELANPLETAVLRTLIDALEALHAGVMSLDRLVAIESKKDAPAVLKLLPYVGPLTATTLVAELGDVHRFKNSKAVGSYAGLVPRVIESGERSYHGPLVNHGNRELRYVLGEWAVQLLARHELVKRWAQPRLRGSAKNKVRVALARRLLVGVWHMLRTGEAFNLERCLALS

SEQ ID NO: 501137 - protein, 456 aa, unidentified
MTKGKKKQKSIQVREDMPPINRNAGGIDVGASEMWVSVPPDRDAEPVKQYAACTRDLYAMADWLKHCGIETVAMESTGVYWIPVFQVLEERGIRVLLVNAKYAKNVSGRKSDMLDCQWLRMLHPYGLLAGSFQPAAEIGVLRSYLRQRQTLIEYAAAHIQHMQKALTQMNLQLAHVLSDVTGTTGMRIIRDILKGERDPKRLAGLRDVRTKSDEETIAKALEGNYQAEHLFALRQAVELFDVYQQKIADCDQQIAGYLRTLESKIDTQAQPLKPAREKKKKRRNTPGFDCRHEAYRISGVDLTQIDSISESTALTILSEIGIDMSPWNTEKHFASWLTLCPNNKITGGKVFQRHTRKSANRVRDVLCMSAQSLLNSKSALGAFCRRMCSRLGPEKGIVAAAHKLALVIYRLLKFGKDYVDIGEQAYERQYKERAVKNLARKAKQFGFQLVSSAATP

SEQ ID NO: 501138 - protein, 322 aa, unidentified
MSVSNQRCAGIDVSKGTLDIAISNNASQFTVPNGSDGFTQVIGELKRNETRLILMEATGGLESGVACHLQSEGFDVVVINPRQARDFARAMDYLAKTDRIDARVLLQMSEVINQHPEREKYIRPLPDAHRQILAAMVVRRRQLTIMLTAERNRLHPSHPQSYESIKSIISALKGELARIEGEMAIHIKDHFSELSDLLSAVKGVGAATVAVLLAEVPELGSLSRREISALIGVAPVNRDSGTMRGRRTVFGGRASVRTALYMSALVGTRHNPVIKEFYTRLVAAGKPKKVALTACIRKLLTILNAMLKKNEAWDPMYHQHAS

SEQ ID NO: 501139 - protein, 356 aa, unidentified
METAYDGRQIVGMDLHRRRSVLVRMTEDGRRLGTARITNSPQELRREIARAGKHPRVVLEATYGWYWAADTLEEAGAEVHLAHPLGVKGFSYRRVKNDERDSADLADLLRMGRLPEAWIASREVRELRELTRYRHKLVSLRTSCKDQVHAVLAKLGIPVTCSDIFGKAGSAWLDGLGLPQPYAGKVTSLRQLTGELTTEITMLTQVIADLLAGDRGYQVIQQLPGIGPVLAAVIVAEIGDVTRFRNAGQLCSWAGLTPRHRESDTKVTRGRVTKQGSRMLRWALIEAVQRAGGDCVTGAVRDAIIARRGKETRNIAKVAAARRLLTLVYYGLRDGQIRCLPAPTPEPPETMPARAA

SEQ ID NO: 501140 - protein, 314 aa, unidentified
MDTVTTYVGIDVAGQEHVVFIRPTGQAMTVANTPQGIDGLVATLSTLKPALVVLEATGGLETPLVWALYVAHLPVVIANPRQVRDFARASGVLAKTDRVDARVIAHFAEVMRPTPRPIPDEATQEAGALLARRRQVMEMITAEKNRLLRSIPGIQARIQEHIAWLEQEKEAIDSELTARLEQSSTWKAQEAQLRSVPGVGPQVARTLLMELPELGTLNRKQIAALVGVAPLNHDSGRRTGRRLVWGGRAVVRSTLYMAALAARRHNPVIKAFYERLIAQGKAKKCALTACMHKLLLILNAMMATGTLWQPPVRS

SEQ ID NO: 501141 - protein, 369 aa, unidentified
MDKDTTYVALDDSKRKIVAGILRPSDTQPELREIANDARQIRRLFERLKREGPVAACYEAGVSGYDLHRQITGLGVACAVIAPALTPRRPGQRIKTDRRDAAKLVRLFRAGELTAIHVLDESEEAVRDLVRCRDDIRRDVLRWRHRVLKLLARHGHAYLTGKNWSHAHWRWIREQRFELPPLQRAFEATVFALEQALARQAELDKELEALAATAPYREPVGWLRCFRGIDTLSAIILLAEVVDFQRFRRPRELMAYLGLVPSEYSSGETQRRGALTKAGNSHARRVLVEAAWHYRHRPTIGRALANRSQGQPDEIVSHAWRAQQRLHRRYRHLLGHGKRTPVAVAAIARELVGFIWAAMTRHESRRQAA

SEQ ID NO: 501142 - protein, 340 aa, unidentified
MNATTYGLDIAKNVFQLYWVDAETGEVSNRRFARDELIRFLGKRTAGRVALEACASAHWWARKLRSLGHEPILLHARYVRPFVQTNKTDVADARAIWTAMQQPQMRTVAQKTVEQQAMLSLHRMRSLLVKFRTMQVNQVRSLLYEFGACFRKGRAAGISEIREQMAQLEADLPGEIVQSVRDQLGRIERFEHDIVEAERRIRTWQRQDVACRAISDVPGIGKLTATAIVATVGDAKAFKSGREFAAFLGLVPRQSGTGGKIRLGAISKRGDPYIRTLMIHGARSVLYHGKEPTDWQKRIQERRPANVAAVALANKTARKVWAILAHEDRYDEHHVSVRPA

SEQ ID NO: 501143 - protein, 341 aa, unidentified
MKHEMNVLGIDIAKRVFHAVGMDDRGNIVYRKRLSRHDLMPFIAKLPPVRIGIEACGGAHYWARRFRAYGHAVKLMAPQFVKPYVKSNKNDSRDAEAIAEAVTRPTMRFVPIKAVDQQDLQALHRVHERLMGERTALVNEVHGLLHEYGIVIPKGVSKFRQAVVGKLEAEKDKLTPLSQEMFWKLVEEFAALEAQLAYYQEKLDTLAQTHPECQRLMTIPGIGPLTATALVAAVSDASAFKNGRQFAAWLGLVPRQHTTGGKERLLGISKRGDTYLRKLLVHGARATIRWVGRKTDRRSQWIRQLVDRRGKNRTAVAVANKNARIVWALLTSHQDYQPATS

SEQ ID NO: 501144 - protein, 320 aa, unidentified
MSASSVAVGIDVAKAHVDVAVLGAKLDAQRFDNEAGAHSALAAALKPLGVALVVMEATGGYEAALACALQAAGLPVVVVNPRQARDFAKSMGRLAKTDRIDARMLAELAGVLARRDDLASLIRPLADAQQQALAAMVTRRRQLVTMMLSERQRLQLAIAVVRPSIEAMIEAIRKQLDDVEAQMVSHVQTHYAELDKLLRSASGIGPVASATLIVELPELGKLNRREIAALVGVAPMANDSGNSKGRRRVQGGRFEIRRVLYMATLTAARHNPAIKVFHDRLLAAGKLPKVALVACMRKLLTTLNAMVKTNKPWDKSLHVA

SEQ ID NO: 501145 - protein, 339 aa, unidentified
MLYVGLDVSQKETEICVLDAEGRRAWRGKCPSRPDAIADALRQRAPDAAKVGMETGPLAIWLWHGLKALGVPIECLHARHVAAALALQVNKTDTNDAHGIAQVVRSGWYRPVAIKSMQSCRVRAILAARRQLVEVRTGLYNQIRGLLKTFGVVLGPGTGGTFERTVNAECPDDPLVRDAVDALLCAWKVAGERKVALERQLVRIAREQDVCRRLATVPGVGAITSLTFVTALDDPTRFRRSCDVGAYLGLTPKRYQSGEIDLAGRISKAGDRTARSLLFEAANALMTRVRKDCALRGWGLSLAKRIGSRKAKVAVARKLATVLHRIWLDGTEFEAAPAH

SEQ ID NO: 501146 - protein, 350 aa, unidentified
MLYLGLDVHSKWMTVKGFDPETGEGVELLKLPNDERSLSEAFTELAGPLYGAMETGTNSWAVYRMIEPYFERLIVVDPATVWGKDVRRGAKTDRRDARKLALKMYRGELDPLYVPDVNTQDQRALGRAKIHASRHVTRLVNELGSLLKSWGIILECSLLSVEGRKLLDESRRRLPEHSIKVLDMWLQMLDKVQEVEAELEKAVEAESENDETCRLLTTIPGVGPVTALVVKSEIGDIRRFGGPEQLVCYCGLSPSVSQSSEKTYYGKLNKACNRFLKYVLVLRAQGMARSKNDNPLRQTYWRVLVRGKNHAKIAVARQLTRVMYRMLKDGEPWNASKITDRRRLSASRAA

SEQ ID NO: 501147 - protein, 344 aa, unidentified
MSEVSIIGLDISKHVFHAHGVDGRGRAMFSKRIGRGKVLDFFATQPSCTVALEACGGAHHWARQLAQLGHDVRLIPPAYVKPFVKRQKNDAIDAEAICEAAQRPSMRFVAVKSEAQQAAGLVFRTRDLLVRQRTQLINAIRGHLTEYGWVAPKGPSHVAMLADLIDKDEMANSLPGAARAMFRVMLDLLTGLSRKIADLDKEIARRAREDEVSRRLMTVPGIGPISATAIAALAPPAETFAKGRDFAAWLGLTPLQRSTGGKQKLGATSKMGERTLRRLLIIGSSAVVKQASKRGAPRGSWLERMLARKPRMLVTVALANKMARIVWALLVKQETYRAPVAARA

SEQ ID NO: 501148 - protein, 404 aa, unidentified
MSVHVAPVTSSTIVVAVDVGKTSAVLSVTDATRHRLLAPSEFAMTGSGTATAAARAMAAAPAAVQVKVGVEAAGHYHRPVLDYRWPEGWEVLELNPAQVAEQRRVQGRRRIKTDVIDLEAITELVLAGYGRPVTYRDVVIGEISAWAVHRSRRVATRSATKNQLLGQLDRAFPGLTLALPDVLATKIGRLIAAEFADPARLAGLGVNRLIRFAATRDLQLRRPVAERLVAAARDALPTRDAVISRRILAADLVLLADLDDQIQSAETALALLLPRSPYATLTSVPGWAVVRASNYAAALGDPKRWPGPRQIYRASGLSPMQYESAHKRRDGGISREGSVALRRALIDLGIGLWLNEPAAKNYAHALKDRGKPGGIVACALAHRANRIAHALVRDHATYEPARWV

SEQ ID NO: 501149 - protein, 407 aa, unidentified
MSYKVAGIDVHKKVLMVVVCEVAEPESLPQRRRFGTTTSELRRLSQWLREGGVEEAVMESTAQYWKPVWYELEPYLRLQLAQAFSNRAPRGRKHDFKDAERLVRRLVANELRLSFVPTGEQRAWRTLTRMKVQLSREASRLHSQLECLLEEMRIKLSSVISDLLGLSGRRILQAIAAGESDPQRLASLGDQHLRCTQEQLIDALSGNPQPLHRQLLGLYLERYQLIQQQIEQLNQMTAAAMQAHSQAVTRLAEVPGFGADSAQQVIAEVGVEAATFASAAQLSSWVGTCPGQHESAEQNQSSRSAKGNRYLRRILNQAAHAAVKKNGSHFQAVFRRLLPRLGYKSAIWAIAHRLCRLVWKILHERVRFVEAGSEPSPRAKRQRAQRLLRSLRRLGYQVTLNPLPAGA

SEQ ID NO: 501150 - protein, 395 aa, unidentified
MFIVGIDIAKRSHVARIIDSEGRTVVKPFSIRNSCSGYNILLARMNKITNHKSEFILAMESTSHYWLALYTRLCREGYRVVLLNPIQTHAMRELLNQNDTKTDEIDTLAIAETIRFGRYKTSRVPQDKLLALRELCRNRYYLIDMASDLKRKITALLDQVFPEFESQFSTIFGKSALAVLKQYPTAEKLARAQLGKLTQLLQTASNGRFGEWKARQLREIARDSFGIPDCEGVYSTLILLQLQQLQSLLDGAAALEQQMADIFSQFDTTLISIPGIGPLLGAVILSEIRDISCFPSADKLVSYAGLNPKVKQSGEAKFEGVHMSKRGSPYLRRAIWMACTNAVQCDPMFRAYYEKKAAEGMRYMCIIGHVTRKMTTVIFAVLRDNKVYQPVLPAA

SEQ ID NO: 501151 - protein, 347 aa, unidentified
MKRIAVDLAKSVYQVAESVRFGQVVQRKRLNREAFRRYIQEQAEPVEWVMEACGTAHYWGRLAQSLGHQVKLLHPRYVRPYRRRNKTDRNDCDAMLEAARCTDIHPVPVKSHDQQQLQQLHGLRETWKKSRTQRINLLRGMLREAGIEAPTSTAAFIRAASELVDQPELASLSRLLHIVLAEINLYEQCMAECEQQLKRWHADDDIVRKLDEVSGIGLLTASALTAAVGKPERFANGRQLSAWLGMTPREFSSGNNRKLGHISRQGNVYVRTLLIHGSRAALLAAQRCQARTPEKLTQLQRWAVQTAARIGHNKAAVALANKLVRICWAVWCHERRFSGNWQSVRPA

SEQ ID NO: 501152 - protein, 411 aa, unidentified
MENVFPCCAGLDIHKKSVEACVRRLEPTGQMHHQTRHWGTMTRDLLAMADWMAAQGVTHVAMESTGVYWKPIYNILESRFTVLLVNARHLKQVPGHKSDVRDCQWIAQLLQHGLLKGSFIPPRAQRELRDLTRHRAQLVEEKTRTVNRLHKVLEDGNIKLASVATDILGVSGRAMLEALMEGQEDPVQLADLAQRQMRGKIPELEKALEGHLTEHHRFLLRLLWKELAQQEELIAELDRKIEEHTRPFANEIERLDAVPGVDRRVAEVVLAEVGSDVKPFPTHFHVASWAGMSPGNEESAGKRRRGRITPGNRWLKRTLVQAAWAASHTKNTYLASQYRRLAGRRGKKRALVAVGHSMLVIFYHMLKERTTYKNLGGDFFDRLEPERLTRYYVKRLKDLGHKVTLEPGVAA

SEQ ID NO: 501153 - protein, 343 aa, unidentified
MHTITTIGLDIAKSVFQVHGTDAAGQVVIRRQLKRRAVLAFFQKLPPCLVGIEACASSHHWSRELQALGHAVRLMPPAYVKPYVKRQKNDMADAEAICEAVTRANMRFVPTKTPEQQGCLMLHRTRHLFIRQQTAVINSIRAHLAEFGIVAPVGRKGVMELLQVVADPSDKRVSEVTRACLAALGDQLLSLKEQILEFDRMIMAWHRSNEPSKRLRYIPGVGPMLATALVASVADPKTFRSGRNFSAWVGLVPKQHSSGGKDRLGSISKQGDRYLRSLFVAGALSVIRYAKIHGTKHRPWLTALLARKPTKVAAIALANKLARMAWAMMARGERYRNPVALAA

SEQ ID NO: 501154 - protein, 346 aa, unidentified
MLHAGLDLSRRRLDFHLLDERGETLEVGSAPPDRDGLRGLSERLRRYEQPVRAAIESMNGARFVHDQLELGGWEVEIADAARARGLAPLACKTDRIDAWVLAELSRRELVPAIWLPDPEVRAERERARFRLHLVRHRSSLKHRVHAVLLAHGRPCPVSDLFGVSGRALLERLALPEPWAGSVHASVRLIDELDQEIAACEAELRRLGADHAYVPLLLTVPGIGWVLGYTIAAEIGDIGRFGSAKKLSGYTGLCPRVYQSGSSDRRGPLAKQGPKYLRWALVEAALHASKHPLYRERYQRTKKRLGKQRGPKVAQVDLARRLAEAIWHMLTRNQPFAPAGATKPVAA

SEQ ID NO: 501155 - protein, 359 aa, unidentified
MTKVKQLDFTGTTIFCGLDVHKVSWRVNVRDTELELKDFTQPADALLLHKHLTKNYPGARYRAGYEAGFCGFGIQRQLAALGIECVLLNAADIPKGDKDRRQKNDKRDARSISHELSIKKDLKSLYIPTPEWEHARTLVRNRQQQISDSTRYKCRIWHFLHFSSLPAPDKAETGQYWSRKFIKKLEDMDCGSSELKTALQIKLQDYLHKRSLLLQSTRAIRSLYKQDAYWQLMQLILSIPGIGEINAAIILFELQDILRFKTFDKLCSYVGLVPDTDDSGDTKRNKGLTHRRNTYLREALIESSWVLIKKDPAMLMKYKDYCKRMHKNKAIIKIARHLLARINYVLRKKTEYVSGLVAG

SEQ ID NO: 501156 - protein, 439 aa, unidentified
MDDEDYQLRHERVAGIDIAKAKADVCTRLPPPREGGRRRSRVEEVPATARDILDLGTRLLADRVELVVMESTSDYWRIWYYLLESLGLAVQLVNASQARQLAGRPKTDRLDCQWIARLAEMGLLRPSFVPPAEIRALRDLTRARLQLARDRTRERQRLEKLPEGALIKLSSVVSSLAAAKSAHKILEAIAGGETSPQALAALAHGNVKGGRAAVERALEGMRPEAHHLMLIRLHLDRIKDLDRRAAALEDEAGAALDAIPAARVTADGEPAPGTAVLSAAERLAEIPGVTPELAIAIIAEAGLDMTRFPTAARLASWAGLAPAARQSGPRTRKPGKGQGNDYLKGYCTQAALGTANTATFLGERYRRLARRTGGVRAQCAVARSILTIIWHLLSDPAARFTDLGPDWHTRKADRDRKIRTHLRQLEALGLDVTITPRAA

SEQ ID NO: 501157 - protein, 336 aa, unidentified
MSHYCGIDLHSNNHVVVVIDEEDKRVLEKRLNNDLSLTLKVLSPYQDTLQGVAVESTFNWYWLVDGLQEQGYDLRLVNTAAVKQYDGLKYSDDHHDAFHLAHLMRLGILPTGYIYPKAQRAVRDLLRRRLFLVRTASAQLISVQSQIWRSTGQRIKSGDLRKADFMAPKVDGYTLLAVNAGLSVYQAVQREIDTLEQSAHQAVKLTDAFQILQTVTGIGKILGLTIMLETGTIERFASPGNFASYCRCVDSKRTSNGKKKGEGNAKAGNKYLSWAFSEAAHFAVRFEPLAQRFYERKKAKTNGIIAIRAVARKLARATWMMLKHQAPYDARRMFPG

SEQ ID NO: 501158 - protein, 342 aa, unidentified
MKIHTIGIDLGKTNFHLVGLNERGEVVVRKRFSRAQLLRFTANRKVHVIGMEACGGSHFLGRALEEQGHEVRLIPAQYVKPYVKTNKSDYIDAEAIAEAVGRPTMRFVPIKSDDQLDLQSLHRVRERWVTRRTAVINQIRGLLLERGITLRKGRRYLDEALPGILEEADAKLSGTLRLLLAQLKLELDQLALRLEEAEALIEQTVQESEACQRLMQIPGIGPVTATAVISAIGNGAAFRKGREFAAWTGLVPREHSTGGKQKLLGISKRGNRYLRKLFVQCARAVLQQKIKQAPGLKAWLEKITSHTHRHVAAVALANKLARMAWAVLATGEPYRAPVPSAA

SEQ ID NO: 501159 - protein, 355 aa, unidentified
MLNAKYIGMDIHKETISIAVMNAAGKVVMECVIETKANTVLQFIHGLRGDLHVTFEEGTWAAWLYDLLKPHVTEVLVSDPRKNALLKQGSKSDKIDARKLAELLRLNHLKPVYHGEHGVRTLKELARSYLTITQDLTRVRNRLKALYRSWAIPCSGTHVYAPRHRSEWLGKITEAGVRRRAEHFYQQFDALRPLRQEVRRDLLTEGQKHKVSKLLRQIPGIGAIRATLLIALIQTPHRFRTKRQLWNYSGLGLETHDSAQYCVVEGQLQRVKRPAMLRGLNQNHNHDLKAIFKGAALEASSGAGPFHDFYEALLAKGRKPSMARLTLARKIAAIALIVWKKEVSFDAKHLKQQAA

SEQ ID NO: 501160 - protein, 414 aa, unidentified
MDVLVERCAGLDVHKDLVVACVRYPGADGERQSETASLATFTTDLLALRDWLVSFGVAMEATGVCWKPVFYVLEDTMESWLLNARHMANVPGRKTDVADAEWICQLLEHGLVRPGFVPPPTLRDIREVTRYRRTVAEERTREAQRLDKVLQDAGVKLSSVASDVLGASGRAMLNALVAGTRDPEVLAELAKGQLRKKLPPLQEALTGRFGVRHIVVVSEILAHLDYLDETIERLSGAIDEAIAPFADARDRLATIPGVNTRLAEAIIGEIGVDMTRFPTTSHLASWAGMCPGHHELAGKSRKGTARRADNWLQRHLTLAARPTQGTYLSSQYHRLAMRRGKRRARKAVGHSILVAAWHILSAVGVTYQDLGPDWFDRRNDPLRRARRKMAELSTLGCIVQPNADGTTTVTLPAA

SEQ ID NO: 501161 - protein, 342 aa, unidentified
MKQYVGLDVSQRETAVCVVNETGQVIFEGKAKSNPGALTDLLSKYAPHAERIGFETGAMASWLWHELRRVELPVVCIDARHAHAALSVRMNKSDQNDARGLAELVRVGWYREVKVKSEESQKIRAILVARSRLVSMRRDIENQVRSLIKECGLLFPRAIGQQFRNQVSELLGVDHLLLSVISPLLAIHENVCQQQGKFDNEVRRLAKLDETTRRLMTVPGVGVVTALTFRHTIDDPSRFRSASTVGAYLGLTPRRSQSGETDTNGKISRWGDRLLRTYLFEAATVLLYRTKKWSSLKAWGMKLAKRIGMKKAKVAIARKIAVILHCIWVDGTSFDWGQPKPI

SEQ ID NO: 501162 - protein, 387 aa, unidentified
MPQLNDLSKSLVALEQDATLIAVIEMGQSSWLVAGIVPGVERQPLKKLTTDQDALLQLLHRWRKEANEAGHVIKRITVAYEAGRDGFWLARWLRAHEIEAYVIHPSSIPVSREHRRAKTDRLDTELLKRAFLGWLRGEPKHCSMAAVPTIADEDARRPSRERENLVREVTRLVNRMKANLARLGIRGFRPHLAQAAGQLQTLQTPEGTAVPANTLAELRRDMDRLRFVKQQIKQIEAARVQRLESEPGERRHAMVYLLARVVGIGVESADMLVQEVFSRKLRDRRAVARYAGLTGAPDESGNKRRERGLAKAGNARVRRGMIQLAWTHLLHQKDSALAQWYRARTADARGRTRKIMIIALARKLLIALWRLVTTGEAPAGLLIRPAA

SEQ ID NO: 501163 - protein, 339 aa, unidentified
MQKEVVTVGVDLAKNVFQVHAIDADGKVLVRRQLRRAEVLKFFAALPTCLVGMEACASAHHWGRELLALGHDVRLMPPAYVKPYVKRGKTDAADAEAICEAVTRPTMRFVAVKSVDQQAVLMLHKTRDLLIRQRTALINALRAHLSEYGIVTGKGPGGVTALMKLLYEGQETLPVHARSALHGIGSQLRSLASEVDRLEAQILAWHRADDTSRRLATIPGIGPITASAIAAAVPDASLFRSGRQFAAWLGLTPRANSSGGKERLGGISKQGDGYLRKLLVVGATAVMRLARKDPSRQPWLAQLIERKPVKIATVGLANKTARIAWAVMTRKEVYAAAAA

SEQ ID NO: 501164 - protein, 342 aa, unidentified
MGQIGTIGLDIAKSVFQVHGVDGAGEVILRRRLTRARLLAFFTKLSPCLVGIEACATSHHWARELRKLGHDVRLMPPSYVKPYVKRQKNDTADAEAICEAVTRPTMRFVEVKTQQQQSIMVLHGTRTMLMRQRVQLSNVIRGHMAEFGVVAPVGREGLLSLTDTLHDEADDRVPAEARHCLQMLAAQLRLVNAQILENDRQIRVSARATDVGRRLMGIPGVGPVLASAFVASVPDPHAFRSGRNLAAWIGLVPRQNSSGGKERLGGITKQGNRYLRQMLFVGAMAVIRYAERHGTRRPWLVQLLARRTTKVAAAALANKTARMVWAIMTSGQKYREPELRTA

SEQ ID NO: 501165 - protein, 347 aa, unidentified
MSKDIKFYLGIDVSKSWFDLSIMCAIDHKKQPMQTHRFDNTAQGMKQLDKLLKDLNVSFDQNSLLVIENTGVYHRLLWEYCSTHNLPIYIGNAAHIKWSFGIARGKNDVIDSQRLCNYASKNADELKASATLNPVFIKLKDLITSRDRLLAQLNSTKVFLNELKLSNTKDVQKLMEQAHKAAMNGLEKSIKLIEERIQEIITEDENIHNNYKLLMSVPGIGKITAIYLICCTNNFAGKYSGKQLASYAGVVPFRDSSGTSVKGKDRVHKMANKELKRLLHMCAVSAIGHHKEFKQYYDRKKAEGKHSMTILNAIRNKIALRAVAVIKNQKNMWITLKKQPKKSLVKS

SEQ ID NO: 501166 - protein, 324 aa, unidentified
MYKFIGIDVSKQTFDVYSLSKEAKPLIICLDNNKRGFAKLIKTYEKDGVYVMEATGPYYVQLATYLYKRGIKVSVVNPLIIRRYAQMRLIRAKTDKKDAQTIFEYASQNSLKLWKPDSQEVINMQQILTAIELLNKQITATGNQLKSFKSSGNADNMIKNSLGKIIKKLKFEKLNLEKRLNEIIDEHFTETRDLLKTIPGIGPKAIAVLIAITNNFQKFIHYKQLIAYVGLSPRIYSSGTSIKGKGHICKMGKSQVRKQMYLSAWSAKFHNKACIELYERLKNKNKNERVIKIAIANKLLKQAFAIVNNKQIYNSSYVSKLNVA

SEQ ID NO: 501167 - protein, 304 aa, unidentified
MFARFIGVDVAKAKVDVFVSDTGEVLQVRNDERSLSRLVRKLDCTDALAVIDLTGGYEAVCVKTFHAAGVKVHRAEGRKVKAFMRATGQLAKTDAIDARALADYGQRLQDRLALYAPDENAVKPYVARLADLKQILRDEKNRLKAPATTPQIRNRIERHIDFLTAEIESLSKELQETVRQNPRLLQKQRALITQTGVGETSANALLAYLPELGTLSRRKIAAIAGLAPYARDSGTLKNARHVTGGRRDVKRTLFICALVAIKNDPEMHAFYEKLIKSGKKKMVAIVAVMRKIIIILNTKCKNIN

SEQ ID NO: 501168 - protein, 356 aa, unidentified
MSKRSKLNFSGQAIYLGLDVHKKSWSVSIFTKYGEYKTFSQPPEAEVLIQYLQRHFPGAQYHSVYEAGYCGFWIHDQLREKGIDNIVANPADIPTRDKERRSKRDRIDCRKLARGLRGGEIEGIYTPARWKLEDRSLIRTRLSMGRKQARCKNQIKSMLLFYGVVIPEQREMGHWSRRFIQWMEGIRMERSSGDVALKLHLEELCHLRQILAKLNRSIVALARTEVYRSWISLLKTLPGISTLTAMIVLTELYEITRFRSLDQLCSYVGLIPDTQSSGEKEHVGGMTGRHHSSLRWLLIEASWIAVRKDPAMMEAFNEYCKRMRKTKAIIKIARKLLNRIRYVLKNEAEYVTGVIE

SEQ ID NO: 501169 - protein, 331 aa, unidentified
MDNFYFIGVDVSKKKLDFCVLFEGKVLREEQVSNHQQAVARLIGELKNDLEMDNEQFLICAEHTGQYTFPLVCACKSVECKLWLENPSQIKYSSGMQRGKNDKVDAKRIAIYASRLGNKVKYYDRPTEEIERLKQLERERALYVTDLAKYKGQMYDQKDFMPALYRKKTKRMKGLIQELQAAIDAITAEMEKIIGSTEVLARQMELLMSIDGVGKVVALNVIIETEAFSRFDNPRKFCCHAGVAPFSYTSGSSQHSKNKVSHRANKNIKKLLHMAAVSVTHRKEGELKAYYMRKVEEGKNKMSVINALRAKIVARMFAVIKRNEVYTPIYS

SEQ ID NO: 501170 - protein, 341 aa, unidentified
MSIIVIGIDLAKNIFAVHGVNENGQAELVKPRVSRDQLLPLIANLPPCTIGMEACSGAHHWARLFRQHGHTIKLVAPKFVTPYRMGGKRGKNDAADAAAICETITRPHMRFVPVKEEQQQIILCLHRTRQGFVAERTATYNRLRGLISEFGIVLPQKVTGLRQSLGKHLDDLPGYAKQCIEDLLAHADQLDLRIADYDKIIAQAAREDARSRRLMQRPGIGPIGASALLASIGNGHDFKNGRQVAAWLGITPGQHSSGGKDRLGRITKAGDSYLRSLLVMGARAVLNSLGDKQDYFSCWARSLVERRGYWRAVVAIAAKNARVAWAVLKYGEDFRMNKSAA

SEQ ID NO: 501171 - protein, 379 aa, unidentified
MEISSSTLPAVAAERATMFVALELSKSSWLVALHSPVADKVSMHRFVGGDVAGLLALIARKQTQAEARLGRTIRVLSCYEAGYDGFWLHRLLCARGIDNRILDAASILVDRRSRRAKTDRLDAAGLLRTLMALDRGESRVCGVVRVPSVAQEDARRRSRERTRLVVERGQHSNRIKGLLMTLGVRDFEPTRRDWQERLGGLRTADGRELPACLKAEITRECRRLHQVIVMIAEVEAEQAAALDAEEGQAARLIRLRGIGLVSATVLADEVFFRDFRNRREVAGYLGLASSPWASGRVQRDQGITKSGNPRARRTAIELAWLWLRHQPGSLLTQWFRQRVGTTRGRMRRIMLVALARKLIVALWRYLSDGLIPDGAELKA

SEQ ID NO: 501172 - protein, 316 aa, unidentified
MDVLYQSCAGIDVHQANIVVCILHGPLTSTRPKREMATFDTTTKGLRACHDFLSQFHVEAVGMESTGVYWRPVWHALCDDFELILAQPAHMKAIPGQKTDKKDAHWIAKLTRIGLLPRSFVPDETIQELRELTRQRKHYVESRNRETNRIHKILQSGGIKLTTYIEDIMGLSGRNLLQLLVDGTPITPRIVHQSVYTSLKKKVRRLLEALDGYFSDHHRFMLKQSLEIYDFYQKQIELLEERMNVYLSQYENHVEILDSIPGIDVITASVIISEVGVDMSQFPTSGHLASWAGLCPGNNESAGKNEVPRFDTEIHI

SEQ ID NO: 501173 - protein, 331 aa, unidentified
MKSKELIGIDVSKKVLDVFILAVSYHFTVENNPVGFAKLLETCCFKLSCNKDHLFFCFEHTGRYSWLLSIFLSESSIVFAKVPAMDIKQSRGLTRGKSDKKDAQMIANYAHRRRDELIPTKLHTPEVGQLRQLLSLRNKLLRHRTAYKNSIKDLQDCFIEGETEFIRTTQERLIEQLKVELDNVEGQIDTIISSMPDWEINFNLMQSVKGIGPVVSRYIIIYTENFTRFTDPKKFACYAGIAPFEYSSGSSIKGRTRLHPCANKQLKSLLNIAAMGAVRLKGEYKTYYERRTEEGKNKMSTLNIIRNKLLFRIFAVVKRQTPYVDLTMFAA

SEQ ID NO: 501174 - protein, 366 aa, unidentified
MKKISTVQTFKSEIFKDQKLTIGVDLGDRWSFYCVLDEAGKIILEQKVPTTPEAMKQTFSRMPQSRIALETGTHSPWASRLLTELEHEVIVAHAQKVQLITKSNRKDDRHDARTLARLARIDPELLGPVRHRSAQAQIHLTVIRARAELVSVRTALVNAARGLVKSYGERLPKCGTEQVSRELAAALSTELRDVLEPLLKEIESLNERIKEYDERMEKIAKEVYPEVSLLKQVKGVGTQIALTYVLTIEDPHRFLKSREVGCFLGLRPGRRNSGESEPQKRISKEGDRYLRTMMVQGAHYILGPFGEDSDLRRWGLQLAGRGGKNAKKRAVVAVARKLAVLLHKLWVSGEVYDPLRNNHKVVSAVA

SEQ ID NO: 501175 - protein, 450 aa, unidentified
MARKRKGVQNLPVLEPNAAGADVGAREIYVAVPADRDAEPIRCFNTFTPDLEALADWLESCGIRTVAMESTGVYWIPLFQILEKRGIEAHLVNARHVKNVPGRKSDVADCQWLQYLHSVGLLRGSFRPSQEICAVRSLWRHRDSLIQMASVHLQHMQKALDQMNLQIHHVISDLAGTTGLAIMDAILAGERDPQKLAGLRDWRIRASESTIVKSLVGDYRDEHLFTLRQSLVAYRHYQRLIAEVDEKVKQLLSELPAQVDPDEKPIPKARNPRKSPWRNEPDGLREDLYRAFGVDLTQVPGIDSLTAQRLLTEIGPSLSAFPNVTTFASWLRLCPDKRVSGGKVLSSRTGPTKNRATVALRMAAQALHRSETFLGEYYRRTRARLGAPKAITAAAHKLARIVYHLLSTRQPYDESIFIEQEIRFRKRKEARLRAQARELGFQLVPVGLGA

SEQ ID NO: 501176 - protein, 393 aa, unidentified
MVYVGIDVAKDKHDCFIVNSDGEVLYDVFTIQNDMDGFEDLLFKIKTASKDLSKVKVGLEATGHYSCNILGFLHNKGLTTIVINPLYTSLSRKSVSLRKTKTDKVDARTIASMIMSDVSLKPYSDTVYHNEDLKSLSRYRFDKVSDRSKLKQSVSRLVNILFPELEKLVSTLHAKAVYALLSEFPGAHQVASANLKHLTALLSTASKGHFGREKANEIREAARRSISSYLPAKSLELRHTIKLIHELNAEIAEIETEIKKIMDSIDSPTLSVPGISYALGSVIVSEVGDFSRFDNPDKLLAFAGCSPSTYQSGQLYSTHAKMEKRGSKYLRWALLNAAKYVCKWEPTFAVYLRKKLAEGKHYNVAVSHAAKKLVRLLYHLETTGEKYIPQTLS

SEQ ID NO: 501177 - protein, 343 aa, unidentified
MSLFAGLDVGGKRTAVCVVDDAGKIVWQGMVDTHPEMIASALQRFRGKLARVGLESGPFTPHLHRSLAAQDFPMVCMDARRTADAIKSRRIKTDKNDAQALAEMLRAGWFTAVHVKTADSHRIKTLLGARDQLVKVKRSLGNQVRGLLRPFGIRLPSRVGTRKFAEAAHQATQNDAIMHASIKALLEALVSIDAQVGRLDAELRELAGHSEVAWRLMSVPGIGPVTAMAYIAAIEDPNRFKRTRDIGAYLGLTAKRYQSGETDVRLGISKQGDSMARHYLYEAANVLLTTVKKRFALRSWGLQLMKKVGPKRARVAVARKLAVLMGRMWKDGTHFEAAMPVAM

SEQ ID NO: 501178 - protein, 370 aa, unidentified
MAPADGIWVPKCEGHQAFTSKMGAIRYADYHGRPRLGQERFSGSRVDAIGQVVLRKSLRRSQMLPFFAKLPPCLVGIEACGTSHHWARELINLGHEVRLMPPAYVKPYVKRGKTDAADAEAVCEAVTRPTMRFVPVKSPEQQAALSMHRTRDLLVKQRTQLINMIRGLLAEFGVDIPKGLERALLMARQIIDGKGPAVPIEAAKMVTTLSQQALDIDVRLREIDRDLAVCLRGNDVARRLMTIPGIGPVGATALAASVTDPHQFRSGRQFAAWLGLTPLQKSSGGKERLGRISKMGDKYLRKLLIIGMTSLVRRAKYNPGKTDPRLADLLARKPTRVATVAMANKTARVIWAIMVRGETYRAGHRPALAA

SEQ ID NO: 501179 - protein, 342 aa, unidentified
MWTIGLDVHQRMSCICILDENGKTIKEQKIVGPPALVIQELRKVAKRFAICYEASVGYGHLHDQLRRFAARVIVAHPAKVRSIFQCKRKTDRIDARKLATLLFLNQIPAVHVPSLDVRGWRGAIEFRQRLIARRTQIKNGLRAILRGHGVTMPIGKGLWTAKGLAWLQRVELPDIPALQRDMLLDDVRQMAPKIKRVEKILKKQADAHPGVILLKTIPGVGIRTAEAVVAYIDNAKRFARNKQIGAYFGLIPCEDTSVKQRLGHITCDGPATVRKLLTEAAWQAVRRDPSVRKRFERIHGGKPDRRKIAIVAIAHYLARVMLAMLRTGECWRSEEKDDKAAA

SEQ ID NO: 501180 - protein, 336 aa, unidentified
MYSGIDLHSNNSVVAIIDEADRIVAQKRLPNDITKIVGFLARWQDDLAGVVVESTYNWYWLVDGLQDAGLHVHLANTAAIKQYDGLKHSGDETDAQHLAHLLRLGILPTGTILPREHRVVRDLARKRMQLVNCRTTHVLAVENIMARQLGERMTSNQIKQLTADTIDSLPLAADVGLAIKANVAVIATLQSQIEILEKRLQERVKPRPQYGLLTSVPGIGQTLATVIFLETGPIDRFADVGNFASYARCVDSVHTSNRKKKGEGNVKNGNRYLAWAFVEAANFARRFCPEAKRFHERKKARTNNIVATKALAHKLARASYHILKEGKPFDATRCFA

SEQ ID NO: 501181 - protein, 407 aa, unidentified
MEVVYRRCCGIDVHKRVVVACLFNGRKRELRQFGTTTNEIKALSQWLLDAKCEMIAMESTGCYWKPLYNLFELMGLEAMVVNAAHMKALPGRKTDIKDAEWIADLLRHGLLRASFIPNRQQREIRELSRYRKSLIGERAREANRLQKMLEGANIKLDSVVSDIQGKSSRKLLEQIIADKSPDADEIMKLIDGRMHRNIEQIMLSLEGITTPLQRKLLSLVISHIDDMTKRIAEMDNLVDEYMAEYEAAIAAIDEIPGIGRQSAQVILAEIGIDMGRFPSAAHLCSWAGICPGNHQSAGKRKHGKTSKGNMTLKTTLTQCAQSAKKAKLSYFSAQYQRIAARRGKNRATVAVAHSILIAIYHVLKEDVQFRDLGADYYDNFNRERKIKSYLKRLSSLGWSPGEESTVA

SEQ ID NO: 501182 - protein, 313 aa, unidentified
MPVSCGVGIDVAKATLEVAWSSEPEARWRTTNDERGWAALIERLRALQPTVIVLEASGGYETGVASALSVAGLPVAVVNPRQVRAFAQALGRLEKTDALDAGVLGEFAVRMDPVPRPVAHDVQADLQALVTRRRQLVEMLTAERNRVPLARGAVRKNLLAHIAWLEKQIGQTDRDLRTRIEHSPIWRVRDRLLQSVPGIGPTTAACLLAALPELGTLSHRKIGKLVGVAPLPDDSGTRVGYRRIQGGRADVRRALYMATVTAIVHNPPIAAAYRRWRAAGKLPKVALVAAMHKLLIHLNAMLKHHTTWQPTQA

SEQ ID NO: 501183 - protein, 465 aa, unidentified
MRVHHNVCCGIDVHKKSVTACLMWGPADKEPQFEIRRFGTMTRDLQMLAEWLKQAGCEAATMESTGSYWKPVWNVLEGQIAKLILANAQHVRALPGEKTDRKDGKRLAELTRHGQVRPSYVPPRAILELRDLTRYRSKLLSAGSSERNRIQKVLEDANIKLGSVLSDLFGVSGQKMLQALIRQDTVDTAKVAQLAHWSLKPKMEAIQQALDGKLRDHHRFLIDASLQHMRFIEEQLMRLDEEIQRRLQPYQEQYALLQTIPGIKETGAARILSEIGPDMSPFPDGDHLSSWGGACPGNNESAGKKFQSKIRKGNPHLLAALTECAWAATKKKDCHFRNKYYRLKSRRGSQRAIIAIDHAMLKCIYVVLSQRQPYQEPKPTSLTEAQKQRKASSLCRQLRALGIYSGSNENFVPVNIAFTSSDLDSNSIDEKIESTDDCAIEPVEQAGSGAMELGVWFERFQNRTR

SEQ ID NO: 501184 - protein, 371 aa, unidentified
MHHSSTLYVGLDVHKDSIAVAYVVKDHDAEVIYLGTIGTRPCDIDQLVRKLQSKAKHLVFVYEAGPCGYWLYRDLTQKGYDCWVVAPSLIPKKAGDRVKTDRRDAVQWARLLRSGDLTPVYVPTVADAAIRDLSRAREDTLHDLKTAKFRLKAFLLRQDIRYTGRAPWGPAHLRWLNEVVCPTPAQQIVLQAYVRAVTEHTERLQRLAQELHEHVNAWRLYPVVEALQALCGVQLTVAVTLIAELGDLTRVDHPRQRMHDLGLTPSAYSRGERRRQGGITKTGKTPARRALVEGAWASRDPANGSRHLQRRLEKLPKPLQDLSWKAQARLCKRYRQRSARGKHPNQVVVAIARELTEAALSLNRASQRVSR

SEQ ID NO: 501185 - protein, 372 aa, unidentified
MDSRSRPVDRGLPSRAEGGTVVIIGVDPHKGSHTATAVSPITNAPASSLRVDATLAGYRQLLRWGKAFPERQWAIENAHGLGRHLAQWLIARGETVVDVRTTATARVRELSRGGRRKNDMLDASAAASVAAVQGDVSLVAAEDEITVFALLEERRANVAAHRVRLANQLHALLRDLVPGGARPALTAASATALLRRLRPLSAAGRTRKRLARELVLEIRATDARLAQIARRMAEALRARGTRLQQVQGVGPVLAARLLGRTGRASRFPSAAAFANYAGVAPIEVASGDRARHRLSRSGDRQLNSALHLVAVTQVRMPHSIGRSYYDRKIAEGKTRNEAMRCLKRRLADHVWRLMLVDERLHDKSAESPAAIA

SEQ ID NO: 501186 - protein, 340 aa, unidentified
MTIGVDLSRTKWVYSCRWSDAEQRRLSSPGESEHLEKLARSYLERGSTVRVVYEACGFGYRVAWRLEEIGAEVQVVAPSTIEKAPGRGVKTDGLDASELAFKCDKGLLKGIYLPDAKTHDLRQLSRTYEQVLGDRKRQQARLRLMLQEHGYGTPPPVQGWGALRQWLTEQEFAPGLEICVDELVAQRGHADACVQQLKKELGRIAGLPAYAAVVTSLAEQSGVGRFTAVRFALEIGNIGRFATAGSLPNYLGLTPGEYSSGEMVHRGHVRKCGPGAVRGWLIQCAWAALRARKDTALVESFDRLAVRVGKKRAIVAIARKLSLRLRARWLAAEANMATAP

SEQ ID NO: 501187 - protein, 430 aa, unidentified
MYYFDFISVGIDVGADFSWISILTPDHKPIVKPFKVLHDSIDSLQKTILTIRKAEESNSMKARIFLESTGIYHFPLFCYLKESGFEVFVLNPLITDSNKNSGIRKVKNDKNDSLRIAKTAYTHDLKTSVIPSDIVINLRSLTREYYHLVDSKTGYVNKLHKELRLVFPTYSKVFSNITGKTALLILKTYKTPDGILNAPKDEIISLIALNSRKGLNYARSKYNKLIDAATLSKSFGHHLDSVFDIIQLNIEFIEIFNSKIEAILKSIKDFTIKYESDLFIKQIHLLDSIKGIGFISAVTLMCEIGDFSAFKKAKQLYAYFGLDPAVKESGKFKGTKVSMSKRGSRLARRILFTVALVSVRGSKSGNPNNPVLKEYYDKKKASKPKMVALGAVMHKISNIIFAVLRDNKPFVLRTPIEHCRAYNNQLSLVA

SEQ ID NO: 501188 - protein, 406 aa, unidentified
MNMNAVGIDVSKRKSTVAILRPGGEIVKKPFDVPHLSSDFRSLTRLIRDLDGETRIVMECTGHYYEPIARRLSQAGFFVSAVNPHIIRNFQGHDNPLRKVKTDKADSVKIARYTLDSWGNLKQYTLMDELRSQLKTMNRQFSFYTKHKTAMKNNLIGLIDQTYPGANTYFNSPVREDGCQKWVDFVDTYWHVDCVRKMSLTAFINHYQKWCHRRRYIFSKSKAEEIYGKAKELVPVLPKDNFTKRIIKQAIAQLNTTSKTVEELRNLMNETASKLPEYPVVMAMEGVGPSLGPQLMAEIGDVMRFTHKGAITAFAGVDPGVNASGEYSQKSVHASKHGSPVLRKTLFQIMEVLIKNKPDDAVYLFMDKKRAQGKPYYVYMTAGANKFLRIYYGRVKEYLLNLSELN

SEQ ID NO: 501189 - protein, 304 aa, unidentified
MFGIGIDVSKATLDVAVHGEQFRQFSNDKRGFVRLIGWLKTWPIKQVVLEASGGYERAALDVLHAAGLPMVRINPARARRFAQGTGRAAKTDRLDATVLAQMAHLLPLTRYVPPAPWQQRLAEFAQCRRQLVQMRVSEMQRLRRLVDPDLIAMKQRHIAQLSDDLKQLDKAIAEQLEGQPGWKNIGALKGVGPILISTLACELPELGSLGSKAIASLVGLAPMNRESGTWQGQRRISGGRAVVREALYMAALTAIRYEPRLRAFYAGLKAKGKASKVALVAVMRKMLVILNARKRDAEVALGCP

SEQ ID NO: 501190 - protein, 334 aa, unidentified
MEKVTTLGIDLAKSVFSLHGVDEKGQVILRRTVRRDQLVKVVAGIAPCLIGMEACSGAHEWGRRFQELGHTVGLMAPKFVVPYRKSGKNDGNDAEAICEAVSRPSMRFVPVKSAEQQALLAMHRVRQGFVVERTATINRLRGLMSEFGVVLPLRSIMVRRQGAAAAENLPELARRAIGDLLDQLRVLDERIHGYDREIEAQAKLCEPAQRLMKIRGIGPTTALAIVATVGNAREFKNGRQFAAWIGLVPGQYSTGGKTRLGHISKRGDAYLRNLLVQGARSVLHTAAAHRDPISRWALELQPRCGYYRTLVAIANKNARIVWALLAKNESLRTV

SEQ ID NO: 501191 - protein, 361 aa, unidentified
MPDATRWVGLDVHATQTTIAVLGQGTGELTRAKLRGAPDVVVPDFLARFEGRVIAVYEAGPTGMRLARVARERGIDMRVCAPGLIPRKPTDRIKTDARDAERLVRQLAAGGLSFVRVPSEHEEALRDLVRAREDVRQDLSRARHRLSKMLLRRGLRYETGKTWTDRHIDWIVRLKFDDLASRIVVGEYVNAVQQLDQRRTDLEATIEQLLPSAPFAQTAYRLRCFRGLATLSAVGLCCEIGDFKRFAKPAQLAAFLGIVPAEHTTDQKRRLGSITKAGSSHARRLLVEAAWHYRRLPATGTTLARRQDGIDPRVIAIAWRAQVRLHTRYTQMKARNKPAGVITIANARELACFCWEAATLD

SEQ ID NO: 501192 - protein, 481 aa, unidentified
MPFLPTAAQALRERFMGLDLAKRETQLSVLNVAGEEIAVKRFLTRREQFQQLADELKANDTVALEVTTNAFAVVRLLQRSGARIILSNPIKTRVIAEAKIKTDKIDARVLAELARVNYLPSVWLPDDDTEALRHFCSDRRSLVDRRTELKNTIHAVLHRNLIPVSHSDLFGTGGQKWLQTVLADQNDETAVQLSLDPIDRLRVRALLLELERLEHSLKEIEGCIAAFIAARPPLRVQLDHLLSIPGVSLVVGAGLLAAIGNVQRFHSPKRLASYFGLVPATYQSGDPRRKHGPITKRGRAQARWLAVEAAEHLRKAPGPMRALYTRINRKRGHNVAVTAVARKLTELVWYLLMRDSDYLYQLPRLADEKRARVRMLARRRVGLRTPSAARKIGGRTALYGSGIAGRSFKTKIVRHAAKQAEDLYAAIVANSPRAQVAGSADPPVAFDPTRPRSIDWESLLRQAATDLLENQSLREEKQSLK

SEQ ID NO: 501193 - protein, 359 aa, unidentified
MKNVSRKLERVKKIAQEVGCKAYVGLDVHKKSINAAVWTDSRIVVTWVMPAENHKVVDCLCQLKDHLGEVVYEAGPTGFSLARACEQVGLPIKVVAPSKTPRPAGRESKSDRLDCRMLAKYSAKGLLEGIAVPTEEEEADRQVTRVREQLAKKLRLTKQHIKSFLLQHGLKEPHGLKHWSLEAIEELRELEMRKELRTCLEIYMDELEHAKRQLKVVEEGMKELSKEERHRRKVELLDMHLGVGPVTAMAFVTEIFRPERFKNGRQVSKQIGLAPMVRQSGESRKEGKILRTGRGELRRLLTQAAWSWINHDPYAHETYLRLVGNTGSKLKANVAMARRLGQNLWRMLAYGEVPLHVAT

SEQ ID NO: 501194 - protein, 417 aa, unidentified
MEYARVALPDAPPGGVTAGVDWANDDHAAAIVDGAGRVVQRFTVPDTGHGLKELPRRLSAAGAAEVAIERPDGTVVDALLEAGLTIVVISPGQLKNLRSRFGSAGNKDDRFDAFVLADTLRTDRARLHPLVPDSPATITLRQTCRARKDLVGHRVALANQLRAHLKTAFPGAVGLFADLDSPISLAFLARFDCQDRADWLSPKRLAAWLASVGYCGRKDPAVLHARLAAAPRGATGDDGAAKAHTTRALLAVLAATAEQIKVLDAQIAEQLALHTDAHIFTTLPRSGTVRAARLLAEIGDCRARFPSPEALICLAGVAPSTRQSGKAKVITFRWAADKQLRDAVCDFAGDSRRASPWATKIYNDAIARGKDHPHAVRILARAWLYVIWHCWQDHTAYDPARHKALQRLLNQDQLAAA

SEQ ID NO: 501195 - protein, 349 aa, unidentified
MNKVNPKGGRLLVNHQVEEFTMYFIGNDVSKKTLDLACFDQQRKRWSKPCKLDNHPKGWDTLIQWAEKQTQAPREDICIVMEATGVYHLKAAAHLSRKGLNVIIANPQLASQYAKSQNQQNKSDKLDARSLQEYGSQLKKYHLFTPDTPEISQLKALLSRMRQLGKDLQRERNRLEKCDFQEGSSWTRTSIERLIGFITCEQKLAQQQIDQLIKQNQVLRHDQKLLCSIKGIGKLTSQWLLPLLSTQRFNNAREAAAFLGLVPCHQSSGTSLKTRGRLSGRGDADLRARLYMPAVCAMTYDPTMKAFYQQLVAKGKPGKVALTAVMRKLVHVCYGVIKHQTPYIENYAA

SEQ ID NO: 501196 - protein, 310 aa, unidentified
MDIIAVGIDVSKDRLDVALRPSGETFAVERNGSGLDRLIERLLQLSPHIVALEATGGFETVAAATLASANLPVVIVNPAQIRAFAKALGQRAKTDPIDAAVIAHFAAATRPQVRPLPDEATRLLADLVARRRQIIEMIGAESQREKRITMPRLRKSIRRVIHMLEKELASLDADIDDAVRGSPAWREKEDLLASVPGVGPAIARTMIADLPELGTLSRKQIAALAGLAPFTRQSGQWKGRSFIGGGRASVRTALFMGAMVAMRHNPVLKTFFERLRAAGKPKMVALIAVARKLLTILNAIVRDKRPWQIA

SEQ ID NO: 501197 - protein, 297 aa, unidentified
MISTPWNKEVLVRGKEVFVGVDIHKESWHVTARTEGEEIFHGSIPSQYRTLRKLLGHFKDCRMRVAYEAGPCGFWLYDRLTEDGVETIVVSPSLIPIESGNKVKTDKRDSRELAKLLEGNLLKRVYVLREQDRVDRELLRTRRQIVEHRNDVARQIKSKLLFYGMRSPFSARHRWSQNYLQWLKGLDLPREGLRVCFESLIELYEYLTDQLIRMNQRVKELSQSSKYRQRMKLLGSVPGIGRLMGMEILVELQEVERFKRAEELASYMGLTPSEFSTGQYVRQGRITRCGNKRVRTS

SEQ ID NO: 501198 - protein, 422 aa, unidentified
MQVLYPRCAAIDVGKKEIAVCVRTPGDEPGGRRSQVRKYKTFYGVLKEMCAWLTECGVTHVALESTGIYSNPVFHALAEFGDFEVIKCNPAHVKNPVPGRKTDAADCCWLAGLLECGLVRGSYIPIQKIAELRDLTRYRAKLAGSRTSEIQRLQKTLEDAGIKLDSVASDVMGVSSREMIKALIDGERRGKVLAELARGVLRNKIPDLSMALAGRFSDHHALMCKLHLRHVDELTELTDTVEKQIEAMLVPFRPERDLLMTIPGIGPAASAVIISEIGTDMSFFPTAGHLASWAGLAPANNESGGRRRPAGTRHGNQHLANVLVECAWACSRTKTRPGAQFHRLVRRFGGHRNTRAKKKAAVAVAHTLLLIIYCVLDRHLPYEELGEDFYTRRQDPERYKDKLIARLAKLGYTVTVQPAQAA

SEQ ID NO: 501199 - protein, 430 aa, unidentified
MKSNTQNAKIEAITEKTLVLGIDVGSEMHYARAFDYRGIEYSKKPFKFSNTEAGFVTFKEWILNLKERHEKDKVVPGMEPTGHYWFNLGKFLQDNEMKPVLVNPHHVKKSKELGDNNPTKNDRKDPKVIAGLVREGRYMIPYLPDGVYADLRTASNIRFQLQAELTRIQNRISRWFNIYFPEYKTVYGKPDAKSGMLILKAAPLPEDILTLGIDGVNQIWRDEKLRAVGKARAKTLIEAAEHSVGSKEGAVSARMEIRMLLEDYESRNTRLQEVMVLIEELIRKIPMAEKLLEIKGVGIRTVSGFLAEVGDISRFNNPKELQKLAGLALVENSSGKHKGETTISRRGRKRLIYLLFEVAMSLVSKNQEFKELHNYYTTRRLNPLKKMQSLMAIAAKLIRVFYAMLTKGVDYDPKKMVSDIKRPAVYLQAA

SEQ ID NO: 501200 - protein, 336 aa, unidentified
MKTGQPEPTYELFVGIDIAATTAAVSTQRRGAKASRSFTVDQTPESYSRLVNKLQAAGYVPSYILVVMEATGSYWMSLATRLVHEGFRVSVINPAQAHHFAKALLKRAKTDAIDAQTLAQLAMVLQPEPWIPPPPIYYELQQRLAQRDDLLNLRQQVRNQLHALEQHPVVMTQVSTRMKDLLATLRSQIDEVEAEIAAALNQDSAWATAAERLQSIKGVGWVTAAWTLVTTLNFTTCDTVDSLTAYAGLAPMPRQSGSSIWHRPSIGHSGNGRLRTAFYMATLTAARFNPVIKRFYNRLREAGKPEKVARCAAARKLLHIAWAVVKKNQPFDPNYA

SEQ ID NO: 501201 - protein, 411 aa, unidentified
MEGRALKQYIGIDIAKHEHVAASRYENGEAHGRAFAFANDGAGFKSLLERLRELGATAGSCLVVMESTGHYWMALWEFLYLRGFDIAVVNPVLTDAFRKADTLRKTKTDKVDAFLIAEYARFKGLGPTRVSAEDAEGLKQLTRYRHHLVKERTALKNRLTSVADRIFPELAGLFSDKNCATARAILGEYGTAAKVASTDIRTLTKTVRSASRGRHGREKAEEVKAAARRSVGSTFAAGALAFEAGRIAELIGHLDGEVAKLDGEIARLLDPEVGALLQTIPGIGPVCAAAIAAEVGDPDRFDDPRKLVAYAGMDSTKCQSGRFDGDEQHMSKRGSAPLRNALMTAADGARRSDPYFGDYYDSLRARGKHHYVAVSGCARKLCGVILAVLRERRPYEPRPSIQSQQNHAAAD

SEQ ID NO: 501202 - protein, 340 aa, unidentified
MKKVYAGIDLHGNNNYLGILERQGKRVFKKKLPNNLQVIMEVLKLFGKAIQGIVVESTFNWYWLVDGLMDEGYRVHLANPAAIQKYAGKKHADDQDDAFWLAEMLRLGILPEGYIYPKEDRPIRDLLRKRGHLVRLRTSLMLSLQNIITRNCGVHLNGNEMKRLKTNHVAPLLAGQEDLALTGKVSKDCIDFLTHQINQVEKVVQNKVRLKDQYRYLETLCGVGKILSLTVMLETGPIERFAKVGNYTSYCRKVPSRWTSNDKTKGKGNKKNGNKYLAWAFSEAAELARRYDKQARAYYQKKSAKTNFMTAHTALAHKLARAAYFVMRDQVPFDPDKVFA

SEQ ID NO: 501203 - protein, 322 aa, unidentified
MLYVGIDVSKLSFDVAVLNNGSYQNMQFDNNSEGFKALSKWVKSSRKEIVFCMEATGIYGLALAKYLVQKSEKTIVANPIKTNAFAKMEMSRNKTDKADAQSISRYCKHLDDKGEITKNLFKPKGEAFEKLQFLITRLEQLDKIATQENNRLGVSLDKEAVRSIKSIISHIDKQIIKIKKVLKEIVKQDDTLNQQVGLLISIPGIGEKTAWSILAYLGDISLFCNAKQVTSYAGINPKIEQSGTSVNKSSLSKIGNKRLRKALYMPALTAAKHNPLMKDLYERLQQKGKPNKVALCAVMRKLLVLAYGVLKSGKAFDPCYQR

SEQ ID NO: 501204 - protein, 391 aa, unidentified
MIYIGIDVAKDKHDCFITNSDSEVLFKAFTIFNNLDGFNDLYQKIESVMDDVTKVKVGLEATGHYSYNLLGYLIDKGLPTYVINPLHTNLYRKSLSLRQTKTDKVDARTIASMLMSDMNLKSYSDTSYHNEELKSLTRYRFDKVKERAKLKTSVSRLVCILFPELEKLVPTLHMASVYALLSEFPSAKHVATAHLTRLTNLLSESSKGRYGKDTAITFRDSARASIGSNMPAKSLELKHPIKLIQELDSEIDEIENEIKIIMDEINSPILSIPGINYRMGAMIIAEIGDFNRFDSPDKILAYAGFSPSTYQSGQLDGAYAHMEKRGSRYLRYALYNATKYVCHWNPTFAAYLAKKRAEGKHYNVAISHAVKKLVRVIYHLEKTKQQYIKAA

SEQ ID NO: 501205 - protein, 338 aa, unidentified
MTTGLAAGTYELFVGIDIAATTAEVSTQRPGAQAGRSFKIDQTPEGFHRLVHTLQATDNAPSHVLVVMEATGSYWMSLATRLVHEGFRVSVINPSQAHHFAKALLKRAKTDAIDAQTLAQLAMVLQPEPWMPPPQIYYELQQRLAQRDDLLNLRQQVRNQLHALDQHPEVIASVRTRMERLLVLFQSQIDEVEGEIAAALNQDSAWAAAAERLQSIKGVGWVTAAWTLVTTLNFTTCDTVDALTAYAGLAPMPRQSGSSVWHRPSIGHSGNGRLRTAFYMATLTAARFNPAIKAFYNRLLEAGKPEKVARCAAARKLLHMAWAVVKKDQPFDPNYAQG

SEQ ID NO: 501206 - protein, 402 aa, unidentified
MNAVGIDVSKGKSMVAIMRPFGEIVSAPFEIKHTASGINSLVELINSVEGESRIVMEHTGRYYEVLAHQLSKANLFVSAINPKLIKDFDNDSLRKVKSDKADAVKIARYALDKWQNLKQYNVMDELRNQLKTMNRQFGFYMKHKTAMKNNLIGILDQTYPGVNTYFDSPARSDGSQKWVDFASTYWHVDCVRKMSLNSFIDHYQNWCKRKKYNFSQSKAEEIYGKAKELVPVLPKDAITKLIIKQAVEQLNSASTTVESLRTLMNETASKLPEYPVVMAMKGVGTSLGSQLMAEIGDVSRFTHKSAITAFAGVDPGVNESGSYEQKSVPTSKRGSSDLRKTLFQVMDVLIKTHPEDDPVYQFLDKKRAQGKPYYVYMTAGANKFLRIYYGRVKEYLSSLPES

SEQ ID NO: 501207 - protein, 316 aa, unidentified
MALLLAAGVDVGQRFLDLGLAPTGQTTRYRNEPVDIARLVARLSQVGVARVVLEAIGSYAQPLVLALVAAGLSVGVVNPRRIKAFREAEGRRAKTDRLDAGLIARFALAMPEAIRPLPDAAARALKELSTRRQQLVAMRAVEKTRLKQAHEPAVIASHQACIAGLDAACAAVEAELDSRIQADAARLEAHRLLVSIPGIGPRVAGVLICDLPELGQRDRKCIASLAGLAPHVSQSGNAPPRAMISGGRSCVRTALYMSALVAVRHDPHFRASYRALRDQGKPAKLALIAVARRILITANAVLKTKTAYKLHMPLDP

SEQ ID NO: 501208 - protein, 355 aa, unidentified
MRGSPEAPRAVKPASERGAPRIDPLIPNSRRGRERASPIRQGRDKMEITVGIDVSKARLDVHVAPSGESFAVGNDEAGVAALVARLGQLDGLLGIGIEASGRYERLAVAELAAAALPVMVLNPAQVRSYAQAIGFKAKTDPIDARLIALFVAAVRPEPRPLPDIQTQELAALMARRRQLVEMLAAERARRMKAQPGRVRASLARVVTTLEDELKALDADIDRTVRGTPVWRDNENLLASVPGIGPIIARTMLAELPELGTLNPKQIAALAGLAPFTRQSGKWRGKSFIAGGRPTVRTALFMGALVAARHNPTLKAFNDRLLANGKPKLVALIATARKLLTILNAIIRDQKPWQPA

SEQ ID NO: 501209 - protein, 341 aa, unidentified
MTLYIGVDIHARQQTVSYLDTADGTTGLVELQHERDDIKGFYSQFQGEVIIGIEACGYTNWFEELVEQLGHQLLVGDAAEIRRLARRRQKNDRRDADLLLELLLHNEFPALFRYSRASRELLRQLRYRHKLVKLRTMVVNTLHALAINAGLSLRAKLLTKGGRRQLAGLQLSVISQQQRDELLSLADELTRRIGTVEQWLQAQAKSDVRVQRLQTHPGVGLLTSLCLVHTLGDLSRFPSTRKVAAYVGFDPMEDSSAERKAYGGISKAGSRLLRYLLVEAGQTAAKDDEHLKQFYRRLLPRRGKARAKVAVARKLLIRCFIMGRAEIDYAEFLRRGKKDAE

SEQ ID NO: 501210 - protein, 460 aa, unidentified
MNPKRSKSRNGGKMSMVHPNAAAIDVGATMHMAAVGADSAPEPVRSFGTFTADLHRLVYWFTECGVETVVMESTSVYWIPIFELLDARGFTVFLVNARDAKHVPGRKTDVSDAQWLQRLHSFGLLRASFRPKGQIAELRAYVRQRERLLEYAASHIQHMQKALTEMNLQLHHVVADITGATGLRIIRAILAGERDPEALACLRHYSCHSSAETIAKALTGSYRAEHLFALEQALALYDAYHEKASACDVRIEAVLKELSIHRGHGHGSAPRASRRRNRTDQANALAFDVREALFALLGKDITTIDGLGPYLSLKLIAECGDDLSSWPSAKHFTSWLGLAPSNKVSGGKMLSSRTRRSGGRAAALLRLAAVTVGRTDTALGAFYRRLSARIGKAKAVTATARKIAVLFYNAVRYGMDYVDPGASSYETRYRTRVVNNLHRRAKAFGFVLQPLEPKVGAAVS

SEQ ID NO: 501211 - protein, 412 aa, unidentified
MSYTVAGIDVHKKVLMVVVVRLEASQPEWQPQQRRFGTTSSELHRLSVWLREQGVGEAVMESTAQYWKPVWYELEPQMGLQLAQAFSNRAPRGRKHDFKDAERLVRRLVAEELTLSFVPPPEQRAWRTLTRMKVQLARDRVRLHSQLECLLEEMRLKLSSVISDLLGVSGRRILQALAEGETDPKKLAELGDQRLHCTNEQLRDALTAKPEPMHQQLLALYLERLRLLDEQIAKLNAMTAQAMHAHQDAVVRLAEVPGFGVDSAQQVIAEVGPQASSFPSPAQLSSWVGTCPGQQESAEHNHGGRSAKGNKYMRRLLTEAAQAAVKAKGSHWQITFRRLLPRLGYKQALWAIAHRLCRLVWKILHDGVAYLERGSQRDPKARRQRAQTLLRALRKLGYQVELKPVHPTLATT

SEQ ID NO: 501212 - protein, 349 aa, unidentified
MLATTGQTIRVVGIDIGKNSFHIVGLDGRGAIVLRQKWSRGQVQARLANLPPCLIGMEACVGAHHLARRLQALGHDARLMPAKYVRPYSKGQKNDFRDAEAIAEAVQRPTMKFVAVKTSDQLDLQALHRVRARLVSQRTGIINQIRSFLLERGIAVRQGQRFLRAELPRILTAACEVLSPRMARVIEALAGDWRRLDGRIDELSAEIQALADADSACERLMSVPGIGPIISSAVVAAIGTGEAFTKGRDFAAWLGLVPRQMSTGDRTILGRISKRGNRYLRVLFVQAAWVVLIKPTSWHRHGLKAWIEAAKKRLHHNVLAVALANKLARIAWSVLAHGRAFEVSRPQAA

SEQ ID NO: 501213 - protein, 370 aa, unidentified
MRDGSTLYVGLDVHKDSIAVAYATTDAPTDPVHVGTIGTRQCDIDALVRKMQSKGAQLAFIYEAGPCGYWLYRYLSRKGLPCFVVAPSLIPRKPGDRVKTDKRDAVTLARLARSGDLTPVYVPDIPDEAIRDLARAREDALRDLNAARFRLKALLLRNDIRYVGRANWGAEHVRWLARLVLATPAQQIVFQEYVRTVTERTELLQRLEAELLEQAKPWRLYPVVEALQALRGVQFTVAITTIAELGDLTRFDNPRQLMSYLGLTPSEYSSGDRRRLGGITKAGNGHARRVLIEAAKAYRHRAKISEQIQARQQHLPAPIRDIAWRAQVRLCGRYRKLLARGKHPNTIAAAVARELAAFMWAIARTQAVSV

SEQ ID NO: 501214 - protein, 318 aa, unidentified
MQVCVLDWGGKVLGNRTCENDPRRVAEYVATHGGVRGAAMESCEGAADFAEGLIAAADWSVDLAHPGYVHRLRQNPDKTDYSDARLLADLERVGYVPKVWLAPQAIRELRRLVRYRRQLVNERRNVKLRVRALLRAHRRSCAVPRWGVAWFQWMRAVELPEQSRWILDRHLDRLQQLNGDIQAVEKRLEAATKDDAVVQKLLTLPGVGPVTAWVLRAEVGRFDRFRSGKQLARFCGLTPWNASSGSRQADAGLIRACNRDLRSVLIEAGHRLKRCDPRWSALADQLRQAGKPGSVIAAAVANRWMRWLYNEMTAAQAA

SEQ ID NO: 501215 - protein, 466 aa, unidentified
MKPPQRRPRKPSASGPSLLERIQPNAAGIDCGSAEHYVAVPADRDATPVRSFPTVTAELHRLADWLAACGVTTVAMESTGVYWIPVYEILEDRGFDVVLVNAHHVKNVPGRKSDVVDCQWLQELHSVGLLRGSFRPTAAIAALRAYLRHRETLVQSAATHVQRMQKALVQMNLQLPTVISDITGVTGLRIVRDIVAGQTDPHALAQHRDGRCRASEAEITAALTGHYRPEHLFVLQQNLELFDTYQRQMAACDAAIEAHVLTLAVQAPAAASPLPAPRTRKTSYDKNEPRFDIRTPLHQLTGVDLTQLDAIGPYSALRLLAEIGTDMSRWPTEKHFTSWLTLAPHNKISGGRLLSSKTQPSANRAAGVLRMAAMTLGRTETALGAFYRRLAYRVGKAKAITATARKLAILVYRTLKDGLVYHDPGAAAYDAQHRQRVIRRLRQRAANLGLALVDRSTGEVLEGAVS

SEQ ID NO: 501216 - protein, 339 aa, unidentified
MKYYVGLDIHKTFCHATIMAEDGTIVKSGRIEVDEKKLQQFFIGIENAEVVIEASGMWEPYYNLLERLGYQVVLSHPLKTRAIAEARVKTDKIDSQILAHLLRADLLPRSYIPPKNIRELRKIVRHRMFLVRNATRMKNKIRAELLKRGWKRKDIFTTQGKQWLRSLEIDEITSCLSVLDQLFLEIKRSNEKITSLTLQNDQARILTTIPGIGYYSALLIVSEIGDVMRFPSSGKLCAYAGLVPSVHQSGVYQRYGHITKTGSKYLRWILVEAVHSHVRFSKSSHLTHYYNRLWRRRGKKVAVVATARKMLKVIYWMLKEQKPFRVKGELRAVNCREGI

SEQ ID NO: 501217 - protein, 430 aa, unidentified
MKSNTQNAKIEAITEKTLVLGIDVGSETHYARAFDYRGIEYSKKPFKFSNTEAGFATFKEWILDLKERHEKDKVVPGMEPTGHYWFNLGKFLQDNEMKPVLVNPHHVKKSKELDDNNPTKNDRKDPKVIAGLVREGRYMIPYLPEGVYADLRTASNIRFQLQAELTRIQNRISRWFNIYFPEYKTVYGKPDAKSGMLILKAAPLPEDILTLGIDGVNQIWRDAKLRAVGKARAKTLIEAAEHSVGSKEGAVSARMEIRMLLEDYESRNIRLQEVMALIEGLVKQIPMAEKLLEIKGVGIRTVSGFLAEVGDISRFNNPKELQKLAGLALVENSSGKHKGETTISRRGRKRLRYLLFEVAMSLVAKNPEFRELHNYYTTRRLNPLKKMQSLMAIAAKLIRVFYAMLTKGVDYDPKKMVSDIKRPAVYIQAA

SEQ ID NO: 501218 - protein, 369 aa, unidentified
MAHSSTLFIGLDVHKETIAVAYGAEEREAEVVVLGTSGTRQGDLDKLIRQLQAKGKPRHLVYEAGPCGYWLYRYLSKKDLKCWVVAPSQIPKKAGARGTTDRRDAVQLARLLRSGDLPPGYVPGVEDEAIRDLVRAREDALKNGKAAKVRLKAFLLRQDIRYEGRATWGPAHLRWLAEVVCPTPAQQLVCQAYVRAVSEHTERLQRLETELQTQVQTWRWVPVVEAIQALRGVQFPVAVTLLAELGDLSRFDTPRQLMSYLGLTPSEHTSGERRRQGAITKTGNSHARRALIEGAGAYRYPAQVSRHLQLRLEKLPQVIQDISWKAPVRLGNRYRRLMARGKHANQVVVAIAREMAAFVWAIARTVKGT

SEQ ID NO: 501219 - protein, 412 aa, unidentified
MTLMIGVDPHKGSHTAVAVDETEQALAELKVRSGPAQLEQLLSWAQRFPERSWAVENATGLGYLLAQQLVAGGERVIDVQPKLAARVRLLDSKSVNKNDPHDARSVAIAALRSPTPVEVRPEDHSAVAKLWSKRQRDLARARNKVACRLHSLLCELVAGGVPDEIYAAKAAKLLASISPDGAVAAARVELAEDLLEDLRRLDAQIKESRRRLEAVVTASRTSTTKIFGVGPVVAATAIGITGDVTRFPNRDHFASFNGTAPIDVSSGGKKVYRLSRRGSRQLNHAIHMAAVTQIRHRHSEGRAYYDRKVAEGKSHKEALRCLKRRVSDALYACMVEDAKRDDRLVKKGPGGQPGNVSVASAAGSHPGTPALRLSHSRTRRQAITARRSSPAQKTRARARSVTTTRKATRSGS

SEQ ID NO: 501220 - protein, 413 aa, unidentified
MALKIVYEICCGIDVHKTFVVACIASTNKGVTTYKRHRFSTYTKGLRELSKWLCENNCKDVCMESTGKYWIPVFNILEDSCNITLAHPKYVKAIRGKKTDKKDAKWIADLFKHDLVAGSFMPPLAIRQLRDLMRYRFKLTNFMSSEKNRLQNCLTISNIQLGNVVSDTFGKSSMNIIDKILDNPLDTSFDIEPLIHGSMKDKLPELELAIDGFVTPEQAEKLKVIKQHYEDLGSRKADLERIILSLAESYSEEINLILTVPSFKNIFSAIAVVSEIGVNMDVFPTAKHLCSWAGLTPTNNESAGKKKSVRISRAGCYIKPLLVQCATAVVKSEKHPEIRNRYLRLKKRRGHKRAIIAIARMLLTAIYHILKKKQPYNAELYRKSDVLPVSREITVEQAILLAKTQGYRIMVTT

SEQ ID NO: 501221 - protein, 317 aa, unidentified
MTIWIGIDVSKSKLDAGWIDGGKRVHKKVRNSKKGFAELMAAVPDEPRFVMEATGTYYFNLALFLHESEQFVAVVNPAQVKHYIRSELTRAKSDKSDSLSIAKFGKEKEPSPWKPHVREVYELRQLLTLDAKLQQMKVQFTNLVEAFVQTDYHSKLAIDQASMMAKVLKERRAKCKREMEKLAAKLFPEQVEILETIPGVGTQSAVEVMACVGDFNRFESSRHLVSFCGLTPTIKQSGTSVHSKGHMSRMGGDKIRKTLYMCAMNALRCNDQCKAMWNRLEATGKHGKKIMVAIMSKLLRQMWALVTKNVKYDPKWA

SEQ ID NO: 501222 - protein, 416 aa, unidentified
MNDLIRIGMDTSKSVFVLHGVDAAEQPVLRKKLRRRQVIEFFAKLPPTQVGMEACGAAHHWARELEALGHEVKLLPAQRVKPYVARNKNDTADAEGVCEAMSRPRMRFVPVKTTEQQAALMLAGIRDRLVARRTQLSNAIRGYAAEFGLVAAKGLDKVEPLLARIAADATLPALAQEMFATLGEEYAQLQPKLGKIEAQLLAWHRQNELSQRLAEIACVGPIGAALMVMKVTDPQAFRSGRDFAAWLGLTPKDHSTAGKLRLGVITRAGDETLRRMLVLGATAVIQQVRRGRGHPSPWLVALLKRKPPKLAAVALANKTARIAWKLMVSGERYNRARASGSAHGNPCSEGASSQPRKPRAVLAAVKARPISAAARRTGSATAGLDGGCARRVTTIAVGTKKRSTVEQRNESQGHSL

SEQ ID NO: 501223 - protein, 373 aa, unidentified
MQNVSTLFVGLDVHKDSITVAYALDGGEVEVLGKIGTTQADLDRLCKRLLSKAKHVRVVYEAGPFGYVLQRRLSDKGIQCMVCAPTQIPRKPGDRVKTDRRDAIKLVRSLRAGDLSAVNIPTVEDEAFRDLARTWAKSRDELKRARQTLKAFLLSHGVRYVGVANWGPAHRNWLSKFSFGNAWQDFAFNELRRAIEDRFAQCQRLESAMRDAVPRWGFYPAVLALQSMRGIQFTAAVGLLSELGDLSRFAHPRQLMAWLGVTPSEYSSGGKRRQGGITKTGNSFARKLLIEAAWSYRHTAKVSPEIQRRHEGLPKVIVDRAWDAQVRLCRRYRKLVARGKSTNVAIVAVARELAGFIWDIGRLGMAQASPRSE

SEQ ID NO: 501224 - protein, 455 aa, unidentified
MSKRSKKREPRGLPPAPVLEPNAAGVDIGATEIYIAVPPDRDTQPVRRFATFTEDLISAADWMKGCGIETVAMESTGVYWIPLFQMLEARGLKVCLVNARHVKNVPGRKSDVSDCQWLQYLHAVGLLRASFRPEQQVCAVRSLTRYRESLVEMAAVHLQHMQKALDQMNLQLHHVISDLSGTTGMAILDAVLAGERDPKKLARLRDPRIKADEATISRSLVGDYRREHLFTLRQSVTAYRQYQELMAGCDVEIERMLEEFSSAADGGAGPLPPSAKHRQKPRRNELKFDLRGHLYRIFGVDLTAVPGINAQTAHTLLAEVGCDLSAFPNASAFASWMGLCPDNRVSGGKVLSARTRKVKNRLARALRLGAQSLFRSQSWLGQFYRRMRAKLGAPKAITAAAHKLARILFHLLTTNQPYDESVFAQQQIQNNQRIHRKLQQQAKSYGYQLVEITAP

SEQ ID NO: 501225 - protein, 354 aa, unidentified
MNTTQVFEKRKIAVAIGIDLAKDHCDVVAYNADNKICFTKANWAYPHLMEWLANAQPAVVLMESCKGCHVRARDIADLGHDTRLVKGADVKALRNVCQKNDIRDADYIARLLYVPGTKFVFVKNQRQQSLQFLQNEYKSIQELRIQVGNQIHAGLEEFGCPGPKSKKIIQSRMMAHLEKNAELIPDEVMSSFLRRREMWLNLFEQEEEAKKRMEEIAKTDDDAQRIMTVPGVGAQTAVGMLVHIGGDIGRFKNSGQFAASIGLVPKQNSTGGNTTLNGITKCGPKRLRANLVQCGQVILMHADKLKGNFGDWVRKLRDSGKKRGVIVCAIAAKIARIVYRLMKDKVDYTPVPSR

SEQ ID NO: 501226 - protein, 400 aa, unidentified
MLSIGIDVSKGKSTVCGMKPGGEIVYAPFEVQHTREGMSELVSLLRSSGEEVRAVLESTGSYHCPVVAALLENGIFVSVVNSLRMKRFCSQSIRKVKTDRIDAMQIALYGLAYWQELQPTRLPENTYRELQLLARQYYQMTSLLIKAKVDFNAICDQVLPGMQELMNDHAGRHKLSDFVLRYRHTTHILEMGETRFRKDYCKWAEKKGYRNCERMAALIFATAQNGIPVLPNAPSTQIVITEAIRVLHTVEASRDAILTQMQALAKTLPEYSLVREMPCIGDTLAPRLIAEIGDVRRFHSKRALIAYAGIDAPPYQSGKFCANNRHISKRGNRYLRKTGYEVMQSYVMHKPANDPIFTFIEKKRSEGKSGKLAMVAGLNKFLRVYYGKVTELYRSLPAIE

SEQ ID NO: 501227 - protein, 452 aa, unidentified
MAQAKPQVIDDEEHERVYERVAAVDVAKDSGMVCTRTPHRSRPGARQSTVWTVKARMTAIRALGRQLTKDGIEMVTLESTSDYWRIWLYVLEACGLAVQLVNAAQARNLPGRPKTDKLDAMWLARLTEMGLLRPSFVPPAAIRALRDYTRARTRLVQERTRCFQRLEKLLEGALVKLSSVASKLTTESAKDMIKAMIAGERDPHTLAALARTRMKAKHDELVEALAGMFDDHHGELAQILLDQAAFCDARIAQLTARITAAVAAMPAAWGVDADGTTGPDAGTGPDAAALPAVQRLAEIPGVSPDLARSIIAEVGLDMSRFPTAAHLVSWAGLCPRARQSGPRTRAGKKNQGDSWLRNSLGQAAIGAARTTTTFLGERYGRIARRRGKAKAQVAVARSILTIIWHLLADPAVRYADLGAGYYQTRTDTDRKLRNHIRQIQALGFEVTLTKAV

SEQ ID NO: 501228 - protein, 338 aa, unidentified
MELSVIGIDIAKNVFQLHCVDRQTGEIERIKLRRNEVLPYFARRTPALVAMEACGGAHWWARQLQQLGHTVRLLPAKAVRPFVLRNKTDAADARAIWTAVQQPEMKTVAIKTEYQQSILALHRMRAQLLKFRHMQTNAIRGLLLEFGHPLPESYLALRKAFPTVMATLDKQLPGILIETLREQWARVQSLDNEIALIEGRLKRALAETPTCQMISDIPGVGLMTATAAVATMGDPASFKTGREFAAWLGLVPRQTGTGGRIRQLGISKRGDAYLRTLLMHGARAIIARRTYSDWVAGLIARRPYSVVIAAIANKLARTIWAVLATGKRYDGAAFAAAI

SEQ ID NO: 501229 - protein, 351 aa, unidentified
MVIIGVDYHPSDQYIAFVDKETGEAGERRLNHSDQEAEKFYRELAARGVSVRVGMEATGYSRWFERLLAELGIELWIGDAAEIKSRRVRKQKTDRNDAALLLKLLLEDNFPRIWVPSPENRDLRQLLWHRHRMVQMRTRIMNQLQALAMNEGQRRKKKLWNAQGRAQLEKLPLATWASRRRQDLLELLDRMNPTIEELTAVVEQEAKKRPEVLRLMSHPGVGPLTALAFVLIIGTPQRFQCGKQIGSYVGLIPSEDSSAGHRRLGHITKQGSSLLRFLLAEAAQAAARCDVDWRRRYMHLAMRRQRNIAKVAMARRLAVRLYWMWRNGWEYMQWVKFGSNAGQLVTGHGVN

SEQ ID NO: 501230 - protein, 344 aa, unidentified
MNIASIGIDLGKTTFHLVALGERNKILLRKKFSRSQLLAYTANLPASLMGLEACAGAHFVGTALREQGHEVRLIPAQFVKPYRKSNKNDFLDAEAIAEAVTKQNMRFAQLKTQEQLDWQAMHRVRDRLVQRRTALINEIRGFLLERGITFAAQPIHLRKNLPTVIEDADQNLSPRLRWLLDRLWQEWKQIESEVQAITDEIERISNEDARCRQLRQIPGFGPLVSTATVAAIGNGATFRRGRDFAAWVGVVPRQYSTGGKQKLYGISKRGNVYLRRMLIHGARAVLFRVKYDTGGFGQWVHRLAQRAPHNKVVVAIANKLARIAWAVLSSGKDYRHQPLLQPAA

SEQ ID NO: 501231 - protein, 340 aa, unidentified
MNATTYGLDVAKRVFQLYWVDAHTGEIVNRRFGRDELIGFLAQRPAGRVALEACGSGHWWARKIRALGHEVVLLHAKFIRPFVQTNKTDAADARAIWTAVQQPEMRTVAAKTEDQQAMLALHRMRALLVKFRTMQVNQLRGLLYEFGVTFRAGRLAGLAEMRARMAELEDALPAMLFDGLQDQLHRIDGLEQGIDQLEKRISAWHKQDATCRAIAEVPGIGRLTATALVAMIGDARTFKSGREFASFLGLVPRQSGTGGRVRLGSISKRGDPYLRTLLIHGARSVMYHAKVPTPWQTTIQARRPANVAAVAVAHKMARTAWAILAHGRTYEKDYVSVKPA

SEQ ID NO: 501232 - protein, 459 aa, unidentified
MGRAKSQVSAWEGLKVIHPNAAGLDIGSEEIWAAVAPDRTAEPVRKFGTFTPDLQALADWLIACGVDTVALESTGVYWIPVYEILEAQGLQVYVVNARHVKNVPGRKSDIQDCQWLQGLHSVGLLRGSFRPEGEIVALRAYLRHRAGLIEHRAAHIQHMQKALQQMNVQLTQVVSDITGVTGLAIVRAIVAGQRDPQQLAALRQPGCQQSAAQIAQALTGNYRREHVFALQQALALYDFYTAQLAACDVEIERQFANLKPISADLPPLPPSEKRDSHSKNGPSYDARSYLYRLTGVDLVAIAGLNESTVQTIISEVGTDLNAFPSERHFCSWLGLAPHNDVSGGKRLRSRTLKTDNRAGQAFRMAAQSVAKSPDSAFGAFYRRLKARLGAKQAIVATAHKIARAFYHMLKHRTPFHDLGGDEYERRARERELKNLEKRAAKLGCSVIKNPAAVAIAGSF

SEQ ID NO: 501233 - protein, 385 aa, unidentified
MRTATKRGPGPSHLLMTPDHAGNVVGVDPHKRTLTATVADARGGIVASAHFRVSGEGHRELDAWARQFGPIARWGIEGSASWGRHPAMFLIGRGHDVRDVCADRTPRSDRARQRGKSDTLDSERIAREVLAHPLLPKAFKRSGQEQGPDEQHQLLALWHHRRRSILTSRQHLVGEAEYILCELPLQLREQLPDTNAVKPRLAALARRNRRRRYDAPTKLRLQLLDAYRAQIKALDLEEKQVIAQLKELVDRSGSTLGKLSGLSTRSVAELLVEVGDPRRFTEGGFARFNGSAPLPASTAEGPGEPIRHRYNPGGNRRVNAVLHRMAVTQLGREPRAQRIYANARAAGHTKKEARRVLKRHLSNVIYRRMIRDLHAELPDQSLLAA

SEQ ID NO: 501234 - protein, 413 aa, unidentified
MRTFRTFSSDLHQLADWLKEVGVKTVAMESTGVYWIPAFEVLEAHGFEVLLVNARHVKNVPGRKTDVTDAQWLQQLHQHGLLRGSFRPRDGVVRLRAYLRHRERLVDYAASHIQHMQKALMQMNVQLHHVVTDITGVTGMRIIRAIVSGNQRPEQLAEFRDVRCSASKETIREALTGNYRPEHVFALRHALELYDVHQAKIAECDVEIAAVLRTLNEERAAPEEPLPAVRHAKGRNEPKFDARPALYTLLGADLTQIHGFGPYTVLRLVAECGDDMRKWPTAKNFTSWLTLAPGNKIGSGGRLLSSKTRRSASRAAALLRIAAVNIGRTHTALGAFYRRLAARIGKAKAVTATARKLAILFYRALRFGMTYADPGASYYEERHRERVIHNLHRRARELGFSLVANAAAHSGVS

SEQ ID NO: 501235 - protein, 398 aa, unidentified
MTESSDYESVQVFIGVDVGKDTHHAVAINRSGKRLFDKALPNDENKLRSLISDLKQHGQILLVVDQPATIGALPVAVARSEGVLVGYLPGLAMRRIADLHAGEAKTDARDAAIIAEAARTLPHALRTLKLADEQIAELSMLCGFDDDLAAQTTQASNRIRGLLTQIHPALERVLGPRLDHPAVLDLLQRYPSPEKLASLGEKKLAAQLCKLAPRLGKRLAADIAQALAEQTVVVPGTNAAAVVLPRLALQLITLRKQRDEVALAVEQRVLAHPLYPVLTSMPGVGVRTAARLLTEVACRAFASAAHLAAYAGLAPVTRRSGSSIRGEHPSRRGNKAPKRALFLSAFAALRDPLSRAYYTRKMSQGKRHNQALIALARRRCDVLFAMMRDGTFYTPQAS

SEQ ID NO: 501236 - protein, 356 aa, unidentified
MTIVAHAHPFVIGVDAHARNHAVAVVACPTGEVVDEAQFPATVAGLQRAVSWVARRTGGDLDVLWVIEGVGTYGARLARVANDTGYAVAEAGRMNARANRGVGKSDPLDARRIAQSVLAVDEGMLRRPRADDGVRAAVRVLVASRDHLSAERTSAVNALTALIRVADLRIDARRPLTAAQITAMAAWRGRDEDLATAVARREAVRLAKRVIAADREIAANTKQLTDLLNASPARVLLDQPGIGPVTAAVTLAAWSHPGRVRSEAAFASLAGVNPIPASSGNTVRHRINRGGDRRLNRALHMATVTRIRMDPRTRAYVEKRTAEGRTPREIRRCLKRYLARQIYRQLNAAETALNPT

SEQ ID NO: 501237 - protein, 402 aa, unidentified
MNAVGIDVSKGKSMVAIMRPFGEIVSAPFEIKHTASDIHSLVELINSVEGESRIVMEHTGRYYEVLAHQLSKANLFVSAINPKLIKDFDNDSLRKVKSDKADAVKIARYALDKWQNLKQYSVMDELRNQLKTMNRQFGFYMKHKTAMKNNLIGILDQTYPGVNTYFDSPARSDGSQKWVDFASTYWHVDCVRKMSLNAFIDHYQNWCKRKKYNFSQSKAEEIYGKAKELVPVLPKDAITKLIIKQAVDQLNSASTTVESLRTLMNETASKLPEYPVVMAMKGVGTSLGPQLMAEIGDVSRFTHKSAITAFAGVDPGVNESGSYEQKSVPTSKRGSSDLRKTLFQVMDVLIKTHPQDDPVYQFLDKKRAQGKPYYVYMTAGANKFLRIYYGRVKEYLSSLPES

SEQ ID NO: 501238 - protein, 348 aa, unidentified
MALTIVETRAITGGVDTHADTHVAAALDPIGGLLGVREFPVTPAGYAGLVEWLTGFGTVALVGIEGTGSYGAGLARHVTTAGIRVVEVDRSDRQDRRRQGKSDPLDAVSAARAAQSGRARGAPKGRDGSVEAIRALMVAKRSASADRIQAINQARSLIVTGPDDIRVRFARHTPAALVAELASLRPRPGSTVGYATRVSLRELGRRGQFLDGQLERLDELIAPLVTARAPGLLALYGIGTHTAALLLIAAGDHPERLRSEAAWAHLCAAAPIPASSGKTVRHRLNPGGDRQANHALWRIVFTRLGSHPATRAYVVRRTAEGLSKKEIIRCLKRYVAREVYPHLRPPVG

SEQ ID NO: 501239 - protein, 437 aa, unidentified
MKAVVERCAGIDVAKDILNVCAMCGPADQDPSVELEKFRTFNAELDRLRSWLLARGCAEVVMESTGSYWKPVFAVLEDSGIKVVLANGEDVKQRRGHKTDWNDCQLLANLLRHGLVRPSFIPPRAIRDLRDLTRRRKQLLGDATSERNRVQKVLEEANVKLGSVLSDVFGVSGQLMLEKLLDGEQDMEAIAGLAQRKAKAKIPDIIRSLEGNRLTGHHRKMLGYSLEHLAFLEKQIDEIDGEAFRLIEAEGLAPAHQLLQTVPGVRETAAAALLAETGADMTVFPTTGQFSSWLGVSPGNRTSAGRNTGTSISRGNKWARSTLVECAWAASAKKEGPLRERYLKLSVKGRKPAVVGVAHAMAVIIHRTLSTGTPYSEPDKAPDERQTQRLIRHHVRRLGKLGVAVSSLRPDTARQNKTSGGTTTRQIHQTDTELNAQ

SEQ ID NO: 501240 - protein, 346 aa, unidentified
MEHYVGLDVSLKLTAICIVDRTGKIEREGVVSSDPEAIAEFIKSHASHVERIGLETGPTVTWLWTELSKLGLPVICIDARHAKAALKMQINKSDRNDAVGIARIMQCGWYKEVRVKDLDSHAIKALLVSRALLVKIKRDIENQIRGLLKNLGLVIGRAKMNVFLLRALQLTEGRPELAAAVAPLLKAREAIEQQIEDLDRKVLRLARNNAQVRRFMTAPGIGPITALCYFATIDDPTRFKKSSSVGAYAGLTARRYASGEVDWTGRISKCGDKMLRSYLYEAANVLLTRIAKWSALKAWGIRLAKRTGLRKAKVAVARKLAVILHRMWIEGTEFNWSSKEASNQPA

SEQ ID NO: 501241 - protein, 355 aa, unidentified
MNCEKYIGLDVHQATISVAVMDSMGKLIMESILETKASTLLEFLGGLRGTLSVTFEEGTWAAWLYDLLKPHVANVVACNPRKNAALNQGNRSDKIDARELANRLRRNDLKPVYHGENGIRMLRELARSYLAIVKDLTRVMNRLKALYRSWAIPCAGRDVYYTRHRSQWLEKITEAGPRRRAQQLYQQLDMLQYLRQQARRELLAESRKHSVTAKLRRIPGLGPIRSALAVALIQTPHRFRSKRQLWKYCGLALETRITGEYVYVHGERRRSKKQLSIRGLNKDHNHDLKGLFKGAATRASVKPGPFQEFYQRSLAKGIKPTMVRLTLARKIAALTLTLWKKRENFDVDKLKSQAA

SEQ ID NO: 501242 - protein, 339 aa, unidentified
MDRETGEVLERRLTPDHREILEWIGGLPAPVAVTYEAGPTGFGLARALAGAGITCAVAAPSKLIRPPGDRVKTDARDAALLARLLHLGEIVAVTVPSVVQEAARDLVRAREDCRADLMRCRHRVSKLLLRQGIVYYGGNPWTLAHERWLRQQSFDCPGLGTAYREAFDAVLATRDRRERLDAAIVALAGDCEFTPVVQRLGCLRGVSTLTAFALASEIGDWDRFTGRSIGAYLGLVPTEYSSGGTRVQGGLTRTGNSHARRLLIEAAWHHRKPYSPTVVLRRRWDVASAAARTRGHAANRRLHHRWERFDERRKRSVVANAAVARELAGWCWSLAVLEE

SEQ ID NO: 501243 - protein, 454 aa, unidentified
MSRRHQKQKRASQGGAVPSLSCIEPNAAGIDVGATEIFVAVPQDRDPSPVRSFETFTEDLHRLKNWLQQCGITTVAMESTGVYWIPLFQILERAGMEVCLVNAHHVKHVPGRKSDVIDCQWLQYLHSVGLLRASFRPEERICAIRSLLRHRDSLVQMAAAHVQHMQKALTQMNLQLHHVLSDITGQSGLAILDAILAGERNPAVLAQLRHARVQASEEVITKSLVGDYQREHLFTLRQSLQAYRYYQSLLTACAQEIEEQLQNLDSRTPPDASPLPPERYPHRPRKNEFRFNMRSELYRIYGTDLTAIPSINALTGYTVLAEVGTDWSKFRNGDAFASWICLCPQNKKSGGKILSAHTRRSANRVNRALRLAAQTLERSTSYLGAYYRKMRARHGAPVAITAAAHKLARIIFHLVTTGEAYDESLFAAEEQRQRKRMCRRRTTSAQTNGKQTQT

SEQ ID NO: 501244 - protein, 414 aa, unidentified
MVNERGGCVRYYVGVDWADAADAVWVEDEQATKILSRSVAHTVEGFTEWGRWLDEQRAAGVEVWAAIEKPDGRVVDLLLDHGVVVFAINPKAADRARDRFRASASKSDPFDARVLASFLRTDHHHLSPLRPSSEAAQELKGLTRDYARQVRQQTRLLNQLTATLKAYYPRALELSDDLKHEWVRAFLHDFPTPAAVAALTERQWSRWARGRRLSAERVGALWAALRAPQLPVPPHVERVHARRLGALLEQLDVTVRTVQVYREAIIDFFARMPAATWATSLPGGRSGTTVPTLCAELGDAAGRWESFRHLQAHAGSVPVTDRSGKYAAVFFRFACNQHLRRASYQFAANSLAHSEWAKAYYDRCRTRGHRHHHAIRALAAKWLKILFVLWTRHVPYDETHHLATMARQQLRRAA

SEQ ID NO: 501245 - protein, 443 aa, unidentified
MGNDTLATGYLGLDVSRDEVVACLLGPGGGQLCPTWRVPNTQPGGEGLAERVAQLCGEHGVNCLRIGLEATGLYWWHLACLLRSTPKLAGLPHEVYALNPKLVTGLKRAYTDRGKTDRRDAFFIAERLRIGHLPAPFHIDELYAPVQRLTRFRMHLAESLAREKNYFLSFLFLKFSGYSQAHPFGDSFNATSLAVLESFTTEQIAQTELSELAAFIGRHGHGKFDSPHEVAEALSRAARDSYRLDRVLEDPLTLILGTTMATIRSFQAQLKQVDKTIERELLVLPENRRSIRSVPGIGPVFTAGLVAEIGDIHRFPDEAALARYAGLVWNPHESGTFQAEDTSMSKAGNHYLRYYLVEAANSVRLHCPEYREYYNAKLAQSTKHAEKRAAVLTARKLVRLIDALLRAGTLYKQPTQDRGEVRTQPQAARPRQQRRARHAASAS

SEQ ID NO: 501246 - protein, 389 aa, unidentified
MKIYVGIDIAKLNHFAAAISSDGEIIIEPFKFTNDADGFQLLVSKLESFDKNSLIIGLESTAHYGDNLVRFLVTELYQVCVLNPIKTCQMRKNNVRKTKTDKVDTYVIAKTLMMQDNLRFVSFFDLDMMDLKALGRFRQKTIKQRTRLKIQLTTYVDQVFPEIQYFFKSGLHQHAVYALLKEAPSPKEIASMHMTHLANLLKVNSHGHFTKEHAKELRVLAQKSVGANDSAISIQITQTIQQIELLDSQLEKIEAEMTDIMKFNDSVIMTIPGIGYINGGMILGEIGDIHRFSNPNKLLAFAGLDPSVYQSGNFQAKTTRMSKRGSRVLRYALVNAAWNVVRNNATFKAYYDAKRAEGRSHYNALGHCAGKLVRVIWKMLTDEVEFNLE

SEQ ID NO: 501247 - protein, 379 aa, unidentified
MRKDIRYVGLDVDSEKIVVAVAEPAGEVRSLGAIPYREESVRQLVKKLGPARRLRVCYEAGPHGYGLYWQLSGLGVHCDVVAPTLVPVRSGDRVKTNRRDAEKLARCYRSGDLTAVWVPDAEHEALRDLVRAREVAKKDQLRARHRLGKFLLRRGLRAAAGMKSWTAKHLLWVKTLRFEHAAQEATYLDYLHEVEHAAERVARLERAIDQAIEALPTQMRAVIAGLQALRGIKKVSAATIVAEVGPLSRFSRPKQLMGYSGMVSSEDSTGSSVRRGAITKTGNAHLRRIVGEAAWAYQYRPAMSPELKKRQEGLSEEVKEIAWKAQYRLCTRHRRLVAKGKLRQKVTTAIGRELLGFIWAIGTQVEREQRSAKLTRRAA

SEQ ID NO: 501248 - protein, 341 aa, unidentified
MKNLFIGIDFSKEKVDVAIISAEGLVETSVRVFNEFKNSVSGYKQLVKWVEKNANGIDPSMWLFCGENTGDYSKPLCNYLYGKGYDMWLENAKCIKDSSGIRRLKSDRADASMIAEYAMRNYDRAVMYEPLSEALTQLRELFLYRQMVVRHRCSFQVRRGEKKLTMEKSSVKTMISQSGRHIVSELNKEIEKIDKRIASLIDSNAELAQVFNIVTSIPGIGTQNAVCLMVYTDNFRKFNYDSRKIACYYGIAPFGKDSGTSVHTDPHVHYMANRQIKAMLTQAALAAVNFNQDIASYYSRLIARGKKKQVALNNVKNKLVHIATAMVKNKQVFDKNYKISA

SEQ ID NO: 501249 - protein, 345 aa, unidentified
MIYVGMDVSSKSFVIHAVNGKKAVKYRGEIEPTKAGLKSLVEELGAEKKYIVMEAGNQLKWIAQRLNKIKDVELHVVHPNELKWISQSNGKTDKIDAKKMAELARGDMLPRKVHIVEGAVRSLRELISARHQLQSKRVALINTIRGNMLQEGFRLPEKFFQRADWEMRLEKAKLDETTRLIVKAMMKAIEALKASEDELTEKIVSIKDKRAEMLETIPGIGKLTSRVILSALDDVERFDNRKAVAKYGALTPTIYQSGGVVQLGHINRNGRHEVRRVLLQCAHTVARMKSHDSAPLREFFERVMKRRGKKIAVVALARKLLTTAYGVLKSGGPFDPKMLLPVSSR

SEQ ID NO: 501250 - protein, 391 aa, unidentified
MEAWTVNNLPPAGTHDDAVRCLLAIELSKKSWIVAVNTSLSDKISRHTLKPCDGKELLDLCERIRTRVARETKKRVEVVSCYEAGYDGFWLHRLLEAHDIRNYVIDPASLQVDRRARRAKTDHVDAERLLRSLIAYLRGEPKVWSVVCVPSVAEEDDRRLHRERSRLINERIQHVNRIKGLLAIHGIYDYQPLRRDRMQRLERLCTAADGRTLPPRIKAEILRELQRLELAIRMIKTIEAERDAIASAAKTETKHTSAKKIQHLAKIKSIGPEFATTLVGEVFYRSFDNRKQLASYVGLTPAHFQSGAMSRDQGISKAGNAKARTVMVELAWLWLRHQPESPLSVWFRERVGKLKGRIRRITIVAVARKLLIALWRYLETGLVPEGAAMKV

SEQ ID NO: 501251 - protein, 304 aa, unidentified
MNATTVKRSSASLVGVDVAKSVFQLAVADGNWKVIETHRLTRSQFERWFVNREVGLVVMEACGSAHHFARWLNGLGIEVLLLPARYVRAYVKRNKTDAADAAALLEAARASDISPVRVKSVEQQALQGLHRTRSLGMGTRTSRINALRGFCREFGIAIAQGSRLGVEQISRVLADPNSAVPELIRGTMKLLVEEIRLLEARIAQLERELSVLAKQSPACTILLSIPGVGLLTATAMTAATSGSVSHYKSSRHFSSWFGLTPREHSSGNTRHWGRISKQGDRYLRMLLTHGARSVLQQGHVRSGQ

SEQ ID NO: 501252 - protein, 369 aa, unidentified
MGKYSEVFVAFDVAKKKHAVAIAEGGRTGEVRFLGGVENSPLPIERTIKRLADRYDRLHVCFEAGPTGYGLYRQIQALGHECMVVAPALIPKRSGERIKTNRRDAVTLARLHRAGELTGVWAPDAAHEAVRDLVRAREAAADDLRRKRQQLFSFLLRHSRIYSGGGHWTLAHRRWLASQKFEHAAQQIVFQEAIDAIEDALQRLRRLEKQLALIVPEWPMAPIVEAYQAMRGASFLVSVTFAAEIGDVRRFDTPRQLMAFLGLVPAERSTGDTIRRKGLTLAGNRRARRALIEAAWTYRYPARVSETLRARLEGLPKLVRDIAWKAQVRLCARYRRLSATGKKLPVVVAAIAREMAAFLWAIGREVAPA

SEQ ID NO: 501253 - protein, 344 aa, unidentified
MKITTIGIDLAKNIFQIHGVDKRAHVRVTRKLRRSQVSPFFANLPSCLIGMEACASAHYWARKLEALGHTVRLIAPQFVKPYVKTNKNDAADAEAICEAVARPGMRFVPIKSVESQSLLSLHRARQGFVKARTAQANQIRGLLMEFGIVIPQGIGHIGRCMPGILEDGENELSESFRQLLMRLMDHMRQLREEAEAIEAQINHWHQQNEASRKLAAVPGIGPITASALVASIGNAHAFANGRQLAAWLGLVPRQHSSGGKQLLLGISKRGDTYLRTLLIHGARAVIRHASARKGHAESWLGKLIARRHTNIAACALANKSARIVWAILAHGRDYNPAYGTTGNI

SEQ ID NO: 501254 - protein, 403 aa, unidentified
MNNVAGIDVSKGKSMVSVLRPFGEVVAKPFSIGHTGSELKELADYLKSLDGETRVVMEHTGRYYEPVARFLHDEGVFVSAVNPKLIKDYGNNTLRKVKTDKADSRKIARYGIDNWAELRQHTPMDTIRMQLKTLNRQQSLYTKTKTMMKNNLIALLDQTYPGVNALFDSPVREDGSQKWVDFATAFWHVDCVRNMSLTAFAERYRKWCKRHGYNFSQSKAVEVHAGAQDLIAMLPRDALTKTMVRQAIDALNAISASMERLKAEMQALAAQLPEYPVVMAMHGVGDSLGPQLMAELGDVTRFTHRNAITAFAGVDPGADQSGTHEAKSTRVSKSGPPELRRALFLVMDCLLKTQPQDDPVYRFMDKKRAEGKPYLVYMTAGANKFLRIYYGRVKEYLASLEEN

SEQ ID NO: 501255 - protein, 418 aa, unidentified
MSEDGNTRGSRRYIALDIHKKYSVIGGVDREGRVVLHAVRVEHEDLEGWLKKNLRSTDHVVFESTTNAWHVYDLLEPLVARVVVANPAKVKQIATARVKTDVRDTFILARLLAANLVPDVWVPPVYVRELRQLLSQRRQLVETHTQIVNRMHSVAHRHHLQHERGKRFNEKNTIWQKDKRLSKIEQFQLELEMENRAYIEKQISRIGKEVAKMSHQKPWAESMTYIMQLPGFGVITGMTVLAAIGEVQRFGTPQHLASYSGLTGGLDQSGTKLVQKGITKEGRKELRWAMVEVAQRAVKSDPVWKHRFQELQKRMHRNQAIVAVARRLLELVWYVLTRRQPYRHFSQERIAYKYLTWAWQMDEAARDGLTRQQFTRYYLMRLGIGQDLTRIALDPKHPRKIATEAELLALRPELKHIE

SEQ ID NO: 501256 - protein, 338 aa, unidentified
MTNFVGVDLHRNNFTYCIRVNGEERKIGKCEITELKGFAAMLGPNTAMAVEATGNTFMFCSSLRAYVGRLVVVNPSQFKVISMSTKKTDKHDAKVLAEFLEKDMLPEVRMKDDLQAKISSLTQTREKLVQLRTVLKNKVNNLLAANFIVLKREELSTEKGLVKALSYRIDPITDTEMLVVVEQIRSLNKSIEKLDKAIEDHGSKMDGFSNLKSIKGIGTKGAAILLATIGNIHDFRSSKHLAAYIGIVPRVSNSNDTVCHGRITKNGSKTARTALVQCALITKRYSPYLNAFHESVKSRRGGAKANIALARKFLDIVYKTLKNNWMFEDFSQFKLVKN

SEQ ID NO: 501257 - protein, 352 aa, unidentified
MNEITTVGVDLAKDVIVVCAGDSKGRPVYTRQLSFKGFAAWAANLPTATFGLEACSSAHYWARWLTERGHTARLMAAEHVGPFRMSRGAKNDRNDAQAILAAMVQPAMRFVAIKSVEAQAMLAVHTARQGWMAERTRLINRARGLLSEFGIWLGKRPERLLKSLPDLIDDETLPARIRAVLRQIREHVAVIDAQIKTTDIEIHAHARQNDNARRVRAICGIGAITASALIATVASANDFRNGRQLAAWLGLVPRQWSSGGKERLGRITKRGDAYLRGLLTQGARSTIRAAQSKQPDKRSRLQAWIVATHDRVGYGKTQVAVANKHARMLWAILAHGEAYDPNAWTRHPLASA

SEQ ID NO: 501258 - protein, 368 aa, unidentified
MSVYVGIDVHRKRSQVAVVTGDGQVQVNKNVVNGSEPMLRLIGGLPAGTPVAFEAAYGWGWLVELLEDYGFDPHLVHPLRCKAIASARLKNDKVDAAILAQLLRADLLPEAWIAPPPVRQLRAQLRHRASLVRLGTQLRNRIHAVAADHGYDRTGSYWTGPGRGWLAELDLPAVSREIITDSLAFLDALAPVIERLDGELHQHAKADPRVKILRTLPGVGEFTALVMLAEIGDITRFASARKLASWAGLTPTVRGSDLTVRHGHISKQGSAWLRWVLNQAAQTAKRSPEFAATYAAITKRRGKKIATIAISRKLLTRAYHLLADAQAAQAPGTASTVTTPPQAGRVTKPRARSLQRHEPAAGRARSSD

SEQ ID NO: 501259 - protein, 339 aa, unidentified
MVIVGCDFHPGWQQVAVFDSGTGEIRELQLRNSEGEAERFYGSLPSPALVGFEACGNTHWFEDMLDRLGHEVWIGDAAEIRASYVRKQKTDKRDAAHILKLLMEGRFPRLWRPSKADRDLRQLLIHRDRLVGVRTRVKNGLHHLMLNKGVQLKRKLWSKAGQKILHELPLEGWAAQRRTDLLQLLRTLDPQIEELDVAVERAAYGNERARLLMTQPGVGPITSLAFVITMGDVTRFPSGKQVSSYLGLIPSEHSSSKRRRLGAISKQGSPFLRMLLVESVQTVCRLDEGFRKQYNHRCHRMKKGIAKLAAARKLAVRLYWMLRTNTAYPEIAHIEGSPR

SEQ ID NO: 501260 - protein, 412 aa, unidentified
MKDLLEISCGLDVHKEKIVACILTGPLGKPTHSDIREFTTLIPDMIALQDWIVSQNCHHVAMESTGIYWMPIYEILEDAFAGDITLLVVNARHMKNVPGKKTDMRDSEWISSLLRAGLLNGSFIPEKRIREFRDLNRYRKSVIRDITSQKNRIEKFLQSSGFRLSSFISDIFGTSGRNIILHLMEHGQIDRVTLDSCLKTKTRNRIDEILMSVNGTLSEHQKSFLKILMNHYDSLKEHLNEIEKNLEEDMAPFALQVEQLSSIYGISTTASCAIIAEIGIDMNPFKTAEHICSWAGLCPGNNESAGKRKSTSVTKGNPYIKSMLCEIAWVIAGKRNTYLSAWYWRIKQKKGAKKAIVALARKLLVIIYTMLKQGTLFDESCFETRRKNCEQKQLSRYIRELEKRGYHVEVQG

SEQ ID NO: 501261 - protein, 359 aa, unidentified
MGIGFSTVSIKEHRDEVPLNRCLSCWSETLVYTTRHKERNMTSYTHFIGIDIAKDTFVCSVYGQENVTPYQNNLKGFKKFMRDNTLDQALVVMEFTGGYEKALGAFLMDQNICIHKVDPKKAHHFHKSLRLKGKTDKIDAQSLARYAHERQRDIIPETRLSLSQERLKELQARREDLVGMQTREKNRKASPSRANVQKSCDRILKALEKEIERIDGEIKGGVEQDQELREKKEILQTIDGVGEKVAHALLACMPELGYRENKKIASLCGLAPHPKDSGAYRGKRCIAKGGRSLKSLIFMAAMAARRHKEGVLSEFYNRLVKKGKEKKVSILAVARKIVVIANARIREYYRGEARIRHFS

SEQ ID NO: 501262 - protein, 453 aa, unidentified
MSKTIPSNTQNLRRMNPRAAAIDIGATMHMAAVNPDADDMPIRAFGTFTHDLNNLAHWFKSCGVTSVAMESTGVYWIPAYEILEQYGFEVILVNARYAKNVPGRKTDVSDTAWLRQLHSYGLLRGSFRPNAQIATLRAYLRQRERLVEYAAAHIQHMQKALMEMNLQLHHVVSDITGVTGMRIIRAIVAGERDPDVLASLRDIRCHSSVETIRASLVGNDRDEHIFALSQSLDLYDFYQQKMLECDHKLEQAIATMTRNVEKPQSPLPKIRIRTKQPNTPSFDVRAALYGLVGTDLTQIHGFGASLALKLIGECGTDLRAWPTAKHFTSWLCLAPGNKISGGRLLSSRTRRSSSRAAALLRLAATTIGRSDTALGAFYRRLAGRIGKQKAVTATARKIAVLFFNALRFGMAYRDPGAEAYDERHRGRVLASLQRRARALGYQLDPIPDAESVS

SEQ ID NO: 501263 - protein, 326 aa, unidentified
MKKNFIGIDVSNRKLDVYYHNQCQHRIFSNNVEGFGEMIIWLKTFKVSVKSMIVCFEHTGIYSEDLSLYLAEKKVCFYMESSLNIKFSIGMQRGKNDKIDSKRIADYIALHYTQLTPTELAKSSVGELRKLLSLRGHIEKEIIGIKNRLKNSSKATGSEFIYQIELDLLDVLCDKLKLVEVQVKALLKSDEELHRIDELVQSIKGVGPVSSWYLIATTNGFKYFEDARQYACHCGIAPFEKSSGSSIKGKTQTDRRSNRKINGIITMAAMSAVQYNPEMKEYMERKQKEGKHYNCVLNAIKNKLIARAFAVVKRQSPYVDLKKYAA

SEQ ID NO: 501264 - protein, 377 aa, unidentified
MERLKFVGLDVHAETIAVAVAEQGGEVRALGIIPNREESIRKLVRKLGPVEQLRFCYEAGPTGYALYWQLTRMGAKCEVVAPTLIPVKAGDRVKTDRRDALKLARNYRAGELTPVWVPDAAHEALRDLVRAREAAKKDELRARHRLNKFLLRHGRRPPMGVKAWTMKYLEWIKREVHFEQMAQEATLLDYLHEVEHAGARIMRLDGAIEEAVKCVPPKMRAVIEALQALRGIARVASVTIVAELGELSRFARAKQLMGYGGIVASEHSSGECTRRRGITKTGNAHLRRVVVEAAWTYRHRPAVGTSLRKRQEKVSEEVKEIAWKAQQRLHQRYRKLLAKGKNKGIVVTAVGRELLGFIWAIGIKIEATQKESLQQAA

SEQ ID NO: 501265 - protein, 407 aa, unidentified
MRCVEAGLVHEGYGVFLGLDVGKGDHHAVGLAPDGKRLHDAALPNTEVRLRQLFDKLARHGRVLVVVDQPASIGALPVAVARACGHQVAYLPGLAMRRIADLHPGSAKTDARDAYVIADAARTLPHTLRRVDTGDEALAELEVLVGFDDDLAGEATRVSNRIRGLLTQIHPALERVLGPKAQHKAVLELLSRCGGPAGLRKAGRRKLLSIAAVHAPRMGERLVEQIMTALDEQTVTVPGTHAAETILPRLADSLRDTLRQRDQVAKEVERILDAHPLAPVLTSMPGIGVRTAARILLEVGDGSSFATPGHLAAYAGLAPVTRRSGSSIRGEHPPRGGNKNLKRAFFLAAFASLADPVSRAYYDRKRAEGKRHNAALICLARRRCDVLFAMLRDKIPYQPRPTSPVPA

SEQ ID NO: 501266 - protein, 396 aa, unidentified
MKNCNAKRIKNEAKSSTKAEESVSYPAFIGLDTHSQTIAVAVARSGREEPEFRREIANKPKSVAKLIKQLSTEFGGEVLLFCYEAGPCGYALHRQILESGHECQVIAPSMIPNRPGDRIKTDRRDACKLAHYLRSGDLKAVWVPDEEQEAMRDLVRARGDFKEQESKARHQLNSFVLRHGHAWPSGKQRWNKTHFNWLESLKFPHHWQQVALQEYINAVKAATQRVADIMAQIEMLLPQWSLAPVVYSLMALRGVNKLTAIIILAELGDITRFDSPTQLMAYVGLVPMVHSTGDKTYLGRITRTGNSHVRRVLTQSSWTYRFAARQTKHIKSKAAKASDEAKAISWKAQKRLCGRFRYLIMAGKESKITVIAIARELLGFIWDIVCHEMPKLQQAY

SEQ ID NO: 501267 - protein, 407 aa, unidentified
MELVALYKRVIGLDIHQAQITACALIEEPDGTTRIEQRQFGGFKRDRRELADWVASLRPDEVVMESTGIYWKSPYAAMEAAGIRAKVVNARHVKNVPGRKTDVGDAHWLATLARAGLLRGSFVPPAKLRELRLIARQRQKLVGQLASEKNRLHKVLTDSGVRLGVVVSDLHGQSARAMIKAIIAGKPANEVLTLASRRLKASREELFDALQGDLTASHRFVLDELMRHIEEIEARIARFDTRLLSELESERNTLALLQTIPGVDLIGAAMLLVEIGTDMEAFGSADRLASWVGVCPGNNESAGKRKSGHVRKGNLYVRRLLCEFAHAASRTTSVFKSKFQALVVRRGYKRAIIAIGHKILRTIFFMLKRREHYRDSATDYEALSVQRNAPRWIKALTKFGFIAPHSA

SEQ ID NO: 501268 - protein, 399 aa, unidentified
MFVGIDWATDAHEVCAVDASGKVRHRATVEHSQDGLDQLVGYLHRWATQGELLVGIERPEGRLVDRILEAGYPILLVPTFAMKDLRRRYTIGGAKSDRGDCYVLADVTRTDGHRLRRLEPLSAQTRALRAVVRTREDLVDQRKALANQLRATLEAYWPGAVAIFADVDSEICLAFLERYPTQESAARLGEARLASFLTKAGYSGRRPAAQLLARLTAAPAGVVGAEAEARADTVRAMVRVLRALLVSIKDLDRSVVAHLGEHPDAEVFTSLPRSGQINAAQMLAEWGDCRQAYPQADSAAMLGGLCPVTHASGTHRDVSFRWACNKRLRQAMTTFANNSRRASPWAAEVYRQAVARGCDHPHAVRILARAWARVMWRCWQDHTPYDPALHRAARRLKAA

SEQ ID NO: 501269 - protein, 367 aa, unidentified
MSQSTQSFIGVDLHKCTVSLAAVDPTGKEIARLKISTKSTGKIEDWLLNLPRPSHMAVEACPFVEWFIDRFRACVDRIDIADATELASRRGKRRKTDRNDALDIGRRLARGECPLGYIADEPLMQLRKRGRHWRSLSRLTSRTKHSMKSMLNAANIRGPKFDGASVQRWFLANRDLLKPVQQQMFADFIDVLMLVERQRERLRREIIFATRSERFAPTVTRLMTVPGIGEIWGAIITAEIGPFDRFPNADTIEFWAGLTADMKESAGRTQSGNITKAGSVTLRWALCQAAVTLCRSDARQEAIRQRFVRRIGKPKANVAMGRRLLRILYAMIRDGKDFQRGPKRNHTAAANQARLGRNKLRREKQAA

SEQ ID NO: 501270 - protein, 437 aa, unidentified
MRRKKKNANKSINLQVLPLVHPNAAGIDVGAKEHVVAVPCDRDPKPLRTFQAFTPDLHELAAWLKRCGIETVALESTGIYWISLYEVLEQYGFEIRVVNARHVKHVPGRTKTDVLDCQWIQKLHSFGLLNGSFRPDQQIRKLRTYMRLRDNLVVASTQAVHHMQKALFEMNVQLSNVISDIVGETGLRIIEAIIAGQRDPVQLAASCSTRIKASRETVAKSLHGNWDEALLFALKAALETYRFSQTKIQECDCCVQQHLAQFESRAEAINSPQDLKAQLHRVCGVDLTKIPGIKEQSAQIIISEVGLDMTQWKTEKQFCSFLGLCPDNSISGGKVLHRATRKVYNRAADTLRLCAQSLTHSKSALGAKYRRLRAKLGAPKAIVAMAHHLARLVYRMLRYGQNYVEQGIHHYELKFRLQRIKWLKKEAQSLNLQLVAA

SEQ ID NO: 501271 - protein, 482 aa, unidentified
MKKRNIYQNQSQELLHLFEETVSREKVMCVPMDYAKNDHLVMFCNGHGDILRKPFSVKNTPEGIGYIDEQVTRSCRQRGIKKKHVFFGGEDANSFAKNFVSTLRSKGFVVANVNAHDAKKQRSNIQASTDRIDLMGIATMLLNCRANCCPAQLGIYRNLRTLVRHRRRLVQMLTEVKNRVHGIVDELFPGFLNENNSGIVPFTQSSLYLMQDRFSPKQIRRRKRQKLVEILKRLGTSKAEHTAAKLQQYAAKVLHAPVEYVDTMQLSLAQHVKHIRCLKESVAQMDKEIALNLAQTQGAFLTSVRGIGLVLAAGVTAEIGDPNEQKPLNNLASYCGIVPRVKQSGGLDGKTYTGPVGKRCNRILKDYVVKSAYHLGLHGPQDLMADYKRRDASGQHADFGIGRRYLRMAINLMRTSQVYLPPNLRKDDSTLQKRAGYYLMSWPYLKEKWKKVGALEAAFANNRPLGLWRQIVQELYDIKLKL

SEQ ID NO: 501272 - protein, 428 aa, unidentified
MKYNTQNAKIASINEKTLIVGIDIGSETHFARAFDWRNYEYTRKPFEFSNNEVGFQTFKAWIEELQEKNGKSVVIPGMEPTGHYWFALGKFLQDNGMKPVHVNPHHVKKSKELDDNNPNKNDRKDPKTIAGLVNEGRFSYPYIPTGIYAEIRSLSNLRFQAQEELTRAKNRIARWFSIYFPEYKDVYRDLKAVSGRMVLQVAPLPEDIRKLGVEGVNRIWRDAKLRGAGMKRAKTLVSSAEHSVGSKEAPEAARIELRNLLNDMDVYASRVEELLGMIGEKLKEIPYIDKLMAIKGVGVITVSGFIAEVGEIKRFDDPKQLQKLAGYAIVTNQSGKHKGESRISYRGRKRLRYVLYEAALSLVGRNSEFKAIHEYYRTRRENPLKKMQSVVAVACKVIRIFYVILTKGVDYDPAKMLGDIRRPQIQAA

SEQ ID NO: 501273 - protein, 405 aa, unidentified
MTLSVFVPCMLTSVMVNNSLIGKAGVGEVSAANRAGTSRRREFGCAQVFKAVTKREPRRHRGTSPNSRLNRRRPTRTASSHLQVREKTMSEPVYVGIDVAKETFHVATLPNVLKTQLPNTHQGHRQLSQSLKNHTIALIVLEATGGYERPLTAELLSDSLPVVVVNPRQVRDFARGMGQWAKTDPIDAQVLAKFAQIVKPAPKTHSTAQTAELSELVRRRRQLNDLRTQESNRLLMIHHPKVKKSIQKMIKTLNFQIDEIDRLIREHIDTDGNFKNKDRILRSTPGVGPQTSAMLIANLPELGKLNRQEIAALAGLAPWDRSSGKSDGKAHIWGGRKDVRSVLYMAAFTACRFNPVIRALAERLKQKGKAYKVVITACMRKLLIILNTMVRNQTLWTPEKSVKNT

SEQ ID NO: 501274 - protein, 414 aa, unidentified
MLKIVYRVCCGMDVHKSFVVACIASTNEQGVTTYKSKRFSTFTGDLRRCAAWLSENNCKDVCMESTGKYWIPIYNILERTCNIVLAHPKYVKVIRGKKTDKRDAKWIADIFKHNLVAGSFIPPADIRQLRDLFRYRWKLTNFATGEKNRAQNCLTVSNFKLDDVFSDVFGKAASAITARILKNPSEKITDVSGFRTKRMKATDEEILAAVDGEMCAEQAEKLRIIRSHMDSLELCKLNLESLILSTAEKYLPQLELVMTAPGIQSFAAIGIISEIGVDMSVFPTSKHLCSWAGLTPQNNESAGKKKTTRISRAGAYIKPLLVQCALCAVRAKQFPEVRNRYLALKKRRGHKKAIIAVARMLLTAIYNMLKKNEPYNSELYRKGDRPPAHREVSVEEAVFILQRQGYLVSAPPTP

SEQ ID NO: 501275 - protein, 346 aa, unidentified
MLYVGLDLSRKRLDWQALDREGGVAAIGAVPPDRDGLAALARRLGDASPVLAVIESMTGARFVHDQLELAGWDVRIADAVKARGIAPLACKTDRIDCWVLAELARLELVPEIWLPDPSVRAERERARFRLHLVKHRSSLKNRIHAILFQHGIPNASSDLFGAGGRRLLERLALPEPWASTVRASLALIDSLDEQIDACALELRELGADHRYIPLLLSCPGIGWALAYTIASEIGDIDRFQSPRKLVGYTGLCPRVEQSGERDRRGPLRKNGPNYLRWAYVEAAHTAARCHPPYTAIRERMQARHGKKRGTKIAAIEIARRLAEANWHMLTTNKPFTPAGAAASLAA

SEQ ID NO: 501276 - protein, 341 aa, unidentified
MHDYFVGLDVHKQVIAYCVKRVDGEIVSEGKVKARRAALSEWVKTLPGPWRGGMEATMFSHWIYRYLQPYAEELRMGHPARMKAITAGKKKSDKIDARTIADLVRVNLFPACFVTPPELEGLRRQMRFRRLVVQETVRFKNKTAGLLMEVGAEYEGRRLHGKRYFGELMKSNAAISEELRPLLEFNRSQIEGLVKMDQRLTRMLESHGRLRARVEALQKIDGVGPVTSLTWALEVGDPKRFQSIKEAVSYCGLASALRESAGQQKRGPLSKQRNPHLQSMLIEAAKMAPGLNAELAQVYQRASERGHKNRATVAVARKLVAYLLAADRAFFAAQAELKPAA

SEQ ID NO: 501277 - protein, 344 aa, unidentified
MSNLDTCGIEVSAKELVVSLRRQEDLEPLRNFTNTPEGHLIILRYLRQTGRVVRVCMESTGLYGLDLALALSGQEGIEVMVANPRAVRHFAQAMMKRSKNDQIDAGVLEQFALHMPFKPWQRPSVAVLALHALARRLRELVEMQTAEKNRQHAAGLSKAIPAVVRRDLARSLRAQERAIQRLTRQARKLIAQDPQLTERFELLDSAPGIGETSAVQLLGELGVLAPDLEARQWVAYAGLDPRQYTSGTSVHKKPRISNAGNKHLRHALFMPALVAVQHDPHLRAFYQHLLARGKFKMQALVAVMRKLLHALHAMFKTHQPYDGSKLFRLKSAPAQEVTHVLVAC

SEQ ID NO: 501278 - protein, 338 aa, unidentified
MTEITTVGLDLAKQVFHVVCCDARGKVVGKRMLRRAQVLNYFANLTPVLVGLEACAGAHYWARELKALGHRVKVLPPRAVKAFVQGNKNDYNDALAIAEAAVRPEMRGVAVKTVAQQDVQALHRLRSQCVASRTALGNQLRGLLAEYGLILPQGLSTLRRRIPDFLEDAENGLSDAFRRLLAQGYRQLVELDEHIAAHTAEVKRHGQQADGCQRLQTIPGFGPIVASVFYNAVGDGRAYRRGRDVSAALGLVPRQHSSGGKSVLLGISKRGDAYLRCLLVHGARAVVRQAAGKEDRLSRWINQVRAQRGYNKATVALANKLARIGWAVLYHRTVYQAA

SEQ ID NO: 501279 - protein, 480 aa, unidentified
MTTNISNRLFILVLSHFNEFSGNRASTFSIIFSRVQTADSSVSIKINGLKSNMTTENYVAYIGIDWADRKHDIALYDCASKTWQESIIQTRPQDILDWVNQLRARYGEGKIAVGMEQKRGPLLYALCQYDNLVLFPINPRTVANYRKAFQPSRAKSDPVDARLLVELMQKHPDKLERWVAGCPQTRALRQWVESRRMLVGEKVRLTNRITASLKSYFPQLLDWFEDKDTLVFCEFIEQFPSVGAAQAATPEQLTQFFRAHKVIRKSAINRRIQQIQEAGPPLTRDEAIVLPAQALTRTLIALLKVILNQLTDFNAKIADLFEALPDAQLFADLPGAGPHLAPRLLVAFGAERDRFASAQAFMSYVGIAPVKEESGKKRWVHWRWSCPIFLRQTFVEWTNQSRRFSPWAQAFYLQQKRAGKSHQKAIRALAYKWGRILWRCWQDQTAYDEEKYLAALARKKSPLIKFLGTMTTEAQTIESV

SEQ ID NO: 501280 - protein, 364 aa, unidentified
MVKKPTRIARFIAAVENRPVFVGLDVHKKTYSVAIFEPQDGLVETWTCPAGEDALAAQLAGLGCPIEHVVYESGPTGFALARALERAGFAVSVIAASRIPRGYAASAKTDRLDAVKLANYFARGLLRPIAVPTVEQEGYRALVRRRKRIAESRAKIKQKIKGFLLASGITEPASLRSWTLAASKDLSALEIPPEHRTALASMVREYLFLLSEDKLLRAEIREATGRMHSERFKRLTAVAGVGETAAAHFLAELFSPERFDRPEEVTSYLGLAPVVSQSGNGPTRAKLRPVGQKRLRGILVEAAWQWSWRDPEAKAIYNQHFAKHGIGQKAIVAVARKLAIKLWRLTVETPSASAEGAARGAWSG

SEQ ID NO: 501281 - protein, 397 aa, unidentified
MFYLGIDIAKHKHYASIIDQTGKPITKPFPFQNHKEGGQTLLNQMYQYIESPTEILIGMEATGHYWLAVYSFLLDHGFSVIVLNPIQTNAWRKGTEIRKRKTDAIDATMIADIIRFGRFVETPLVDEKMFALKQMSRFRNALVSNMSDLKRKALVVLDQTFPEYQSIFSDVFGKTSSQILLEYASPSDYEQISIDDLTQIIEQTSRNRLGKKTANKLMELASNSFGVTFCKDAFSFQLKMLMEQISFIEDQIKECEDEMSQLLIDLDTPIMTVPGVGPILGATILSEIGDIHRFDKPSKLVAYAGIDASVSQSGQFESSGMSISKRGSSHLRRALFQAAITAHKHDPVLKAFYEKKRKQGKHYYVCIGAVARKLCYIIYAILKNNKPYEIPQYSKEV

SEQ ID NO: 501282 - protein, 338 aa, unidentified
MEQISRIGMDTSKHVFQLHGVNAAGVTVLRKKLRRKEMVAFFQTLPPTVIGIEACGASHHLARLLSSFGHTVKMIAPQLVKPYVKRGKNDAADAEALCEAMSRPTMRFVPVKTAEQQAALMLVGVRDRLIRNRTQLSNAIRGYAAEFGLTAAKGTAHLIPLLERTESDESLPALARELFASQAEEYRQLQAQIDDIDAKLTAWHRADACSQRLAKIPGVGAIGAVLLKMKTPDPAQFQSGRQFAAWIGLTPRDHSTAGKVRLGGITRAGDEGLRSALVLGATAVIQHALRSGKASPWLAELLKRKPAKLAAVALANKTARIAWKMMLTGEAYTAQSAA

SEQ ID NO: 501283 - protein, 315 aa, unidentified
MNTSVSKNFVGVDVSKDFLDVHIHPLGKSFRISNSKKAISKLLKELLTYNIEQIVCEASGGYDCFLLEMALKKSFKIWQVEPKRIRAFIVSEGIKAKTDKIDARYIALFASKKKPSYNSIGQSENEEELKALSRRRADLLQMITMEKNRFKHPQQKHSKKSISNHIKFMQREVKKIDEKIEQLIEKDDALNVKREILESIPGVGKVTAFTLLSSMPELGRIDNKPIASLLGVAPFDNQSGKFKGKSSINGGRRHVRKVVYMAAVSAIRCNSTFKVFYERLRTNGKGAKVALVAVMRKLITIMNVMLRKEEYWRSA

SEQ ID NO: 501284 - protein, 343 aa, unidentified
MQAITTIGLDIAKSVFQVHGVDADGHVIIGRQLKRRQVTAFFQKMPPCLVGIEACASSHYWSRELQALGHSVRLMPPAYVRPYVKRQKNDMADAEAICEAVARANMRFVPTKTPEQQSGLMLHRTRHLFMRQQTSVINAIRAHLAEFGIVAPVGRRGVEELLRVVADPSDKRVPEVVRACLAALGNQLLNLKKQILDFDRMIMAWHRSNQTSKRLNCIPGVGPLLATALVASVADPKTFRSGRNFSAWIGLVPKQHSSGGRDRLGSISKQGDRYLRGLFVAGALAVIRYAKIHGTKHRPWLTALLARRPTKVAAIALANKLARMAWAMMATGKRYNYPASLKV

SEQ ID NO: 501285 - protein, 322 aa, unidentified
METVNFQQVVKRGCGIDVHKETVVATIDGQGLKRTTREFLTFTSSLTDLKDWLLENGITHVVMESTGVYWKPVYQILEPTGLTVWIVNARHVKYVPGHKTDKKDSAWLCKLLLAGLLKPSYIPPKQQRELRDLTRYRKKLIQDIASNKNRIIRILEDCNVKLSSVLSDTSGITATKLIDKLCDGKAITMDDINEVYHKKIQATREELWEACNGFMNEHHIYLLQTIRQNTMDTEKIILELNDRIRALLSPYENILEHLREIPGLGHKTAEDLVAEIGLDMEVFPSENHLSSWVGVSPGNNESAGKKKADAQRTGISKRNLHW

SEQ ID NO: 501286 - protein, 413 aa, unidentified
MNGDVEVVDADHEEVVQRVAAIDVAKASGMLCTRVPHPSAPTRRITKVRTVSSTTNAILALANELAEMGIERVVVESTSDYWRPFFYLLEALGLDVWLVNARDVKHVPGRPKTDKLDAVWLAKLAERGMVRPSFVPPAEIRHLRDYTRLRIDLVAERTRHVQRLEKLLEDALIKLSTVASDIMGVSGREMIEALIAGERDPAVLAGFARGKMRDKHGALKEALTGRFDEHHAELAQMLLDTIDSLSLKIEALTTRIDERIAAMRASQTPLPDGDATPGSGSAPLGVIERLDEIAGIGPRAAQIIVAEIGLDMSQFPTPGHLVSWAKLSPRTIQSGAPSRRGRTHVRRRRHRRPGQGHPPGPDLPTSGRLVLRGPGRVLGPRAGQRTAGGHALRSPRTDRARRARHFAPRGHRP

SEQ ID NO: 501287 - protein, 452 aa, unidentified
MSRRKQRKKFKVTDLPEHLQQVNLNAAGIDVGSDRHVVAVPSGRDEVSVREFGAFTTDLHTLADWLTKCGITTVAMESTGVYWIPLFEILEQRGFEVKLVDARQVKNVSGRKSDVLDCQWLQQLHTYGLLAGAFRPTDQICVLRGYMRQREMLVQASSMHIQHMQKALQQMNLLLHNVVSDITGLTGMKIIKAIIAGQRDAKVLAKHRNYRCQSSAATIAKSLVGNYREEHLFALSQAVSLYETYQAKIAECEAAIASYLHSQAKRTDEEPPPEDKASRNRDRLRGGVDVRSQLYRMTGVDLFNLPGLGADTLLTLAGEAGFDMTPWRSEKHFTSWLALCPGTKKSNGKVLSRKTKRSANRAAAAFRLAAASLSRSKTALGAFYRRIRVRVGKAEAVTATARKLAVLYYSLLKYGSAYVESGQAVYEQKYQQRRLHSIQKQALAMGYQLIPT

SEQ ID NO: 501288 - protein, 313 aa, unidentified
MIHSDDKYYVGLDISKDFIDVCILPTLEQFRISNDSAGFKCLIKRLPEQVERIVMEPTAKYSRQVLKALQDKHYSTCTVNPRQIRRFAQALGLLAKTDKLDAFICAKFASLVEPRNDKPVDMQRQKLSDLETTRQQFVSDIVRYKNRMSGADKTLKSLYQTVIRQLEKQLKKVNEIIKQLVAQQAAWQQLVDFLMSVKGIGQVTAYMLLAKLPELGHVSEGAIAALVGVAPFNHDSGYYRGQRKICGGRKEVRDVLHMATLVATRHNPAIKPFYSRLLSKGKLKKVALIACQRKLLVILNAKVRDFIAGKIEA

SEQ ID NO: 501289 - protein, 347 aa, unidentified
MDTIGLDLHKRESQLCIGQDDGTIVELRIATTRERFTAVLGNRPIAKILIEASTESEWVARHLESLGHGVIVADPNFAPMYATRSRRTKTDRRDAKTLMDACRLGAYRPAHRVSDARRHVRAQLAVREALVRTRTRYISIAKALVRRDGLRVAGSESHLVAKRIAALELSESLAVELTPLFTILAPINDQIAAADRELALLCERDPIVALLATAPAVGPVTASAVVATIDDITRFASAHQFEAFLGLVPGERSSGEKRRIGRITKAGNSRVRYLLVEAGWRIMRSKSPETAALREWAGRIAVRRGKRIAVVALARRLAGILFAMWRDGKPYDASVLRAPRTVLAQAS

SEQ ID NO: 501290 - protein, 411 aa, unidentified
MHQKQKYIYVGIDTHKLTHTAVIINCWGDKLGEITIENKPSKFNDLLLEVKKHAKRKTAVYGLEDCGGVGRALAVFLLGEKKLVKEVDSSLANVERKALPIYHKDDSFDALCVSRVLLSRLDELRNANPQDLYWTVNQLVQRREALVRSSSALKSQLHVQLAHNYPSYNKFFFEIDGKTALAFWEKYPSPSKLKTATLEELTELLVTNSHNYYTVKKAVQIIETAENDNVREVPEYQYIRDFLVESMVKEIKFKDDELTRIEVEIKLIVDKMGYKLHTMTGIDIVTAAKLIGEIGDIERFPTPAKLAKYAGVAPITYSSGQKDKQLKNQQGNRILYGIFHLLAVHQILQERNTKNPRNPVFREYYEKKMSEGKTSGQAIICIARRLVNIIWGMMKNKSEYKIPNLPKPNTK

SEQ ID NO: 501291 - protein, 343 aa, unidentified
MLHVGLDLSRKRVDVCLISSDGELVDHFRARADRDGLYGLTRRVAVYDEPVRGVVESMNGARFVHDELVRCGWEVLVADAQRVKGLAPLACKTDKIDARVLAELSFRDLVPAIWLPTPELRAERERARWRLHLVKHRSILKNRVHASLIAFGHQVPMADLFGVAGRRLLTELDFPEPWLGHVQASLELIDDLDHRIGEIERWLHRSGADHRYIPLLMTAPGIGWVTGFTIAAEIGDINRFASPVKLTGYTGLCPRVNQSGEVDRRGPLSKHGPRYLRWGLMEAAIAASSHPLYKERYQRTKRRLGRQRGAKVAQIDLSRKLTEAIWHMLTRNQPSLRQAPLFV

SEQ ID NO: 501292 - protein, 315 aa, unidentified
MLIHYIDIAKRNFVIAVSSLSKTKTETNNPKGIAHTIEYLKKHKVALVVTESTGGLEIPAAKAIRRAGIAVIIANPRQTHQFAQSQPLTKTDAKDAKMPAFFTQMMTQKEDWQTMPYQPPTEAEEVLEALVNRRNQSADMRTAEKNRLHQVHETQVGSVKQLIAHFDRLIDELDKQIDDHTHTHFDGKAQVAEQIKGIGSITTATLMAMLPELGRLSHKRIASLVGIAPHPRESGETKFKSRCFGGRSAVLKALYMATVAATRFEPLIRDFYQRLLSEGKPYKVAVTVCMRKLLTISNARMRDYFAENDTAENGI

SEQ ID NO: 501293 - protein, 414 aa, unidentified
MTIDTNNTGSKLWVAIDVSKNKHDVLIEYPNGTCKRLIIMNTMDDFKKLADLLNASQLSPFIGLEATGYYHRSLAYFLLQQKFSVYLISSIAVARTRDAQYNSRDKHDKRDAQVILHLLKAGTVQIYYDPLVYGYNDIQELSNTHYRVSFRKTQLQHSIINHFLPLYFPEAEKYFCSTRAAWFANFLHRFPCPTAITSYKEEQFIEQAWTLAGRKVSKLNWLKDVYKTAKNSVGLPVEQTSKTIVMFQFILSEFADVCQRRKQIETEADAYLANNKDYQRLKTIPGIGPIIALTILAEAGDLRRFKHVRQFLKYCGFDLATYQSGLTRGVTTLSKRGNARLRQMLWLAATIAIRMRENTFRKKFTNYTKGDPTNVNLKRKGYTAVAAKMARVVYSMIRHGTDYYCTHTEAVVTQ

SEQ ID NO: 501294 - protein, 386 aa, unidentified
MQASNVCTPTAGHIGTIFVAIELSQKSWLVTIHSPDRDRISRHKLEGGNHAGLLSLLEGIRTRASQKLGSAPAIVSCYEAGYDGFWLHRLLTAAGIRNHVFDPASIAVEQRGRRAKTDRIDGEQLLRTLMAYCRGEPRVVRIVRVPSPEQEDVRRATRERDRLVKEQGAHTNRIKALLRLLGMAVGNPRRRDWLKWLSAQRDWQGQAVPQQIKVEIEREHARLMLVREQLAALEQQSAQAQPAPAAAEMARRRDILFKLKGLGPAFSGTLTNEVFYKDFDNRRQVGAYVGLAPSPWKSGGIDREQGISKAGNPRARLAAVELAWLWLRHQSNSALTRWFLAYTAKASKRIKRIAIVALARKLMVALWRYLTTGLVPDGAVLKPVEV

SEQ ID NO: 501295 - protein, 368 aa, unidentified
MHELITGFVGLDAHAESTAIAVAEVGREAPRFVGTVGARLSELTKALSRLGEPQSLQVVYEAGPCGYALARELIRLGYRCEVVAPSKIPRRPGERIKTDRRDALNLAGLARAGELVPVRIPDERDEAMRDLSRARVDAVRARLKARQQLKALMLRHGRRYSGKTSWSAAHERYLAAVSFEHPAQDIAFTEYRQAVSEGEARVQRLSESLRREVEHWRMHSLVSAVMSLRGLDLIAATTVVAELGDLRRFAHPRELMGYLGLVPSEHTTGSKRRLGAITKTGNTHVRRVLVEAAWNYRFPARISPALQLRQERQPAEIRAIAWRAQLRLNHRYRRLKARGLQHNKICVALARELAAFVWDIGHHVAASC

SEQ ID NO: 501296 - protein, 342 aa, unidentified
MDYFVGLDVSVRTTSVCVMTETGRIVQEGKVESEPEALIQFLDVPGRRYIRVGVEAGPLCQWLYAGLAKAGLPVICIETRHAQAVLKAQINKTDRNDARGIAQMMRVGLYRPVHVKTLASQQIRALLNGRRFLQARILDVENSIRGLLRNFGMKVGVISRARYDARIRELIDGDPTLAAVIEPMLIVRRVTREQFAALHRKMLELVRADEDCRLLMSAPGVGPVVAMTYRAAIDEPARFQRSRAVGAHFGLVPRTHQSGEIDRRGRISKNGDETLRSTLFEAALVLLRPNSKPSALKAWGLRIAKRRGMSRAMVAVARKLAVILHRMWIDRTEFCWKAEATV

SEQ ID NO: 501297 - protein, 378 aa, unidentified
MSDVISIAPADVRLWVSLDVHKFSIVAATLPPAGGKPEVCRIETTEKAIRRFIDRLGGPEGLAVCYEAGTGGFALWRLLTRLGVSCDVVAPSLVPVRAGDRVKTDRRDAKKLVSLHRGGLLRFVHPPTEELEGLRDLLRCRDDIRCARTAARHRVLKALLRHGRIFREGKTAWTKLHRAWLARQRLDDPLAQRALEQMLIHLDGIERQLDALDAELGQIASSERWAGQVAILTRFRGISTLSALGLIAEIGDFARFGNPRELASWLGITPSEYSSGDQQHRGHITKAGNHHARRLLVEAAWHYRHPPRRPTSGPDPDERAWQAQIRLHHRYRHLTEHGKRTTVTNIAIARELVGFLWAAMTDQPLRDTHDPHHKEVAA

SEQ ID NO: 501298 - protein, 358 aa, unidentified
MAGPQPIVADVYTYVVGVDTHAATHHYAIIEARTGGLIDHAEFPTHTAGLLRAADWIARRTAEATAGEVDRVLVSIEGTRSYGAQLTAVLSQTGYRVVDAPTPKRERGSGKNDQIDAVVAARGSLHKHLDQLADARSGETSATLQVLLSARNSITGERTRAINALTALLRVHDLGVDARRKPTRQTIRSIAAWRTRRGDTPTQAVARRETIRLATRILALDAEATSNDKQLHDIVAATAPTLLDLPGVGPVNAATVLTAWSHPGRVRNEASFAKIAGVCPLEVSSGRRHEHRLNRTGDRQLNRALHSIASNRMKYHPATRDYVARRTAESLTKPRIRRCLKRYIAREIYRHLAALDTL

SEQ ID NO: 501299 - protein, 344 aa, unidentified
MDHFAGLDVSVKETSICIVDDAGKIVREVKVASEPEALLAVLKNLAYHFKRIGLEAGPLSQWLFSALAEAGLPVICVETRHMQAVLKAQINKTDRNDARGIAQMMRAGLYRPVHVKTIRSQKLRMLLTHRKLLQSKAIAIENDLRGTLRNFGLKVGVVGKVKFEARIRELVENLPDLAVLVEPMLIVRRTLREQIVILHRRLLAIVRDDEVCQRLMTTPGVGPVVALSYRATVDVPARFRKSKAVGAVFGLTCAKYQSGEVDRNGRISRCGDEMMRVMLYEAAQSMLRSKKWSWLKAWAMQIARRRGMKKAIVALARRLAVIMHRIWVDGTEFRWTREQATAAA

SEQ ID NO: 501300 - protein, 376 aa, unidentified
MEHDSTLYVGLDVHKESITAAYALGMGEVELLGKVGTTKTDIDRLCKRLQSKASRICIVYEAGPCGYGLYRQLQQKGVDCMVCAPSLIPRKPGERVKTDRRDAIKLVRSLRAGDLSEVYVPTVEDEAFRDLARAWVSAKDDLKRARQRLKSFLLSHGVSYSGRADWRAAHQRWLSTFAFDSAWQQLAFEEHRRTIEDRLAQCDRLEAALREAVAAWRFYPAVLGLQTMRGMQFTTAVGMLAELGDLSRFTHPRQLMAWLGVTPSEHSSGEKRRQGSITKNGNSYARKLLVESAWSYQHPARVSPEIQRRHEGIPKSIVDRSWDAQVRLCRRYRTLVARGKQKNIAVVAVARELSGFIWDIGQLAMSLALQPQQHAA

SEQ ID NO: 501301 - protein, 406 aa, unidentified
MAAVMIGVDPHKGSHTAVVIGPAEEPLGELRVRASAGQAGKLVGWAAAWPERTWAVEGAGGLGHLLAQQLVAAGERVLDVQPKLASRVRLLQAGDTNKNDPNDALPVAVAALRSRTCRQVVADDYPAVLKVRAERHRDLARTRNQVACRLHAVLCDLVPGGHSKEISAAQAARILAQVTPSGAVALARVELAAEFLADLRHLDAQLRGTRKKLAAAVRASGTSLTQVFGVGPVIAGTIAGDVGDVARFPGRDHFASCNGTAPVEVSSGNRTIHRLSLRGNRRINHAIHMAAITQLRHKHSEGRACYDKKVAEGKTRKEALRSLKRKVSDAIFARLQADARQAAAARTKGPGGQPGNGSDSSAASSHPERRLFGPATPGPDTTIRPGTTAGTPSPSKPTSKKTRPAT

SEQ ID NO: 501302 - protein, 337 aa, unidentified
MIIVGCDFHPSYQQVAMLDTETGRTEDHKLMHATGEAERFYRAIALPALVGIEAVGNDQWFVCLLQKLGHEVWIGDASQIRASYVRKQKTDRRDAKHILQLLVEGRFPRIWIPGAEMRDHRQLLIHRHKLVQIRTRVKNELQHLMLNQGTQKKQKLWSEEGRAMLASLPLEPWTDRRRRDLLNLLGMLDDQLEKLNDAVTQVARQYPDVHLLMSQPGVGAVTALAFVLTVGDVRRFSRGKQVASYLGLIPREYSSGGKQRMGGISKQGNRLLRFLLVEAANIAVRFDPVFRKEYLHRCHQKHFTVAKVAAARKLAIRMYWILRTQTPYPKVLSSRVA

SEQ ID NO: 501303 - protein, 311 aa, unidentified
MSDKTTVGIDVSKFALDVWIDTSKRLIHLEKSASGIVKLLKEFEGLHISGVIMEATSRYHSLAESMLISAGLPVAVINPLQIKNFARAMGKVAKSDPIDARIICEYGRRMKPEFRPVRDKVLQNMAMLLTRRRQLVQNRVMEITRLQEKSGAWIEKDIAEHIAWLNVQIDALDKEIKDQLNQNAALSPKRKMLETVIGIGPVTQAAILSQLPELGHLNRRQISALVGVCPYDRDSGQLRGKRAIWGGRSGLRATLYMAMLSALRYNPQIKSFYTSLVARGKPKKVAITACIRKFITILNAMFRDQKDWAYS

SEQ ID NO: 501304 - protein, 323 aa, unidentified
MNKDIKHFGIDISHLVFDVTDTDGKYYQFKNNGSGFKKFTKLLNCDSHCVMEATGYYHYQLAYYLLESGMKVSVENPLSVKRFIQMKLSKIKTDKSDSKLICEYAQQVDLKLWKGNSKDEMECLQITRALSVYTKQSTMLKNKLHGESVLGEPSKAVVRSLKRSLKQLVKEIKSLEDKLLVLVKEVHQDLLTRLQTIPGIGRKTAIMLVVLTGGFDRFTSASELCSYAGLTPVIRQSGSSVKGRPRISKIGNQKLRNLLFMCSFNACKYNKACRDLYERIVAKGKSKKLALIAVCNKLLKQAFAIAKSGLIYDDTYRSTLVKN

SEQ ID NO: 501305 - protein, 353 aa, unidentified
MGHKYVGLDVHQSSTVAAVHDEQGKSVMESILATGAEAIRDFLKGLRGTIHVTFEEGTQAAWLYEIVKPVVAEVVVCNPRRNKLLAVGNKADRVDAQKLAELLRCGQLRAVYHGMPGVRLLKELVHSYDSLVGDTTRVMNRVKAIYRGRAIGCAGRDVYYQRNREQWLEKLTEAGVRQRAVFLYQQLDTLRGLRREANKAMLKESRRHPAYPILQEIPVLGPIRIAQILAKVASPHRFRTKRQFWAYCGLAVVTRSSADYEFREGKVEKRKRAPMTRGLNPNFNHRLKYVFKSAAMDGIHQAPFEGYYARLLVKGIRPEMARLTLARKIAAVTLTLWKRGERFDDLKVSEQAA

SEQ ID NO: 501306 - protein, 325 aa, unidentified
MQISTIGLDLAKHWFQVHGVDAYGRVVVRRRLWRSGVIAYFRSLEPCLVGMEACATAHYWARELMALGHTVKLMPPAYVKAYVKRNKNDAADAEAICEAVTRPSMRFVPIKEAEQQAVLMLHRARSLLVRQRTMLVNALRAHLAEFGIVAPQGLRYVEILTKTIAHQQARLPELARSILQTIVDQLNGTMARIQEIEGRLARWHRQSRVSRLLATVPGVGIMGASAIAATVTDPSLFRSGREFAAWLGMTPRQNSSGGKERLGRTSKRGDKYIRSLLTAGAVAVLPHARNRPTRDGEWVRALVARKPTKLAAVALPTKPPASSGQ

SEQ ID NO: 501307 - protein, 335 aa, unidentified
MEFSYFIGSDVSKNELDLVLLQGKEVVSHQEIANTPAAVKAYVKGLYQLPGFALSKAVFCLEHTGIYNNHLLAYLHQIKAQVCLQAASQIKSSLGNMRGKSDKIDALRIAQYAYKNREELRLWQPKREVVERLSHLAASLSRLLAAQKLLATPLREAAGFVSKSMVKENKQVCAKTLAAIQADLAKTDKAMEAIIQADEELKRLFGLVSSVSGVGKVTATQMLITTNEFKDITEAKKFAAYAGIAPYPHESGLYKGKARVSHMANKKMKTLLHLAALSAIQFNADLKVFYERKVNQQKKNKMSVINAVRNKLILRIFACVNQNRKYEKIYVKSVV

SEQ ID NO: 501308 - protein, 412 aa, unidentified
MGKAKHAHHYLRRTQNGGHGARAPLPTLVIAQTGIVGVFRKEWPATDVHPAAGRWRSDRVRPEPLWLPRSVIVVSTFIGPGWLPEQLGSLHKAGSRKMTQTNMTTAGIDTSKLKLDIAVHGRTERWKVANALPGWRALAANLAKADVTRVGIEATGGYERGVVEHLRAAGLIVLVLQPVQVKAFGRVHLRRAKNDALDAELIAACAAAIDRLRMVPDARLTELAGHLTFLEQTEEDIARFKTRLEHIDEPGLRRIVNSDIARLKARKAAQIRDIAKRLRAHDDLAERLDLVLSIPGIGERTALALLIRMPELGQVSREEAAALAGLAPFDDDSGQRKGQRRIAGGRGRLRRSLFAAALPAAYRWNRALIALYARLKARGKAHNAALVACARKLLIYANTVVQRGTPWTEKAA

SEQ ID NO: 501309 - protein, 409 aa, unidentified
MIGYVGLDVHKQWTQVAWHLPDGSVQRERIATQPALLRELADRLSPQDTVALESTTNTFAIARLLRPRAGRVLISNPLKTRLIAESHVKTDKVDADVLVQLARSGFLPTVWQPPEDLELVRRRAAHHAAITRQITQVKNRIHAVLHRNLLEPPVADLFCQRGRAFLRRADLPLDEQVQLEIDLEILQHLEAAQAQARGALARLACDRPAAQLLMSVPGIDYPTAVGIMAAIGEIARFPSSRKLVSYFGLNPIVSQSGQRCWTGRISKQGRVHARWLLVEAAHCAVRSSGPLQAFYRRVKARKGTNVAVVAAARKLTVILWHILRSGEPYRYAPERTTREKLSRMRYHATGRKATGGVPKGTPRSEHYGTGRRGRQASAQADRKRLQAHQNDYERLIEGRYGDAAPAETS

SEQ ID NO: 501310 - protein, 316 aa, unidentified
MNSQVFVGLDVSKQHLDVAVRPQGRHFVTPNHDRGIKQLIKHLTALKPQLIVLEASGGYEFLVTAALAEAQLPVALVNPQAVRKFAGATGKLAKTDKIDAQVLAHFAEALRPEPRPLPDQAQQLLKAALQRRLQVVKMIGQEENRLEKTFIPAVRRDIQDHLTWLRRRLKELDRELDDQIRQSPLWRDRDRLLRTIPGIGPIVSRAVIAQLPEAGALPGKKAVALVGVAPYNRDSGRFRGKRMIRGGRSYLRRMLYMAAVVASRFNPVLRAFYQRLLAAGKPKKLALTACMRKLVLILNAMIKNNQPWNQFITQVP

SEQ ID NO: 501311 - protein, 421 aa, unidentified
MAPQLMQQFAAYVGIDWADRKHNFCLQAGDEDTVEFGCLPHRVECIDEWARALHQRFGGPIAVALELAKGPIVSALQKYDFFTLFPINPSTLAKYRLAFKPSRAKDDPSDAELALDLLLRHPERFAPLKPQSVGMRSLTVLIEQRRQLVDDRNRFTNRLRSALKEYFPQTLDWFEDIDTMLFCDFLSRWPTLSAVKRASSKTLDGFFRAHNCRRATLIDQRLKSIRSAVALTEDPGIVTPYRLHAVTLVAQLRTTLAVIDVFDQEIAALVRTLPDFALFDSLPGAGPHLAPRLLAAFGEQRERFRSAVEVQQYTGIAPVTERSGKKSWVHWRWQCPTFLRQTFVEWAAQTINKSFWAGAYYRQQRAKGSSHQAAVRALAFKWIRILYRCWQTGKRYDESVYLNALRRRGSPLLGKLSLSDG

SEQ ID NO: 501312 - protein, 344 aa, unidentified
MDIVVLGIDLGKNSCSLAGLDASGRVIMRRRMRRSSVESFVNGLGRCIVAMEACCGAHHLGRVFAAQGHETRLMSPEYVRPYVKAQKNDELDAEAIAEAATRPTMRFVALKSQTQSDTQALHRARERLVSERTALINHLRALLLERGVIAPQGRRKLQEELTVFADEDRTEALSPRIRLLIEDLRSEWRALDERIAAFDAEFVRMAREDEAVRRLTTIPGIGTINATALAAAVGNARAFGRGRDMAAWLGLTPRQMTTGGKPRLLGISKRGNRYLRKNLIHGARAVLPYLVERKTPLGRWACGLLARAHKNVVVVALANKLARIAWVVLARGGVYDAGYEAAAA

SEQ ID NO: 501313 - protein, 375 aa, unidentified
MSNVRFIGLDVHAETIAVAVAEPHGEVRALGIIPNRAESIRRLMKKLGPAEQLRACYEAGPTGYVVYWQLTAIGVACQVVAPTLVPVKPGDRVKTDRRDAIKLARSYRAGDLTPVWVPDAAHEALRDLVRARATAKKDQLRARHRLGKFLLRQGRRPPTGMKAWTQRHLAWVKTVEFEHAAQQATLLDYLHEVEHATERIARLERALDEAAQTAPESMRAVIAALQSLRGIARISAVTIVAELGQISRFAKPRQLMGYSGGVASEHSSGERTARGDITKTGNAHLRHVVIEAAWAYRHRPAVGASLRKRQAPLDDEVKAIAWKAQYRLNARYTALLAKGKTPQQAVTAVGRELLGFIWSIGVIAEARGPAAQAAA

SEQ ID NO: 501314 - protein, 360 aa, unidentified
MKTYYIGADVHSNSTELAIEHNGRIVSRHSIPTAIPAIKEVIGSLGGKIHLTFEEGPMAGWLYRNLKNTVEEIVVCDPRRNKLICCDGDADDKIDSGKLAALLRGGYLRAVHHSDDAGRAEFKQWVSLYHDRVRDAVRTINKIRARCRMYGIKIGRNVIRDKSQRPGWLKNIQDQALAGQLEVLWIGYDAVALQVCRAKRQFCKLGKNYPIIKIWSDLPGIGVIRAATVFAFLDTPWRFSRPNKLWKYCGVGLQRSASGSDKKGNPNPARLKLAWAVNRLLKNVVLGAAHTAVNQNKNVFKDYYERMLYDGIIPSNARHAVARKMLTVMWGMWKTNSRFNEKLVKDVSMIAGSSYCATRK

SEQ ID NO: 501315 - protein, 336 aa, unidentified
MKSWSVTILSETSVLKRMSQGADPDALHRFLTSHYPEAEYYSVYEAGFCGFWIHDRLTELGIHNIVVNPADVPTMSSEKLRKTDAVDSKKLAVSLRAKQLKGIYTPDREALEIRSLIRLKNSITKDMTRQKNRIKSQLRYLGIAMPTAYLEPYSHWSKRFLNWLREVEMSTPSGRHTMDILIMQLEALREQKAEMTRKLRALSHTERFEETLNLLMTIPGIGQATGLALMAEIVDITRFSNAEQLAAYVGMIPMCHSSGEHEGVGDITLRKHAILRSNIIEAAWVAIRKDEAMQLCYLNNCKRMVPSKAIVKVARKLVNRIYFVLKRHQPYVNAVA

SEQ ID NO: 501316 - protein, 413 aa, unidentified
MMSLGFSWAISLTRGWRDLSNIYRIPKLIMKIQYYIGLDVHKETVAIAYIKSNSRGDAIYKATCGGSNAAVERALRKLAKELGVKLQELSICYEAGPTGFVLGRRLIQLGLECTLCSPSKTERKPGEKIKTDKRDAMKLAKLYKNGDITPVRIPPALDEAVRDVCRARTDAVDDLTRSKQRLNSFLLRLGMSYTGRSKWTPAHMRYLRDLTMPTDVQKIVLEAYITSIDLNESKVKELKASMLTILQDWEWKPVVDALMGCKGFQEVAAMTVISELGDLRRFDNPRKLMAFLGLVPSEHSSGGKRRQGGITKCGNSHARWMLIECSQHFRKSPQIGAALTTRQIGLTDEVKNLSWRMQNRLNKRYVKLKTRGKNENKCIVAIARELVAFIWELQNKCKLEMPAPSEARNMIEN

SEQ ID NO: 501317 - protein, 404 aa, unidentified
MFKFGIDWSEQHHNLCIRNSKGAIVSRVEFKHTLEGFQRFDDERRKLGVPPSECLVAIETAYNLLVDFLLDRGYLVYLIPPQATKGYRNRQRSTDAHTDDTDAALLSSILHTDLDSHRRLQPNSALTQQILAQVRLIDLLRRSIQRQANQLRAVLFRVYPQALGLFGKLTAQINLHFLMAYPTAQEAQALTQPAFEAFCREHRYGRANLISRRYAHLMEPAPEANPIAVTAYRDQVRILAELLLPQVLRRTEARSSLAQLFSQHPDSFIFESLPGAGELLAPGLLVKFGDHRDRFPTPGSVQALAGTCPVTKQSGKRKVVIFRRGCDREFRRITQQFAKASVRQSGWALAYWRDVRPRCRSDSDAYRRLANRWLAIIWKMWQDRKAYDESYHIQQRAQRRRSRF

SEQ ID NO: 501318 - protein, 442 aa, unidentified
MRTIGLDLSIKQPSEAIVAGHDGSFIGSSFKVDETAAGLQALMERACEGMPDDESLRVIMEPTANAWLPIAIYMSHREVVCHLVQSEKAADLRKFYRKHAKSDRIDTRVLVKIPFVDEEGLNSLYLPTAEEQALRRLCRQREKLVSQATAIKNRLHDLDRLAGWDKVLGSAFGNAFSEAARSFRRDFYDPWQVRELSVAGLKEYLVKLTGEEDCQSTAEKLYRASLAIIELYSPPEEDTSPHLDFEMLCFEAQIKQEHLDKLEELQEKVKSQIQRISQGSRSVELARSLMGIGETGGPVLASYVGDPHRFNQNTFRGWHGMIPGSKQSSSKDQKGVSMTKAGPNLVKKFAYLCADIARQWDPQIGRIYWDQMVNKGKHHTQAVCACATHLLDRLLAVLKEDRLYELRDCAGNPITNAEGRKIIQEKYQVPKAVRRSRRARNP

SEQ ID NO: 501319 - protein, 344 aa, unidentified
MYVCILSQDGEVVLHRNMQASPDALLKAIAPYRDHIVIAVECIFTWYWLADLCAQEGLPFVLGHALSMKAIHGGKAKNDQIDSQKMAVLLRGGMLPQADVYPAAMRATRDLLRRRMHLMRKRAELLAHVQNTNSQYNLPGMGKNIAYKANRDGIAERFPDPAVQKSIAVDLALIGHYDPLLNDVEFSIVHTAKQPDPQTLSRLQSVPGIGKILSLVLLYEIHTIDRFPRVQDCVSYCRLVKGAKASAGKRYGTSGAKIGNAYLKWAFSEAAGLLLRTNPAGQKSLARLEKKHGQGKALTVLAQKLARAVYSMFKRKTAFDMPMFLQSSSGAERVSPTSHWTLSG

SEQ ID NO: 501320 - protein, 374 aa, unidentified
MRTSITHVAMDVHKKQHQVAWVCPDTGEIQTFSIANTEKELARMVRRIRPKGAGEIHICYEAGICGFTLQRRLVKLGCRCQVIAPSLVPSKPGDRVKTDRRDAKKLLGQFIAGQLTEVHPPSAAQEADRELTRCRERAQVDLKRARQQLNSLLVRHGYLYSEGQLWTARHEKWLQSLELDLPRLREVFEEYTSQVQHSQQRLASLDKRIGQLAQSEPYAKAVAALRCFRGIDTLTAITLLTEIFEFGRFDSPRALMAYLGVTPSEQSSGERRRTGGITKMGNRHVRRILTETGWHYRHPHRISKALKARRKGQPAWAIDIADRAGHRLYKRYRHLIERGKSAPTAVMAVVRELVGFLWALLRHVQGHPQTEGSK

SEQ ID NO: 501321 - protein, 320 aa, unidentified
MHLHLGIDVSKNKLDCALRLENGKFRNKVVENNVRGFTSLQEWLKKQTTAEIHVCMEVTNVYWEAVAEYLANQNLIVSVVNPAQIKSFGASRLVRTKTDKVDSQLIAEFCFDRHPAPWQAPTLSEQTLRALVLRLDALQAMQTQEKNRLDVSRDAIKTSLEEHLAWLEKEISNLAKKIRDHIDDDPDLKTKRDLLQSIPGIGERTTATLLSFYANVERFENARKAVAFAGLDPRHHQSGTSVNGKQSMSKIGHTFIRKALYMPAMVTLYKTAWGKAFYSRLRASGKPNMLIIGAMMRKLIHVAFGVLRSGKIFDKSLHCA

SEQ ID NO: 501322 - protein, 345 aa, unidentified
MQIAVVGIDLGKNTCSLVGLDEDGRVIVRRRLRRESVTKFTASLAPCLVAMEACCGAHHLGRILQAQGHQVRLMSPEYVRPYVKAQKNDDRDAEAIAEAATRPTMRFVELKSEEQLDMQALHRARDRLVGERTALINQLRAVLLERGLVAPQGRRKLEQHLAMMLDEGGADVPLSPRVRALLEDMRAEWRELDRRIGAFDDEFAARARTDEAARRLATIPGIGVLNATALVAAIGTGETFGRGRDLAAWLGLVPRQASTGGKARLLGISKRGNGYLRKMLIHGARAALPPLVQTQSRLGHWLRGLLARAHKNTVVVALAAKLARIVWAVLRSGKGFDLRAAPAAA

SEQ ID NO: 501323 - protein, 303 aa, unidentified
MQQESAVFIGLDTSKMKISVALAEDGRHGEVRFLGDIDHTPEAVRRLVTKLAGKYRQLLFYYEAGPTGYGLQRQISALGHDCAVIAPALIPKRPGERVKTNRRDALTLARLHRAGELTRIWVPDPGHEAVRELVRAREAAMEDLRAKRQHLQSFLLRHGRVFTGRKPWTRAHARWLADLAFEHPAQHLVLHEYRQAIADAEARLERLTQQVAEVVSGWSMAPVVEAYQALRGVALLTAVTFVAEIGDVRRFETPRQLMAYLGLVPAEHSTGDRVRRGSITKAGNTRARRVLIEGAWPTASRPA

SEQ ID NO: 501324 - protein, 347 aa, unidentified
MRFYTGQHQYYCGIDLHARTMYLCILKHEGGEVVLHRNLRCEPDTFLRTIAPFRDDLVVGIECIFCWYWLADLCTRENIPFVLGHALYMKAIHGGKAKNDKIDSHKIAVLLRAGAIPVAYVYPHGMRATRDLLRRRLFFVRKRSELFSHIRITFHQLNLPAPTGQLRYACNRAGLVEAIPDSMVRASIEADLATADRLDEVIRTLKRTILSQARIEDPHTLQLLQTIPGVGPILALTLLYELHDIARFARVQDFLSYARLVKSQKASAGKVLGTSGSKIGNAHLKWAFSEAAVLFLHKNPPGQKLLNRLRSKHGKGKALSILAARLGRASYYMLRRTTAFDMDRFMN

SEQ ID NO: 501325 - protein, 357 aa, unidentified
MLSSNVKYIGLDVHKEAIAIAVLNGAGKLVMESIVETKSSTVLDFLHGLRGELHVTLEEGTWAAWLYDVLKPHVREIVVCNPRRNALLKEGSKSDKIDARKLAELLRAGLLRAVYHGENGLQTLRELARSYLTISKDLKRVKNRLKALYHSWGICCAGKQVYAARHREQWLSKIAQVGVHRRAELFYQQLDGLLVLRNTVRGELLAESRKHQAVKILRQVPSIGPLRAALLLALMQTPHRFRSKRQLWTYSGLAVVTHDSAQHRYVDGQLQRSKKPQQIRGLNQNHNHAMKEIFKSAALNASRCAGSLQDFNARLLVKGMKQDMARLTLARKIAAITLALWKKGGSFDAEHLKSQAA

SEQ ID NO: 501326 - protein, 428 aa, unidentified
MSKGKTQSVIETDDDTLYYERCAGIDVHKTLLVVCLRIGRKTESRECGTTTGEIREIVNWLKGNGCQMVAMESTGSYWKPLYNIFEQENLPAMVVNAYHIKNVPGRKTDWNDAFWIAKCLAQGLLKPSFVPDREQRELRDMTRFRKSQIEERSRNINRLQKFLEGANIKLGSWLSDIEGKSSSELLELIIGKEDFTLDDVRQRMHGRLKSSPEEIFASIEGYITSTQRKFLAHVMNIIKEQTRLIEITDEMIKASFSDEQKKAVEALDAIPGIGTVSAEQIVAETGTDMSCFRNQHAFSNWIGVAPGNNESAGKRKSGKTTHGNKTLKSTLSQCAKSAVKNKKSFFSAQYARLVTHRGKNRATMAVAHSMAIAIYFVLSGYDFKDLGSDYYNQFNREKKVNSHLKQLGKLGITLPDDLIDIIRAQSSG

SEQ ID NO: 501327 - protein, 417 aa, unidentified
MKKHNNCPKKSEPTSKRAKSRGPVQRDPKEVLAELVGKLREKLDPRVVAASAGEEDSRGKVRPNLDRLTVGVDLRDQWSHYCILGLEGERLAEGQLRTTPRDITEFFEALNAARVVVEVGTHSAWVREVICSYGHEVLVANPRLMEGSKRRKRKNDRIEANKLARLGRVDPQSLHPMQHRSREVRQDLVVLRARDALVAARTELINATRGLVKSMGSRLPKCSSPSFAQKVEETVPVELRDALMPVVRMAAALSDCIQGYDEKIEKLGREKYEHTALLRQVKGVGPITSLAYVLTLENPDRFVKSRDVGPYLGLVSKQEDSGESQPQLGISKAGDTMMRRLLVGSAQYILGPFGPDTDLRRYGLRLCERGGKNAKKRAAVAVARKLAVLLHCLWVSGEVYEPLRQGMSATMTPAAAA

SEQ ID NO: 501328 - protein, 372 aa, unidentified
MFIVGCDFHPSWQQIAVFDNESGEVNEYKLSNGDGAAEQFYRKLPAPARIGLEACGNSQWFVQLLQELGHEVWIGDAAQIRASYIRKQKTDKRDALHILKLLLEDGFPRLWTPTAEIGNQRQLLVHRHKLVRLRAQVKNELQHLAPNQGVQKKARRWSQAGQKLLRELPLAGWAASRRANLLELMKLMDRQIAELDRALEQAAEENPQARLLRTQPGVGPVTALAFVLTLGDVSRFPRGKQVSSYLGLIPREHSSGGRQRLGAISKQGNRFLRQTLVEAAHSVVRLDEGFRKQYQRRCHRKPKGVAKVAAARKLAVRLYGMLRTNIGYPEIVHIESRPLVPLVDHGQTETLNGRSRIQQTGAKDGPAGLGKR

SEQ ID NO: 501329 - protein, 336 aa, unidentified
MSHYCGIDLHSNNHVVVVIDEEDKRVFEKRINNDLSLTLKALSPYRKSLQGIAVESTFNWYWLVDGLQEQGYDLSLVNTAAVKQYDGLKYSGDHHDAFHLAHLLRLGILPTGYIYPKAQRAIRDLLRRRLLLVRAASTQLVSVQSQIWRSTGLRIKSGDLRKTDFVSPDIDKYTRQAVHAGLAVYQSIQQQIDGLENTAHQAVKLTDAFKILQTVTGIGKILGLTIMLETGPIERFAGPGNFASYCRCVDSTRMSNGKKKGVGNAKAGNKYLSWAFSEAAHFAVRFEPLAQRFYDRKKARTNGIIAIRAVARKLARATWMMLKHQVPYDAKLMFPE

SEQ ID NO: 501330 - protein, 419 aa, unidentified
MLVAIDMSKHRQEVLIERPEGGRRRRMTIMATKADYDRLADELSSIGCPIVVGFEATGNYHRTLAHRLLSAGFELRLISSVALARTREALHNGWDKNDSKDAQVILHMLRIGATQRYVDPLAAGINDLQEMSKTHEAISKAKTQTWHRILTHYLPLYFPEIERFAGNSRSDWFLALLERFPTPTSMTALGQEDFTREAWSLVGRKVSKARLINDIYETACASVALPVDEDSVAIAMFRMVIAQARSLIRQRDEIERTAHALLSENRDYQLLRMIPGIGPINALTILAEAGDLRRFAHHRQFLKFCGLDLATCQSGTFRGRTKLSKYGNARLRRTFWMATQVAIRQRDNSFRDKLGRYVAGHGNDPDRRRKAMTALTAKMARVAHAVIKTGTEYRPFVERADTRWKDPSLSCREGATATL

SEQ ID NO: 501331 - protein, 361 aa, unidentified
MFNLPVFVGLDYHTQTIQICVMNQQRKILVNQSVVNDPAAVFQVVAPFGNNVSVAIEASTGSANFAEELISKYQWHVELAQPGYVARLKQTPDKSDWTDAKLLADLTRVGYIPRVWLAPLYIRELRNLVRHRHGLVQQCTQTKLRLRALLRQHRIDCPHSPWTIKGKKWLLDANNIASKNLLFLLQDHYDTIEYFTKKIVAATTMMETHVASDAVVKQLLQQPGVGVITAITMRATIGRFDRFRTSKQLAHFCAVCPRNNSSAGKTTTGGLIKAGDELLRQVLMEAAHRLIRYDPDWKVMAARLRANGKKTCVVVAAVANRWIRKLFHQMQESISIGSADMRFLRHGQESTPALENPLVIF

SEQ ID NO: 501332 - protein, 328 aa, unidentified
MRDQYIGIDLHKAFFQACAVTSTGDRLWEGRFPRTPAGVDALTARCTPRSALAVEASTPTWHFADGLVAAVGELRIVDPLKTKLKAGYAAKTDRLDARRLADALRRDSVVGIYYPPLAIRELRELCRTRHALVQVRTALINRLRAVLLRQGIADARRLAKTADDTWLTDLRLPPQAGASVARLRQVLAVVRTEAAQAEAEVRRGTDADPIAITLQQLRGIGPVLALTIRAEIADIRRFPTGGHVASYAGLVPRVDASAGRIRYGRITRRGSPWLRWALIEAAMHGTTRSDRIGRWGRGLAVRKGALKARVALARVLCEEIHRLWSAVI

SEQ ID NO: 501333 - protein, 378 aa, unidentified
MPKAAHKKTSDMASKVYVAFELSEKNWKLVFSDGTRTSEASAPARDLSRVLEVIGRARRRPEGSCRVLSCYEAGRDGFWFHRALTDHQIENVVLDPSSIEVDRRARRAKTDRLDGRKLVALLIRMDRGDATVRRVSVPSPEVEDARRISRELHRLKNERTAHINRVRGLLALIGRTMKRMKEVRSFLDLGWRGRDGRLVGPVLRGEILRELSRIDLLNAQILEVKRAQKELFETDSACATVAAQLTNITGVGESSAAILSYELFGWRDLANRRQVAGAAGLAPTPTSSGNDEREQGISKAGNTRVRWVAVQLAWVWLRLQPETRLSRWYRDRFGSGSPRLRRIGIVALARRLLIDLWRSEVRRHPGGRDHEGVNVVKV

SEQ ID NO: 501334 - protein, 362 aa, unidentified
MKNLKYAIGIDVSMKDFACCLSVINEQQEVKVKASHKFSNAPAGFKALSQWTTQHCKEVLPVVFVMEATGVYHEQLAWFLNSKEQQISILLPNKAKSYLKANGAKSKNDKIDARGLSQIAAEKKLDLWVPPSRELYTLRSYTRQHQNLTEIHTALSNQVHSIQHSQFPNKDIIKQLKKTIKLIDDQLKEMNVAITKTVKLDEVLNQHYQNICTIKGLAMLSFAVIAAETNGFALFENAASLVSFAGYDVVENESGKHTGKTKISKKGNSRIRRILHMPALNAVRDDQPQFKKLFERVYERTRIKMKGYVAVQKKLLVMMYYLWKKNEKYDSAFDHTQKVIAPAMPGATRDKPLKGILIDHQN

SEQ ID NO: 501335 - protein, 418 aa, unidentified
MTRGDDSRIIRIVHPICCGLDVHKESVSVCVIFPDDKGEEQCDVKVFGTFTDDLMRLRDWLAAHNCPVVAMESTGVYWRPVHNVLEDSVQVVLVNARDMHNVPGRKTDIGDSRWIAGLLRHGLLKSSFIPPQDVRQWRDLTRLRKKYVHTVGDYRKRTHKLFESANIKIDSVVSDLFGVTGRNLMQLLVADRKLTLSDIQTCVRGKLKGKEAELFRSIQGFFTDHHRFVLKMILETIATLEAQIEALDLQIRCAMKEHETLLDRMKQAPGIADVASREILAEIGPTLDSFRKDTALVAWSGLCPGNNESAGKRKSGKSPVRKHHLKTIMIEVAWAAIKKKDSYFKDKYYRLKARRGAKRAIAAIAHRILLGIYHVIKDGVDFRDLGGDYLTLRNKSQKVFHLRKQALAMGFDLVPQTV

SEQ ID NO: 501336 - protein, 337 aa, unidentified
MSVYVGIDVHRKRSQVAVVTEDGTVQLNKNVVNGSEPFLRLIGDLPSGTPVAFEAAFGWSWLAELLEDYGFEAHLVHPLRCKAIASARLKNDKVDAAILAQLLRADLLPEAWLAPPRVRQLRALLRHRASLVRLGTQLRNRIHAVAADHGYDRSASYWTGPGRGWLAGLDLPAASREIVGDCLAVIDGLAPVIDRIDGELHACARADPRVTVLRTLPGVGEFTALVMLAEIGDITRFGSARKLASWAGLTPTVRGSDLKVRHGHISKQGSAWLRWVMNQAAQTAKRSPEFAASYAAIAKRRGKKIATIAVARKLLTRAWHLLNEMQATDTNAPLRRP

SEQ ID NO: 501337 - protein, 418 aa, unidentified
MSPLPEHPFTAYVGIDWADTKHDICLQAAGDTRRESCCIRHQVAAIDEWANTLYLRFGGPVAVALELSKGPIVAALQKYEFLVLFPINPATLAKYREAFQPSGAKDDPGDAELALDLLLHHPERFGPLRPQSAAMRTLVSLVERRRQLVGDQTRLTNRLCDTLKQYYPQALEWFDDRGTVLFCDFLDRWPTLRSVKQARTATLEAFFHAHHCRSARRISARIGSIRGAAALTEDPAIIGPCRLHVLALVAQLRAVLAAIVQFEHEIAAVARTLPDYTLFKNLPGAGAQLAPRLLAAFGEQRERFRSADELQKYVGIAPVTERSGKKSWVHWRLQCPKFLRQTFVEWAAQTVPRSFWAGAYYRQQRAKGSSHHIAVRALAFKWIRVLYRCWQTRTPYNETVYLNVLRKRGSLLLGKLGA

SEQ ID NO: 501338 - protein, 372 aa, unidentified
MASMTVATLDPQPGQVTGVVVGGVDTHKDLHVAAVVDGGATVLGTESFSTTRAGYRALLGWMRGFGDLRRVGVEGTGSYGAGLTRHLAEADVEVLEVDRPDRTDRRRRGKSDTFDAICAAQAALAGRRTSIPKSRDGMVESLRVLKLTRATAIRARTKALQLLRHHIVSAPEELRGQIRNLTRMQLIRTCAAWRPDTVGFRDPVVATRISLKSLARRILELNDEIADLDALIEPLVRELAPQLIATSCIGIETAGQLLVTFGDNPARIRSEPAFAMLCGVAPLPASSGMTQRHRLNRGGDRQANRALHMIVISRLRVDERTQAYAAKKTAEGHSKLEIIRCLIGEVSVMRPGIGLDRGFSVVSGDGLVAEPL

SEQ ID NO: 501339 - protein, 319 aa, unidentified
MFNLGIDVAKAKLDCALRLPNGKHRNKVVENNAKGFVALSEWLLKHDAGSPRVCMEATGTYWEGVAEYLAGLGMVVSIINPAQIKAFGASRMVRTKTDKVDAQLIADFAHERQPEPWIAPSPSAQALRALVLRLEAVQAMRLQETNRLDVAREAVRQGIENHIDWLDREIKELVRAIKRHIDDDPDLRDKRELLDSIPGLGERTIPVLLSYYADTERFDNAKQAVAFAGLDPRQHESGSSVRGKPRMSKIGHSFLRKALYMPAMVAVHRTAWGKRFGQRLSAAGKAPKLIIGAMMRKLVHVAFGVLRSGKIFDPTLHTA

SEQ ID NO: 501340 - protein, 396 aa, unidentified
MISVGIDVSKGKSTVCILKPYGEIVSKPFNITHTHKDLSELSSMLFRLNDEVKIVMEATGIYHLPVLTYLQEKGFFVSVINPYLMKSYRNESLRKAKTDKIDSRIIANYGIDHWFKMKEFQTSGEIYEELKLLGQQYQHYMKLHLLSLAELTHLLDLTMPGIKNLLASWNETNRKDKRSDFVERFWHYDVITSMSEQEFTEEYILWAKEKKYVPSQEKAKVIYTLAQESIPTLPSETSSVKMLVTEAVRVLKEVDATLGLILSRMQEIAKTLPEYSVVREMGGVGNTLAPKLIAEIGDVRRFRNGKALVAFAGIDPPPYESGQFVGCNRKISKRGSASLRKVGYETMRSLKMRSRPEDPVYRYVVKKESEGKSKKNIEISRKIYRACLKNHFCNTF

SEQ ID NO: 501341 - protein, 409 aa, unidentified
MQVQPGALHVGVDLALEKNVVIVINEKAQRLDHFSFPQDRGGYDYFLQRMEGLRQKHQAGEIIVAMEPSNYFWKLLAKELEEKKIPYHLVNAYTVKKHREGNQLDRSKDDRRDAGQIAELSRNGHYTETRLQKGAYEELRQYATLYDQLIQSLRREKNVLWGLVGQVFPELHQVFKDLTGETCQAFLGSFAAAASLRQLNIDDFITHVRKAFTGKKLCVSKLRQVYQLATNSIGVAEGLQTIQLATQVHLAELDTLQEQLKRVIPAMTTSLAPMPETPYLLSMKSLCTVSAAIFLAEVGDPNRYHTAVQWVKLAGIQPTPNSSGKKQRSQTPMSRQGRSRLRTMLYFTCLRLVHQDDHFAQLYSHLQRTSDNPLTKMQALGVLMNKLLHILWALIHNQTFYNPSLGQSI

SEQ ID NO: 501342 - protein, 342 aa, unidentified
MTNRCQLHVEVFAGLDVSAREISAARLRSKEKTPTVASFANNASGHKALLAYLLQGPEHVRVCLEASGNYSLDLALALHAHRQVEVSVVNPRRARRFAESLGERSKTDPVDARVLCEYAARMPWVTWRPPTARALRLRAITRAIESLGVMHTQEKNREHALKASQALPSLVIREMRRHQRYLEHRMEHLRRKARQLIAKDPELDRRFRLMVTVPGVAETSALQILGELVVLPDSLDARQWVAFSGLDPSHFTSGTSVEKRPRISRGGSRHLRRALYMPALVALRREPHLRTFYQGLVNRGKARLQAVVAVMRKLLHALFAMFRSNQTYDGAKLCSAGLASCA

SEQ ID NO: 501343 - protein, 345 aa, unidentified
MNKVVAGMDLHSNNVMIGVMDMNGKRLASRKVPCELGEVVKFLAPYKKRLERAAVESTYNWYWLVDGLQFLKYPVVLANPAGMAQYSGIKHADDTNDAFFLAELLRLKILPTGYIYDANLRPVRDLFRRRLMLVHQRTALMLSFKSLYTRTTGQEMSLSELKALEIKEAQGLYDHPANQLIAGVQIDHIEQLNESVDKIEKAVLASARELPCYAKLTTLPGVGKILGMTITMETGEISRFASAGDFASYCRAVQAQRLSNRKKKGENNSKCGNKYLAWAFVEAANFARRYDEPCRKWYDRKAGKTSTIIATKALACKLAKAAWHVMAEGTNYDSKRMFGQPATQK

SEQ ID NO: 501344 - protein, 410 aa, unidentified
MRRCIGLDVHREFAEVAIWEDGVVRSAGQIETTPEALRLFAESLCVYDEVALEATCNTHAIARLLERHVGRVVVSNPTKTRAIAEAKVKTDKVDARVLAQLLAAGFLPSVWLADDETHALRRQVARRAHIVRQRTRLKNRVQSILHRNLVPRCPAADLFGHKGRAWLAEQDLPLDERQAVEALLRQLDFRGDELRLIDGELARVALCREEVKRLMTIPGVDATVALSIVAAVGDFTRFRSPEKLVSYLGLNPRVRQSGGQPASHGRITKQGRAHARGMLVEAAWAAAKTPGPLRAFYERVRARRGMQIAVVATARKLAVLCWHLIVKGEDYPYGRPSLLAQKLRALELRAGMPSRRGQRGSTHAYNPKEVRARERALSEQGEIAYKQLVADWHAKAGTRAGTGAATGVRL

SEQ ID NO: 501345 - protein, 412 aa, unidentified
MLYIGIDWSDVDHKVYFTDDKEICLDVFAIPHSPEGVSELFQRVEKFANDVKEVLFALEKPSGLLVDAILDKGFTLYPINPKAVDRYRDRYKVSGKKDDFFDARVLANILRTDRQNHRPLVPDSVLTRHLKILTHQYDGLSRLKRRLLNQITSTLKDYYPVVLEVFDRTDQKVTIDFLKKFSTPDNFSKLTREKIRRFLKSHHYPGVDQKTEEIYLLSKKPHFKVEEFVVESKSLYLLSLLSQLENLLVSLKIFEEKINQLLEQHPDKDIFLSLPGSGEITTAKLISEFGDHRERYPKVSCVQEIAGSCPVTEQSGKYKRVYFRRACRKTFRNAVSQFSFCSLKESNWARERYKKYIQSGKKKTLALRCLGNAWLEVIFRMWQDQSIYDEQKHLKIVKEQFQEDLLPVSLSC

SEQ ID NO: 501346 - protein, 322 aa, unidentified
MAMLSFGGIDVSKDRLDVMVLPEEQSSSVSNDAAGWAELVEQLRSSSIVAIGIEASGGYERGVMRALLAADLPVRQVNPFKLRQFARASGVLAKSDPLDARMIASFVAIMPTRPAPRQAPAAERLTEMLAVRRQLSAEKVAAENASRLLEDAMLRRLSRRRIGRLGTDIDLLDKHLVGIVGTDAALAHRYQLLTSMPGVGVVLACTLLALLPELGRMSRKQVAALVGVAPYAFESGTLKGRRCIWGGRAHVRQVLYMAAMSACNWNPRFKTFHDRLKAAGKLPKVAIVAVMRKMITTLNAMVRDDVSWADRLTGRHSVPTAR

SEQ ID NO: 501347 - protein, 355 aa, unidentified
MAYIGVDLHSDKFTAAFRDKTNKDILKSYCLSEYENFIRNLKRDDYVFLEASTPSFAFTDLIKDMVKKTIVIDPLQFRAIADSRKKTDKIDARQLARMGKYHVETDKDFLPEVYVVEKGIRKLRSLFTTYRLIKKEINQTKNRIHSLFKQNLKPYSKKHIFDKIMTGLESIDMDEEYKIQVEILFDILSKLQEKKAEIKKKILLTGEPFIADIDILVSISGISVFVALGLISDYATVERFQTAKQFSKYLRSTPKSEESNKKVKTGKTQKSGRKLSMELMLQSINHFRKESSFIDEFYWRLRKGKGACKAKTAVARKILTAMYYMLREGEYYRYMNKTSHDRKMKEYQRFLVKNK

SEQ ID NO: 501348 - protein, 402 aa, unidentified
MAASQLWAGVDVGKEHHWVCVVDDNGTVVLSRKLTNDEQPIRELIAEVDALSQEVSWTVDLTTVYASLLLTVLADAGKSVRYLTGRAVWQASTTYRGGEAKTDAKDARVIADQSRMRGTDLPILHPGDDLITELRMLTAHRADLVADRTRTINRLRQQLIAVCPALERAAQLTQDRGWVVLLTRYQRPKAIRQSGVSRLTKMLGDAGVRNADTIAAAAVAAVKSQAVRLPGEEVAAGLVADLAGEVVALDHRIKSTDADIEDRFRRHPLAGVITSLPGMGFRLGAEFLAAVGDPALIGSADQLAAWAGLAPVSKDSGRRTGRLHTPKRYSRRLRRVMYMSALTAIRCDPSSKAYYQRKRDEGKRPIPATICLARRRTNILYALIRDNRTWQPDSPPLAKSAA

SEQ ID NO: 501349 - protein, 408 aa, unidentified
MNAVGIDVSKGKSMVAALRPMGEVALLPQEFLHTEVGLEQMAYAIVALGEDTRVIMEATGRYHEPIAAALHEYGIYVCVLNPLFIKQSGGGSIRKVKTDKADAMKIAKYGLDNWVELREYTPMDTVRQQLKLCSRQYNLYMKTVVSLQNNLISLTDKTFPGVNELFSSPERADGHQKWVDFVMTFWHCDCICRVSEKAFTDRYQKWCKRKGYHFSTEKALDLYAGSCGHFTTLPKNDNTKLLITTAAQQLLAGKTTLAALRTEMTRLAKQLPEYDTVRAMYGVGETTAAQLMAEIGDVRRFPRRSSIVGFAGVDPAVDQSGKHSAKSVPTTKRGSPHLRKTLYQIVCTYLKKSPVDEPVYQFLDKKRSEGKPYFVYMTAAQNKFLRIYYARVKECLEAFDARQSLAQS

SEQ ID NO: 501350 - protein, 370 aa, unidentified
MEEGIKFFVGLDVHKDTIAVAVAETGRAPARLVGSIAHDVNQLLKRLARYGEPAQVHVVYEAGPTGYGLQRALARRGYQAQVIAPSLIPKRAGSRVKTDRRDSLRLAELSRAGELRAVWIPDPADEAIRDLARAREDAVNARTQVRQQLKGFLLRHDVRYARRTSGSKTYYRWLATLNFGETGVQTAFTDYWQAVSAADERVGRLTTALVGSIAGWRFASIVAALQALRGIDQINAIGLVAEIGDIGRFAHPRQLMSYLGLVPTEASTGERVVRGSITKTGNAHARRLLTEAAWNYRFQPRIGMRAQRRAEDLPQAIRDVAWKAQLRLSGRFRRLHTRGVHLNKVCTAVARELAGFVWAVARARSELPQS

SEQ ID NO: 501351 - protein, 357 aa, unidentified
MKSQDSNYVGIDCGKKSLEVIRINSEGSYKRQQFSTTEIGISKLINWLNPNDVVGLEAGSQSFRIAKSILNKGIQVIVLNPGDLATIYQSLKKTDKEDSLKIARLIQRFPIEELPVVPIPNDEEEDNRRLCSEQENWTRQLTQGKNRLHSLFTQAGLTEITKKHLRTKSSRETSVTLLPSRYQKEAERILQVLDLVEQNLKLIEEEIKEALRKNQTYTQTIMSMPGIGMITSLAILSYMGDCKRFSSAKQAAYYVGLVPRVDISGDSAYYGRIVNRGCHLIRRVIVQAAWSLVRCQHGGKLKEFYERLYSKKGAKKSIIAVSRKMIEVLYSMIRTGTLFDSMPEEVLYRKLAQYGLM

SEQ ID NO: 501352 - protein, 366 aa, unidentified
MGWMAPLRHLSAKLLSDRISSEWEPSMGEVTTIGLDLAKHVFQVHGVDAEGATVLRKQLRRAQVLAFFSRLPPCLVGLEACATAHYWARELRALGHEVRLMPAQYVKAYVKRNKHDAADAEAICEAVQRPTMRFVPVKTADQQAAVLLHRGRERLVRQRTGLVNALRGHLAEFGVIAPQGLRNVGKLIAIVRDERDARLPDLARQVLQVLAAQIEQLEAAVAAIEKQLMAWHKSNPVSQRLASVPGIGPIIATAIAATVVEPSGFRSGREFAAWLGLVPRQNSTGGKHRLGGISKRGNQYLRRLLINGASANLLRSKATNADPWVIGLRRRRPPLVVAVALANKTARIAWAVMHRHENYQRVAAAA

SEQ ID NO: 501353 - protein, 462 aa, unidentified
MGGKLEIESSEGKRRQLQGLPVIRRNVAGIDLGSERHWVCAPTAEGSGREIASFGATTAELIRMAEWLKARGVESVAMESTGVYWIAPHEVLEAQGLQVLLVDTRQLARVPGRDKKTDPTDCEWIQRLHSCGLLQGSFRPEEAVCMLRTLVRDKANLVAERGDWLRRMQKSLDQMNVRVHRAVSDLDGVTGMAILRAIAGGERDAQKLAELRDPRCSKTEQEIAEQLRGHWREDHLFSLQQALQMYDAVEERIAAYEKEILRKLGDMEREEQRGQTAPPLQNPNKAKAIKKRGQEPMRQALYRMSGVDATHIDAIGVETLEVVLSEYGPDLSRFPTEKQFVSHVTLAPHVPTSGGKPLRKRKRNSTSTRVAAALRMAALSLRHSQTALGAYYRKMAQRLGGDIAVFATARKLATLIYRLLRWGQPYVDEGAKAYEARYRQQRIGRLAATAKQLGYQLAPINA

SEQ ID NO: 501354 - protein, 346 aa, unidentified
MKKYAGLDVSMEETSICVIDGDGEVIAEGKVASEPGALARYLEPWREELVRIGLEAGATSPWLHRGLVDLGLPAVCIETRRMKAYAKASPVKTDRRDAHLIALAMRAGLFRAVHVKSEGSQKLRLALTARRTLLDQARQLQGKIRGDLKPFGIVLGKVGSGGFAARVKERLAGRADLWALVSPLLDMRAALLDRVRGYERLLRSAAKANPVVRRLMTAPGVGTLNALAYYAVIDTPERFRRSADVPAALGLTPRIDNSGEVERCGSITKAGDALLRSLLFEAANALLTRTRKWCALKRWGLTVAKRRGFNRARVAVARRLAIVLHRMWRDGTEFHWGAELASDKAA

SEQ ID NO: 501355 - protein, 347 aa, unidentified
MTQSQIYIYGIDLGKNWFHLVAMDRMGHVLTKQKLTRSQLKQFISTTPPCRVAFEACPGSQYWGRLFQQAGFEPKIIPAQFVKPYLKSNKNDFNDATAIAEAGSRGTMRCVPLKSHEQLALQATHRVRQRFIIERTATVYQMRALLLEYGLTVPVGRKVFERALPAILEDAENGLPDFIRALVLRLRERWQQLDIQIDEMSLMLGQASSASSLCQKVSTVPGIGPIVSTALIAAIGNGSQFKKARDLSAWLGLVPRQYSTGGKSSLGGISKRGNNYLRQMVIQGAKALKIHMKRDKSSLGEWVARLEVGHHHHVVLIALANKIMRICWKVLTSGRDYRPYPNASAAV

SEQ ID NO: 501356 - protein, 310 aa, unidentified
MEPLFVGIDVAKNELAVHIHPSAEAFRVTYDEAGLSQLVARLRQLTPTLIVCEATGGYEITLAVALASAGLPLAVVNPRQVRDLARALGQLAKTDTVDAHTIALFAEKVRPAAQPLADETARRLGELVTRHRQLLEILAGESNRRPLVRDRAVRQRLDAHITWLRREIGDLETDLSTTIRGSAVWRETDDLLRSVPGIGPITSASLIADLPELGQLGRRQIAALAGLAPINRDSGQWRGRRCIGGGRRVVRSALYMATVVAVRYNPVVAAFYARLRAAGRPSKVALTAAMRKLLTILNAMLRDRRAWQPA

SEQ ID NO: 501357 - protein, 370 aa, unidentified
MEKRSMFVGMDVHKESIDISVAEDGRQGEVRHYGVIPGDLEAVAKVLRALRAPDRVLHMVYEAGPCGFGIHRYLTAEGEDCVVVNPSSMPKRSGDRIKTDRRDGEALARLHRAGELTAIYIPTPDDEALRDLVRAREDAVGLSTQAKHRLKAFLLRQGRRYPGRAGWTLAYRRWLADLSFPLAPQHIALQEYRDTIDETERRVARITDQLRQCVPAWRWASVVDALQALRGVSFVTAVGLVAEVGDFRRFQHPRHLMAYLGLVPSEHSSGPSVRRGGITKAGNPHARRLLAEAAWAYQGIARIGRQMLYRQEALPKRVCDIAWKAQLRLTSRFRRLVARGKAKPKVATAVARELTGFIWAIAREVPAPPA

SEQ ID NO: 501358 - protein, 438 aa, unidentified
MSNKVIFNLDELFISVGIDVGADFSWMSIALPNQQFVGKPYKILHNSIDSLTTAVSKIKEAEELYSLESRIFLESTGIYHYPLFCYLRDKGFNCSVINPIITKNSTNINIRKVHNDRFDSKKAALVGLKPDLKVSLMPSDLALNCRNLCREYYDLMDNRSAYVNKLQGELRMAFPQYLGIFSKITINTSLTLLETYTSPSAFLEADKQEIIDIIKSTARFGLTYAQNKYNAIIQAATDANQFGYIIESNIKRIRLYISFIRKYDEEINNILESLHELVDANEDADFVKQIHLIETFKGAGFLSAVSIMGEIGDFSAFSKPKQLFAYFGLDPAVKQSGKFEGTKVQMSKRGSSIARRVIHTLALQSISISRNGKAKNPVLREYYLQKCDSKPKLVAMGAVSHKVCNMIFAILRDNKPFEIITPQEHIKQYNAAKCDIAA

SEQ ID NO: 501359 - protein, 347 aa, unidentified
MRFYNQQHQYYCGVDLHARSMYLHILDHQGQTRFQEDLPAGPGEFRSAVAPFREGLVVGCECMFAWYWLADLCQDESIPFTLGHALYMKAIHGGKAKNDKIDAAKIAGLLRGGMFPMAFVYPRDMRETRDLLRRRTFFVRQKAQLIAHIQNTNSQYNLPPFERKLSRQPDYSELAERFAHPSTQLSIAADATLIHQYQQTIAELEKHLVKHAKVHDPATYQLLQSLPGIGKVLGLIMLYEIQDIKRFPEDGNFLSYARLVRCEHESAGKKKGSGGRKIGNAHLKWAFSEAAVLMLRCLPAVKGWVQRQERKRGKRKALAILEAKIGRAVYQVWRKQQPFDAKKFLRQ

SEQ ID NO: 501360 - protein, 326 aa, unidentified
MHYIGIDVSKAKLDCCWLRDVEKNKFKTKVFKNSATDCNALNTWLKAQTKAEPDEITVLMEATGIYHENLAYYLFEHGYQVCVVNPARTKEFASSLGNTHKTDAKDSQILALYCHRMHPELWQPERPEIRELKALLARLEALETDLNRETNRLEKAEFNCSSERVIESLNLMIEQLKAEKKRLEDDIDNHIGRYPQLRKDRQLMESILGVGPIISRLMLSILHSRSFRTAGQVAAFLGLVPRIQQSGQWKGRSRLSKQGPANVRAKLYMAAVVCLRYNPDIQAQCQRLMENGKSKMQALGAGMRKLVQICFGVVKHQSEYRPQVVS

SEQ ID NO: 501361 - protein, 341 aa, unidentified
MNGSKNVVGIDIAKRVFQLHSIDRETGEIVSLQLKREKFLEHFANRQSCLIGMEACGGAQHWARKLTAMGHQVKLLPGKAVKPFVIGNKNDRQDARAIWTAVQQPHAKAVAIKTEEQQAILALHRMRSQLVKFRTAQINGLRGLLTEYGEVMPQGKAGVRKGIAEALARLSDRLPAMVIDTLREQWARIGKMDEEITTIEQRIKLWLKNDDACRRIAEIPGVGPLTATAAVAIMGDAKTFKSGREFAAFAGLVPRQVGTGGRVKLLGISKRGDTYLRTLLIHGARSVLTHAKEPGPWVTELSQRRPLNVAVVALANKMARTIWAMLAHERTYQKEFVSQPV

SEQ ID NO: 501362 - protein, 341 aa, unidentified
MTEIIRIGVDIAKNVFEVHAVNAQEQVVVRRSLRRNQVLAWFGKLPPCLIGMEACGTATHWARELSALGHTVRLIPPAYAKAYVRRNKNDPADARAICEAVGRPSMRFVPIKTVEQQGEAVTHKARQLLIKQQTMTQNSLRGLMAEFGIVVPQGPQHISKLLVILADPEDPRIPAVARTALNAMADLLAALEQQVETLDKTIRAQVRANPTARRLDTIPGFGPILSGAIAAIVADPRHFDSGRDFAASLGLVPRQDGTGGKVKLGPISKRGNGYLRRLLVNGATAVLNGKNARNDPWQAKLLDSKPKKLAAVALANKMARIAWAVMTRQETYRPRAVAAAA

SEQ ID NO: 501363 - protein, 337 aa, unidentified
MKYSGIDLHSNNSVVVVTDGQDRVLEEKRVPNDLRVIVKLLEPHREELAGVVVESTFNWYWLVDGLMEAGYAVKLANPAAIKKYAGLKHSGDETDARHLAQLLRLGILPTGTILPKELRATRDLARKRMQLVRYRTMHILSVENITAREFGARINSNQVKRLALPDIEAMPLPEDVKLALEAHVDVIATLSRQIEVIERRIQEKLVPRAEYRLLESVPGIGRILAPVILLETGPIERFSGVGNYSSYARCVESRYTSNGRKKGEGNTKNGNKYLAWAFIEAANFARRYHVPAQRFYEKKKARTNNVVATKALAHKLARACYHILKEGKPFDAARCFA

SEQ ID NO: 501364 - protein, 385 aa, unidentified
MRAVCGLDVYKDSVYLCILNDDGELIEKVFGVLTFQLQQMRDLLLTHHVDEVFMESTSVYWIPIWRILANHFLLRLVNPYFIKQLPGHKSDVADAQWIAECTMKNLVSGSFVPPEDIQQLRQYDRRIFDLDEEIVRKLSKLDAVMQRCNIRLSNYVSNVDCKSYKDVVRKISEGVTDPEVLIEEFHGRIIKHHGRETILASLTGVISQAEIDVLRQLREELDLAEEHKQECLERMLKKCQEKYPDELRRLQTIPGVKERTATSLIAEIGTDMSKFETANHLAAWSGLRPRNDESNKKFKSRRITHGNVYLRKNIIQCAWAASRTKSCFFSRFSYHQTQVRKKNKMKVIVAVARKLLVAVWLVIYDETDYVDFQQKQDRQVSATNG

SEQ ID NO: 501365 - protein, 354 aa, unidentified
MQIHTIGIDLGKTVFHLVGLNLRGEAVVRKKCSRMQLLQFTANIQVDLIGMEACAGAHFLGRALREQGHEVKIIPAQYVKPYVKTNKSDFIDAEAIAEAVGRPTMRFVPIKTDDQLDMQSLHRVRERWVIRRTAVVNQIRGLLLERGITLRQGRRPLEAALPGILEDATAKLSGALRMLISQLKHELEELANFIAEADGSMERTSRENESCRRLLAIPGIGPVTATALIAAIGNGAAFRKGREFSAWVGMVPRESSTGGKQKLLGISKRRNPYLRKLFIQGARAVMLRGTKQSLGLRTWIENIALRKHHNVAAVALANKMARIAWAVLARGEAYRPSLLAEAESNLPGLQMTPA

SEQ ID NO: 501366 - protein, 435 aa, unidentified
MKNDLVIVHPHAAGIDIGSRSFYVATGEENIKVFPTFTEDCNALRDYLVSQKITTVAMESTGVYWVVLYSVLEEAGIEVYLVNGRDVKNLPGRKSDVKDCQWLRQLHSYGLLRKSFIPGSDIRIVRSYLRLRQDHIRAAATQVHLMQKALTQMNLRLAEVISDITGTSGLRIIEAIVSGERRPEILLQLCVSQLKEKKGEQILKSLHGHYRNEHLFALRQALSTWHYYNKLIGECDKEIEQQLLTMTRDKDDIDTSNARKPIRYNKPTISNLHQPLLKLSEGKDPINIAGITDYSFLQIMSEVGTDMSPWPSEKHFTSWLKVAPMRASSGKMSKRITMKRHNNAGQLFRNVAQGILTSKHLALGSFGRRIRARKGSAVAIKAIARKIATYYYRVMTKGTAFVEKGIEQYEKQIKEVQLKQLNKMAMKHNLQLVQI

SEQ ID NO: 501367 - protein, 376 aa, unidentified
MEHDSTVYVGLDVHKDSITVAYAIGAGEVELLGKIGTTQADIDRLCKRLQSKGRHVRIVYEAGPCGYGLYRQLGEKGFDCMVCAPSLIPKKPGERVKTDRRDAIKLVRSLRAGDLSAVHVPDIEDEAFRDLARAWVTAKDDLKQARQRLKSFLLSHGVRYTARADWGPAHRRWVSQYSFASEWQQLAFEEHRRTIEDRLAQCERLAAALRDAVVNWRFYPAVLGLQAMRGVQFVTAIGMLAELGDPSRFEHPRQLMAWLGVTPSEHSSGGKRRQGSITKTGNSYARKLLIESAWSYRHPARVSPEIQRRHEGIPKAIIDRAWDAQIRLCRRYRKLAARGRHANVAVVAVARELSGFIWDISRLAMSLAVPHSRQAA

SEQ ID NO: 501368 - protein, 448 aa, unidentified
MSKIKTKNEKVKQVSQLTVINPTAAGIDVSDTEMMVAYPINSEQLEVRAFGCFTRDLHLIAMCLKENGITTIAMESTGVYWVALFLLLQEYGFEVYLVNAKHVKNVTGRKDDESDAEWIQKLHSCGLLTPSFQPDNMTRTLRSLVRHRKNLVRTSTTYLNRMQKALELMNIKLHTIISDIDGKTGMLIVEAILAGERNPEVLADLRDKRIKASREDIIKSLEGYWTTEHLFELMHCHRLYCIHRQTIDECDIEIEKQIVEYIASKNEGVIPDIPEVKRKAAGKYKTPFNLASYLKEILGVDVTEVFGISEISALTIMSEVGTDMSKWKTEHHFTSWLGLAPNTKKSGGKVISSRIMKKKHHAGQSFRMAACSLYGSKSPLGDYLRRIRAKAGAPKAIVATARKLAIIFYKMVSKKEAFNPKALEDYQHKYKEMKINQLKKKIALLEAA

SEQ ID NO: 501369 - protein, 423 aa, unidentified
MEAIHDRVAGLDVHKDTVVACVRSMSGNKATRECRTFATTTDGLLGLLEWLSSSRCAVVAMEATGVYWRPVWKILSDGDFELILANAAHIKAVPGRKTDMNDAMWIADLAAHGLIRASFVADEEMHELRTLMRTRKQLVRDQTRHVQRIQKTLTEANIRLDSVISDIMGRSGRRMIEAMIAGQRDPRKLAALADRRVKATPKELYDALHGRLTDHHRFLLKLHIGQWDTLDASIQAVDREVDARIARLDSEGRADKARFSHLTGLLASIPGVSKLSAVAILSEIGTDMSRFDTAGHLIAWAGLCPGQNESAGKRKRTRLRKGAPWLKTMLVQCAWAAKRANNSYYKAQFFRLQARRGPQKAICAVAASILTAIYHMLKDGTGHNDLGVAYFDRRSPEAKVKRLARQIAKLGYEVTLQPNANAA

SEQ ID NO: 501370 - protein, 317 aa, unidentified
MSEISILAIDLAKGSFQVCGVTADGAVVFNRSVSRPRLYHLLAEQAHCVVAMEACATSHHWGRVAQSYGHEARLIPAAYVKPFVKRQKNDRADAEAITEAASRPSMRFVAVKSAEKQGRAVAFRTHQCFVRQRTQLINALRGHLAEFGLVAPKGPASLKLLEQALAHSATDLPAPVREMAVLYLDQIGRLTELIEQLADELERASKTEDELRRLCTVPSVGPVTAGAIAAFAPDLSTFESGRNFAAWLGLVPRQRSTGGKARLGAVSKMGQCDIRKLLIVGAMSVIRWVVRKGGSANRWLANLVARKPRMGRKAWAR

SEQ ID NO: 501371 - protein, 377 aa, unidentified
MGAEMDTPPSGIRCAKLEVRCLTQSTSNGVSTMKNSLVSIDLAKNVFQVCAMDEDQKIVFNKKVSRKKLLHTLNQFEPTTVIMEACYTSHPWGRAIQALGHTVKLIPPYQVKPFVVGHKNDHNDAIAIAEASRRPKTSFVPVKSLEQQDLQSLQRIRKRLMKHRTAIGNQLRGLFAEYGIVLPKGIRYLRAEVPLILEDIAQPLTTVARGFVHRLYRELADHEKQISEIEAEQSALVEQNDDYQRLLSIPGIGPVVATTLLASVGDANYFKNGRQMAAWIGLTLRQHASGEKSRMLGISKRGDRTLRKMLIHGARTVLNWCERKTDKLSLWLKALSTRAHPCKVIVALANKLARIAWAVMAKGEDYRAGAGMAEAAA

SEQ ID NO: 501372 - protein, 412 aa, unidentified
MRYYLGVDWADQTHAVWVVDESGRKITARTVSHTAEGLGEWGRELDEWRAEGIALWAAIERPDGRVVDFLLDHGVVVYPVNPKALDRARDRFRQSGAKSDPFDARVLADFLRTDHAHLHALQPSSEAAQELKLLTEDCQRHIRQQTRLVNQLTATLKAYYPRALEVAELTSALAREFLPAYPTPEALIALTERQWQRWARAHRLTEARTGDLWAVLRQPQLPVPPHVVRAKARLMLALVEQLMPVMAAVAQYRKAIDDFFASMPAAQWARTLPIGKHGITAPTLWARLGDAPGRWESFRHLQAHAGTVPVTKRSGKQPRVVQFRFACDKALRYVVDQVAFLSLLSSRWARAYYDQQRARGHSHRQALRALGAKWLKIIFVMWERHVPYDEQYHLATMARQQVRPTSDTNRLT

SEQ ID NO: 501373 - protein, 373 aa, unidentified
MGNTITYVAMDTHKKDHKIALHYPHSEEVVRFIVKNNARDIKRMVNKIKKQSPANIKFCYEAGVCGFTLKRRIEALGCKCMVIAPSLTPIKPGDHIKTDRRDAIKLLTLFKAGLLTEVHAPDPQQESAREVTRCRQTAQENLKRIRHQLLKFLTRHGYVYADGNHWTQKYFTWLRNLEFDQPLLTDVFDNYFTQMNHCLQRLTSLDKQVKILAESNSYKKIVGFLRCFHGIDTLTAITIITEIFDFGRFSSPRQLMSYLGLTCSEDSSGQKQRKGSITKAGNKRVRRLLVETSWHYRHPCKLSKTLRMRRKNQPLWVIDIADNAGRRLRKRYRHLTNNGKMPCKATVAVARELAGFIWSVFNEYQTRNQEKAA

SEQ ID NO: 501374 - protein, 429 aa, unidentified
MKVIYPKACGVDVHKSFIVAVICDSTGQTTKYSKKRFSTFNNSLIQFKDWLLENDCQNVCMESTGKYYIPVYNALEGFISNVVVANPKWVAVIKGEKDDNKDAKWIADLFKLGIVRSSFIPPKDFRVLREFTRYLYKLTCNKTSEKNRYTNAITVGNCKLDMVFSDIFGKSSQSIIDIIMNNDNFSDEDIINCLDKHCKSSHEDILSSVNGIAFTNEQKLRIKIIKEHIDYLTNQINSLRDIIDNLVTPYESYISLLMTIPGIDRYSAIIILSEISNDMSQFSNHYRLSAWAGLAPGCNESAGKKKSVKISRAGVYLKPCLVEVAHCAVKDKTNTYYANKFNKISKRRGKKRAYIAIARKILVAIYHMLSTGEVWNPSDLAANETSNKDRIKYTKNNFNQSLKQLLSLGLTSDELVNIINQNAVSTNLG

SEQ ID NO: 501375 - protein, 406 aa, unidentified
MNQNTCITIDVSQNKSHIQGFIGPNKPLSKARTMRNTKQGFQFILILKNLIESKTNETPLIVFEFTGIYHKPLEKFLISQNLKYHIVAPLKAAKARNSEIREQKTDARDCLSLSKLFYSNNLGIFYSENETYSNLRKLNRYYDTCMKHLIKIKVNFRETLAVVYPNYKKLFSSIYSDDSLTFLKEFPHPSLYTSKLEDRIIEILKNKWDHLESWTSSKVKILTPLINEVVSGCNVTEPDIIMLLSYISQIEYYLNQIEITVSQMNELAKKVPLYNLVHSLPGIQDILTCKFIAEVGDISRFSNYKQIVAYAGIDPMIRQSGDKDGLHLKMSKKGNKRLRTILHLMVSSLIKANREPNAIKDKYQKKTHQLNPLKPKVASMACANQLVRVIFYMHKTSSTYTYHECK

SEQ ID NO: 501376 - protein, 457 aa, unidentified
MPQPKRSRSRTGLSAVHPAAAAIDIGATMHVAAVGPDRDTEPVRTFRTFTEDLHRLADWFARCGVKTVAMESTGVYWIPVFEILEQRGFEVMVVNARDAKHVPGRKTDVSDAEWLQRLHEYGLLRPSFRPQAEIAGLRAYLRQRERLLDYAAAHIQHMQKALMQMNLQLHHVVSDITGVTGMNIVRAIVAGERDPNVLASHRERGCHASVETICQALVGNYREEHVFALSQAIELYDVYQTKVAACDKQIEVILKRLKKSATPPASKLLPPKHRSRQPNAPSFDARAALHAILGVDLTQIHGLGPYLALKLVGECGTNLTAWPTAKHFTSWLGLAPRNKISGGKVLSSKTPRTSNRAASLLRLAAVSVGRTDTALGAFYRRLAARAGKAKAITATARKIAVLFYNTLRHGMSYADPGATYYEERYRRRVLGNLQRRAKSLGYVLHQADRDPIQVVVS

SEQ ID NO: 501377 - protein, 310 aa, unidentified
MNTLPEKPQPVYAGLDVAKATLQLHLQSRQCALPNTAPGHAQGLKLLRAVPGAHVVCEATGGYERAAVAALQAAGVPVSVVNPARVRHFAHAQGRRAKNDPIDAAVLTAFGQALAPAPTPVLDTALAELRDLVRWRQHLQEQLVATGNRTEHLATKFVARQQAQLVRQLEKQVAAVEAELAAALARSPHWQAQIAKLDALDGVGMITAVGTLSQMPELGRLSRRQAAALAGLAPWTRQSGPWEGQRHIGGGRAEIRRGLYMAAVAVARMKHTVLGQFYARLRAAGKPAKVALTAVMRKLLLQMNHVLKPA

SEQ ID NO: 501378 - protein, 455 aa, unidentified
MPKKTTGGRPELKAVNVGAAAIDIGSKMHMAAVNSACADVPVRSFGTFTQDLHELADWFKACGVTSIAMESTGVYWIPVYEILEQRGFDVILVNARYAKNVPGRKTDVSDAAWLRELHSYGLLRGSFRPNAEIATLRAYLRQRERLVEYAAAHIQHMQKALMEMNLQLHHVVSDITGATGMRIIRAIVAGERNPDVLATYRDVRCHSSIETIRAALVGNDRHEHVFALTQSLELYDIYQAKMLDCDRKLEVLLAGLNDRGAKPVGRLAKPRIKTKQVNAPTFDVRTALYGVLGVDLTEIHGLGPSLALKLVGECGTDLRAWPSAKHFTSWLCLAPGNKISGGKVLSSRTRRSSSRAAALLRLAATTVGRSDTALGAFYRRLASRAGKSKAVTATARKIAVLFYNTLRHGMSYKDPGADHYEQQYRSRVLANLQRRAKTLGFMLQSIPENANPAVS

SEQ ID NO: 501379 - protein, 386 aa, unidentified
MVFVGIDVAKDKHELYAVDSDGVVLCDHLTFANSAVGFASLLERVSAWGKIKVGIEATGHYSSNLLSFLKAHDFEVVVFNPLSVSRLRSANSLRRTKTDKNDSRYIARLLMTGDANPYQSQSYNISVLKSLTRARFRLFQEIQPLKNRFRRLLHILFPELQGFFSNLYGNTSLNLLSALPSAKDIAECNILKLTKILSVSSHGKLKRSRAEQLKSLAKSSIAAYNYGDAFELKQTVQRILFLSSQMSEIERKIDSVMSQLNSPITSIPGIGNLLGATILSEIGDIKNFDNPDKLLAFAGCEPSTYQSGKYTATNTPMVKHGSRYLRRALYCAADMAYVNSISFRSYIDRKRAQGKHYYVAMSHGMKKLVRIIFAVLSRNIPFSEPA

SEQ ID NO: 501380 - protein, 353 aa, unidentified
MEHFIGCDAHKKFSIFASIDEKGEYGPTFRVRHDLEVFRKFLKELPAGSKIALETSGCYYWMVDEMERAEHIPLLAHALTAKRRMEGRHKTNERDARGLAMLLRNGTLPVVWIPPAELRDQREMLRWRMCLSRMRTRVKNRIHGVLQRYNVDIAVSDLFGDAGRVELLARLHELPPYSRHSLLDQLQMVDTVETQISECEQVLEEMLYPSADRDLLDSLPCVGKILSAVMALEIGDVQRFGGPDRLVSYAGLVPVARESADWKRKDRCPRDCNMYLKWAYVEAANLISIHRGRWPERHVAQLYERVKQSTKMHGKATMAVARHLAEASYWMLRKQAVYQEPNSKRKVLSSTHG

SEQ ID NO: 501381 - protein, 305 aa, unidentified
MISWVGIDISKSNLVVWVQPQKDGFEVPNTVEGFDVLVARLGQYTVGRVLLEATGGYERKVMAALQQASFSVLRINPRRARAFAVAMGKNAKTDPIDAAVLADFAEALHASREKPISPEREALRELIQLREHFVQQRDDNKRRLQQAQLPAVVEAIRDHIRYLQTQIKQLGKAIDQSMRELDAEKADRLISVKGIGTVATASLLVYLPELGELDRREIAALAGIAPYNDDSGNHSGKRQIYGGRARVRRALYMSCWVVIRHQADFKARYESLRERGKSAKVALIACMRILLIRLNAMLRDGTEWR

SEQ ID NO: 501382 - protein, 344 aa, unidentified
MEHIGIDVHKVESQICILRESDEVVERRIRTQRERFAAVLGERPRAKVLIEASTESEWVARCLEELGHEVVVADPNFAAMYATRSRKVKTDLRDARTLAEACKLGAYRAAHRTSDRQRHVRAQLSVREALVQTRARYISLIGSLLRREGLRVASGNAASLTRRVARLALPGQLKSEIAPLLAVFVSIDRQLVWIYTRLEHLAQSDETVERLCTAPSVGPVTAAAFSSTVDDPGRFKNAHQVEAYLRLTPSEWISGEKQSQGHITKAGNSRTRRLLVLVAVSILRLRSPRTEALRKWATGIAARCGKKIASVALARRMTGVLFAMMRDRTCYFQAALPEPSAQVA

SEQ ID NO: 501383 - protein, 388 aa, unidentified
MNKPILHIGLDVHAQAIAIAVAEAGSEARLYGSISSDLHSVDKFLAKVRKAHPEAQLRFCYEAGPTGFVLQRHFSRKGIECLVAAPSLIPSRSGDRVKTDKRDAVKLARLLRAGELTGVHVPDAVDEAMRDLCRARTDAVQERRRQRSQLKAFLLRNGYRYQGKTSWNEKHLSYLRSLTLAHPAQRAVLDDTLQALQAAEARIARLEESMEALLADWHMRPMVGALLGMRGFALICAMVIGSELCGAWRFEHPRQLMAFLGLVPTETSSGTKRKQGGISKTGNCHARWIMIEASHHYRLEPGVNPQLSRRQEGLSEEVKACAWKAQTRLHKRLKQLLARGKHRNKAQVAVARELTGFVWQIFRLMEGRMKKADGQQTAESGVKQSAGT

SEQ ID NO: 501384 - protein, 429 aa, unidentified
MTSRSSTTAPAVRIAIDVAKLTHQVLIELPDGKRRVIRVANTKTDLDRLVATIRAVPHPCEVAFEPTGDYHRPLAYILAQAGCRLRFVSSLAVARTREAMYSTWDKNDPKDAQVILHLLKTGTTQAYLDPLATGYQDLQEIAGTYQQISLRKVRLQHSLLTHYLPLYFPEAERYFHSSRAEWFAELLLFAPCPAAVQRYTKPAFVAAATAVVTGRKVDKARWLADFYETASNSVGLPVSPDSEAMRMFRVVLEEYRALCNRRKQLEADIVTRLAEQRDFVRLQTVPGIGPVLALIILAEARDLRRFGCARQFLKYCGFDLCTEQSGQYRGTTHLSKRGNARLRYAFWMAGTVAIRMRQNSFRRKFEDYIRPDPANPDRRRKGYTAVAAKMARVVYAVITTGTDYRRFPEATRPGGRIPSPRAVEAHATS

SEQ ID NO: 501385 - protein, 337 aa, unidentified
MDVLYQSCAGIDDHQAPVVVCILHGPLTSTRPKREMAQFDTTTKGLKACHDFLSQFHVEAVGMESTGVYWRPVWHELCDDFELILAQPAHMKAIPGQKTDKKDAHWIAQLTRIGLLPRSFVPDETIQELRELTRQRKHYVESRNRETNRIHKILQSGGIKLTTYIEDIMGASGRNLLQLLIDETPVTPRIIHQSVYTSLKRKVPQLLEALDGYFSAHHRFMLGQSLEIYDFYQKQIDCLEERMNGYLNLYERPVEILDSIPGIDLITASVIIAEIGVDMSQFPTAGHLASWAGLCPGNNESAGKKRSTKIRHGNSYLKRCLCQTVFAAKKQKGSPLA

SEQ ID NO: 501386 - protein, 355 aa, unidentified
MTRLAGAIDGVIGVDTHRDTLAAAATDPVGGLLAQTSVSADAVGYRRLLDFARAQVPGRRCWAVEGAGSYGAGLAAFLQAQGERVVEVGRPKRPPRRTGAKSDALDAVRAAREALTHDHPLAPRRRGDREALRVLLATRHSACVAKVSAINQLKALIVGAPEELRAELRGLATKRQVVRCVRLRARPARSLEHRMTVRALRSTAQRIQLLATEAAELGDELERLVAAIAPWLLELPGVGPISAAQVLVSWSYAGRLRSEAAFAALAGANPIPASSGQVTRHRLNRSGDRQLNRALHTVVVARLRDDPATRAYAARRTSEGKSARDIRRCLKRAVARQLFKLLERCDRPGVEVVTL

SEQ ID NO: 501387 - protein, 383 aa, unidentified
MTQALGTVIDYERTLILAIELSNTSWVLAAQIPGLPGVKAKRSIDPTPEALMAAIENYRARAEKAGRNVDRVIAVYEAGWSGFWLVRWLAKHGVEEAHVIQPSSVPVDRRARRAKSDGIDAELLLRTLLAWLRGEPRVCSMVPIPAEADEDARRRVRERAELVSERTGLVNRIGAVLATLGAGEYNPLRRDRRQRLDELQTALGDSLPTNAHAKIARMLDRLELLLIQITELEQSRDAVLEDESPDRASSMIQQLAKLRGIGVQSATVLVREGFVREFANGKALGSYAGLTATPYSSGGIEREQGIGKAGNARLRTVMVELAWLWQRYQPGSAQVRWFRERGGTGRRVRKVMVVALARKLLIALWRFATQGVVPEGAVMKPAS

SEQ ID NO: 501388 - protein, 344 aa, unidentified
MTKTPIAVLGIDLGKNSCSLAGLDAAGAVVMRRKMTREGVMAFTAALPACVVAMEACCGAHFLGRVIADQGHTVRLMSPEYVQPYVKAQKTDDRDAEAIAEAATRPTMRFVTLKSEAQLDLQSLHRARERLVLARTALINQLPAVLLERGITLAKGRAVLMRRLEEVGSEGLAVSDRTRRLVEDLLEECDGLSRRIKAYDDELAAVVRSDEQARRLSSIPWVGVINATALLAAVGDGSAFAKARDLASWLGLTPRQHSTGGRTRMLGISKRGNRYLRKQLIDGARATLPHLAAKPNAMGAWLQQLLARSHPNVVVVALAAKLARIVWAVLRRNALFDHGAVAAA

SEQ ID NO: 501389 - protein, 394 aa, unidentified
MRYWAGFDVGKAFHWLCVLDDEGGVLLSRRVEATEEDIEAACSQIRALGSSQERTVAVDMMGGPATLLEAILLGRGERVFYLPGMSVNRAREGYQGEQKSDRGDARVIADQLRMRRSSLREILPRDDEAVEMRLLVSYRRDLVVDQARCVTRLRALLNEVFPGLDALLNFRKDRAFVLLSKVATPKAARRLGISRLARWLRTQGIRRSDELAGKVVEAAKAQSCDLPASATRGALVCEMATEVLRIRERVAEIEDRLEELLSARPEAEVVRSLPGMGVVFTASFLAEVDDPGRFDSADTLAAAAGLVPATRQSGGTSFQTRARRGNRTLKNLFYRSAFSCTAHHAPSKAFYDRKRAEGKTHHQSVIALARRRVNVLWAMLRDGQLYEDRTPAAA

SEQ ID NO: 501390 - protein, 313 aa, unidentified
MIRTICGVDVSKGKLDACIEPGGKHASFDNDAGGIAELARFCREHAAELVAMEASGGYERQAFLRLWEMEVSCALTNPRSVRRYAEAMGLLEKTDRIDASVIAQFAHAKKLVPTPLPSQAQQRLKALVTRLRQVTDDLTVQKQRRSTLLDNPQMLASLDEVIALLKRQSRSLEGEIDSMIDDDPLWAQLAESWREVKGVAGRTVAWLHAELPEIGTLSNRAIAKLAGLAPLADDSGKRKGKRHVRGGRAGVRSILFLVAAIAARFDQSLADFRERLVAAGKEKMVIRIALARKLLVRLNAKARDARAAYANAT

SEQ ID NO: 501391 - protein, 411 aa, unidentified
MDGLFITHGAGLDIHKKVIVATVLTPTVTETRTFGTLTEDLLTLGDWLLACGVTHVAMEATGVYWKPVVNLFEALDFEAVWVVNPSHIKGMPGRKTDVQDSQWIAHLLRLGVLKGSYIPARPQRELREVVRYRKSLIQARATEANRIQKVLEGSNIKLASVISDVLGVSGQRILAALADGETDPVTLARLADERIRASEETLAAALRGLVERHQQLMLKLQLAHIAFLDRQIVTLNAEIGQRLANFDDVLARLQTIPGVGRRTAETIIAEVGTDMQRFPSARQLVSWAGFSPAQKESAGKRQPAGTRKGSKALREALVESGQAAGKTRTYLGAVYRRLAGRRGKKRAAVAVGRHILTATYAILKTPGTVYQDLGADYFDQRDRQAIVRRETRRLEALGYRVTVAEVAATAS

SEQ ID NO: 501392 - protein, 441 aa, unidentified
MRRCIGLDVHREFAQVAIWERGQVGQAGQIATTPEALRLFADSLCEHDEVAIEATCNTYAIARLLEERVARVVVSNPQKTRAIAEAKVKTDKVDAAVLAELLAADYLPGVWLPDEETHALRRQVARRAHIVRQRTRLKNRVQSILHRNLVPRSPAADLFGRKGRAWLAEQPLPADERQAVETLLRQLDFHGEELKLIDADLAQTALARAEVKRPMTIPGVDATVALAIVGAVGDFGRFLSPGRLVSYLGLDPKVRQSGGQPASHGRISKQGRAHARGMLVEAAWVAAKTPGPLRAFYERVRARRGMQIAVVATARKLAVLCWHLIVKDEDYAYQRPSLTAQKLRALELRAGMPSRRGQRGSTHAYNLKEVRARERALSEQAERAYRQLVADWQAKAPTSGAGVAAANGARLSRPAVGPAARQDSTPTPALRSGVGHAHTEA

SEQ ID NO: 501393 - protein, 332 aa, unidentified
MTPFEGASVAEASTIGLDIAKHVFQAHGADSSGRVVFRKRITRAKLMQFFASQPRCLVALEACGGAHYWGREIGKLGHTVRLIPPAYVKPFVKRQKNDAADAEAICEAAQRPSMRFVAVKDEEQQASGVVFRARDVLVRQRTQCINALRGHLTEYGRIVPKGTTHMTTLIAQIEDPNCDLPESALAVFKVLIMSLQALEENIAILDTEISRRSKEDQVARRLMTIPGVGPITATAIAALTPPIETFRTGRDFAAWLGLTPLQKSTGGKQRLGAISKMGDRTIRRLLIIGGSAVVSHACRRGAPVGTWLARMLARKPRMLVAVALANKTARII

SEQ ID NO: 501394 - protein, 438 aa, unidentified
MKVMHERVAGIDVHKDMIKVAIRSPGEKPWTRRTEILTFRTFYGVLQAAARELRRRGVTHVVMEASGVYTEPVYYALREEDFTEVAVVNPAHAKALKGHKTDAKDCARLAELFECGLLQGSYIPAPELKELRDLTRYRTKTVQARASEIQRLGKALESAGIKLGSVASDITGKGPAAMIGALIDGERRGAVMADLAIGRMRAAGKLADLSMALEGRFTEHHALLCRLTRDRITVLDAAVADLETRITARAASWQRETGLLKTIPGISDTVAWTWIAEIGPAPHQWFGSHEKLASWASLAPGNYISAGKRRHGRTGDAGTYIKPMLVQAAWAAIRVKGRLQARYNRLVRRMGGPKNPAAKKKAIVAIAHTLLKIAYAVLKTGTPYQDPGADFYTRRESPGHRQAWLERQLQKLHPGYTVTITISPPPAPVPQTALTSGP

SEQ ID NO: 501395 - protein, 342 aa, unidentified
MSIVGGFDVHRRQITFDYLDTETGRLVRGRICPAHRGALRRWLADRFAGRADVEFAVEACTGWRFVVEECERAGIAVSLAETADTSTARGSKRRAKTDAADSALLRELLAGGRLPESWIPPEQVREVRAVLELYKDLRDEHTGWVQRIHATLFHQGVPQLGAAVASVAGRARLEAGEGLSPAGRQAVMVALRVMDALDVELAVLHRQIRSWANTQPGCKALQAQYGVGPITSTAIWAMMGDTRRFSASRKAVRHAGLDVTVYSSDGKRSRGHLAKQGPPLLRWALYEAACMASHTRAPDHDYYAGVKERIDHKRATIAVARKIARRSHHILRELGDQAYAAA

SEQ ID NO: 501396 - protein, 333 aa, unidentified
MVEGTKGSHHKEGSTKMSNDSTVCAGIDTGKHKLDVAIDGSTERLQVDNSPQGHQALSAWLRQRGVERVGIEASGGYEQAVVSYLRADGFVIIVFQPIQVRAYAKFVLQHAKNDNIDAALVARCTAAATDIREPPDARLAPLAQHLTMIEQLTEDVAHLKTRHEACRDPRIRDFWKQEINRLKALLHGELKRLVAAIRQHRDLSNRLELIASVDGVGLRTAVAILVRMPEIGRVTREQAAAIAGLAPYDDDSGLRRGSRHIKGGRQRLRQSLYAATLPAVFYWNAQLKTVYRRLIAAGKTHKLALVACARKLLIFVNTVVARGTPWTASPATT

SEQ ID NO: 501397 - protein, 430 aa, unidentified
MGLIVPTTIRPERADQPLPYEWFVGIDWGSQQHQVCVLDRDRRRVGERAVDHDGASLARLADWLWGMAVGQPQRVAVAIEVPRGAIVEGLLERGFHLFALNPKQLDRFRDRHSVAGAKDDRRDAFVLADSLRTDQPSFRRLQLDAPQLLLLRELSRAEETLLEEFRRSANRLRDQLHRFYPQMLQLCSAADAPWLWDLLDLAPTPAHAALLSAEQVQRVLKAHRLRRITAPEALACLQAPALPVAPGATEAAQAHCGFLLPCLRVLAEQLRACGQQVDALLRTMADEPGAGERPSDVAIVLSLPGVGRKITAWLLAEAAQPLAARDYQVLRTHSGVAPVTKQSGKRRLVVMRRGCNPRLRHALYHMARVAMQRDTHFSSVYTALRAKGQRHGQALRAISDRLRRILVAMLRNGTCYDASRIRRESAVQMG

SEQ ID NO: 501398 - protein, 330 aa, unidentified
MTDVTLETAPLGKPLFVGVDMAKLDFVWNVHEEHGTVSVPNDLDGFEQLVAALGQRPIGLIVIEATGGLERALAAHLVSQNLPVAVVNPRAAREFARSMGHLAKSDTIDARALAHYAQTLAAKADQTGVRFAVPPARQEALQAMVMRRAQLLNMRTAEKNRLASAIRVLRESIRAVIKTLDAQIEQIDRDINQHLDTHFKEQAKRLEAIKGVGTTTCATLLAFMPELGQATGRRVAKLIGLAPLNVDSGKSRGTRHIWGGRSIVRTTLYMAMLSTVRYNPVLKAFYVRLLAAGKPKKVALVACAHKLVRIINAMMRTGQPWNEQLHIQAA

SEQ ID NO: 501399 - protein, 413 aa, unidentified
MNPYAELTHFAGFDWAGDHHDIIIVDGAGTLVADFRIEHTAAGWRQWKEKTSAYAKLGVAIETSFGMVVEQIIDSGATVYPVNPMSARRYRERKHPSGTKTDRHDAWALADALRTDGHAWRALGPKDPIIEELRILCRDEVALIEERTGLVNQLRQALREYYPTALEAFGDWTAAYAWAFIERFPSAEALLKAGKRQWEKFLHAHKLARPQTYEARMEAFARTGEWHVNAGMVKAKSLYAVAKARQLRILQAQLDEYRRRIADLFASHPDSGLFGSLPGAGPKLAPRLLSEVGSDRALYDDAQGLQCVAGTAPVSFQSGKIKKAQMRRACNRSLRHAMHLFAHKSIEQCAWARIYYDTQRDKGKTHSQALRCLGQRWLKIIWKMWQTHTAYDAELHMRNQLAHGSWVLQIKPA

SEQ ID NO: 501400 - protein, 353 aa, unidentified
MIEERISYGLGLDIDSENFQASLSSRNAEGEIKELFNRKYSNTLIGFKAILKRLKSLFKESNQELQIAMEVTGVYHEEILQFLHDQGYHVSVLLAKRMKHYFGYLGKRSKTDPIDAKAISQLACREKLAAWKPLNGEILEIRNLFRHRKSLIGVKNGYTNRLHAAERTTAKTNEIERSLKKLIKGVEKEIDLIEQMAINKAKENDSFYEKLKLISSSITGAAIVTVLTIVAETNGFLEFRSIKQLESYAGFDVVENKSGKYEGKTRISKMGNVHLRTAVYMPSLTIIRWNYQPFYNLYERVNLRHGWKIRNKGLVAVQRKLLGMIYTLWKKEEAFDKNYYKRHQKNMPALQPT

SEQ ID NO: 501401 - protein, 319 aa, unidentified
MPQHHRPANAGLRILGADVAKSHVVFHDSLTGRSWTTANAPADLSQALYAYADYDWLVCETTGGYERQLLEAAMQLGLTSCRADAAQVKAFIASHGGRAKTDRIDAAWLARYGLERAHRLLSWQTPDPHRQAFAELLRHRQSLLAQRTQAKNRRSAPGGGQRLQALLDEQIAFLTRQIDRIDQDMADLVQAVPDLARDEQTLRAIPGVGPVAARSLIALLPELGRLGPKQAASLAGLAPHPRESGKLKGRRRMNGGRNGLRPVLFMAALAAARAHPSLSPVYQRLISAGKPKRLAIAAIARKLVVIANAKLRDHHQQLT

SEQ ID NO: 501402 - protein, 403 aa, unidentified
MSNYFAGLDWASRTHAVCVIDEHGSVLERLDVAHDASGLAELRRRLERWHRPPVAIERPSGLIVDTLVEAGFTVVPIHPNAVKASRPRYRSHGAKSDASDAYLLADLLRTDGHRFKALSPQDDEILALRALVRGRDDLVATRVQLANQLRSLLESFWPGAACVFADIDSPIALAFVERYPTPESARALGPKRMAAFCAQHAYCGRRSADDLLTRLHDAPAAVCAELQMEAKGELARCLARTLRSLVEQIRLLSSRIEHHIASLNDGQILMSFPRAGRICAAQILSELGSVRERFASDSQLAAEAGVAPVTYASGKSKAVTFRWACNHRLRAALTCLADNSRHASAWAAHVYDKAKARGCDHPHAVRILARAWLRVIWRAWTNRKPYEPALHRGAQLLLQTAGG

SEQ ID NO: 501403 - protein, 300 aa, unidentified
MKILALDLGKFNTMCCFFDTKTRKHSFLNAATDRDYLTTVFKKHKIDLVVMEACGPSGWITDLAKGLELETVVCSTNEDAWKWANVKRKTDKDDALKLARMASMDELKAVHMPTEAHREFRSLVKYRKTLDYRICKMKCTIRAWFVNHGISIDTGEKAWHTGRERINSFRKPLAECEPNELWRGELDLELTQLDALTIQLQCVVKKLEELGKNDPRIVRLRTIPGIGPRTAEILVAFIDDPHRFENGRQVAAYFGLVPRQFQSGETDRNGRITKRGNPLARTRIAAEGSLLLSRYEATIR

SEQ ID NO: 501404 - protein, 359 aa, unidentified
MIRSSEGEPSMTKASMIGLDLAKNVFQVHGIDASGKVVVRRQLRRRQVEKFFAELPPGVVVGMEACGGAHYWGRMLEKLGHEVRMMPPAYVKPYVKRNKNDGRDAEGICEAMGRATMRFVPVKSAESQAVQALHRTRRLLVRQRTMTANAFRSALSEFGIVAAQGLKGLRSLTETVDDPASAIPEVARMPLQMLARQWERLNADICKLESEIVRAAKTDAVARRLMAIPGLGPIGATAILAAVPDARVFKSARDFAAWLGLTPRQFSTGGKQRSGGISKQGDRTLRTLLTVGATSHLRYERARDTKDPWLQALLARRPFKVAAVAYAAKMARIIWAMLVTGEFYRVSNRCPKVSAQAAA

SEQ ID NO: 501405 - protein, 342 aa, unidentified
MKDTMIGVDLAKSVFQLHGASLAGHLKFRKKVTRVQLRHFMAKHEPAVVVMEACGSASYWAREMVKLGHEVRLIAPQYVRPFVKRQKNDAADAEAIVVAAQRPEMRFVEPKSEDQQACAVLFRARERLLHQRTELVNALRSVLYEYGHVFPKGIAHLRRIEAVLTDPASDLPALVRDECHDLLEQISEQTARIEAKTAKTRGLAGTNDTARRLQTMPGVGPQTALAISGFAPPMDSFKRGRDFAAWLGLVPRQYSSGGKERLGRISKAGQTDIRYLLIIGAMSRLTVLARKSIQEGSWLARMLHRQPLMLVAIALANKMARAIWAMMTKKEDYRDPARAVST

SEQ ID NO: 501406 - protein, 399 aa, unidentified
MRCADHPVRLRAAVREEDSSLFVALELSKSAWLIAASAPGSEKVCKYRVAAADVAALVALLTRLKAQAERYRSGPMQVVSIHEAGLDGFWVHRMLEANGVESHVVDAASIAVNRRSRRAKTDRIDVEGLLRTLMGWARGERRICSMVRPPSPADEDERRLTRERGTLVTERTRHVNRIKGLLATQGVFGFEPLHKNRRKRLEELQQWNGQPLPARLKTELVRELDRLELVMSQLGALEAERDRALQARRTVVGNTTKAPSGTASAGEVGSQLLRLRSIGPEIASVLTLEAFYRNFSNRREVAAYSGLAPSPWKSGGIDVEQGISKAGNARLRTTMIQLAWLWVRHQPSSALSRWFHERVGDKRGKIKRIALVAVARKLLVALWRYVAQGVVPAGAELKA

SEQ ID NO: 501407 - protein, 368 aa, unidentified
MNEYKLKAAPTAVSKEQNSQKNPKANRILIGVDAHLKSYEAARKIDNGAVGVAQSFRSKEAFLLYVEKQREQAEEVAVVYEAGPLGYTLYRELKASDIECLVCAPRSGEQKRKRRKNNSIDARTLSSDLFNYLNGNEQALQAVRVPSEAQEQARVESRQHDALVEERKRIGAMGNSLLLSQGYGSWSNWWRPKAFERLSQGVAPWIVKHLGRWVGILRELDQQIQQAKAELTQHYQGPRPKGMGAPSLAQLNAEVLDWTLYSSRRKIGCLAGMVPSEWSTGEAQRLGAITKVGVPAIRRIITEMVWRMILFQPEYKPVQKWREVLEGPNRGLKKKAVVAIGRQLIVDIWRLQTGRITAQELGLIMIEA

SEQ ID NO: 501408 - protein, 322 aa, unidentified
MAMLSVGGIDVSKDRLDVMILPEQRCSSVSNDPVGWSELVNQLGGGSISAIGIEASGGYERGVMRALLAAGVSVRQINPFKLRQFARASGVLAKNDPIDARLIASFVAIMPTRPAAPRVPAIERLVEMLAVRRQLSAEKVAAENAARLLEDAMLRRLSRRRIARLAADIDMLDARLVEIVAADAMLAHRYRLLTSMPGVGPLLGGTLVALLPELGSMSRKQVAALVGVAPYAFESGKFKGRRCIWGGRSHVRQVLFMAAMSASNWNPVLKRFHDRLEAAGKLPKVAIVAVMRKMITMLNAMVRDDVVWADRHRGRHTVPTAR

SEQ ID NO: 501409 - protein, 415 aa, unidentified
MNRYCGVDWAEGHHDVAITDTEGKLVAKRRIADDPTGFAELTVMLADVGDTADDPIPIAIETPRGLMVAALRASRRPVFAINPLAVARYRERHSVARAKSDHADAMTLANILRVDAHMHRQLPADSELAQSIAVLARAQQDAVWRRSKASNELRSILREYYPAFLETFAGRSATNLAKPEARALLAIAPTPAHAARITKAHIVTALRRAGRQRGIDDLAADILRRLKTPQLRQPELVEKAMGRQALALLAMLDAACTGADELQQAAAEEFRNHPDYDIITSFPSLADLTGARMLAEIGDDRTRFADDRALKAYAGSAPVTRASGKAISITHRRIKNDRLAAVGWVWATYASINQGPAREHYRHRRDHGDRHAAALRHLFNKMLGQLYHCLQTRQTFDAQKAFSHSAETPQNRAAA

SEQ ID NO: 501410 - protein, 403 aa, unidentified
MQETTQHDAVDVFVGVDVDVGKGQHHAVALDRNGKRLYNKALPNDEVKLRALIAELKTYRRLLFVVDQPSTIGALPVAVARAEGVLVAYLPGLAMRRIADLHAGETKTDARDAAIIAEAARSMPHTLRSLRLADEQLAELTMLRGFNDDLAAQVTQTSNRIRGLLTQIHPALERVLGPRLDHPAVLDLLERYPSPSALAAANEKTLANRLTKLAPRLGKNWAAEIVQVLNEQAVIVPGTQAAAIVMPRLAQQLAALRKQRDEIAAEVERLVLAHPLWPVLTSMPGVGVRTAARRLTEAAPKALATAAHLAAYAGLAPVTRRSGSSIRGEHPSRRGNKVLKRALFLSAFAALRDPVSRAYYSCKIQQGKRHNQALIALARRRCDVLFAMLRDGTIYPPKSAPNA

SEQ ID NO: 501411 - protein, 371 aa, unidentified
MSRNLYSVYVGLDVHKESLTVAIASPERGGEIRFYGNIPNQQPAIHHFFLKLQKQYASIMACYEAGHCGYGIYHQLTVMNIECIVVAPSRIPKSPTDRIKNDHRDAMGLARLLRAGELSPVWIPDLTHEAMRDLVRARAASKQDCRIARQRIQSMLLRTDRRYERKPWGYRHRIWLANQTFPLPSQQIAFQHYCQNHEQIENRIAQLDQEIDRLLPEWSLYNLVCQLQALKGMGKTIAVSLASELGDFSRFSNPKQVMAYTGLIPGEHSSGSKVHTRGITKTGNSELRRLLYEAAWAYRSPAKVGSWLITYRPVSASQDSKDIAWKAQQRLCARYKALLQKGKKSQVAITAVARELTGFMWEIALTARQSG

SEQ ID NO: 501412 - protein, 356 aa, unidentified
MSRDVKYIGMDVHKEAIVIAVLNDSGKLVMESIVETQASSILQFIHGLRGELHVTWEEGTWAAWLYDLLKPHVHEVLVCNPRRNALLKEGSKSDKVDAHKLADLLRTGMLRPVYHGENGLRTLRELARSYQTISKDLNRVMNRLKALYRGWGIACSGTQVYAARYREEWLHKIPHAGVHRRAEVLYQQLDGLQALRRTLRPELLAESRKHKAAKLLRQIPCIGPIRAARLLALMQTPHRFRSKRQLWTYSGLGIETHESAQYRYVRGQLQRSKKPQQIRGLNQNHNHEMKEIFKGAATRASCGVGPLRDFYVALLDKGMRPEMARLTLARKIAAIALTLWKKEERFDAEQLKPQAA

SEQ ID NO: 501413 - protein, 407 aa, unidentified
MHDRTWTTFAAIDWAAETHAVSLLDPDAHIHRTTVAHSRDGFDRLVGWLARFGDPAQIPVAIERPDGRLVDRLLEAGHPVVPVKTNAIKAWREAEVISGAKSDAGDADVIVDYLRVRHRQLHTLPPLSDHTRALRTVVRTRDDLVDQRVAAGNQLSALLDAFWPGANAMFATITSEIALAFLTRYPTPTSAARVGPARMASFLTKHGYSGRQPAARLLARLRAAPAGVTATAQTDAGRDAVLALVTTIRALNAAIKDLDRSIAAHLDEHPDGSIFTSLPRSGQINAAQMLAEWGDCRQAYAHPDAVAALAGACPVTKSSGKHHSVSFRWACNTRFRNAMCTFADNSRHASPWAADIYTRARAAGKDHPHAIRILARAWIRVIWRCWTNHTPYNTDLHGAAQRLANAA

SEQ ID NO: 501414 - protein, 318 aa, unidentified
MNQEFVGIDVSKNSFDVATFTSNQKWHFANDEEGISQLRKVLKTLSSTLAVMESTGGYETPLAYALNNANIPCAVVNPREVRDFAKATKKLAKTDTIDARVLAHFAAVIKPEPRPLSDSRGQELEAILARRAQLIVMLTAEKNRLHTARNTVRDSIQSLINYLENELNRLDTTLKGKIEESPVQREKYELLKSVPGVGPNLASTLLIELPELGDLNRKQLAALVGIAPINHDSGNMRGKRRIWGGRPQVRAALYMATLVATRFNPIIKEFYTRLCTAGKAKKIALVACMRKLLTILNAMIKHRVGWHFSQPVVPAIMV

SEQ ID NO: 501415 - protein, 338 aa, unidentified
MAIVHIGIDLAKNVFAVHGVDEHGKPALVRPSVPRARLHELIAALPPCTVAMEACSGGHHWARLFAVHGHSVRLIAPKFVAPYRMSGVRGKNDAADAAAICEAVQRPAMRFVPVKSIDQQARLMVHRARQGYVEARTACINRLRGLLSELGIVLPLKAATVRREAGTALEDLPGWANTVVGDLLSELHRLDERIATYDQHILVIAREDERARQLMRLSGVGPTTATAMLAMIGNGHEFRCGRQFAAWLGLAPGQYSSGGKTRLGRITKAGDAYLRTMLILGARAVLAAAKNKTDSLSRWALALQERRGYWKAVVAIAAKNARMCWAMLAKGEDFKLPA

SEQ ID NO: 501416 - protein, 431 aa, unidentified
MVIGITFQRRAVIAQGHDKPIISVVHPICCGLDIHKASISACCLTTAADGGEDMEIAEFDTFTDALIRLRDWLIERDCPVVAMESTGVYWRPVHNVLEGFVKVVLVNARHTKHVPGRKTDLADSQWLAGLLRHGLLRGSFIPPQQVRQWREMTRLRKAYQESLADFKRLIHKLFEGANIKLGVVVSDLFGATGRYVMNLLVTRAGELSADDIAAGAHGQLKQKINELCRAVQGFFTDHHRYQLRLLLATVTELEHHIEQIGQNVKELMADHHPVLSRLQEIPGVSEVAAATILSEVGPTLEEFPRSAALTSWSGLCPGNNQSAGKRKSGRSPVRGHRLKTIMVEVAWSAVRKPGSYYKDKFQRLRARRGAKRAIVAIAHRLLKAVYYIIKEGRHFRDLGAEYLTHKHQTGKLGSLKKQAKLLGYELTPLAA

SEQ ID NO: 501417 - protein, 341 aa, unidentified
MSLIKAIGIDLAKSVFSIHGVDSHDKCQLRKTVKRNKLLAEVAKLPACIIGMEACSGAHYWAREFTKLGHEVRIMASKFVIPYRQNEKNDANDAEAICEAVTRPKTRFVTIKSEEQQAVLCLHRIRQGAIKDRTALINRLRGLLAEFGIIMPKGRYPAQHAISGILEDGENNLPMLARELLSDLWQDIKALNQQILKHDRKLYQLANQMNAARRLMTIPGVGEITATAVVATVSDAKDFDTSRAFSAWIGLVPRQYTTGGQVKLGRISKRGEKHIRTSLIHGARAVIANCKHKTDRTSLWVKELIERRGFKRATVALAAKNARLIWALLRSKNEYQIDYVK

SEQ ID NO: 501418 - protein, 399 aa, unidentified
MISVGIDVSKEKSMVCILKPYGEVLLSPTEIMHTEKEVTKLVDQILKLDEEVKVVLEATGAYHLPLLSVFLERNIFVSIINPLVMKKYASVAIRKGKTDKIDSIRIASYGLDNWFHLRSHKVSEDIYEELKFLGRQYSHYIKMKIDSKLSLTSILDRTMPGIKKLLSGKRSDNPTKDKLADFVEHYWHYDNITKLSEIKFIESYKKWTKKKGYHASESKARKIYAMASSGIPTLPSNTPSTKMLVLESVRVLKEINKTLYNILAQMQIVARSLKEYETVRAMNGVGDVLAPRLIAEIGDVTRFHSGSALVAYAGLDSPPFESGSFIGTRRKISKRGSSLLRKTGYEIMKCLKTVKPTEDAAVYQYMLKKETEGKPKKVAKIAALNKFLRIYYARVMELQ

SEQ ID NO: 501419 - protein, 365 aa, unidentified
MFVGLDVHKESIDISVAEEGRDGEVRHYGKIAGDLEALAKVVTALRAPGRRLRFVYEAGPCGFEIHRYLTAQEEDGVVVNPSSMPKRSGDRIKTDRRDADALARLHRAGELTAIYIPTADDEALRDLVRAREDAVGLSTQAKHRLKAFLLRQGRRYPGRPGWTVAYRRWLADLSFPLAPQHIALQEYRDTIDETERRVERITDQLRQITPTWRWAPVVDALQALRGVAFVTAVGLVVEIGDIRRFDHPRQLMAFLGLVPSEHSSGPSVRRGGITKAGNPHARRLLAEAAWAYQGPARISRHLLLRQEALPKPICDIAWKAQLRLTSRFRKLVARGKAKPKVATAVARELTGFIWAIAQEVPAPRA

SEQ ID NO: 501420 - protein, 319 aa, unidentified
MMAQNNLVVVGIDVAKDKVDACIRPSLARQTFPNSSIGQRQLAAWLRRHKVGKAVMEASGGYERHWAKVLRQLGVEVRIVDPKRVRSFARSAGRLAKNDKIDAAMIAWFAETFDQAPSQAYDAAREELVQMVNARQGLLDLQTTLQNRDEHSEVSAVQKMHARLLKRVAGEVLRLEAAIALIKMTKRFAELAEIIASVPGLGDITCAGLIAAMPELGQVTNKVAAALLGVAPYDDDSGKRRGERQIKGGRRRMRNLFYMACLGAATRHNPVLKTFYRRLIANGKPPKVALVACMRKLIVILNIMIARRQKWDASLYPAS

SEQ ID NO: 501421 - protein, 345 aa, unidentified
MKITTIGVDLAKEVFQIHGVDTHGKAVLRKQLRRGEMAKFFAKLEPCLIGMEACGSSHHWARKLDEFGHTVKLMAPQFVKPYVKTNKNDMADAEAICEAVSRPNMRFVPIKNVEQQAILSIHRARQGFVKARTAQANQIRGLLSEFGIVIPQGIKSIAKHMPDILEDGENGLPGTMRNLLERLNDNLKEMDRQVAELELQIKQWHHGNEASRKLEAIPGIGPITASAIVATVGNATEFKNGRQLAAWLGLVPKQHSSGGKQTLLGISKRGDTYLRTLLIHGARAVIRFAENKAEPDQWLCKLMVRRNKNVAAVALANKNARIIWALLAKGNIYKRDYVSVVEAAA

SEQ ID NO: 501422 - protein, 347 aa, unidentified
MVTFGCDSHKRTHTLVVVDQNGRQLGERRVAATTSGHLEALDWARQWSQRQWALENCRHLSRLLERQLLSAGEVAVQVSPKLMGSVRRSSRELGKSDPIDALAVARAALREPHLPVAQLEGREREVKLLVDHREDLVGERTRIQNRLLWHLHELEPGYQVVASGLLRSVVLAEVSRRLERHTGVVAEIACELVVRLAELTQSVKRLQQRLESLTRELAPSLLSLPGCAALSAAKLLAETADVSRFRSSAAFAMHNGTAPIPVWSGNHNRHRLNRGGNRQLNVALHRIAITQIRLGGPASAYVARRLTMGNTKTEAIRALRRQISDEVYRRLRQDKLKRSTVQVAVAA

SEQ ID NO: 501423 - protein, 397 aa, unidentified
MKRVAGLDVHKDSIFVSIKKGRYQNKVKEFGTTTKELAELHHYLHAEHVLKVAMESTGIYWMPIWRALEQDFELYLVNPYFIKQMPGRKTDIQDAQWIATLLDKDMLRSSVVPEKTIRILRSYLRRHAQLQGQMNRCFQSMERQLSQCNIKIASLTSTIGSKTVLKVVQSITEGKISAEHLLTQVHGRIINSKGKDTVLQSLDGIIEEHDIFLLRQIFQDYLHIELQSQQLLAQAEHLADTHYKEQIKLLQTIPGISKLSAVIIFAEIGGDISKFQTAHHLSGWCGLRPKNEESAGKIKNTRIGKGNKYLRRILVQTAWAASRKKDCYLKEKFERLCVRKSRKKALIAIARKQLVIAWNVLTKQEDYVEPVIVLSQNQIQQKRKYYQQKLKNLEKVG

SEQ ID NO: 501424 - protein, 355 aa, unidentified
MTQPSYHPKDYETFIGLDVDKNSFSYTVSDKFLKVKSKKMSSNPEHLYNYIQKHFNTKKVICAYEAGPTGFHLHDYLSKKDILCLITSPASIPTARNQKVKNNRIDSVKITDHLMTGKMKPIRVPQGAYRELRDLVKIRENYAKDRKTAKQRIKGLLLYSNLYPSLKDPDGNWSNKYINDLKQIDCSFAVRHRLDMLIEDLEYARRKLLSVHRTLKSFCRENDEINQYIHYLQSIPGIGFTISVMLLGKSGDPESLKNPRELAGFIGLTPKENSTGDSINRGSITRMGDKTLRFLLVEAAWVAIRKDTQLDQFYHRIRNKNHPKAASKIAITAVARKLTQIIYRVLKEKRVYIQY

SEQ ID NO: 501425 - protein, 406 aa, unidentified
MLLVGDDWAEDHHDVEIMDPAGRTLAKARLPEGIAGLARLHALIAGQRGDDAEQVEVRIGIETDRGPWVAALTAAGYTVYPVNPLQAARYRDRHAVSGAKSDAADAHTLADMVRTDAHQLRPIAGDSPDSDAVKVVARAHKTLIWERTRQTQRLRHALREYFPAALDAFDDLDAADTLELLAKAPDPTAAVRLTRAQISAALRRARRRHVDTKTTAIRAALRTPQLGRPAVVVAAYAATTRAAVAVLATLNAQITALEAQVGAHFRRHPDAEIILSQPGMGPVLGARVLGEFGDAPGRYADAKARKNSAGTSPITRASGRRKTVHARHVHNDRLVDALMLQAQSALQASPGARAYYDRQRARSLDHNPALRQLANRLVGILHGCLKTRTRYDEATAWSHHNQQTAA

SEQ ID NO: 501426 - protein, 412 aa, unidentified
MDVTVERCAGLDVHKATVTACIRLPGPDRERAQVLQTFGTTTAALLTLRDWLTAHQGTDVAMESTGVYWKPVYYVLEDAVCVLLVNAAHMANVPGRKTDVADCAWIAQLLECGLLRGSFVPPPAIRELRDLTRYRTALIQDRTREANRLHKLLEDAGLKLASVATDVLGVSGRAMLPALVAGTTDPAVLTDLARGRLRAKLPALRQALTGHVRGHHAFLLTHLLAHLDYLDELLAALSQEIEAHLVPFAAEAARLQTIPGVKQRSAEAIVAEIGVDMTRFPTAGHLASWAGLCPGNTQTAGKRRRGRARKGDPWLKGTLVEASLAAIRVKGSRFGALYRRICRRAGHNVAIVAVAHAILEIAWYLLRHGTTYHELGADYLDRRDKQRTTDHYVRLLEKLGHRVTLEPAAIAA

SEQ ID NO: 501427 - protein, 350 aa, unidentified
MKSFFGCDAHKKFSMFASINEEGHRAKCIKVKNDRHQFSCFLNTLPPGSPIAVETVGNWYWMIDDMEKAGHVPKLTNAWKAKLMMGQINKTDKLDANGLARLLRNGTLPSVWIPPRELRDQRELPRMRMALVSVRTKFKNRIHATLAKYAILITEVSDIFGVGGRALIKKRLSELPPYTRRSVEMQLELLDQTVEHIKVCEKQIEEVIKKTPTMKLLMTLPGVGSVLAIVIALEIGEIERFARAENLASYAGTVPRIKQSAGKIRYGKVRPDVNRYLKWALVEAANIAVINQSRWSDRHVVRLYRRIRGRRGHGKAVVARHLAEASYWVLKKNEPYKEPKGNKPISSTRK

SEQ ID NO: 501428 - protein, 343 aa, unidentified
MLHAGLDLSRKKIDVCLLSAAGEVVDEWASPPDSDGLRGLAARAVMWGGSVRGVIESMNGARFVHDRLEEHGWEVLIADATKVKGLAPLACKTDKIDARVLATLSARDLVPEIWLPDPSVRRERELARFRLHVVRHRTTLKNRIHAALIAFGHPCPVSDLFGHAGRELLDRLEIPDPWRSNIDVSLELIDDLDLQIATLTVQLKRQGADHRYIPLLVTAPGIGWINAYTIASEIGDIGRFASPAKLCGYTGLCPRVKQSGATDARGPISKHGPKYLRWALFEAALNACKHPYYAERYQQTKRRLGRQRGPKVAQIDLSRRLTEAIWHMLTRNEPFAPAGAPVV

SEQ ID NO: 501429 - protein, 343 aa, unidentified
MDYFAGLDVSVKDTSVCVVDETGKITREVRVASEPDALLAVLRNPTYRFKRIGLEAGPLSQWLFSALAEADLPVICVETRHMRAVLKAQINKTDRNDARGIAQMMRVGLYRPVHVKTLRSQMLRMLLTHRKLLQSKAIAVENDLRATLRNFGLKVGMVGTAKYEIRIKELLENFPDLIPLVEPLLVVRRVLREQIGVLHRRLVAVVRDDEVCRRLMTVPGVGPVVALTYRATVDVPARFRRSKSVGAIFGLTPARDQSGETDRPGAISRCGDAMMRTTLYEAAQSMLVHSTKWSWLKAWAMKIARHRGIKRAIVALARRLAVILHRIWVDGTEFRWTREAAAA

SEQ ID NO: 501430 - protein, 321 aa, unidentified
MTDSILGIDIGKQKFSVALLIKNKTKSKSVKNSKEGFAALSDWLKKHSSKHVHACMEATGSYGDELALYLHDAGHTVSIVNPARIKGFAQSELIRTKNDTVDAGVIARFCLAMQPKPWTPPPPAIRRLQAVVRRIDALINIRTQEENRLVVAHSLVEPSIKEHLAYLYSEIKKLKAQIRSEINNDPDLKGKRELLISIPGISDTTIAIILAEIDFQKFKSVKQVVAFIGLAPKETLSGSSVKGKPRICKIGNARLRKSFYMPALVATRFNPIVANFYRRLKESGKNGKVAVCAAMRKLVHIIYGVLKTGKPFNANYETNIA

SEQ ID NO: 501431 - protein, 349 aa, unidentified
MEAYDGPQIVGMDLHRRRSVLVRMTEDGQKLGTARITNSPARLAAEIRRAGLHPKVVLEACYGWYWAADTLAAAGAEVHLAHPLGVKAFSHRRVKNDELDARDLADLLRMGRLAEAWIAPAEIRELREITRYRGKLVQQRTSCKDQVHGVLAKLGIEVTCSDIFGAWGTQWLDELPLPQPYSWKVASLRQLIGWLSAEITVLEQVTADLLAGHDGYRAVQELPGIGPVLGAVIVAEIGDITRFRHPARLCSWAGLTPRHYESDTKVVRGRITKQGSRPLRWALIEAVQRTPAGTPIRQARDAIIARRGPQARNIAKVAAARKLLTCVFYAMRDGHVRSLTAPAAEHEAR

SEQ ID NO: 501432 - protein, 470 aa, unidentified
MGKGSGVTRGDRRRNARRERLRGLLPRDGAVVGIDLGEDKQALAVVDHDVRVLWRKTVRVKAHQLGGALDRAVGEARARGYVRVTVACEPTGARWMQVQRLCAERGLDLVCIQPLVSHIAREQQDYTAHKRDESDCVLIGRLAVELHCYVPEELDEAWAHLRHLGRRRAQLITAATASVLRVREFLSVAWPVAPEACAQPFKSVTWLAAVRVVAGRCGGQPEQLAAVGLEEFTALVQSAVAGWGGKRADGRVARAVFAALADTGGAVTWSRRGLLRRVADELGDLQRTRAQLRTVEADMVMVLGELGLARLAGIPGLTAVGAAAILAETGDPRRYETSSSLVKHAGLSPAGNASGAFEGQERISRRGRPGLRTAVWRAVWPLIIHNPVLAAKYQALTEGADAAARAEQARPGAGSPRASAAQRAARARRARARVACAASLLRWMYSMTVHGTSWDPAEAGRGQHLPAEAA

SEQ ID NO: 501433 - protein, 401 aa, unidentified
MKTVLSVDVAKNKSVIMLMNSDGEILIDTKEIKHNLQDFDKVKEQINEIKPQNLTVFMESTGTYHLPVERYFKENGFNTLVINSLTTKNNYDTIRKTKTDKEDCYRLAKLFFVNEVEYHDLSKKDLYANLKAMTRQYFYLLQNNVSCKNRYKRLINICFPELEKIFKSTRIYEDIALNFIKEFPHAEIVREKRIDALYNNLYKTNGRNLNFYKKLATTIKTASANSYPGVDKEHEDVKNLSYMAKIVQNNNNIINELRDKMIETAKKSPYYEIINSFYGIGEILTAEILGELGDITRFDSPKQLIAFCGLDPTIKQSGKSINVKGAISKRGNKYARYILFNCSQMVVKLGASNYAEHPVYIYYQNKKAEGKHYYESLTACSTKILRMLYSMCKNNKQFLEN

SEQ ID NO: 501434 - protein, 407 aa, unidentified
MRYYIGVDWADEEDAVWVANDAGDKMLSRRFAHTVAARSEWARWLRERQAEGIELWAAIERPHGRIVDFLLDHGVVVYPINPKSLDRARDRFRVGGSKSDPFDAKVLALFLRSDHLQLRPLRPNSEAAQELQGLTRDYRRQVHLQTRLLNQLTATLKEYYPRALELGEDLTAGWAQAFLARYPTPAAAAALTEPDWQAFAHAHRLSPTRTAALWETLQQPQLPLPAHVVRLKARLLQALLRELAPTLATIAEYRQAIDDFFATMPTAEIARSLPVGKSGTTVPTVWAELGDHADRWGSFRHLQAYAGSVPETDCSGKHHVVKFRFACNTALRDAMHQLAFLSLPHSLWARAYYDRYRERGHTHHQALRALGAKWLKIIFVMWKRQVPYSETHHLATMARQHLHQTAA

SEQ ID NO: 501435 - protein, 342 aa, unidentified
MQIAVLGIDLGKNSCSVVGLDAAGRVVLRRRLSREGVIKFAAGLPRCVVGMEACCGAHHLGRVLRDQGHQVRLMSPEYVRPYVKAQKNDDRDAEAIAEAATRPTMRFVELKSEAQLDLQSLHRARDRLVGERTALINQLRAFLLERGIAVPQGRRKLELRLEELLAAEQPSLSPRTRLLIEDMRAQWRELDRRILAFDDEFVAHARTDEAARLLMTIPGIGPLIATALMAAVGRAETFKRGRDLAAWLGLVPKQATTGGKPKLLGISKRGNGYLRKMLVHGARAALRMLSGTDTALGRWLRGLLQRAHKNTVVVALAAKLARVAGAVLRSGRGFEIGAAAAP

SEQ ID NO: 501436 - protein, 323 aa, unidentified
MRIIGLDIHRAFAEAVAWDDGKLKRLGRVDMRRPLLEAFAKKLSKEDVVVVEATGNASSVAAVIAPHVKKVVIANPMQVRIIAHAKIKTDTIDASVLAQLYASGFLPEVWIPDEPTQALRRQVTRRNQIVRQRSRLKNIIQSILHSHLIPSCPHADLCGASGRAWLFHQVLPEDERLAVERHLREFDRLDEDLKVIERDLARSALGDESVKRLMTIPGVDMVVALAIVAAIGDVGRFEQSQKLVSYLGLNPSVRHRVLGPRITAGSRGRAVGMRAACSSRRLGRQRERRVRCGRSSCESAPAAVSMSPLSRPPVSSRCSSGIC

SEQ ID NO: 501437 - protein, 366 aa, unidentified
MKKTSTVRVSGNMIFKGHKLTIGLDLGDRWSFYCVMDEAGQIIVEQKLATTPEAMKQTFGKIPRSLIALETGTHSPWVSRLLTELGHEVIVAHAQKVQLISKSNRKDDRHDARTLARLARIDPELLGPVRHRSAKAQIHLTVIRARAELVSARTALVNAARGLAKSYGERLRKCGTQQVSRELAAELSVELREVLEPLLQEVESLNERIKEYDARMEKIAKESYPQVELLKQVKGVGTQIALTFVLTLEDPHRFPKSREVGCFLGLRPGRRDSGESQPQMHISKEGDPYLRTMLVQGAHYILGPFGQDSDLRRWGLKLAARGGKNAKKRAVIAVARKLAVLLHRLWVGGEVYEPLRNSHKAMRAVA

SEQ ID NO: 501438 - protein, 416 aa, unidentified
MSYRPTMGGRLRKGTAGVDRSQAGLFCWGIDPVKEISQTCGLNVIMRRKATSNRSVVTAAKLVYSTWKINPPGERDMEKRFIGIDLHRNRFTCCIRLENERTHVTDWALEDLGRFAKKLRPSDEVAVEITSNTRLFYDAVAPQVARVVVVDTNQFRVISQSVKKTDPNDARLLSLYLSKGLLPEVRMKDKELAQLASLTQTRDTLVKQRSALKNKVNNILSARGLNLAKEALSSEKKLTEVVELPFEQVVCVELRVIVEQIRSLNKSIAELEKTIGEKGSKLEGHQGLSSIKGIGKITGAILLSVIGDVNDFSDEGRLASYFGIVPRVSNSNQTERSGRIHKRGTKLGRTALVQSALIAANYSPYLKSFYERVKARRGAGKAIIALARKFLGIIYLTLKNKWVFEDFPGFVLAESA

SEQ ID NO: 501439 - protein, 353 aa, unidentified
MFCYSITGGEDIQMSEVTMIGLDLAKRVFHLHGARADGSVAFRKKLSRAQLLTFLSGQPHCLVAMEACATAHGWGREIAKLGHTVRLIPPAYVKPFVKRQKNDAADAEAIAEAASRPTMRFVEVKTEEQQAHAMLFRTRQMFVRQRTQLINALRGHLAEHGVIAPQGPAYIRTLTSALQDKSLGLPQIVRELGQVYADQIAVIGARIAALDLKMRTSARCAETTRRLQTMPGVGHVTAVALEAFAPPMNSFRRGRDFAAWLGLVPRQHSSGGKQRLGKTSKMGQRDIRRLLIIGAMSMVRATLRRRTAEGTWLARMLARKPRILVATALANKMARGLWAMMTKQEEYRNPALT

SEQ ID NO: 501440 - protein, 341 aa, unidentified
MNIAILGIDLGKNSCSAVGLDVSGRVVLRRRIQRPTIVGLAAKLPSCVIAMEACCGAPHLGRLLSGQGHEVRLMSPEYVRPYVKAQKNDDRDAEAIAEAATRPTMRFVALKSEQQLDTQTLHRARDRLVKERTSLMNQLRALLLERGTVVPQGRTRLKLHIKAIVIGDNCGLSDRIGMLISDMLERWDQLDQRIAAFDAEFLAEARHDEAAHRLTSILGIGALNATALVAAVGDANTFSRGRDLAAWLGLVPRQMTTGGRPRLLGITKRGSKYLRKMLIQGARSALPTLSRSNTRLGGWLRGLLARSHSNTVVVALAAKMARIVWAILRNGTTFEHQPGAA

SEQ ID NO: 501441 - protein, 347 aa, unidentified
MNKVTVIGMDLGDKNHKAVVLAADGAEIERVEVSNTPEQVQEFLERHPGALLAVETGTHCRWISRLAVGLGHEVLVGNARKLRMIWNSSRKNDWNDAEMLAKLARADRSLLVPVKLRDDESQELLRLVKARDILVKHRAGIVNMIRGFSKAEGGRMDGCTTEAFVRQEFDVPKVLREVTKPLFAVLRELSKKVALFDKILVQSLEKKHREEAASVMAINGVGPVTAAAFIATVGDPMTFGKPRDAGAYFGLVPRQDQSGQTDRQLRITKEGNTQVRSLLVNCANYIMGPFGKDCDLRRHGLRIAERGGKNARKRAKVAVARKLAVVMLALLQNKKEYCPLMGDASMA

SEQ ID NO: 501442 - protein, 371 aa, unidentified
MDEFTKYVGLDVHKETIAVSVADGQGGEVRYVGEIANTPEALRKLSKQIGMGGAKLRFCYEAGGCGYGIHRQLKALGWDCQVVAPSLIPKKAGNRVKTDRIDSLMLARLHRAGELTPVWVPDGEQEALRDLTRAREDMKHLQRQVKQRLLAFLLRHSERYTGKSNWTQAHYRWLEQVKLPHPVQQIVFQEYVDTVKAMSERVQGLDEQIHSASSESVFWPVIEALMALRGVSLLAATTVVAEIGDLRRFASAPQLMGYLGLVPSERSSGPNRVRGSITKTGNGHVRRILVEAAWTYRHPARKTAILQQRALRTAPQIQDIAWKAQKRICGRYRLLEARGKLKVQVCTAMARELTGFIWAIGQTVPQPEFKA

SEQ ID NO: 501443 - protein, 415 aa, unidentified
MALKIVYKICCGIDVHKTFVVACIASTNDKGVTSYESHRFSTYTSGLKTLLQWLLDRNCKDVCMESTGKYWIPVYNILEKDCSIVLAHPKYVKAIRGKKTDKKDAKWIADLFKHDLVAGSFMPPAGIRQLRDLMRYRFKLTCFKSSEKNRLQNCLTVSNIQLGNVVSDTFGKSAQAILDKILENPADTSFDLEPLVFKSLKKKLPELRDAIDGYITPEQAGKLKVIKSHYENLEARKAELQELILALATPYQQELAILQTAPGISSDFTAIGIISEIGTNMEAFPSAKHLCSWAGLTPTNNESAGKKKSVRVSKAGCYIKPLLVQCANAVVKSNKHPEIRNRYLRIKKRRGHKKAIIAIARMLLTALYYMLKNGENYNAELYRKSDLPPVDREITVEQALMIARNQGYKIKSATA

SEQ ID NO: 501444 - protein, 338 aa, unidentified
MRYVGLDVHWRQSSICVLDTRGRKLSAQAIKGGWSKVFEELGKIKKPFAICFEASSGYGYLFEQLTPIARRVVVAHPGQLRLIFRSKRKNDRVDAEKLAKLLFLDEVPPVHVPSVDVRSWRSIIEHRRKLVAEQTRTKNTIRALLRSQGIESPRGLWSRQGLTWLSSVTLATDLDELQRDILRERLESIASMIKRVERVLNRKATAHPGVQLLRTIPGVGPRTGEAVVAYIDKPSRFHSNKAIGCYFGLIPRQDASGRSNRLGHITREGPSVVRCLLVEAAWQGIRRCPRIREVYERIMRGDKERKKIALVATAHYLLRAMLAMLQTGEVWRESEKAA

SEQ ID NO: 501445 - protein, 320 aa, unidentified
MVSSPSLPVVGLDVSKASLAVCYQQDQQVRHLEVGNDKAGFAQLLQACGTQSLFVMEATGTYYLALAYYLHEQGGQVAVLNPLVIKRFIQMHLSKTKSDRKDAQWLLRYGQQQGVTPWQPDETVLVECRQLEQVTEQLLKQKTMVANSLEALQQQPIINPLAQQRLQQTWQLLDDQLQAVEAELLTLLDQRFASEMKLLRSIPGIGRKTAGMLLLFAGGFKRLDNYRQLIAKAGLSPREHSSGSSIRGKVRITKMGGGLIRSKLFVCSFSAKKWNAACKALYDRLVAKGKNGKVALIAVCNKLLKQAFAIVKSGVPEVVG

SEQ ID NO: 501446 - protein, 347 aa, unidentified
MEVHVIGIDLGKTVFHLVGLNPKGEVVVRKKFSRAQLLRFTSNLRVHLIGMEACGGAHFLGRALRAQGHEVRLMPAQYVKPYVKTNKNDYIDAEAIAEAVERPKMRFVPIKSDDQLDMQSLHRVRERWIIRRTAVVNQIRSLLLERGVTVRTGRKQLVAALPGILEDPDTDLSGPLRVLLAQLQWEMKQLEHQIEEVDAVVVSASGESEACQRLETIPGIGPLTATAIVSAIGNGAEFKKGRGFAAWLGLVPAQYSTGGKQKLLGISKRGNRYLRKLLVHGARAVLQMKDKQSPGLSTWLTQLASRAHSNVAAVALANKMARIAWAVLAKREAYRPPLLAGEELACN

SEQ ID NO: 501447 - protein, 351 aa, unidentified
MDRFIGLDAHASSCTLAVLGPSGKRLGSHVVETNARALIEVLKGIPRSRHVCLEEGTLSAWLHEVLEPWVEELVVAGVGKSRGPKDDKRDAFALAEQLRIGAIETRVYKARGEFRRLGNLAKAYDFVVRDVVRVKNRLRSVLRSRGVGYGAGQSVYAKRDREQWLAELPESTGVQAELLYEEHDALMALRVKAEKRMLAEARKHREWHMLKTCPGLGPIRTAELLPVVVTPYRFQKRSGFWAYCGLGVVMRSSSDWARDPSGRWVKTPVQQTRGLNRNFNHTLKRVFKGAATTVIGRAGDEPLYRHYERLLDGGTKPNLAKLTIARQIASIMLALWRTGEEYDPTRLEATE

SEQ ID NO: 501448 - protein, 360 aa, unidentified
MDKHKYVALDVDSANIVAGVYDSKGKTVMQCCLRNEGQAIQEFLKLLPGTVHVTFEEGTQAVWLYELIRPLVAEVVVCNPRQNKLLKAGNKSDRIDVAKLGKLLRLGELRPVYQGPSATQGLKQLVHGYAALVDDTTRVKNRLKALYRGRGLSCKGEMIYGREQRQQWLSQLETKELQRRATYLYEELDCVMRLRVEAEKVMCRAARKIEAYKWISSTPGLGAIRTAQILATAITPHRFRGKRQFWPYCGLAVVTRSSSDYEWVDGGARRKRKPIQTRGLNQNYNRTMKAVFKGAAVSALQQHQEFQEYHQRLCGKGMRPEMAQLTLARKLAAIVLILWKKGELYDSERLNQAAPGAGQQ

SEQ ID NO: 501449 - protein, 351 aa, unidentified
MLLIGVDYHPSFQTIAFLMEETGECGDQELNHSDGQAEKFYRDLKERGISVRVGMESTGYSRWFERLLAELGFEVWMGDPAEIKAKRVKKQKFDREDARLILRLMRENNFPQVWVPGPENRDLRQLLWHRHRLVQMRTRIMNQLHALAMNEGYRWKKKLFSEQGRAQLEKLTLAPWASRRRQELLELLDRMNPTIEELTAAVEREARKRPEAMRLMTHPGVGPLTALAYVLIIGTPTRFQRGKQIGTYVGMIPCEESSARKQRLGHISKQGNSLLRFLLVEAAQAAARIHPDWRRRYIHLAMRRHKSIAKVAMGRRLAVRLYWMWRNGCEYSQSLEFGSYAGQLGTRHGVE

SEQ ID NO: 501450 - protein, 467 aa, unidentified
MVVPNDEPSKPKKSRRKSLPVPVPASSAPLNVINPDAAGIDVHSDMHMVCVPADREAEPVRQFGANTADLQEIVVWLKECRVKTVALESTGIYWIPLFELLESEGFEVYLVEPGQLSRCGARPKTNVLDAQWIQRLHSYGLLRGSFRPPNSVLALRAYWRQRQMQVRYAASHVQHMQKALEQMNVKLAEVVSDITGHTGMSIIGAILDGERDPIKLAKLRDERCHHSEDQIALALQGTWRPEHLFELRQARALYQFHHEQITECDQQVEAELANFPNRAGEKTHTVKPRKRGRKSNDVRFEATGPLFKALGVDLTLIEGIDVGTALVILAEIGVDVSRFPTEKHFASWLRLCPPQNQSNKTNRTSRNRKGASRVTIALRMVAQSVGRTMTPLGLFYRRIRSRIGGLGAAKATAHKLACLVYRMLKYGQEYVTQSMEEYEAKAKANMLKALKRKASAMGFQLTPLPTQ

SEQ ID NO: 501451 - protein, 391 aa, unidentified
MDKAWLGVDAGKEFHWAHLLDASGQQLLSRRVENDEGDLLKLIEEAQSLAEEVVWAVDQPGGGAALLLALLWERDQRVLYVPGLSVDRARDAYRGESKTDAKDARVIADQARMRPEFGELTPSEGELAELQLLLARRRDLITDQTRSITRLRETLLSLFPALERSLDLTNKGSLTLLCHYQTPAAIRRAGRKRLADYLRNRSVKGADTLAHKALTAAKSQSVTLPAEGVAAAICAELAKEVLSLKERLQTLDKELAGRFFARPEARILSSLPGMGPILGSEFLVSVGDLSAFESADQLAAYAGLVPAAHDSGKRIGNHRRMRGGNKVLKRVFYQSAFASLRSSPHSRAFYDRKRGEGKKHTQALIALARRRVNVLWAMLRDGTTFEAPSAA

SEQ ID NO: 501452 - protein, 401 aa, unidentified
MQDTQQRDAVDIFVGVDVGKGHHHAVALDRNGKRLYNKALPNDEAKLRALIAELKTHGRLLFVVDQPSTIGALPVAVARAEGVLVAYLPGLAMRRIADLHAGEAKTDARDAAIIAEAARSMPHTLRSLRLADEQLAELTMLCGFDDDLAAQVTQTSNRIRGLLTQIHPALERVLGPRLDHPAVLDLLERYPSPAALAGTSEKTLANRLTKLAPRMGKGLAAEIVQALSEQAVTVPGTQAATIVMPRLAQQLAALRQQRDEVAAEVERLVLAHPLWPVLTSMPGVGVRTAARLLTEVAHKAFASAAHLAAYAGLAPVTRRSGSSIRGEHPSRRGNKVLKRALFLSAFAALRDPVSRAYYSRKIQQGKRHNQALIALARRRCDVLFAMLRDGTIYQPKSALNA

SEQ ID NO: 501453 - protein, 379 aa, unidentified
MSRTPTAGDNTINPTLFVAFELGWKTWKLASTVGLGQKPRISPSIPAGDLEAVVKEISKALERFGLPPDSKVVSCYEAGRDGFWLHRFLTHVGVENIVIDSASIEVSRRSRRRKTDRLDAIKLVTMLVRWDLGEKTWSVVQVPSVEGEDSRQLHRELKTLKKDSTRHINRIKGLLANHGIRINSIPKDLKSWLEEQRLWDGSTLPNGVAVRILLEHDRLRFIRSQILAVEKERRRLLVECKTKDAQVAHKLQRLGAIGHNSAWVFSTELFATREFENRKQVGSLVGLTPTPFDSGGSDREQGIDKAGNKWVRSMAVEIAWAWLRFQPRSALSLWYQRRFGAGSKRLRKIGIVALARKLLIALWHWVEHDVLPKGAIVKA

SEQ ID NO: 501454 - protein, 378 aa, unidentified
MATTRSVLRHELTAKSGDLYLSLDLGDKRWHISIGDGRCGLSHYSVGAGQTDELADCIAKARARLHLSRKAIVHSCYEAGRDGWWLHRWLTEVGVDSIVVDPASIEVNRRARRAKTDRLDADKLLAMLVRHHSGERVWSVLREPSPEDEDARRTHRELQRLTHERVAHTNRIGSLLVLHNLRPNVVIGGRYWSVWWERHRAQVPSSLAAELEREVMRLQLVKQQVRAIEAIRSQELLEGKQPLVAQLTRLRAIGAKGAWVLVKEMFGWRTFANRRELAGSLGLVPTPYASGDSQLEQGISKAGNRRVRGLLVELAWGWLRLQPSSALAQWFDRRFASGGKRLRRIGIVALARRLAIALWRYLKNGEIPAGAQLKPAGA

SEQ ID NO: 501455 - protein, 437 aa, unidentified
MLQNTNPNSAGIDIGATEIYIAVPHDRDSNPVRRFDTFTADLHEAAKWLKDCSIDSIAMESTGVYWIPVFQILESYGFEVVLVNARHVKNVPGRKTDVQDCQWLQYLHSVGLLRGSHRPPQEVCAVRSLLRHRDGLVKTAASHIQHMQKSLTQMNLQIHNVISDITGVTGLAIIDAILSGERDPQKLAALKNGRIRATKDTIAKSLEGDYLPEHVFTLKQSLQVYRHYQQMIAECDREIESHLNNFDSHIDVDQNPPPPTSTSRQGQGNEPNFDLRTHMYRILGTDLTQIEGINSVTAHVFFTEVGCNVSKFPKSENFVSWLNLCPGNKISGGKILSSHTLPGKNRLAKALQMSAMSLWRSNSYLGNYYRRKRAKNGAPSAITDTAHKLARIIYHLVKTGKQFDKSVFSSQEEAHQERAFRNLKNKAKSMGYKMVPC

SEQ ID NO: 501456 - protein, 378 aa, unidentified
MREKLRFLGLDVHAETIAVAIAEANGEVRSLGTIANREDSVRKFIKKLGPPEQLRACYEAGPTGFVLYWQLTQLGVECAVIAPTLVPKKPGDRVKTDRRDALKLARCHRNGDDLTAVWVPDEASEALRDLVRQREAAKQDQLRARHRLTKFLLRTGQRPPLGLKAWTERYMRWLAQVRYTQPAQEVTRLDCMNEFEHMSARVKRLEEAILEIVKQAPQSMQELIRGLQALRGIAHISAVTIAAELGNDISSRFESARKLMGYSGAFPSENTSGKRIRKGAITKCGNAHLRRIVVESAWCYRHLPRVGEKLRKRHEGIPAEILEIAWKAQNRLHERYRKLTMAGKDLRKVMTAVARELLGFIWAIAIKVEQTRTPQLAA

SEQ ID NO: 501457 - protein, 377 aa, unidentified
MKRIKFVGLDVHAETIAVAVAEQDGEVRSIGVIPNRCESVRKLVKKLGPVEELHFCYEAGPTGYVLYWQLTALGAQCEVVAPTLVPVRAGDRVKTDRRDALKLARSYRAGELTAVWVPDAAHEALRDLVRAREAAKRDQLRARNRLTKFLLRHGKRPPQGVNPWTLSYMDWVRKGVHFEPRAQQATLLDYLHEVEHMAARVTRLEQAIEEAVQLAPQQMREVIEALQALRGIAKVSAVTIVAELGELSRFAEARQLMAYSGTVSREHSSGESCKRGGITKTGNVHLRRIVVEAAWAYRHAPAVTACLRKRQERVSEEVKEIAWKAQHRLHGRYRKLTARGKNTGKVITAVGRELLGFIWAIGVKVEAEQRKALGQAA

SEQ ID NO: 501458 - protein, 457 aa, unidentified
MDRKGKRTEGLEEAHPFTGMSQVNPHACGVDIGAVEIVVCVPGDENTQVVRAFGNYTVDLQAIGKWLTEYGVKTVAMESTGVYWIPLFEELERQGFECLLISSRSLRRVAGRKSDITDAQWIQTLHSYGLLESSFRPQAELVALRTLLRHRGQLVEHRSPHILHMQKALLQMNVQLPQAVTDITGVTGLTILRAILAGERDPQELAAMREPGCKKSAEEIGKALTGTWREEHLFILKQSLEMYDFYAQQIQACDEEIERVYGLTRPDWEAGEVKPLGERKRSSHSKNRPHNPEAIRKHLKRISGVDLSVVDGFGVSLAQTVIMEVGTDMSKFPSEKHFCSWLGLAPKHEISGGKVLKNKTLKTKNRAGQAFRMAAQSVKQADCVFGVTYRRLKARLGPAQATVATAHAIAKVVYRMLKYKVEYETISVEEYEQKYRDQQFKYMRKKAAKLGYQLVPA

SEQ ID NO: 501459 - protein, 473 aa, unidentified
MSTSKRPVSTGGSGPGIAPSKRGSHKKEAGQAVFQPNAAGIDIGAREIYIAVPADRDDDPVRKCGTFTSDLDQMAEWLVSCGITTVAMESTGVYWIPVYDAVERHGIEPCLVNPRNMKNVPGKRTDFHECQWIQHLHSLGLLHAAFRPESQVCAVRSLMRHRNDLVQMASQHVQHMQKALTQMNVQFQHVISDLTGLTGLAILDAILAGERDPAVLAKLRDPRIKADQETIRKSLEGNWRIEHLLVLKQRLSLYRSYRDQIHDCDKEIEKLVAAFASQVDPAAKPLPEDRKKRQRQRKKKSGSPDFDMRTEAYQLFGVDLTQIPGLMTLVFMLFSEVGRDMTRWPTAGHFVSWLGLCPDNDISGGKVLWRGARRTKNRAGALFRMAASSLYREQSPIGNYLRRMKAKLGPAAGTTATAHKIAIIFYTMVKNQVEYDASLWAKRDLMREKQLEARLHKQAAQRGYKLVPLEAAA

SEQ ID NO: 501460 - protein, 401 aa, unidentified
MKRLSGGIDIGCESHHIIILDEEDNFLYNQKVAHKLNEFSENIKLFKQIEKKEGGKLSFALEGKNGYSTPLDRILLDQGFTLYNVDNLKLKRFREAFAGEWRDDERDSLMLSKMLKLKDYINSERERVFIKIEKPSLVTESLKLLSRHQQTLIDEKIRLINRLGKKLLEVCPQILKLGKLKNKKITAILAKYPDFSKYKRITLKSLLKIKGIGKKGAFFLLKRLNNIEYMPGLTDIYKTIILSYAKRIVQLQREIEDIDKKLDEIGKKNKEVNHLKTIPGVATKLASRFIGEIGDINRFPSEKQLAVYCGVACVDNNSGKVTKARAVYKANKICKKTLITMAGCSIRFSPQCKAYYLKKRAEGKSHNHTLRCLARQLIKVIYRMLTEDREYIVRKDLKKVA

SEQ ID NO: 501461 - protein, 374 aa, unidentified
MGDYSEVFVGIDTSKLRNAVAIAQGERNGEVRYLGEIENTEAATGKLVKKLAAQHRRLTFCYEAGPTGYGLYRLIKTLGHECVVVAPSLIPKKPGDRVKTNRRDALNLAKLLRAGELTAVWVPDARHEAMRDLVRAREAAVDDLKSKRQQVLSLLLRLGRHFTGKRTWTRAHMNWLVSQKLAHREQRIAFEEMLLAVRQANERVIRLERAIAAVVPDWSLATVVTALMALRGLDLISATIFLAEIGDLSRFASPRQLMAYLGLVPGEASTGDRVWRGGITKAGNHRARRILVECSWSYRHPPRVGKKKLAKVEAAPPAVQEIAWKAQARLTARYRALARRGKRPTLVVTAIARELSGFIWAVSRAVGAPATPAR

SEQ ID NO: 501462 - protein, 345 aa, unidentified
MEIVTLGIDLAKNLFALHGVDAAGKIVLQHPAVKRAKLLEVTASLPPCRIGMEACSGAHHWAREMIRQGHDVRLIAPKFVAPYRMSGKRGKNDAADAAAICEAVTRPAMRFVPVKTVEQQSELFLHRARQGYVEQRTGLINRIRGLLSELGIVLPQKADTIRRELAYLLEELPGHCNTVMGDAITDLERLDARIAEYDRHIALCAKTHAAARRLMQLAGIGPTTASALVATVGDGHDFASGRQFAAWLGMVPGQYSSGGKQRLGRITKAGDRYLRTLLILGARSVLQSGKKKEDVISRWTRDVEGRRGYWKAVVAMAAKNARLAWAVLHHGDDFRLYGQEVATGA

SEQ ID NO: 501463 - protein, 350 aa, unidentified
MKRLEAEMKQIGFNTHSTRTVATVVNDRGKKILRREIPTRELELIDFMQSIPGPKRVALEESQVADFVARMIMPYATEVIRCQPQHNRLISESEDKCDNQDSYSIAELLYLNKLKSVHHPPWEYRQLREAVRAYWTSSRDLARAKSRLKACFLFNGIHCAGEKVYSQRYRKKYRERFHGRSGNLNLLDLHYEALDSCRHTKAGHVRVLRNLAKPLHEELERLQSIPGIGPIGAYTLLAYLENGWRIPNKRKLWQYCGIGVRRHESNGKGYKGASRKGNRYLKNTLMTAAAAVAARRTGDNALAQRWHAGLAGGVAADRLRRNLARKIAVLAQYVLRFKEEYNDERVVTTP

SEQ ID NO: 501464 - protein, 464 aa, unidentified
MKRHRRSVPKPRRSPSVLEHLNPNAAGIDCGSAEHFVAVPADRDPIPVRSFATFTGDLHRLADWLTACGVTHVAMESTGVYWMPVFEILEARGFTVALVNARHVKHVQGRKSDVSDCEWLRDLHILGLLRSSFRPADAIVALRAYLRHRATLIESTATIIQRMQKALVQMNVQLPLVVTDIAGVTGLRILRDIVAGQRDPQQLAQHRTYQCHASEAEIVAALTGHYRPEHVFVLQQNLELFDAYQRQLTACDTAIETHLQQLTAHVSAPTAPLPPARRRHTLFGNEPHFEIRTPLHRLTGVDLSQIDGIGPYRALRLLSEIGTDMTRWATEKHFTSWLTLAPNNRISGGRLLSSQTQPSANRAAAILRLAAMTLSRTQTALGAFYRRLAYRIGKAKAITATARKLAILVYRTLKDRLVYADPGANAYDVQHRVQVVRRLRQRAANLGFELVTRTTGEVIEGAVS

SEQ ID NO: 501465 - protein, 358 aa, unidentified
MEHHILKVALGVDVSKDNLAVCLCRLTVNLTKEFEDPFEVSNDLPGFKKLIRWLDKQVASRENLWIVMESTGIYHEAFVYYLYEAGFNVSVMQSGRVKRYAQSLDQRSKTDALDSRMLAMLGCERALPLWTPPDPILRELKGLSRERSFLLKEKQIEKNRLHASEHSVYSNKRELRRYKQRLKLIARQLEEIEKEMMELINASSYLKGRIKHLESIPGISFVSAATVVGETLGFTGFTNAKQLTSYAGFDVVLKESGAYKGKTRISKKGNKNIRRALYMPAMTAVRCNPTLKKFYERVKPTKAKPMIALVAVERKLLVLMYSLWKNEINYDPEYEQKKTARTEVLAAQDRSNLALTSS

SEQ ID NO: 501466 - protein, 375 aa, unidentified
MKDKVRFLGLDVHAETIAVAVAEPDGEVRSMGIIPNRAESIRKLIKKLGPSEHLRACYEAGPTGYVLYWQLTELGVECAVIAPTLVPTKAGDRVKTDRRDAMKLARCHRAGDLTAVWVPDAATEALRDLVRAREAAKQDQLRARHRLSKFLLRTGQRPASGVKAWTELYMAWVRQLRYAQAAQEFVRLDLLHEVEHMGERVKRLEEAIREAVKLAPVAMQEVIRGLQALRGIAEISAVTVVAELGQISRFESARQLMGYSGAVPSEESSGQRQQRGGITKTGNAHLRRIAIEAAWSYRLKPAVGPGLRKRQQDVPEEIKEMAWKAQLRLHKRYARLAAAGKDQRKIVTAVGRELLGFIWAIGVKTETTARLRVAA

SEQ ID NO: 501467 - protein, 341 aa, unidentified
MKNKSFIGIDISKNVIDASIFCEETPIKDFPHAVFNNSHKGFGEMCTWLKKNHVVLSNSLFGMEFTGSYSMELEKFLNARKYQFCMLSPHVVKHYPMGPKDKNDKIDSAKIADFLYRYDGTECVKPYKMPDKTMQRLKALTKERKFLVEQRTCFMNRRQLCTTKEAAQLYDGYIKEFSHDIENIELKMQNLLETDDSLSTTYKNLLTIPGIGFVNAMNVIVITRNFTAFETARQYASYIGVAPHFHTSGTSVKWRPRPSARCDGQAKADLSMAASVAVQCDAELQSFYNRKLGGKQDSDTKRKALNAIKFKLVLRMFAIGKQNREWEPLDSKSSNEKLAIS

SEQ ID NO: 501468 - protein, 310 aa, unidentified
MNKTLVGIDIAKAHFDLYDSLTHKHLRFDNNTSGIKKCTRYLVPLKPTLIVLESTGGYELDLVLSLQETKLPVAVENPRRVRDFGRASGRLAKTDRIDAVLLSEYAAALNPLPQPVKSPQSRKMKALVARRHQLLQMRTAELNRRDHAKDKDIDQSIKTIIAVFEKEIDRIEQQLRTLIEATPDYRKKLQILTSVPGIAETTATMLLVELPELGQLNRRQIAALVGVAPINRDSGTFRGKRMTGGGRRLVRTRLYMPTVVACHHNPQISAFYKRLVEKGKTKMTALVAAMRKMITIINTMIAKNQSWCLQ

SEQ ID NO: 501469 - protein, 356 aa, unidentified
MQTQVTKKIDFSDKDLYIGLDVHKKSWSVTIVIDGMEHRTFTQPPDPRALNNYLQRMFPGGIYNSAYEAGFCGYGIHRELNSLGIKNIVINAADIPTTQKDKLQKRDPVDSRKIARSLEKGSLHGIHIFNRELEELRSLNRTRFYLMRDLRRSKNRIKSFLQYYSEPIPPEFDNNQWTLKFVSWLKQVKMETESGHDAFSHLIESYEHHRQQLLILSRIVRLRISQYDKELYSLLKTISGIGPLTSSALISELGDINRFKTIDQLSSYVGFIPRIRESGETTHTGGITFRCNTFLRTLLIEASWQAIRMDPAMMQYYHQHLVNNKGHKVVIKVARKLLNRVRYVMKNRQPYITGVA

SEQ ID NO: 501470 - protein, 331 aa, unidentified
MDEVQRFVGIDVAKEQLEVFIRPGGESFAVANDEAGIGELRRRLEPADFVILEATGGLEMPVASALAAAGLAVAIVNPRQVRDFARATGRLAKTDRLDAEVLARFGEAVRPEARPLADEQAQALEALVTRRRQLIEMLTAEKNRRARAPKVLHRSIDEHIRWLEKRLSGLDAELAELIRETPLWRERDELLRSVPGVGKVLSSTLLAQLPELGMLNRKQIAALAGLAPFNRDSGNMRGSRCIWGGRAQVRRVLYMATVAGVRSNPTIRTFYLRLRTNGKHAKPALIACMRKFLVILNAMLHNKTHWQTPALISPTAPPFPLLGAVSEHGCC

SEQ ID NO: 501471 - protein, 355 aa, unidentified
MNDAKYIGLDVHQATISVAVLDSAGKLVMEAILETKAETILQFIHGLHGSLHVTFEEGTCAAWLHDLLKPHVTQVLVCDPRKNALIRAGNKSDRIDARKLADLLYLNKLNPVYHGETGIRALQELARSYLALTRDTTRVMNRLKALYRSWAIPCAGQRVYAPRYRSEWLAKITEAGVHRRAEIYYQRLVALRSLREQVRRDLLAEGRKHTAMNLLRQIPSIGPIRAVLLIALMQTPHRFRTKRQLWAYCGLALKTSTSGEYQIVEGRLQRSKKFLAIRGLNANHNHDLKNIFKGAATRAAAVPGPFQEFHAGLVTRGMKPTMARLTLARKIAAITLIVWKKGVSFDADHLKQQAA

SEQ ID NO: 501472 - protein, 340 aa, unidentified
MKKLYGAFDLHSSNNYLGISDEKNRRVYKKRLPNQPDVILAELEPYRNDLVGIVVESTFNWYWLVDLLMEEGYRMHLANPAGIQKYGGLKHSDDKDDTFWLAHLLRLGILPEGYIYPKEERPVRDLLRKRGHLVKLRTSLINSLQGIIHRNCCVKLNATKIKAIKVNNVAPLLSGQEDLALSGMVSKEAIDYLGQQIRKVENIVLGKVKLKKEYLYLLTIPGIGKILSLTIMLETGPISRFQKVGNLTSYCRKVPSKWTSNDKKKGKGNKKNGNKYLAWAFSEAAEFARRYDDHARVFYNRKAAKKNFMVAHSALAHKLARAAYYVMRDQVAFDPQKLFA

SEQ ID NO: 501473 - protein, 422 aa, unidentified
MLEETHDTEEIIARVAALDIGKAELVCCVRVPSAQGSGKRAQEVRTYPTMTRSLLVLADRLRELGVTRVVMEATSDYWKSPFYVLEAHGLEVWLVNAKDVKHLPGRPKTDRLDAVWLAKVAERQMLRPSFVPPPPIRRLRDLTRYRADLVAVRTAEKNRVEKLLEDAQIKLSVVASDIFGVSGRDMMAALIAGERDPKALAQLARRRLRAKRSLLEEAFYGHFSDHHAFLLQTMLARIDQASADIATLEAHIEAEIAPFAQAADRLDEITGVGRAAAQVIIAEIGVDMGRFATPGHLASWARFAPGVKESAGKKKGKGTTGHGNPYLARVLGEAAAAAGKTSTFLGERYRRIARRRGTKKAMVAVGRSILIIIWHLLSDPDARFHDLGPGFYDTRIDADRRKRNHVRQLEALGYTVTLQPAA

SEQ ID NO: 501474 - protein, 356 aa, unidentified
MVTGLKHQKEKRSMDYFAGLDVSVKETSVCIVDDTGKIIREVKVASEPEALLAVLKNPAYHFKRIGLEAGPLSQWLYSALAEAGLPVICVETRHMRAVLKAQINKTDRNDARGMAQMMRVGLYRPVHVKTLRSQKLRMLLTHRKLLQSKAIAIENDLRGTLRNFGLKVGTVGTMKFEARIRELVENVPDLVVLVEPLLIVRRTLREQIGVLHRRLLTLVRDDEVCRRLMTVPGVGPVVALTYRATVDVPTRFRNSKAVGAVFGLTPSKHQSGEIDRTGAISRCGDDMMRAMLYEAAHIMLVRSTKWSWLKAWAMQIARRRGLKKAVVALARRLAVIMHRVWVDGTEFRWTRQTAAA

SEQ ID NO: 501475 - protein, 343 aa, unidentified
MYFIGLDVHKKTISYCVKDAAGRVYQEGKIGSTRRELDEWIRTMPQPRTIAMEATIFTGWIYDHLLPHAEKVKVAHPLMLRAIAAAKKKNDRIDAGKIADCLRCDFLPECHMATTEIRDRRRTLRYRSLVIKQMVQMKNRVSGLLMETGVSYNKQRLHKVGYFAELMTANEDVHESIRPLLKLSRELISRSQKLDYALLSSLQRDPLLKERLRRLRTVPGVGPITALTWALEIGDFTRFSSIKQAISYCGLCGDEKSSADKVMRMPISKQRNKHIQRVLIEAAKLAPRESPELAVIRARELERGNPNRATLAVARKMVSYMLAVERRNQDFVPAEEFSRTAAA

SEQ ID NO: 501476 - protein, 418 aa, unidentified
MKTQNNTETKTDRVGKVREAGKARSSVQREVQEVMTELVLKLSQKLEPAPDRMSEAGRQECVLGPNRGRLTVGVDLGDQWSSYCILGLEGETLAEGQIQTTRPDFREFFQSVAAARVVMEVGTHSAWARDVVAGCGHEVLVANPRQMEGPKRRKRKNDRIDAQRLARMGRVDPQSLCAVEHRSVEVRQDLLAVRARDAVVAVRRDVINTTRGLVKGLGARLPKCSTASFSKKAEGALPAEVSEVLLPLVRLVESLSNCIKAYDERIEKLATEKYPHTEFLRQVKGVGPLTALAYVLTLEDPKRFAKSRDVGPYLGLVPKQEDSGDRQPQLRITKMGDMMLRRLLVGGAHFILGPFGPDTDLRRYGLRLCALGGKNAKKRAVVAVARKLAVLLHRLWVSKEVYEPLRHAPPPAPEQEAA

SEQ ID NO: 501477 - protein, 412 aa, unidentified
MKQQADRAAGLDVHRDNVVAATRINEPGGEVVVTKKRFPTTRRGIGELAAFLTDEAVTRVAMEATGVYWKPLYYALEGLFDELWLCNAQHVKNVPGRKTDLSDAEWLADVAAHGMVRPSFVPPPEIRELRELTRYRKTQVDARGREIQRLEKTLQDAGIKLTSVASAVWSVSSRKIVEALIAGERNPAVLAGLAVGKLRPKAGQLEEALDGRFGAHHGFVCRQVIDHIDFLDDSIAKLSEEIAARLLPFEAAVRLVRSVTGIGELSAQAIIAEIGIDMSRFPTAGHLCAWAGVAPASCESAGRKRPAGTRHGSTWLRRVLIEVARAASRTKGSYFSAQYSRIARRRGTNKAAVAVANSILAVIWHVLTNGCIYEDPGADYFERRHDPAVEAKRLQARIEALGFDVTLSPKAA

SEQ ID NO: 501478 - protein, 340 aa, unidentified
MVALKSFTMKKIFHFIGIDVSKETLDIALIKNNDKSHIYSFKVTNNLDGFKKMKRWLRSEKIVLKQAVFCVEHTGLYSKAVSRFVLSEQSNLWMEMSLKIIRSMGIQRGKNDKIDAIRIALYAQRYQDEMKLYEPPRPIVEKLKTLLQLRKTLIISRNHLQVPCKELLAVDCQAGKEAFKLIAPAIKALQKSIDAFNEQIEMLIASDEQLNHYFEIGTSVPGMGKITLAYIICFTNEFKNFSSGKQLACYSGVVPFEYTSGKSIKGKPHVHNMANKTLKRQLHMGALAAVTYYDEFKCYYKRKLLEGKPKMLILNNVRNKIILRLAAVIKNDKPYLKRVA

SEQ ID NO: 501479 - protein, 342 aa, unidentified
MEQVSVVGLDLAKSVFQVHGVNAQGEAVLRRKLSRGQLLKLFEKLPPCLVGMEACASAHHWARELAALGHEVKLMPPQYVKPYVKRGKNDAADAEAICEAVTRPTMRFVGAKSPDQQATMMLHRVRKILTRQRTQISNALRAHMAEFGIVAAIGRGGLERLIAVIADQEDARLPDEARACLAVLSTQLEMVKEQILDNDRRILADARKTEAGRRLMKIPGIGPLLASAIVACVPDPSTFGGGRGLAAWIGLTPRQNSSGGKERLGSITKAGNTYLRELLVVGAMAVVRQAKLGSAKWPWVTQLLARKKPKVAAVALANKNARIIWAMMATGEAYREAELAAA

SEQ ID NO: 501480 - protein, 344 aa, unidentified
MKISTLSIDLAKNVFQVAGFNSNHKRECNKRLNRPKLNAFLANTPPCRVVMEACYSSHYWGRVFSSYGHTVDLIPAQHVTPFVRGNKNDSNDALAIYEASLRPHIKFVPIKTEAQQEILMFHKIRERLLQNRIAATNQLRGLLVDFGYVFPVGIKAFEQGIIALESDSELRPQLRIMVSDIYTEYKTLVKRIKAIEAMLTAHVERDTNAKILHSIPGVGVLNASAYAASIGNGQAFKSAKELGVWLGLTPKQYASGDKSKMSGITKRGNSYLRKQLIHGARALIARSHHKTDALSQWINQLREKKHFNCLVVATAHRLARLMWVLLTKQALYSPQYVQNTRKDA

SEQ ID NO: 501481 - protein, 317 aa, unidentified
MAMQAGKLIVGADVAKAELVIHHDGSDEVIKLKNSKPDIKRWLKQQPLNTAIAVEATNVYHLDLVELAHGLGFSVYVIDGFQLSNYRKSVGGRVKTDPSDARLLSRFLKNEGEDLRPWSPPPAVYGKLQSLLRRRAALVSARTAMTQSWANESLLKSAFESFVKSIDRLDLLMQKKIKEVLREAGLHDQVARCQAVEGIGFLTATALVMAFVRGEFKNSDAYIAFLGMDLRVSDSGQKTGRRRLTKRGCSEIRRLLHNAAMAASKSTAWKGVYEQHRNSGKATTQALVILARKLARVAFALMKNQDEYVTKASKLAC

SEQ ID NO: 501482 - protein, 322 aa, unidentified
MSDSVLGIDISKQKFEVALLAADKIKNKSFSNTTEGFEALALWLKKRGIQKVYACLEATGSYGEDLALFLHEAGQTVSMVNPARVKGFAQSELIRTKTDKIDAGIIARFALAMKPDPWIPPPPEIRSLQALVRRAESLIDMLTQEKNRLSTAHESVLPLVQEHIAYLNQEIEKVRQQIADLIDRNPDLKQKEKLLLSIPGIGKVTVAAILAELYNLDRFTHVRELVAFIGLAPKERISGSSIKGKPRLCKIGNARLRKTLYMPALVSIQYNPVIIQFYDRLKEKGKNGKVIVCAVMRKLVHIIFGILKSGKKFDPNYKPNFA

SEQ ID NO: 501483 - protein, 389 aa, unidentified
MSQPFDASRSLTALEQDSTIIAAIEIAQSKWLVAAVVPGIKRQPLKKLDADEESLLKLLYRWRKEADQAGHPIKRVVVAYEAGRDGFWLARWLRTRGVEAYVIHPNSIAVSREHRRAKTDRLDTELLLRALLGWLRGEKRHCSMVAIPTIEEEDAKRPNRERDSLVTEQTRIGNQIKAILTRFGIRRFRLKLRKAEQQLKELHTGEGSLLPENTRAELFRHLARLHMVHEQIRAIEKARLQKLEANRDRKKSPYAMVHLIARVVGIGVETADMLVTEVFSRQFRDRKAVARYAGLTGSPDESGKRRREKGLARAGNARVRTGMIRLAWRVLRFQDGSALAQWFQTRTADGRGNTRKTMIVALARKLLIALWRLVTTGEMSDGIVLRPAS

SEQ ID NO: 501484 - protein, 420 aa, unidentified
MEEVTEEPAELVERVAALDIGKASLVCCVRVPHESKPGARRQEVRTYATVTPALLELHDWLICQGVTRVVMEATSAYWKPPFYLLEDDIDCWVVNARDVKNVPGRPKTDKIDSVWLCKLAERGMLRPSFIPGRPQRQLRELTRYRRTLTQERSREKQRAEKLLEDAQVKLSSVISDIFGASGRDMLAALIAGQRDPHALADLARKKMRAKMSVLRQALTGHFTDHHAFLLGMMLDRVDALTAQIDTLTARIEQAIAPFAAQVAQLDEIPGIGVTTAQEIIAEIGADMTRFPTPGHLVSWAKFAPKARQSAGRSKAASTGQGNPWLGGTIGEAAAAAARTSTFLAARYKRIVKRRGKKRALVAVGNSILTICWHLLCDPSAHFSDLGPDWHDRLAPQRRKRQLIAELERLSGKKVTLHNTA

SEQ ID NO: 501485 - protein, 427 aa, unidentified
MAYRVAAVDVHKKMLAVVVADVGGEGDYQFERRKFGATPDQLHVLADWLVQQEVEEVVMESTAQYWKPVWGALERYWKPVRQKREGATKMSGALHLCQAKSNRGPRGRKSDFADGERMIKRLVAQELVLSFVPDAEQRLWRTVTRRKHQLTRDKIRFQNQLEALLEQAHIKLSSFVSDLLGVSARRMLKALAEGETNPAVLAALADCRLRATPEQLRDALGACTQLNGVYRRLLKMALEELKLKEDQMEQLDREAANLLQGHQDAVQRVAEVPGFGVDSAVQMIAEVGPEAAVFETEKHLSSWVGTCPGSEESAGESKGTRSPKGNRTMRRLLNQAAQSAVKVQGSIFDITFRKLLPRLGYKQAIWAIAHRLGRLLWMILRKGVRYQERGPEVSAKSLRTRTARMIKQLQNLGYRVEGGQLPPGNPA

SEQ ID NO: 501486 - protein, 367 aa, unidentified
MKNTIVHHEGAASLKVAGNKIKLSGSIIKIGLDVHARIYVAVAQYDQLLPKPARRLAPLEFVPWVEQLLRAGHTVHVVYEACGFGFGLYRELEALGVHCYVIAPRKLDEQFTRVKTDPRDATTLCQRLSRYLEGNTRELAVIRVPSEAEEQARHVSRQREQLVRHRQKLEAQGRSLLINHALPAPAHWWKNQTWSRLTKLLPAWICLRLEVHRPALLILEQQISALSVELEAAAPALVPTGVGKLTTVVMTREICSWERFSNRRAISSYTGLCPGEYSSGTKRIPGSVTKHGNPRLRAALVECAWRMVRFQPQYPPVKKRLSVLAKGARATGGQRKKAIVAVARHLAVDLWRLHTGRNTAAQLGLTI

SEQ ID NO: 501487 - protein, 513 aa, unidentified
MLRCRIGVWPDSVQVPGGRLSLRLPTQLNGVALFRSAARRAPLTRRGSRRDCPARSSTARPVVPYRHERRREQQHAAQRTRHHRVDPHKLSATIEVVDHHERCLGSGRFSTDRAGYTAMRTYAKAWPERVWAVEGANGAGRPLAQRLLEAGENVVDVPAKLAARVRLFDTGHNRKTDALDAHSIAVVAVRIQGLRVLQVDGELEALRMLTDRREALTRRRIQTVNRLQALLADPLPGQAKKDITALQAKAMLATVRPRDLTGKTRRRIAAEELAELIAVDTKITEATAELKTIVLSRGSHLMDLHGVGPVVAARVLADVGDVTRFADRNRFASWTGTAPLDASSGEQNRHRLSRAGNRRMNHTIHIAAITQIRLDTDGRTYYRRKRAEGKKPLEALRCLKRRISDALHRQLLADHQPTADLERRAGPGGHCRASQESSAVDPPPHIDTSDQPLPRPAPQTLPAAATRANPRPGSAPQPTRRRAGAVKVERPTGRTTLTVTSAGAHFKEPIPAS

SEQ ID NO: 501488 - protein, 450 aa, unidentified
MGNGSGVSRGDRNRNARLERLRALVPVVNAIVGIDLADAKQMIVVTDHDSKVLARRTFRCRAWDLGEALDWAALQARARGFAGVTVACEPTGHRWRVLGQLAGVRGMPFVCVQPMLTSWARRSEDLTFDKTDEKDAVLIARLAAQLRCYVPEPVDEIWGRLRHLGSRRAQLLAEAGSQVQQMRALLECAWPASLDTARQPFRGATWPAAMSVILDRDRGDLARTRRLGLARFEAAVRREVIRRARQKPCIRIVRQLFAALTDQAGVIAHRPGALERVAFLMDDWCHTNRRLADTETRMTGILEDLQLTELVTSITGLSPVGAAAILAETGDPRRFATARALVKHAGLAPREKLSGTFVGRTKLTGQGRPGLRLAAWRAVWGAQRANPVYAARLTHLTSREQNRLTVTQAQAVNAAAILRQLHAVITTGQRWDPVIATCGARPSTMTPIAA

SEQ ID NO: 501489 - protein, 446 aa, unidentified
MSTLNSAEEKPFYAARIGLDWADQKHFWTMLTAEGKRTRGELKHTPEAIEIWAVELARSFGGRPIALALEQKRGALVAILSKYAHVHLFPLHPTNLSHYRSSVCASGAKSDPSDADLILDYLVKHPEWLRGLRPDTVETRSLQFLVEERRKLVNQHTSQLQILIYWLKQIFPQMLGWFDDMSTPLVGDLLLRWPQLPALKKASQNTLRKFFVQHNCRSEERIQQRLDEIGQAVPATTDTALLNTADLCIRLAVQVLAAQRAGIAEFDRQIEAIYEAHPDRFIMASLPGAGPALEPRLIAALGTNRERFESASGMACCFGIAPVTESSGKSCWVHWRWACSKFVRQTLHEWANCSIRSCGWAREHYDKQRGKGKGHHASVRSVAFKWIRILFRCWRDRVPYCEERYLKALRMHGGAVAAVVGQPMPLPPAVQWESCGGFSKIVELSS

SEQ ID NO: 501490 - protein, 365 aa, unidentified
MQKISTMRRSGKNIFRGQLTIGLDLGDRFSAYCILSEAGEIALEHKLATTPEAMKQVFASMPRCRMAMETGTHSPWVSRLLAELGHEVIVGHAQKVRLITKSRRKDDRLDARTLARLARVDPELLSPVKHRSAQAQLHLAEIRARATLVSARTALINAARGLAKSYGERLQRCHTQQVRRETANGLSAGLREALQPLLQEVESLNERIQEYDRRIEKMARATYPETALLKQVKGVGALIAATYVLTIEDPHRFRKSRDAGCFVGLQPGRRNSGESEPQMRISKEGDEYLRTLLVQGAHYILGPFGEDSDLRRWGQRLSARGGKNAKKRAVVAVARKLAVLLHRLWVSGEVYEPLRNSHKAMSAAA

SEQ ID NO: 501491 - protein, 417 aa, unidentified
MSDARDVLYVGVDWADTAHRVIVLNAARQVLHDWVVPHTGEGLAGLAARLVALAEGDAGRVAVALEMPRGPLVDALLERGCHVFAINPKQSDRFRDRFSPAGAKDDRRDARVLADALVTDRGAFRALAPEDPLVIRLRELSRVDAELQQELRRLTNRLRAQLQRFYVQPLALCPAADEPWLWALLALAPTPAAAARLREARLARLLRTHHIRRVTAGEVRAQLQRPALPVAPGVTEAASSHVALLLPQLHLLQQQRRACAPQIEQLLQRLAERPDAAEPHREHRDVTILRSLPGVGRTVAATMLAEASGPLAARDYHALRTQTGVAPVTQASGRRRLVQLRTACNRRLRQAVYHWARVSTQVDPLSRAHYTALRGRGHSHPRALRGVADRLLAILIAMLRTGTLYDASYRRAATLVA

SEQ ID NO: 501492 - protein, 344 aa, unidentified
MKITTVGIDLAKNVFQVHGVNEFGKTVVKKQLRRDQVAEYFVNLPTCLIGMEACGSAHYWARKLQGFGHTVKLMAPQFVKPYVKTNKNDAADAEAICEAVAWPNMRFVPIKNVEQQAVLALHRVRQGFVKARTAQANQIRGLLGEFGLIVPQGIGYIATRVPELIEDASNELPGSFRVLVQRLLDHLKELDRQVGELEVQIQTWHRSSEVSSKLAKIPGIGPITASALVASIGDAKNFDSGRQVAAWLGLVPKQHSSGGKQNLLGISKRGDTYLRTLLIHGARSVIYRAGQKPESCSWINGVVNRRNKNVAAVALANKNARTLWALLAHEREFRSDYTTANAAM

SEQ ID NO: 501493 - protein, 414 aa, unidentified
MEVVNRHCAGLDVHKKTVVACRIVPHREGEWEKEIRTYGTTTGALLELADWLRAGQVSQVAMESTGVYWRPVFNILEADFEVVLVNARHIKHVPGRKTDVRDAQWIAELLQHGLLTASFIPPAPQRAVRELIRYRTKLLQERTREVNRLQKVLEDANLKLGDVISDVLGVSGRAMLQALIVGQDNPAQLAQMAHGRMRSKIAALEQALTGRVRDEHRFLLKLHLEHIDYLTERVTELQQEIDRRIVPFDHNHLLDRLDTIPGVGLLTAQGLLAEIGTDMQRFPTAGHLASWAGLVPGKQESAGRNRSAKTPKANRHLRTILVEAAHAAGRSKDNYLAAQYRRLAARRGKKRAAIAVAHSILVITYYLIQRGTAYVDLGAHYFDQRNQQATQRRLVKRLEQLGFSVSLQPLPQAA

SEQ ID NO: 501494 - protein, 363 aa, unidentified
MQKISTMRTRRKNIFQGQLTVGLDLGDRSSAYCILNGAGEIVLEHKLATTPEAIEQVFASMPRCRIAMETGTHSPWVSRLLTALGHEVIVGHAQKVRLITKSRRKDDRLDARTLARLARIDPELLSPVKHRSAQAQLHLTEIRARAVLVNARTALVNAVRGLVKSYGERLRKCDTQQVRREASNGLSAELHKALEPLLEEIESLNERIKEYDRRIEKMAKEMYPETAVLKQVKGVGDLIATAYVLTLEDPHRFRKSRDAGCFVGLQPGRRNSGESEPQMHISKEGDEYLRKLLVQGAHYILGPFGEDSDLRRWGQKLAARGGKNGKKRAVVAVARKLAVLLHRLWVSGEVYEPLRNSQMSAVA

SEQ ID NO: 501495 - protein, 357 aa, unidentified
MLEGLESLSGSVGQSGVFLNPNSCMGFEPEPSKEGSWMMAQNDLIVAGIDVAKDKVDVCIRPLSLRRTFASTTEGRRELASWLRRKKVGKAVMEASGGYEREWAKALRDAKIEVRIVDPKRVRDFARSAGRLAKNDMIDAEMIAWFAETFDEAPGQAHDAVREELAQIVNARLGLIDLQTRLLNRDEHAGPEPVQKMHARMLKKIAVEIAKLETVIAAMIKATPRFVELAEIIESVPGLAETTSATLIAKMPELGQVNNKIGAALLGAAPYDDDSGCRRGERHIKGGRRKVRNLFYMACLGAATQHNPVLKAFYDRLIAKGKEKKVALVACMRKLIVILNIMIARRQKWDPNLHVLG

SEQ ID NO: 501496 - protein, 446 aa, unidentified
MKKSSRMSIVHPHAAGVDIGAEFHVVAVPPDADTEPVRTFQSFTGDLQRMSDWLKTCHITTVAMESTGVYWLPAFEILEAAGFKVILVNARDAKNVPGRKTDVNDAQWLQKLHSFGLLRASFRPEHDISVLRSYLRQRERLTEYRAAHIQHMQKALMQMNVQLHHAVSDITGVTGLSIVRAIVSGERDPSMLIQYRDVRCKKTPEVLRQALTGNWQPEHLFALEQSVAFFDFYQEKIRECDDQIETSLLQLSTGTEEPEGVLPSARHRTKQPNQLSFDVRPLLWKITGADLTQIHGFGPYLALKFIAECGTDMNRWPDASHFTSWLCLSPGNKISGGKVLSSKTRRSSSRIAAALRLAATTIGRSDTALGAFYRRLSSRIGKAKAVTATARKLAILFYNTLKYGQKYVDPGADYYEERYRSRVLDGLKRRAKSLGYSLQQDPELCV

SEQ ID NO: 501497 - protein, 393 aa, unidentified
MRKSKKQQKPLNDLSRSLTPFDPNHTLIIVVELSKKTWLVAGIIPGIERQPLKKLTADENELLKLLERWRAEAEKAGHKIHRVAVAFEAGRDGFWLARWLKAREIEAHVIHAASVPVSREHRRAKTDRLDTKALKRVFLGWLRGERDHCKMCAIPTFAEEDAKRPHRERETLVGEQTTIINRIKGTLARLGIRNFNPKLKKAPERLENLRTPEGEPIPPNTLAELHRDMERKRLVAEQIRQIEKARLEQLKQAPKTGPNLMVLLLARVIGIGIETADMLVKEILSRNMRDRRAVARYAGLTGSPDESGNKRREKGLARSGNARVRRGMIQLAWRFLEFQKESALAKWFEARTENARGSRKKMIVALARKLLIALWHFVRDGVVPQGIVLRPAH

SEQ ID NO: 501498 - protein, 383 aa, unidentified
MSWGPTAFFVNPNSCKGQAPAHKEGTEEMVVQTVQDIGIDVAKRWLDVAVFQTQEQAHFDNDKDGWAKLVRWLRGRPVRAIGMEPSGGYERGVAKALRSVDLPARNVNPHKLRHYARALGRLAKNDRIDALLIARYTAELPTRPVRCDPIAEQLADLVVARRQLSDDKVSLANQLEQLREPMVKRIFTQRLRRIEFDIALLAKRMAELVASQPALAAKDRLIQSFHGAGPVLSHTILALAPEIGQASRREIAALAGLAPYDFDTGTFKGRRIIWGGRHALRRVVYMAALTASRSNPVLKAFHQRLVAKGKEPKVALVAVARKIMTILSAMLRHKTHTKLENTVAHPTSLREATFSHRGRREERTIHITSNTNVFTSASGSAMA

SEQ ID NO: 501499 - protein, 345 aa, unidentified
MEPMYYIGLDVHKRKISYCVKDGAGKVYSEGSLAATRLDLDVWMKTLPQPWSAAMEATMFTGWIYDHLKPHAAALKVAHPLMLRAIAAAKKKNDRIDAGKICDCLRCDFLPECYMAPTAIRERRRTLRYRNLLVRQMVQMKIKISSLLMEAGVSYNKQRLHKAGYFRELLAANPDINEGLKPLLQLCRETVVRLQKTESAMVRSLERDSLLMDRVERLMTIPAVGPITALTWTLEVGDVQRFSSIKKAISYCGLCGAEKSSGSTVQRTPLSKQRNKHLQTTLIEAAKMAPRNSPELAMLYDKEKQKGNANRATLAVARKLVAYLVAVDRRQKEFLTVERENRTAA

SEQ ID NO: 501500 - protein, 347 aa, unidentified
MNLSRAGVDIAKSVFHVHAVDRHGQPKWRAKLKRNEWLDALCQRLAPGAEVGMEACASAHHWARKLQARGFRVKLIGAQFVKPYVKSNKNDQVDAEAICEAMSRPGMRFVAVKSVAQQDTQAAHRIREELVGQRTAKANQIRGLVGEYGIVAPKGIQQLRRALPDWLEDAENALTVDFRSLLADLAEDLRYLDDRITLLDEQIAQHVKEDPVARRLLALRGIGPLTASALAGALGNAQAFNKGRDFAVSLGLTPRQHSTGGKDRLLGISKRGDVYLRKLLVHGARSVLLHAKDRDDALSQWLKALIARKHPNVVVVALANKTARVAWAIVHNATDYDPRLVAGKGTN

SEQ ID NO: 501501 - protein, 468 aa, unidentified
MEDNPVRRQRSKTEKAKQPTLLERIKINAAGIDCGSRQHYVAVPVDRDVEPVRRFNTMTPDLYRLADWLKACGIESVAMEATGVYWIPIYEILEERGFEVVLVNARHVKNVPGRKTDVVDCQWIQELHSLGLLRGSFRPSAEIASLRAYLRHREKLVLDAANHIRRMQKSLGLMNVQLHNVIADITGKTGMQIVRDIARGATDPKALASHRDYRCRASEEEIAASLTGNYRHEHVFVLRQNLELYDSYQHQIQTCDGEIESLLQDLAAKQGPPVAALPPARRRYRAQKNDPRFEIRSPLHRLSGADITQIDALGPYTALRLISEIGTDMTCWPTEKHFTSWLTLAPRNKITGGRLISSKTQPSANRAAAMLRMCAMSVGKTSTALGAFYRRLGYRIGKAKAITATARKLAILVYRVLRGDIEYQDPGADAYEAQHRTRTLRNLRNRAQRLGLGLINLETGEVLERGVS

SEQ ID NO: 501502 - protein, 485 aa, unidentified
MAKRKMSTFERLQSGKMNRKERKDLSRRIMAEDATLQVVHPNAAGIDIGNESHFVAIPPDRDANPVREFGSWTTDLQNMARWLIEHNIQTVAMQSTGVYWIAVQEVLEQYGLEVYLVNARGTKNLPGRKSDVQECEWLRKLHAYGLLRNSFRPPEQIRAIQTIWRQRDRWVKDCGRAIQQMQKALTKMNIQLANTISDISGVSGQAILRAIVAGTRDPRDLAKLRDRRIAASEEEIVQSLQGNWKEDILFELRQVLEVLETYDFYQNQIAACDRELAKYIADVPSREISEKQNIPEGACPLVSGKPSRRSKPQKKNSIGFDLASELERTMGVDLTRIDGINATIAQVIFSEIGSDFSPFPTENHFASWLTLAPQRDISGGKVIRHIPAAGRNRVANALRMAAQSLYHSDSYLGARYRRLRARLEGKKAVKAMARYLACLVYRMVTKGQAYVDRGATYYENKRHEKERDSILRKAAILGLKLVPSE

SEQ ID NO: 501503 - protein, 347 aa, unidentified
MNFYTKEHLFYCGVDLHARSMYICILDQSGQILLHRNLPTEPQRFLDAIAAFRQNIVVCAECMFSWYWLADLCAKENIPFVLGHALYMRAIHGGKAKNDKIDSHKIAALMRGGMIPQAYVYPAQMRATRDLLRRRNYLVRKRADLLSHIQNTNSQYNLPEFGKKIACRSHRTGLAEHFPDPNTQLSIHTDLALIDHYDKLLNALELFVLQNARDHDPGTLALLQTVPGIGKILSLVILYEIGDIKRFPAVGNFASYARLVACAKESAGKRHGTSGRKIGNMHLKWAFSEAAVLFLRKNPQGMKYKKRLQQKYGKSKALSILAHRLGRATYYVLKRQRAFDMKRFLSS

SEQ ID NO: 501504 - protein, 308 aa, unidentified
MHYLYYVGLDVSKETFDASLVAFEDANEMAHRKFANSRKGICSCLHWVEKRHGILLDDVIFCAEDMGSYISEMAVCASDRTLNFNFSLISPLVIKYSMGIARGKTDRVDARRIAEYAITHYRKIALYLPAEKELCQLRTWLILRAHLAKQRVAKLVLLEKLDYKEKFADVSIQRSMLQEEIAYAETHMKTIEREMKELIAADSNICRNYKLLTSIKGVGPITAIVMLCSTLNFTKITDHRKFACYCGLAPFEHSSGTSVRGGCHTSSMANRDIKVQLNRRALIAIRCDPQLKAFTNAKWLKVNINSAS

SEQ ID NO: 501505 - protein, 373 aa, unidentified
MEQDTTYVAFDTSKETIAVAMAESGQRGEVRFFGTIASRPDAVRKLVEKLAKRHQRLVFCYEAGPTGYGLYRQLTGMGYDCQVVAPSMVPVRPGGHIKTDRRDATTLAALFRAGELTAIWVPDDAHEAMRDLARGRQAAMEGLRRARQQLLSFLLRHGRIYPTKSHWTRGHRRWLAEQRFGHAAQQIVFEELIQAVEQAQGRRDRLAQQMITLLPSWSLREVVAALQALRGVATLSAITLMAEIGDFRRFANPRQLMAWLGLVPREHSSGATTARGPITKAGNSRARRVLIEGAWTYRLPARVGLALLARSQALPEAVKAIAWKAQVRLCARYRRLQRAGKQTNVITVAIARELAAFVWAIATNIMPPLEHAA

SEQ ID NO: 501506 - protein, 364 aa, unidentified
MHELTHIGLDVHKDTIAVAVLRSSTTTCDERVIPNTPEAVRKLLSRHADPSLLRTCYEAGPTGYDTHRLVTSLGIACDVIAPSLIPKRSGVRVKTDRADARNLARLHRAGELVAVRVPTPAEEAVRDLVRAREEIKADRRIARQRIRSFLLRYGKRYPKPTDRWSFRFEVWMRALRFEEPLSQATFEHLLGAYFVRDSQLAAIDRQIEELALLDPLAEPVARLRAFRGIDTLSAVTIASETCDFRRFGTAASYMAFTGLVPSEHSSGASTRHGGITKTGNQHIRRVLVEAAWAYRYAPAVRGKFKKRLEGQPPEVVAYSWAAQCRLSGTYRKLAAKKGANKAVVAVTRELSGFVWGAMTGNMGT

SEQ ID NO: 501507 - protein, 335 aa, unidentified
MEFTYFIGTDVSKNKLDLAVMCGRTLLFHKEIANTQQDITLFIKELSRLPEFSMEHAIFCMEHTGIYNNHLLGHLHKNKAHIWLQTAIQIKRSMGSVRGKNDKVDAIRIADYAYTHREKARFWVPTRDVIRQLANLTAARTRLVEAKKMLKTPLDEQDGFSTKKLTKKSAAICSHTLKAIDADLERAEKAIDQLIANDPELKRLFHLVTSVSGIGKVTARQILVTTNEFKDITSAKKYACYAGVAPFVHESGIFKGKGRVSHMANKTVKTLLHMSAIAAIQHNQDLKHYYDRKINEEKKNRMSVINAVRNKLVLRIFACVNNNSPYQNNYQKSLA

SEQ ID NO: 501508 - protein, 440 aa, unidentified
MPRKKRKTDEVVEVVYERSCGMDIHKDGIVACLNIGGKREVREYTSMTDDLLLLASWLKSENVEMVAMESTGSYWKPIFNILECEGVPAMLVNAQHVKTLSGTKTDRRDAKWLSGLLRHGLLKPSFVPSRDMRELRELIKYRISLTEETTRVLNRMEKVLQGANIKLSSVISKTGTKTELSIIKALSEGEYDAYVLSELARGTLKNKKDELVRSLNGLMGEHQKTLLKSMYNHLERLNEEIASIETEIDKRMKKDEEVLERLIEIPGVGKTTAQVILAEIGTDMEQFPNEKNLASWAGVCPGQNDSAGKRKSGKTRKGNSTLKKTLVQCANSASRAKDSYLSAQHKRIAAHRGRKCANVALAHTILVICYFMIKDGVSYEDLGGDYFDKRNKVNIVHRSIKRLEALGYDVILQEKVSAPQDHCAVMGKPPDSTAKAPSVA

SEQ ID NO: 501509 - protein, 347 aa, unidentified
MDVHPASISIAVADAAGKVLMECIIETKSVTVLEFIQGLRGSLWVTFEEGTSAAWLYDLLKPHVAKVVVCDPRRNALLKAGNKNDRVDARKLSDLLRAGLLTPVYHGESGVRTLRELSRSYLAASKDLTRVMNRLKAIYRSWAIPCAGQQVYSARQRAAWLEKLKEPGVRRRAEQTYQQLDFLMGIRKETRKELLAESRKYPARKLLEQIPWLGPIRVALLIALIQTPHRFRTKRQLWNYCGLGLRTQSSGEYRFTGGQLQHARKPPALRGLNVNHNHELKNIFKSAATQASASRNPLGEFYQNLLAGGMEPPMARLTLARKIAAIALNIWKKGERFDPAKLKQQAA

SEQ ID NO: 501510 - protein, 357 aa, unidentified
MKTTAGLGRRSVVGKDVYVGIDVHKESWQVTVRTDGEEIFNGRIPGQYQSLKKLFERYQGCRMKVAYEAGPFGFWLSDKLVEDGIEALVVPPSLIPTESGNRVKTDKRDSRKLARLLASNMLKRVYVLTPEEREHRDLLRTRRQLVDHRNDVARQIKSKLLFYGITSPFTASTRWSLKYIEWLKVLRCDTEYLRESFNLLIDLYEYLTRQIVRINKKVALLCRDKKYRDRITLLCTAPGIGRLTAIEILVELQDITRFESAEELAAYIGLTPSEYSTGERTRQGRITRCGNKRVRTYLVESTWMLITKDPAIRLKYLKLKSLRGGKRATIAIARKLLIRIRRMLLDNVPYRMTATAA

SEQ ID NO: 501511 - protein, 399 aa, unidentified
MRYCLGVDVAAVDSMYCLVAETGEIIFMPAKSPHTKSGFQWILEKLNGIEQKDIAVIMESTSTYHLKVERFFRENTDCEVIILNPMISKNHKRNLRKTKTDKEDCLNLVDIFFKGEYNCQVRHEEIYAEMQFLSRQIQHLQEGATRTRNRLRQLLSMLNPAYFDAFRNDFMYSETGLRFIAAWPHCDLLNAATAEDIAISLASTHQRSPGYYRRKAERLKTFAANCYPAVSKESVMTDCLAETAHRLLAQQQEIEVLKSRLVALGSSTELYDLFISVPGIGPYLASSLIAELKDIRRFENHKKLIAYCGFDPTIIQSGKSIHYNGPISKRGNSTARKILFYTVSIILVVARKTNRQMPLLLYYEKKRGEGKHHHACLVACCTKLLRILLAMSKQNTPYS

SEQ ID NO: 501512 - protein, 413 aa, unidentified
MKPKQKDKSKTATGRPTQPSWQEMNRKQRREMIRKIQSEELRLEVIHPDAAGIDIGNESHYVAVPPSRDSQPVRRFGCTTAELKVMAGWLHQCGIRTIAMQSTGVYWIAVYDILEEAGFEVYLVNARETKNLPGRKTDVQESQWLMKLHTYGLLRNSFRPPQEIRTMRTYWRQRNDLVQAGARHIQRIQKALTQMNIQLANVLSDVSGMTGQAIIKAILAGQRDPHKLAELRDPRVKASEEQVERSLEGHWQEDLLFVLKQEQDGYEFCQGQMAECDRRLDQYLQQQKDRSQGASLPEEKRKERLKKKKGNKPRFDLRAGLFRMAGVHLTQIDCIDVMTATTLLSEAGSDMSRWETEHHFVSWLRLCPDNRISGNKIIGKGRLPTSNRITNALKMAARDHGSTCKDVPRLGKR

SEQ ID NO: 501513 - protein, 371 aa, unidentified
MEHTRFVGLDIHKERISIAVAESGRSGVVEYLGEIANDPGAISKLCDRLGRPGRPLAFCYEAGPCGYGVYRQLTSLGHRCDVVAPSLIPMKPGDRVKTDRRDATMLARLHRAGELTSVWVPDADHEAMRDLIRLRSVVRQIVTRTRQHLQGFLLRHGRKHGQGTAWRMAYRRWLSTLAFQHPAQQIAFQDYVDAVMDAERRLQRVEEQISCLLPEWNLRSVVDALQAMRGIALINAVVLVAEVGDFTRFSNPRQLMAYFGLVPGEQSSGETIRHTGITKTGNSHARRALVEGAWAYRMKPRIGRHKVDRIEALPKIIRDIGWKAQVRLCARYRRLSARGKNANVVNIAIAREMVGFIWSIACTVQSAPRTA

SEQ ID NO: 501514 - protein, 318 aa, unidentified
MTSQHLALAAGIDVGQRFLDIGLAPSGKTFRVPNAAEGIAAIVERLAREGVGRVVLEAIGPYAQRLVTALACAGFEVGLVNPRRIKAFREFEGRRAKTDRLDARLIARFALAMTDAIRPLPTAEQLTLRALSTRRRQLTEMIAMEKTRLKQAMQPMLLESHRSAIKSLAAECSAIEAELARRVADDPQLASTFEILTSIPGIGERVATVLVTELPEIGRTDRKAIASLAGLAPHISQSGNAPPRAAISGGRPCVRAALYMAALVASRAHPEMKASYKALRDQGKPGKLALIAIARKLLVTANALVKNNTRYLPKTLDS

SEQ ID NO: 501515 - protein, 418 aa, unidentified
MHVLQPNSAGIDVGATEIYVAVPDDRSNKPVRRFDTFTDDLHEAAKWLKECGIESIAMESTGVYWIPIFQILDTYGFDVILVNARHVKNVPGRKTDVQDCQWLQYLHSVGLLRGSFRPDQDICAVRSLLRHRDNMVKDASSHVQHIHKSLTQMNLQIHNVISDITGVTGLAIIDAILAGERDPDILTDLKNPRIKADRQTIVKSLTGDYRSEHIFTLKQTLQSYRNYRQMIQDCDAEIERHLKEFDSRIDLDDCPKPPEKKLKRKPRGNEPTFDLKSHMHRLLGTDLTRIDGISDLTAHVFFTEVGPDLSKFNNANHFCSWLGLCPNNKISGGKILSSHTRPGSNRVAQALRISANSLWNCKSYLGDYFRRMRARHGAPKAITATAHKLARIIYHLVKEQEHLMKPFFRNKKKTTRYV

SEQ ID NO: 501516 - protein, 338 aa, unidentified
MAIVMGLDQHRAQITAEWIDTDTGEVSRSRISPAHRAGVRKFAERFRGQELEVALEATTGWRFVAEELRRVGAVVHLAEPAETAARRGNKKRAKSDRADARHVRELLMIGRLPESWIAPDHLLDLRSRVRLRHTLSHQRGEWQQRIQAVLYHHGCPQRRNLMTAEGLQWLKAQPLPAGAREQVTVALGMIDALDAQLAPLDKELRAYARRQLGCKALMEHFGVGELTAVTILAELGDVDRFSSSREAVRYAGLDITVHQSDQRRSPGHLSRQGPPALRWALFEAAQSAARQGSPDRDYFAQAAERLGANRACLSVARKLLKRSYHTLRELGEEALQPA

SEQ ID NO: 501517 - protein, 348 aa, unidentified
MNLKRIGLDTSKAVFTLHGVDHDEKAVLRRNMRRAEMEAFFAKLPPTHVALEACGGSHHWGRRLAAMGHTVQLIPPQYVKPFVRRGKNDRNDAEAISEAAARPDMPGVPVRSAEQQAEAIVLSARELLVRQRTQLVNAVRGHAAEFGVIAAKTISQLPGLLETVAAAETVPATAKEMVAFLGAQVAQLDSQIAELERRMKQQHKANPVSQLLAEVPGIGPVSALSLALTIDPGRFTSGRHFAAWLGLVPKEHSTGGRQRLGGISRAGNERLRQLLVVGAMAVIRYAKPGSKTASAWLLALLERKPRKVAAVALANKMARIVWAMMATGEAYRGSRKVAAPAAGAAAAA

SEQ ID NO: 501518 - protein, 312 aa, unidentified
MVVIAGIDVSKDKLDIHVLPSNQTFVVGRDPRGLASLARRLRKAGVEQVALEASGDYERIVIEALEADGFVVQLLNPARVRAFAEAIGMLAKTDPIDARLIALYCQHFPDTGLTRRPEQARKLGEFLNMRAMLLKLAGEIRNSLEHVREPGLKALADTLSADIAAKLKDVDDRIAKVIAGHDATMRKARIIRSFTGARPVLTSGLLARVPELGGVTRHAAARLCRAAPTDRQSGRTRHRSSIEGGRDQVRPVLHMAALAAIRSNPIIKAFAHRLSAAGKPKPLVIAACARKMVVILNAMLRDNTEWKYAKAA

SEQ ID NO: 501519 - protein, 484 aa, unidentified
MAKRKMSTFERLQRGKWSREQRKELAQKLEAADLTIVHPDAAGIDVGNESHFVAVPAGRDAQPVQEFGSWTADLQRMAAWLKACGIRTVAMQSTGVYWIAVQEVLEQAGLRVFLVNARGTKNLPGRKSDVQECQWLMKLHTYGLLANSFRPPEEIRAVRTIWRQRDRLVQDAGRAIQQIQKALTTMNIRLANAISDVSGVTGLAIIRAILKGERDPRELAKLRHPCIQASEEEVVRSLEGHWRDDVLFELKQVVEGYDFYQRQMEACDEELQKYLAVLPDRRKESAAVGADPGPTRTKQRRRSKAERKGKTRRKNQPGFDLQAELHRTFGVDLTRIDGIDIMTGQVILSEVGPDLSDFPDEDHFASWLELAPRRNITGGKVISQKSRESRNRVANALRLAAESLSRSDSYLGARYRRLRGRKEGKKAVKAMARHLACLVYRLLTKGQDYVDRGAAYFEKKRTEREMIGLQRKAAEYGMRLVPVA

SEQ ID NO: 501520 - protein, 405 aa, unidentified
MKSLVVFGIDVSSRQSTVAVVINRAKLPEFKISNDLIGFKRLGKELELYHQPQIIFEATGVYSRRLQAFLERNNYDYIRMNPLTAKKLMDNNLRHNKTDRTDAVSLALIQFANPQKVSYVEPQVYQEMQANSRIYEQFSHDLVKYKNRLHRALQLTFPEIEQLMTPIGKNYWRIVQRYPHPQLVLRENETSIAAKLKLLSGIGPKRSHYLAQQLVNLAKQSCSAVSVDSAEIWGIRANLMALRFAYRQCQTAVKKLNQLSKQLPGKDLDIYTSIPGIAKTTALRLIAELGDLRRFDKPNQIDAFVGIDPSRYQSGKTDKHLGITKHGNAIARKILYRTIGQIESASKTNPCHIADYYNKRKKSSHSQGYKKIAIAAVHKLIRTAYALIKNDQLYDHSVANKNQRL

SEQ ID NO: 501521 - protein, 336 aa, unidentified
MSEYYLGIDLHKKRSFSVLMDREGNLLDQGGRPNDAMAAFFAAKVPRSTTAVMEATFNWPFMYDLAGEYVERVLLAHPQKVKMIAEATVKTDKIDARTLAHLARTGYLPTAYAAPRAVRELRQLLRHRANLVGDRTRHKNRIHSILTRHNLTPPVSDLFGVQGRAFLQSCQGLSLVDRRSIDDNLAAIDVYDQLLVEVDRDLGQQVRADEQVTLLQTLPGVGLITAAIIRAELGEVGRFRSADQAARWAGLTPSVRASDETIHRGAISREGSTYLREAMVGAALRAVRTSPCLRRFHERIAKRRGPGMARVALARKMLEIAYCMLRSGQPFREAGG

SEQ ID NO: 501522 - protein, 366 aa, unidentified
MKKPSTTASSRRGKLQDGQLTIGLDLGDRSSFYCVLNRAGEVILEERVPTSPDAIKKRFEKMPASRIALETGTHSPWVSRLLTELGHEAIVAHSRNVRLIGESRRKDDRLDAQALARLARIDPQLLSPIQHRSAQAQADLTVIRARYALVRARTALVCAARGLTKSFGERIRGRNPKGFGSTTTKELGPQLQVALAPLLSALETITARIREYNVQIEKLAEESYPETALLKQVKGVGTLIALTYVLTLEDPRRFRKSRDAACYVGLQPGRRNSGQSEPQLHITREGDSYLRMVLVQGAQHILGPFGEDSDLRRWGLKLAERGGKRGKRRAIIAVARKLAVLLHHLWISCEAYEPLHNTRKRRLVAA

SEQ ID NO: 501523 - protein, 342 aa, unidentified
MEYYAGIDVSLECSSVCVVDANGKIVCEAKVASEPQALISWFGSLGFGLQRIGLEAGPLSQWLFAAMKAAGLAVELLETRHVRKAFEAMPVKSDRNDARGIAQLMRLGWFRPVHCKSMSAQETRSLLTARKLVQSKLQDVENSLRGILRGFGLKVGKTTGQTFAGRIEELVAGHPHLQTIAKALLAVRAVLRAEFAAFEKQTRRMVRSDTQARLLTSVPAVGPIVALTYASAIDDPARFKSSKQAGAHFGLTPKKYQSGETDYTGRISKIGDASVRTALYEAANVMLTKPVKGCSRLKSWAMRIKRRAGMSKAKVALARRLAVIMHRMLADGTPFNAAVAAA

SEQ ID NO: 501524 - protein, 344 aa, unidentified
MNHVAIDLGSKESQVCVRSPDGAIVLERKHKTTELPKLMREWSRSRVILETASEAFRIADAARDAGHEVRVVPSLLSKQLGVGERGIKTDLRDARKLSEVSCRIDLPSVHVPTSETRELRALLRSRQTLISARTQLVNHVRGWMRTQLARLRSGWAPTLPDRVRAYAMQNDLALPPHIEQVLTVLDALSMQIKTADATVRTRAKTSPVGRLLMTVPGVGPVTALTFIACLENTSRFAHTHHVHSYLGLTPGENSSSDRQQRTGITKAGPSLMRACLIQAAWTVLRRYPKDPMTRWAQQIAERRGKLIAVVALARKLSGVMFAVWRDQTTYTPTRAAMFASVPAA

SEQ ID NO: 501525 - protein, 310 aa, unidentified
MTIHHAYVGCDVSKHHLDFYDASTRKGWRIDNTDAAVAEAVRSFTDGKRFVILEATGVYDRCLRHGLAEAGVVFARVNPTMARRFAQACGRRAKTDALDARLLADLGHKLQPEADPPIDTERERLTALVRRRDQLVAMRATEKGRLKDLADDAVADCIAETVGFLSRQIDILERRINTMVGDGKSLADDNRILSTAPGVGPVTATTLLALMPELGKTSPKRIAALAGLAPYNHDSGMLKGQRCIAGGRRRVRKALYMAAIAAIRSCKRMNAFYNRIADRAPAKKIAIIAVARKLLTCLNAMLRDRKQYAQ

SEQ ID NO: 501526 - protein, 359 aa, unidentified
MRIIGVDLHTRQQSVAMLDTDTGEVIEKTLAHEGDEVRKFYSELPDPVLVGIEATGSMLWFLELMEELKIECRVGHPAKIRAAEPRKQKHDRRDARLLLNLLAENRFPSIWMPSTEQRDLRTLLRHRHQFVRMRTRVQHTLQSMALANGLRRGTTLWSQAGQHALQALPLAPHASERRAALLALCPGLQKSIDDLDHQVSEQALLHPQARRLMTHPGVGPVTALATEVFLGDPLRFPDGKAVASYIGIIPRERSSGGRRQRLGALSKQGNALVRYLWGEATMHAVRRDPELKRFYRRKLIQKGMGKARVAVARKLGIRLWIMLRDRIDYEEFCRRGRIRQKSGDARAGMPGPINGPAMQ

SEQ ID NO: 501527 - protein, 349 aa, unidentified
MNILAMDLGKCKTVVCLYNDKNSKHRFGKVVTRPKQIHDLLVEENPDRIVFEICSSAGWIYDIAKTLNFEVQVANPSTEGWRWKNVKRKNDREDALKLAKLSAMNQLPTVHMPKREVRQKRSFIQYRQRLVRRVVQIKNSIRSILDKEGYSMSRGKSGWSKQSLEQLAEMALPLEECDFNNLWRGQLYVELEMLKAAGKCLAKVTSKLDELAKSNKQIQRLQTAAGVGPRLAEAIVAFVDEPGRFASGKQVGCYAGLTPKQYQSGSMDRQGRISGQGNKLLRALLVEVSWLGLRHNSWIRETYNRLLRGSPSRKKIAITAVARKLLVRCWAMLRDEQPWRDEISDKEAA

SEQ ID NO: 501528 - protein, 355 aa, unidentified
MSQEKYIGMDVHQATISVAVMDSKGKLIMECILETKAATILEFIQGVRGTLAVTFEEGTCAAWLHDLLKPHVSRLVVCDPRKNALLKDGSKSDQIDARKLAELLRGNQLSSVYHGDHGLRTLKELGRSYLTITKDLTRVMSRIKALYRSWAIPCSGTTVYAARHRSEWLAKISEPGVRLRAERFYQQLDMLRALHQEARPDFVVESHRHPAVKLLRQIPSIGPIRAALLVALLQTPHRFRTKRQLWAYSGFAVETHDSGEYRVVRGKVRRNRERISVRGLSDNYNRDLKNLFKSTAISASIRPGPLRDFYLALLAKGMRPTMARLTLARKIAAITLTIWKKGVDFDAKQLDQQAA

SEQ ID NO: 501529 - protein, 328 aa, unidentified
MFYLGMDVAKAKLDCCLLLDEASGKRKTKAVSNTKSGIVDLLAWVAKQNVSPGGLHVVMEATGVYHEQAAVALADVGITVSIVNPAQVKDFGRGLAVRTKTDGVDSFVLARYGALLKPAAWTPPAPEARMLQALLSRREAITQDLQRERNRQEKADATDTPDRIRQSLSDSIGFLVKQLAELQRDIDQHIDRHPTLKDDMTLLQSIPAVGPQVGGNLLSVMHSHEFHSAEQLAAYLGLVPVERQSGSSVMGRARLSKAGPARIRAVLYMAAVVATRHNPHVKAVYDRLLARGKSKMSALGAAMRKLVHLCFGVLKTRKPYQHNYAKIA

SEQ ID NO: 501530 - protein, 344 aa, unidentified
MYDKILGIDIAKATFDVALLPPSAPTAGQTERPRTHHFANTPDGMAALQRWLATQQAPQVFACFEATSTYGDALAAALCAAGHTVACVNPYQIKRYAQSELQRNGTDRQMAAVIARFARERQARLPAWTPPDPALHTLQDLVRHADDLQTLCGQVQNRLERPGHSDTVINSLTEMAHCLETERQRILQLISDWIAEHPALTQQTALLQTITGFAETSAVAVLSEVGDVRRFVSTRQAAAYAGVTPSRTQSGTSVSTAAHFSPHGNRRLRKALFYPALVAIRCDPRLKAFYQRLLKAGKPKMAAVGAVMHKLLKIAVAILRSGKVYDLYIPPAGVSFLASPSFFG

SEQ ID NO: 501531 - protein, 340 aa, unidentified
MTITTVGIDLAKNVFAVHCVDQHGKTVLVKPKVPRAALPELIASLPPCVIGMEACSGAHYWARLFRQYGHEPRLMAAKFVSPYCMAGKSGKNDAADAQAICESVRRPHMRFVPVKDESQQAMQCLHRTRQGFIEEKTATYNRLRGLISEFGVIAPQSTDALRHMVSEQKKSLPLQVQQCVDDQLEHIDRIENNVTEYDRILSRMAKADHRSQRLMELKGIGPTTACALVASIGNAHDSKNGRQLAAWLGLTPSQYSSGGKSKLGSITKAGDSYLRTLLVQGALSVLIGAEKKTDSFSRWVCSLVERRGYWRAVVAIAAKNARLCWASLHYGDDFRLYSVS

SEQ ID NO: 501532 - protein, 427 aa, unidentified
MGAMSESEVPGQELQFSALVGIDWADQKHAWCLQVAGTTQRENGEVEHTPEAIEAWVGELCRRFDNRPIAVAVEQVKGALVFMLSKYGSLHLFPVPPAMSAKMREALYPSGSKDDPQDADLLLELLLLHRDKLRRLSPDSEATRRVQNLVEERRNLVDEKTAQINRLTHQLKIYFPQMLEWFEQLDTELVCALLELWPTLEELQKVPPERLRTFFRKQHCRYLELIERRLAGIRQAIPADRAVIEAKSAVVKVSAQVIRSLVWGIADLDRKIEEAAAAHPDFFIFESLPGAGAVLAPRLLAAFGSQRERYASAEEVQTYSGISPVMKRSGKKKWVHFRWACPKFVRQSFHEWAGHSIAHSQWARSYYRQQRERGKGHHAAVRGLAFKWIRIVFRCWKDRVAYDESRYLMTLAKRNSPLAAVPGGTML

SEQ ID NO: 501533 - protein, 351 aa, unidentified
MKTQQTAGSKLFIGIDIHKRSWKIHCATDLCSGKTFSMPPRAELLRDYVFKHYPGYEVSTAYEAGCCGYAAHRSFERYGWRSLVVNPADIFRRGKERHTKTDRIDAQLIARELKDNRLEGICVPDTCREQLRSLFRRRNDLVKDMRQIKSYIKMQLLYYGIEIPEQYDNDHWSHNFRHWLDDLKFEYDTGDEVLRSRMRTFRFIDQEFRDVSTLLRRHTKTYFKEDYMLLRSIPGIGPIVASGILSELGNLRRFTNIKHLAGYVGLAPGIYQSGDTVRHTGVSMRAHRLIRSYFIEASWQAIRTDPVMQGYYRKHQGKNVKSVIVKVARKLLSRTLAVIKTGIPYQIGVVE

SEQ ID NO: 501534 - protein, 416 aa, unidentified
MDAIVERCAGLDVHLDTVVACVLYGKLDIKPKKEVKTFSTTTKGLLELLDFINQKECTHVAMESTGIYWKPVWNILESGAFDLIVENAKKIKNVPGRKTDVKDAEWIASLLRGGLIEKSFVPPERIRDLRDLTRLRKELLGEVNRNKNRIHKVLQDANIKISSVLSDVFGETGKSILNQIIGNQCITEEFIYSLYEGRGKSKLKSTLMEMYEALNGKIRGHHVILLGMHNSNIVFLEKQINELEKEIDILLQKERDSLELLETIPGISKISASSIIAEIGTSMDVFKTEKHISSWAGLCPKNNESAGKKKRSGTKSWNNWLRSMLCECAWSATKKKDSRFKNKYWSMVPRMGRKKALIAIANMMLRLIYHLLKTKSTYKELEIQYFIDKDKRREDRIIKELKSKGYLVEKDSLQMA

SEQ ID NO: 501535 - protein, 370 aa, unidentified
MAQSTPLFVGLDVHKDSIAVAHATGGQPDPPVFVGAIGSRQADIDQLIRRLRSKASALTFAYEAGPCGYGLYRYLTGKGLPCQVVAPSLIPKKPGDKIKTDRRDVVELARLLRSGDLTAVYVPSVEDEAIRDLCRARDAARVTGKDAKLRLKAFLLRLGHHYVGRATWNEAHRRYLAKVVCPTPAQQVVFQESVRAVDEQVDRLQRLEAELVERTPGWRLAPVVEALQALRGVQFLTAITVVAELGDLTRFDSPRQLAAFVGLIPSEYSSGGTRRQGGITKAGNGRARRALIEAAWAYRHPAKVSLHIQQRIDRLPKSLQDLGWKAQVRLCKRFRRLTARGKHPNVAVTAIARELIAFMWAIAREVRLSA

SEQ ID NO: 501536 - protein, 400 aa, unidentified
MLSIGIDVSKGKSTVCGMKPGGEIVYAPFEVQHTREGMSELVSLLRSSGEEVRAVLESTGSYHCPVVAALLENGIFVSVVNSLRMKRFCSQSIRRVKTDQIDAMQIALYGLAYWQELQPTRLPENTYRELQLLARQYYQMTSLLIKAKVDFNALCDQVLPGMQELMSDHAGRHKLSDFVLRYRHTTHILEMGETRFRKDYCKWAEKKGYRNCERMAAHIFATAQNGIPVLPNAPSTQIVITEAIRVLHTVEASRDAILTQMQAFAKTLPEYSLVREMPCIGDTLAPRLIAEIGDVRRFHSKRALIAYAGIDAPPYQSGKFSANNRHISKRGNRYLRKTGYEVMQSYVMHKPANDPIFTFIEKKRGEGKSGKLAMVAGLNKFLRVYYGKVTELYRSLPAIE

SEQ ID NO: 501537 - protein, 401 aa, unidentified
MPFHGGLDWGGTSHAVCIIDGVGRVVVRVEARHDAAGLADLIARLERVAEPAELPIAIERPSGLIVDALVEAGHPVIPIHPNVVRACRPRYRAAGGKSDPGDAYMLADILRTDGHRFGPLMPASDHIRALRALVRGRDDLVAQRVALADQLRSLLEGLWPGAAAVFAAIDSPIALAFVARYPTPDSASRLGEKRMAGFLAQHAYCGRRSPAELLARLRAAPLGLASDAEAEAKGELARALVAVLDRLVPEIAKLSSRIEHAEAELPDGRIVMSFPRAGRICAARILAELGDVRERFPTEDQLAAEAGVCPVTHASGKSRGVVFRWACNKTLRLAITCFADNSRHASAWAATIYRKARGRGCKHPHAVRILARAWVRILRRAWQNGKTYNPEYHRGAMKIAP

SEQ ID NO: 501538 - protein, 345 aa, unidentified
MDEAYDGRQVVGMDLHRRRSVLVRMSMDGRKLETVRIGNSPGALRAVLARCGERPLVVLEATYGWYWAADVLAGAGAEVRLAHPLGVRAFSYRRVKNDERDAADLADLLRAGLLPQAWIAPPEIRALREVVRYRHKLVGQRTSCKDQVHAVLAKLGIAVTHSDVFGTGGGLWLDQLVLPAPYAAKVASLRALTGVLDGEIARLGDQAGGMLAGDAGYQAVRELPGIGPVLGAVICAEIGDVTRFRRPGQLCSWAGLTPRHRESDLKVIRGHVSKQGSRMLRWALTEAIQHQPASARPRAARDAIVARRGPEARNIAKTAAARVLLTQVFYALRDGHVRRASAPAA

SEQ ID NO: 501539 - protein, 320 aa, unidentified
MTILNAPTVVGIDVAKAEIVAYREDVQLTQAIGNNRESIGRWLKTLPAQSAIALEATSHYHLDTAELAFGMGHRVYVVDPYRVSHYRESVGLRAKTDPCDARLLARYLASEQQHLRAWSPPPRFYGVLKSLLRKRAELIKTHAAVMLSWSGEPLLKDLMAQQMEHFKRVDQALQKLLRETAQEAGITENIRRCKAIEGIGDLTATGLATTFMRGDFASADAFIAFLGMDLRPKDSGKKHGCRRLSKKGDGEMRRLAHNAAMAACRSPVWKPYYESYLARGLAKTQALVILARKLCRVAFALMKSESEYQPNLRLQGSLAT

SEQ ID NO: 501540 - protein, 428 aa, unidentified
MKNRNIQKLEAITPSTLVVGVDIAKETQWARFVDYRGLELGKTLKFQNNKNGFENILASIESISKNKRLDKVIVGMEPTGHYWKPLANYLILNDITVVMVNPYHTKKAKELDDNSQTKSDFKDALTIAKLVKDGRYYEVYMPQDIFAELRVLSNSRISLVKRHSALKNTITAVMDEYFPEIETVFKNYLKGKASMQIIKTCPFPSIILKLGVDGVLFEIKKAVKKTVGRKKAEALVKAAKNSIGVDYGTVSAKLKLGLMIEELELLTKQLDQIKNAMAVALTNTGFGEIVLSIPGIGVVSGASFIGEIGDPMRFDDPRQISKMAGYNLVEDSSGNSKSGTVISKRGRKNLRNILYKMALTMVTVNNEMKDLYNYLKMRKDNPLKKKQALVVISKKIIAVIYNLVKKQSEYKAELVLGEFRKNQMKNVA

SEQ ID NO: 501541 - protein, 335 aa, unidentified
MFYVGLDIHWKTTTICILDENGRRVKRKTIHSNWKRVLEYCRQIDGPFAVVYEASCGYGYLYDQLSKMASRVVVAHPGQLRLIFRSKRKNDRVDAEKLAKLLYLDEVPPVYVPSVDVRQWRALITHRQTLIAKRVRCKNGLRALLRGQGIVAPKGLWSRRGIAWLEALCLNGEWLGIQRDTLLAELEMFDAQIDRVTAALDRLGASHPGVALLRTIPGVGPRTAEAVVAYVADPSRFARNRQAGSYFGLVPRQDASAGSNRLGHITKEGPSVVRKLVVEASWQLIRRCSRTKQRFERLAQGKKERRKIALVAVAHHLVRCMTSMLRTGEVWRDAA

SEQ ID NO: 501542 - protein, 354 aa, unidentified
MTTTQYIGMDVHKESISIAVRNAAGKVVMECVIETKASTILQFIDGLHGDVHVTFEEGTWAAWLHDLLKPHVTKLVVCDPRRNALLQEGNQNDLVDARKLAELLHNNQLRSVYHGDHGLRTLKELVRSYLTITQDLSRVMSRVKAIYRSWAIPCTGKQVYTPRHRAEWLAKINEPGVHRRAEFYYQQLDALRCLRQEVRRDLLAESKKHQAWKRLCGIPSIGPIRAAVLLGILQTPHRFRTKRQLWTYSGVGIETSSSADHHVVKGQLERKKQVEVRGLNRNHNHDLKNLFKGAAIVAATKPGPFAEFYAELVAKGMRPEMARLTLARKIATIVLIVWKRGVCFDAQHLKPQTA

SEQ ID NO: 501543 - protein, 309 aa, unidentified
MKQIIGIDIGKAELVVFWQGKNFSILNECVTIKKWLQKHHDNLQQVSLIVFEPTGGYENKLINELTLMGLPYRMVHANHVRAYAKATGLLAKTDRIDARIIADFAKAMNLEPKAKFNQYTELKEQLNRREQLVYIRAQEKNRLEVVSSIMQKDIESHIRWLSKKIEKIEANMNTYIKQANQLKELIDLLQSIPGIGKLTAIRIIVDLPELTSLPFKKLAALVGVAPLNYDSGKMRGKRYIRGGRSKIRSALYLATLSAIRYNSVIKAYYQKLRQKGKPGKVAMVAAIHKLLAIIKSVAERKTPWVEVFC

SEQ ID NO: 501544 - protein, 410 aa, unidentified
MLKIVYPVCCEIDVHKTFIYCCIATTDNKGITTYKSNRFSTFTNQLKRCATWLKEKDCKDVCMESTGKYWIPVYNILELSCNIVLIHSKYVKAIKGKKTDKRDAKWIADLFKHDLINGSFIPPADIHQLRDLTRYRNKLTNFIAGEKNRAQNCLTVSNIKLDYVFTYVFGKASSSIINTLLLNPSEKITDVSKFRTRGMKSTDEEILAAIDGNICNEQAEKLKIIRSHMDSIEECKANLESVILNLAEKYLPKLNLILSVLGIKSFSAVSIILEIGVDMSVFPTSKHLCSWAGLTPQNNESAGKKKTTRISRGGAYIKPLLVQCALAAVKSNKHPKIRNRYLALKKRRGHKKAIIAIARTLLTAIYNILKKNEPYNPDLYKKSDLPPQHKTVSFDEAVFILQRQGYIITS

SEQ ID NO: 501545 - protein, 328 aa, unidentified
MDIRDQAKRHVVGGVDTHKDLHVAAVVDERDRVLGSQSFATTRQGYRQMLAWMGSFGEVQRIGIESTGSYGAGLLRFVQTVGIEVLEVTTPDRHDRRRRGKNDDLDAQNAAHAAFAGQRTVTPRSRDGMVESLRVLSACRKTAVAARRVALQLIQNTIVCAPDGLRDVLRSMTRMQLIRTLAAWRPDLTAYRDVEAAYRITFKSLARRYLELHDEIADLDIMIGAIVDELAPDLVARNSIGHVGAAQLLLAAGDNPDRLRSEASFAALCGTSPVPASSGKTIRHRLNRGGDRHANSALHIIAIGRLRTDPKTKTYVAKRIESLKPFGP

SEQ ID NO: 501546 - protein, 372 aa, unidentified
MVYIGVDLHRKKSQVAAIDQDGKLALNRKVRTGPAELQQLFDELRPQPIEVAFEATFGWGWFADLLAELGIPAHMAHPLATKAISSARVKNDAVDAKTLAHLLRTNLLPEGWIAPPDVRESRRLVRMRAALVRVRAKLKAQIHALLGEHGIQPDVVDLFSNRGRELLGQFELPAISQSRLQACLRLIDEVSLEIVIAEREIQQKIKDDKRLERLLPIPGIGPIIAATILSEIGDVTRFASADKLCAWAGLTPSEHSSADHLRRGHISKQGSRWLRWAWSRLLSTLFATSNSDSSSSGSRAGAGPRSPASLWRDGCSRSSTTRFAARLAVGAIRSLRIQRSRRARWLSWPLTETAGNLIEPSGPNHTMDIRSE

SEQ ID NO: 501547 - protein, 320 aa, unidentified
MEKIIFDQVVKVGCGIDVHKDIIVATIRGSENDFETKEFSSFTSSLTELREWCKSEGVTHIAMESTGVYWKPVFNILEEGDFEIILVNARHVRNVPGHKTDKQDSQWLSKLLLSGLLKASFIPPVEIRDLRDLVRYKKKVVTQSSSEKNRIIRILEDANIKLSSVLTNVDGAVGSKIIDDLIAGKTDINGLMQHYHGHIKASREEFRKALQGRLTKHHQFMLKVIKESITDKEKLIDKIEKQIDELAKQYAVEIELLQTIPGVAYDSAVGIISEIGADMKQFSSDQHLSSWAGMSPGNNESGGKKKAQPPSTGTNTCNRP

SEQ ID NO: 501548 - protein, 356 aa, unidentified
MTTQITKPDFTGQELFVGIDVSKNSWKVCILTQHLEHKTFTQPPKPEVLVGYLQRHFPGATCHCAYEAGYCGFWIHDHLKALGVDCIVVNPADVPTNHKERTFKTDRIDARKLARALRNGELTPIYVPNRAALEDRSLIRTRHNLVKKQTRCKNQIKGLLGFYGVPLPLEPGTKNWSRRFILWLDQLAMQSPSGTQALKALIQELKYLRQMIAETTKQIRTLAKELPYCSYTVPLLTIPGISTLAAMIFLTELVTLSRFRTLDQLSSYVGLVPGEYSSGEREITTGISQRRNPFLRGLIIECAWVAVRKDPALVLAFNKLCTRMPKHQAIIRIAHKLLNRIRFVLKHQTSYVHAVV

SEQ ID NO: 501549 - protein, 423 aa, unidentified
MDEARQTTTQESNYKVAGIDVHKNMLAVVVTDAAEVGEYRFERRKFGAAPSQLSALAEWLMAQGVKEAVMESTAQYWKPVWQALEGKCALHLAQAHSNRAPKGRKRDFADAERLVKRHIAGELILSFVPDPQQRLWRMITRTKHQLTRDRVRLHNQLEAFLQDARIKLSSCLSDLLGVSGRDMLKALAAGEKDVAAIARLAQPELQATQAQLCDALSAAASLSDLRRRILHLFLQRLEMIESQMETLNQAIAGELRDYEDAVRRLAEIPGYGVDSAQQVIAEVGPKAAAFPSPGQLSSWVGTCPGREESAAVSKSDRSPKGNKQMRRVLDQVAQAAVKTKGSVFQALYRRLMPRLGYKKTIWAIANRLCRLTWKVLHQGVTYEERGQCPHPTVKRRRTTKLVRALRDLGYSVQLTPLPTGASA

SEQ ID NO: 501550 - protein, 366 aa, unidentified
MKQQHQDSEVTIGLDLGERRHRFCALDGRGEVVEEGSLLNDRASLARLTARYPGALAVMEAGTHSPWVSRYLEGLGWEVIVSNPRKVRAIYQHERKSDQRDALMLARIGRMDRALLYPVRHGSEQAQRDLLRIKLRDSLVRARVALINSVRFSLKSLGYAVCNPSSERFHKVAMERLPERVQQMIAPSVQALAELSTRIAVLEREINVVARTKYPQTLWLQQVPGVGALTALYFVLKIEDPQRFENVRDVGAYAGLCPRRDQSGGSDPQLRISKRGDPYLRRLLVSAAQYILGPFGPQSALRAYGLMLAADGSARARKRAVVAVARKLAVLLLSLWKNRSHYEAFPHWQTIEDKRSGTIAMHRVEA

SEQ ID NO: 501551 - protein, 373 aa, unidentified
MPKYSTAFGMDVHLRSTTVCALDADTGEAVTRRFPGNPWGEIAGWMDGFPGPSLAAYESGYLGFAPQRELAGLGVECVVAAVSKIPRSAADSASKNDRNDAARMAKAILAHDISPVWVPSPEVEGIRDLAGAYDGAAARLATAKQRLLAFLARRGFVYGGTTPAGNPRKYWTYDFLRWLDKVRPEDDGGARALAALRNEVEAAAEARADLLSEYRAAVDASPIAAEVAALQSIKGCAFALAAAFSAEVGDFARFRSGRQVTAYFGLAPSQRSSGDSVRLGGISGAGSALVRKLAVEGSWCYAAARHQPKLMPRDTGVPLEIRMHGRKGSERLLRRREEMLARGMPAAKANAATAAELVRWLWALGMMCREGAE

SEQ ID NO: 501552 - protein, 342 aa, unidentified
MDHFAGLDVSVKETSVCIVDDTGKIVREVKVASEPDALLPVLTNPTYHFKRIGLEAGPLSQWLFSALAEAGLPVICVETRHMRAVLKAQINKTDRNDARGMAQMMRAGLYRPVHVKTLRSQKLRMLLTHRKLLQSKAISIDNDLRGTLRNFGLKVGVVGKVRFEARIKELVENLPDLALLVEPLLVVRRVLREQLGILHRRLLAIVRDDEVCRRLMTTPGVGPVVALTYRATVDVPARFRKSKSVGAVFGLTCAKYQSGESERSGRISRCGDEMMRVMLYEAAQAMLHSKRWSWLKAWAMKIARHRGMKKAIVALARRLAVIMHRIWVDGTEFQWTREAAVA

SEQ ID NO: 501553 - protein, 416 aa, unidentified
MNAAGIDVSSRKSTVAVLRPFGEVVRVPFEVSHSAEGLASLVQQLKAIEGDTRVVMEHTGRYYEAVANALHEAGFFVSAVNPLLIKEYGGNSLRKVKTDKADAVKIARYALDNWAELRDYTPIDRIRYDLKTLNRQFHLASKQKTASSNNLIALLEQSFPGVRKCFDSPVRRDGTQKWVDFAHDFWHADCVRKHSLAAFTERYRKWCKRHGYHFRQGTAQQVYDLAKSVVVLVPKSDLTKVLIQEAANQLTAISRSVETYRAEMDRLASQLPEYPVVMGMYGVGDSLGPQLMAEIGDVCRFDRKQSLVAFAGVDPMPNQSGEKNIRSNKSSKRGSPYLRKALFNVMTCYLQKAPADEPVFQFLDRKRAEGKPYYVYMTAGANKFLRRYYGKVMEYLSTLEDLPPVDMNSTGLPKHP

SEQ ID NO: 501554 - protein, 318 aa, unidentified
MPETEEFVGIDVSQDVLDVSASGGSTWTVQYDEEGLAQLTSRLQTLPVRLVVLEATGGLETPVTAALVTAGIPVAVVNPRQVRDFARATGLLAKTDRLDAQVIARFAEAVKPTPRPVPDDQARELEALVARRRQVVEMVVMETNRLQRALPSLRPVIQAHIDWLRGQREQLDVQLDQVIKRSPVWRAREQLYRSMRGVGPVLARTLIAELPELGTTTSKRISALVGLAPFNRDSGKMRGKRTIWGGRKCVRNTLYMATLSAIRSNPAIRAFYHSLLARGKERKAALVACMHKMLIILNAMARTGTVWQPAPPVPALSA

SEQ ID NO: 501555 - protein, 429 aa, unidentified
MTRISVGVDVSKNRSTVCIIDQDGKVIMRPFLVWHSTEELDFLADTLKRLNGEVRVIMESTSVYQYPIALHLKEKGIFISIVNAYKVKKFANTDFRGGKTDKKDSRTIASYGISYWDKLVEWQIPKDTYFNLDLLNRTYMNAKKHRQIILQELQHYIDCAMPGMDKELRSLNLSTKKDFMLDFVEKFWHRDEIVNMTEAEFTEVFTAWAKKKGYRPVEGKAAKIYAIAKSCIPYYPANPTVKTILQCIVDKLSGVNRTLVTIVTQMIEEAKKLPEYQIVREMPGVGDPLAARFFGSAGDIRRFKNSKALVAYAGIDSPPDESGDFSSTHRHITKKGSKVFHDTGYEIMMALRAQKRTWEKVRKNPEVYDYMLRKEAEEKPRKVAKIAALNKFLRIVYARIKELYDNMALAERAKAKTKSKTKAKTKATA

SEQ ID NO: 501556 - protein, 348 aa, unidentified
MTHFVGLDVSVKETSVCVVDDAGKVVCERKVPTEPDDIAVLLTSVAGDYVRVGIEAGPLSQWLVNGLIEAGLPVICVETRHMKALLQAQQINKSDRNDARGIAQMMRVGLFKPVHVKTLAAQEQRMLLTSRKLVQRKLIDIESDMRGTLRNFGLKVGVVSTIGYEARIRHLVEGFPRLAAIVEPLLTVRRVMRQQLATLHKMLLDTVRHDPVCKRLMTAPGVGPVVALTYRASIDQPQRFVHSRAVGAHVGLTPRRHQSGEIDYDGGISKSGDTMLRTMLYEAAQILMTQSRHWSWLKAWGMEVAQRRGMRRAIVAVARRLAVVLHRMWTDGTDFRWGSEPGTAVAAA

SEQ ID NO: 501557 - protein, 365 aa, unidentified
MMNEHAVGIDVSKKKLDICVATANKVKTKVFKNTPAGHDDLDSWLRQRHLPKTTPVVLEATGPYSERVATALADAGWAVSVVNPARITGFAQSELSRNKTDKADARLIARFAQKAELQLWQPPSLAVRELRALVDRLQALIDMRQQELNRLEALDQGSTTSVRDMVKDHVDWLNTQIKKIQSDIDDHIDGSPELKHDAELMESIPGIGKRASSQFLAYIGDVRRFKSAKALAAFIGVTPRQKQSGTSLNGRSSLSRAGHAAARKALFMPGMVAKRHNPAVIAMAKRLEQRGLTPKAIVGASMRKLVHLIYGVLKSGEPFKAEISMAGLEIQEGISYIQVQISNGPCVANGRFYSQPHPSGDVNIF

SEQ ID NO: 501558 - protein, 320 aa, unidentified
MSDSTERFVGIDVSKDSLDLFADPPAPQLSTHCGYDDATVHKLANALADLAPTLVVMEASGGLEQRLAAELAACGVQLAVVNPRQVRQFARALGELAKTDALDARILCAFARAIRPQARAPHDADTRDLADLLSRRRQLVDMRVQELQRQHTASSRTMQKSLTEHIAWLDKRIAQLDEDMGQRLRASDIWRAKDDLLRSIPGVGPVLSLTMLGLCPELGQLNRREIAKLVGLAPLANDSGKYRGPRRIWGGRADIRRVLYMGTQSAIRHNPVIAAFAARLHLTGKKPKVVIVACMHKLLTIMNTMLKTGQSWQPPEQRTQ

SEQ ID NO: 501559 - protein, 381 aa, unidentified
MHSMTQDQAPVVIGGVDAHADTHHAAALDARGGLVGSKEFPATTAGYEQLNAWLHGFGEVEAVAVESTSSYAAGLTRALTAHGVVVVEVNQPHAHSRRRRGKSDAVDAELAARRYLTGEGIAVPKDTSGVVESIRMLRVARHGAVKARTAALLQARDLITTAPQPLREQITVRKTLRARLAICKRFRPGQLRTPTHAAKLALKTLADRVGALDREIAVLDTQLQQLVTTTAPRTTSLLGIKTGHAGQFLVTAGENIDRLSKGESSFAALCAASPVKASSGKTNRHRLNPGGDRQANRALHMIAVYRLGACPRTQAYATRRTTEGKSKPDIIRCLKRAIAREVHHALTADLADLIAHNRPGPAHTTVILCGNPGHGTLRQRT

SEQ ID NO: 501560 - protein, 361 aa, unidentified
MTTTIPTAASTILAIDLGKYKSVACLYAGSPDTARFDSFTTDRARLAKLLQRCQPSVVVIEACLLAGWVHDLCAHLGFPCLVANTASEAWKFKHLKRKTDKDDALRLAQLHALGQLPTVALPPPATRQWRSLIAYRQTLVGRRVAVQNRIRALFVAQGLPAPRGAKAWTVTGLDGLALQAKPLADCGPDELWRGLLHLALAEYRQLRALLDDAEGRLDALAKSDQSVQLLESTPGVGPRTAEAIVAHLHQPERFQSGKQVSAYVGLAPKQFQSGETDRRGRITRRGPALLRKLLVECAWVMLRYNGWARAVYLRLTHGGKARKKQAIVALARKLLVRCWAMLRDQKPWRDKTPAPAVAGST

SEQ ID NO: 501561 - protein, 340 aa, unidentified
MEQASMIGLDIAKNVFEVHGRSAAGAVVLRRSLRRGQVESFFTKLPKAVIGLEACGSAHHWGRMLDKLGHEVRLMPPAYVKPYVKRNKSDAIDAAACWEAMGRPDMRFVPVKTVDQQAALSLHRSRDLLVSQRTQLSNALRALLSEFGIVAGKGKAGLARLVDELRAGMLELPADAVVAAMALADQRAALDAAADALERRITAQAKADKKAVMLKTAPGVGPLSAHATLATMPDPSLFKSGRHFAAWLGLTPRLNGTGGKTRTGRITKQGNQPLRRLLVLGATAWLRQVKANSEKASPWLRGMLARRPSKVVAVAQAARTARILWAMLTHNQPYRAPAIG

SEQ ID NO: 501562 - protein, 365 aa, unidentified
MPSMPQPAQPDHNTSPTDEVILGVDTHKDLHVAAVITAVGAMAASRSFPTTMAGYQQLLAWTRTFGTLRRAGVECTGSYGAALTRHLQAAGITVIEVNQPDKATHRRRGKTDIIDAQAAAQAVLAGRATAVAKSGDGPVEMLRMFKLAKSSAIKSRTQAINQLKAVLVAADPTLREALSGLSTPILIRQCAQLPTSAPSDATSAATWTLRLLACRIVKLTGEIDDLNQQLARAVNRHASKLLARPGVGPDCAAALLITAGDNPERLGSEASYAALCGASPVEVSSGKTVRLRLNRGGDRQANAALYHIALSRLRWDPKTRAYLARRIAQGKTRREALRCLKRYIAREIYQIITQPRPHSTAACHP

SEQ ID NO: 501563 - protein, 377 aa, unidentified
MQETMIQSVKADKLFIGMDLHKNTSTFVVKDKDGKLINSAKVLTDKNDVTRYINSIKRNSDGRDLSLAVEPVSQWYYYADLIENLGVDVHLAHPLEVKAIAHAHIKTDKIDAGVLADLLRTNFLPEAYFSPAEVRSWKEQCRFRASIINLRSQVKNKIHAILFKHSLKHNFSDLFGKGGRRWLASLELKEPFQGNLNKYLILIDQLTEQVVQAEEIITNTVINCPQAKLLISIPGISYCSALTIMAEIGEIDRFISVKHLQSYAGLIPSTYNSGDKQIHGRITKRGSKWLRWIMIESAYHQMNCKRIPGFGAYYNGIKIRKGTKTAAVATARKLLAVVWRLLKDNRPYEVIDPRCWKSRPIASKISSVSTVINTTED

SEQ ID NO: 501564 - protein, 412 aa, unidentified
MQTLIERGCGLDVHQATVVACLLMVRRDGKVQKQMRTFGTTTRELVGLREWLLSEGCTHVAMESTGVYWKPIYAILEGALEIVVANAQHIKKVPGRKTDVKDAEWIADLLCHGLLRSSFVPPKPIRELRDLMRYRRKLVESQAAERNRLLKVLETANIKLANVATDVFGMSGRLMVRALIAGKATPQEMAELAKGLLRKKIPELELALEGKLEQHHRFLLELQLQRLEAAEKDLAVLEQRIRRMLEPYAAQLALLDEIPGVDWTLAAVIIAELGVDMTVFGNVSQLASWAGVCPGNNESAGKRKSSRIPSGNVYLKSGLVEAANAAARAKGTYLRDKFFRLKARRGYKRAVVAIAHKILVAIYHMLSQQVSYNDLGDLYLDKLNQNHLTRNLVHRLERLGYAVTLTLQQKAA

SEQ ID NO: 501565 - protein, 528 aa, unidentified
MAWLSIRLPPCWAWLPNDVPACRGLAVAWLKRGVSATKILELGVPAAVLARRKGRSVSMAAVMIGVDPRKASHTAVVISAAAEPLGELRVRACAAQAERLLAWAAAWPERTWAVEGAGGLGHLLAQQLLAAGERVLDVPPKLGARVRLLAAGDTNKNDPDDARSVAVAALRSAGVREVRPDDHAAVLKIWSKRYRDLGRTRTQVVCRLHAVLCDLVPGGVSRPIYAARAARILEQITPPDAVAAARCELAAAFLEDLRRIDAQIRETRKKLAAVVAATGTSLTGLFGVGPVIAAAVIGDVRDVSRFPGRNHFAAYDGTAPIEVSSGPRKIYRLSRRGNRRLNHAIHMAAVTQVSHRHSDGRAYYDKKLAEGKTRKEALRSLKRQVSNAIFACLQADARRAAAHAKGPGGQQGNDSAACAAGSHPRHRLFGQATPGPGAHPTTPAASPAPGPASARGRAGHSSIAATLPSATPQVQVERPQRSEDERPGGAARQRPYSAARKALGQKFPLKAQRPKGTSHAAKRTDGTP

SEQ ID NO: 501566 - protein, 381 aa, unidentified
MAALTIVAQTRPFVIGVDCHARTHTYAIIEARTKRRVACEQFPTTSAGISRALAWVGRRTDGDMACLWAVEGVGSYGARLARAVTDAGYDVAEAPRMNARGRRGIGKSDPLDAAAIGAAVLALEESQLRAPRRDEGTRAGLRILSAARDQLTRDRTVNVNALIALLRAHDLGIDARKPLVAAQIATITRWRDRQEQIELSIAREEAVRLARRVLEVTTQLTANQKRMTELIQQSPAAPLLEMVGAGAVTVATVLTAWSHPGRVRSEAAFASLAGVNPLPASSGNTVRHRLNRGGDRRLNRALHTITMTRMVHDPGTRDYVARRTQEGRSYREIRRSLKRYIARILYRQLNTLYATADPARPHVSGAQACQGEVRGPSIAVS

SEQ ID NO: 501567 - protein, 386 aa, unidentified
MQASNVCTPTVGHIGTIFVAIELSQKSWLVTIHSPDRDRISRHKLAGGDHVGLLGLLEGIRTRASRKLGSAPAIVSCYEAGYDGFWLHRLLTAAGIRSHVFDPASIAVEQRGRRAKTDRIDGELLLRTLMAYCRGEPRVVRIVRVPSPEQEDVRRTTRERDRLVKEQGGHTNRIKALLRLHGMAVGNPRRRDWLKWLAAQRDWQGQAVPPQIKAEIEREHARLMLVREQLTALEQQSAQAQPAPAAAEMARRRDTLFKLKALGPAFSGTLTNEVFYKDFDNRRQVGAYVGLAPSPWKSGGIDREQGISKAGNPRARLAAVELAWLWLRHQSNSALTRWFLAYTAKASKRIKRIAIVALARKLMVALWRYLTTGLVPVGAVLKPVEV

SEQ ID NO: 501568 - protein, 410 aa, unidentified
MTEASIAQSEPVLVSIDIAKARHEVLIAVPGRKRRRRLTVLNQLEDFNRLISTLAEFACPVRVAFEATGNYHRALAYRLGVAGFDVKLVSSVALARTREALNNSWDKNDPKDAQVILHMMQIGNEQFYHDPLLCGTNDLQELSKTHDIVSRSRTELWHRILTHYLPLYWPEADRFHRSSRSDWFFAFLERYPSPHFISAMSQETFIADAWRVVGRKVSKERLLADTYQTAKSSVGLPIAPGSDAARMFKLVLAEGRSLIAQHNEIEDRAVELLKNNTDYQLLTSIPGIGPINALTILAEAGDLRRFKHHRQFLKFCGMDLATIQSGTFRGQTKLSKYGNARLRRTLWMAGQVAIMQKTNSFRDKFERYIAKDRQNTHLRRKAYTAIAAKMARTVHGIIKRGEPYRPFFEG

SEQ ID NO: 501569 - protein, 463 aa, unidentified
MKSTKQAKQKNRPRNKQVDWKALDIVHPDAAGIDIGGSEHWVAISPDRDEHPIRCFDCFTADLRELADWLIAKGVRSVALQSTGVYWIPVFEVLQQRGLEVYLVNARHTKNLPGRKSDIEECQWLLKLHTFGLLNNSFQPTDEIRITRTLWRQRGGLAEQARSTIQRIQKVLTEMNVQLSNVLSDVSGASGMAIIHGILKGERDARVLAALADAQVKASKEVIAKSLEGNWRQELLLVLAQEVELYGVYQNKIAECDRQLQTQLRTMAPKVDLKSNPLGPRPKGKRAQGNAPKFDLRTELYRLTGVDWTQVNGIDVTVAQSVIAETGVDLSPFPSEGNFTSWMGLCPANDSSSGRVIRKSTPHVASRAATAFRQAASSLIRSQSYLGAQYRRLRTRLGAPKAITAMARKLACLFYRLLRYGQQYVDKGMQFYEEKYRDQQIKSVTRRAQQLGLQVIQPKASLA

SEQ ID NO: 501570 - protein, 342 aa, unidentified
MNGDYDGRQYVGIDLHRRRSVIVRMTEQGEQLGWVRIDNDPVALGLELAKAGPDPEVVLEATYGWYWAVDALQTAGAHVHLAHPLGVKGFAYRRVKNDVRDAADLADLLRMHRLPEAYIATPHERELRELVRHRAKLVALRSGLKAQVHATLAKQGQLPAASDVFGRAGTAWLRSAPLELVYRQRIDSLLELIDAYDGEIETFRTMIANRFTGHRGYRAIQQISGIGPTFAAVFVAEIGDINRFSRPEKLCCWAGLTPRHRESDTTVHRGPITKQGSKLVRWAAIEACQHTRAGTKLSADRSRIIAARGRNVGIVAAARRLLTLVFYGLRDGEIRALAARAG

SEQ ID NO: 501571 - protein, 462 aa, unidentified
MPGREERETSEKTGRQLEGLPVIRRGVAGIDLGSEQHWVCAATLDRSGREVAHFGATTAELIRMAEWLKARQVESVAMESTGVYWIAPHEVLEAQGLQVLLVDTRQLAQVPGRDKKSDPTDCEWIQRLHSCGLLRGSFRPEEAVCMLRTLVRDKANLVAESGDWLRRMQKSLDQMNVRVHRAVSDIDGVTGMAILRAIVGGERDAQKLAKLRDRRCSKTQQEIAEQLNGHWRDDHIFSLQQALKMYDAVQERIAAYEQEILRKLGEMEREEPHEPTAPPLQNASKARTIKKLGQEAKRQALYRMSGVDITQIDAIGVETVEVVVSEYGSDLSRFPTEKQFVSHVTLAPSVRKSGGKPVRKKKRNSASTRVAAALRMAALSLRHSQTALGAYYRRIAQRRGGDIAVFAAARKLATLIYRLLRWGQPYVDEGAAAFETRYRQHRIGRLAATAKELGYQLTPVPA

SEQ ID NO: 501572 - protein, 425 aa, unidentified
MHEQLEIGDKNEYIHPICSGIDVHKKMLFAAIHIYDKNRDQVRYITARFTTFPKGLQEMVNWHIVNGCSEICMESTGQYWHPVFDAFEEAGLHPVIAHPKYTKPLKGKKSDPADAKWIAKSYAGGHVVPSFIPPKKIRLIRSVIRYCLKIHNSITGEKNRILNCLTGEGIKLDDVFTDPFGTSSMDILKYMIQHPGEAFDVTPFIRKGCKTPIPVIQEAVEKAASIDLSALSKLRVALDRMVRTIGNETTLKQDISEKMKPYAHQLELIRTVPGFDKDPFTAERVLAEIGPDMSVFPSAKHLCSWAGVCPSHDSSARKVKGRKISKAGTYIKPLLVNIARAVVRSKIHPEITLRFNRIKNRRGYMKAIIAICKMFLTAIWHILHKDEPYKADGYMTAKKPKKAKKVMTRAQLAEYLASQGITVVD

SEQ ID NO: 501573 - protein, 440 aa, unidentified
MSDLHEEKVGPEFAAQIGLDWADQKHFWAMRTADGKLQRGELLNTPEAIQVWAAELGQRFGGRPIAVALEQSRGAVIAMLCKYAHLVLFPVHPNTVSNYRKAFYPSGAKSDPGDGHLILELLLTHPDKFRRLQPDTVETRKLQFLAEERRKLVNRHTSEVQRLIGWLKQVFPQIVHWFDDPASAMVGSLLLRWPTLQALQKASPKGLLKFFSQHNCRGEELIRQRIEQIRQAVIATTDEALMQTGLLCIQNSIALLEIMRAGIATFDQQIAEIYRNHPDRAIMESFPGAGAALEPRLIAAVGSVRDRFDTANSLACFAGIAPVKESSGKAAWIHWRWACPKFIRQTFHEWARCSIPTCDWAREFYDRQRAKGKGHHAAVRALAFKWIRIFFRCWRDRVPYSEEHYLKALRHHAPPKPEPTIVEIGWETTVGFSKLSVVSS

SEQ ID NO: 501574 - protein, 374 aa, unidentified
MADYNEVFVGIDTSKLRNAVAIAEGGRNGEVRYHGEIENTEAATSKLVKKLAAQHRRLTFCYEAGPTGYGLQRLIKTLGHECVVVAPSLIPKKPGDRVKTNRRDALNLAKLLRAGELTAVWVPDARHEAMRDLVRAREAAVDDLKSKRQQVLSLLLRLGRYFTGKRTWTRAHMNWLVSQKLAHREQRIAFEEMLLAVRQANERVIRLERAIAAAVPDWSLAEVVTALMAVRGLDLISATIFLAEIGDLSRFATPRQLMAYLGLVPGEESTGDRVWRGGITKAGNHRARRILVECSWSYRHPPRVGKKKLAKVEAAPPAVQEIAWKAQARLTARYRALARRGKRPTLVVTAIARELSGFIWAVSRAAGAPATPTM

SEQ ID NO: 501575 - protein, 387 aa, unidentified
MAQVNDLSRSLTAFDLISTLVVVVEMSKASWLVSGAVPGVERQPLKKLEPDATALLRLIERWRNEAVRAGRPISRIALAYEAGRDGFWLARWLIARGIEAHVIHSASVAVSRERKRAKTDRLDAAMLMRVFLGWLRGERGHCGMVAIPTMEEEDARRPSRERECLVNERSRIINRMKSALARLGVRGFKPHLRKAPERLAGLRTAEGTGLPANIIEEFRRDMARLALVREQINSIEKTRAERLKRAPDTGPHAMVRLLARVIGIGIETADMLVREILSRKLRDRRAVARYAGLTGSPDESGLKRREKGLAKAGNARVRRGLIQLAWRFLMFQKDSALARWYRTRTEGPSGARKTTMIVALARKLLIALWRLVTTGEVPDGVELRPAG

SEQ ID NO: 501576 - protein, 320 aa, unidentified
MTAFTPVGIDIASKKFDAAIWIEGKKYKNKVFANTPTGFHAFLLWLAPYGPCHICMEATGAYSLPLATYLYDAGYPVSVENAARIHAFGQSELIRNKTDKGDAKMIARYCHLHKPPEWKPVPVNERKLQVLINRLNALKEMKRMEENRALTSETIVQGSIQKVIAALDEEIKEIEQAIKKHIDNDPDLKKNQALLESIPGVGEILSTTLLGYVGDMSRFSSNKALVAYAGLNPMLKESGCWKGSTKLSKKGNALLRKALYMPAITDLKYNPVVAALCKRLKEKGKRGKCLVCAAMKKLLQLAYGVLKSGKPFAAEIPLAR

SEQ ID NO: 501577 - protein, 331 aa, unidentified
MDLHRRRSVLVRMSETGEHLETVRISNDPEYLREVMTRAGEAPEVVLEAAYGWYWAADALAELGATVHLAHPLGVKMFGLRRVKNDARDAADLADLLRMGRLPEAWIAPPATRELRGWVRHRAKLVALRSGLRCQIHAVLAGAGVQVPMSDLFGVSGRELLTTAALTVESRSRVESLLRIIGALDFEIDLYTKLVASRLRTDPGYHAIQAIPGVGPVLAAVFVAEIGDITRFHRPAELASWAGLTPRHHESDTTVHRGRITKQGSRLVRWAAVEAVQRVPARTRLGQRRDRVAERRGHNIGVVAAARDLITLVFYGLRDHHVRCLPTKAAP

SEQ ID NO: 501578 - protein, 436 aa, unidentified
MDIVHPRVAGIDVHKKIIWVAVRLPGAEPGHRTVVVKHFRAFWRSLQKMAAWLSELGVTDAAMESTGIYWWPVYHALAQAGIEVCVCNAAHMRNVPGRKRDVTDCQWIAELHEYGLLRPSFIPAAEVAALRQRTRYRKKLIEQRTSEGQRLAKVLEDAGIKIDSVASRLLGVSGRAMIEALIAGERNPGRLAGLAKGVLRRKTEDLQMACDGRFTDSHGQMCRLHLDAYDHLTGQIAELDILVAEAAAPFGRLIARLVTIPGIGQRTAEVIIAETGGDMARFATAARLAAWAGLAPGDNESAGKRKKAPTRKGDQHLRAAMVEAAWATWRTATRPGARFRRLARRFGKGNEKKAAVAVAHTLLCIAWAVMRYDGDYADAGTDYYDRRDERNREHLIRHHQQALARLGCQMQLIPPGDGSPPPGTDTPPAAAPGQAA

SEQ ID NO: 501579 - protein, 344 aa, unidentified
MQIHSVGIDLGKTTFHLVALGAAGKVLVRKKFTQRQLLTYTANMQTSLIGLEACSGAHFLGRVLRKQGHDVRLIAAQFVKPFVKSNKNDFVDAEAIAEAVERKNMRFVPIKTDDQLDLQAIHRVRDRLISRRTAVINQLRAFLLERGLVFAKTPAKLRAAMSDILENAKADLTPQMRNLIDLLWGEWNTVEQQIEVLRLELERISAADAGCTRIRQIPGIGPIVATAIVAAIGNGAAFHKGREFAAWLGLVPRQYSTGGKAKLLGISKRGNVYLRKILIHGARAAVLRIKRDRSSIGAWMDALDARAPKNVVVVATANKLARIAWAVLSSGEDYRPVANASPVT

SEQ ID NO: 501580 - protein, 317 aa, unidentified
MTDQTPATVGIDISKAHLDVHELPSGRSAQFANNADGFKDLAAWIAPGTRCIAYESTGRWHRALQEALAGTLPLACVNPMRVRRFAQALGQEAKTDAVAARVLAMMAAAIKLRRTKEPSPIQRDLEELNTARDALMRDRTAALNRSKHLRHKLLRRQNQLHLAQIERHLKALDAEIRDLVDGDDELSRKVQVLASIPGIARITAVGLLAGMPELGTMNGRAAASLAGLAPFTRESGKWKGYSFIGGGRRRVRQALYMASLSAINCNPDLARQYESLRERGKPGKVALAAVMRRMLVLANLLVKQDRVWTPAPPRALA

SEQ ID NO: 501581 - protein, 462 aa, unidentified
MKGHTRKKKVAHKRSTPSSFPIINTNAAGIDIGSGEHWVAVPEDRDEEPVRSFGCFTADLHAMARWLKACGITTVAMESTGVYWIPPYQILEAYGFEVRLVNATHVKHVPGRKSDVDDCQWIQRLHTYGLLSGSFRPDNQICVLRSYWRHRENLVRYAADHIRPMQKALTQMNLHLHKVLADITGVTGMRIIRAIVQGERNPKKLALMREPEVKNTPEAIAKALEGDYREEHLFVLKQALELYDFYHRQIEACDLEIERSLHAFETKVDPAAHPLPPRKRNRKKPIGNESFADLRTELYRISGTDFTQIPGFDALNVQTILSEIGLDPGRFPTEKQFVSWLGLCPNNRITGGEVKSTKTKKTNNRAAAAFRMAAQSVGKSNTAFGGFYRRIAARLGAPKAITATAHKLARIFYRMWSTGQSYVDMGDHYEARYKERVLHNITKRARELGYEVTLQPVAQEVA

SEQ ID NO: 501582 - protein, 425 aa, unidentified
MYPFDFISVGIDVGADFSWVSILTPDHKPVVKPFKILHNDIDSLEKAVLTIKKAEESNSMKAHTFLESTGIYHFPLFCYLKESGFEVFVLNPLITDSNRNSGIRKVKNDKSDSIRIARTGYTHNLKVSLIPQDLVINLRSLVREYYYLVDSKTSYINKLHKELRIVFPSYCKVFSNITCKTSLMILKKYKTPKDIANSPKEDIIALIAANSRKGLKYATKKYNVLIEAVTLASSFGKFLESSIDIIQMNIDIIEMFNNKINDVLDNIEEQTSKYAEHDFVKQIHLVNSIKGVGFISAVSLMCEIGDFTAFKRPKQLYAYFGLDPAVKESGNFKGTKVSMSKRGSRIARRVIYAVALCSISSSNNPVLKEYYNKKKESKPKKVALGAVMHKLCNIIFAILRDNKPFVLKTATEHCKEYQRHLSLVA

SEQ ID NO: 501583 - protein, 361 aa, unidentified
MRIIGCDLHARQQSVAMLDTETGEVVNRTLMHEGNEVREFYAQLPQPVLVGIEAIGPMQWFLQLLAELGIECRVGDAAKIRAAEPRKQKHDRRDAELILKLLVEKRFPTIWMPSQEQLDLRALLLHRHHWVRLRTQIQNALQAIALAHGLRRGPSLWSYDGQAKIAFLPLPPHASYRRSMLQALYRKMEEEIEQLTAQVAEQAEQRSGARLLLTHPGVGPVTALATDVFLGDPQRFADGKALASYVGLIPREYSSGAHQRLGALTKQGSPFLRFLWNEAGAHAVRRDPELQRFYRRKLVQKGLGKARVAAARKLGIRLWIMLRDQIDYQEFCRRGQKQPSGDACAGMLEVGNGANGHRPVG

SEQ ID NO: 501584 - protein, 320 aa, unidentified
MKHKVGKDNTVARFIGIDVSKQWLDVATLPERETRRFSNDGAGQEQLGAWLIQLAPELIVMEATGGFETRVATALAAEGLALAVVNPRHVRDFARAFGILAKTDRIDASVLAAFAEKVHPPVRPLPDEDRRELIDLVDRRRQLVTMRAEEKTRLSQATASARQDIKEHIEWLDERLRRLDIDLTAKLRSSSLWKAKEEILISVPGVGRVTVFTLLARLPELGALNRRAIAALTGVAPFARDSGQHRGRHMIWGGRADVRSVLYMAAVTAARINPVIKSFYLRLKQAGKPAKVALTACMRKLLTILNTMLRTNQSWHAPTT

SEQ ID NO: 501585 - protein, 347 aa, unidentified
MNIVEAARGVTGGVDTHLDVHVAAALDPLGGLLGTERFETNAAGYKALLGWLESFGDVTKVGVEGTGSYGSGLARYLKRVGVEVLEVDRPDRQKRRRAGKSDPLDAIEAARAALSGRAKGKPKSRDGAVEAIRVLVVAKRSARQARGKALVQMRHLGYSAPEQLRCRMKGLSVPALVAEGKGLRPGRSPDPVTAATKASLSSLARRISSLDDELAELNERIEALLVATVPDLLELFGVGPDTAAALVMAAGDNPERLHSEGAWAHLCGVSPIPKGSGKNSGRVKAHDGGDRQANSALWRIVMVRIAHDPETQLYFERRVKEGKTTHEVIRILKRYVAREVYRYLPRA

SEQ ID NO: 501586 - protein, 332 aa, unidentified
MMAQNNPVVVGIDVAKDKVDACIRSLSRRQTFPSSAQGRHKLTAWLRRHKVDKAVMEASGGYERDWAKTLREAGLLVRVVDPKRVRNFARSAGQLAKNDAIDAQMIAWFAETFDQAICQAHDVEREKLTQIVYARQALLDVQTELQNRGEHSVPDVVRRVQMRLLKKIGAELATLEAAMVAMVKATPRFAELAEIIESVPGLAEITSAGLIAVMSELGQVSNKAAASLLGVAPYDDDSGKRRGERHIKGGRRKVRNLFYMACVGASTRHNPVLKAFYRRLIARGKEPKVALTACMRKLIVILNTMIARRQKWDATRYHMSHCARLPQSACAT

SEQ ID NO: 501587 - protein, 311 aa, unidentified
MEHSVFVGIDVAKERLDVHLRPTGETFSIGHDEAGLVALTERLVPCAPAIVVLEATGGYEVTVAAALASARLPIAVVNPRQIRDFARATGQLAKTDALDARVIALFAEAVRPVARPLPDAQAQVLGEFVARRRQLVEMLGAETNRRRLVRDPQLQRRIAAHLRWLERALRELETDLHDTIRSSPVWREAEDLLRSVPGIGPVTAFTLIADLPELGRLSRRKIAALVGVAPFNRDSGTLRGRRMVTGGRAPVRRVLYMATITAIRRNPAITVFYQRLRAAGRPAKVALTAAMRKLLTILNAILRDHRSWQRA

SEQ ID NO: 501588 - protein, 404 aa, unidentified
MKGPIVSIDVSKGKSDYQAFKEMNVKYTGSRSIKHTKEGFDEIVSLVREMEKKLETEVCVVYEATGVYHRVLKKVLEDNNIKQFIINPLLSAKTRKNDSLRSPKTDKLDPKSIAKTYYSHSLHNSHKPETIYHELRELSRYYEDILVHLRKDKVTFRAQLDVVFPGYDTLYDDLYGPVALAVIEKYPHPEMLQKKKINTVSKVIQSKTCHRQAMSDTMADKAIEYSKTIYSGCDKDDIEVLILQRFIKKLKEDMAEAERTIGEMIKLAQELPDFSIIKSIPGIGDNLAARIIAELGDMTRFKKKNELVAFAGLDPRISESGQNDGDHMHITKKGNKRLRCLLYLAVTCSIRLKRDDNSIKDFYIKKKQQSNPMCSKAAKTACASKLVRIIYSMCKTGELYQYNK

SEQ ID NO: 501589 - protein, 363 aa, unidentified
MDVHKNSFSLCAYDGYTGEIVSESTFASDVKLVIKFIETLKSRYENDVEIKCGYEAGCLGYSLYKSLTARGVDCIILAPTTMQVSAKNKMVKNDRMDALNIAKNLASGSYKSVYVPDEEDVEIKEYIRMIHDFKKELKRVKQEICAFVLRHGYQYDGKSKWTIRYMNWIRELEMSEIQRETLNEYIAEMENLNDKINRFMNRIDEMYQSERYHEKVSKLRCFKGIETFAAMTIQVETADFERFPSAKAYASYTGLTTGEHSSGDKNNRIGITKQGNTVIRKTLVECAQSLVKGNVYAKKSQGLKSRQKGMDVNIIAYADKATERLKKKYQKLIERNVPRNKAIVAVARELACFIWGMETGNIH

SEQ ID NO: 501590 - protein, 398 aa, unidentified
MISVGIDVSKGSSSVCINKNGRVIKQFFIEHSQSGVKKLIDLLLSFEEETKVILEATGIYHLPLVQSLSFSGIFVAIINPLVLKKYATLSLRKGKTDKLDAVKIADYGLTNWHKLIGYSVSDSIYTELKDLGRNYAYYVKLKVMQKQHISMLLDKVMPGITDLVRAGDNLIKNKLLDFIEHYQHYDRITAKSERQFVLDYCRWAKKKGYRPDESKASSIYALAKASIPTASSKSTPSTALLLEAAKVLRQLCATLQSILAQMKELAKELPEYNVVCAMHGVGAILAVRLIAEIGDVRRFHSGKSLVAFAGLDSPPYESGNFVGTKRSISKRGSPLLRKTGFEVMKALTIHKPQDDNAVYLFMVKKVSEGKAKKVAMIAGLNKFFRIYYARVKEIYDVV

SEQ ID NO: 501591 - protein, 364 aa, unidentified
MSDGSKEQPKVTAGLDLGDKYSYLCLIDTVSGEVIEEGRLRTAPEALRRRFASEPSLRVAIEAGTHSPWVSRVLEECDHEVLVANARKLRLIYANKRKTDEVDAENLARLARLDPKLLYPLKHRGEESQAHMAIIRSRQALVGGRTQLVNHVRGAVKSFGHRLPKCPARSFHKRASEHIPEALWPALGPILEQIGSLTERIRDYERQLERISKERYPETDLLRQVEGIGPLTALTFVLTLEEPSRFEKSRRVGAYLGLVPATDQSGDRDPQRRISKEGDEMLRKLLVGSAHYILGPFGSDSDLRRHGEKIASRGGKNAKKRAAVAVARKLAVLLHRLWISGELYDPLYNTHRRQKQQEEQEEAA

SEQ ID NO: 501592 - protein, 428 aa, unidentified
MTQSPNPTPPTFAAFVGIDWADQEHAVCLSPADTLKPEQFTIHHTPEAIAEFVAMLRCRFGGQPVAIALEQARGALLYALMGHEFVRLYPIHPATSKRYRDAFAPSGAKDDPVDARLIWELLVKHRDQLRPWQPQDATSRQLTLLCEHRRDLINQRTRLVQQLQAALKTYFPQALDWTGEDLASVMATDWLVRWPTLEQLQRVPPKTVRAFYYAHHCRRPDLVQQRLHQIKTAQPLTTDAAVIAAHSLRVQSLAHQLRPLLASLAAYDQQIQALFATHPDAAIFTSFPGAGECLAPRLAAAFGTDRDRFPDADSMLRWSGIAPVTRRSGKFQTVHRRYACAKFLRQTFHEFARCSIKFCEWARLYYQAQRAKGKGHHAAVRALAFKWIRILWRCWRDRRPYDDSLYAAALRRSGSPLAKLLPLPSQQP

SEQ ID NO: 501593 - protein, 361 aa, unidentified
MSLSSWLVAGVVPGIERHPLKKLETDEDALLKLLLRWRDEAVKAGHKIERIAIAFEAGRDGFWLARWLRARGIEAYVIHPASVAVSREHRRAKTDRLDTELLKRVFLGWLRGEPNHCSMSAIPTLEQEDAKRPNRERENLVGQRTRIVNRMKACLIRFGIRNFKPTLRRAPEGLEALRTPEGAPLPPNTRAEMRRDMARLRFVQDQIKEIEATRLQQLEQAPAEGPHAMIRLLARVTGVGIETADMLVNEILARNLRDQKAVARYAGLTGSPDESGKRSREKGLSRAGNARVRRGMIQLAWRFLIFQKESALAQWYRVATKDARGAIRKTMIVALARKLLIALWRMVTIGEMPDGVAMRAT

SEQ ID NO: 501594 - protein, 317 aa, unidentified
MSKHTTVSAGIDTGKCKLDIALDRCPERLQVDNTDDGHAVLWGWLRQHRVNRVGIEASGGYEQAVVSALRRKGFLVIVFQPVQVRAYAKYRLQLAKNDKIDAALIAACTAEAKKIHPPPDPRLAPFAELLTVIEQLTEDIARLKTRRATSRDEQIRRFWNEEIARLKRLQSQKLKQLVAAIREHRDLADRLELIVSVDGVGLRTAVAILVRMPEIGRITREQAAALVGVAPYDADSGSHIGLRHIEGGRERLRKSLYTAALPAAFNWNPELMAIYKRLTAAGKPHKLALVACARKMIIFVNTVVARGTPWVPRDALI

SEQ ID NO: 501595 - protein, 337 aa, unidentified
MQKEDCDCVGVDVSKRTLDVALYRGEVDWKNGHIKVENNKTGYKDLKRWFRSNGIKKQKLRICMEYTGLYAHDFRIWLESEGLVYYMVDPNRMHYFEPPLSIKGIRQTKTDKADAFRIAIYCSLFYKSMSPSYLPSSTYFILKRLLAERLLYVKQAAKYKQQRRDVSLYDTEDSRIRKEEELKKLNSYIWRTEKDIRSVIQSDSLIKRNYDLLTSIVGIGMVIAVTTIVLTENFTAFTDPRKYASYIAIAPFPHESGTSVRGAVRVSKQGFKQAKADLSISVLPAISLDPGIRSYWLRKKAEGKHSGIIMNAIKFKLVLRMFAVVKRGKPYVIIDKF

SEQ ID NO: 501596 - protein, 353 aa, unidentified
MSMLADEVDVVIGIDTHKYTHTAAVLSASTAGVLAKMTVASATAGYEELYRLGQRYGERRAWSIEGTASYGAGLTEFLQARAERVIEMDHPNRAKRRNGVKNDEVDAVRAAREALARDKLAEPRCQGQRACLATLLCVRASAVEAAKQARTQFQSLVVTSPEPLRERLGKPKGLALLRAGADLADQDGDSPELRLMAGALRALARRALSLYQEAKSYQASMRTIVEEWHPELLAQSGVGTIVAATVLCAWSHPGRFRSEASFAMLAGSAPLDASSGLSTHHRLSRCGDRQLNRALHVVVITRWTKDKATIAYCQKRRADGKSDREIKRCLKRYVARSLFRLLESSSTGTETMT

SEQ ID NO: 501597 - protein, 368 aa, unidentified
MTTPAVAVIGGVDTHKHTHYAAVIDDQGRLLGHQEFPATEPGYRALDAWLRRHGQVTAIGVESTGSFGAALTRSLTAAGERVVEVNRPNRTARRLDGKSDRLDAEQIARAVLGQISTAIPKAKSGIVEVIRTLRVTRASAVKARTQAFNVLWGVMIGAPSPLRDELVVLGKRTLVNRCLQLRPAASDLLDLSEDPAQLLMAGVKTALRDLARRWKSLDEEIKTLSTQLDGLVRAAAPALMELHGVGTELAGQFLVTAGDNAGRISSEAAFAKLCGVAPQPASSGRTTGRHRLSRSGDRAANSALYMITIVRMRRHQATLDYVERRTAEGLTKREIIRCLKRYIVREIYASLPRPETTKPAVQPTGLTT

SEQ ID NO: 501598 - protein, 416 aa, unidentified
MAKTDRVVTGGVDTHKDVHVVAVIDERGEILDTASFQARASGYRELVSWLRSFGKLARVGVEGTGSYGAGLARHLANAGIEVVEVNRPNRQARRRRGKSDTVDAEAAARAALNGEASVVPKAQRAVVESIRVLRVAFTSARDSRTRVALKMRDLIVTAPDCLREVLEPLNTDERATRCARFHVAGDLADPLLGTKLALRTLARRYEALSTEMAEFEARLDELTARANPALRGANGVGPDVAAILLTAVGDNPERLRSEAAFAALCGVSPIEASSGKTVRHRVNRSGNRQANQALWRIVMVRLSIGDPATKAYVERRRAEGKSLREIIRCLKRYVAREIYRHLVRPKPVPTGADLRVARRAAHLSLQSVADALHSWPSRISELERGRKHDAALAHRYMAWLLPHGKYPPHAGCSFAV

SEQ ID NO: 501599 - protein, 385 aa, unidentified
MQDHKPEDQTAIRTDLGAIFVSLELSRSTWLVTSLSPGGGEKMSKHSVPGGDISGLLMLFSRLTERARKRAGEEFPIIAIQEAGLDGFWIHRALEQEGIESHIVDAASIMTSRRRRRAKTDRIDGEALLRALMAYKRGEPRVCAMVRVPTPEDEDRRRISRERNVLIAERVAHVNRIKGLMFSQGIRYEPLRRDRRARLEELRTGDGRVLPENMKRQISRELDRLELLLAQIKAVEAERNTMLAKTNEANLTPAKMLMGFKGIGAEFAMALWSEGLFRHFDNRRQVGAYAGFAPTPWQSGMTDREQGIAKSGNPRLRTTMIQLAWLWLRHQPDSLLSHWFQERVAGKGRRIRKIMITALARKLLVALWKYVTAGVVIERAVMKTA

SEQ ID NO: 501600 - protein, 384 aa, unidentified
MGHQTFIPRDYDVFAGLDVDKRSISVTFTDHQGLLKSLRIPNNVEHLVNHVRKHFPNQRVAFAYEAGPTGYGLYDGLVAQEFRCLIASPSMIPKAPGQRVKTNRLDSVGLSENLRGGQLKGIHVPSPLYRELRHLTQLRDTFVNEMVGMKQRIKSLLLMEGVEFPPAPAGSQWSFMVKDKLRKLPCSSTVRFKLDQLLDSLEFNEKQVLKTTREIRRFCQNDPELSQCIKYMMSVSGIGWIVASQLLARIGDWRELRNIRQLGGFLGLVPTEHSTGERTDRGSITRTGDERLRSKMIQASWSAIRKDAELREFFRLICHRHPRREGPRVAIVAVARKLSVRISVVLMQQRPYVVREKVHSAPLTQEETSSQGTTRRQAEPGDNS

SEQ ID NO: 501601 - protein, 456 aa, unidentified
MAKIRSWVGLDVHAAKVVACVVDAESGEMTLHRLSGETAEVVAFCAGLPAPARAAYEAGPTGYGLARALVAARVGCVVAAPGKIERAAQDKVKTDARDAERLVRLLMINALHAVSVPTPEQEALRDLVRAREDIRVDLMRARQRLSKLLLRHDVRYDDTTSRWGERHRHWLAKVDLGQSGAQATLADYVGAVEALELRRGTLEAAIAALVPETPCALAVARLRCLRGIDTLSAVGLAVEIGDFERFQRPGQLMAYVGLVPSEHSTGQTRRQGHITKSGSQHARRLLVEAAWHYRRAPRLGTTLQRRQQDQSHVVVAIAWKAQQRLHHLWRRLDSQRHMRRTIVAVAVARHLAGFCWAIVNHDEHQELADQPPRRSGPPRARQRRQVADAGLLSSASRSACGRPPGDSSAGHPLNGTQVGPGGPTTGKAVAASNTSHAARRQPVRARRSQPPRSTAR

SEQ ID NO: 501602 - protein, 375 aa, unidentified
MKRRPSDDKVIVEAKTRSRKERLLNNNKYIGMDVHKATTVIVVLNYLGDVVSESIIETKGPSILDFLKGIRGTLHVTFEEGCQAAWLYDLIRPYVARVLVCNPKKIAVQQNKADKPDARRLAESLRTGGLEPVYHGEHSTQPLKEYIQSHGAIVSDSTRVKCRIKSLFRGSGIDASGPGVYDKEQHEQWLDHLKTPAVRIRGSRLFSELDCLTDLREKAEKDVVREARKHPAAKILQGIPGIGPLRAAVIIAYAITPHRFRTRKQFWTYCGLAVTSRITGEYVIVDGQVRRSKKLPLVRGLNRNYNRWLKEAFKGAALTAATGPWKFHFDAMVARGTDPSLALLTLARKLATTSLVLWRKGERYDEQKMKRSHAA

SEQ ID NO: 501603 - protein, 414 aa, unidentified
MDVLHERCAGVDISKKDAKACVRTPSARRRGSFTTVTTTWGSTTNAVLALRDHLLAAQVTLVVIEATSDYWKPFYYLLADELNVILVNARQVENLPGRKTGVSDAAWLAQLGAHGLVRPSFVPPQPVRELRDLTRARTQMTRERGQIVQRLEKLLEDTGIKLSAVASDIVGVSSRAMLEALTGGERDPRTLAELAGRKLRNKIPELTEALTGRFRAHHAFLTRLHLDHYDQLTDAIRQLDERIEEAMAPFRGALDLLDTIPGINRAVAEVVIAETGGDMSRFATVKHLASWAGVCPGHHESAGRTKSAKIRPGNPYLQGALGLAAFGAVRTKDTYLQARYKRLTARRGPLRALVAVEHSIITAIWHMLTDNVAYHELGGTYFAQRDPERATRRAINALNQLGYTVTLNPLEGAA

SEQ ID NO: 501604 - protein, 353 aa, unidentified
MKRDKYMGMDVHQATTVVVVLDAEGKLVWETIVATEASAIIRLIQSLSGPLHVTFEETTQAAWLYEVVRGYVGEVIVCDPRRNKLLDEGSKADKPDARKLAQLLRAGLLRSVYHGQEATRKLKEIVRAYETLSADTVRTMVRIKAIYRGRGIGTSGRGVYRLQQREEWLAKLSEPGARQRVAWLYEELDQLGSLRKRAKQAMLVESRSHRAFALLRTIPQLGPVRCALIVATVDTPHRFRTRQQLWSYSGLAVVTHMSSEYEMKEGRVVRSRKPMATRGLNRNCNRRLKEVFIGAATGGSQREPYRTYLKDLQQRGMRAEMARLTLARKIAAIVLRIWKKGETFDPKKLNWTT

SEQ ID NO: 501605 - protein, 346 aa, unidentified
MTTAYLGLDLHANSSTLGVMASDGTYQGHKQFSTAESELIPRVSSIDAQEKRLAVEASELSRWAARTLDPYVDRTLVCDPRENFLISRDGRKGDVSDAYNLCRLLRLGELKEVYQATEDHRAAFKAAAQHYLDCRGQQVALKQKIKAVFRRWGVLDLEGQEVYSEEGRTRYLKQITQPEVTNQLQRLYRLLDQAVRAWKEAREQMLRLGERYPEIEAFQQVPGVGPIGSHLFDAFIQTPHRFSTRQKLWSYCQLSIRSQSSDGKPLGYEELDPNGRSELKQVSYRAYVAALKQGDNAVATFFEQSLRRTEDQTHARLNTQRKILATLRALWKTGTSYRPEKFLGSA

SEQ ID NO: 501606 - protein, 359 aa, unidentified
MLVERTSVGLDVHARSVAAAAIDGVTGELKRARLTPSHDHIRSWLGELAGPVAVAYEAGPTGFGLYRSLTALGIRCVVAAPSKLQRPSGDRVKTDARDAVHLARLLRLGELTAVCVPSVDQEAARDLVRAREDCRGDLMRARHRLSKLLLRQGIVYCGGNAWTDAHDRWLRRQRFDSPATTTAFESDYDTILTVAARRDRLDTTIAELAADSEFTPVVRRLACLRGISTLTAFALAVEIGDWHRFTGNTIGSFIGLVPSEHSSGASRVHGSITKTGNTHARRLLVEAAWHHRASYRPGKTMHQRWERAPAAARARGDAGNRRLHARWITFNLRRKRPVIANVAIARELAGWCWSLAVMD

SEQ ID NO: 501607 - protein, 393 aa, unidentified
MKPEMSVRGIDLAKRVFHAVGMDERGKIVLRKRLSRHDLRPFLAKLPPVRIGMAACGGAHYWARRFREHGHEVKLMAPQFVKPYVKSNKNDRREAEAIAEAVTRPTRRFVPIKDVDQQDIQALHRVREWLIGERTALINEVHGLMHAYGIVMPKGVAKFRQAVVEKLESAKDKLTALSQEMCWKLVEEFAALEKQLASDQEKLDALATTHPACQRLMTIPGLGPLTATALVAAVSDASAFKNGRQFAAWLGLVPRQHSTGGKERLLGISKRGDSSLRKLLVHGARTTIRWVGRQTDRRSQWMRHLVERRGKNRTAVAVANKNARLVWALLTSHQDSPLTTGEGQLLRASVASVRMEYGKVTKEEMPKLLMAMVLEKSMEESCRTMPGGSELMT

SEQ ID NO: 501608 - protein, 337 aa, unidentified
MSIIRIGMDTSKHVFQLHGVDEREQSVLHRRLGRKEVERFFAKLPPTQIGLEACGAAHYWARLLRRLGHQAVLLPPQYIKPYVKRGKNDAIDAAAICEAMSRPGMRFVPVKSATQQAALMLLKSRELLVKQRTMLVNAMRSHAAEFGVIAPKGVAKAVELRQRAQAAAEDVPALAVEMLALLASQVAAIEARLKAIEARLIAWHKEDPVSRCLATQPGIGPIGAVRFALKVTDAGAFGSGRHFAAWLGLTPKEHATGGRARPGRISRQGDQTLRRLLVLGATTVIRFARPGRTSAWLMQLLARRPKKLAAVALANKMARIVWAMMVSGELYRRPQPA

SEQ ID NO: 501609 - protein, 339 aa, unidentified
MELTPVGVDIAKNVFQVHWVDPDSGEFISKRLKRAKFLEYFANRRPCLIGIEACGGAHHWARQLTEMGHQVKLMPARFVKAFNIGNKNDPADARAIWLAVQQPGKAVALKTEGQQAVLALHRMRQQLIKFRTMQINCLRGLLTEYGEVMGKGRAALDKAMPAVLATVAERLPAVLIHTLREQWNSLNKLDEQIAVIERRLREWMKQDKACNRIAAIPGIGLLTATAAIATMGDPKSFRSGREFAAWLGLVPRQTGSGGKVVLLGISKRGDTYLRTLLIHGARGVLYNAKDPGAWVERIGKRRPPNVVLVALANKMARTIWAILAHDRPYEKGFASAKPA

SEQ ID NO: 501610 - protein, 334 aa, unidentified
MNTPVVGIDVSKRKLDVALLVEGKVKTKAVSNSQEGFAELELWLIKQKVSLAEAHICLESTGVYSEPVALYWFDKGIKVSLVNPNCIKSFGSSENIRNKNDQVDAGLIARYCAVMAPSSWNAPSREQRQLRAWSNRLTALQDMRQQELNRLEVHETAKQIDVIPHVLAHIKWLDAQITQIVQDIDDHIDRHPGLKQDAELIESIPGLGRTTAAKVLGHIGDVRRFENAKALAAYLGVTPKQRQSGTSVRGRTMMSRMGNKHLRAALFLPSLVAKRHNPILRQFGQRLEANGLSKMAVAGAIMRKLVHMIYGVVKSGKPFNPNHMEKGLAIQDGI

SEQ ID NO: 501611 - protein, 481 aa, unidentified
MAKRKASTFERLRQGVMSRKELQRRLYSADPGLSVVHPNAAGIDIGNESHYVAVPADRDANPVREFGAWTAALEEMAQWLKACRIDTVVMQSTGVYWMAAYDILRRHGLDVQLVDARGTKNLPGRKSDVQECQWLMKLHTYGLLRSCFLPPEQIRQVRTIWRLRQQYVGQAGSSVQHMQRALIQMNIQLSNTISDLSGVTGQAIVRAILDGERDAERLADLRDRRVKASLPEIVNSLQGDWKDDIVFELRQAVACYDFFQQQIATCDRQLQQYLATLPAREVAGVSPLAEPCAPKKADKTRATSRARKPKGNQPAFDLEAELQRILGVNAKTIHGLDVMTIQTVLAEVGPDLSAWKTEAHWASWLNLAPKRDVSGGKVIRHTREHRTNRVGNAFRLAAQALFRSDTYLGAKFRHLRAKLGAGKAVKAMARTLACLYYRLVTKGQTWVDRGTDEFERKRQERELTSLQRKARSPGMQLVPVP

SEQ ID NO: 501612 - protein, 339 aa, unidentified
MTIKSEKIVQETKSLFAGIDVGAEELILLIRKNGTSHKPQKFANTAADRARLVKKLVSMPGITVCLEATGVYHFDLSVALHDAGVALMVVNPKSSHNFAKALMKSSKTDAVDADTLAQYAERMNFVAWTRPSDEKIALRSFARRIDALTRQKAAAKNNCHALVSSQETPKAVLRDVKLAISQLEKRIDCLSKEALVLIGKHAELERAFRLLTGIKGIAQTSAIALMGELLLLPQGLSHREWVKFAGLDPRAFDSGKSVHKKTRISKAGNRHIRSALYMPALSAKQHDPYVKAYFQHLVDNGKLPLQALCAVMRKLLHAIHGMLKHDKPFDNTRFYAIPA

SEQ ID NO: 501613 - protein, 351 aa, unidentified
MMIIGCDFHPRFQQISFLLEETGECGQRRLMHTAEAEQYYRSLSGTRVRVGIEATGSYGWFRRLLSELGHELLVGDATRIRASNPRRQKTDKRDAEHILGLLVEGRFPAIWQPPAENEQLRQLLLHRSRLVRLRTRVTNQLEGMAKNEGLLVPGGWSGKRRKGIEALSLPGWYGERRKDLLGLLDRLEERIAPLNKAVSQAAANNAEACLLMTHPGVGPVVSLAYVLTIGNWQRFQRGKQVGSYFGLIPAEESSGDKRRLGHISKQGNTLVRWLLVEAASTAQRYDPSWHRQYLRLSMTKHHGVAKVAIAHKLAVRLYWMLRSGEDYQHVRERGSHARQSECPGGRCKAAD

SEQ ID NO: 501614 - protein, 355 aa, unidentified
MYVVYAHCCGLDVHKRSITACLLVSRAGGKGQHEIRRFGTMTRDLLALADWLQSHHVTHVAMESTGVYWKPVWNILEGQFEVVLVNAQHIKAVPGRKTDIKDCQWIAELLQHGLLRSSFVPPTPIRQLRDLTRMRASLRQDHTAVANRRQKVLEEANIKLAAVASDWLGVSGRAILAQLLAGEEDAEKLAELSRGRLRSKLPAMQLALEGRMTEHHRWRLRVLQEQLVFLEAQIAKLEAKMQDQVSDYREARDLCTTIPGVEEVAAANLIAELGVNMEQFPSAQHLASWAGICPGNNESAGKRLSGKPRKGSAWLRRSLCQAAWAASHTKETYLAASPRARARSAQLWLWPIPSW

SEQ ID NO: 501615 - protein, 359 aa, unidentified
MQAKVKTISFQGQNIYIGIDAHLKNWTVTAMTENSLTKTLSQDPDAGILYTYLQRNFPGGNYFSAYEAGFCGFSVHRKLQKYGIQNIVVNPADIPTTDKERKQKEDRRDSRKIARSLKNGELNGIHVPDLETEELRSLVRYRKTLVKEISRNKSRIKSHLYCFGIDIPLTLAQASLHWSGRFTQWLETVQLSTCYGDIVLQSTLQTVKHLRSELLKINRQLRGLEKESKYSFKIKLLRSIPGVALIVAVTLLSELETIIRFKNLDKLCSFVGLVPTTNSSGDDERVGRITRRSNKPLRSLIIEAAWIASRNDPTLAQCYIELCKRMKPNEAIVKIAKKLLNRIRYVMKNEKEYVHSVVQ

SEQ ID NO: 501616 - protein, 430 aa, unidentified
MNESVSEQPVNPKVAAFVGIDWADLKHDVVLRSVGDPTKSEHQIIKSEINALADWIAQMHERFEAKGKVLVCLEQSRGALIYQLMAYELFELYPINPSQLANYRKAFFSSGAKDDRPDADLLSELVMCHRDRLKAWKPDDQLTRELASLNEGRRNAVDRRTDLANEIKSQLKLYFPVALQLLDNDLTTALAADLLVQWPTLAELQKVSPAKLRKFFYGHHSRQEKKILERLALIKEAKPLTTDLAILRPNALRVKLLAQQLKSLLPFIAEYERRIAEIFGSHPDRFLFDNLPGAGPALAPRLLTAFGTDRDRFEVAGDLLSLSGIGPVRIASGKKTGKHASVHCRRACPKFLRQSFHEFGECSIRYSPWAQACYQAQRGRGKGHHAAVRAVTFKWIRILFACWKQRTPYDPQRYFQALQTRGSDYAQTTA

SEQ ID NO: 501617 - protein, 342 aa, unidentified
MAEYVGLDVSKEETSFCVKDGDGMILARGKALSDPRSLFEALREHTLCPDRIVLETGSLSNWLARGLRGYGLPVDVIDARQVHGVMKLQHNKTDAKDADLLAEISRTKFCRPVSVNSEAAQKQRLLIKARSHLVRQRRDTENAIRGFLTSFGLRFAKGSGKLAGRVRAALEERPDLLVMIEPLLASVEAQKAQIERLHREVLAEAKASPAARLLMTIPGVGEVTALTFAATIDEPGRFARSRAVGAYLGLTPRRCQSGEMDYTGRISKYGDSLLRSLLYEAANSLLTIVLKAHPIKDWARRIKKRSSHKKACVALARKLAVIMHRMLISGEAFRWPEKQAAV

SEQ ID NO: 501618 - protein, 332 aa, unidentified
MSAPLIPVGIDVSKAILHVAILFPERSKPLYQTFDNSEAGYAGLQGWLEEQGVTSAHVCLEATSIYGHGVATALHQQGHRFSIVNPVRIHGYAKSQLKRTKADRPDATLIAQFCRDLKPGAWQPVTADIEALQAYTRRLDALTHMLSQEKNRLDISPEALKPDIEAHITFLEDQVKALKKQFRTHIGSHESLQTQAALLDSIVGIGPDTAARLLAEIGDIKAFGSARQLAAYAGLTPQEHTSGTSVQGKTRLCKIGNARLRKALYFSAIAFLRCAPELQPWRERLVAAGKTKMAIIGAATHKLIRIVYGVLSSGQLYDPEKLKPQKSAKVIP

SEQ ID NO: 501619 - protein, 464 aa, unidentified
MAAGKKLWRNRKERKEWAQRLQSEDPGLEVVHPHAAGIDVGNSAHYVAVRPERDVEPVRRFECFTADLHRLADWLRSCGVKTVAMQSTGVYWIPLYEILEDRGFEVYLVNARHTKNLPGRKSDVQESQWLLKLHTYGLLSNSFQPPAEIRMLRTYWRQRGTHVAGAATCILRMQKALTQMNVQLANVISDISGLTGQAIIRAIVAGERDPRKLAALSDRRVHATQEEIAKSLEGNWRPELLFVLQQEVEMYDTYQRRIAECDQRLQKHLASFADTLSVRTPNDKPKTKKAAAKNAPQFDLSSELQRITGVDLTRIDGIDVMVSQTILSEVGLDMSRWKTEAHFSSWLGLCPDNRISGDKVLGRGTRRVVNRAATALRQAANTLIRSRSYLGAQYRRLRTKLGAPKAITAMAHRLARLVYRMLKYGQAYVDKGTEYYEERFRQQQIHLLRKRAAKLGLQIAEIQT

SEQ ID NO: 501620 - protein, 328 aa, unidentified
MQGKVSSERTAMATVYVGIDVCKEWLDIHLHPLGRSFRVTNDTAGLRRLKRELDALDQMPRSALHIVMEATGKWHRAVQRSLHADGFYVSVVDPLRARLFAKACGFLAKTDRLDARLLAIMGEALKPAQTPPQDQALEALQELVNARSAANGERTALSNRMKTAVTAFLRKELTRRLAALDTHIARLDAEIERSIGAEPEMRRRLDILISIPGIGAVTAASLIAGLCELGACSGKQAAMLAGLAPLACESGERAGHRAIRGGRPAPRNAIYMAALSASRHNPDLAHFAERLKKAGEPNKVVLVAVMRKLIVLANTLITKNRIWTPNPP

SEQ ID NO: 501621 - protein, 388 aa, unidentified
MFFLGIDVGKNTHVASLVDEKAKIIFKAYSFANTLDAAEALLVKLEPYKDSLEIGMEATGHYWLSLYSFLAEHKFIVHVLNPIQTDGWRKGIEIRKRKTDVIDSVLIADLIRYGNFLETSLADEDILSLRNLSRFRVYLVNSVSDLKRKAIAVLDQIFPEYASVFSNVFGQTSKELLKSLSLPSDYENLSATKIEEVLSNITQKKKASKTISTLSDKASRSFGISFCKDSFAFQLKLIIEQICFIEEQIASVELEIDHLMSKLGTNIKTIPGVGSVIGAVILGEIGDIERFDNPSKLVAYAGLDASVSQSGEYEASSGKLSKRGSPYLRKALYMAAQRAEFCDPVFHAYYEKKRNEGKHHLVATNAVARKLCHTIYAILKKDVPYEVQ

SEQ ID NO: 501622 - protein, 330 aa, unidentified
MVELGIDVSKTKLDCTLLLDVETLRCRSKSVPNTLDGVKALLQWVERHSGCTAEHVRAALEPTGVYHEVATLALYEAGVRVYVVNPAQLRDFAKGHAVRTKTDAKDSLVLALCVAQVKKLIAWQPAPAEIRELRALMSRLDAVEGELRAELNRQEKAQIAADPALVLRSIAQAISFWQAERERLQQAIDEHIDRHPGLKSEQERLLSIPAVGQKTANRMLCMLHGGQFRSASQLAAYLGLVPVEHQSGTSIRGRPRLSKAGNARVRAALYMAAVTAIRHNPDVRTLYERLLSRGKAKMSALCAAMRKLVHICFGVFKNAQPYRPQIDQIA

SEQ ID NO: 501623 - protein, 338 aa, unidentified
MSKKVNKQLYVGVDVSCDTLDVAARTDTGVVERAAQFANTGAGHRHLIKWLTKRGRSARVVLEATGVYSLDLAVALDAAPRIEVMVVNPRAARHFADAGLQRSSTDATMAAVLREYAARMEFVAWTPPSAAVRELRAIGRRIAALTEEKTRELNRQHAAGASADTPAVVANDVAVNVRHLQRRIDELERHAVTLLRTDPQLQPAYQHVCSVCGIADTTAIQLLGELLVLPADMTARQWVAHGGLDVRHVTSGTSVHKVPRISKQGNAHLRRILYMPALVASQRDPHVRAFYEQLLAAGKKPLQALVAIMRKLLHAIWGMLKTNTDFDGAKFRKLPEAA

SEQ ID NO: 501624 - protein, 338 aa, unidentified
MALYCGIDLHSNNCWVSVLLEGQQVIKEKRIGNDLHQILEFLKPFREELEGIAVESTYNWYWLVDGLMDAGHRVHLTNTWAIKQYDRLKYADDRHDARWLAHLLSLGILPEGFIYPKEERGVRDLLRRRLFLVQKKTSFLLAMRGAFECRTGLRTKTNDVKKWTVDDIAPHIDDPFASLGISCLLGPVGVMNEQIQLIEKAVLKQGRLREEYRHLTTVWGIGKILGLTIMYEVGEIDRFKKVGNFASYCRLVKSDWWSNGKRKGTGNARNGNPYLSWAFSEAAHFATIHYEDAKKYVQKKRSKTNGIVAIRALAHKLARASYHVMKDQVDFDPERLFT

SEQ ID NO: 501625 - protein, 333 aa, unidentified
MLPPNCGTATPYILRNTVGLDISKLTFDASAMVGNAEYSAKFDNDSKGLDQFSDRLKSLGCQNLHICMEATGNYYEEVADYFAQYYSVYVVNPLKISKYAESRFKRTKTGKQDAKLIAQYCRSAQESELVKRQKPTDEQYRLSRMTAAYAQIKSECAAMKNRHHAAKDEEAAKAYAQIIKAMNEQLEVLKEKIKEQTEKPNCKEGVKRLETIPAIGRMTAAVLFHHLTSSKFETSNKFAAFAGLSPQQKESGTSVRGKGKLTKFGNRKLRAVLFMPAMVAYRIRAFPDFIKRLEEKKKPKKVIIAALMRKLAVIAYHVHKKGGDYDPSRYKSA

SEQ ID NO: 501626 - protein, 416 aa, unidentified
MDLVHPRCAGIDVSKRDAKVCVRVAGRGRGGAASTVTTWGAVTNQVLALREHLVDAQVTLVVMEATGDYWKPFYYLLEDGPFEVMLVNARHVKNLPGRKSDVSDAAWLAQLGAHGLVRGSFVPPEPIRNLRDLTRTRTAIVRERGREVQRLEKLLEDAGIKLSSVASDITGVSGRAMLDALISGQQDPMALADLAKRRLRSKIPELTEALTGRFTDHHAFLARLHLDLIDQHTRAIMDVTARIEVVIEPFQGIRDLIVTIPGVSTGVADVIIAETGADMTRFPTAAHLASWAGTCPGSNESAGRIKSTHTRPGNPYLKGALGVAAMSAARSKDTYLSVKYRRIASRRGPLKAVVALEHAILTATWHMITTGAFYDDPGSDFYTRRNPDKTKQRAIDQLHKLGYTVTIEPHQAAMGT

SEQ ID NO: 501627 - protein, 387 aa, unidentified
MLMAAVMIGVDPHKGSHTAVVIGAAEEPLGELRVRASKTQVDELVAWAAAWPRRTWAVEGAGGLGRLLAQQLIAAGERVLDVQPKLAARVRLLEAGDTNKNDPNDALSVAVAALRSKASREVTADDYTAVLKVWSKRHRDLSRTRNQVACRLHAVLCELIPGGHSKEISAAQAAKILDQLAPSGAVALARAELAAEFLQDIRHLDAQLRDTKKKLAAAVRASGTTLTEIFGVGPVIAGTVVGDVAGVSRFPSRDHFASYNGTAPVEVSSGNRKIHRLSLRGNRRVNHAIHMAAITQIRHRHSEGRAYYDKKAGRGKDSQGSAPLPQAPDQRRHLRPPPDRRPHGRSLPGQGSGRAPGERLCIQRGQLTPRMPALRTSHSRTRHQPTT

SEQ ID NO: 501628 - protein, 349 aa, unidentified
MTSLPEVVDVVIGVDTHKHTHTAAVVVAGTGAAVEHRTVDTDPHGYDHLVSMADEHSGARVWAIEGTGGYGAGLARFLTERGETVIEVDRPNRPARRNGAKSDPLDAVRAAREALTREHHAQPRAGGDRAALSVLLAARRSAVDAATISQCQLHALVTAAPEVVRAKFRGRSTRSMLSTATRLRTSPNWDIETATTTQVLRSLARRCLALETEARDHEQAILAIVRTWRPDLLDQQGIGPIVAAVVLCAWSHPGRCRDEAAFANLTGVAPIPASSGQTTRYRLNRCGDRQLNRALHVIALTRLRHDPATRAYAERRRGEGKTNREIKRCLKRYIARQLYRQLEAGQPPT

SEQ ID NO: 501629 - protein, 444 aa, unidentified
MIRKVMDAIYPRVCGLDVHEETVVACRRRLTSDGQAESEVEIFKTTSAGLRLLSDWLTAWEVTHVAMESTGVYWIPVWNVLEGRFKLTLENAQHLKKVPGRKDDISDAEWIAQCMQCGLLRGSFVPPLEVRQWRQLTRHRTKLVDQRTSVINRLHSVLEQGNIKFSNVASDIMGVSGREMIKAMSKGESDPARLAALARGRLKAKYEPLVEALDGQLNENQRWMLGRLLEQVGILDKEIESYSERIKELMAPYQTQLERLDTIGGVGLRSAENILAEIGPDMAPFPTDDDLVSWGALCPGKNESGGKQGSRKTPKGNKWLKRALVEAAWAATHEKDSYLAALYRRLAPRRGKKRAIIAVARTILQSAWHILKEGVVYKELGGDHFDRLNEEKSTKYFVKRLEKFGYEVVLKPKKAGKETVKPKPKRIKKSVAEPKPKKAREATV

SEQ ID NO: 501630 - protein, 344 aa, unidentified
MKNTTIAIDLAKSVFEIGISDRPGHVARSYRLSRVELSSFLAAQPPATVVMEACSSSHYWGRKFQSFGHEVKLLPPLYVRPYVQRSKTDKTDVKGMLEAWRNSDIRPVPIKTESQQQLTSLHRVRSTWMAARTMRINSARGLLREFGFVFPAGASSLPGHVRALIENADEAVPIQLRDLLHELVLEIGELETRIKVVEKHLEALARQTPVVERLQTIPGVGLLTATALVGFVGDVARFPSGRHFACYLGLTPREHSSGGRRSLGRISKRGDAYLRMLLIHGGRAVLWGARSKTDPDRLRSWALDLQHRRGHNKAAIGVANKMARIVWAVWKSGTPFASRPRSVG

SEQ ID NO: 501631 - protein, 403 aa, unidentified
MRHVIAFDISMGKSYMVIYNAQKQCIFEKEIKHSKSEFEELQKKIHELTNETGKSPEIVFEATGIYSRQLERFMQDNQYTYCLLNPLEAKLQCDSLRIHKTDRSDAHRLAITHFTVTRRVSHGTDHLFHQLKSLSRFYSELDGELSMIRSRMHKVIQLTFPELEKMFTSKSDLFLNFVQLFPHPDCVLNLSKTIIKNRIRANTNKKISTIMAEKKAIQILEIAKNSYPAVSQNDVLCDQLKVYARRYQELLHQKEHCINKMVHLAEQRAEYSIIVSLPGIGPNTAVRLMAEIGDITRFANNKQLNAYAGIDIRRFQSGKTFYKDKINKRGNKHLRKLLFLIIQNMIKQRRYGRNHIIEYYDKLKTQPYNKCHKVASIACVNKLLKLLFHLITHDIHYDYRLTA

SEQ ID NO: 501632 - protein, 338 aa, unidentified
MSLYAGIDLHANNHYLAVIDETDRLVASRRCPNELASIGRALEPHREELVGIAVESTFNWYWLVDGLQESDYCVHLVNTLAAQQYRGLKYTDDKTDARWLAQMLRLGILPTGWIYPKKERAVRDLLRRRSQLVRQRTASRLGLRNVLERTTARRLSTNALKRLTRDDLAGWIEDENVRLSMAASLAMIEAASEQIEHLERTILEQAKLKDGYRVLTTIPGVGPVLAATIQYETGDLGRFATVGHYVSYCRLVKAERSSNQRIKGQGLRKNGNPYLSWAFHEAAHFAVRFQPQARRWYEKKRARTCALVAIRALAHKLARAAYFMMRDQVPYAPARLFG

SEQ ID NO: 501633 - protein, 371 aa, unidentified
MDSSCDSVGIDVPESLLVKSKEEPIVQKDTLVSVDIAKDVFEVGVSDRPGHVARRERPRRPSFLALMAQLPPATVVMEACGSAHYWGRRIEELGHVVVLLSPQYVRPYVVRNKTDRTDVDALLEAYRNEQIRAVPIKTVPQQLLGALHRLRSGWLGERTRRINALRGLLRELGFFIPEGRKHVLPDAWEIIQDSDSSLPEALRPSLSALCEEIVWLSTRVEEIERQLEALAKQLPAVARLRSVPGIGLLTATALYAFVGDISRFPSGRHLASYLGLTPREYSSGLRRRLGRISKRGDSYLRQLLIHGARAILWHAKRMKQPDRLRSWALKLEKKIGHNKAAGALANKLARTAWAVWKNDRDFEPAPEQTAA

SEQ ID NO: 501634 - protein, 383 aa, unidentified
MEALMYCCCGLDVHRDLIEACILRGEGLEPEIIRESFGTTKPELKRLTLWLSKNDCFSVAMESTGVYWKPIFEALELSSEYLEQIWVVNANHMRNLPGRKSDVKDAEWIATLLRHGLLEKSFVPPAPIRDLRECSRLHRTFVQERCRYVNRLEKFLQAHGFKFSSVMKDILSVSGRKLLNILRDTGSLTPLDVAENCRRLRRTPEEISAAVCGNLTVAEQRLLKQLLHKIDSCREDIDSILVDMRLLSQQFQEQLAIIDSIPGFDEESSIEIIAEISAAPQDHFSSGEKLCHWAGVTPRNDETAGKMKSRKTLHGNPYVKSILCQAAWAAVKVRNSPFHDWFWSHQHKLGQKKAIIAVCRKLLLLIYLLLQTKQYYKQPQKVA

SEQ ID NO: 501635 - protein, 457 aa, unidentified
MAKKKRESQNQAVLPILKPNAAGIDIGATEIWVAVPADRDPQPIRCFPTFTEDLHRLADWLKACRITTAAMESTGVYWIPLYQILETRGFEVCLVNARYYQNVPGRRTDVSDCQWLQYLHTVGLLRASFRPEPQVCVLRSFLRHRDNLIQIASTHVLHMQKALDQMNLQIHHVLSDITGLTGLAILDAILAGERDPKVLAKLRNPRVQASPQTIMKSLVGDYRVEHLFTLRQSLAAYRYYQQLIADCDREIEKQLLQFQDKVDVATKPLPPLKVQRTTRYSNAPSFDLRGHLYRTLGVDLTAVPGINVLTGHTILTEVGPDLSGFRSASAFASWLGLCPDNDKSGGKILSVRTRKVNSRAALAFRLAANTLHRNKSWLGDYYRRMRAKLGAPKAITAAAHKLARIVYHLLTTHQPYDESIYAKYQQQSRARATAKLKKQAIFLGFQLVPMHATPAAH

SEQ ID NO: 501636 - protein, 312 aa, unidentified
MSSPSAFVGIDVSSQRLDVAIGDDPLESFANDDAGVVALCKRLSTCNCELILLEATGGYEALAVATLAGAGLPVRVINPRQVRNFAKATGLLAKTDALDARVLRQFAECLRPVVLPHKSQAARELTALVARRRELVQMLTAEKNRLKLATRAVGRDISAHIRFLEKRIKDSDDELKGRIQADDDFRVTDELLRSVPSVGRVSSSTLIALLPELGSLPHRKIVKLVGLAPLNDDSGQRRGPRHIRGGRAEVRTVLYMATISALRSNPVIRTTYQRLVASGKPKKVAIVACMRKLLTILNAIVRDQTPWNPSIA

SEQ ID NO: 501637 - protein, 341 aa, unidentified
MKLIRVGVDLAKNVFQLHGVDRSEKTVWGRKLVRGDWIKELLERIAPGCEIGMEACSGAHHWARMLQAQGYTVKLIAPQFVKPYVKSNKNDANDAEAICEAMSRPSMRFVAIKTVEQQDIQAVHRVRSGLMDQRKAKANQLRGLASEYGLVASKELLHLRSAIPRWLEDQENGLTERFRRLLHGLWGDLKALDERIEELDREIEQIARQDPVAIRLQQVRGIGPLTATALLATVGDASQFASGREMAASFGLTPKQNSSGGKERLLGISKRGDAYLRSLLVHGARAVIRTAQAKTDRLSTWVIRIATTRHPNIAAVALANKTARVAWAMLTKGTDYQPQAA

SEQ ID NO: 501638 - protein, 449 aa, unidentified
MGRYAGVDWAAEKHDVLVADEAGEELLAATFAHEEKGLRALCGTLVRLKVELVAIERPDGLLVERLLDAGLRVLALHPNQVAAARPRFRVSGGKSDRFDAFVLCELARTDSHRFRVLEPDTDETKALRALTRAREDLVHAKVALTNQLRSELECFWPGPVGLFTKLDSAISLAFLERYPSPVDARGLGEQRLAAFLARQHYPGGQNPAQLLAKLRRAPEGRVGEAELNARRQLVLGLVATLKTLIAQVNRLERQITTAVRAHPDGEIFLSLFKDPNSVVTAAELLAEIGDCRARYPTGDALAGDAGQAAVAIESGKRKAACFRWGCNKRLRGAFCTLSDSTRHWHPWAQDRYAAARARGHDHPRAMRTLGRAWCRIVWRCWQDRVPYDPARHRGLQQHVTVTIPTPSGPRPDLAATQRMAGAAVTHKAAQRAEREALDGKPPSANPLPA

SEQ ID NO: 501639 - protein, 347 aa, unidentified
MVHVGLDLSRTRLDVHVMDESGAPLAVTTALPEAGGLAALASRIEAEFGSPVYAAIESMNGARFVHDQLELAGWQVEIADAQKVKGLAPLACKTDKIDSWVLAELSRRDLVPAIWLPTPAVRAERERARWRLHLVRHRTALKNRIHATLLAFGHPCPVSDLFGTGGRELLARLALPEPWAADTTAALHLIDELDHEIAECERALRIAGADHRYVPLLMTAPGIGWVLGYTIAAEIGDIARFASPTKLAGYTGLCPRVYQSGGKDHRGPLSKNGPKYLRWALIEAATHACRHPAYAERYRRTKARLGRQRGPKIAQVDLARRLAEAIWHMLSTNKPFAPAGAASALAS

SEQ ID NO: 501640 - protein, 458 aa, unidentified
MPKSTTGNRPELKPINVGAAAIDIGSRMHMAAVDPTCTETPVRAFGTFTQDLHDLANWFKACGVTSVAMESTGVYWIPAYEILEQRGFEVILVNARYAKNVPGRKTDVSDAAWLRQLHSYGLLRGSFRPNAEIATLRAYLRQRERLVEYAAAHIQHMQKALMEMNLQLHHVVSDITGATGMRIIRAIVAGERNPNVLATYRDVHCHSSIETIRAALVGNNRDEHIFALTQSLELYDTYQAKMLDCDRKLESLIAALTDKGAKPVGKLSRPRVKTKQVNTPSFDVRAALYGVLGVDLTEIHGLGPSLALKLIGECGTDLMAWPTAKHFTSWLCLAPGNKISGGKVLSSRTRRSSSRAAALLRLAATAIGRSDTALGAFYRRLSARAGKAKAVTATARKIAVLFYNTLRHGMTYRDPGADHYEEQYRSRVLANLKRRAKSLGFVLQAVPCDAAVAEVAVS

SEQ ID NO: 501641 - protein, 354 aa, unidentified
MDHFAGLDVSVKETSVCVVDDAGKIIREVKVVSEPEALLTVLKNPAYRFKRIGLEAGPLSQWLFSALAEAELPVVCVETRHMQAVLKAQINKTDRNDARGIAQMMRVGLFRAVHVKTLRSQKLRMLLTHRKLLQSKAIAVENDLRGTLRNFGLKVGMVGKVKFETRIKELVENLPDLAVLIEPMLIVRRVLREQIVVLHRRLLAIVRDDEVCRRLMTVPGVGPVVSLTYRATVDVPARFHKSKAVGAVFGLTCSKYQSGEVDRSGRISRCGDEMMRVMLYEAAQAMLLRSAKWSWLKAWAMQIARRRGMKKAIVALARRLAVIMHRIWVDGTEFRWTREQATTAAMKTGQHLTR

SEQ ID NO: 501642 - protein, 337 aa, unidentified
MSVYVGIDVHRKRSQVAVVTEDGTVQLNKNVVNGSEPMLRLIGELPSGTPVAFEAAFGWSWLAELLEDYGFEAHMVHPLRCKAIASARLKNDRVDAAILAQLLRADLLPEAWIAPAKVRQLRALLRHRISLVRLATQARNRIHAVAADHGYDRSASYWTGPGRGWLAELDLPAASREIITDCLAVIDGLAPVIDRIDGELHAHAKADPRVKVLRTLPGVGEFTALVMVAEIGDVSRFGSARKLASWAGLTPTVRGSDLHVRHGHISKQGSVWLRWAMNQAAQTAKRSPEFAASYAAIARRRGKKIATIAIARKLLTRAWHLLNDMQAADAGTPPRRP

SEQ ID NO: 501643 - protein, 366 aa, unidentified
MITTKVKEKEVSQRIVADFSQFTIYCGLDVHKKNWNVSVYVDGLFARRFQQPSNAEALLTFLQSNYPNGKYKACYESGFCGFSVQRSLQSVGIDCIVVNAADVPQTSKGALSKTDSSDSKRIAEAFAKGLLRPIHIPLAEDEADRNLIRYRKRVQKDLKAKKQIIKSTLNILGISIPAQHDKSYWTNNFIQWVNDIKTQSTSTNTTLSLCVGDVKGLRKRLFEINKLIKQMADSDKYNARHELLVSVPGIGLITAMTMITEVQDIKRFDSFDKFNSYIGLCPSEFSSGEQIRKGKMTTRCHKELRSLIIEAAWIAIRHDPALTQKFAELITVKTKKRAIVAIAKKLLSRIYSIWYNNIKYEKGIVK

SEQ ID NO: 501644 - protein, 469 aa, unidentified
MDLVYPCCCGIDVHKKIIVACLIILCADGQKQTEIRTFRTVTQELLECLDWLKAAGCTHVAMESTGVYWKPIYNLFEGHIELLLVNAQHIKAVPGRKTDVNDAQWIAQLLQHGLLKGSYIPPAPQRELRELTRYRVSLVEERSRAVNRLQKTLEDTNIKLGNVATDIMGKSARAILEALLAGETDPVVLADLARGKLKSKRAQLEEALVGTVKPHHRFMLGEQLVLIDTLDEAITRVSQEIEDRLTPPSDPRLAGNESQIETPEPCQTAQEEELQAHQEQDSQEASPSTDPAQTEQAQKGEPLSWKEAVALLDTIPGINQRAAEGILAEIGIEMSRFPTAGHLASWAGMCPGNHESAGKRLSGKTKKGSPWLRRLLVESAHAAAHKKNSYLCAFYHRIKARGGGKQAMVAVGHKILVTIYHLLDRRVPYQDLGENYLDEHERQAREKRFVRGLEKLGYQVSLEPATSVA

SEQ ID NO: 501645 - protein, 391 aa, unidentified
MIYVGIDVAKDKHDCFITNSDSEVLFKAFTIFNNLDGFNDLYQKIESVMDDVTKVKVGLEATGHYSYNLLGYLIDKGLPTYVINPLHTNLYRKSLSLRQTKTDKVDARTIASMLMSDVNLKSYSDTSYHNEELKSLTRYRFDKVKERAKLKTSVSRLVCILFPELEKLVPTLHMASVYALLSEFPSAKHVATAHLTRLTNLLSKSSKGRYGKDTAITFRDSARASIGSNMPAKSLELKHTIKLIQELDSEIDEIENEIKIIMDEINSPILSIPGINYRMGAMIIAEIGDFNRFDSPDKILAYAGFSPSTYQSGQLDGAYAHMEKRGSRYLRYALYNATKYVCHWDPTFAAYLAKKRAEGKHYNVAISHAVKKLVRVIYHLEKTKQQYIKAA

SEQ ID NO: 501646 - protein, 346 aa, unidentified
MKIVGCDFHPSFQQIAVLETSTGEIEQGRLCHGDGEAEQYYRQLEGPALIGMEAVGNSLWFEQLMQQLGHELWIGDAAQIRASYVRRQKTDKRDAGHILRLLMEQRFPRIWVPSAAERDRRQLLLHRHKLVGMRTRVKTELQHLALNQGMQKKRKLWSVQGRADLEKLSLEGWTRKRREDLLAVLELLEDQVEKLDDAVKEIAADDRQAQLLMTQPGVGPVTALAFVATIGDVRRFKRGKQIASYLGLIPAERSSGDKRRLGAISKQGNVFLRTLLAEAAQSAVRHDAEFRREYRHRCRQKPTGVAKVAAARKLAVRLYWMLRTQTPYAAAVHNEGSPSHPVVSVS

SEQ ID NO: 501647 - protein, 416 aa, unidentified
MQHDQDVAVYIGLDWGDRAHAVQLQPAAGGPVEQLTLEQQPHVLHGWVAQLRERFGGRPVGIAIEQRRGAVIHALMQYEFLVLYPVNPKALARYREAFHPSGAKDDPTDAALLLDLLRKHRDQLRPWHPDTVTARTLQLLCEHRRKLVNLRGGLTNRITSLLKQYFPQALDWVGALDSRQACDFLARWPTLAAVRRARPTTVRRFYQQHNCRRAPVIDTRLAEMATAQPLTTDPAIVDTLSLAVQSYAAQLRPLLEAIDTFDTQIATVFAAHPDQALFVSFPGAGAVCAPRLAAAFGTVRSRWDTATELQSHMGIAPVTERSGKALWVHHRLACPKFLKQTFHEYADQSIRFSAWARAYYDQQRGRGNDHHAALRSLAFKWMRILFRCWQDRTPYDEARYLDALRRHGSPLVERLT

SEQ ID NO: 501648 - protein, 476 aa, unidentified
MATTRPSGLNRKQRRELARRLQAADPGLKVMHPNAAGIDVGNSAHYVAVRPDRDPDPVRRFDCFTADLHRLADWLQHCGVTTVALQSTGVYWLPLYDILEGRGLEVYLVNARHTKNLPGRKSDVQESQWLLKLHTYGLLRNSFYPSADIRVVRTYWRQRADHVRAVSTCIQRMQKTLTQMNIQLANVISDLSGWTGQRIVRAILAGERDPQTLAALSHPGIHASRDAIAKSLEGTWRPDLLFVLQQEVTMYDAYLQRIEECDQALEQHLKSFADKPADTPDAVASPAARDQARRRIKHRRKAGSHTPQFDLGRELRRISGVDLTRIDGIDVGVAQTVISEVGLEMSRWEDEHHFASWLGLCPDNRITGGKVLRRGTRHVINRAATALRLGASTLLRSQSYLGAQYRRFRGKLGAPKAITAMAHKLAILVYRMLRWGHAYVDKGMRYYEERHRQQQIRLLKKRAAKLGLQIVEPQVA

SEQ ID NO: 501649 - protein, 347 aa, unidentified
MQFYTKQHKSYCGIDLHARSMYVCVLNQDGDIVMHRNMKASPDTFLRTVAPYRDDLVVAVECVFTWYWLADLCAQEGIPFVLGHALYMKAIHGGKAKNDKIDSQKIAVLLRGGMLPQAYVYPAEMRATRDLLRRRLHLTRQRAELLAHIQNTNSQYNLPEIGKKLAYKANRDGVAERFPDPAVQKSMEVDLALIGYYDHLLSDVELHIVKAAKQHDVQTLYLLQTVPGIGKILSLVLLYEIHDIQRCPRVQDFVSYCRLGKCAKESAGKRYGTSGSKIGNAYLKWAFSEAAVLFLRDNPAGQQYLARLEKKYGTGKALTVLAQKLGRAVYDMLRRNTGFDMDHFLHG

SEQ ID NO: 501650 - protein, 420 aa, unidentified
MKSPSNLEFTAFVGLDWADKKHDICLQAAGCEAREFDRFAHRVMAIEQWALSLQQRFGGRIAVALELSKGPIVYALQKYDFLVLFPINPSMLAKYREAFKPSRAKDDPTDAELALDLLVRHRERFKPLQPQSEPMRTLAYLVEQRRRLVDDQVRYTNRLGSALKQYYPQALDWFADRDTVLFCDFIKRWPTLMQVKRARKTSLVAFFKAHNMRFPKLIEKRICAIKTAAPLTHDGAVITAYKLQALVLVEQLQVTLQAIGCFDQEIAAITPKLPDYALFRALPGAGSALAPRLLVAFGEQRDRFASAAECQKYFAVAPVTERSGDKTWVHWRWQCSTFLRQTLVEWAGQTINKSFWAGAYYRQQREKGSSHQAAVRALAFKWVRILYRCWQTRTPYDESKYLEALRRRGSPLLKQLGETM

SEQ ID NO: 501651 - protein, 393 aa, unidentified
MICVGIDVAKDKHDCFILSSEGEVLAGVFTIQNNAEGFDTLLQTIRRCTRPEDKIKVGLEATGHYSYNILGFLIDKGLPTYVINPLHTNLYRKSLSLRKTKTDRVDARTIAAMLMSDVDLKSYTDTAYHNEELKSLTRYRFDKVRERAKLKQSVSRLVTILFPELEKLVPTLHMASVYALLSEFPGAKQVAGAHLTHLKAVLSDASKGRYGRDMATTLRDAARCSVGSVMPAKSLELRHTIRLIRELDAEIKDIEAAIQSMMDEIQSPITTIPGIGVRMGAMILAEIGDFSRFDSPDKILAYAGMSPSTYQSGQLSLSGTYSHMEKRGSRYLRYALYNATKYVCLWDSTFAAYLAKKRAEGKHYNVALSHATKKLVRLIYALEKSKWPYSTAA

SEQ ID NO: 501652 - protein, 310 aa, unidentified
MDVIIDKGCGLDVHKETVVACVMGEGIKKEIRTFSTMTEDLFRLKSWLSEKGITHVAMESTGPYWKPVFNVLEDSFEVILANARHIKNVPGRKTDVKDSEWICKLLRSGLLAASFVPPQAIRELRDLTRYRRKLTQAISSEKNRVQKVLEDANVKISSVVSDTFGVSASRMIEAILAGNLNPEAISDLAVGKLKGKKEELKKALVGNFQEHHRFMIQASLDHIESLEKIIAGLDQEINRKLKDYHREFELLQTIPGVKEQGAASIIAEIGADMGIFPSEGHLSSWAGMSPGNNESAGKKKVERRPTAIRI

SEQ ID NO: 501653 - protein, 388 aa, unidentified
MQNVADQSVAPTTIGADLYAIFISLELSRSTWLATSLSPGRGEKMSKHSVSGGDIAALLARFSELRRKACARTGKSFPIVVIQEAGLDGFWIHRVLMSEGIESHVVDAASIATPRRRRRAKTDRIDGETLLRALLAHKRGEPRVCSMVRAPTPEDEDRRRICRERKVLIMERVQHVNRIKGLLFSQGASGYEPLRRDRRARLDALQTGDGRRLPQHLKAQVCRELDRLELLLEQIKAVEAERDALLSAEQTKVSAPPPMLLGVHGIGPEFASVLWSEGLSRHFDNRRQVAAYAGLAPTPWQSGSVNREQGISQSGNPRLRTTMIQLAWLWLRHQPRSALTLWFQDRNERNGGRRRKTTIVALARKLLVALWKYVSAGVVIEGAMTGPA

SEQ ID NO: 501654 - protein, 377 aa, unidentified
MTGISAAISNDPFIYAALELSKNSWLLAIQVPGRDNPSLHPIKGGDAEGLMARLDAARKRVAKVTGQMPTVTLCYEAGYDGFWLARFLDQRGIGCLVMEPASLQVNRRARRVKTDRIDVERILHTLIAWCRGERHVCSMVVIPSVEEEDLRRSHRERDRLIRERTAHINRIKGLLFGQGIRGINVKSRYKTLTPADLVTGDGRALPERLGREIAREIERLALVQAQIVVIEHERDHPATSCVATERKRHQLLRLKGLGPALSSTLTREVYYRRFANRRQVASYIGIAPSAYDSGDGRRSQGISKAGNRLARVAMVEAAWLWLMHQPDSALSLWFHHRTQGQKGRIRRVMIVALARKLAIALWRYLETGLIPEGAVVK

SEQ ID NO: 501655 - protein, 789 aa, unidentified
MITAHKIVLDPNPAQENYFARACGTARFAYNWALAEWNRQYKAGERPSEAALRRQLNSLKDDAFPWMREVTKNAPQQAIKNLGTAFKNYFADLKKPKRQRRFRHPQFKKKGKHDSFRADNGADKDHPNAVEVDDKRVKLPVIGWVKMRESLRFVGKIKSAVVSRTADRWFVSLTVEIEHTPPNRENQAVVGVDLGIKALATLSDDTPAVENPKALRRNLKKLKRLSRSLSRKVKGSANRRKAKCKLARLHARIANIRNDVMHKLTTDLVTRFDVIGVEDLNVRGMMANGRLARAVADVGMFEFGRQLVYKAAMTGARVVMADRWFASSKTCSDCGHVQTGLTLSDREWSCVECGVIHDRDRNAAINLMNFAASSAVTACGEMLWGRRRGCGTIVAVDQPMERPMKRDDLSRSLVAFDQASTLVAVVELGLRSWLVAGLVPSLTRQPLKKLRSDPDALLGLLLRWRDQATKAGGRIKRMVVAFEAGRDGFWLARWLRARGIEAHVIHPTSIPVSREHRRAKTDRLDTGLLMRAVLGWLRGEPKHCSMAAIPTIAEEDSRRPNREREKLVGEQTRAINRIKSTLVRFGIRAFKIKLRQASKHLEELRGPEGEPLPPNTMAELRRDLARLQIIRAQITEIERARLERLKRVPCQGTNPMIRMLTKVMGIGIETADVLVHEALTRQLRDQRAVARYGGLTGSPDESGIKRRERGLARAGNARVRRSMIQLAWRWLMYQKTSALAQWYQARTAGAKSGLRKAMIVALARKLLIDLWRYVTIGKVPPGAVLRPAT

SEQ ID NO: 501656 - protein, 417 aa, unidentified
MFRRCVSGIDVHKKMLAVVVRRQEGGQVTYVKRKFGATKSEIGHLAAWLKHEGVEEVVMESTAQYWRPVWYGLEPHFRLHLSHPLKTKAPLGRKRDYRDAQRLADRWCSGDLEESLIPLSEQRGWRWMTRARVDLKRKVTRVRNQVEGVLEEGGIKLTSVASDVFGVSGWAMLERIADGETDVEVLVGEARAALRKKKAELQEALAGYLGPAYRMLLKQYLDQVRLLRKQIEELNKEIALAMKDYTEVLCRLCKVPGIQLEAAQELLAEIGPKAAAFPSAPQFASWAGVCPGCQESAEVCYSRRSAKGNRYLRRVLTQVAWAAVRSKDNFFGSLFARLKPRIEAKGAAWAVAHRIAKVVWLLMHEGVEYVEKGPGQPSVKSLTNKLRRMTKQFAAHGLDIANVLAQVSATTLSEPAS

SEQ ID NO: 501657 - protein, 352 aa, unidentified
MGQVTMADQQSHVTVGVDSHKDVHVAAVIDQVGQILATTSMATTDRGSGQLVRWAQRHGQVDRFGVEGTGSFAAGLTRYLRARGYQVLEVNRPNRQTRRRRGKSDTVDAESAARAALAGQASTPKAADGTVEMIRALRVARRSAIKARTQAANQLDSLVITAPEELRVQLRGLATARRVEVAAAFRPGSLTTPVAATKLALRELARRHLALTAELERLDTELAKLVRKAAPKLVARRGVGTEVAGRLLVAAGDNPDRLRSEAAFAHLCGAAPIEASSGKTVRHRLNRGGDRQANNGLWVTAMCRMHSDQRTKDYVARRTKEGKSKKEIIRCLKRYIARELYRDLVTAVLDKP

SEQ ID NO: 501658 - protein, 338 aa, unidentified
MSVKVIGLDIAKHVFQVHGADGSGKAVLRKRLRRNQLTDFFGSIPRCVIGMEATRGAHYWARVLGSFGHEVKLIAPQFVKPYVKGQKNDSQDAAAICEAVSRPEMCFVPQKSIEQQDLQALHRIRSRLLGSRTQLGNQIRGLLAEYGIIVPLHLSQLRLHLSALLDGPHPQLTSFAQELFASLYEELCAIDDRVEAMQVRISRVFASHEACQKIAEVEGVGPLIATAVVAAIADGRAFRNGRQFVAWLGLVPRQHSSGDKQRLLAISKRGDPYLRMLLIHGARSVVYRCSSKADARSRWIADKQRRRGTTKACVAVANKNARIIWALLAKDEPYRRAA

SEQ ID NO: 501659 - protein, 338 aa, unidentified
MELYAGIDLHSNNNVLVVLDESDRVIYQKRLHNVLADILAALASCGGAIKGVAVESTYNWYWLVDGLQEAGHKVHLVNTAAVKQYDGLKYSGDFSDARHLAHLLRLGILPEGYIYPREERAVRDLLRKRSQLVRTRTTQILSIQNLLARNLAIQASGNLIKGWQDANIDALELMSEQKLALKSNLALMHCVDEQITLLEKAILTKGKLKSEYKSLRTVSGIGEVLALTIALETGELSRFAEPGNFASYARTVNSRRESNGKKKGEGNTKCGNKFLAWAFVEAAHFAVRYDPVIARFYQKKCAKSLSVVAIKAVAHKLARACYHVMKKGEPFDVKRAFG

SEQ ID NO: 501660 - protein, 342 aa, unidentified
MKITTIGIDLAKNVFQVHGVDPHGKTVIKKQLKRDQMAPFFANLAPCLIGMEACGSAHHWGRKLQVLGHTVRLMAPQFVKPYVKTNKNDVADAEAICEAVARPNMRFVPIKTIDQQSVLALHRARQGFVKARTAQANQIRAMLAEYGLVLPVGIRHIPERVPELIEDGELLLPGQFRLLIQRLVEHFKELDRQVLELEAQIKAWHRANPASCKLEKIPGVGPITASALVASIGDARHFANGRQVAAWLGLVPRQNSTGGKAVLLGISKRGDTYLRTLLIHGARAVLSHAWRQADQCSWLHKLVQRRNANVAAVALANKNARIIWALLAHDRSFQLDYVSVAP

SEQ ID NO: 501661 - protein, 407 aa, unidentified
MKELYIGIDVHLRQHVVTVIPAVKFQENKTSWKKTRSIKIGNNRPDFEYLDSFIKSQVTKANQVCVGIDHTGGHYSEPIGYFLKSQGYEVYYLGPVSVKAIKERLLGEENKTDKIDSATLAYLLYLRDFYDVSLHISATSVNFESRASILRSLALQSQYYQKLGTQTTNRLRQYTHAVFPEGEEKYFTRLVKIFPYNPTIAEIINDPDVLKKVRMSTNAREEFLELAKKTVGIPGETYKFIIQDLALLLKTNKERIIAIDRTIKEAVLEHPYAQILMSFPGVKEKSAAIIISTVKDINNWPTKKQFRKGLGIYGTLRETGKKQVKFRRGLSGDRLCRLTLFLICFTIIRLKNKNDFKDFYERQIKKGKPRIKALVATMGKLAEIMYHCLKFNEPYQYQSLRKMKPKG

SEQ ID NO: 501662 - protein, 413 aa, unidentified
MRLFAGDDWAEDHHDVELMDSAGRRLAKARLPEGVAGIARLHAMIGGQLGEDADEDDAGQVAIGIETDRGPWVAALIAAGYTVFAINPLQASRYRERHGVSGAKSDAADAHVLADMVRTGSHQLRPVAGDTAQAAAIKVVTRTHKTLIWERTRCTQRLRHALRDYFPAALEAFEDLDAADTLELLAKAPDPASAARLTTAQISAALKRARRRDIAAKAERIQAVLRAAHLGQPDVVAAAYAASVRALVAVLITLNEQVKTLQGQVEAYFGQHPDAEILLSQPGLGPVLGARVLAESGDGPGRYISAKARKNYAGTSPITRASGKKKTVMARHVHNDRLIDALISQAFTALRTSPGARAYYDHQRARGAGHNPALRQLANRLTGILHGCLKTRTLYHEATAWPQYAATSEKTAA

SEQ ID NO: 501663 - protein, 396 aa, unidentified
MLSMVALQGKLEFAGDPLGGPQRPAASSFVPWCFTHRPVAGTAAGVLVSTRTIAWAIEARIRKEGSTTMNDSILLKADVQGFFGIDVSSLSLDLADFPASFAESFSNDPEGIAHIVEHLRERPVARIVVEATGGYEVSLVVTLHEAGLPVVLVNPRQVRDYARALGILAKTDRIDAGVLARFAHDIQPPLRDFPDENGRKLDALVSRRRQLLEVRTAELNRRHQANLPEIQRSIDSVINLLNRQLAEIDEQLARAIQASDTWRTKDQILQSVKGVGPATSHALLAELPELGRLNRRQIASLVGVAPFNRDSGRLRKPRSIRGGRASVRSALYMAAFNAVRCNHRLRSFYERLRQAGKTFKVAITACMRKLLTTLNAILRDLTPWRDITVANSQNTS

SEQ ID NO: 501664 - protein, 423 aa, unidentified
MFDYNQTLFVGIDVSKDSNQVCLINFERKKLLNKSFKNNLEGANEIKTTIISYLSKHDFSSLIIVLESTGIYSIHIANFLSYEAESICSKTEIYLLNPIISHNFSKSNVGSVKNDPMDAFALADFAASGKVNNLTPFKANQHFAIQSLARQRKHYIDLMCREKARILNYIFIKFSDYNNAKHQNKAFSNVFGNTSIEVILNYKTPEEIASSSIEDLTEFIKEKSRNRFDDCEEVAKILQKASRDSYRLDATLYDSVNTNIAICYSTIKFYENIIKTIEKEIESLTKGSTFEKDVSILKSIPGISNVFATSIVSELGDASSFTSDDALAKYAGIYWNENSSGNFISEDNRLKKTGNPYLRYYLIEATSSVIRNNHVFNDFYQKKLKEVKNHKESRALVLTSRKFIRLIYKLLKDKKFYEFPKEQ

SEQ ID NO: 501665 - protein, 341 aa, unidentified
MKSTTIAVDVAKEVLEVAVSVQPGQVSQQRRLTRAAFMKFCADQPPATVLLEACGSAHYWGRRLQALGHRVVLLPPHATRPYVFRNKTDRTDTRGLLEAFRNEDIHPVPVKSVAQQALTALHRLRSTWLAARTARLNTVRGLLREFGCTIPVGAQHVLASTSRLLADADSGLPDALRPALDAACTEIRDLEVRIRIVEDQLQALADQTPAVARLRSIPGVGLLTATALVAFVGDVQRFPSARHFASYLGLTPRERSSGLVRRLGSISKRGDVYLRMLLIHGARAVLWAARKRRTPDRLRAWALHLQSLRGHNKAAVALANKLARIVWAVWKHDVDFREFAA

SEQ ID NO: 501666 - protein, 343 aa, unidentified
MGTQITGGVDTHLDVHVAAALDDHGGLLGTASFVTTPNGYRELAEWLRSFGDVAVVGVEGTGSYGTGLTRHLQGVGMIVVEVDRPNRQRRRRAGKSDTHDAISAARAAFAGDALGAPKTRDGNVEAIRVLRLARSSAMRDRTRALNQMRSLITTAPDELRDQLRRLTIPRLVRTAAGFRPAGRADVANATRLALKTLARRVLELDDEVRALDDVLEPLVAHTAPQLVEQLGVGTETAGALLVAAGENAHRLRNERAFARLCGAAPLDASSGKQQRHRLSRAGDRQANSALWRIVITRLSYDPDTRAYLRRRCDEGKTKTEAIRCLKRYVARELFAHLPRPTLA

SEQ ID NO: 501667 - protein, 404 aa, unidentified
MFDTGDVGVFLGMDVGKSAHHGHGLTPAGKKVFDKPMPNSEPKLRAVLDKLTAKFGTVLVIVDQPASIGALPLTVARDAGCQVAYLPGLAMRRIADLYPGEAKTDAKDAAVIADAARTMPHTLRSLELTDEITAELTVLTGFDQDLAAEATRTSNRIRGLLTQFHPSLERVLGPRLDHRAVTWLLERYGSPDALRKAGRRRLVELIRPKAPRMAQRLIDDVFDALDEQTVIVPGTGTLDIVIPSLAASLAAVHDQRRALEAQITTLLEAHPLHPVLTSMPGVGVRTAAVLLVTVGDGTGFPSAAHLASYAGLAPTTKSSGTSIHGEHAPRGGNRQLKRAMFLSAFACMNADPASRTYYDRQRAHGKTHTQALLRLARQRISVLFAMLRDGTFYESKAPTAILAA

SEQ ID NO: 501668 - protein, 452 aa, unidentified
MQQPVEVQVDEHEPIVERVAAIDVAKASGMVCLRIPHETIPDRRVTKVWPVAATTAALVELGDHLRCERVTRVVVESTSDYWRPFYYLLEAAGLMVWLVNAAQVKNVPGRPKTDKIDAVWLAKLAERSMLSPSLVPTEPMRRVRDLARARYDLVEDRTRVKQRIEKLLEDALIKISSVLTDVLGVSGRAMIEALIAGQRSSKALAELARGRARTRRADLERALHGRFTEHHARLARLLLGQLDELTARINQVTTLLDAAINELPAPAATRPTGADERDQTQAQPPQAGYTSAVARLCAVPGGGPDSVRAVLGEIGLDMSVFGTPQRLCSWAKVAPRTVQSGRRTGRARTGKGNPYLKSALAQIATGAAKTDTFLGDRYRRLIKRMPKAKALVALQRSILVVFFHLLNDPAAEFTDLGADFYQRRIDRARRTTHLLRQLHALGYEVQLTEPAA

SEQ ID NO: 501669 - protein, 361 aa, unidentified
MGDGSTEHSRITVGLDLGDKYSHICALDTDSGELLEEGRLRTTPEAFGRRFGYERGLRVAVEVGTHSPWVSRLLEDCGHEVLVANPRRTRLIYGEGRKTDKLDAQKLARLARADPELLYPIEHRGEGSQANLSLIHSREALVRSRSQLISHARGTVKSFGSRLPGCSAPSFHKKVREHLPSELAEGLGPIVDTIASLTEKIGDYDRRIERLATERYPETELLRQIQGIGTLTALTFVLTLEDPKRFAKSRDVGAYLGLVPGRDQSGDKDVQRGITCAGDKMLRALLVSSTHYILGPFSQDSDLKRHGQKIASRGGKNAKKRAVVAVARKLSVVLHHLWVSGEVYEPLHNARCMEAIGEEIA

SEQ ID NO: 501670 - protein, 342 aa, unidentified
MAIVAGFDVHRAQITFDALDSESGEVFRGRIDATPAAVARWVARFDGQAIDVAVEACTGWLFVCDALVSSGAVPHLAEPVETRALRGRKRRAKTDREDARWLRELLAEGRLPEAWIPPEHVRQWRSRARLRHTLIGERTQWMQRIQATLFHHGISGTPEKLRTRTGRAFLEALEVPADARERIQVALAMVDAIDAQIAPLERELRQLARRQRGCRALMGLYGMGELTSLVTLCELGDVGRLSASRKAVRMAGIDIGVHRSDRRARVGKLNRQGSPHLRWALYEAALAACRPTSPDHADYLALKARGLSHTRASLTIARKLARRSFHVLRELGPAALEPVPTR

SEQ ID NO: 501671 - protein, 393 aa, unidentified
MEEQRTSRVVIGMDPHKRSVTIEVMRPDESVAVGGRFATDQGGYAAMLEVARAWPERVWAVEGCNGIGRHVAVRLIADGEQVIDVPPRLSARVRMFATGQGRKTDATDAHSIALVGVRMAGLRPVVDDEQLAVLRVLVDRRRALGEDHTRMVSQLHHLLLELIPGGAKKDLSAAQAKKLLATVRPRDLAGRARRRVAAELISDLERIYARKKAANKELSQLLTATGTSLTGLHGIGPSGAARLLVEVGDITRFPDNNHFASWTGTAPIDASSGDHVRHRLSRGGNRQINRVLHIMATVQLRNPTEGRAFFDRTKARGKTSNEAMRLLKRRLSDIVFRTMLADAARQMATGPGGQQGDDSDSSAAGSQPHTSSSDKPLPGPATTHPRTGLAAAS

SEQ ID NO: 501672 - protein, 311 aa, unidentified
MTLPQNIIGVDVAEQWIDAFFNSGNRAERVPVSSAALDDFARRARDHLVVFEASGGCERPLAEALARAGVAFSKVNARQARDFARATGRLAKTDRVDAAVLAEMGRALRPRITPPPDAARTRLADLVARREDLCAMLRAETSRLRRARDRAVRRDITSLIRVLRRRIETLEQSIAAQVAAHDGMARDSRRLQTVPGVGPLLSATLLATLPELGQLTRREIAALAGVAPHARDSGLHRGKRQIWGGRAGARRALYLAAFIASRYDPRLKAFRASLQARGKATKVAIIACARKLLTILNAMLRDKSDYKKYEG

SEQ ID NO: 501673 - protein, 341 aa, unidentified
MNTVAIVAIDLGKLSFHVHAQNDRGHELYHRKFNRETLMRHLANLAPCTVAMEACGGSHFMARELTRLGHTPKLIPAQFVRPYVKSNKNDFADAAAIGEAATRDQMRFVQPKTEAQQALAMLNSLRDSFIRDRTATMNRIHAYLLEVGISLPPSFKAVRELPIVLDDSTFSPLIKKLLLDLHTHFSYLDDRVKALDKEVHGQAANDDLASRLMSIPCIGPITATALAAELGDGKQFRCGRDYSASIGLVPRQHTTGGKPCLGRISKRGDGNQRRLLIQCARVYLMGLERQTGKLADWVRGLLRAHHPNLVVCAVANKLARIAWAITAHHSEFDAGASAMSA

SEQ ID NO: 501674 - protein, 457 aa, unidentified
MGRKGKRTAGMEEAHPFTGMSQVNPNAAGVDIGAVEIVVCVSGGENMQIVKAFGNYTVDLQAIGKWLKEYQVKTVAMESTGVYWIPLFEELERQGFEFRLISSRSLRRVAGRKSDITDAQWIQTLHSYGLLESSFRPQAELIALRTLLRHRSQLVEHRSAHILHMQKALLQMNVQLSQAVSDVTGVTGQTIIQAILAGERDPQEPACMREPGCKKSAEEIGKALTGTWREEHLFIFKQSMEMYIFYTQQIRACDDEIERVYGLTRPDLETGEVKPLSERKRNSHSKNKPQNPEGIQKHLKRISGVDLSVVDGFGVSLAQTVIMEAGTDMSKFPSEKHFCSWLGLAPKHEISGGKVLKNKTLKTKNRAGQAFRMAAQSVKQTDCVFGVMYRRLKARLGPAQATVATAHAIARVAYRMLKYKLEYETISVEEYEKKYRDQQFKYMKKKAAKLGYQLVPA

SEQ ID NO: 501675 - protein, 320 aa, unidentified
MITEASLIGIDVSRDRLDGFCLLGQRRFRHPNTAEGHNALIAIVRQIPDQVRVGFEATGGHGWVLWTELVATGIVAVQLSPAQIKAFASSRGTRAKTDRIDAELIARFMAFRPEAGRELPGKNLRILRTLTTRRGQLVDMRKRLKAQIGARKKQSVSADVEGMDDDLQDVLDAQISVIERRNENVIAQTEPLAAKANLLRSIPGIGPVSAAMLIAELPELGRMTSGEAAAITSLAPVAHDSGAMRSRRMIAGGRRSLRHVLFQAALAAACHNPVLKPVAKRLKERGKPHKLVIIAIARRLVTIANAIIKTGKPWQIQPRE

SEQ ID NO: 501676 - protein, 338 aa, unidentified
MDIAKRVFQAHGADASGKGVLRRKLQRAEVLTFFAAMPPCLVGIEACSTAHHWAREISALGHHVRLMPASYVKPYVKRGKTDAADAEAICEAVTRPTMRFVPIKSAEQQAALMLHRTRDLLVRQRTMLVNALRGHMAEMGIIAPQGISRVADLVAALLGEDDTKLPRLARYALRGLAAELEALGTRVKEIEAAILAWHKDNEASRRLATIPGIGPITASAIVATVTDPSQFHSARQFAAWIGLVPKQNSSGGKERQGGISKQGDRYLRRLLVLGATAVIRHARTKITAQTAWLRGVLDRRPVRLASVAQANKTARIVWALLARGESYRAPGVAQAAAA

SEQ ID NO: 501677 - protein, 470 aa, unidentified
MVVPNEEPKTPAQPRKSRARSLPVPVPVSAAALHVINPDAAGIDVHSDMHMVCVPADRDANPVRQFGANTADLQEIVAWLKQCRIKTVALESTGVYWIALFELLEAEGFEVYLVEPGQLSRCGARPKTDVLDAQWIQRLHSYGLLRASFRPPDSVLALRAYWRQRQMQVRYAASHAQHMQKAMEQINVKLTEVVSDITGVTGMSIIGAILEGQRDPVKLAQLRDKRCQSSEDQIALALEGTWRPEHLFELRQAYELYQFHHRQITECDQQIEAELANFPNRAGAKTHTVKPRKRGRKSNDVRFDATGPLFQALGVDLTLIDGIDVATALVILGEIGVDVSRFPTEKHFASWLRLCPPQDESNKTKKRRGHRKGTHRVTIALRMCAQSVGRTMTPLGLFYRRIRSRIGGRGAVKATAHKLACLVYRMLKYGQEYVTQSMEEYEAKVKANMLKALKRKAAALGFQLSPLPTQ

SEQ ID NO: 501678 - protein, 348 aa, unidentified
MDQIIRIGMDTSKTVFQLHGVNAAEEVVLRRKLRRKEMVAFFERLPATVIAIEACGASHHWARLLNGFGHEVKLIAPQLAKPYVKRGKNDAADAEALCEAMSRPTMRFVPVKTAEQQAALMLIGVRERLIRNRTQLSNAIRGFASEFGLAAAKGVVHLDPLLDRLRDDESLPALARELFNSQAQEFAQLQTKIEVIDAKLAAWQKTEPQVQRLVKIPGVGPISAAMLILKTPSPRMFRSGRQFAAWMGLTPKDHSTAGRARLGAITRAGDEALRSVLVVGATAVIRHVRRGNSSSAFASWVAELLKRKAPKLVAVALANKMARIAWKLMVTGQAYAEKSTSAALASAA

SEQ ID NO: 501679 - protein, 343 aa, unidentified
MQTITTIGLDIAKSVFQVHGVDVGGQVIVRRKLKRRYVLTFFQKLSPCLVGIEACASSHHWSRELQALGHTVRLIPPAYVKPYVKRQKNDAADAEAICEAVTRANMRFVETKTPEQQGGLVLHRARHLFIRQQTAVINAFRAHLAEFGIVAPVGRHGVEELLNVVADPNDKRVPEMARACLLAFGAQLRRIKEQILEFDRMISAWHRSNEMSMRLDEAPGVGPVLATALVAAVADPKSFRSGRNFSAWIGIVPKQHSSGGKNRLGNISKQGDRYLRGLFVAGALSVIRYAKIHGTKHRPWLTALLARRPTKVAAIALANKIARMVWAMMARGERYKEPVALAR

SEQ ID NO: 501680 - protein, 454 aa, unidentified
MTKARTGDHPEMKLVNPWAAAVDIGSTMHMAAVSPESCDTPVRAFGTFTHDLHELATWFRSCGVTSVAMESTGVYWIPAFEILEQHGFEVILVNARYAKNVPGRKTDASDAGWLRQLHSYGLLRGSFRPEAKIATLRSYLRQRERERLVEYAAAHIQHMQKALMEMNLQLHHVVSDITGVTGMRIMRALVAGERDPDILASYRDVRCHASSETIRAALVGNDRAEHIFALAQSLDLYDAYRAKIADCDVRLEQTVSALTIRSGSTTPLPKPRFRQKPTGAPAFDVRAALHGVLGLDLTQIHGIGPSLALKLVAECGTDLTAWPSAKHFTSWLCLAPGNKISGGKLLSSRTRRSSSRAAALLRLAATAVGCSDTALGAFYRRLSSRVGKQKAVTATARKIAVLFYNTLRFGMAYRDPGAAAYDERHRSRVLTNLQRRAKSLGYHLAPTCEPAGIS

SEQ ID NO: 501681 - protein, 405 aa, unidentified
MAVIIGIDPHKGSHTAVAIDEAETALGELRIRSGATQLERLLEWAGRFPERTFAVEGAGGLGYLLAQQLVSVGERVLDVQPKLAARVRLLATGDTNKNDPNDARSVAIAALRSPAVRVVHPEDHAQVMKVWAKRQRNLGSARTQVVCRLHAVLCELTPGGVSGQLHAPRTARLLEELEPEGAVASARHELALDLLEDLRRIDEQMSETKKRIAAAVTASKTTLTEIFGVGPIVAATVIGDVVDVSRFANRDHFASYNGTAPIEVSSGPRKVYRLSRRGNRRINHAIHMAAVTQVRHPTSEGRAYYDRKLAEGKTGKEALRSLKRRISDAIFARLQADAHQLERFVDVGSGRQEGNDSVASATGSHPEHRLFGTATPEPDVTLKRPAAPRRRNTTSTSPKKERRAS

SEQ ID NO: 501682 - protein, 364 aa, unidentified
MSIVKYIGLDVHKNSIAIAVADYGRENEPRYWGEIENNLDQLTKVLKKLCRDGNKLSCVYEAGPCGYGIYRHLISKGIDCSVVAPSKIPRKSGDRIKNDQRDALSLARLHRAGELTPVYVPDQKDEALRDLVRAREDAQKDLRKSKQRLNAFLLRHNIVFTGRSMWSKAFFNWLSTISMEHPAQQFTLQEYINTVESCNLRIQRFTEQIRELSKQSHLYPLITALQAMRGISLIVAATMVSELGDLKRFESPSQLMSYLGLIPSEHSSGRKIKRGSITKTGNAHVRKVLIEGAQAYRLPARVSLAIRKRQENLSEKVCQIAWKAQVRLCKRYKQLVARGKNANIVKVAIAREMLAFSWAIAQEI

SEQ ID NO: 501683 - protein, 464 aa, unidentified
MRKGRQSSKKNQPLNVEFLPAIRPLVAGIDIGSREHWVCCPASRDGSPNVRVFRTTTDDLNRLVDWLCEQQVESVVMESTSVYWIPLCELLESRGIEAVLVNARQLHNVPGRKTDYLDCQWLQLLHSCGLLRGSFRPNDAVVALRAIQRQMANLVEERTRCVQWMQKALDQMNVQVHHAVSDLAGTTGLAIVRAIVAGDRDPMSLAAKRDPRCRKSIEEIARYLTGNWRDEHLFNLGAALKLFETIEGQIRQYEERLLKQIEELEPPERQNQPVPPHPNPAKERDIRGHGDQPARTSLWRFSGLDLLRINGIGTAAAKTVLTEVGLDLSAFPSERHFISWLRLCPRTAISGGKPLKHKRNGMGANRISAALRMAACGLSRSKSALGAAYRRIARLKGASVAVFATARKLAQLVYRMIRFGQDYIDIGDTAYELRFQTRRLASLKESAKALGYTLTPAPQLAPAT

SEQ ID NO: 501684 - protein, 367 aa, unidentified
MEKSSKNFVGMDVHKESIEITLAEQDGEVRRFGQVGGDRTSLLKAVRKLESSGKPLVFVYEAGPCGFWIHREITSRGHACWVVSPSRVPKRSGDHVKTDRRDSEHLARLARAGELDAIYVPDVHDEAIRDLVRAREDTVISQRRSRQQLKALLLRNDIRYVGKSSWSAAHQRWLARLKLPQPAQQIAFQEYLDATVVATERIARLTQAIAAEMPSWRFATVVSALQGMRGIQFIHAVTLVSELGDLRRFESARQLMGYLGLTAREDSTGEKRRQGSITKAGNTYARRALVEAAWAYQHPARVSPVIARRQSTLEKPLRDIAWKAQLRLCSRYRRLMARRMHKNKVIVAVARELAGFVWAMGQEVKLG

SEQ ID NO: 501685 - protein, 322 aa, unidentified
MSQPNPLCVGIDVSKATLDIAASSDVAQFTVSNDSDGFNAIITGLRRHSVALVLMEATGGLEVAVACSLQAEGFEVAVVNPGQARDFARAMGYLAKTDRIDARVLTQMAEVINRHPERKRFIRALPDAERQALAAMVVRRRQLIAMLVAERNRLHPFHPQNKKSINTIIKALEDELVRLEKEMDSHIRNHFKEIAERLSSIKGVGTMTVSAMLAEIPELGTLSRREISALIGVAPVNRDSGTMRGRRTIFGGRAGVRSALYMAALVATRFNPVIKTFYVRLLAAGKAKKVALVACMRKLLTILNAMLRKNEEWDESYHHVAP

SEQ ID NO: 501686 - protein, 419 aa, unidentified
MDVLIERCAGIDIGKDEVVACVRTPASGGRGRSKRTRTFSSFTAALEAMADWFVAEGVTDVAMEATGSYWKPIWYVLEGRPLELKLVNAHHVKILPGRKSDVLDAEWLAELLEHGLLRGSFVPPPAIRELRDLTRYRKRLIQAHTSECQRIQKTLEDAGIKLDSVASDVLGVSGRAMLGALIAGERDPHVLAELAKGRLRRKIPALRQALRGRFTDHHALLIGLCLEHTSHLEDAITRLDERVDAVFAAQVSETAVPFARARDRLDTITGVGKRAAETILAEIGVDMSRFPTAAHLASWAGVAPGNNITGGKRGSGKTTKGHVWLIDILTQCAWAAAHTRDTYLSAQFWRLARRIGKKKAAVAVAHSILVICWHLLTNDCDYADPGGDYFTRRNADRQRDRLINQLHALGYRVTPDKVA

SEQ ID NO: 501687 - protein, 351 aa, unidentified
MFFNKINLTKDDDVYIGIDAHKDSYNIGIWLNDAPAIDYVMPANNKKLIMDVEKIRPAIKNIVYEAGPTGYALARELQNQDLPVQVIAPAITPRPATKQTKTDRLDCRKLAQYAAKGLLRQVAIPTRQQEADRQLTRMRAHIVDKLKRIKIQIKSFLLQHGIEQPAGLKNWSLEAVNSLKRINLNEYLRFSLDLMIEQLEFLKNKLKEVESKLKELFEQKRHSKKIELMQTHPGVGPVVAGMFRTEIFNPKRFKDKAQIAKYIGLSPQITQSGQSLRDGPIIKTGRAQLRSTLIQAAWRWVAKDPAAKRIYRRLLVNTAQPNKAIVAMARRLAVNLWKISGDNLAYVAPVY

SEQ ID NO: 501688 - protein, 315 aa, unidentified
MITGIDCSKDYFDIAVLKEGKSAFKGRFTNNLKGFKDMLPHILDTHVAMEATGPYYFQLARFLYDSGIRVSVVNPLVIRRFAQMRMSRAKTDKKDAMVIAEFAQMTSPRLWEPPTAAIQSIRNLETYLEGLKQRRHMLSSQLHAFEAAGTIDKLLYNEIKEEVESHDKRIKEKERQIDGLIKQHYEEMAGNIRSIPGIGPRSVSMLIIATDGFSMFENYKQVISYFGLAPRIYESGTSVKGKGHICKMGMGQVRKVLYMAATSAIRCNKACKDLYERLRDKGKPYRVALIAAVNKLIKQVFAIAKSGEPYKAQFG

SEQ ID NO: 501689 - protein, 383 aa, unidentified
MENRPLRFEAKRIFGLDLSKKTLKACRLDEDSGFEKQNIFDEKMTDDGRHHLASRLRKGDYVAMEGGSSTSFLARYLMENTEAEIFVLNPCKLHIIFESACKTDKQDCIKIAKYIRDTNPSNWCLIPVPTYEETSLRSLINSHISTKQERTRAINQLHAFFNLNGISFLKKSDLGDSDRRHDLVDHYFSQDDLRGMQARLMLQDIDNIELSADCYEDMVRRALLSRPKESLIWMSIPGVGPLTALACVAYIGDGKRFSTPDQLRNYVGLVPRIDQSGIKEVIYGVNHYGCMPVRRNIVQAAWSVTKLSFDCRFRQRWKELKASGKKGQKIAVKVANDMLTIGWTLLKKGELYNGLGDFSYLKRKLRNYKMTAIDSSSFGECLK

SEQ ID NO: 501690 - protein, 347 aa, unidentified
MRFYTKQHLYYCGIDLHARSMYLCILDPQGEILLHRNMPCTPELFLKAIAPYREDIAVAVECIFTWYWLADLCAKENIPFVLGHALYMKAIHGGKAKNDKIDAHKIAVLLRGGMLPMAYVYPALMRSTRDLLRRRMHLMRKRSELLAHIQNTNSQYNLPEIGKKIAYKANREGVAERFEEPSVRKSMEMDLSLIDHYDKLLTEVELYITQTAKVHDVNAFHRLRSVPGIGKILALVVLFEIHDINRFPTVQDFVSYARLVKCAKESAGKRHGTSGKKIGNVHLKWAFSEASVLFLRGNPAGQRYVEKLTSKHGKAKALSILAHKLGRAVYYMLKREKAFAMNQFFGS

SEQ ID NO: 501691 - protein, 322 aa, unidentified
MNSEQVVLGIDVAKAKLDCALSVGSKYRTKVFPNTSPGFARLVAWLLQHEAAHAPVCMEATGIYWEAAATYLADAGHRVSVINPALAKAHAQSLGLRSKTDVLDAKMLAHFCREKQPPAWVPPPASERRLRALVLRHQALIEMQTQEKNRSESLREDVRNSVETHLAWLADELKRIEQAIAQLLDDDDDLRGQRDLLASIPGLGERTIAVLLAYGVSSERFDTARQFVAFGGLSPRLHESGSSVRGRPRLSKVGHAFLRRALYMPAMVTLYRTAWGQRFRQRLADHGKPPKLIIGAMMRKLAQVAFGVLKSGKPFDPILHGA

SEQ ID NO: 501692 - protein, 410 aa, unidentified
MEVLYPHCAGLDVHKDTVVACVRHMVNGSVRREVRSFKTTTKELLALSDWLAGEGCTHVAMEATGVYWKPVWHVLSDGDFTLVLANAAHVKNVPGRKTDVNDATWLADLLAHGLIRSSFVPDGQTQEMRTLLRTRKQLVRECSRHVQRLQKTLEDANIKLDSVISDIVGLSGRRMIEALIAGETEPGALAAMAHRRIKATPDELEAALRGRVTRHHRFLLQLHLQQIDAVNAAIHQIDQEVDAYVEPFRATVRLLTTIPGIDELSACVILAEIGRDMSRFPTAGHLISWAGLGPKNDESAGKRRSTRMRKGAPWLKTTLVQCAAAAARKKASYLQAQFHRLRARRGAKKALGALAASILTSVYHMLISGELYRDLGPHHFDQRAKAVNTRRLVVRLQNLGYAVQITPLAA

SEQ ID NO: 501693 - protein, 388 aa, unidentified
MFFLGIDIGKNTHVASLLDEKAKIIFKAYSFANTLDAAEALLVKLEPYKDSLEIGMEATGHYWLSLYSFLVEHKFIVHVLNPIQTDGWRKGIEIRKRKTDVIDSVLIADLIRYGDFLETSLADEDILSLRNLSRFRVYLVNSVSDLKRKAIAVLDQIFPEYASVFSNVFGQTSKELLKSLSLPSDYENLSATKIEEVLSNITQKKKASKTISTLSDKASRSFGISFCKDSFAFQLKLIIEQICFIEEQIASVELEIDQLMSKLGTNIKTIPGVGNVIGAVILGEIGDIERFDNPSKLVAYAGLDASVSQSGEYEASSSKLSKRGSPYLRKALYMAAQRAEFCDPVFHAYYEKKRNEGKHHLVATNAVARKLCHTIYAILKKDIPYEVQ

SEQ ID NO: 501694 - protein, 340 aa, unidentified
MTVIIGIDPHKASHTAVAIGRDERQLAEIRVRATCQQTERLLAWAESLGERTWAVESAGGMGYLLSQQLVGAGEQVLDVPATLASRVRVLGTGRSNKNDPNDALSVAIAALRSPGLRSVESADHREVLRLLAKRNHEIGRLRNIVVSRLHAALVNLSPGGISKELNASDAMRLLNGFEPITAVEQTRYDLAHELLDDVERLDVQLKESHRRIKTAVKASGTSLTELYGVGPILACELIGYTGDVRRFTTRDQFASYAGVAPVERSSGGRIFFRLSRRGNRQLNHAIHMVAICQIRQKDSEGRVYFEKKVAEGKTKREAIRSLKRHISNAVYRQLLVDAQK

SEQ ID NO: 501695 - protein, 361 aa, unidentified
MSESMTLVGLDVHKAQTVAALLDPATGELSVQRLRGEPERVVPVFLEELDRPVRAVYEAGPTGFVLARVAEQRGLDIAVVAPGSIPRASGDRVKTDRRDAQRLVRLLAAGELSFSFVPSETDERFRDVVRCVEDARKDLMRSRHRLSKFLLRRGVRSPCKSWTQAHEQWLAKVSFDDELSRAVFLDYLCAERSLVQRRRALIEMLEGAVPESSHAQAVARLRCFRGIDTLTAAGLCAEVGSFDRFEKPSLLSGFLGVVPSEYTSDSKRFQGQITKAGPSHARRLLVEAAQHYRRRPAVGKGLQQRQAGQDQRVVQIAWRAQRRLHERWTHLGRRRGKPSGTVAIAIARELAAFCWEAATLS

SEQ ID NO: 501696 - protein, 343 aa, unidentified
METKRYIGIDLHRNCFTACVRRENGREYLREWQLEDLSKFTRTLRATDQIAVEVTGNTRLFHDAVSPHVERVAVVNPNQFKVITHSVKKTDPNDARNLALYLAKDLLPEVRMKDKTQAQIASLTQTRDTMVKLRTALKNKINNLCSAHGVNLNKEALGSEKGLRAVLEMRFDGLVNLELKIIVEQIRSLNKSIAELEETIAKEGQNLKGHANLTSIKGIGGLSGSILLSIIGDIHDFPEEGNLAAYFGIVPRISNSNETEHSGRITKRGTKLGRTTLIQCALIAQRYSPYLKKYYEKMKSRRGTGKAIVALARKFLGIIYRTLKNDWVFEDFPNFVLAEKANA

SEQ ID NO: 501697 - protein, 314 aa, unidentified
MTPGSFIGIDVAKRELEVAERPSGARGTASNDVAGIAGLVERIRGAEPVALIVVEATGGYEMALVAALTAAELPVVVVNPRHVRDFARAVGKLAKTDRIDADVLARFGEAVRPEPRPVPDELTQALHGWLARRRQLLEMLGAEEQRLAISARDVRRHIQQHVEWLRRELRDVDTELQTLIRTSPVWRESENLLRTTPGVGPVFATTLLADLPELGQLNRRQIAALVGVAPLNWDSGHQRGTRHIWGGRAAVRTTLYMATLAAIRCNPVIRAFFERLSEAGKPRKVALVACMRKLLTILNAMMRRRIGWQPALSA

SEQ ID NO: 501698 - protein, 416 aa, unidentified
MRNAFTVAAGIDVHRDTVVVTIRKKMTGAEDDQMETRTFETFRDTLEKMAAWLQAEKVEAVGLESTGVYWMPVVRTLQEKASDLLVWLVNPLDVKRRAGRKTDRKDSRWISELVLYGMVAPSYLPSREQSELRKLTRHRTKLVADQTRYHNRILKELEGSGVKLPSVVTDCMGKSGRAIIEALLAEKLSLDEIADLARGSLRKKISLLRRAIDGSFTPSTKIVLRQLLALHDLVAHQTSLIDSDVRKLLAPQAAEQALASTIPGVSDTSSAAVLAELGIDMSLFPSSKHLTAWAGLAPGSEESAGKAKAAPARQGNKYLRTSLVQSAWAAVKTKASHWRQVFLRLRSRLGPKKAIVAIARKMLVALYYMLRDNVPYRAPDQQPIPQPIKARIANRLTQRLRALGYAVTLSAEPGVS

SEQ ID NO: 501699 - protein, 352 aa, unidentified
MQYVGIDWAYRRAAWCALGEGGAIGGEGVVPADEDGLVKLVLAVGPEVRACVEMMSGAVWVRDRLAAAGWEVEVAHARKVRDIAPLACKTDKVDARVLAELCRRDLVPALWIPSLDDRALRERLRRRMHLVRLRTSARNRIFGLLTQWGLRLSLTRLRAPDAMELLAARGVEETWRRSIAEALAVIDLLDARIAPLDAELRPLAAADPRVLLLRMIPGLGDLLGLTFAAEIGDISRFSSPRKLIGYAGLAPKISQSGDRSRTGALSKAGSRTLRWAAVEAAHQAWRATNPWHELYADIAKRAGKNPAKSAVARKVLIAAWHVLSREQQFAPARRRTTDPTTVSASSRSYLAA

SEQ ID NO: 501700 - protein, 404 aa, unidentified
MSETEPVPTRFVGLDIHKEYIVAVGVDAAQAVVLGPLRFSVNELADWSARHLTPQDAVVLEMTTNTYAVYDILVPLVHSVTVVHPPHVALIVRAQVKTDRKAALALAQLHAAGLLVGIWIPPQPIRDLRALIAQRWKMVRLATVAKNRLHSALHRHHLDAPDSSLPFSPKHKAFWLSLPVSVTERAIIACDWETIEFAERQKAALEASLAQAAAGDERIPLLVQLPGIGLIGALTLLAAIGDITRFASVKHLVGYAGLGARVHDSGTLHQTGRITKAGRKDIRHIMVEAAQSAARTHAHWKAELARLEPRIGRRKAIVAIARKLLVAVWHVLTDQEADRFANPQQVACSLLAHAYKMGVKNLPDGQSALQFTRQQLDRLKLGRDLTHIPWGSNQYKLPPSTLSG

SEQ ID NO: 501701 - protein, 360 aa, unidentified
MSRTSLSQIHQFIEGYSSGKFWIGIDVHKRSYSLALLREDGMSYTWVTTADPIRLVEQLQGLPITISSIVYESGPTGFGLARTLKKANIPVDIAAPSRIPRPVRPGAKSDRLDCLKLAAYGSKGMVKSIAVPREEEEALRALLRRRQQLTESLVRVKQRIKSLLLYIGQTEPHGLRSWTDKSIRQLENMSLNDAYQILLKSLIRQLRFVQDERQIVLNQLQSLISKTDQQNRLGCLSSVPGVGSITALTFLLEVFNPQRFNRAEEIASYLGLAPMVHHSGEQTPPGKLQPVGQACLRSLLIEAAWMWKTKDEGARTMYNNFLSKMGIPQKAICAMARRLAIILWRIAVEQRTYYPIEVKV

SEQ ID NO: 501702 - protein, 355 aa, unidentified
MDSIKYIGLDVHQSTISVAVLDADGKLVMQSVVATHAATMLDFLNGLRGTLYMTFEEGTHSAWLYDLLVRRVAKLVVCDPRKNALLKAGNKSDSVDARKLAELLRAGLLSPVYHGQNSTAAVKHLGRSYAMLTEDTTRIMGRLKALYRSQAIACTGKKPYAARYRQEWLAKLNESGLRRRAERLYQQLDLVQELRRDARRDLILECRKHSETKLLGTIPWLGPIRIALLIGRVQTPHRFRSKRQFWAYCGLALETRSSADYGFVNGQLERKKKPVFIRGLNLNHNHDLKNLFKSAATTSSGSHGAFGQFYENLLIKGMKPELARLTLARKIAAITLHVWKKGEPFDAEYLKPQAA

SEQ ID NO: 501703 - protein, 388 aa, unidentified
MIQVDDLSRSLIAFEQISTLVIVVELSQSSWLAAGVVPGIERRPLKKLDPDPTALLHLVEGWRDRATKAGRAITRTVLAFESGRDGFWLARWLRVRGVETFVMHSTSVAVSREPRRAKTDRLDTEMLIRVFLGWLRGEPRHCKMVAIPTLEEEDARRPSREREILVGERTRIINRMKAALVRLGIRGFKPGLLTAPQKLAALRTPEETPIPPNMLDEMRRDMARLAWVREQINAIEQARLERLERAPATGRHAMVRMLARVIGVGVETADMLVQEALSRNLRDRRAVARYAGLTGSPDESGSKRREQGLSKAGNARVRRGLIQLAWRFLRFQKESALAQWYRGRTEDAAGKRKRTMIVALARKLLIALWRLATIGEIPVGVALRPAVA

SEQ ID NO: 501704 - protein, 332 aa, unidentified
MAITAWLGIDIAKQKFDVALKWNSRRRAKVFRNDAEGWQALLRWLKDLGVDQVHACLEATGRYGDGLALHLHNAGHRVSVVNPAQIKHFGRAKLGRNKTDRADAALICDYCRLFEPAAWTPPSAALRQLRDLVRTREALSASRVEWTNRRGSGQESAAADAAMAGVIARLEAEIAALDQAIKDAIGQDGELRARHDLLISVPGIATHTAAVILSELPGPAVLRTAREAAAYAGLNPSHRQSGSSLDAPSRISRIGNATLRAALYFPALAALRCNPLVAALRQRLKDQGRLKPKQIVGAAMRKLLHLCFGVLKTGKPFDPDHATSTDEIAATT

SEQ ID NO: 501705 - protein, 388 aa, unidentified
MHQSNDLSRSFTTLNQDNTLIVVIEMSLSSWLVAGMVPGVERQPLKKLEPDEDQLLKLMNRWRHEALQAGHAIERVVVAYEAGRDGFWLARWLRERGVEAYVMHPSSVAVSREHRRAKTDRLDTQLLMRAFLGWLRGERRHCSMAAIPTIEEEDAKRPNREHEKLVGDRTRIVNRMKSTLARIGIRGFKPTLRKAEEKLSELHTAEGTLLPENTREELRRDMARLRVLREQIKEIEQQRLSKLKAAAQAKEGPHAMVLLIARVVGVGIETADMLVNEILSRRLRDKKAVARYAGLTGSPDESGKRRREKGLSRSGNARVRRGMIQLAWRFLRFQKDSVLAQWFQARAADGRSGTRKAMIVALARKLIIALWRLTTTGEVPAGVILRAA

SEQ ID NO: 501706 - protein, 337 aa, unidentified
MSYLGVDLHSNSFTVCYRNSKGKERLATFEIRRIGQFRKTLRKHDELAVEATGNTAWFVEQISDRVSRVVVVDPHQFKVIRKSVKKTDKHDARTLAFFLSKDMLPEARMKSKETAQLHSLAGTRDKLVKQRTALINKIHNILNSHGMKYKKETLSTDKHLKKVLSFDWDAIVRVELEVLAEQIRSLTKSIKKLDEQMSEHGKNLKGHKNLASIKGIGERSATVLLSVIDDVNDFADEDKLAAYFGMVPRVSDSNETVRHGRITRNGSKIGRTTLVQCTLVAKRYSPYLRRHYERIKRHRGSGKAIIATARKFLGIIYQTLKNDWIFEDFPNFVIANT

SEQ ID NO: 501707 - protein, 359 aa, unidentified
MLSERTSVGLDVHARSVAAAAIDGVTGELVQARLTPSHEQIRSWIAGLAGPVAVTYEAGPTGFGLYRALTAAGVRCVVAAPSKLQRPSGDRVKTDARDAVHLARLLRLGEVTAVAVPSLGQEAARDLVRAREGCRGDLMRARHRLSKLLLRQGIVYSDGQAWTDRHDRWLRQQRLDNPGTAMAFESEYDTVLSVSARRDRLDAAIAELAADSEFTTVVRRLSCLRGVSTLTAFALAVEIGDWHRFTGNTIGSFVGLVPSEYSSGTSRVQGSITKTGNTHARRLLVEAAWHHRAPYRPGKTIRDRWELAPPAARARGDAGNRRLHERWVTFNLRRKRAVIANVAIARELAGWCWSLAVMD

SEQ ID NO: 501708 - protein, 493 aa, unidentified
MGRCELESGDVALAAIPIRKMTIGIAQTLLLIVDWRIAMPKRTTGHQPELKPVNLGAAAIDVGSRMHMAAVDPACTDVPVRSFGTFTPDLYELADWFKTCGVTSVAMESTGVYWIPVYEILEQRGFKVILVNARYAKNVPGRKTDVSDAAWLRQLHSYGLLRGSFRPDAEIATLRAYLRQRERLVEYAAAHIQHMQKALMEMNLQLHHVVSDITGATGMRIIRAIIAGERNPEVLASYRDVRCHSSMETIRAALVGNNRHEHVFALTQSLELYDIYQAKMLDCDRKLEVLIAALGSRGTKPDGKLSRPRIRTKQVNTPTFDVRSALYGLLGVDLTEIHGLGPSLALKLVGECGTDLRAWPSAKHFSSWLCLAPGNKISGGKVLSSRTRRSSSRAAALLRLAATTVGRSDTALGAFYRRLSSRTGKSKAVTATARKIAVLFYNTVRHGMSYRDPGADHYEQQYRNRVLANLQRRAKSLGFVLQAIPGNANPAVS

SEQ ID NO: 501709 - protein, 353 aa, unidentified
MFHKPGEATEMKLTTVGIDVAKNVMQVHGVDERGKAVLKKQLKRNQVLAFFGNSEPCLIGMEACGGAHYWARKLEKLGHTVKLMAPQFVKPYVKTNKSEAADAEAICEAVGRPTMRFVPIKTGEQQAVLSLHRARQSFVKARTAQANQIRGLLCEYGIVIAQGIGHIAKRLPEILEDGEHDLPGQFRVLLQRLGEHLKELDRQACELELQIQLWHKENEASRKLAAIPGIGPITASALVASIGDVRDFENGRQLAAWLGLVPRQHSTGGKPTLLGISKRGDTYLRTLLIHGARAVTRVAERKAGHAESWLARLMARRNKNVAAVALANKNARIVWALLAQARTYRANYKAIAA

SEQ ID NO: 501710 - protein, 315 aa, unidentified
MTKQLLPVNAGVDVSKDKLDIYLLERDLSLSVPNDEQSIASLVRRLARYRLERIVIEATGRLEHAFVSAAIAKGLPIVVVAPLKVRRFAQAAGQLAKTDAIDARLIARFAAALKPATRPTIDTKSQIIKDLVVRRRQLTSLRTIEKNRRSVMPEALTPSIDRIIESLDREITSLEQLIQNAVEQHATWRHKRDLLTSMPGIGPTVASTLIGDLPELGSLSRRQIAALTGVAPFNRDSGNFHGKRRIRGGRAHSRTALFLSAMVAIRYNPDIKRFYERLLQTGKHKKVALTACIRKIVTALNAMLRDNKPWQSSFA

SEQ ID NO: 501711 - protein, 321 aa, unidentified
MVTGIDCSKDYFDFLVLKENKVVVQDRLGNNRKGFKQLLSHVLGTHVAMEATGPYSFQLALFLHESGVKVSVVNPLVIRRFSQMQMSRTKTDKKDALLIAEFTAMTSPKEWNPPRKEILHIRSLETYIDGAKRRRRMLSNQLHAFEAAGTLDKDFRSELKQELEEYRVRIEKKEKEIERLVNKAYARLSENLRSIPGIGPRSASLLIVLTDGFKMFESHKQVISYFGLAPRIFESGNSVKGRNHICKMGMGNIRKVLYMAATSAIQCNRACRELFERLRAKGKPYKVALIAAVNKLIKQAFAIAKSGRPYEENFVRPNIIR

SEQ ID NO: 501712 - protein, 390 aa, unidentified
MELLHAPLASSALVVAIDPGKVTHRVWVTSAEQGLIGEPVSLPVLRDGLQALARLIAASGIPGPPVIAIEATGALHQAWVSELERRYPGSVRLFAPSETQAARAQLGSRRRKTDDRDCAALVWLVRQGAGRPAAGHGAEALLGAVRHRRGLVADRKVLQQRLHDQLNRLCPGLSAPPGHGRALDLAGPAGQGVLACAAAFNGHPPSIRSLRARAPGRLTEMTARFWLDRWRACLPPPADAVLRGQRLGRDLARYQALQADITQVEAQIIRLLARTPGQILTSLPGVAAVRAAAFAACSLPIDRFPSAEHLYAATGLAPAVWQSATLQRRGRISRQGLPEHRDALMSIAWGLSSTPRRFASVTRTSAGVECDRSRPGSRWPATPAGCALPC

SEQ ID NO: 501713 - protein, 371 aa, unidentified
MNTIVYVGMDVHKESYTLCCYCYDTDKVEYRQTIPSDYRLILKYMERVRNRYEGVVSFVCGYEAGCLGYSLYHQLKEHEVDCKILAPTTMAITNTNHVKTDRKDAANIARCLAFHTYSEVYVPDENDDQVKEYIRMRDDQKLALKKVKQQILAFVLRKGKHFDGGKTYWTLAHLKWLKDLELEGLDKETLSEYLITYDYLVEKIERLDKRIEELASRDRYQEKVKNMGCLLGIKTHTALSMIVEIGDFERFEKASKFAGFLGLVPSEDSSAEDINRYGITKAGNRHLRRLIVEAAQSYTRGAVGHKSIALKKRQEGCSPEIIAYADKANERLRRRFYRLTLSKGVNRNKVTTAIARELSCFIWGMMTGNVA

SEQ ID NO: 501714 - protein, 391 aa, unidentified
MTILVGIDVAKDKHDCFFMNSEGEVLAKPFTIFNNKEGFDFLYEKIQSVSSSDNIKVGLEATGHYSYNIIGFLLNKGLATFILNPLHTNLYRKSLSLRKTKTDKIDSKTIAMMLLSDVSLKSYSDISYHNEDLKSLTRYRFSKVEERAKLKTSLSRLAQILFPELEKLVPTLHMTSIYQLLEEFPSASAIASVHLTRLTNLLSKASKGHYDRETAIKIRDAAKNSIGSNMPAKSLELKHTIKLIRALTIDIGEIEAEISKMMDMIASPITTIPGIGRNIGAMIISEIGDFSRFSSPDKILAYAGFSPSIYQSGKLDNCYAHMEKRGSRYLSYALFHAAKLVCHWDKTFADYLAKKRAEGKHYYVAISHAVKKLVRVIFHIEKTKQAFLKAS

SEQ ID NO: 501715 - protein, 420 aa, unidentified
MAPLSNQQFAAYVGIDWADTKHDICLQAAGDFRREFDCIPHQVARIDEWAKTLHRRFGGPIAVALELAKGPIVAALQKYDFLTLFPINPSTLAKYREAFKPSRAKDDPTDAELALDLLLRHPERFAPLRPQGVAMRSLLSLVERRRDLVGDQNRLTNRLCDTLKQYYPQALEWFDDRGTVLFCDFLTRWPTLLAARRARRTTLEAFFHAHNGRRANLIEARLESIRAATPLTEDPGIVAPCRLHVLALVEQLRTVLTAINGFDREIAMVAGTLPDYALFQGLPGAGPQLAPRLLAAFGEQRERFHGADELQKYSGIAPVTERSGKKSWVHWRWQCPKFLRQTFVEWAAQTINKSFWAGAYYRQQRAKGSSHQAAVRALAFKWIRILHRCWQTRTPYDETIYLNALRKRGSPLLRNLGLAG

SEQ ID NO: 501716 - protein, 398 aa, unidentified
MIYVGIDWARQRHYLVVLDGQGAQLHHQFVAHSAEALAALAGTLARLEPDPAAVRVALELHDGGLLAWLVAQGYSVYPLNPKSAERARDRYRPAGGKDDRTDAFVLADTLRTDGGALRPLRPTSGRAQELLSWLGVRDGLVRERTTKMQQVRAILDEWCPELSALCNNLKCIWQRELLRAFPLQHDLAGVEAAQVAAACGRKLSACARTRLQAALAAACLPLPPGRREPLAWQVRELVARIAELSEHIKQIEQRLWALVAAHPRARLVGSLPVKGIVTRATLLAVMEAGDDASWRALVARWGVAPITRQSGKSRGVRRRRGCDHFVCQVLMQFAHCTAQVQGSWAQQMYRTKRAAGVEHFTALRQLANRWVKVLCAMWRHDTLYDEQLHHTNRLRAAA

SEQ ID NO: 501717 - protein, 375 aa, unidentified
MPMLAEVVDAVVGIDTHRDTHQVEIALPTGAPIATTTITNDTRGYTGLLAWIAEHTPGPRLAVSIEGTSSYGTGVARAVGAAGLAVIEAEQPTRTTRRGRGKSDPIDAHLAVTFALQLQVDRLPTPRADGDRDALRILLGARHDLTLISTAQVNRLRALLRDGDNTGNNTGNNTGNNTGNNTADSTGDADGQLARGALTTATLTTLARRRLPLHATRAQAVRHDEIRRLALAVRDARRALAANQAQLQAIVDELAPGLTDRRGIGPIVAAQALVSFSHPGRIRGEAAFAALAGASPLEASSGRTVRHRLNRGGDRALNRALHTIALTRMASCPRTRAYVARRRAEGKTPREIRRCLKRYIARELYRTLTTTMINN

SEQ ID NO: 501718 - protein, 348 aa, unidentified
MRFYDQSHEFTCGVDLHGRAMYICVLDREGTVVLHRNLPCDGAAFLAALAPFRAGLVVGCECVFAWYWLADLCEEVGIAFVLGHALGMRLIHGTKTKSDRLDSEKIARLLRSGHFPLAHVYPRRLRATRDLLRRRLFFVRRRSELLAHLQMSQTQYNLERSPARLDRAMNRSGLAERFPAGSARASIHADCSMLDALDGLVSSLERELVRTTKLDDLPSFHRLRSVPGIGEILAMTILYEVPDFDRFDTVQQFASYSRLVAPRGESSGKLGGARGRKQGNVHLKWAFSEAAVLSLRANPRAQKHLQRLTRRFGKAKALSVLAHKIGRAVFYMQKRNLPFDAERFYQEA

SEQ ID NO: 501719 - protein, 340 aa, unidentified
MGLYTGFDLHANNSYVGIINEDGRKEARRRLPNDPGLILQFLTPYKSDIVGVVVESTYNWYWLVDALMEDGYRVHLANTTAIQKYSGMKHSDDKDDAFWLAEMLRLNILPTGHIYPKDERPIRDLLRKRGHLVKLRTSLILSLQNIIDRNCGVRIKVNDIKRLREDKVAPFMEANEDLALAGLVSKETIDFLTGKIRTLESFIENRSKLKDPYNHLLTIPGIGKILGLTIMLETGAIDRFEKVGNYASYCRKVATKWTSNDKKKGKGNKKNGNKYLAWAFSEAAEFARRYDQQARAYYNRKMQKTNFMVAHNALAHKLARAAFHVMKEQTPFMPERLFSS

SEQ ID NO: 501720 - protein, 379 aa, unidentified
MVTVGEHVYFIGSEDETMKRYLGVDLHRNCFTVCTLGEDGKSELKKWSIHSLREFAQQVQATDAVAVEATGNARHFCQALEASGCRLVVVNPHQFQVISRSVKKTDAHDAKTLAEFLAKDLLPEVRMKEQLSAEVASVLQTRDKLVKLRTTLKNKINNLLAARGILIKKESLSTDKGLEQALSAAVGELARLELGVLVEQIRHLNRSIAKLEAAIKQQGPKLPGYENLKSIKGIGDIGGSTLLSTIGDINDFADEGKLAAYFGIVPRVANSNETERSGRITKRGNKLGRTALVQCALIAMRYSPYLANYYARIKAARGTGKAIIALARKFLGIIYKTLKNGWVFEDFPRFVLAPAVTQGGGFAPTPPGFIALGATSGAG

SEQ ID NO: 501721 - protein, 316 aa, unidentified
MYLGIDVSKLTIDCCLIADGQNHQKKFQNNKGGFEQLIKWLQSHKVTDKLHCVCEATGTYYEALAEYLYLRYTITVENPRKIKGYAIAELQRSKTDTQDAKLIAQYCQDRKHKLKAWQPPAKEQKQLQEIARYLDYLKQQRATEKAKQHEAPDYIKSHIQTTISNLTAQIQTVKKQLLQFYKDNPSYNTLRKRLKTITGIGEQATAVLLSTYKRHEFKNAKQFTAYLGLDPRKYQSGTSVNGKSRISKIGSSEIRKSLYMPAVVAYRCNAFPEFVGRLKNKGKHIKLILIAIMRKLAVIAFTLLQNGQDFQVERYK

SEQ ID NO: 501722 - protein, 323 aa, unidentified
MMSTQHNYAGIDIAKRNFVIAVSSLSKTKTETNNPKGIAHTVEYLKKHNVALVVMESTGGLEIPAAKAIHRSGIAVIIANPRQTHQFAQSQSLTKTDAKDAKMLAFFAQMMMQKEGWQTMLYQPPTEAEEVLEALVNRRNQLVDMRTAEKNRLHQVHETQVESVKQLIAHFDRLIDELDKQIDDHTHTHFDGKAKVAKQIKGIGSTTTATLMAMLPELGRLSHKRLASLVGIAPHPRESGETKFKSRCFGGRSAVRKALYMATVVATRFEPLIRDFYQRLLSKGKPYKVAVTACMRKLLTILNARMRDYFAENDTTENGIQTA

SEQ ID NO: 501723 - protein, 350 aa, unidentified
MTRPSLAQRVFVGVDTHKDVHVAAAIDEHGRRLGYRSVATTERGCRELHEWAVSLAPQVRYGVEGTGSYGAGLSRYLRAQASSVLEIRGPNRKLRRDRGKSDTIDAEAAARAVLAGTSTLVPKAGDDWVEQLRVLRLARRSAVHARTQTINQMHAVVVSAPPQLHDVLKPLSRVELIRRSSRFRVGQLGAPATTVRWTLRLLAQRYQTLTAEINAIDSVIAPLLEDRAANLLELRGIGPDVAGALLVVAGDNPQRLRSEASFAALCGVTPLPASSGKVVRHRLNRGGDRRGNTALWRIAMTRLSCDERTRNYVQRRTSEGMSKREILRCLKRYIAREVFRALPRPVLDRP

SEQ ID NO: 501724 - protein, 403 aa, unidentified
MISVGVDVSKGKSTVCILKPYGEVIMSPNDYEHTLSDLKKLADQMDSFEDEIHVTMEATGNYHFPIATYLKKRDYDVRIINPLEMKRYRCQGIRNPKTDSIDAFMIAQYGIDFWFRPFQDYVVGDERIELKTLGMQYFKTMKTRQDRYLVLESVIDRALPGIGGVLNGYDKSTGKDKKSDFVYDFYHAKKITVYSENRFCDRYESWSTKKGYRYSEKEARQLYSIAKDSIPTLPSSENTKLMVQDAVKILREVDAALHDILTRMNEIAKCLPEYTTVMDMKGVGVSIGPRLIAEIGDPRRFHSAKALIAFAGIDAPPYQSGKFTGTERHMSKRGSRVMRKIGFELMDTINKHQKLYAGDPVCEYFLAKRAEGKKYRVAMFAAYNKFLRIYHSRVSAVLNENVK

SEQ ID NO: 501725 - protein, 422 aa, unidentified
MLEETHDTEEIIARVAALDIGKAELVCCVRVPSAQGSGKRAQEVRTYPTMTRSLLVLADRLRQLGVTRVVMEATSDYWRSPFYLLEAHGFEVWLVNARDVKHLPGRPKTDKLDAVWLCKVAERQMLRPSFVPPPPIRMLRDLTRYRADLVAARTADKNRVDKLLEDAQIKLSVVASDIFGVSGRDMLAALIAGERDPKVLAQLARRRLRAKLSLLEEAFHGRFSDHHAFLLQTMLSRIDQASADIAALDAKIDQEIAPFAPAVDQLDEIIGVGRTAAQVIIAEIGVEMGRFPTPGHLVSWARFAPGVKESAGKKKGKATTGHGNPYLARVLGEAAVAAGRTNTFLGERYRRIARRRGAKRAMVAVGRSILIIIWHLLSDPTARFHDLGPGFYDTRSNADRRKRNHVRQLEALGYKVTLQPAA

SEQ ID NO: 501726 - protein, 391 aa, unidentified
MPVPNDPGRCRTALDPESTLVAVIEMSQSSWLVAAIVPGLERHPLKRLAVDEAGLLRQLERWREEAARAGRRVARIAVAFEAGRDGFWLARWLRARGVEAHVIHPTSVAVSREHRRAKTDRLDTGLLKRAFLGWLRGEPGHCSMAAVPTLEEEDARRPDRERESLVAERTRVINRIRGCLARLGIRAFKPTLRRAPERLEGLRTPEGDALPPNTLSDLRRDMARLRLIRDQVKELEAARAERLEAAPASGQNAMVRLLARVIGVGVETADMLAHEILSRGLRDRGAVARYAGLTGAPDESGARRREKGLAKAGNARVRRGMIQLAWRFLVFQKQSALAQWYRARTADARPGTRKTLIVAMARKLLLALWRFATTGQPPAGVALRPGTTAAG

SEQ ID NO: 501727 - protein, 370 aa, unidentified
MKQDSVFYVGVDVSKAKHAIAVAEGGRNGEVRYFGEIEARPAAVERFVRKLEKKHPRLHFCYEAGPTGYGLYRQIVELGQRCDVVAPSLIPKRPGERVKTNRRDAVSLARLLRAGELKGIWVPDAVHEAVRDLVRVRSAASEDLRKKRQQLLSFLLRHGRVFTGRKNWTRTHARWLAAQKFDHPAQQIVFQDQVDVITDAQDRLERLDAQLAELVPSWSMAPVVAAYQALRGVSFIVAVTFVSEVGDVRRFDTPRQLMAFLGLVPSERSTGDTVKRGGLTLAGNRRARRVLIEGAWAYRYPARVTEPIRVRLEGLPKAVREIAWRAQTRLCARYRRMMAAGKNKPIVVAAIAREMAAFLWAIGHQVEPVR

SEQ ID NO: 501728 - protein, 358 aa, unidentified
MENRKYIGMDVHQATISVAVLDAAGKLVMESTIETKAATIVDFIQGLRGSIWATFEEGTSAAWLYDLLKPHVAKVIVCDPRKNALLKAGNKNDRVDARKLAELLRTGMLSPVYHGESGLRTLKELARSYLTLTKDLTRVMNRIKGLYRSWAIPCAGRKVYSPRHRGAWLKKLTQAGVRRRAERLYQQLDVLQPLRREARQELLAESRKHAASGLLRQIPWLGPIRVAVLIALLQTPHRFRTKRQLWAYCGLGLQTRVSGEYRFTGGELQRIKRQPALRGLNANHNRELKELFKSTATRASVSAGPFGNFYAALLATGMKPAMARLTLARKIAAIVLNIWKKGVHFDPGRLRRQPSLSV

SEQ ID NO: 501729 - protein, 321 aa, unidentified
MAKHTTICAGIDTGKRKLDVAIDGSSKQLQVENTAEGHEALLTWLRQHRVKRIGIEASGGYEQPVVAELRRKGFVVVVFQPAQVRAYAKFHLQRAKNDKIDAAIIAACTAAVRKIHAAPDPRLLPFAAQLTMIDQIGEDIARLKNRIESCRNETINKLWQEDIARLEQRERAALKALVAAIRKHPDLAKRLALISSVDGIGLPTAVAILVRLPEIGQITREQAVALAGLAPYDDDSGDRSGVRHIEGGRKRLRRALYTASLAASFRWNPQLIQLYQRLTAAGKEHKPALVACARKMLIFANTVVARGTPWCGEPPGSLPAS

SEQ ID NO: 501730 - protein, 439 aa, unidentified
MNKRRDRVCGADVHKDLIVATITGDDVPTIRENFGTTKAELKKFRNWLVANKCEQVAFEATGVYWMPIYDALSQTIDTIIANPLQIKTIPNDKSDSKDSKRIATLCLNGQIKRSRVFAEEDRDLRMMTRARSGYVKTRTQFRNRIHKYLSSSGIKLSSTMDDIFCKSGRYILDGLAEEKPIEEILKGIPSGKIRKKQDLIRAALENGLNDTNRMLVRDALEILDNLESKIEKLSHEVLKKVQQKSKDLAIVMSIPGIGFISASVILSEIGNYRDFQTPDQLAKWCGLNPGENESAGKKKKCGITKKGSKHIRVILVQAAQTISNMNKTALSRFFQRLIKKKEHNVAIIAVARKLICLIYHLLINQELYQEDECRKRRSSQDKSCQAPSFKEENLTDRVAAIVDAFYHLKESSRKNALMREIADISGIKVGQKRPSKGGG

SEQ ID NO: 501731 - protein, 422 aa, unidentified
MKPQPTGNEFAAFIGIDWADAKHDICLQAAHAARRESSVLPHRPDAIEAWAGVLRQRFQGQPIAVCLELAKGPLAYALQKYDFLVLFPVNPATLAKYRQAFTPSQAKDDPTDAELQLELLLRHRDKLKRLHPQGVAMRTLQYLVEQRRRLVGDKGRITNRLIYALKQYFPQAVEWFKDKDTVVFCDFLSRWPTLKQAKHARRATLEVFFREHNVRYPHIIEERLQAIKTATPLTEDIAVITPHRLLVQALVEQLRVSLEAIERFDAETTTLAQTLPDYSLFRALPGAGATLAPRLLAAFGEQRERYQSAAELQKYTGIAPVTERSGKKQWVHWRLQCPKFLRQTFVEWAGETIPRSFWAAAYYRQQRDRGCSHQAALRALAFKWIRILYRCWQNRTPYDESTYLNALKRRGSPLLSSIAASP

SEQ ID NO: 501732 - protein, 410 aa, unidentified
MQVVHERCCGLDVHKKSVTACVLTPGAGGEPAAEIRTFGTMTEDLERLADWLAARGVAEVAMEATGSYWKPVWNVLEERRFALTLANAQHVRHVPGRKTDVKDAQWLAELLRHGLIRGSYVPDRAQRELRELTRYRTSLGEERTAAVNRLQKVLEGANIKLAAVASDVTGVSARAMLAELVAGSTDAEALAELAVGKLREKIPALQRALRGRVGEHQRFLLAQQLSHIDFLDGQLAQLDAEVAERTRPFEEAVARLDTIPGVGQRTAEVLAAEIGTVLDRFPTPGHLASWAGMCPGSDQSAGKRRSGRTRKGSPALRRVLVQAAHAAARSKTTYLGAQYRRLAARRGAKRAAVAVGHSILVIAYHLLTRATAYEDLGPTYYDQRDREAVLRRLVTRLEKLGYEVTTKPAA

SEQ ID NO: 501733 - protein, 358 aa, unidentified
MADIFALDVSMGKSYCVWYRGKHCLKEFSLVHTRVGFNALRDMIKKAQKPIIYFEATGIYSRVIEHFCETNGLRFCRLNPLELHLKSESLRRVKTDQKDAHRIALTVQENTFRLTVPWKKDYLQLHELSRFYNQLNADWNYRLNHLHTALEQVFPELKRLFVNRTSKLALNIVELFPHPALVRPYSRVKLKNILMASTDKRISKMKAYKYADRLIDLAPKSYPAVSGDAIQVDEVRYYARQLIALTRKKEEVIKRMESIAQRLPEYILYCSFPGIGKQTAAQLMGELGDISRFDNANQLNAFVGIDIRRYQSGTYLGQDHINKRGNPIARKLLYFTVGNMIRQQHANSSICQVFIGSL

SEQ ID NO: 501734 - protein, 364 aa, unidentified
MYDSTTTVAVGLDVHARSIRLAAVRADELLEERTLPYDHEAVERTLRRWPSVRCCYEAGPTGFGLYRHLIGRGIDCAVVAPGLVPQRPGDRIKTDPRDARKLARLLAGGLLEPIHVPSRELEAARDLVRAREDARLDRMRDRHRLSKFCLRHGRLLPTSSWTVVRRRWLGEQRFEYAAEQLTFDTYLHTVDLVDRRIEALERAIRETAAQGPWRALVAQLRCLRGVDTLTALALVSEIGDFDRFRNAEEFMAFVGLVPSEHSSGEKRRQGTITKVGNSHVRRLLVESAWHARRRPKVGYELARRQRGQDAVVVERAWRCQQRLYQRWQRMAGRGKPQQKVVVACARELAGFVWAIATEQPLKST

SEQ ID NO: 501735 - protein, 340 aa, unidentified
MTEITRIAIDTSKSVFTLPAVDGNGRAMVRRNLRRQQVVPFFTDRPPVEVVMEACGGSHHWGRTLQGLGHRVRLIPAQYVKPFVKRGKNDRNDAEAIAEAANRPGMHDVAVKSAEAQARAMLLSVRELLVRQQTQMINALRGHAAEMGLVAPKGDGGLAKLRADIDADTSMPAPAKAALQMLGGEIDRIEARRATADKQLLAQHKADADSRRLAAIPGIGPVSALSFVHSVDAKQFESGRHFAAWLGLVPREKSTGGKQRMGGISRAGNERLRALLVLGATSVIQHANPQRRGVSAWLLKLLERKPRKLAAVALANKMARIVWAMLTSGKAYRGTSPVAA

SEQ ID NO: 501736 - protein, 423 aa, unidentified
MSQNQPEIQYAAFWAIDWADQKHVWSLQDANSSTCERGEVDHMPEAVEAWAAQMSQRFAGRPIAVAVEQSRGALVFLLSKYEQLHIFPVPPAMTANLRKAFYSSGAKSDPSDADLLLDLLQRHREKLRRLSPDTEATRRIQNLVEERRKLVDEKTAQSNRLEAHLKIYYPQIPRWFGDVDSPLVCALLERWPTLEALQTARPDTLRSFFRKQHSRKEELIENRIKAIGEAMPALKDRAVVEAKVAVVKVSVQLIQVLHEGIEGLNRQIQEAAEAHPDFFIFDSLPGAGAVMAPRLLAAFGSQRERYQDAAEVQILSGIAPVSESSGKSSWVHFRFACSKFLRQSFHEWAALSIPQSQWARAYYELQCRRGKKHHAAVRALAFKWIRIIYRCWKEQVAYNENVYLAALAKHNSPLVAATKAVAL

SEQ ID NO: 501737 - protein, 465 aa, unidentified
MIRSVGIDLHQGRHRARCLDDRAQPCDGFTFQTTPEGLATLEERIFQDGVNPIIVLEPAGLPWLMVAVYLRSRHPDCRLVKARTQKVAALRRYLRGPVKSDRLDALTLAKMPFIDPEQLDDIYLPPAEIHALQRLARQRKRLESDVSGRKIRISAIVDGYLPGVRRAFEDAWSSPFRAFLRSRINPFSVVRDGEKALHDYLSKASHRSKWSRVQTQVVFLACQSVAAVCELSKPAGTVNEDFFIDLQDELARELRLMEVEEAESESLADRIAKLYRKLHPSDNLCTIPGVGEHTAPIFLATVGDPARFRNQSAFANWEGVVPGARQSSNVEAKGLRMTKAGPSIMRMALYQAGDIGRRWDPQLAAVYYREMVYHGKNHRQAMGAVMSHLGARVLRVLKENRPYEIRDAEGKSIDRNEARKLILSQYHVSEDIRRERRRRNSKADKRRETASPRTNEAAKAPQPVN

SEQ ID NO: 501738 - protein, 459 aa, unidentified
MRRRDGRVEEIDDEEYERVLDRVCAIDVAKESGQVCVRTSRADGRRYSRVWPVKATTRAILELGEQLVRERIEKVTLESTSDYWRIFYYLLEACGLNVQLVNARDVKNVPGRAKTDKHDCVWLAKLTERGMLRSSFVPPREIRVLRDYTRMRVDLVRDRTRHWQRLEKLLEDSLIKVSAVASKLTTMSARDMVEALIRGERDPHKLAGLARGRMRHKHDALVEALTGQFDDHHAELAQILLGQIDSLDIEIDRITARINQLIADMPAAQPPAADTGDAQAGDDPTTQPQPGSAGGRPLPAVQRLAQIPGISIEGAQLILAEVGTDMTRFPTPQHLVSWARLCPRTIQSGAKHRTGNTPKGNPYLKGVLGQAASAAARTNTFLGERYRRIVKRRGKGKALVAVARSTLTIIWHLLADPTTTFRDLGPEYYTSRIDKERKIRNHIRQIEALGYSVTLAPAA

SEQ ID NO: 501739 - protein, 412 aa, unidentified
MNQDKLYVGIDVSSKNNVCYLMYSDGSKHSSFSVPNNRNGAKIIVDRVTSVLLSQDIPQVVIGMEATSVYGDNLMRFLRESGSLGRFERNLHMLNPKQVKKFRDAYSDLPKNDYVDSYVIADHLRFGRINKEVYMDDYKYQALKMYTRARHQLVQELTREKQRLLNTVFISFSGLTQEKIFSDKFGATSMALIEEFSSLDELAYMSTDELADYIRKKGKNHFENPEEIAEAVQRAVKNSYRPPQVIADAAKQMLAISMNTIRLLQRQIKEYDKAIEKMLEAFPQTLTSIKGIGNIYAAGIIAEIGDINRFPSQASLAKYAGLVWTQHQSSDFEAEDKRMIQGGNHHLKYYLCEAANALRRCDPEFKRFYSLKYKEANKHNHKRALALTARKLVRLVYTLLKTNRLYIPPEEY

SEQ ID NO: 501740 - protein, 341 aa, unidentified
MDNVTMIGIDLGKHSFHPHGQDRAGKAVFRKKVSRKQLLEFFATFHSCTVVMEACAGAHWMARKLSEFGHAVKLISPQFVRPFVKSNKNDFVDAEAICEAASRPSMRFVTPKTESQQTLSALHRVRQALVRDRVCTTNQMHGFLLEFGISLPVGHAVVRRLPAVLAEYRLPPRLVAILDRLHEHFKYLSEQIRDIEKELERQLADDSLGQRLMTIPGVGTITASLLASELGDGKQYRCSRDFAAAVGLVPRQYSTGGKSNLLGISKRGDKNIRHLLVQCARAFMLRLDKQSGRMADWVRSLLARRHSSVVACALASKLARIAWAIVSHNTVFEQRAAVTAA

SEQ ID NO: 501741 - protein, 348 aa, unidentified
MVLIGCDFHPSWQQVCWLKQETGETGDSKLVHEAGAAEKFYRQFPAGTRIGMEATGNCQWFLELLAKLGHEVWIGDAAKIRASDARQQKHDKRDARLLLQLLMEERFPRIWVPSREQKDLRQLLMHRHKLVRIRAQVKNGLQHLAMNQGLQKKKGLWSEWGQQALRALPLARWASRRREDLLKMRSELDAKIAVLDEAVAAAAEKDARARLLMTQPGVGPITSMAFVLTIGDVSRFPRGKQVASYLGLIPREYSSGGHQRLGAISKQGNTFLRMLLVEAAQGAVRGDESFGNEYRHRCHRKPKGVAKVAAARKLSIRLYWMLRSNTKYPEIVRNESSSRVPLVGASLP

SEQ ID NO: 501742 - protein, 481 aa, unidentified
MKTKPPEKIQQATNPSTRGHWNKMNRKQRRDMMRQIQSEDLSLEVVHPHAAGVDIGNESHYVAVPPTRDSQPVRHFGCTTVELKALAEWLKQCGIQTVAMQSTGVYWIAVYDILETAGLDVYLVNARDTKNLPGRKSDVQESQWLMKLHTYGLLRNSFRPSQEIRTMRTYWRQRNDLIRAAVSHIQRIQKALTQMNVQLGNVLSDVSGVTGQAILKAILAGERDPHKLAALRDPRVKASEEQIARYLEGNWQEDLLFVLKQEQEAYEFCQQQIAECDRQLEQYLRQREDRSQGASPPQEMRKGRLVRKKGNKPVFALRAELFRITGTDLTQVDGIDVVTAATILSEAGWDMSKWEDEHHFVSWLRLCPDNRISGNKVLGKGRLPTNNRASIALRMAASTLRVSNTYLGAQFRRFRTKLGAPVAIKAMAAKLARLVYRMLRYGMKYVDQGANIYEAQHRQRQIGQLKWNAAKLGFRVVEAAT

SEQ ID NO: 501743 - protein, 313 aa, unidentified
MDEKTYVGIDVAKNHLDIAIYESQKVWRINNDTQSIQDLVEEMRSISPRLVVLEATGGHEMKAAKALYLADVPIAIVNPRFTRSFAKSLGHLAKTDRIDAKDLAHYAAVIQPSVTMMPSEEEEELRALVRRRWQLIEARTQDKNRVKSAGKSIDDSLNRHIEWLTEEIERIAKTIDVLIKASNLFRQKVQILKSFNGVGDVLAYGLLSELPEIGKLNRKKIAALAGLAPMNKDSGKKKGERSIAGGRHKARTLLYMPTLSAIRHNPSIRELYNRLLEKGKTKKVAITACMRKVLIILNAMIRNQTTWQADFAK

SEQ ID NO: 501744 - protein, 341 aa, unidentified
MDKELYFGVDVSKKTLDLAYYDGEAIDWKNAHIQVSNDDAGFKKIGSWVAKVGKDFATFLFCMEYTGLYNQNFRLWLESKEYIYGMVEPRKMHRFEPDLDDDQRSLDRIKTDELDAFRIAIYCEQNHKKILRNPSKLPSPVYFKLKRLLAERKQNTKQSVLYKQQLHDICAYDTDLSVERKKLLLKNMQENQKAIDKEIDSYMNEDTSIRKNYNLLTSIPGIGRIIALETILLTENFTAISNPRKYACYIGIAPFKKESGTSVRKKTGVSKKGFSEAKADLSIAVLSVIRNNPSIRDYWIRKRKEKCGGIVLNAIKFKLVLRMFAVIKRGTPYVETDAYKN

SEQ ID NO: 501745 - protein, 318 aa, unidentified
MNIIGLDISKDTIDATLHKTNGSIHYIKFKNNDDGLKQFRLWIKGNRIRKAYIGMEATGIYYEKAADMLSSYYTVYVINPLKIKDYGKSRFNRTKTDKADSNLIADYIKRHQDTLIPYQIPKNKALQKLINLKNQLQQHQKQIKNRLHSTEEDFIRNIHQDLIDTIQDKMEQVKIAISEQIKKQTDYNHYRNLQTIPSIGKDTALVLYAQLTEKHFKTANQFVSYAGLSPAIIQSGTSVRGRGRLSRYGNRRLKSTLYMPALCAYRFNAFPKLINNLKKAGKPKMVIIVAIMRKLAKLAYYIVKTGQPYDAERHRLNQ

SEQ ID NO: 501746 - protein, 308 aa, unidentified
MAQNYIGVDLSSDWIDIHDPIRGTSRIANSNAALARWMEAFAPEDFLIFEATSGCDRAILQEAEARGITMRRINPLHGWHFGRSLNLPKTDRVDARMLARYGAERQPEPQAPSSPARLALAELETRREQLKVMEVQEKNRLRKATLEAVRADHLTMLRNLAARTAKIETHIRDHLKAHPDLARAAHLLQSIPGIGSVAATVLIAHLPELGTLDRRAIASLAGLAPKARESGKWHGNRPIGDGRRHIRRALYMAALSALRSSSCFATSVAALRAKGKPGKVIAIAMARKLLVIANAIISKQEPFRAAKQ

SEQ ID NO: 501747 - protein, 326 aa, unidentified
MKKYIIGIDISKDTLDFCCVDVDTHKKTSFGVIRNTKTAIIKWLKSLDINTIEFSMEHTGHYGALLVSILNDKSACYYLVNPFDLKKSIGIQRGKTDAIDAYRIASYTITNKHRLVPYKLPSNELCKLKALITARQLAVKMSVQIKNSIKANEILNNTINVKDIIAQEKKQLKTLAKSIDFFEAQMLEVISSTEELKSTYTNINTVIGVGPITSVKIITETENFTKFTNPRKFSCHCGLAPFKYQSGTSINGRTKTHFLRDKSLKSILFQAAGSAIQHDPQLKAYYKRKVGDGKHKLTVLNAVANKLVLRVFAVAKREGQYVKLFN

SEQ ID NO: 501748 - protein, 347 aa, unidentified
MLIIGCDFHPGFQQVAIFDNRTGEIEEKRLQHRAEAEQFYRGLAGQEVLVGMEACGHYPWFEGLLQELGMELWFGDAAKVRASVVRKQKTDRRDAEHLLDLLRQDRFPRIWVPSLEVRDVRQLLVHRHKQVQARTRTKNQLQAMALSHGVQKKRKLWTKAGRAELEQLPLLAYAAQRRKKLLEALDELDVEISELDRRVAEEARERPEAVRLMTHPGVGSVTALAMVLTLGPAERFGSGKQVGSYFGLIPSEESSGGKQRLGKISKQGSSFLRFLLVEAGQTAARYDPQLKRFYRRLAVRKNRSVAKVAVARKLATRLYLMLREQWTYAQLSQAVMQVSPSHSVAGE

SEQ ID NO: 501749 - protein, 344 aa, unidentified
MIAIVDEAGARIKHRKLNCDLQLVLQMLNPFKNHLSSIAVESTFNWYWLVDGLMEHGYPVVLANPAAIEQYNGIKHADDKNDAFFLAELLRLGILPTGNIYDAQLRPVRDLLRRRMNLVRQRTALLLSLKSLHHRTTGSALSHNKIKSNENAAVAELFDHPANQLIASLQKQHIDALTESITVIEKETIKSVRNIGYYQRLKTLPGIGVILGLTITLEVGVVSRFKTPGDFASYCRTVDSQQISNGKKKGSNNQKCGNKYLGWAFVEAANFAKRYDETCRRWADRKAAKSGKIVATKALACKLAKAAWHIMKTDTDYDETRMFPQLAGTKPSGEQSSARIGVGP

SEQ ID NO: 501750 - protein, 342 aa, unidentified
MSGMIIGLDLAKSVFQVHAVDAEGKVVITRKVRRSQMLEFFTRLEPCLVGMEACPSAHHWARELSAMGHEVRLMVASYVKPYVKRQKNDMVDAEAICEAVTRPTMRFVPIKSESQQAILMVHKTRALLVRQRTMLVNALRGHLTEMGVVAPKGIRRHADLVERVLAHGADEIDLPPLVRDIVFSSARQIGSLNAEIKELERKILEWHRTSEASQRLATIPGVGVITASAMAATVVDPAAFRSGRDLAAWLGLTPRSNSSGGKERLGRITKAGNRYLRTLLVIGATAVVGFSRRTTEGPLMNWVRKLLQAKSARLTTVALANKMARICWAVMAHKTVFGAAAA

SEQ ID NO: 501751 - protein, 369 aa, unidentified
MEWPAPLSRRLRWGNQREEDGAMQIAVLGIDLGKNSCSVVGLDTSGRVVLRRRLHRDSVAKLASCLPPCVMAMEACCGAHHLGRALQGCGHEVRLMSPEYVQPYVKAQKNDERDAEAIAEAATRPTMRFVELKSEPQLDMQSLHRARSRLVGERTALINQLRAVLLERGITVAQGRYRLQRYLALALDGDDAPLPLSPRIRLLIDDMRAQWSELDRRIAAFDTEFVAAARNDAVARRLVTIPGIGVLNATALVAAVGDARSFSRARDLAAWLGLVPRQATTGGRPRLLGITKRGNKYLRTLLIHAARAALPSLTMTEGPLGNWLRGLSARAHRNTVIVALANKLARIAWAVLRSTAIYSATTSDRPTVA

SEQ ID NO: 501752 - protein, 317 aa, unidentified
MTVVGIDVAKASLAVALFTPVGTMRQRRCPNTPAGHVELLRWLRRHGDDVVHVGLEATGGYQDAVALALHDAGHIVSVLNPAAVEAYSRSQLRRAKTDPTDAALIADYVRTQGPPAWTPAPPEMRQLQALVRRLDALLEMRTQERNRLEPAAAIVRSSIEATLAHLDDAITTIKAQIALHIEACQTLRAPRDLIVSIPGIGVTTAAIILGELQQITRFASARQLAAFSGLVPHIRHSGTSVRGRGALSKLGASRLRKALFFPALVAMRYNAVLRPFAARLRAAGKPKMVIVAAVMRKLVHQIYGILRSGRAYDPAHA

SEQ ID NO: 501753 - protein, 278 aa, unidentified
MYYIGLDVHKKTISYCVKDAAGRVHQEGKIGSTRRELDCWIRTLPQPRTIAMEATIFTGWIYDHLLPHAEKVKVAHPLMLRAIAAAKKKNDRIDAGKIADCLRCDFLPECHMASTEIRDRRRTLRYRNLVIKQIVQMKNRVSGLLMETGVSYNKQRLHKVGYFADLMTSNEEVNESIRPLLKLSREMIHRSQKLEYALASSLERDPLLKERLRRLRTVPGVGSITALTWALEIGDYTRFTSIKQAISYCGLCGDERSSAEKVMRMPISKQRNNTFSAY

SEQ ID NO: 501754 - protein, 391 aa, unidentified
MIFVGIDVAKDKHDCFITNTDGEVLFKSFTIINNLDGFDELYQKIESVMEDVTKVKVGLEATGHYSYNLLGYLLDKGLPTYVINPLHTNLYRKSLSLRQTKTDKVDARTIASMLMSDVNLKSYSDTSYHNEELKSLTRYRFDKVKERAKLKVSISRLVCILFPEIEKLVPTLHINTVYELLYEFPGARHVANAHLTRLTNLVETASKGHYTKESAIAFREAARTSIGSNMPAKSLELKHTIKLIRELDSEIEEIENEIKIIMDKIKSPILSIPGISYRMGAMILAEIGDFSQFDSSDKILAYAGMSPSTYQSGQLDNSHSRMEKRGSRYLRYALFNATSYVCFWDPTFKAYLAKKISEGKHYYVALSHATKKLIRIIYKLETSGQQYIKAI

SEQ ID NO: 501755 - protein, 347 aa, unidentified
MEHCAGLDVSLKETSVCIIDKAGRTVREVKVASEPEALLALLQDPLYRFERIGLEAGPLSQWLWAALAEAGLPVVCVETRQMKAVLKAQSQVNKTDRHDARGIAHMMRVGLFRPVHVKTLHSQKIRMLLTHRKMLQAKAIDIDNDLRGTLRNFGLKVGTVSGGGFEARIRELVDRSPDIAAFIEPVLVVRRVLREQLAVLHSRILTIARDNATAKRLMTIPGVGPIVALSYFATVDVPARFTNSKAAGAAFGLTPSQYQSGEIMRTGRISLCGDRMMRALLYEAAQVMLFRSQKWSWLKAWAMKIVKNRGAKKGIVALARRLAVVMHRMWMDGTDFRYGREGSAPAA

SEQ ID NO: 501756 - protein, 356 aa, unidentified
MKIVKQCIGIDISKDALDCCIGSIDSNQNQSFSKSKKFTNCEDGFKEMLKWVKAEKEEVVFIMEATGVYYENLAYWLNHHDQKLCVLLPNKVKYFAKSLNLKTKTDSQDARLLSQLGLERKLSYWNMPSKMMREIKFLSREYRETKAKLVQIKNQLHARNHSYGCPKSTEKRLKKQISLLETQLLEVEAELRLQAMADSKLYDKIVSLSTIPGVSFMTIICILAETNAFALVDNAKQLVSYAGLDIQHNQSGMKEGKTRISKKGNSFIRNALYMPALCASKHNPAMKEFYNQLIERKPAKKIGVTAVARKLLILMYVLWKNDTEFNPLFEQQKSSLIEVGRSSLPTQDELRKVLLI

SEQ ID NO: 501757 - protein, 403 aa, unidentified
MCTLIGIDWSKNKHNICIMNEAGAQILRFSIPHSTSGFSDLEAKVNKLGVPLTDCLIALETAHNLLIDFLWSRGFCLYVIPPSVVSSNRDRHRSSRAHNDDSDAFLIADLLRTDRHRFAPWKPDGQLVRRMKAKLSLIDSLTKTITAYSNRLQAVLLRYYPQALGLFSQVKTQIGLRFLIAYPTPEAALSLTYSDFAGFCRSHGYTQPHLLPDSYAQLRQPVPEPDPVVTLAHKEETVFLAKLLLEMVRHKAREIREVQKLFAQHPDQAIFDSLPGAGDLLAPKLLVMFGDHRERYPTPQTIRALAGTCPVTIESGQKRRVRFRRGCNRDDRHTAQQFAKASVREAEWAAAYLSLCLARGHSKSHAYRCLANRWLGIIWKLWQSRELYDETYHLQQIRRHRRR

SEQ ID NO: 501758 - protein, 428 aa, unidentified
MNEEDRIRLEEFRQFKKEIRKSAEYLIVGIDVAKDKHHAFFGTATGKTLLKRLVFANDLEGFGKLLVQAEALKVQEGLKKVVFGLEPTGNYHKPLGEHLLRCGQLVVLVSGVAAHENRKTLDGRWDSNDTRDAANVADLVSQGKCLFYEFPVGGLQDLRSLLSLKRRLKRQEHGYRVRIRNHLVAKYFPELDRYFAQSEKLSLAVVRWCLDPSVIAGLEYPRFVEMVSSGQRRLAQERKLQAIWKLAVDSVGCEVGPAVEFEVKVMVEGLKQIRERIQEIDEKIQEICSQFPEYEYLLSIPGFGPDISAKVLAAVGDPFRFQSGKQVLKLAGLDLSAERSGKSSPNAIPVISKKGKADLRYALFQAAFIASTKNHYFMVYYTNKLRGREREPGIRIKMRVKLSAKLLIIAWTLMKKKEPFNPDYLAIE

SEQ ID NO: 501759 - protein, 340 aa, unidentified
MVHVGVDLDKRSSQIAVLTEEGEIAQQRLPNDPVQLEKFFAELPPFTPVAIEASGTWWWLVDLLERLGHHPVLSHPKQTKAIAAARLKNDRVDAERLALLLRGDLLPTVWIPSAALREARELVRHRIQLVWVRGVIRNRLQAMLARRNLQPTSGQSWLTQRGQRELQRLPLTETPHRIREDCATLLPTLDAQIRRLDAELVARWGRDGRVQRLMTIPGIGPFIAIVLVLELGDIQRFADAKRLASYVGLTPRVRSSAGRVRSGHISKEGHRLLRWVLVLAATQAIRRPGPLRAWFHAVKKRRGKKVARVALARRLAEIVFHVWKHECDYFTVVRHGVVRG

SEQ ID NO: 501760 - protein, 374 aa, unidentified
MKGTRFIGLDVHADSIAVAVAEPNGEVRSLGVIPHDPEAVRKLVRKLGPPETLRACYEAGPCGYPLYWQLTQLGVGCIVVAPTLVPVKAGDRIKTDRRDAMKLARSFRSGDLTPVWVPDAAHEALRDVVRAREAAKRDQLRARHRLQKFLLRHGRRAPAGTKAWTQGFHRWIRGLHFEHPAQEATYLDYVAEVDHAAERIARLERAIDAAVATAPPAMRTVIDALQALRGVRKVTAATIVAEVGPLARFDRPRQLMAYCGVVSREDSSGGRTRRGAITKTGNAHLRRVVIEAAWAYQHRPAIGPTLRQRQRDLPAAVTAIAWKAQHRLHGRYRRLLGRGKVKPQVVTAVGRELLGFIWASGVEVAPPAMTATAA

SEQ ID NO: 501761 - protein, 360 aa, unidentified
MGNERTFVGLDVHARSVTGHALDAVTGEVWQRKLCPDPGEVLRWVSVLPGPVKVGYEAGPTGYGLYRCLNDHGVLCVVAAPSKLHRPHGDRVKTDARDAELLAHLLKLGGIVEVNVPSVEQEAARDLVRAREDARADLMRARHRVSKMLLRQGIVYSAGDTWTKVHDSWLRGQRFDQQSRQLAYDSAYEAMVLTVDRRDRLDRAIDEMAANSSYTPVVRRLGCLRGISTLTGFALAVEIGDWQRFTGATIGAFVGLVPTESSSGQSRSQGSITKTGNTHARRLLVEAAWHHAKPYRVPGKTMRDRWELAPPAARVRGHEGNRRLHQRWQRFNARKKRPAVADVAIARELAGWAWSLALLE

SEQ ID NO: 501762 - protein, 341 aa, unidentified
MAESVGLDVSMKETAVSIRRDGKRIWRGKCGSDPKLVAEVIRRRAPDAARVVFETGPLSVWFFHALTAEGLPAICIDARHAKAALDMAPNKTDANDADGLAQLAEVGFFREVRVKGFDSMLGRTLVAARNRLVQITTELSNQIRGLMKTFGLVVPAGKGSRFEAHVRALLADQEGLAPILLPLLDAWRAVRVRAAELGRQLVASARQSAACQILMSVPGVGAVTATSFATAVEDPENFRRSRSVGAWLGLTTRRYQSGEVDYDGHISRRGNTHLRGLLYEAATVILTRTSAESSLRTWGLKLKERIGFKRAAVAVARKLAVVMHAMLRSGQLFDRTAGMAA

SEQ ID NO: 501763 - protein, 363 aa, unidentified
MKSTTLWVGLDVHKESISVAVFEDARTQGRPVVTIPNDPTQIRKLSSRLKKEGEVRACYEAGCCGYEVYRQLAAMGIACDVVAPGLIPVRVGDRVKTDRRDAEKLARLFRAGELTSIRVPTSAEEALRDLIRCREDAREDVLRQRQRMLKFLLRHGRVFHDTKHWTRAHWVWLRAQRFDEPLAQIVFTEYLTTLEKTLARVTTLDQEIAKQADKELYKPLVGRLRCLRGIDTLSAMALIAEICDFTRFEHPRELMAYLGLVPSERSSGGKQRRGSITKTGNAHARRIFVEAAWHYRHAASRSATMKARWKDQPPTVIEHAYKAQERLHRRYFRLTSRGKPSQVAVVAVARELCGFVWAVARAA

SEQ ID NO: 501764 - protein, 337 aa, unidentified
MRFCGIDLHSNNSVVVVTDETDKVLLSRRCPNDLSTILTLLAPHRDELTAVVVESTYNWYWLVDGLMAEGYAVRLANTVAMKRYDGLKHSDDETDAAHLAHLLRLGILPTGYIHPPAERALRDLARKRVQLVRSRTQHVLAVENILARSTGSRPSAAAIKRLAPADIGTLGLAADVALAVQANLAVIATLNLEIGRLEARLLEGAKLRPDYVRLKSIPGIGEVLAIIIMLETGDVTRFARVGNFASYARCVDSARYSNGKKKGEGNTKNGNAYLVWAFIEAANFARRFNDEARRFFERKKAKTNSIVATKALAHKLARASYHMLKEGQPFDVKRCFA

SEQ ID NO: 501765 - protein, 413 aa, unidentified
MEVLYQRCAGLDVHRDTVVACVRLAVGSKVEQHVETFGTTTSALLKLSDWLTGFEVTHVAMEATGVYWKPVWHVLEGSFELVLANAAHIKNVPGRKTDVNDATWIGDLLAHGLIRGSFVPPAPVQAMRELTRTRKQLVRERASHVQRVDKVLQDANLKLGSVLSELDGQSARDIIRAVISGETDPDKLVELVNYRVKAPRPKIVEALRGRVMPHHRLLLKLHLEQMENIEKAMATIDAEVGQTLTPFRQAADLLMTMPGVRDVAAAVIVAEVGIDMSRFPSAGHLVSWAGLCPRNDESAGKRRSTRLRKGAPWLKATLFQAAWAAIKTKGSYLRSQFLRLKARRGPKKAIAAVAASMLTAVHAMLRTGQPYRDLGATYFERRDPHSAANRLLRRLRTLGFNASLTPIPEAVSS

SEQ ID NO: 501766 - protein, 343 aa, unidentified
MQVTTIGIDLAKNVFQVHGVDASGKVVFNRPLPRSRVLAFFAKLPPCLIGMEACASAHYWARELKKLGHEVRLMPARDVKAYVKRGKNDSVDAAASCEAVQRPTARTVPVKSPEQQAQLMQHRVRDLLVRQRTQAINALRSHMAELGIVAAQGYDGLKELLAIIADAGDGRLPENARASLSGLVQQIASCQAEIGALEKRLVTQHRKCADSQRLETIPSIGVIGATAIVATVPDASIFKRGRDFASWIGIVSRQNSTGGKQRLGPISKQGDRYLRRILIVGAFAVLRQARAHPEKYPWVAQLLAHKPAKVAAVAVANKTARIAWAVLTKKESYRAHPTTAAAV

SEQ ID NO: 501767 - protein, 344 aa, unidentified
MTEISTIGLDLAKNVFQVHGIDALGTVVLRRQLRRAAVEKFFAQLPPCLVGMEACGSAHHWARVIGRYGHKVRLMPPAYVKPYIKRNKNDGRDAEGICEAVTRPTMRFVPVKSMEQQATLAVHGTRALLVRQRTMAANALRAALSELGIVAAQGYDGLRELMTRLEEPSEEIPETMREALLLLVQHWQALDADERKLERQIAKSARGDADARRLMEVPGVGPIIASTVMAKVPDAKVFRCGRDFAAWIGLTGKDHGTGGKHRPGRISKQGDRMLRALLITGASAHLRQQKARGVSDPWLRDLLARRPYKVVMVALAAKTARILWAMLVKGEVYRNRASAPAAAC

SEQ ID NO: 501768 - protein, 379 aa, unidentified
MSETATTRTNHATAADRRLFVAFELGEKEWKLACTTSFGALARPGTLRARDTRRLLDWLAKARERTGAQRIVSCYEAGRDGFWLHRFLQAHGIENRVVDSASVEVNRRARRKKTDRLDARKLLTMLLREALGEKDVWSVVHVPSVADEDARSLQREYRTLVKERTRSANRIRGLLANHGLAPERVDARLRAWLERARLWDGSPLPPGARQRVLRELERWEFTHGQVLAIEKERRERTKTGCEPGLEKVRRLYGLRGIGLGAAWTYGLELFSWRAFRNGKQVGACVGLAPTPFQSGDSERELGISRAGNRWVRGLAIEIAWGWLRHQPDSVLSRWYRERFARGGPRARKVGIVALARKLLVALWRYAETGALPEGAVLKP

SEQ ID NO: 501769 - protein, 354 aa, unidentified
MSQKLESAIAVIGIDIGKNSFHVVGHDDRGVIVLRQKWSRGQVEARFANMPPCLVGMEACVGAHHLSRKLNSLGHNARLMPAKYVRPYSKGQKNDFRDAEAIAEAVQRPTMKFVATKTADQLDLQALHRVRERLVSQRTGIINQIRAFLLERGIAVRQGQRFLRAELPRILATPPDVLSPRMVRTIEDLAGDWRRLDERVESLSKEIVAIARQDAGCERLISVPGIGPIISSAMVAAIGAGDVFTKGRDFAAWLGLVPKQISTGDRTILGKISKRGNRYLRVLFVQAAWVVLIKPQSWERHGLKSWIEAAKKRLHRNVLAIALANKLARIAWSVLAHGRSFEASKLAAAVTQPA

SEQ ID NO: 501770 - protein, 421 aa, unidentified
MKNKAARKIKQIPEGYLMVGIDPHKKKHAAVAMTQDFMVKNKFKFTNSKHGYEEALERVRWEMRSNGCRGVIFAIETASHYWRNLAYFLDERGIPFRLINQFTLKRRREGKDIDRKKNDLRDAEAAAQLLRSGEFTETQLPQGIYAELRATYNAYRRLIKEGSRIKNLIKGLLDGLFPEFTQVFKDPCGLTALSVLSICPIPNVITGMTEEGFLNIIRQECKGRLMKKKLRVLHNIARNSIGIAVGAHSVAMEISFLAEKLALINSQVHQTEKTLMKLVDETEEGKYLLSIRGLGYISVAGMLAELGLFSSYHSAKQLVKMGGTNPTESESAGKRKSRTPMSKKGRPGLRWCGWTAAVSLLRHNPDFRFWAKRLQERPIHANPLNGKEMTGAAINKLLRLAFALVKNKTFYRLPEMTEMKV

SEQ ID NO: 501771 - protein, 308 aa, unidentified
MKKTITVQAFQKEICKEQKLTIGLDLGDRWSFYCVMDEAGQVILEQKLPTTSEAMKQTFGKIPRSLIALETGTHSPWVSRLLTELGHEVIVAHAQKVQLISKSNRKDDRHDARTLARLARIDPELLGPVRHRSVKAQLHLTVIRARAELVSARTALVNAARGLVKSYGQRLPKCGTYQVSRELATALSTELRDVLEPLLQAIESLNERIQEYDERMEKIAKEVYPEVSLLKQVKGVGTQIALTYVLTIEDPYRFAKSREVGCFLGLRPGRRNSGESEPQKGISKEGDRYLRTMMVQGAHYILTFWRRQ

SEQ ID NO: 501772 - protein, 343 aa, unidentified
MEHFAGLDVSVKDTSVCIVDDTGRIVREVKVASEPEALLQVLANPAYQFKRIGLEAGPLSQWLFSALAEAGLPVICVETRHMRAVLKAQINKTDRNDARGMALMMRAGLYRPVHVKTLRSQKLRMLLTHRKLLQSKAIAIDNDLRGTLRNFGLKVGIVGTVKFEARIKELVENQPDLAVLVEPLLIVRRTLREQIAILHRRLLALVRDDEVCRRLMSIPGVGPVVALTYRATVDVPSRFRTSKAVGASFGLTPAKHQSGEINRTGAISKCGDEMMRVMLYEAAHIMLTRTTKWSWLKAWAMKIARHRGIKKATVALARRLAVIMHRIWVDGTEFRWTRETAAA

SEQ ID NO: 501773 - protein, 401 aa, unidentified
MISVGIDVSKGKSTVCILKPYGEIVASPFEVMHTESELRKLAQMLQRLDGEVRVVMEATGIYHLPVLSALQDQELYVTLINPFEMKEYASRGLRRVKTDKKDSITIANYGIDNWYRLKNHQGSDDVYSELKLLGRQYCHYMELHVKALLELTHMLDYTMPGVKKEFHSWNEGNGKDKLSDFVERYWHFDNITAMTKEEFIEDYVSWAAEKKYHQNRSKAAELYNLASDGISTLSANTPSTKMLVLEAVRVLREIDSTLLKIITRMKELAKTLPEYDTVRAMGGVGDVLAPKLIAEIGDIRRFRSGKALIAFAGIDAPPYESGQFVGTNRKISKRGSKVLRKIGYETMRVLKTHKAPEDDAVYRFILKKEAEGKSKRQAKIAGLNKFLRIYYARVSEVYKAL

SEQ ID NO: 501774 - protein, 351 aa, unidentified
MLIIGVDYHPSFQQIAFMDRETGECGERRLNHSDGEAERFYRELKQQGVSVRVGMEATGYSRWFERLLAELGINVWIGDAAKIKTKRVRKQKTDREDARLLLKLLLEDNFPRVWVPSPENRDLRQLLWHRHRLVQMRTRIMNQLQALAMNEGTRRKNRLWSAQGRAHLEKLPLAPWASRRRQDLLELLDRMNPTIAELTAAVEQEAKKRPDVLRLMTHPGVGPLTALAFVIIIMTPERFPCGKQIGSYVGLIPCEDSSAGRQRLGHISKQGNALLRFLLVEAGQAAVRCDADWRRRYLHLVMRREPRIAKVAMARKLAVRLYWMWRNGWEYSQSIEFSSHAGQLVTGHGVK

SEQ ID NO: 501775 - protein, 335 aa, unidentified
MNIRYFIGVDISKATLDWAVFDGKTIVLQSQSANSEVGIKTTLKLIRALPDFRITESVCCMEHTGIYNAHLLAHLHKLSFPLWLESSLQIKKAGGLQRGKTDAIDAQRIAEYAFRFRDQMRLWQPPRPVLQKLAALSALRQRLLLVRQQLQQPITEQDGFVDAPLQKQLAKNCQASLKAINADLEIADKQITELIEGDDRLKELFAWITSVPGVGPATATEVIVATDEFKSISHPKKLACHAGVAPFEYRSGSSVRGKTRVSQHARMRLKSLFHLGAMSAVRMKGELQEYYQRKVAEGKNKMSALNAVRNKLIHRVCSVVYRGQKYDKNYTPALA

SEQ ID NO: 501776 - protein, 404 aa, unidentified
MIFVGIDWSEHHHDVCVVDEQGTQLAKVRVPEGMEGVVRLHETIADHAEEPEEVIVGIEIDRGLLVGALVAAGYRVLAINPLSVDRYRDRHATSGAKSDPGDAKVLADLVRTDRHNHRPVAGDSELAESIKLIARTHQSFVWERQRHVNRLRSALREFYPQALVAFGTELASADAIAVLKIAPTPELGRRLSRSKIAAALRRAGRLRNLEARAEQIQRALRSEQLQASEAITGAYGVIASSLVRLIEGLNTQIAGFEDELERSFEQHPDAEVLRSLPGLGIVLGARVLGEFGDDPTRYADARARRNYAGTSPITKASGTRRVVLARFARNERLFDACYLWAFTSLTKSPGARRYYDLQRARGKTHSQALRALGNRLVGILHGCLRHGELYREDVAWPSRESLAA

SEQ ID NO: 501777 - protein, 354 aa, unidentified
MLIIGCDYHPGFQQIAFVDTETGELQERRLQHCEEAEKFYRDLAAQGMKVRVGMEASGHARWFERLLAELNFELWIGDAAEIHRKRERKQKTDRQDAQHILRLLLKDDFPRIWVPSWENRDLRQLLWHRHRMVQTRTRLMNQLQAVALNEGLRRKKGLWRETGRKQLESFRLAPWASRRRRDLLELLDRLNPTIAELSAAIEGEVERCPEAQRLRTHPGVGSLTALAFVLIVGEAERFQCGKQIASYLGLVPLEDSSGNRRRLGHITKQGNSLLRFLLVEAAQVTARSLPEWRSKYVHLTMRRGRKIAKVAMARKLAVRLYWMMRKEWDYEQVKKFGSHAGQPGNRYGVKSNIE

SEQ ID NO: 501778 - protein, 409 aa, unidentified
MDAMFPHCAGLDIHKDSVVACVRHVGRSPMEQVRTFGTTTEQLLALGDWLTAEGVTHAAMESTGVYWKPVWNLLEGRVQLLLANAQHMRNVPGRKTDVADCQWIAQLMQHGLLKASFVPPAPQRQLRDLTRQRSQLVADRARVANRVQKVLEDANIKLASVASDVLGKSGRDMLDALIAGQSDPAVLADLARLRLRAKIPQLRAALNGKIGDHHRFMLKQLLRQVDDLEKQMRAYDRQIAKVMSPLEKKAIERLDEVPGIDVHAAQVILAEIGTDMSRFASDAHLASWAGLCPGNHQSAGKRHSGKTNNGNRWLRAMLCQCAWAAGRTKGTYYSAQYRRLAARRGRKRAILAVAHSQLVAIYHLLEGQSYKELGANWFDKLAPERLKNNLVSRLQRMGYDVTLQEKPAA

SEQ ID NO: 501779 - protein, 343 aa, unidentified
MSIAILGVDLGKNSCSIVGVDDIGAIVVRRTMRRETLIEYVAKLPACVVAMEACCGAHHLGHLFEAQGHEVRLMSPEYVRPYIKAQKNDDRDAEGIAEAASRPTMRFVNLKSQEQLDIQTLHRVRSRLVAERTNLINQLRAILLERGVIFPVGRRKLELGVDGMLSKSAQILSPRVHQLVADLRSEWKELDKKIDALNAEFVRLARGDAAMRRLTSIPGVGVLNATALVAAVGDASSFAKARDLGAWLGLVPRQYSTGGRPRLLGISKRGNTYLRTLLIHGARAALPSLSTAETPLGRWLKAMIERGVHRNAIVVALANKLARIAWAALRKGTGFDRGYPVAA

SEQ ID NO: 501780 - protein, 352 aa, unidentified
MNETKYIGMDVHMATTVIAVLNSVGKVVAEAIIETKASTILDFLKSQRGTVHVTFEEGTQAAWLYDLIRPHVAQVVVCDPRQIARQDNKADKADAKRLAELLRTNGLKAIYHGEHSTQAVKELARSYGSIVNDGTRVKNRLKALFRGRGIACRGTGVYSGEERDQWLKRLDNAALRVRISRLWKELDLLVQLREEAEKDLMAEARKHPEVKILRSIPGIGPLRAAVILGFAITPYRFRTRKQFWNYCGLGLRSKITSEYELVQGRVSRSKKRPLVRGLNPNYNRALKEAFKGAAVTAAMGAWESHFDAMVENGTRAPLALLTLARKIAVIALVLWKKGERYDENKVKFVHAA

SEQ ID NO: 501781 - protein, 341 aa, unidentified
MIFYCGIDLHSKKSHVCIIDKKGKKVKEENLNNDLSLILQFLKPYGKDVHIAIESTINWYWIVDGLQEAGYDVKLAHTLGLHMITGAKVKTDRRDAFKLAKLLRMGEIPEAYIYPKEKRPLRDLLRRRAGLVQERAACYSSLRVQFIRYNLNSMSLTDLKQILPADIYIMPIPQELKDYCVMILQRIDLLSSQIHELDKYLKGVTLEDPKFKILLTLPGVLYVLGLTLYYEIGDIGRFNSVRQFASYCRLVPSISQSSDKVKRGKGSNQGNHYLKWAFTQAANVAVRYYPTLRKFRDKHANRRKGNAATMIANCILAHKIAIATFHMLKEGVPFDEVKLFG

SEQ ID NO: 501782 - protein, 316 aa, unidentified
MDHKEIFIGIDVSKDTLEVFVKPLGERMTFAQTEDGLSLMANFVQSFSPCLAVLEATGGLERAAVAILGSKGLPIVVVNPRQVRDFAKAKGILAKTDKMDAKVIADFAEAIRPEIRPLKTEEMQELEALVTRRRQVVQMLTAEKERLYTASRSTKKDIQAHIQWLEKRRDRLDKDLGRMIQNSPLWRAKDKILQSPKGVGPVLSHTLLAKLPELGTLNRKQVAKLVGVAPLNRDSGNFRGRRTVWGGRSEVRSVLYMATVAAIRSNPVIRAFYERLIKAGKFKKVAITACMRKLLTILNAMVKNHSSWNATQVKNT

SEQ ID NO: 501783 - protein, 324 aa, unidentified
MIDGILGIDVCKNTLDVSISSYTKVRTKSFTNSPDGWRHLLDWLIAQKIQRVHACLESTGRYSLGIACALYEADHVVSIINPAQIRDFVRTKLGRNKTDGVDASHIREYCELFKPSPWAPPSEAHRRLGELQTIRSGIIAGLTEWKNRRNSGIVDAEAQALADATISHFTSQLGAVDKAIALTIDNDCDLRSKRDLLLSISGVGETLAGVVLAELPGPDVLRSSAEVVAYAGLNPRQHQSGTSIDRATRISKIGNAVLRAALYMPALSAMRYNSAIVALVTRLKSRGRLKPKQIVVAAMRKLLVLCFGVLKTGRPFDAAIAMGG

SEQ ID NO: 501784 - protein, 332 aa, unidentified
MGRFVGVDLHKNMFVASFYSSATDTHELRQYRLHELERFIADLESCDIVAVESTNNTRYFVNSIRGHVHDVKVINPSQFKVISKSVKKTDENDAKLIAEFLSKDMLPEVRMKDKKTAQITSLANTRDKLVKLRTALKNKIHNILSSHGIVLKKESLSSEKGLQRILEQPVDPVAAVELEVIVTQIRSLNEGIKKLDSELEDKGSELPGHENITSIKGIGKKSGSILLSVIGDINDFDNEKKLAAYFGIVPRVSNSNETERQGRITKRGSKLGRTTLVQCTLTAIRYSPRLRAFYNRIKAKKGSGKAIIATAKKLLNVIFYTPGFKFQVQPCS

SEQ ID NO: 501785 - protein, 418 aa, unidentified
MNEDLIARLSRRYLALDIHKHYSVVAGVNFEGQVVLEPVRIEHEDLEVWLTKDIQSTDYVVIESTTNAWHIYDLLEPLAEKVLVANPIKVKQIAQARVKTDIRDTLILARLLAANMIPEVWVPPVHVRELRYLLSQRRHLVGMHTATVNRMHSVAHRHHLSHARGKRFNEKNTKWQKDNDLSDSEKFQLELDMSTKEHLTEQAEKITKKLARMSHRKPWAGSMLYLMQLPGFGVITGMTVLAAIGEISRFEDFKKLASYSGLTPGIEQSGTKNRGKKITKEGRKDLRWAMVEVARRAVKSDPLWTCRYNELCRRMHKNQAIVVIAHRLLALVWYVLSRQQPYRNFSHERIAYKYLTWSWQLSEADRDGLTRQQFTRYYLMRLGIGHDLKRIELNPRYPRRLASEAEVLALRPELKQTQ

SEQ ID NO: 501786 - protein, 343 aa, unidentified
MTCFVGLDVSQKMTAICVVDNASHRLWRGQCSTNPEQISILVRRHAGDDVRIGIETGAMTPCLVHELRNLGLEVICLDARHARAALEMQINKTDQNDAEGLAQIVRTGWYRSVHVKSFDSHRARALLGARTQLIGMTTRLSNHIRDVLKTFGLLPGAMRGLPFDRKVEALLLDRPDVALIVRPMLVAWRQLREQIAVFDKAIRVLVRSNSACRLLMSVPGIGVFSALAYVSTVEDPGRFSRSRSVGAHLWLTPRQYQSGEVDRSGRISKCGDTLARTLLYEAAVVILTRLKKASSLKDWGHAIARRSGNGKARVAVARKLSVILHSVWRSGQPFLWPDHANAA

SEQ ID NO: 501787 - protein, 357 aa, unidentified
MKTITDTNTHRDSSAQNLAKAKTIKLGIDVHADSYRVVRQIDHATPQPAQKFTPKEFLVWAGKQREQADEVHSCYEAGPFGYALHRQLEQLGIHNLVIRPQNWDEHGKRVKTDRTDALALVQRLDRYVQGNRHALAVIAVPTPQQEQQRTLSRRREQLQKDRQGHEAQGRSLLLYHGWRVKGQWWRAAAWQRLQQALPDWLKAVLESVRTQILTTDGLLTAATSQIESQAQPQAKGFGRLTSEVLRREVLDWHRFQNRRQVASLTGMCPRVRSSGLKSTSGAITKHGNPRLRRVLVELAWRVIRYHPDYPPVRRWHERLRGHVGGRKRAAVAIGRQLAIDLWRMETGRATAQQLKLI

SEQ ID NO: 501788 - protein, 355 aa, unidentified
MSQEKYIGMDVHNATISAAVRNAQGKLLMESVLETKADTIVEFVQGLRGTLALTFEEGTWAAWLHDLLKPHVSRLVVCDPRKNALLKDGNKNDRIDARKLAELLRTNQVKPVYHGNHGTRALKELGRSYMTITKDATRVMNRIKSVYRSWGIPCAGTSVYARRHRAEWLAQLVEPGVRIRAEHLYQQLDSLQPLRLEARHQLLLESRRHAAVKLLRQIPAIGPIRSALLVALLETPHRFRTKRQLWAYSGFAVEVHDSGEYRWVRGKLQRNRERITVRGLNDNHNKDLKNLLKGAAIAASTRPGPLHDFYVARVESGMRPTMARLTLARKIAAITLTMWKKGASFDPKHLQRQAA

SEQ ID NO: 501789 - protein, 350 aa, unidentified
MDTTIPPLASIGIDIGKEVFHVVGFSTDGRIAFRRKIKRLALVETFKKLPPSVVGMEACLSAHFVSRALRQLGHEPRIIPAIYVKPFVKGQKNDYNDAEAIAEASLRPNLRTVREKTQDQLDLQACHRVRSRLVSRRTATINQIRAFLIEQGIAIRTGSRTLRNSLMAILKNRQDEISPRMSGLIAGLYEDWIALDEWIDTIASEIEKISEKEANCQRLMSVPGIGPLISTAVVAAIGTGEAFERGRDFGAWLGLVPRQYSTGGRSILGRISKRGSKYLRTLFIQAANVILMRPHNWERFSFGAWLLNAAPRLHRNKLATALANKLARIAWSILRNEKTFDTPRHEVVAI

SEQ ID NO: 501790 - protein, 368 aa, unidentified
MDVHKDTVMVAVYSDDAREPEIVQQLPNDPRKLKRFFQRWGRRGEIRSCYEASGAGYVLQREITEWGHDCEIVAPSLIPIRPGDRQKHDRKDATQLARLYRAGELVTIRIPSAAEERVRDLVRCRQCFQREILRSRHYVTKFLARRGLVYREGTNWTRRHRSWLQSLFQQGGLEPEDRSVFSEYLALLDYKVSRREDLDGQIEKLAFSPAYKPKIDRLRCFRGVDTLAAMTLVTEIGDWRRFERPGQLMAYLGLVPSEYSSGDREHRGPITKAGNSRCRHVLVQAAWKYKHRPTVSVDLKKRQSGQLPQAIAHAWKAQHHLHKLFHRIAARKSSRIAVVAVARELVGFLWAVMQELETEQAVTLSTAA

SEQ ID NO: 501791 - protein, 311 aa, unidentified
MTCWVGIDVAKDSLAVWLRPQGKSFSVSNDEQGHQQLLALFAEEKPGRIVLEATGGYECDVMFGLSRAGHAVSRLNPTRVRAFATAMGKLAKTDPIDAAVLAHLAQTLEEAPSTVPSPERERLRELVQRREQLVSQRDDERRRLHQARDPFVRQCLEKAIKALKEAIRRYDKEIAKAMNAVDAEQAQLLSQVKGVGPVTVAGLLAYLPELGQLNRRQIAALVGLAPYNSDSGQKSGQRRIRGGRGMIRRILYMAVLSIIRYQEDFARRYQSLRENGRCAKVALVACMRVLIVRLNAMVRDGTCWRTDTVQQ

SEQ ID NO: 501792 - protein, 440 aa, unidentified
MPVRKREDEVFPNAAGIDVGASSHWVAVPPHLVEESVREFGAMTDDLNAMADWLLACGVDTVALESTGVYWIPVYEVLEQRGLKVWLVDARQMKYVPGRKSDVQDCQWLQKLMSLGFLRAAWRPDGEVCVVRAVARQREVLLIEQASWVQRMQKSLVQMNIQLTEVLTDVMGMTGQAIIREIVAGERDPKALARHRDRRVKASAEAITKALTGNWRDEHLFVLRQALAMYDDIAGHLAECDTKLQTLLRALGQRNVDLGKAPRAGSKTRQEFDARQTLANWAGVDLTRINGLGLAAVMKILSEIGPDLSRFETVKHFCSWLGLCPGTKISGGKILSAKTKRSANRVRQALKMAAMSLSHSSSALGAFYRRLCSRMDKPSANTATAHKLARMVYFMLTRGEDFVDQGQQRYEEQQRLRSIAALRRRAAALGFEINPTSAPA

SEQ ID NO: 501793 - protein, 322 aa, unidentified
MKYIGIDVSKATFVAAYSSDRCGETRTFDNTAAGIKKFIGTISSIPDVHCVMEATGNYSAMLLYLLNSAGITVSMENPLKIKNFARAMLSVVKTDILDAKLIALYGEKMTPAPFKVQSEAILRLKQKRTVMRQLQKQRTALSNLKGSIECLPVLDKGAIHAISETLVCIDKRLAGLQKELTELVGNEFGSQLALLTSIKGIGITLATALIITTGGFTYFQNAKQVSRYLGLCPTYEQSGTSVNVRGHINRNGDSYTRGLLYIAAWPASRFNAQCKETYTRLRKRGKPGKLAMVAVANKLVRQAFAVVSQQKEYADGYISKRH

SEQ ID NO: 501794 - protein, 412 aa, unidentified
MKDLLEISCGLDVHKEKIVACILTGPLGKPTRSEIREFSTLIPDMIALRNWIVSKNCHHVAMESTGIYWMPIYEILEDAFSGDITLLVVNARHMKNVPGKKTDMRDSEWISTLLRAGLLNGSFIPEKRIREFRDLNRYRKSVIRDITSQKNRIEKFLQSSGFRLSSFISDIFGASGRNIILHLIEHGQIDKTALDSCLKTKTRNRIDEILMSVNGTLSEHQKAFLRILMTHYDSLKKHLAEIETSLEEDMAPFALQVEQLNSIYGISTTASCAIIAEIGIDMKPFKTAEHICSWAGLCPGNNESAGKRKSTSVTKGNPYIKSMLCEIAWVIAGKRNTYLSAWYWRIKQKKGAKKAIVALARKLLVIIYTMLKQGTLFDESCFETRRKHCEQKQLSRYIRELEKHGYHLEAQS

SEQ ID NO: 501795 - protein, 370 aa, unidentified
MSKIDYITSVGMDVHKKTINVAVVLSGSSQVAEEWQLANEPRAIKRLVKKVKRLSPGEAVACYEAGPCGYALKRRLDDLGLPCVVIAPSLIPVKPGERVKTDRRDARKLATLFMAGLLTEVHPPNPAQESVRDLTRAREDAKQDQMRARHRLGHMLLRHGFMFTETNNWTKKHRAWLRKIRFDSVHAQRVFEQYLLSLEQIEERLITINVYLEEAADSEEYAEKVGWLRCLRGIGTVTAMTILAELHDFRRFDNPRELMSYLGLTPSEYTSGENTRRGGITKAGNSHVRRILVEAAKHYRHRPTVSVVLRKRRAGQPKAVIAIADRAHSRLHRRYYKLKEGSRKHSNVATTAVARELTGFIWAVMRHDEL

SEQ ID NO: 501796 - protein, 344 aa, unidentified
MGEVSTIGLDIAKSVFQVHGVDADGAVVIRKRISRAKVLEFFAAVSPCLVGIEACPSAHHWSRKLQALGHTVRLMPPSYVKAYLKRSKNDANDAAAICEAVTRPSMRFVPTKSEQQQSGLMLHRGRQLLVRQRTMLSNAIRGHMAELGIISAKGRNGTVELLEIITNADDDRVPTVARLSLDALARQYANTTAEIRAFEKHIHAWHRSCEESRRLEGIPGVGPIVATALVAEVGDWKAFSSGRNLAAWIGLVPKQHSTGGKERLGGISKQGNRYLRWLLIAGAMAVIRYARQHGTKRLWLARIMERRPIKVAAVALANKIARMAWAMMVHGERFKEPRLLSQAA

SEQ ID NO: 501797 - protein, 343 aa, unidentified
MQSITTIGLDLAKSVFQIHGVDGDGAIVVRRALRRSQVLDFFRRLPPCLVGLEACASSHHWAREIAALGHDARMIPPIYVKAYVKRGKTDAADAEAICEAVTRPTMRFVPIKSVEQQAAGMLLRTRDLLIRQRSQLANAFRAQMSELGVVTALGMVSVAKLADKVRDPSMPMPAVARYALLEMAEQIDMLTSRIERLDEQILAGVKADETARRLTSIPGVGPLIAATVRASVNDISAFKSGRDFAAWMGLTPRLLSSGGKEKLGSISKQGNKQLRSLLVIGASSIIKQAKRGVKLPEWLVGLIARKPYKLVAVALANKTARIIWALLSKGGVYGRSAQIADVI

SEQ ID NO: 501798 - protein, 369 aa, unidentified
MDKDTTYVALDDSKRKIVAGILRPSDTQPELREIANDTRQIRRLFERLKREGPVAACYEAGVSGYDLHRQITGLGVACAVIAPALTPRRPGQRIKTDRRDAAKLVRLFRAGELTAIHVLDESEEAVRDLVRCRDDIRRDVLRWRHRVLKLLARHGRAYLTGKNWSHAHWRWIREQRFELPPLQRAFEATVFALEQALARQAELDKELEALAATAPYREPVGWLRCFRGIDTLSAIILLAEVVDFQRFRRPRELMAYLGLVPSEDSSGETQRRGALTKAGNSHARRVLVEAAWHYRHRPTIGRALANRSQGQPDEIVSHAWRAQQRLHRRYRHLLGHGKRTPVAVAAVARELVGFIWAAMTRHESRRQAA

SEQ ID NO: 501799 - protein, 361 aa, unidentified
MDQISKLMKDQLKLLNFDSQNLFVGIDCHLKSWKVTIYSEEFELKTFSQEPNSAKLAQHLHKNYPGAKFSCVYEAGFSGFWIQRELSEYGIDCIIAHPADIPTMDREKKLKSDVIDSRKLCRSLRNREIEGIYVPSIELQEARSLVRTRVKLVNDLTRVKNRIKFFLMFYGIMISTQGNSWGKNYLAKLQQIQLKTEAGQRSFEFYLQELHFLIEKEKWIRKQIEQLSLTDPYKEDVRLLRTIPSVGLITAMTIITEIGDIKRFKSLDKLSCYFGLIPTSHSSGEKERIGRNTSRGNKYLKHLLIESAWIIIRKDPGLLLYYKKQIAVMESNKAIIKVARKLLNRIRLILTMNVEYQCGRP

SEQ ID NO: 501800 - protein, 321 aa, unidentified
MSPFYLGIDVAKAKLDCALRLPNGKFRAKVISNSPEGFAQLVTWLSAHDAAKPHVCMEATGIYWEEVAQFLATAGLTVSVVNPAQIKAYATSRLTRSKTDAVDAKLIADFCAERQPLPWQARSEAEVALRALVLRLDALQAMRTQESNRLEVARDAVRQDIQQHLEWLDTDIRQLVKTLNDHINNHPDLKQKRELLDSIPGIGERTSAIILAFYADTDRFANSRQAAAFAGLDPRQHESGSTVRGKPRLSKIGHTFVRKALYMPAMVTLYKTVWGKRFKERLALSGKPPKLIIGAMMRKLIHVAFGVLKSGKVFDPVLHGV

SEQ ID NO: 501801 - protein, 409 aa, unidentified
MRPILRSCCGIDVHKSMIKACIAKGPLNKPPKIEIRTYSTMTSDLENLNEWLKENKVEAVAMESTGVYWKPIFNILESDFPVSIANPKYLKKVPGKKTDVSDSEWIATLLRCGLIPKSFIPTLLIRELRDLNRTRRKMVEHMASEKNRLQKVLEDANIKLTSVVSKVDGVSSMNMIQALLNQDEISREDIAAMVHGKLKNKIDQLVQALNGRLTNHHRYLLRLHLKQIAFLAEQIKELDDVIQKKMKPFKKESDLIQTVPGIGKTTAPAIIAEIGTDMSQFPDEAHLSSWAGICPGNNESAGVNKSGKIRKGNKYLKATLCEAAWSASKKKGSAYSAYYNNIAKRRGKKRALVALAHRMLMDIYRTLKTGEPYVDEGAEAVFERNSSGRQKSAIRFLEKSGYVVTKASA

SEQ ID NO: 501802 - protein, 418 aa, unidentified
MKDIKTEKGKKINKKSMIVALDVAQEKHVVYIRCSGGREEKPFVVFNRREEYEQMWERISQTKEAYGLEEIVVGFESTGPYAEPLVHYLMKKEVKLVQVNPMHTKRVKEIRGNSPNKTDEKDPQVIADIIELGNYLTVVIPEGISAELRRLTQARERAVGRRTMLVNQVHGLVSVIFPEFLMVMKDIKTKTAHYLLKHCPRPQEVVGLGNERLEETLRKISRGRMGKERAEALYEAAVNTVGVREGQGSIVFEIKQLVAGIEETERVIEELEEKMREYLKEIPYSRCMLSIQGVGEVTVAGLIGEVGDFTKYKTIAEITKLAGLDLFEVSSGKHKGERHISKRGRPLMRKLLFYAAINVVRKGRIMHERYERYIQRGMPKIKALTAIARKLLGVLFALVRDQSEYVRNYEGIPLKKVA

SEQ ID NO: 501803 - protein, 387 aa, unidentified
MYFVGIDISKFKHDCAIIDELCDTVMPSWSFSNDREGFSHFKALLDSLEGEKKIGLESTGHYGQNLKQFLESNGFAFMEFNPLLVSRFVRSKSLRNTKTDSIDALSIAQYVMTVEYTPYPSSFYHLDKLKSLTRFRNSLVRQRSRQLVELTNVLDKLFPEFKPFFKDKFSVTALYILAHYQTPERIANMNARSYEALRKLSRGRFTLSNFTQLKALAKNTVGTQSDYLLDQMNILLELYSQLDSKVDELDAQIKECVRGIDPPCLSIPGVGELSAAMILSEFGDFSKFQNPSKMLAFAGLEPGYFQSGQSEYTGHMVKHGSSRLRYALMNCCLPLISNEPVFAAYYAKKRSEGKPHRVALTHVAKKLVRVIYTLQTKNIRYDPTMIH

SEQ ID NO: 501804 - protein, 360 aa, unidentified
MTEHYAGLDVGVAETAICIVDLKGEVRLETTVATEPDVIAQALAPWRATLRRAGHEAGALSPWLQPALKDLGVPATCLETRHVRAALAAQRNKTDATDALGLAHLMRTGWYRTAHVKTEAAYRLRLLLIQRRNLKRKFLDLENSIRHSLKSFGVKLAKVGRGAFDQAVRDACADDPLTAELMDCMLIARAALWTQYLKLHALTVRVVAQDEVCRRFMAIPGVGPIAALTFRTAVDDPMRFKRSRDVGAYFGLTSKRWQSGTSIDIQGRISKAGDPDVRRALYEAASAMLTRYKGRSALKSWGETIAKRCHKKAVVAVARKLAVIMHAMWRDGTVCADAVETGVADGGATAKECKLLGVYA

SEQ ID NO: 501805 - protein, 408 aa, unidentified
MNAVGIDVSKGKSMVAALRPMGEVALLPQEFLHTEVGLEQMAYAIIALGEDTRVIMEATGRYHEPVAAALHEYGIYVCVLNPLFIKQSGGGSIRKVKTDKADAMKIAKYGLDNWVDLREYTPMDTVRQQLKLCSRQYNLYMKTVVSLQNNLISLTDKTFPGVNELFSSPERADGHQKWVDFVMTFYHCDCICRVSENAFAERYQKWCKRKGYHFSAEKAQDVYLGSCGHFTTLPKNDNTKLLITTAAQQLLAGKMTLAALRTEMTRLAKQLPEYDIVRAMYGVGETTAVQLMAEIGDVRRFPRRSSIVGFAGVDPAVDQSGKHSAKSVPTTKRGSPHLRKTLYQIVCTYLKKSPVDEPVYQFLDKKRSEGKPYFVYMTAAQNKFLRIYYARVKECLEAFDERQDTVQN

SEQ ID NO: 501806 - protein, 335 aa, unidentified
MNAVGIDVSKGKSMVVIMRPYGEVVASPFEVAHTVSELDKLKDLLKSLNGETKVILEYTGSYYQPVACVLHEAGLFVSVVHAKLIHDYGNNTIRKVKTDKADAVKIANYGLSNWLMLHEYIPESDIRRMLKAYSRQYTKYSKLKSMLKNNFIALTDSTFPGVNELFSSPPRKSDGHEKWMDFAFKFWHCECVCGLSPEAFTERYRKWCKRAGYNFSKDKAFDVYASACGHVCVVPMNDTSKQLVTLAIAQINAVAETIAIVAREMKRLAEMLPEYPVVSEFYGVGDILGPQIMAEIGDVTRFRSKGSLVCFAGLEPPEYQSGKFEAAERDISKHI

SEQ ID NO: 501807 - protein, 352 aa, unidentified
MAATAQSSIAVIGIDIGKNSFHVVGLDGRGAIVLRQKWSRGQIEARFANMSPCLIGMEACVGAHHLSRKLKALGHDARLMPARYVRPYSKGQKNDFRDAEAIAEAVQRPTMKFVATKTADQLDLQALHRVRERLVSQRTGIINQIRAFLLERGIAVRQGQRFLRVELPRILATPPDVLSPRMVRVIEGLASDWHRLDERIEGLSSEIEELAKRDAGCERLMSVPGIGPIISSAMVAAIGTGDSFSKGRDFAAWLGLVPRQISTGDRTILGKISKRGNRYLRVLFVQAAWVVLVKVKPNRWQGHGLKPWIEAAKKRLHHNVLAIALANKLARIAWSVLAHGRTFEANKLRAAA

SEQ ID NO: 501808 - protein, 384 aa, unidentified
MMRDDKRKKKTVPIRRDMSNNSLIAGIDLGDSASLATLLTPRGDVADRFTFKMDDQGYTLFAEKVPRETRLAFEATSMAYPFSRVLKGLGYDDVTVAHPTELAWIVRSKKKNDRADSLKIAKLHLAGLLPESRLLPQTEQIERDLLIQRVKLGSEIGRMKSRIISYLKREGVYNHLPKSKDNFSVRKRAAIASLKFNDDRDLVLKTMIDRLEFMETQCEPLEQRIKLNARDNKYVRILMSIPGIDYYLASLYTSYIGDPHRFPSFDHVASFLGIIPESKDSSNVRRRGRMSKDGPPIARWALGIMTDTVMLYNPNIKAYYTRVKQRTGRGSYAHVLTMKKLARMIHHMMITEQNFRWENEALTEKKISRLDGDADAAGGGESSA

SEQ ID NO: 501809 - protein, 399 aa, unidentified
MANQARLVGGIDSHKDTIHVAVITELGVAVDDREFPTTTTGYRDATGWLSRHGSLTDVGVEGTSSYGAGIAAALLSCGVHVIEVNRTRPAERRKQGKTDQLDAYRAARAVVAGEATTEPKRASIEPLRALMITRRSAVKAQQAAWRQIGALLVNASAAVRDQYRDLPETKLLATLANTRPGAIIDADHADTLFALRTLARRHHDLTAEITQIQDRMRARATAANPALLAIKGVGPIVGAQLLITAGDNPDRLRHEASFAALCGAAPVPVSSGRTDRFRLSRGGDRAANCALHLIVNNRMSNDPRTRTYRDSHLAQGWTKKAVYRALKRAVAREVFRALTGHCTVPDYSDLRPARQAKNLPLSAAATHLGVWPTAISQLELGKRRNDDLANAYRTWLHAA

SEQ ID NO: 501810 - protein, 410 aa, unidentified
MGRWIATGTLAEWGCTTTHSLDMPMQIEQTQAPITIRTDLGAIFVSLELSRSSWLITSLSPGGGEKMSKHLVRSGNVAELAERFAQLREKARTRTRKSFPIVVIQEAGLDGFWIHRVLQKNGIESYVVDPASIATSRRHRRAKTDRIDGETLVRTLLAYKRGEPRVCAMVKAPTPKEEDRRRLSRERHVLIVERVRHVNRIKGLLFCQGINGYEPLRCDRRARLEEFQTGDGRRLQEHLKRQIGRELDRLELLLDQIKTVEGERDALLTAEEKTVPAPAAMLLNLKGIGPEIAAVLWSEGLFRHFDNRRQVAAYAGLAPTPWQSGSVSREQGVSKSGNPRLRTTLVQLAWLWLRHQPQSALTLWFKERSERNGGRLRKTTIVALARKLLVALWKYVTSGVVIEGAVMKIA

SEQ ID NO: 501811 - protein, 344 aa, unidentified
MTYYAGLDVSLRSTHICVIDDDGELLAEGKTDSEVVDIIAFLDDLHVEITEAGLEAGTLTQCLTYGLQSAGFEVVCMEARQVKAALSAMRNKTDKNDARGIAQLLRSGWYSRVHVKSIESHQVRALLSSRRAVLAKCIDLEQEIRGLFKVFGIKLPKRLGHGAFDPKVRPLIEADEALSHALLPMLDARLVLYHSFRELDNRTRHMPNDDPTCQRLMTAPGVGFVTALTFKAGVDDPTRFKRSRTVAAHFGLTPRRFQSGEIDFDGHISRAGDANVRSTLYVAANSMLTRSSKWSPLKAWGMKLAKSRGHKRAVIAVARKLAVILHRMWIDDTQFQWSTEAARS

SEQ ID NO: 501812 - protein, 412 aa, unidentified
MKDLLEISCGLDVHKEKIVACILTGPLGKPTRSEIREFSTLIPDMIALRHWIVSKNCHHVAMESTGIYWMPIYEILEDAFSGDITLLVVNARHMKNVPGKKTDMRDSEWISTLLRAGLLNGSFIPEKRIREFRDLNRYRKSVIRDITSQKNRIEKFLQSSGFRLSSFISDIFGASGRNIILHLIEHGQIDKTALDSCLKTKTRNRIDEILMSVNGTLSEHQKAFLRILMTHYNSLKKHLTEIETSLEEDMPPFALQVEQLNSIYGISTTASCAIIAEIGIDMKPFKTAEHICSWAGLCPGNNESAGKRKSTSVTKGNPYIKSMLCEIAWVIAGKRNTYLSAWYWRIKQKKGAKKAIVALARKLLVIIYTMLKQGTLFDESCFETRRKHCEQKQLSRYIRELEKHGYHVEAQS

SEQ ID NO: 501813 - protein, 411 aa, unidentified
MNNTLFVGIDISKRSNVATFMNCEGKVVGRLTFSNNGSGADRLVVKILSYYEKEDFEAIRIGMENTSVYSKNLVWFLYEHEALNEHKLSIIPLNAIMVANYKKSFLDMDKDDITDSFAIADFIRIRPGLLPFKLDDRQEALKIMTRSRYNYVQALSRMKSQFLTRLFLSFSEMEAGKPFYSIFSKTSLSLLEEEFTLDELAEKPIPELVEFLQEKGGGKFQNPEEIAKVLKKAASSSYRVPAMVRESLNRTMASDMEIMRILENEIHNCDKNIEKLMKSVPAILVSIPGIGPVLAAGIMSEIGDISRFQKQESLGKMAGFKWKRNQSGKKESEDKAAVLSGNKKLRYYLVEAANRVRIHDPVFEAYYRKKYAESKTHAHKRALILTARKLVRVIFYLLKENKLYKPDVGIS

SEQ ID NO: 501814 - protein, 411 aa, unidentified
MSSSYRLAGIDVHKSVLAVVVSELSEQGEFTFQRRKFGVLDSDLKALSQWFQELEVREAVMESTAQYWRPVWRALEAQCALHLAQAQSNRAPRGRKGDFRDAERLVRRHVAGELILSFVPDPTQRLWRTITRTKYQLSRDRVRLQNQLEAHLEDAHLKLGACVSDLLGVSSLRILSAIAKGEKDPTVLALLGEENLKATAEQLADGLQAVSTLSPLHRQILRLFLERVELIDRQLQTLHQQIAHALHEYQQAVTRLAAIPGLGIDSAQQIIAEIGPGAAKFDSAEQLASWVGVCPGREESAEVSKSNRSPKGNRMMRRVLSQAANAAVRSKGSIFQLHYRRLVSRLGHNKAIWAIAHRLCRIAWILLHRGVDYIEHGAERNAAALRRRTTRQLRELRALGYQILPPATQCA

SEQ ID NO: 501815 - protein, 317 aa, unidentified
MEKITNFFVGVDVSKNWLDVHIHPKNESLQFDNSDIGIEKLLKVLSKHTIEQIVCESSGGYENLLLKLCCDAGYKIWQIDPKRIKAFIASQGVKAKTDKIDAKMIARFASQQQSEYSKYKRSDDNEKVRALVRRRADLTEMAAMEKKRLKGPSGYYCRERIESLLAIINKDIESLGIEIKNLIEQNEEMKERKEILESIPGIGATTAAALIADMPELGKLENKQAAALLGVVPYTKQSGMYKGIEVISGGRPAPRCALYMAALAASRYNPTMKIFYNRLRTAGKKPKVAIVAVMNKLIVTSNAMLKKKTKWSVVATS

SEQ ID NO: 501816 - protein, 356 aa, unidentified
MGEGSWVGLDVHARSVVAGVIDQGSGEVRSLRLPPGGEATVAWLRTLPAPVRVVYEAGPTGYGLARACTAAGISCVVAAPSRVRAAADRVKTDRRDAERLARLLRLGEITPVRVPAPEEEAARDLVRAREDARSDLMRARHRLSKLLLRHGYVYDATAWTRTHDAWLRRQRFQGGPLAIVFDECYGRMLDAKTRRDTLDKAIAELATAPPYLDVVERLVCLRGVSTLTAFALTVELGDWHRFRPESLGPFLGLTPSEHSSGERRRQGGITKTGNSHVRRLLIEAAWHQRSPSRRSVTLERRRDGKPLAVQAQAERSGRRLHGRWHALEARGKPRSIVVVAVARELAGHCWALATME

SEQ ID NO: 501817 - protein, 408 aa, unidentified
MQVLHERCCGLDVHKKVVAACVITPEERETRTFSTMTNDLLRLADWLREKGITHVAMESTGVYWKPIYNLLEDEFTLLVVNAHHIKAVPGRKTDVKDAEWIADLLRHGLVKGSFIPDRPQRELRELVRYRRSLIQERSQVINRIQKVLEGANIKLSAVASNVVGASGRAMLEAMISGTEDAQALAALAKGNLRNKRTALEEALHGLMGTHQRMMLQSQLRHLDFLGQEIARLDEEVAQRMRPFEEDIQRIDAIPGLGRRLIEQVVAEVGLDMSRFPSAEHLSSWARMCPGNNESAGKRHSGRTGHANPWLGSTLVEAAWAAVRTKATYLSAQYHRIAARRGKKRAIVAVAHSILVIIYHMLRDHTSYRDLGGNYFDEHQRLRTTRRAVSRLQKLGYKVTLELAQPVFS

SEQ ID NO: 501818 - protein, 346 aa, unidentified
MQNDTLVAVDIAKEVFEVAVSDRSGRVALRKRLLRDRFVAFFAQQPQATVVMEACGTAHYWGRRLEELGHVVVLLPPQYVRPYVVRNKTDRTDVDALLEASRNQQIRPVPIKTLTQQVIASLHRLRSGWLADRVRSINTLRGLLRELGFFIPEGRRHVLPEAWQIIHDHRRGLPEALKPSLAALCEEIASLSTRIENVETQLQALARQIPPIARLRSVPGIGLLSATALYAFIGHPARFPSGRHLASFLGLTPREYSSGLRRRLGPISKRGDSYLRFLLIHGARSVLYHAKRMKDCDRLRSWALRLEQKVGHNKAAAALANKLARITWAVWKHDRSFEPLPQPQAA

SEQ ID NO: 501819 - protein, 458 aa, unidentified
MNYDVLKVLFKKYGHEKIIFVGFDIGKYDHVVSVWNGYKDTLLEPFPFSSDEVGYDKFNESLKKIISNVNPKQIFFGCEPSGHYYLNLMNKLYEDYSGASFRLVNPSATKAQRDMSMERNKTDPVDTTAILELMIQGNSYELPVNDYVFEEIKEVVRRVDRYTKDLTSIKNRIHGYLDELYPQFESKGNSLVNTISGKQFLYILPDPKLLKKMNADDLIKLYKKNKFTLQHSYAVKFIQRANQMLIPEKPIIKSKVDTLKELIIQYDFLEKMIAKAESILETLLSNFHFTENIMELNGMGVITLSRIIAYLNNPFKFKNGSCAAQFAGLTPAKSESGTGAKREKISRKGHVALRSTMVQLTHQLISSTGYFTASYNRLVIEKNKDIKLAVTATAHKVLRVIIAMMHSGGKFNPPTVKDKTLAQSKMPRFTKAKQTEYQKMRKTQSGTQHTLDIYITRV

SEQ ID NO: 501820 - protein, 339 aa, unidentified
MKYIPVGVDIAKHLMQVHFIDETTGEIVDKQIKREKFLEYFSNREPCLIGMEACGGSQHWARELQKLGHKVRLLKGRFVKAFVMGNKNDVMDARAIWMAVQQPVKSIAVKTKEQQTILTLHRMRQQLVKFRTAQINALHGILLEFGETIHKGRSALSREVPEALERLKKDLPPYLITLLNEQYQRVTDLDLQIDNIDKQLSAVARQNEICKRLLDIPGVGPLIATVAVATMGDSSAFKSGREFAAFVGLVPKQTGSGGKVHLLGISKRGDTYLRTMFIHGARAAALLTKEPSQWITELKSRRPATVAIVAMANKLARIVWAIAAHNRKYDKNYISIRPY

SEQ ID NO: 501821 - protein, 351 aa, unidentified
MKNHKYVALDVHKASVTMGVRDGAGKCVGHAVVQTKAETIKELIAGLSGTIHVTFEEGTQSAWLYDLLKGRVAECVVCDPRRNKLLESGSKSDHIDVDKLSELLYLGGLRPVYHGDHGTRALKELVHNYESLVKDQTRVKNRLKAIFRGRAISYQGAELYQLKERQQWVSKLNERGVRQRTEQLYEQLAALEPLVVAARQKMLRESRQQKASKNLQLISTLGEISVAELIGTVDTPYRFRSKRQFWTYCGLAVVRHTSSDYRFEQGELQRRRKPGPTRGLNQNYNRRLKKIFKTAALTGSHTGPFKPYYERLVQRGLSPELAQVTLARKIAAVTLNLWKKGERFDPKKLQS

SEQ ID NO: 501822 - protein, 398 aa, unidentified
MKQLWAGIDAGKAHHHCVVIDSDGTQLLSRRVANDEADLTTLVDNVLEIADGGVVTWAVDLNSGGAGLLIALLAERDQLLLYLPGRIVYHAAAGYRGDSKTDAKDAAIIADQARMRRDLHPMRVDDEISVELKILTSRRTDLMRDRTRSINRLRALLTGYFPALERALDVRNSTGGLILLTGYQTSDGLRKLGHAKLERWLRKRKAYNASRLADAAIEAANGQSVRVAGQDVAASTVGRLAHQILNLNTELRELDSSIEERFRRHRHAKVIESMPGFGPLLGAEFLAATGGDVSAFGTADRLAGISGLAPVPRDSGRVSGNLHRPRRYDRRLLRTFYLSAQLSIRHNDQSQVFYNRKRAEGKRHTQAVLALARRRLNVLWAMLRDNAVYQPRPAIAAA

SEQ ID NO: 501823 - protein, 418 aa, unidentified
MNLFVGLDVSSEKLDVCFLSDDNQLTILLETSLGNDVKGAHQIKQKILEFQNVYSFSQIVIGMESTSMYSFHPATFFNEDRELKRINTVVTIENPFRIKQFSRIFDEDKTDKNDAMRIADFLRIQRFTTSPIKEEKYMALQRLTRTRYQLIGQLVETKQHFLENLTYKCNTLTRELKNSETPSSVFGATLIALMTEDYGLEELAQMPLTDFASLLQEKGNGRFKNPERLAKTIQRAITMSYRLGEVAQESINIILSILAREIRALEASIKDLDKAIEQLVIVLPEYQCLTSIPGVGKVYAAGLLAEIGEIQRFEDQTKLAKYAGLSWKIKQSGNYQSENTPLTKQGNRYLRYYLVEAANSVRRYLPEYQAFYQKKYKETPKHQHKRAIVLTARKFVRLVDTLLRNHQLYTPPRSVIEK

SEQ ID NO: 501824 - protein, 347 aa, unidentified
MSHTKKGDRIMQVERIGLDIAKSSFQVHGVDAHGKVVVRKQLSRSKVLLYFAQLPPCLIGLEACGGAHYWARELQKLGHEVRLMAVAMIQPYRTGQKNDQNDAEAICEAVSRPRTRFVPVKSEAQQAVLTVHRARELLVTERTALANQIRGLLMEYGVVIAQGIQRLRRELPGVLAATETLPELVRDVVEELRERMQELDRRITDYDHRIEQLAKQNEATRRLMQVEGVGPITATAIVATIGNGHAFQHGRQFAAWVGLVPKQHSTGGKTVLGRITKHGNVYLSTLLIHGARAVLQFSAKRSDQKSRWVEQVRQRRGNNIAAVALAAKHARILWALLAHGQEYQLAA

SEQ ID NO: 501825 - protein, 310 aa, unidentified
MHDTIGIDISKDTLDVHRLSDGKYIQFDNDTTGIKALCRWVGQRPVRVVYEATGRYHRDLERGLGAVGHGLVKVNPGRARRFAQAVGQDAKTDWVDAGLLARMGSVLDLDAKPARTEDMHEIRELHIARVGLIKDRTACRNRLQAARNKVVLAQLRARLRQVERQITQIDAELRRVVAADPVLVRRFDILMSIPGIGPVAAIALIVEMPELGRMNGKEAASLAGLAPITRQSGTWKGKAKIGGGRALLRSALYMPALVATRHNRQLGKTYQTLCTAGKPAKVAITAVMRKLLILANALIRDDRKWSEINP

SEQ ID NO: 501826 - protein, 389 aa, unidentified
MLCVGIDVAKRKHDCCIIDSDALKTVESFTFPNSREGFDMLLSKISELGIPKDKIRVGLEATGHYSSNLAHFISEHDLPLLTFNPLLTNRYKQGFSLRKTKTDKVDACAIAQMIVSGKGSQTYSSSLYHNEEMKSLSRYRSQTMQKCSKLKISVSRLVTILFPELEGLTSSIHLASIYALLKAYPGHEQIAHCSMKRLTHLLSDASQGRFDKSKALEIHQAACRSIGKVSLSASMELVHTITDIEVLKQHIAEIDEKLKEMVDQEESSIIDIPGIGYTLCASILGEVGDFKRFPDVDKLLAYAGMSPSKHDSGDYHSKHNKMEKRGSPYLRKTLYLAARLVAQNVPKFKEYLEKKLSEHKPYKVALSHVAKKLIRLIYRLGISGCPYLA

SEQ ID NO: 501827 - protein, 458 aa, unidentified
MKDKGGKRKKVEFELQVMRKNVAGADIGSREHWICAPAVQGEGCEVERFGSTTAELYRMAQWMKARGVKSVAMESTSVYWISVFEVLDRQGFEVILVNARCLMSVPGRKTDVLDCQWIQKLHSCGLLKGSFRPADGVCALRALVRERATLISQQSDWIRRMQKAFDQMNIRLHHAVADISGTTGMAIVRAIVKGERDPKRLAEFRDARCKKSSEEIIAYLQGNWRDEHLFNLEQALKMYDFLGERMDAYDAAIMQALQRLEQPELQHSAPPALPTTSKMRTLMRRGQEPMREALYRLNGVDLLTIDAIGAETAETVLSEFGWNLSTFPTERHFVSYLRLSPKLAISGGKPLRGKRRQSTATRVGTALRTAASTLRHSKTALGAEYRRLARIKGPGVAVFAMARRLAVLIYRLLKHGQAYVDQGMKVYEERFQQRKLAACQNMAKSLGFGLVTLPQTAT

SEQ ID NO: 501828 - protein, 311 aa, unidentified
MSYFIGVDVSSKCLDVSLTPSGPLEKYENNSKGIKGFLKRIKGLSISLVAFESSGAYERDLLYALLDNKVPCAVLNPKQVRDFAKAKGILAKTDRLDAKVISHFAEVMNPEKHREISQEEKNIEALVRRRRQLVGMLVQEKNRLELAAEKVKKSIQAMIDILDKNIKAIEKEIQENIDKDPELKSKQELLMEIKGIGEVVSRSLLSDIPELGKVGNKQIAALTGLAPMHRESGTMKGRRRTGRGRQHIKGYLFTSVMSIIQRAGELRDFYDRLRANKKDKMLAIVATMRKLIIAANAKLKKAGAATAPAPT

SEQ ID NO: 501829 - protein, 411 aa, unidentified
MDVLNMRCAGLDVHKKVVVAAVIALDAQGRLCRETRSFGTMTAELLTLSDWLSCYGVTHVAMESTGEYWKPIYNILESNFAVLLCNAQHVANVPGRKTDVNDAEWLAELLRHGLVKASFVPPQEQRELRELTRMRTTFVHERVNLVNRLQKVLESANIKLASVATDVMGVSGRAMLEALATNQGSSAQEMAELAQGRLRNKREALAQALEGRVRPHHRFLLTELLCQIDSLDETIARCNAQIEAYRRPFEEAVLLLDTIPGVGPAVAEVIVAEIGVDMSRFPSAKHLAAWAGVAPGNNESAGKHRSGKTRHGDRSLKTTLIQAAHAASHTKGTYLAAQYRRLSARRGVRKAAVAVAHSILEIAYYLIQRHEPYRELGANYFDQLRPEAVTKRLVRRLEQLGYTVALQAQAA

SEQ ID NO: 501830 - protein, 320 aa, unidentified
MASRESLFIGIDVSKQTLDVAFGADPHAPRETIPSTDEGVQLLVTRLQRLQPTLIVLEATGGLERMVFAQLLQAGVPTARVQPRRVRALAHAEGRQAKTDRLDARLLARFAERVRPPHHQATDEQRASLRDLLVRREQLIQMRTAEINRLTAAAPNLRPGIQQHIDWLDQEIRALEQERDNEAERTDEVRRKRELRDSVPGIGAITALNLLLRLPELGTIKRTEAAAVVGVAPYANQSGAQHKPRHISGGRRDVRSVLYMATLAATRRRLVRRAFYQRLCQAGKPRKVAIVAAMRKLLTILGAILRQQKPWDPAVHTSAP

SEQ ID NO: 501831 - protein, 345 aa, unidentified
MKYFAGLDVSLEETSICVVDGEGVIVAERKVASEPWAIAESLRGLGLGFERMGLEAGPLSPWLHDGLRAEGLPAICIETRRMKAALQAMRNKTDRNDARGIAQVMRTGWFRFVHVKSLESQELRLLLTHRRTLQRKALDIENEIRGTLKAFGLKIGKASQGRFAARVRDLVADRARLRAATEPMLKARAAVRAEFDRLHRMVLEVVHGDSLCGRLMTIPGVGPITALAFKTGVDVPERFAKSKTVGAHFGLTSRKFNSGEIDYNGRISKCGDAMVRTLLHEAANSLLTRCARNSALKAWAMRIAKTRGLKRAKVALARKLAVVLHRMWLDGSEFRWSHKTSASAH

SEQ ID NO: 501832 - protein, 385 aa, unidentified
MTVIIGMDPHKRSATIEAIDPTGHVLATGRYATDTVGYAEMLTAAKRFDDRIWAIEGCNGIGRHLAHRLVHDGEHVLDVPAKLSAQVRVFATGNGRKTDPVDAHSVALAALHSPNLRRVHADPELIALGMLADRRDGLGHARTDTLNRLHRILLDLIPGGAKKFLSARQARELIAITPTDPVAVVQQRLAMELIEDLEKIDRRIRAADKELRQLVTDRGSTLMELHGIGPSSAARLLADTGDIHRFANRDRFASWNGTAPLDASSGEQQRHRLSRAGNRRINRVLHIMAVVQLRHHTTGRVYYDTRRTGGKTSMEALRALKRRLSNIVYARMLADQRRGDLAGPGGQSGTTTDSSATGSNPHTDPSDKPQPGPTQQANPETLTGS

SEQ ID NO: 501833 - protein, 387 aa, unidentified
MAQVIIGVDPHKRSATIEIINAREKALGQGRFGTDRDGYQAMLAAGRKHKDRLWAVEGCNGIGRHVAQRLVADGETVVDVPAKLSARARVFATGQGRKTDPVDAHSVAVVALRTEGLRQVVTDDTTVALRLLVDRRDQLGRARTEVVSRLHHLLLELVPGGAKKDLSAQQARALLGSVRPRDVVGKTRRRLASELIGELVVIDKKIKTAKQELTDLVNSTGSRLMNLTGIGPSGAARLLGDIADIARFTSRAHFASWNGTAPIDASSGDQNRHRLSRAGNRRINRALHIMAIVQLRRDTEGRRYYRRRLAAGKTPMEALRALKRRLSDIVYRQMVADAKLVRTGPGGHAGATLQSSAADLNPEIDTSEKSLPGPATPQPRTPLLIIT

SEQ ID NO: 501834 - protein, 341 aa, unidentified
MNTITRIGIDLAKNVFSLCGVDPNDKIVLERTLKRKDLLSFLANLPACTVAMEACSGAHHWSRQLLTMGHTPRIIDPKFVIPYRAGGKARKNDRNDARAICEAAGRPNMRFVPMKTEQQQAILVVHRRRRQIVAEHTRTANQIRGFLSEFGVIVPKGVQVLRREWLNVRQQFSETVPRLVWEELDALFDQLLSLHQTILRYDRKIHHFNTQDERAQRLMKINGVGDISASAIVATVGDARVFKNGRQFAAWLGLTPREYSTGGKPRLGRISKQGDVYIRTLLVHGARTELNLTSKRSDAKSRWAEYIKLNKPWNKSAVALANKHARIIWAILAKGEEYQPM

SEQ ID NO: 501835 - protein, 342 aa, unidentified
MVDGMSSVGRDTAQTVVCAPFPLGVEPGGIVAGFDVHRRQITFDALDTVTGESWRGQLESSSAAVEDWVGRFPSREIHVAVEACTGWLFVSCALGRTGAVAHLAEPVETSALRGRKRRAKTDRTDAKWLRQLLCEGRLPEAWCPPEHVRQWRSRARLRNTLVAERTGWIQRIRATLYHHGIPGAPDDLRTLAGREFLASLELPVDGAERIRVALEIIDMLEIQLATIEKDLRALARHQPGCQALMTLYGMGELSALVTLVELGDVQRMHASRQAVRMAGLDIGVHRSDRHAQLGKLTRQGSAPLRWALFEAAQSASHQGSPDYQDYHALKDRGLSHDTNQLR

SEQ ID NO: 501836 - protein, 422 aa, unidentified
MLGIGIDWAEEFHDVALGTAEKGVIEQFRVEHTPAGVGALIERVLRLEPDPAEVRVVLETRHGLLVEALIDAGFTVLPVNPDLVARRRGPARKKDDAEDARICCLLAVDRHAGLKALIPHGELGGELRAIARDDDRAARDQRRLLNRLRADLQTTYPAALVLAGQDLGAPTVLRLLERWPTQPELAAASHAELVEFARAGRHGWPDRFADRVTAALATSSLPTRDYLVRAKAAAIRLAAVQLLALHEPGRGWEARMAELLLGGRRTGRNHTVSDPDPGKAFPGGAIYLSFPGLGDRLAARVAGEIGEHIDQFDSPNGLQCYAGQAPVTRRSGKSDFVVARRLAHNRYLGAAVHQWAFCSLTRSGWAREFYDQKITAGKSHHAALRALGNRWLEILWHCLTKGVLYDEAVHVANRNRALGRAA

SEQ ID NO: 501837 - protein, 411 aa, unidentified
MRDRQNYVFIGADVHKEQHTVVIINCWSEVLGDFTFESKISEYPKVIEKINEVIPDGLVPIWGLEDVCGNGRSLAVFLKENGYTVKEVNPSFSSSERKNHATTKKNDYWDAKCIADVLIRKLNELPEATPNDLYWTLKQFVYRRDSLVKSATTAKIQLHEQLVKNYTSYKKFFSNINGNTALEFWERYPSPTTLKGVTVIELRNFLRKASKNSCSTKKATTILELIEGDGDTFREYQNSRDELVKSYVRSLKYYQEEIKKLNKEIKGIISNLDYKLETLTGVGTVTAAQLISEIGDINRFKSAEKLAQYAGVAPVRFSSAGKGKDKKSKQGNRNLNGVLYFLAMQQIQISKQSKIPRNEILYEYYQRKLTEGKTKVQALICIMRRLVNIIFGMMKNKTEYVKEYRHNRIVS

SEQ ID NO: 501838 - protein, 328 aa, unidentified
MAFIGIDVSKEKLDVLWLRQSTPRKVKTRVFRNHRPLLKDVANWLVKQTGEAPKDIHVVMEATSIYHEILAYALHEGGFRVYVANPTRVKEFARSEGVLNKTDKKDSLVLALYAQEKHTRLTLWQPEAKEIRQLRSLMARLEALEKDLQREQNRHEKALATDTSERVMASIEDMIAALEAEIRKLKDDIDNHINGHPALKNDRELLKSIPGVAEVCSVQLLALLRSRAFVSARECAAFIGVVPVQVESGSSIRRQARISKAGRSSVRQKLYMAAVTACQYNPDIRALKRRMQAKGKAGMAIVVAAMRKLVHIAFGVLKHQQGYVPQAA

SEQ ID NO: 501839 - protein, 388 aa, unidentified
MYHIGIDISKFKHNCFIATEAHVKVKEFIFDNNASGFNELLDSLKSLGEPSEIKIGFESTGHYGTNLKQYLSNLGYTYVEFNAYLTHMFSKASSLRKTKTDKVDAKVISSMLGSVDYETLHTKFYHNNVLKELVRQRYVYLQSRSKELVKLTNLLDKTFPEYKPFFKGRLGSGALFILKRFKNKSRIARMTTKDFDTIRSKTKGRITYPRFNQLKILARDSIGLDDKVYDLLIQTVISSIKYLTETLEILDQEIVNLFSKTNSKLLTIPGLGIITAATIYAEVGDFKNFSSPAKLIAFAGFDVRIIQSGTQEHYGKLVKHGSSLLRSAIWSYALPAVRFIPIINDYYHKKRNQGKHHKVALTHVCRKLIRMMHYIEFNNVSYDQNLSR

SEQ ID NO: 501840 - protein, 387 aa, unidentified
MPLAADLPAQTQPVPRPAQVLYVSLELSPSKWLVTSLLSGTGRMSKHLVIGGDGNALLRLLAALRTRAEQRAGAPVVIVAIQEAGLDGFSVHRLLEANGVESWVVDPASVAVPRRMRRAKSDAIDGETLLRTLLAFRRGEPRVCSMVHPPSVEEEDRRRITRERRTLLRERIEHTNRIKGLLMGQGVTGYDPLGKDRWARLESLETRDGHALPPRLKAEIGREIERLELLARQIRQVEAERDALAATVPEVAASPAALLLRLKGVGPEAATLLWLEGLFRTFANRRQLAAYAGLAPTPWLSGRIRREQGISKAGNPRLRTAMIELAWLWLRHQPESALSRWFGERVRAGGGRNRRTTIVALARKLLVALWRYLVHGQVPDGAVLKPS

SEQ ID NO: 501841 - protein, 430 aa, unidentified
MEQVNGSRLAEFCRFKKEIRGSTEYLIVGLDIAKERHNAFFGTATGRTLHKGMFFDNTYDGFQKLLIQTDALKVQHGLRQVVFGLEPTANYHKPLGEYLIKGGHLVVLVSAAATVKNRELMDGRWDKHDAKDSANVADLIAQGKCLYYDCPGEDLRSLRGLLSLKKRLKKEEHGLRVRIRNQLLAQYFPEMDQHFGSIASLNVVQRCLDPSLISIMEYDEFCRTVAPGKVNLAQQRRLMQIWRVAKQSIGCSVGSAVSVEAQIMVAGLNRVRETIKTVDDKLEDICLKFPEYSFLLTIPGFGPDVSSKVLAAIGDPERFTSGKQVLKMAGFDLCASRSGKTSNSATPVISKHGKSDLRYALYQAAIISSLNYKEFIIYHTNKIRGREREKGIGTKMRVKLAAKLLIIAWTLMKKKEPFDPKYLNQGDSKA

SEQ ID NO: 501842 - protein, 305 aa, unidentified
MEQVDSQAEVILGVDTHLDVHVGVVIDAVGRVKGTLSIETNPKGYEQLLNWARSFGSLGRAGIEGTGSYGAGLTRFLERSGVAILEINRPNRSRRRNRGKSDPTDAESAARAVLADDATGAPKAQSGLAEALRTLSVARRSAVKAKTQAVNQLRALLVSAPSFIRDALLKVKPEHCVAACAALPDDDEKNPVLASLKTTLRLLAKRWNALHDELRELDKQLTRLTKLAAPRLLGRFGVGPQTAATLLVTAGDNPTRLRNEAALAALCGVNATSHGQRVPIRHLSRLQKRTSGIRLLGVKSQEVLS

SEQ ID NO: 501843 - protein, 415 aa, unidentified
MMSNPLIVGVDVHRKTNTFCLMDASGQEVRPRFTLDNNRPGTQAFVQRVAELMEADGFSELQVAAEATGWYWFHFFQSLQQEALLASWPVDLHALNPRLTANFKKSYVDVDKSDLIDAFVIADRLRWGRDIGTPFEYDETYLGLRFLTRYRYHLVHNLAREKAYCTALLYLKASEYSREGKQPFADLFGAASRAVIQEFTSIEEIAAMPFAELVEFIDVKGKRRFPDPSQNARLLQQVAQDSYLLPQALQPPINLVLSLSLKQISALEHQAEQLNTAITERLAAIPNTLQTIPGFGPIFTAGILAELGNPQRFNFDQAKVAKFAGFKWRKTASADFTADETRMTRTGNPYLRYYFCEAAFSVQRCDREYGAYFQRKLIEVRKHAHKRATVLTARKLVRLVMRLLATNQPYQPRRL

SEQ ID NO: 501844 - protein, 345 aa, unidentified
MVEHIETIGCDLGDKQSELCILLPSGESKRPQPVKTTRAAMRTFFTRPRAHVVIEVGAHSRWVSQLLKDLGHQVTVANPRRVQLISQNDSKDDRVDAELLARLGRADPELLAPIEHRGNQAQADLAVTKARDGLVRCRTRLVNQARGLVKSFGERLPKCGTDCFHRKAWPSVPGELRPALEPIFQVLGEVELKIKEYDRALARMAKRYPDVQILSQPDGVGLLTALVYLLTLEDKARFEKSRSVGAFLGLRPKKDKSGDSDKQLRITKAGDPFLRRLLVGSANFILGPFGADSDLRTWGLGLSKRGGKNAKKRAKVAVARKLAVLMHRLWVTGEVYEPTGYGKAA

SEQ ID NO: 501845 - protein, 319 aa, unidentified
MTTSAVVVGVDVAKDRLDVAVRPSGEAWSEANDEAGITALVARLRPLGPALIVCEATGGFERAAIAALAAAGLPVVVANPRQVRDFARATGQLAKTDALDAGILALFAERVRPTPRPLPDAAAQLLDAVLTRRRQLLETLVAEKNRLGFAPKPLHRGIQAHIRWLERQLDDVTKEFAGLIEASPVWRAKDDLLQSVPGVGPIVSSTLLGELPELGTLSHKQIAALVGVAPLARDSGTLRGKRMVWGGRASVRTALFMAALCGRRWNPALKVFYDRLKAAGKPTKVALIACARKLLTILNAMVRSNTRWMTPEARIQYSC

SEQ ID NO: 501846 - protein, 407 aa, unidentified
MIFVGVDWAEAHHDVHVQDENGKRLGGGRLPEGVEGIARFHELAARHADDPGQVVIGIETDRGLFVTALVAAGYQVFAVNPMSASRYRDRHSASGAKSDPGDAKVLADLVRTDRHNHRPVAGDSDLAEAVKVLARAHQSMIWSRRRQANMLRSALREFYPAALAAFEDLTSGDAIEVLRAAPAPALGAALSRPKIAAALRRGGRQRRIDARAGQIQAALRTPQLAPAPVIAAAMGASVSASVAVIAEMTTQIAALERQLAADFEQHPDAEVIRSLPGPGTILGARVLGEFGDDPDRYATAKCRKNYGGTSPITRASGTRSVVLARYVRNQRLADALYLWAFAAITASPGARAFYDTHRAAGDTHHAALRALGNRLVGILHGCLAHHTPYSETTAWGHRASTHITEAA

SEQ ID NO: 501847 - protein, 339 aa, unidentified
MSLYCGIDLHSNNHVITIIDENDNRLFERRMPNKLETTLNCLSEYQDDVAGIAVESTYNWYWLVDGLMDAGYSLHLVNTSAVKQYEGMKFTNDEHDAFHLAHLMRLGILPTGYIYPKEQRAIRDLLRKRGFLVRHRTAHTLSAQSLHSRLTGRQANCNVIQGDHAESIYLPGLDDANRRLEMKANLRMIQALHHQIVEIEKTVLNQMKLSPEYIGLKQVPGIGNILALTIALETGDISRFPKAGNYASYCRAVKSCRESNRKKKGEGNRKNGNKYLGWAYVEAVNHMVRFSNDGNRFFQRKLAQKNRAVAVKATANKLAKACFYIMRDKIAYDAKLLFR

SEQ ID NO: 501848 - protein, 371 aa, unidentified
MNHVTSIGLDVHARSVTAVALDSITGEVRSRKFGYSPAEIAGWILQLDSPKAVYESGVTGFHRVRELREMGVDCIVGAVSKMHKPASDRRKKNDRNDAEFLARQLMAHNIVEVFVPDVETEGARNLSRALEDVRDDLTRAKHRLTHLLIRWGYAWNEFNEDGKRRGSWTHAHWEWIRGIELPDAAARESLDYYISEVRHIESQKKAIEKRVAQCASKPRWRDRVEALRCMKGIETVTAFALTVEAGVFSRFDSARAFASWLGLVPSEHSSGERTSRGGITKAGNSHLRKLLVEASWHYTRATKERKRSLYDESVPASISNHAAVGVKRLVERRRHLSCELRKRPVVANVATARELACWIWALGRMSEGALA

SEQ ID NO: 501849 - protein, 421 aa, unidentified
MPSIEHPPQAAARSDDARSIDMDATLFVALELSLSSWVVVASAPGEDKASRHGVTACDGPGLLALLRRLRERAERRRRRPVAVVVMQEAGRDGFWVHRLLEAHGMRSHVVDPSSIAVSRRSRRAKTDRIDAEAMLRTLMAWARGERQVCAMVRPPSREAEDARRLGREREALLAERIRHANRIKGLLATQGVFGFEPSLRNRRERLAELRTPEGASLPPQLAAEIARQVDRLELAMQQLAALEDARDAAFAAERGTDPARNEAAHVAANHEAASVKAAPFPEREGAGARLLRLRGVGPETASVLAGEAFFRDFRNRREVASYAGLAPSPWQSGGTDHEQGISKAGNSRVRKAMGQLAWLWLRNQPDSDLSIWYRNKVRDGRGRIKRIAVVALARKLLIALWRFVTQGLVPTGAVLKPAKAA

SEQ ID NO: 501850 - protein, 404 aa, unidentified
MSKTRDKGSFSGFLGIDISKGRFDGCCINREGSVLFHVSLPMNRTGFEKLVTHVCAISLPKGSILVGMESTACYHVSLFSFLMALGYSVSVINPLLISNFMKLQLRKTKTDKKDAAVIARFLSAHGACLPHTMADSHIADLRELSRQRESLLHQMTALKCDIKRVLSITFPELERTMGVFTRTTLRLLCRFPSARALAQANHEEVALLLRHVSRGRNTPVSADMLLQLARSSVGTASPSREMILRQKASILVHLEEHLQEMTNTLIELCQSALERDVDILTSIRGIGDKTAATFLIEMGGEIQKFETHSQLIAMAGLDPSVYQSGQYDGHSRITKRGNRHLRRVIWLMTIRVIQFNELFKSYYRKRIEDGLPFKKAVLATAHKLIRIIFVLLTRRTTFCHQVTS

SEQ ID NO: 501851 - protein, 322 aa, unidentified
MNPKNYGGIDVAKKNFVIGIYGQDKTKTEANTPKGHAKAVEYLQKHNVDLVVLESTGGLEVPLANALHAADIRVVIANPQRTHQYAESFSLGKTDHLDAKMLADYAQALDSRKMADDMCYAPPSEEALALEALVKRRSQLVEMRKMEKNRLEQTHASQKASVVAMIKHLGELIAALDKEIDQSNRGGFNGKGEILSEMKGVGRITCATLLSMLPELGKVPHKRAALLVGVVPPPHQSGEKEKKSGCVGGRMVVRNALYMAALAATRSEPKIKAFYEKLMSRGKAFKVALNACMHKLLRILNARMRDYLASLKETEESESQSA

SEQ ID NO: 501852 - protein, 339 aa, unidentified
MKNTKYYIGLDVHKERTSYCVRDKLGNILIEAEAASLYSELESRLKPYLAASMIGLEASTSYYALYQNFLRNNYYIKVANTIQLRQLIAKNDKLDAQRLSEMLRLGTFPCSYIPDEKIQHLRSLIQMRHALMQEKVRCNNRIQAFLDRNGVMMPSCKAFSKKWKHALMQYMGAGNVNTELRYEYDHYVYLEKTNEQADQEIIGYTKTYWNQEYQLLRSITGFGVLLPCYIIAFVHPIERFLSNRKLRRYAGVIPVTKESGDTTSKGRIPKTTSKTLLRWALVQAANTIGKTNTRLGRYYRRKKNQKKNTGIAKIAVASTLVDIIYKVLTTKKPYRSAVC

SEQ ID NO: 501853 - protein, 446 aa, unidentified
MLSHQSKKPMTKSGKGRSKIQSESVSLTIINPHTAGIDLGAREHWVCVPKEAEEENIRSFGCSTPDLLSLADWLEDCGVTSIAMESTGVEWIPLFQILSERNLKVFLVNAKSVKTVPGRKSDVKDCQWLQQLHSYGLLAPSFVPEGQIAVLRSYLRQRENLIRSASSHIQRMQKALTQMNLQLHKVISDLTGVTGLNIIRAIISGQRNPKHLAKLAHSRIHCSPQQLQAALTGNYREEMVFILHQELSLYEFYQQQIVALDGEIEKCLAQFPSVTEEAPPAKKKKNRRRSTHPCFDLHSHLYRITGVDFTSIDGLDVVTLQTIISEVGLEPTKFKSVKHFASWLGLCPGCRITGGKVKSSQTRKVVNRAATAFRLAAQAVSRSNSALGAFYRRLYRRAGAAKAITATADKIARLFYTLWTSRQSYQDQGADYYEQQYRQRVINNNL

SEQ ID NO: 501854 - protein, 359 aa, unidentified
MQTQNTKTAIDFTGQNIYVGIDTHYKTWMVSIYSDEFELKTFGQEPDVDRLENYLLKHYPNANLKLAYESGFCGFWIQRSFAKKGIHCNVAHAADVPGSNKELIRKTDKVDSRKIAKGLRNNELNCIFIPDEQLESDRQLLRSRTKIVRDTTSVKNRIKAFLKFKGINIPGDYKSNKWSKKFISWLQSIEHNSISSKAAFGCYVDELIFLSEKQKQLNQTIESLAKRDTYSSDLHLLRTVPAIGLLSGMTILTELGDINRFQKQDHLYSYCGLTPDCHSSGNTERIGKVSRRGNIFIKTVLIECAWVAVRKDPALLLYYKQQLPKMDRNKAIIKVARKLLNRIRYVLKNKMEYQIGIVE

SEQ ID NO: 501855 - protein, 417 aa, unidentified
MEYAPSTLTAVPVNRLACGIDWARDDHAVAIVDGGGRQVHRSIVEHSSAGLRALVTVLARAGVAEVAIERPDGPVVDALLGAGITVVVISPNQLKNLRGRYGSAGNKGDRFDAFVLADTLRTDRARLRPLAPDSESTVALRALCRARKDLVAHRVRVANQLREHLNRVFPGAVGLFAKLDSPISLRFLSRFDCQDRADWLTPRRLQAWLASAGYCGRTDSAVVFGRLGAAPRGLPSAAGAAQIPITQALVATLDNLVKQIAMLSEQIGQQLNAHTDAHIFTNLPHVGTVRAARLLAEIGDCRGRFPTPEALACLAGVAPSTRQSGRMRSVGFRWACDKQLRDAVCDFADGSRRGNPWAADLYSRARARGHDHPHAVRILARAWIYVIWTCWQNNTAYNPAQHRALQTVLHQDQPPGA

SEQ ID NO: 501856 - protein, 344 aa, unidentified
MTNIQHKETAHKTKPDLFAGIDVGAEELILVIRKNGKLFDPQKFANTPADRDRLVKKLVKLPGIMVCLEATGIYHFDLSLALHDAGVLLMVVNPKASHNFAKVLMKNSKTDAVDANTLAEYAARMDFVAWTRPSDETIALRSFARRINALTGQKAAAKNHLHALNATSETPKAVLKDAKLAITQLEKRIDRLTDEALVLIGKHSELTRILALLIGIKGVGETSAIALMGELLLLPPDLSHREWVKFAGLDPRAFDSGKSVHKQTRISKAGSRHIRAALYFPALSAKQHDKHVKAYFQHLMDNGKTPLQGVCAVMRKLLHAIHGMLKNNEPFDNTRFYAIPESNG

SEQ ID NO: 501857 - protein, 338 aa, unidentified
MTVVTVGIDLAKNVFAVHGVNAAGKAILVKPLVRRAKLLELIATLPACLIGMEACTGAHYWAREFQKMGHTVRIMAPQLVSPYRMGGRHGKNDAADAAAICEAVARPNMRFVPVKSIEQQGQLFVHRAHQGYVSERTALINRIRGLLSELGIILPPAFKAFLSGVSQVLEDLPGYCNQVIGDLLSELFHIEEKIKNSEKLIQQLARDNSAAQLLMQFRGVGPMTATAVVASIGNGHDFKNGRQFSAWLGLTPKQQSSGGKARLGKITKAGDSYLRTLFVLGAKSVLLGATKNDDPVSRWALQLKERRGYGRALVAIAAKNARMCWAMLHLKDEFRFPV

SEQ ID NO: 501858 - protein, 380 aa, unidentified
MHKVGTPWDTAPGLQANFTRKATPMSAPYSLGIDVAHQTLACCLLGDGTRHRCDLPNTPAGFRRLARWLDTHTASQPVQITLEATGGYELAVATFLHAQGSRVCVVNPYGVKRFAESGLCRTKTDAVDAETLAEYGRAHPALHPWQPPTPAQAELQALVRARADLEQAIHNRCHAPGTPASVRRVYDPVLASQQAAIDDLDRQIHALLHATPTLGEDYRLLRSIIGIGHSTAVTLLAEGGDLRRFASGKALAAFAGLSVQEGTSGTSVHRRPRLSKRGSARLRKALYFPAITAMRWNPHLRAFAERLAARGKTKMQIIGAVMRKLLELVYAILHTGQPFQRDYRCARLDRHPVPAGDGAVGVKPPLGPDTPGLDAHRAVA

SEQ ID NO: 501859 - protein, 459 aa, unidentified
MQNSCQNGPGSQRPIEGLPVVRRNVAGIDLGSEQHWVCAPTVDGAGREIAHFGATTPELIRMGKWLQERQVESVAMESTGVYWIAPHEVLEGMGLEILLVDTRQLARVPGRDKKSDPTDCEWIQRLHSCGLLRGSFRPREDVCMLRTLVRDKANLVAEAGDWVRRMQKSLDQMNVRVHRAVSDVDGVTGMAILRAIVEGERDARKLAQLRDRRCQKSEEEIAEQLSGHWREDHLFSLRESLKMYDAIQQGIANYDREIMRQLGAMQQEEFGGQPAPPVKNPQKAKAIKQRGQEPMRQALYRMSGADMTSIDAIGVETVQVVLSEYGPDLSRFPTEKEFVSHVTLAPHRPTSGGKPVKKKRRNSASTRVAGALRMAALSLRHSQTALGAYYRKLARRKGGDVAVFATARKLATLIYRLLRWGQHYVDEGAEAYEKRYQQFRITALKAKARELGYELVQHA

SEQ ID NO: 501860 - protein, 393 aa, unidentified
MICVGIDVSKDKHDCFILSSEGEVLEDVFAIPNNAEGFDTLLQTIRRCTRPTDKIKVGLEATGHYSYNILGFLLDKGLPTYVINPLHTNLYRKSLSLRKTKTDRVDARTIATMLMSDVDLKSYTDTAYHSEELKSLTRYRFDRVKERAKLKQSVSRLVTILFPELEKLVPTLHMASVYALLSEFPGAKQVAGAHLTHLKAILSEASRGRYGRDVATELRDAARNSVGSVMPAKSLELQHTIRLIRELDTEIEDIEAAIEAMMEETQSPITTIPGIGVRMGAMILAEIGDFSRFDSPDKILAYAGMSPSTYQSGQLSLSGAYSHMEKRGSRYLRYALYNATKYVCHWDPTFAAYLAKKRAEGKHYNVALSHATKKLVRLIYAMEKSGRTYQLAA

SEQ ID NO: 501861 - protein, 367 aa, unidentified
MKQYHKYVGLDVHKERNEVAIAESTGEVRLYGSISNDLHALEKLVGKLRGENVVLHFVYEAGPCGFVIYRRLVQLGEDCLVVAPSLIPRKSGDHVKTDRRDAVMLARLHRAGELTGIHVPDERDEAIRDLVRARTDAVTDRRDNRHRLKAFLLRHGYKYSGTSSWTEAHLRYLRELVLAHAAHKVVLEEYLLAITQATERIERLETHLATLAATWRLKPVVDALQGLRGVQLLTAVALVAELGDLSRFAHPRQLMAYLGLVPREYSSGETRRQGSITKAGNSHARWFIVEAAQHYRLAPKVSKELAPRQEKLPARLKEISWKAQVRLHKKYWAMTLRGKRVQTIQVAVARELVGFIWATARQVKVND

SEQ ID NO: 501862 - protein, 411 aa, unidentified
MEVVLERCAGLDVHQASVVCCVLIGAPGRKTQKLLHSFGTTTRELEALRAWLAEHGVTHVGMESTGVYWKPVYAVLEGHFDLTVGNAHHIKNVPGRKTDVKDAEWIAQLVRHGLVAKSFVPPPAIRDLRELVRHRRTLIETRTAVRNRVLKLLEGANIKLSGVASDVFGVSGMAMLEALASGTNNATEMAGLARGRMRRKHAALEAALDGRRREPQCFLLAMQLRNLEAIDQDLEALDARIETQLEPYQAQHRLLMQIPGVDWVTAAAIIAEIGTDMDVFATAHRLAAWAGVAPGNYESAGKQKGAGTRRGTVFLKSALFAAASAAVQTKGSYYRDKYNRLRARRGPVRAIMAIAYKLLVAAFHMLSTGEDFRDLGEGYLDQVARKRSTTKLVQCLSNLAAIIHEPEAAPG

SEQ ID NO: 501863 - protein, 351 aa, unidentified
MEFVGIDWATRRAAWCAVDAAGRRLGEGAVPADEGGLLRLVADRGLEVTAAVEMMSGAAWIAETLRSVGWTVRVADARRARALAPLAAKTDRIDARVLAELARRELVPEVWVPSVADRALLEQLLRRMHLIRLRTSAKNRIFGLLSQWGVRAGVTHLRKPGAVDALGERGVPEVWRASITEAIAVIDMLDARIAPIDAGLVQLARDDPRAALLRTIPGIGGLLGLTFAAEIGDISRFPSASKLVGYSGLVPRVRQSGESSRTGRLAKAGSPLLRWAAVEAAQHAWRAQNPWHRLYVDVRARHGHGNAAKSAVARKILIAVWHVWSRQQPFKPAASCAASIVPASSGQPLVA

SEQ ID NO: 501864 - protein, 338 aa, unidentified
MEYEQQRYVGIDFHRRRSVIVHKDAAGTVLETVHLDNDPVAFARELAKAGEHPEVVLEACYGWYWLADLLEELGANLHLAHPLGNAWGNRRVKNDERDAEDLVDLLRLGRLAEAYIAPPALRELREIVRYRAKLVTLRSGLKSQVHSVLAKEGVPVPMSDLFGTAGQDLLNTAKLGRAYAIRVESLRDLIGDYDKEIAMADGELDQWLAGDKGYLAIQAIPGIGPVLGAVFVAEIGDVTRFSSPDKLSCWAGLTPRHRESDLHVVRGPITKQGSRLVRWAAVEAAQRHHGFQSERFEAIVARRDSKKIARVALARHIITLVYYGLRDGEIRCLAEKTG

SEQ ID NO: 501865 - protein, 353 aa, unidentified
MQSSGFSHQPATREAPVERQYVGIDLHRRSSTIYRMNAEGEMLGCVRIPSQPAELAEAMADAGENPEVVLESAYGWYWAADLLQELGATVHLAHPLGNNWGHRRVKNDERDARDLAAMLRLGRLAEGWIAPPETRELRELVRYRFRLVGHRSSAKAQVHGVMAKNGILPALGDMWGKGGAAQLDALELPRAYATCLDSLRDLIAFLDNEIDIFDRTIHHELKDDPGYNAILKVDGIGKVLGAIFVAEIGDVTRFPTPKQLCSWAGLTPKHRESDQKVRRGPITKQGSPLVRWAAIEAISKYRGGEKLRADYLRIAEHAGRFKARVAVARKLLILVYYGLRDGEIRCLESPEAA

SEQ ID NO: 501866 - protein, 341 aa, unidentified
MSEVSTIGLDLAKNVFQVHGADASGAVLVRKKLRRDQVLKFLAAQPACTVAMEACASSHYWAREIAKLGHEVRLLAPDYVKPFVRRQKNDAADAEAICEAAQRPTMRFVAVKSEEQQAAAVVFRARDLVVRQRTQTINAMRGHLAEFGIVTAKGPFHVAKLVTAIESDRSGIPEMARPILRLLVEQLRSLDERVALLDRELARRAKEDADAKRLMTIPGIGPITATALAALAPTAQAFKRGRDFAAWLGLTPLQRSTGGKQKLGETSRMGERTLRRLLIIGASATVRWAMRKGSTADPWLARMLNRKPPMLVIVALANKTARIVWALIARGGTYRAPAAAK

SEQ ID NO: 501867 - protein, 371 aa, unidentified
MKQQTKSSHITVGLDLGDRRHRFCALDERGEVVEQDSICNDRVSLRKLAGRYHGALGVMEAGAHSPWISRFLEALGWRVVVSNPRKVRAIYQHERKSDQRDALMLARIGRMDLALLYPVRHGTAEAQQDLLRIKLRDSLVRARVAVINSVRFTLKSLGYTVRNPSSARFHKVVMEEVPESVREIITPSVQALAELTARIKMLELEINTLAQMKYPQSAQLQQIPGVGPITALYFVLKIEDPNRFAHVRDVGAYAGLCPRRDQSGESDPQLRISKRGDAYLRRLLVSAAHYILGPFGPQSALRAYGLMLAADGTARAKKRATVAVARKLAVLLLSLWKSQQPYQPFPGACLNGEQEDRRSGTIALHRMEATD

SEQ ID NO: 501868 - protein, 362 aa, unidentified
MTKSTTIIGFDLHAATTVAAVLLPGQRTPALHALSSDIPTVVRFVERVRRQGRVVCCYEAGPCGFELQRALANREMQCDVIAPALIPRRPGDRIKTDRRDASQLAILYRAGALTIIGIPTEQEEAARDLLRCREDIRADLLRARHRLSKFLLRHGRRFTETKNAWTKRHRAWLQAQHWPLAALEQTHRAYIRAVDEAVARLQSVDTELRDLLTIEPLRARVERLRCFRGIDDLTALTIAAELGNPRRFPTAPRLMAFTGLVPSEHSSGAKQARGTITKTGNAHLRRVLVEAAWHYRHHPFVGRALRLRQRGAPAPVIQQAWHAQHRLNRRYRCLAARGKPRPHIVTAVARELTGFVWAALTQ

SEQ ID NO: 501869 - protein, 551 aa, unidentified
MYRVPQAGLTKSAVAGQLERRVSEVIGLSAARRFQETRRGRAAAVRWNAAPAKTDLPLERACPSVSVVLGHVGESGETVEAVIPIERVSTTTYPNRRGIPMTIMEEAMAVRKRAVLELAHPNAAGIDIGSASHYVAVPADRDDESVREFKSFTDDLERLADWLVACGIDTVAMESTGIYWIPLFELLESRGFTVYLVNARHVKNVSGRKSDVLDCQWLQQLMSYGLLSGAFRPKDEICALRAVSRQRDMLLSYQARHVQHMQKALAQMNVQLANVISDIVGETGQKIVRAIIAGERDGARLAQMKNVRIRASEAEIAKSLRGNWREEHLFALRQAMALYDAYGERLAECDQQLEALLAALQPEAAGDPGKNRRRSRARNAPKFDVRAYLFGMCGVDLTRINGIDTTTALKVISEVGPDLSRFKSAKHFTSWLGLCPGTKISGGKVLSGASKRTANRAAQALRMAAAALRSSQSALGAYYRRLCARLDRPKAITATAHKLARLIYTMLTKGTEYTDQGQDYYEERYRQRVMHHLAKRAEKLGFQLTPLAVTT

SEQ ID NO: 501870 - protein, 356 aa, unidentified
MGDYSDAFVGFDTSKLRNAVAIAEAGRGGEVRFLGEIENTPAATAKLVRKLSAKYKRLTFCYEAGPTGYGLHRQIKDLGFECVVVAPSLIPKRPGDKVKTNRRDALSLAKLLRADELTSVWVPDGRHEAMRDLTRARETAMLDLRTKRQHVSAFLLRLGRPYPESRKTWTKAHASWIASQKLEHPQQRLVLEEMMLAIRQAQERLQRLEQAIAATVPEWSLAPVVAALMAMRGIDLISATTLLAEIGDLSRFQTPTELMAYLGLVPSENSTGDTVKRGPITKACLRRIRPATPSSADRSPKPATGVPGACWWSARGAISIRRGSDKPSNRRSMRRRQQFARLPGRRSAGCTGAIVR

SEQ ID NO: 501871 - protein, 367 aa, unidentified
MKKISTATAHAIRKVESQRLTIGLDLGDRSSWYCVLDETGEVLLEQKLSTIPKTMREVFGEMPRSRIALETGMHSPWVSRLLSKLGHEVIVAHARKVRLIGESRRKDDRLDARTLARLARIDPQLLAPVKHRSAKAQADLTVIRARAGLVRARTSLINTARGLTKSYGERLRGCNSRNMKPEKASGLSPELQAVLEPLLAGIESLSEQIREYNEQIEHLAQESYPQVALLKQVKGVGTLIALTYLLTLEDAHRFRKSRDVGCYLGLQPGRRNSGQSEPQLHISKEGDPYLRTLLVQGAHHILGPFGADSDLRRWGLKLAERGGKNGKKRAIVATARKLAVLLHRLWVSGEVYEPLRNSSQAMLPAAA

SEQ ID NO: 501872 - protein, 317 aa, unidentified
METCKVKPCFVGIDVSKDTLDICILPQKEGFRVENNGNFEELCQQLKTMFPSLIVMETTGGYEDGIYRALSAAGLRVNREPAINLYHHRKSGGKRAKTDKIDAEAIAHYAQCYSETIRVQEPPSESQERLRQLLNRRADLVQMQSMEKNRFSAPATIPEVNNSCKWLLEMFESEIRQIELAIQAEIDRHEELKTKQERLKTATGIGELTSSALLAWLPELGKEQHKTIAALVGVAPYHKESGQWQGKRQISGGRAPLRCLLYMATLSAVRHNKKLAEFYECLVQRGKAKKVAIIACMRKLLRILNAMLRKQEDFQAA

SEQ ID NO: 501873 - protein, 388 aa, unidentified
MSKSTATTSTIQISEERETLMLAMELGETGWLLGFASAYGQKPLRRKIASRDRKALLREIEWAKAKLGLEAGARVVSCYEAGRDGFWLHRFLVAQGVESLIVDSASIEVSRKKRRAKTDRIDLVALLDLLARHLAGSAKRVWSVVRVPSVEDEDRRHLHRELKLVKKDRTRVSHRMKGLLSNHGLTLELRGNLESQLGAMRQWDGNPLPPGLRGRLERYLAEYRYFTKRIEELEAERRRILREERGPVLEKVLQLYSLRAVGINSAWLYGTEFFGWRDFKNGKQVGSMSGLTPTPFASGTREREQGIGKDGSRWIRGGAIELAWGWLRFQPESELSKWYQRRFGSGSKRLRKIGIVALARKLLIALWRFLETGVVPEGALLKTDLRLR

SEQ ID NO: 501874 - protein, 341 aa, unidentified
MTVIIGVDPHKSTHTAVAIDRDERPLARVQLVADRCQVQRLLAWVEPLGTQRCWAVESAEGLGKLLAQQLVEAGEQVIDVPPTLAARVRLLGSTKAGKNDPNDALATAIAGLRHCGLRAVRAEDHTAVIRMVIDRYDDLVALRTQAACRLHVALRELIAGGAPRRLGADWAARLLRSVRPQGAAGVERKRLALELVADVRRLDRDIATAKRRVSDAVMASGTSLLELHGVGPIVAGFILGHVGDPARFPTPARFASYNGTAPIEASSGPRRRHRLNPRGNRKLNHALHLAAVTQVRHDTPGRAYYQRKIAEGKSKKEALRALKRRISDAVWRQLQVDLGHR

SEQ ID NO: 501875 - protein, 427 aa, unidentified
MKYTQNEKIMQISEEILVVGVDIASEIHYARAFNNRGIEVGKLIRFTNSEEGFNAFETWAEELKVKHNRKQVIVGMEPTGHYWFNFAQHLKDHGIKIVLVNPFHVKRSKELDDNNPTKNDRKDPKTIAMLVKDGRYMVPYIPEGIYSELRTAMETRWQIVKQLNTIRNRVKRWISIYFPEFNTVFGDWEGKAALIALKEFPTPARVVEIGVEGIVSYWKKEKIRAVGKRRAVELIEAAKKSIGIREGLAAANNELLTLLEDYEMKIKQYERIMALIEQLTLQIPGMEEILKIKGVGLTTAAGFIAEVGDISRFEHPKQIQKLAGLSLKENSSGKHKGKTAISKRGRRRLRALLFQGIMPIVATNEEFGELHRYYTTRDKNPLKKKQSLILLCCKLIRIFYALLTKKVAYDPQKMMSDIKRPILQEVA

SEQ ID NO: 501876 - protein, 356 aa, unidentified
MSQKLNCEIAVIGIDIGKNSFHLVGQDRRGALVLRQKWSRGQVEARLANLAPCLIGMEACVGAHHLSRKLQALGHDARLMPAKYVRPYSKGQKNDFRDAEAIAEAVQRPTMKFVATKTADQLDLQALHRVRERLVGQRTAIINQIRAFLLERGIAVRQGLRFLRAEMPTILAKRSDVLSPRMLRIVEDLAGDWRHLDERIEGVSSEITALADQDAACKRLMTVPGVGPIISSAMVAAIGSGDVFGKGRDFGAWLGLVPKQISTGDRTILGKISKRGNRYLRALFVQAAWVVLVKIGPKHWHRYGLETWIGAARKRLHHNVLAIALANKLARIAWAVLHKGRAFECVKTDAMASRPA

SEQ ID NO: 501877 - protein, 354 aa, unidentified
MKYFAGMDVSLEETAICVVDETGQMIKEARATSEPDALHALLASFNLRFERVGLEACSLTAWLHGELTSAGWPAICIESRHAKAAMGAMPNKTDRNDARAIAQIMRTGWFKAVHVKTPTCRSWRSLLVARRAVLNEMRTIENVVRAIFRETGLKLGTPARKDFIVRAREFVAGEKGLAMMIDPLLEILATMLREFTRLTKQVLVIVRDEPVCRRLMSTPGVGPLTALAFRATIDRPERFKKSRDVGAHLGLTPRRYQSGETDIQGRISRCGDELARTALYEAAHSLLIRSKKWSALRAWGMKIAKHRGMARARVAVARKLATILHRMWVDNTEFRFGREQAAYPTIKAITVVAA

SEQ ID NO: 501878 - protein, 372 aa, unidentified
MKFTTKYIGLDVSKEKIAVAIADAGTEAPRYYGTISHTPAAIRKLLKELGPANSLAFCYEAGPTGYETHRWIESMGASCTVIAPSLIPKRAGDHVKTDRRDAEQLARLFRAGELTAVHVPTREDEALRDLVRTREAAREDIHRARQRLLKFLLRHHIHPPVTIKRRWTKKYREWLTQLTFEHEGMQVAFTEMLHAIDEVDQRMARLEKALLVQATKGAKAPVIQVLQSLRGVALLTAVTIAAEIGSFARFRSPAQLMAYLGLVPREYSTGQRTRRGSMTKAGNSHLRRVLIEAAWSYRYRPAVKGELEKRLDGLSGEVQMLSWKAQERLHRKYRYLVFGKNKQKNVAIGAVARELVGFVWAVARTVEPSPTA

SEQ ID NO: 501879 - protein, 416 aa, unidentified
MNAVGIDVSSRKSTVAVLRPLGEVVCLPFDVTHDIAGLASLVEKLKALDGETRVVMEHTGRYYEAVEKALHEAGLFVCAVNPLLIKEYGANSLRRVKTDKADAVKIARYALDNWADLRDFTPMDAIRYDLKTLNRQFQLASKQRTASANNLIALLEQSFPGIRKCFDSPVRSDGTQKWVDFAHSFWHVDCVRKQPFPAFCERYRKWCKLHAYFFKLRNAEKVYALAKSAVVLTPKSKVVKVLVQEAANQLISISRSVEVYRAEMDRLAAMLPEYPVVMAMYGVGKSYGPQLMAEIGDVRRFERKQALVAFAGIDPMPNQSGDKNVRSNKSSKRGSPYLRKTLFNVIRTYLQCAPQDEPVFQFLNRKRAEGKPFYVYMLAAANKFLRRYYAKLRDYFASLDTLQPVAPIPTILKAAL

SEQ ID NO: 501880 - protein, 339 aa, unidentified
MKLYTGLDLHSSNSYLGIIDETGKRVLKQKLPNERERILEALKPYQNDIVGIVVESTYNWYWLVDLLMGAGYHVHLANPAATKKYTGLKFADDQHDAFWLAEMLRLGILPEGYIYPKEDRPVRDLLRKRMHLVRLRTSLIVSLQNILCRNNGYRLKTADVKALCDDRVAPLLTRNEDLALAGMVSKESIDFLTRQIKKIEAVIEDKVELKPSYAKLQSVFGVGKILALTIMLETGPISRFAKVGNYASYCRKVASKWLSNDKVKGKGNKKSGNKYLAWAYSEAAEHACRSYTPARTYYNRKMQKTNFMAAHNALAHKLARAAYYVMRDEVNFMPEKTFV

SEQ ID NO: 501881 - protein, 311 aa, unidentified
MNKDTIGIDISKDTLDTHRLSTGAAAQFANSAAGLRALRRWIGAQMPDLVVYEATGAYHAALERGFAGVLPLVKVNPLQARRFAQARGTRAKTDAVDARVLAVLGSALDLAPDVPAGKNQHDLKELQIARMALIKERTRLLNRSKTQSLALLKRQSKARLEQIKRQLTELEAALLDLTRQCPKRARAFDILCSIPGLGRVTAVAILVECPEIGTLTRKQIASLAGLAPMTRQSGQWRGTAFIQGGRKFLRDALYMPALVAARYNPDLRQRYQNMIKAGKPAKVALTALMRKMIELANALVQKNRKWTPKTA

SEQ ID NO: 501882 - protein, 451 aa, unidentified
MASSTSPLDMIQCNAAGIDIGADQHWVCVPADRDTPSVRQFGPFTPDLYALADWLKHCGIETIAMESTGVYWIPVFQILDSRGFEVKLVNAHHVKTVPGRKTDVLDCQWLQQLHSYGLLSGSFRPEDEICVLRSYMRHRDSLVKTASTHVLRMQKALTQMNVQLHRVISDITGKTGMAIIGAILAGKRNPSELAALKDPRIRASKETIADALTGDYRPELVFVLAQEMDLYTTYQRKIAACDLEIERHLNTLGTKGDTLPCSMATPTPRRKRKVGNELSFDMHQHLNLINGIDFTQIPGISDLSALTILSEVGLDPSRFHSAKHFCSWLGLSPGNRITGGKVKSSRTRKVVNRAAIAFRMAAQTLRRSQSALGAFYRRMRSRLGAPKAITAVAHKLARIFYTLWSRGEQYVEPSLDSYQQQYRERSVQQLQRKAAKLGLQLIPVSDSEDVS

SEQ ID NO: 501883 - protein, 343 aa, unidentified
MQVVTTIGLDIAKSVFQVHGVDAAGQVLIRRQLKRRAVLAFFQKLPVCLVGIEACASSHYWSRELQALGHSVRLMPPAYVKPYVKRQKNDMADAEAICEAVARANMRFVPTKTPEQQSCLMLHRTRHLFIRQQTAVINSIRAHLAEFGIVAPVGRKGVTELLHIVADPSDKRVPEVARACLAALGNQLLSLKEQIVEFDRMIMVWHRSNETSKRLHYIPGVGPLLATALVASVADPRTFRSGRNFSAWIGLVPKQHSSGGKDRLGSISKQGDRYLRSLFVAGALAVIRYAKIHGTKHRPWLTALLARRPTKVAAIALANKLARMAWAMMAKGERYRQPVALAA

SEQ ID NO: 501884 - protein, 342 aa, unidentified
MDHYAGIDVSLECSSVCIVDANGKIVREGKVASEPDALIGWLTSVGYELSRIGLEAGPLSQWLFAAMREAGLAVELLETRHVRKAFEAMPVKSDRNDARGIAQLMRLGWFRPVHCKSIGAQETRAVLTARKLVQSKLRDIENHLRGILRGFGLKVGKTTNPSFGMRIRELVANHANLEMIAEGLLSVHAVLLREFKVFEKQVRSMARSDAKARLLMSTPAVGPIVALTYASAIDDPARFKSSKRVGAHFGLTPKKYQSGETDYTGRISKIGDGSVRTVLYEAAHIMLTKPVKGCSALKSWAMRIARRAGMSKAKVALARKLAVILHRMLVNRTPFNAAAAAA

SEQ ID NO: 501885 - protein, 361 aa, unidentified
MVTPYPFYCNLGQFIRPKPACRIDKKTIDRLVLKHIVMDKYIGIDVSKQTFDAFGLNRQGEMIALKPVNGSKGFRELLKHFDENQVFVMEATGPYYLKLAMFLHANGRQVAVVNPLVIRRFSQMRLQRAKTDRKDAQTIRQYAIQNPVALWNPEPRAILEMQQIITSLELLNKQRTASKNQLGAFMSSGIIDGQVKKTLETMIKVIEEERNRLETRLNEIVEAHYAETRQLLESIPGIGPKASAILIAITSNFEKFAHPKQLTAYVGLSPRVYSSGTSVKGKGHICKMGKAQVRKQLYMSSWSAKIHNKACSMMYERLREKGKPERGIKIAIANKLLKQAYAIAKSRNMYDERYGSSRLVA

SEQ ID NO: 501886 - protein, 475 aa, unidentified
MNIKGSKKKNQVLSVNIFEQQEIIAKADAIKAGLKASTWHELETKGKFDKNDKLSFVSDDMLILGCDIVSETHYVRAIDTRGRELSKSAFGFSNTAEGFESMLDWSTKLAAANDKKQIVLGLEPTGHYWFCLTTWLVAKGISVVQVNPYAVKQTKEVEDNSQLKDVKKDPKLIANLVKDGNFGMPYLPEKLYADIRRLSMFRGQLNEDRIRNLNRLHREMKIYFPEYKYAFGKIDGAFSLELLKEAPFPDELAALGTEGMKQIWHEAKLRGRGYANASSILEYARKSVGIKDGSDAGRQAVKWFVSRIIELDEQLSDIENQLNQRCNEIPYAKNILAISGIGENILSGILAEMGDISRFDNVKEIQKLSGLGLVACSSGKHTGETKISHRGRKRLRYWLFQAAKSAVAHSEEFKELHVYYTTRKQNPLKKMQSLIVIACKILRVIFTILTKGTAYDPKKLLGDIVRPDQSIPQAA

SEQ ID NO: 501887 - protein, 422 aa, unidentified
MKQALNIEQFAAFIGIDWADTKHDLCLQAVGGDKHESSTLEHTPEAIEVWASALRRRFGGKPVAICLELNKGPLVYALSKYDFMVLFPVNPLTVARFREAFATSGAKDDPSDAQLQLEILLKHRDRLKPLNPSSPAIRALEQMVEHRRRLVGDKVRLNNRLSSILKNYFPQVLEWFKVRDTTLFCDFLTRWPTLKVVQRARRSTLECFFHAHHVRSSVLINQRIQGIKDAIALTTDEAVIAPNALLTQALVAQLRVVLTAIGEFDDEIALRAQRHADFALFATLPGAGPVLAPRLLVAFGDQRDRYTCAADLQKYAGIAPVTRRSGNQCSVQWRWRCPKFLRQTFVEWSAKSIHHSFWAQAYYQQKRAQGKSHHAAVRALAFKWIRILFRCWQDRRPYDESVYLSALQRRGSPLFKYLATST

SEQ ID NO: 501888 - protein, 334 aa, unidentified
MEFRNFIGIDISKNTFDFALVKDNNVSMPISDQAPNNHSGIVKLEEFLKKQGLNMEETLFCMEHTGIYCRLLSQYLAERKYHVWLEMPVQILRSLGIQRGKNDRLDAKRIAEYACLKKDKAVLWQPPREVVIQINDLLTLRDRLIESRKSLKQPIKEFKDAGFKDTAKLIESRCINTLKAIDKEIQQIEKDLDDLINKDSNLKKLHKLAVSVPGIGNITAFTMLYFTNEFKLYSNAKQLACYCGVAPFEHTSGTSVKGKSRVSSFANKRLKKLLHLVAMSSITSDRELSKYYKRKVAEGKNKMLVINAIRNKILQRLCAVIKRGSPYQLEYQYA

SEQ ID NO: 501889 - protein, 373 aa, unidentified
MPKYSTAFGMDVHLRSTTVCALDADTGEAVTRRFPGNPWGEIAGWMDGFPGPSLAAYESGYLGFAPQRELAGLGVECVVAAVSKIPRSAADSASKNDRNDAARMAKAILAHDISPVWVPSPEVEGIRDLAGAYDGATARLATARQRLLAFLARRGFVYGGTTPAGNPRKYWTYDFLRWLDKVRPEDDGGVRALAALRNEVEAAAEARADLLSEYRAAVDASPIAAEVAALQSIKGCAFALAAAFSAEVGDFTRFRSGRQVTAHFGLAPSQRSSGGSVRLGGVSGAGNALVRKLAVEGSWCHAAARHQPKLMPRDTGVPLEIRVHGRKGSERLLRRREGMLARGMPAAKANAATAAELVRWPWALGMMCREGAE

SEQ ID NO: 501890 - protein, 412 aa, unidentified
MLFVGDDWAEDHHDVEIVADDGRRLVTKRLPEGLDGITRLHGLIAGCIPEEWAELEPGEAAALVKVGIETDRGPWVAALVAAGYEVFAINPKSSAHYRELHTTSGAKSDRGDAHVLAEIVRLDRAHHRPVAADSAQGESLKLVARAHQSMVWERTRHVLRLRSALREFFPAALAAYGDLDEPDTLQLLLIAPDPDSAARLSTAKISAVLARAHRRNVAARAQQIQGVLRAPALRQPGPVQAAFAAIAASEVRMITAINTEIAALGQVVADHFGRHRDADIYLSQPGLGVILASRVLGEFGDDPDRYADAKARRNYAGTSPITKASGTKKVVLARYARNTRIADATHQWAFGSMRGSPGARAYYDELRARKVGHRAALRQLANRWVGILHGCLKTQTLYDEKTAWAHRNTTAA

SEQ ID NO: 501891 - protein, 336 aa, unidentified
MSILYSGIDVSKDKLDIAIALNGKEIISTATFNNNLQGFKKLFSWVKKQVKGYSRIHFCMESTGIYHEEIAEFLQEQNNTIVSVINPYQSKSFAASRFIRTKNDKVDAKVLAFFCAITQPNEAVKLPDEVKKHRRLVRHLNRLIKDRAKEKTRLHSCKDTDVANVLKGTILFLSQSISQVEKLITQHIKKYPELKHKVNLLKSIKGFNNKTAWRILAEIHIEDGKSLNVKAQVAHAGLAPKERKSGSSINGKTRICKTGNASLRSALYMPAMSATKHNPALREFYQRLISKGKLKMVALVAVMRKLLVYAIGILRNNTPYNPDWTKIQQEKFALAS

SEQ ID NO: 501892 - protein, 424 aa, unidentified
MKKDISKTTKTQKQGNGKRRQLRETKRNVAALKTAKKRKAKRSEVEREVKEDASHAGEEGQAVVEFKAGEGEGYTIGIDLGDKRSRYCILDKEGKIVRESSVATLPASLKTVFSKLAGCRLAMEVGTHSPWVSRLLTALGHEVIVANAREVPLIYKSRRKNDKLDAEKLARLARLDPKLLKGIRHRGAEGQGDLLLIGARAQVVETRTGLMNMVRGLVKSRGERLPGCTSEGFVVELLEGVDEAAVRALKPVMVLIEQMTATIKEYDKQVEEMGKKHAEIARLDEIKGVGPLIAATYVLTIEDPERFGRSRDVGGYLGLEPGQSDSGESQPQKRITKAGDGYLRYLLVQGAHYILGPNGPDTDLRRWGLKLGSSGGDRGKKRAVVAVARKLAILLLVLWKTGAKYEPLRNSDKQEKQDKQKVAA

SEQ ID NO: 501893 - protein, 370 aa, unidentified
MSVRRILAKTINTDLEYEAIGIDLAKNCVSVALLTTDGEVVCIDRLDYSELEKSAQVLCPTTFAMEPCTEMNYLVQKLEAWGHRCLVIGGKNVQNYVENHYSGQKTDLNDAQALAFLAQDTQLRTIKAKDMEQQKYASLTTLREQYIKQYRQTIVSLKGICQAWGLNISKGISGKARLKDLIENHAAFPEELKESLVDMVTHAQTAQKALNKITKTLELLAKNDKVCQLIQTIPGLGTICSCRLRATIGDIKRFKNPKDFPAYYGLVPRSIATGHNEKKGKITHRGDKTMRSLMVQGAGSVINMATKGKLKSKQLTKWILKKQKEKMPWGKLVCAVAAKLLRIVRAVLISRKAYDPKLAGVAKCSLPKAT

SEQ ID NO: 501894 - protein, 448 aa, unidentified
MREPQEIEDREHEQAVLRVAAIDVAKASGVVCTRVPREGGRGFVTKVWPVDATTGAILELADHLAGLRIEKVVLESTSDYWRPFFYLLEAAGLEVALVNARDVKNAPGRPKTDKLDAVWLAKLAGWGMLRPSFVPPPEIRRLRDYTRLRIDLTRERTRHWQRLEKLLEDALIKVTTVASRIDTMPVRDMLEALIAGQRDPQRLADLARGKMKAKRAALVKALTGRFDDHHAELAAILLAQIDGLTVQIDTLTARIEAVVSEIAAAQGVNEDGTTGPHAGRGPDAPVLPAIDRLQEVPGISRNAAQVIIAEAGLDMSRFPTAAHLVSWARLCPRTLQSGARERPGRTAKGNPYLKGVLGDAAAAAGKTDTFLGERYRRLARRRGKLKALVAIARTLLVIVWHLLADRAARYRDLGMNYYISRPGTGRRARNHVRQLEALGYSVTLTEAA

SEQ ID NO: 501895 - protein, 444 aa, unidentified
MEYKKQHINFSHRLVKRGAIYGVGIDVHKHSLTAAVAEKQLDAIKIVKVQPFTTDDTGYAQFWAFVSKYFPKTFVFEASGVYSTYFHEFLDTRNRSSGLNATIDRLNPRVAKQMHFASTNHRDPIDAKSLATIAVMGIAQPFHGFGASDTSKIKELTRTYLRYSRDCTRIKNRIKRLLDRSGIYLRGLDLETNWGCYFTEALAKNKGTVMDAITQVLRDSQIPSISKRALEKHAKQWGFYQNRGLQPEYQELLDMFVVRLVFLNSCMAQIENLLNNLVASDQTLQKQVGFIAAVPGLSVSSALTILSEIGDISYFDNYRSFLNYAGLAPTIHASGEQSRIGRINRKSNTFLRTAFYQAGKSIATNVKEKSELKDLAGRMLVRYGKGKRTYMKIAAKVARIVYSLLKKGEWYNPFHGYHETREQATKVIKTRIDRKKKSFRRIAN

SEQ ID NO: 501896 - protein, 426 aa, unidentified
MKEHIDYLSTLFVGIDIASRIHVISALDFNQDFFIKMKPVQNTQEGAALLESMIVDVLKVNHPFKYVVIAMESTGFYGVHLANYLSASDLLAPFSVRVYCLNPKEVKNYKKSFNDIGKNDGIDSFVIADFARVGRISIRPWRGSQYLALQRLTRHRMHITECISREKTYMLNNIFLKFSEYALLRDGEHPFSNKYGAAAEAIFTEFTTNEDIVNSSVEDLVAFINTKSRGRIADPEETAKIVQAAARNSYRLDKCLYEPLTISIASSFNCISSFEKELKAIDKAILQTVQGLNPEEYTVLNSIPGIGKVYSAGILAEIGSVRAFQNANALAKYCGIVWNDNDSGDFEAKDKRMSKAGNSYLRYYIIEATGSVIRHCPEYERFYQKKYAETRNHQHKRALALISRKFIRLFYGLLDKSQLYSPEKSR

SEQ ID NO: 501897 - protein, 361 aa, unidentified
MMSNPESVNNFVGIDISKRGMEVLRISFNGKFERFKTKTTQEGEMKLINWLKGNDISVLEAGSQTFRIAKRLKNHGFDTIVLNPGDVRTIYASLRKTDKEDALKLARLAQRNPRKELPEVIVPTDEEEDARRLTTEQAHWSKQKTINKNRLHSLSTQAGLTDITKRNISSHANREEVIPYLPERYQREALRLQQSLELIDENLNAIDAEIRERLQRNKDYAKLSMSIPGIGPVTTHALLAYLGDCSRFSSGKQVSYYTGLVPRVDQSGESERYGSIIKRGCTPIRRVIIQCAWAMVKSEYGGPLKEFYEKLYPRIGKKKAIVATARKMVETFYAIMKSGEFYWGVPDGIILKKMKTYGLIA

SEQ ID NO: 501898 - protein, 334 aa, unidentified
MALELLAIDLGKRSFHLYGIDTDGVILSRKVSRAKLAEVVGNLAPTVIAMEACASAHYWARCWLAAGREVRLMNPRFVKPFVKGSKNDAVDAEAIFEAATRPTMRFVPVKSTDQQDLQSLHRARDRLICQRTALINHTRGLLAEYGVVLPQGPGRFMAQAPTAFAGADLSDLARAIFGELMDQLGDLDRRIKRLDAMIVTLCRTNETCRQLAKLPGVGPIIATAIVGSVNDGRQFRSGREMAAWIGLVPRQYTTGGKPRLGGIGRRANHYLRRQLIHGARAIVSRSAKHDDRQSTWLKALVARRGFNRTTVALANKTARTAWVLLSHKQEYAAP

SEQ ID NO: 501899 - protein, 432 aa, unidentified
MDSTKKAKQNEETIAAYVGLDWADSEHEVTMLVVETGEVETRKLKQESEALAEWVQSLQERFSGRKVAIAVEQTKGALIYALMCYDFLNLYPVNPKTLARFREAFNTSGAKSDPSDSGLLLDLIRLHRDKLRAWVPEDADTRLLQMLVEERRSLVDDVTGLTNRLGSTLKQYFPQALEWAGELNSRQALDFLTRWPTLQSIRKAGAAAVEKFYRQHGLRNKDKVEQRVKAIKESRALTTDRAVVEGSKMKALATVRQLHALAKSIAEMDARIQELFEQHRDHEVFSSFPCAKKVLGPRLLAAFGGDRSRYKSALELQSFSGIAPVTRSSGKSKTIHKRMACPKFLRQSFHEYAAQSIKKAGWARVYYQMHRDKGVKHHAAIRALAYKWIRIMFRCWQEQEPYDEAKYIASLKRRSSPLVPGLPPAPSSPVEV

SEQ ID NO: 501900 - protein, 417 aa, unidentified
MLWNRIAEKRSGIKADMLVIGVDVGKYFHVARGRFPDGTFTRPLSFASDNEGFTRFLTQVLAWQHQAACQDVIVGLESTGVYWESLAYWLADRQYRVVQVNPLHVHRSKELLDNTPTKTDDKDALLIADLVAQGKYLSFVMPRGVFADLRQLAAVRARLARDRTTQINCLHGLVSLIFPEFSNLYRDLSTKVARRLLYHYSTPEAVCGHTVAAMAHRVRKAGGVRLLEDKLALLKARAQTGVGIKEGQTALVVALRDTLAALDALDERIASFEARMASLLDETEEGGYLRSLYGVGPVSAAVILGETGGLSRYGSAEAVLKLAGLNLCEISSGLHTGRRHISRRGRPLLRQTLYFVALHHTREGTPLYEHYARLVNRGVPKPKALVALSCRLMRIMYALTRDRRCFSNEAPPRTQAA

SEQ ID NO: 501901 - protein, 412 aa, unidentified
MSFLQVALEPSTLVVAVDPGKVMNRVWVSDGCGPLADPVSMPVSRAGIDSVERMVSVHGPGRGALVIAIEATGSLHRAWASELERRHPGAVRLFAPSETKAARTQLGSGRFKTDDRDCAALTYLARQGAGRRWVDELGVETLRAVVRHRHGLVADRKVLQQRLHDQLNTLAPGLSAPAGHGRSLALEHPCGQAVLACAAAFAGRAPTVRSLQARAPGRFTKTDAQYWADRWRGCLAPPHDAEQRAQRLGRDLARYHILRGDIDALEADLERLLRGTDGQILTTLPGVAVIRAAGFAAHSLPINRFPNAEHLYSATGLAPALYESASVRRRGRISRQGLAEHRDALMGIAWGLSRYSPSFAKRDHEYRARGMAPIQARVALARHACRLAYRLLITQDSFDEERYRRGRPSRGR

SEQ ID NO: 501902 - protein, 347 aa, unidentified
MAIVGGFDVHRAQITFDYVDTNSGQVSAGQIRPATRPALRNWLERFNGRDEVAFAVEGCTGWRFVVEELVGAGVEPHLAEPADTATQRGRKKRAKTDRADARLLRELLAQQRLPESWAPPSHVLEVRTLGRLYMALMDERRAWQQRIHAQLFHQGVPSVRRLLTPDGRVAVAKGDLSPAGLQMVQTAMAAVDALTLQIGPLRAQLQTIGANQPGVLALTQQYGIGLLCGTIIWAELGDCRRFSNADQVVRFAGLDVTVWSSDTKRSAGRLARQGSPELRWALFEAAKAAARQTSPDYDYYDAVRDRLGGKRPTLSVARKLVRRCYHALRELGDQAWLAPAQVEQQAA

SEQ ID NO: 501903 - protein, 402 aa, unidentified
MSNYFAGLDWASKTHALCVIDERGGVVERFDIDHDAGGLTELRRRLRRFGSPPVAIERPSGLLVDTLVDADFTVVPIHPNAVKASRPRYRSHGGKSDASDAYVLADLLRTDGHRFKALTPQSDEIRALRALVRGRDDLVATRVHLANQLRTLLESFWPGAAAVFADIDSPIALAFIERYPTPESASRLGPKRMAAFCAQHAYCGRRSPDDLLARLQEAPSAVSAETEMEAKGELARCVARTLTRLVEQLRLLSSRIEHLVASLDDGRILMSFPRAGRICAAQILAELGSVRERFATDAQLAAEAGVAPVTYESGKSKAVTFRWACNHRLRAAITCLADNSRHVNAWAAHVYANARARGDHPHSIRILARAWLRVIWRAWTDRKTYDPMQHRAAQLLLKAAGG

SEQ ID NO: 501904 - protein, 311 aa, unidentified
MPCCVGIDGATAQVESALRPSGERWAVPNDASGVTTLVERLQAHPPLRVLEAPGGLERAVTRALATAGLPVVVVHPRQGRDCARAPGQLATTEALDARALAHGAAVIGPTPRPRPEAQTQELRALRGRRQPLIVMRTAAQHRLAGTSARLTKALAAHMPWLTTGIATLDDALETRRRARPVWRDNDDLWQRAPGSGPVCARTLVRDLPEWGTRTRQQIAALGGVAPRPCDRGTLRGRRTIWGGRAHVRSVWYMGTRVATRDTPRRHAFYPRLLAAGQVKKVALTACIPPCLTILNARLKHRTPWQAQEVQS

SEQ ID NO: 501905 - protein, 405 aa, unidentified
MDIIIEKGCGLDVHKKRIAACIMGTGLKKEIRTYGTMTNDLLKLKTWLKESGITHIAMESTGVYWKPVFNILEDSFEVILANARHVKNVPGRKTDVQDSEWLCKLLRSGLVRGSFIPPIEVRELRDLTRYKRKLIQTTTSEKQRIEKILEDANIKLSSVASNIFGVSGSMIIEELMKGKLQIGEMAELSKGRLRRRKEELKEALVGNMQTHHKFMIKESLEHIKAMEERISVLEYEIQEKIGRHFKEEYELLQTIPGVKENASVIIAEMGVNMDLFPTEAHLSSWAGMSPGSNESAGKKKPGTTTHGNKYLKTMLTEFAWAAAKTKDTYLGAKYRSLVGRRGKKKALVAVGHKILIICYHILKCKVPYRELGATYLDVRKKDRITKGYIKRLNNLGYIVTLKDAA

SEQ ID NO: 501906 - protein, 416 aa, unidentified
MEVIHPRCAGVDVSKKGAKVCIRIQGGGRRKTTSTVGTWSSMAGSVLELREYLLAQEVSCVVMEATGDYWRPFYYVLEEGLNVVLANAREVKNVPGRKTDVSDATWLADLGAHGLVRASFVPPPPIRELRELTRARTVITAERSREVQRLEKLLEDTGIKLSAVASDIVGVSGRAMLEALIAGQRDPVVLANLAKRKMRVKIPQLTEALVGRFTDHHRFMVRLFLDRIDAHSADIARLTERIEEALVPFSLVRELLGSIPGVSTGVADVFIAETGADMSVFPTAAQFASWAGTTPGSHESAGHSKSTKTRPGDSYLKGAMGVAAMSAAKSKNTYLSAKYKRLASRRGRLKAIVALEHSMLTAAWYMLNTGELYRDLGADYFTRRDPAKARARAIGQLEALGYHVSITEADPPRTLT

SEQ ID NO: 501907 - protein, 314 aa, unidentified
MIICGIDISSISLEARIGPDGPVRSFSNSAAGIAELAAFCRTHQVDMAAMEATGGYEKQAFALLWAEGLPVAIMNPRAVRRFAESMGFLEKTDGIDTGVIAQFAAVKKVKPCTPASAQQQQLKALVARLRQLVELQTAQRNQRLLVTEAAVIAMFTELLALVASQIRALEVAIAELIDDDPLWQKLDLVFRSIKGVASRTISRLMADMPEIGTLSNKAISKLAGLAPLARDSGKQKGKRIVRGGRGDVRAILFVVAGIVRRYDPDFAAFDKRLREAGKPKKVIRVALAHKLLVRLNAKAREVRSQFGVEVCVVA

SEQ ID NO: 501908 - protein, 341 aa, unidentified
MTIGIDLGDVWSHYCTLNEDGEVVDRGRFRTSPSGVEKWFTDLPRVRIAMEAGTHSIWISEQLQELGHEVIVANVRELRAISHSDRKSDPVDAEKLARYARLDPKILRPIAHRTVAQQEALTWIRARNLIVRLRTAAVNAVRGLAKPCGYRLPASSTLCFAKRCVAVLPPGLAQALGPVLEQIAEMTKKIKHYDRLIKRLTETEYPETQALIQVYGVGQLTALTYVLTLGNKERFQRSRDVGCYLGLRPKRSQSGDRDPQLGITKAGNIYLRTLLVECANQVLGPHGRDSTLRKWGLHMTSRGGKQSRNRAIVAVARKLAVLLHRIWITQEPYIPFYGVAA

SEQ ID NO: 501909 - protein, 339 aa, unidentified
MEIEILGIDLAKHVFQLHGADRSGRAVHRSKVARGALAETVHKLHPQIIAMEACSSAHHWARRFIALGIEVRLISPQYVSPFVKTNKNDRNDAEAIVEAAGRPTMRFVSIKSVEQEDIQAVHRMRAILVRQRTAVINQVRGLLAERGLIIARTPQAFKHAIHEVLSNEGSELTGFCQALLTEMLQHLQALEARIHWLEVSIKNFVKSSQLCRKITAVEGVGPLTATAIVGAVGDAKQFSNGRHLAAWLGLVPRQYSSGGKARLQGISKRGDTYLRTLLIHGARTVLQYAAGKTDKRSRWLQQLIARRGYNCAAVALANKNARVIQVLLSGNAAYRPAAF

SEQ ID NO: 501910 - protein, 342 aa, unidentified
MGEVSIIGVDLAKNVFQVHGAAADGSVVFRKKLTRLQFVRFMAEQPLCLVAMEACAGAHHWAREMARHGHEVRLIAPHYVKPFLKRQKNDAADAEAIVEAALRPTMRFVEPKSADQQARAVAFRTREQLVKQRTEAVNALRSHLYEFGHVAPEGIGYLPRLAKVVDDPGTGVPDLARDICRMLLDQIAQFTARIDGLKARIAAMSQEAALPLQLQTMPGVGPITALAVETFAPPMEQFRRGRDFAAWLGLVPRQHSSGGKQKLGKTSKMGQRDIRRLLVIGATAVIRWASRRGAPKGSWLARMLERKPIPVVAVALANKMARGIWAMLTRGESYRGPVLSGA

SEQ ID NO: 501911 - protein, 363 aa, unidentified
MMTAPVAGIDPHQDTYTIGIVDPTGVEVTHRSLPATAVGYLKGIELMTTHGVTRVGIEGSASWGAHAAIAFTAAGFDCREVPAQRSAAQRRSRRLDKTDAVDAVAAARALLAEPTLGPVQTLEVYDPLVAKIEAVLEHRRMLVAARTLILHHVGDQIAKLPIEIRDQLTTTGKLEGRLRQLERIDTTTASTMAGEYRLSWLLPLIDQDRAARRQVRQLERDIDELLDQHGTTLRDEPGIGPIAAATLLAEVGDPFRFARESRFARWCGTGAVAVSSGEGDAKPLKHRLDFRGNRRINSVLYVASVTQQRDNDDARTYIERKLSEGKTRREARRAHKRHLANRVIRRMWRDESQRRHPATTIAA

SEQ ID NO: 501912 - protein, 439 aa, unidentified
MSRGDKRRNAKLARLRELVPTDNAILGIDLADEKQAIVLTDHDSQVLARTRVKAKAWRLGPVLRWGREQARKHGFADVTVGCEPTGHRWRVLDQLAAQQNMVLVCVQPLLTGRARESEDYTRDKRDDKDAVLIARLVAQLDCYAPERTDETWARLRHLGARRDRLISESTACVQQLRDLLECAWPAVLSAAAQPFDSVNWCAALAVVLERCNGDPRRLARLGPRGFEAAVRRELPRWGGQRAWRRIITAVFTALTDAAGVFAQRRGALERARWVLADWRTCQARLAEVETRMVEVLDELGLTEYLTSIPGISAVGAAAILAETGDPTRFDSPRALVKHAGLCPRENTSGTYTGQSRISRRGRPRLRLAAWRAVWGALPNNPVMAARYQHLTTRERNQLNDGQARAAIAAALLRWIHVIVTRRVTWDAALAGANELPAAA

SEQ ID NO: 501913 - protein, 373 aa, unidentified
MEYTTVYVGMDVHKESFTLACYTNEKEEAEYVQRTEAHYSKVLSYLEAMRFHYGDDVTFICGYEAGCLGYTLYHQLSSHHVKCVILAPTSMPTQQGKKKVKTDKRDAKKISKCLAHHDYSPVHIPTAKDEETKEYMRMRDDHKLALKKIKQQILSFCLRHNLRYSDGSKHWTRMHLQWLRELNPGDLYKEILDEYLATYYSLVAKLERLDRRIEELASDEEYSENVHKLSCFLGIKTQSALSVITETGDFKRFASAQQYASYLGLVPGEDSSGEDQTRLGITKAGNRHLRCLLIEAAQCYSRGQIGHKSKDLKARQQSNPPEIVAYADKANERLRRRYYRMVLRQNKRHNVAKTAIARELACFIWGMMTGNVA

SEQ ID NO: 501914 - protein, 412 aa, unidentified
METQIERCAGLDVHKETVVACVRVPGAGRERQQLVQTFGTTTAALLALRDWLVAHGVTVVGMESTGMYWKPVYYVLEDALECWLLHARHLRNVPGRKTDVADAAWIGQLVEHGLVRPSFVPPKPIRALRNLTRYRKAQIEERTREAQRLDKILQDAGIKLSSVASDVLGVSGRAMLGALVDGTRDPAVLAALARGTLRKKIPALREALRGRFSPHHALLVGTMLAKLEFLDEALAQLAAEIEQVLAPFAAAAALRRTIPGVDRRTAEALIAEIGVDMSRFGTASRLASWAGMCPGHHASAGRRGPGTTRKGSKWLRTSLTEAAKAAGCTKATYLGAQYARLRARRGAAKATVAVGHSILVAAYHILDRRQPYHDLGPDYFRRRHSREHQTRRLVRQIQALGYKVTLEEVAAA

SEQ ID NO: 501915 - protein, 340 aa, unidentified
MRLIGCDLHASQQSIAMLDCDSGAVNEKTLKHEGEAVREFYASIPPPVVVGIEATGSMGWFLRLMEELAIECRVGHPTAIRKAETRRQKHDRRDAALLLQLLAEDRFPTIWMPSTEYRDLRSLLLHRHQWIRMRTRVQNALHAIVLAHGVRRGHTLWNRDGQALLASLPLPPHTADRRSELQALYQHLQAHIDRLDDRVEHVANERARATLLMTHPGVGPVTALATEIFIGDPARFLDGKALASYVGMIPREYSSGKRQRLGALSKQGNPFLRFLWCEAAAHAVRRDPELQRFYRRKVLQKGFAKARVAAARKLGIRLWIMLRDQIDYTEFCRRGLARQS

SEQ ID NO: 501916 - protein, 412 aa, unidentified
MHYYVGIDIAKSFHVACVVNQDDKVIKKSLKFNNDESGFEELLLLLNSIDEVSTFTIGMEATGIFFENLYLYLSEKGFNVILLNPYQTNRFREMDSMKKVKNDNIDALMIAALIKSGRYSKAYVSEDMYQSIKSLYRHKNNLLEEVKKHKRQISTLLAVVFPEMEQVIKDPFNVTGLALLEKYPTAKHYHHASVDRILKTFRGIKGNNFNGEKASKLLELAKHSIYQGNGVDERAYVIKSHIRVIKLLQEELKELESEMLKLFNQQVSLNADEEQEVMDIIDNLRTIPGVSDKTIFALISECGDLSRFKNNSHLIGYLGLYPTLEQSGNKLSYGPIAKRGAKLAKKALYQAAIAAIRHNNELNKLFRDKVSQGRAKKEAVVIVARKLAHIILAIYKNNVAYNPQRVFQASVS

SEQ ID NO: 501917 - protein, 417 aa, unidentified
MDTLFAKVAGLDVHLKGIQCAVRCRQESGKLLAPVRSFGTMTRDLRALADYLQALGVTHVALEATGVLWKPVWNVLEGRFTLLLVNPRHLKKVPGRKTDVSDAEWLAQLLQCGLLRGSFVPPRAVRQLRDLTRHRAQLTGEQTRVANRIHKVLEDANIKLGAVASDVLGQSGRAMLRAMLGGEQDPKKLAELARGRLRGKMPQLRLALEGNCTEHHRYVLGRLLSHLSYLEHQADQFSGRIAHRLSELLPAAAAERLDRIPGVNRITIENVIAEIGVDMAVFPDEHHLSSWCGVCPGNEESAGKRLRSRTRKGNRWLRRALTEAAWAASHTKDSYFAAQYRRLAARRGKKRALVAVGHSLLVIIYHVLKEQVEYQDLGPDYFDRLEPERLRRYLVKRLQGLGFEVTLSAKKLNDSAA

SEQ ID NO: 501918 - protein, 335 aa, unidentified
MQIYGIDLAKEKFDVSFFDLTSKKVSNQPSHKVVKNNLKSIGRFLETLPSDAVLVAEHTGVYGDTLLKCCMDSNVKIAFVGGYVIHRYRATPDRAKTDVLDCALLREFGERYPDKLKYRKFPEEALYELRQLARHREMLVEQRKQQITADRSEDCRPIRSLAVKRSMDRIKEMLDTEIAETEKEMLKVINGHDSIHHNYELVKSVDGVGLITAVELLVKTENFTKITTARQYAAYAGTAPYEKSSGKMDKGAHISKIGNRRSKTLLYICAESARLHNKEIKLYYERRTLIDKKPRHYVLNAIANKLLRIIFTLVEKGEVYDVNYIRQDPRLVKHN

SEQ ID NO: 501919 - protein, 426 aa, unidentified
MRKTYQICCGVDVHKTFLVATIVKTTNNIPHYEKKRFSTFAKDLRLLKHWLLNNNCFDLCMESTGKYWIPVWNMLEDKINVTIANPKWVSAVKGNKDDTKDSKWIADLFRMGIVPGSYIPCRAIRILREFTRYRYKLVCMRSSEKNRYQNAFTVSNCNLDSIVSDMFGKSAMDIENYLLEIDMENFDPEYCKSLLQRSLKKKADSVIESVESFNMIVEQKERVKIIQEHFNDLDTRINRIDEQIEKLIVTNKWQSAISLICSIPGIDRHMAITIISEIGTDMTPFSSSKRLCCWAGLTPSNNQSAGKKKSVKITRAGIYLKPALVQAAHAAVKSTTNPYFKNKYERIYKRRGKKRAIIAIARKILTAIYHMFKNGELFNPCDIYKESIPETVQLHQKKKAAKQAIKLLVNLGLIAEGAVSLELLAS

SEQ ID NO: 501920 - protein, 320 aa, unidentified
MLSFGGIDVSKDRLDIMVLPDEQCSWVSNDAAGWAELVEQLRGSSITAIGVEASGGYERGVVRALLAAGMSVRQINPFKLRQFAKASGTLAKNDRLDARMIASFVAIMPTRPAQRQAPMIEQLAAMLTVRRQLSDHKVATENASRLLEGAMLQRLSRRRIAGLTADIDLLDQRLVEIVTADPALAHRFRLLTSMPGVGAVLACTLIALLPELGQMSRKQVAALVGLAPYDFDSGKLKGRRCIWGGRARVRHVLYMAALSASNWNPGLKAFHDRLEATGKKPKVVIVAVMRKMITTLNAMLRDGTTWVDRYSGRRSASTAR

SEQ ID NO: 501921 - protein, 424 aa, unidentified
MHKHERADRKRGSRLQVSPSRRNMRYVGIDISSEKHTVAIVDGESAVLVKAKDFTEDHIGYAVLFEILGEDVEDHFIAMEATGHYWQNLFAALVAKGFKVVLLNPIQTRRFADSSLARTKTDKIDATTIARFAAQKKPAATVMPDEATLELRELVRMRDRYVQDFGDRVRQLHRIVDLGFPELTRFIDDLGTARATTILRHYPTAPDLAKQSPKKLAKLIYDGRHVVGDVLAKTLIDAAKTSIGRHHGRAYKMQAIDLCEDIDMLRSRIKRLDEDISNTLDKHDIGKLLMTIDGIGETTAARIVGEVGDPSAFRDAGALAAYVGVVPALWQSGKRQSMRAGLAPIGHADLRAKLWMPVLVAVRRNAWLKAFYERLLARGKLPKVALIAAMRKLLAAIYSVAKNRRPFTPILATAASTTSVENSC

SEQ ID NO: 501922 - protein, 390 aa, unidentified
MFYLGIDIGKFNHAAALMNQRGKVISTLPSFPNTRNGFQNLLALITEHLPPTEELRVGMEATGPYWIPLAEWLKTHGWIPVILNPIKTASLRNYGVRGAKTDNIDSVLIANTLRIEGEQPQPASPKLSEELRHFTRLRTDMTKDRTRIGLRVTSILDRLFPELLSSFSKTLSPSCLALLCEAPTPSKVLALGEEKLATLLRKASGGNLKATQAKEIMDKAAQSVGVSSQSMEEVLALLLEQINLINSQLRVVDHRITQLYEQAGVCFTSIGGVGTLSAASILAEYGSVTKFTQPKQMVAFAGIDPKLRNSGQHQGQVHISKRGPHYLRRALYLACQGVVRNDDYFHSIYQRHRDKGKSHKEAIIAVINRFIHVLYAIWRDNRPYYPLTQA

SEQ ID NO: 501923 - protein, 338 aa, unidentified
MHNITIGMDIAKSVFQVHGVDKRTGTVIKKRLARSKLLGFFGKIEASLIGMEACSTAHHWARELEALGHEVKLLPANYVKPYVKRGKNDEIDAEAVWEALERPTMRFVAIKSREQQGVLALHKVRSQLVGQRTRLVNLLRAYMAEFGLVAPQGIWRITELKTIVGDKADERLPALGRVALTPVVQQLDLLASAIEDLDRVVVAHCKSNETSRRLSAIPGIGPITASAFVASVGDATAFKSGRHFAAWLGLTPKQHASGLKDRKGRISKMGNSYLRTLLVLGATAMMRQARRSQTPLSAFVGRLLAKKKSVRLITVALANKMARIVWVLMAKGESYRTA

SEQ ID NO: 501924 - protein, 367 aa, unidentified
MKKVSTTVAKQSRNISQQKLTIGLDLGDRNSWYCVLDEGGQIQLEQRVRTTAKALQEVFGPMACSRIALEIGTHSPWISRLLSELGHEVIVANARKVRLIGESRKKDDRLDAQTLARLARIDPQLLYPVKHRSAQAQADLMTIRARAGLVRARTALVNTARGLAKSYGERLRGCNVRNMNPEKADSLSPELQAALEPLLNAIESLSERIVEYNERIENLAQQSYPQVALLKQVKGVGTLIALTFVLTLEDPHRFRKSRDVGGYLGLQPGRRNSGQSEPQLHISKEGDPYLRTLLVQGAQHILGPFGIDCDLRRWGLKLAERGGKSGKKRAIVATARKLAVLLHHLWVSGEVYEPLHNSSRLTVAAAA

SEQ ID NO: 501925 - protein, 330 aa, unidentified
MDRQGKKLVHTNVKDNDFAFFLKLVQPYRHDLTVCCECMFGWYWLADACQAAGLKFVLAHALYVKAIHGGKNKNDRIDSEKLTHLLRSNLIPPAYVYPAQKRPLRALLRQRIFYVWRRAELLARIHSHQLAHNRVAAKQTRCSRDPWEEQLLKAEDHPLRQLALKNDLAMIRHFDRKILEVEKELQRQTKQLASREYALLQTVPGIGETLGLTLLYEIGEIERFPTVKDFLSYCRLVKGTVASAGKIKGLRGAKLGNPYLRWTFGEAAVIAKRDHFRIRPLAQRLEARMAGNKFKANTVVAIKLARAVYFMLKNKTVFEPERLVAALARN

SEQ ID NO: 501926 - protein, 423 aa, unidentified
MAYRIAGIDVHKKKLAVVVADVEVDDAYQFERRWFGSNPEQLQRLAEWLIEQRVEEVVMESTAQYWKPLWSALERYWKPSCQNREGAGKMSGTLHLAQALSNRGRRGRKKDFPDAERLVKRLISQELTLSFVPDTEQRLWRTLTRTRYQRTRDKVRLQNQLEALLEEAHIKLSSLVSDLLGVSARRMLHALADGETDPAAVAALAHQCLRATSAELRDALGACTELNPVYRRLVRLALDDLQLIEQQIGQLDQEIASLLREHQDAVQRLAEVPGLGVDSAQQIIAEVGAKAATFASAKNLVSWVGACPGEEESAGVNRSKRSPKGNRQMRRILNQAANAAAKHKGSIFEIVYRRLVLRLGHNKTIGAIAHRLCQLIWIILHNGVRYEERGPSVCEKAKRVRTSRMIRTLRTLGYRVEPVVIPA

SEQ ID NO: 501927 - protein, 413 aa, unidentified
MEYKTITAVGIDVSKGKSTIAVRRPGGEVVLVPFQVNHDAAGLSGLVKTLREIDGDIRVVMEHTGMYWRPIALALKEAGFFVSVVNAILIHDFSDNSLRKIKTDKADSMKIANYALAFWQELREYSNEDETRQLLKTQSRLYERTQSAGVALRNSLISLIDQIFPGANHFFGSIPRKSNGHVKWVDFVKRFWHKDCVAGISLAAFSAVYRKWCSNNGYKFYSSDAEKIHRSARGAVATFPKNDSTKLLITQSVDSLNAVYDALYVMRGEMMRLASLLPEFEVVMSIQGAGEITGPQLMAEIGDVRRFTYKGALVAFAGVDAPPFQSGAFDSKSRRVSKRGSPHLRRTLFQITSILLQHSDPANPVFQFMDRKRAEGKHFYVYMVAGAAKFLRIYYARVKAHLEVSDTGSDNAA

SEQ ID NO: 501928 - protein, 412 aa, unidentified
MRHRKEQYIYVGVDLHKRTHTAVVINCWNEKLEVIEFENKPSAFPAVVNKVKKHVQDGMTIVFGLEDVGGYDRSLAVYLVENHFLVKEVNAALSNWKRRSYAMTEKHDSWDAENIAKLLLDELDRLPTAQPHDDYWILKQLVMRRYSLRDTLVMLKNQLHSQLSYNYPSYSKFFSEVDGRTALAVWHEYPSPYLLEDVTLEALAEFLRKNSNNVCSTKKATLILESVQADGNTKRNGQEYRDFLVRSHVNQIRDVHREISDVEDNIRDIMQKLDFKLNTFTGIDNVTASAIVAEVGDIARFTSADKLAKYAGLTPSQMSSGGRGKDRNQRQGNRALNKILWGLAVRQVQTARTSKKPLNPLFHAYYEKRLGEGKKKKQAIICIMRRLVNILYSMMKNKTEYRLASLPETLAS

SEQ ID NO: 501929 - protein, 477 aa, unidentified
MAKRQTKSSRTTKSSARRGKPKKVVADDLQITHAHAAGIDVHSREHWVAVPANSVSGPPRDQLPAHVRNFGTCTADLELLADWLTECSIKTVAMESTGVYWVPLFELLERRGFEVFLVDPRQTRQVSGRPKTDVRDCQWIQRLHSYGLLAASFRPSDEVCVLRGYLRQRQMLVGNAAQSIQHIQKALEQMNIKLTEAVSDVTGVTGMLILKAILRGERDPKRLAKYRHDNCKQTEEQLARALQGNWREEHLFALKQALKAYEFERRQLKECDAAIAKYLKSMEDKSGGEVLDPKPTKSKSATTPTFDARTLLFQASGKDLTLIEGIDQSSALTILSEIGLDMGKWATEKHFTSWLGLCPQHRGSAGKIKNRRLRGGANRAARAFRMAAQGCHHAKNAMGAFYRRVRSHAGAAKALVATARKIAERVYRLLKYGEGYVRQAMDAYESSYRIKLTKGLAKKAAELGYKLVPNAAVASTV

SEQ ID NO: 501930 - protein, 346 aa, unidentified
MMIIGCDFHPSWQQVSWLDTETGETGEQKLVHAAGDAERFYRQMPVPSLIGMEATGNSQWFVELVEDLGHAQWIGDAAQIRASYVRKQKTDKRDAGHLRKLLEEGRFPKLWTADREQRDHRQLVMHRHKLVQIRSRVKNELQHLSLNKGMQKQNKLWSAAGQKALRELRLKPWAACRREDLLQLLAMLDQQIGKLDAAVQQAAEHNPQAKLLMTQPGVGPVTSLAFVLTLGDVSRFPRGKQVASYLGLIPREHSSGGRQMLGSISKQGNRLMRALLVEAAQTAVRYDPGFRKEYLHRCHQKPKGVAKVAAARKLAVRLYWMLRTQKPYPEVVRIESSPRVALVGAS

SEQ ID NO: 501931 - protein, 331 aa, unidentified
MIFSTIIGIDVSKLTLDLHVLPNNQDCQTKNDEKGFKEIVKWLAKVGQIDLSATLFSFENTGFYSYKLSLWLQDKGYRFVMLSGLELKRSLGISRGKSDEIDARKIAEYTFLRRDSITQTILPEQGIIRMKRLLSLRNKLIRQRSGFMATLREAKRAFSRKEDPLYYKIQEDLLKKLSIQIERIEKELHQIIENNSTLKEQYHLILSIKGAGPIAAFTFIAITHGFQKFQTWRKFACYAGIAPFPYRSGTSIIGRNKVSHLANKKIKSLLSNMAVSAVQHNTELKLYYNRRLDDGKNKSSTLNIIKNKLVARIFAVIERGTPYVNTAKFAA

SEQ ID NO: 501932 - protein, 378 aa, unidentified
MSKIRFVGLDVHAETVAVAVAEPNGEVRSLGLISNRPESIRRLVRKLEPVEQLRFCYEAGPTGYVLYWQLTALGAKCEVIAPSLVPTKPGDRVKTDRRDALKLARCYRAGDLTPVWVPDAAHEALRDLVRAREAAKGDLLRARHRLSKFLLRHGWRRPESIKSPWTNAHLEWIKTKVHFEQPAQEIALTDYVHQVEHLVARIERLDQAVLEAARSVPPRMRAVIEALQALRGIAQVTAVTIVAELGQISRFAKARQLMGYSGLVPREDSSGERERRGAITKTGNAHLRRVIVEAAWAYQFRPWLGGYLLKRQVGLSEEVKEIAWKAQHRLHARYRKLLAQGKNKPQIVTAVGRELLGFVWAIGVNVETRMCEPKQVAA

SEQ ID NO: 501933 - protein, 416 aa, unidentified
MKLFVGIDVSSEKLDTCFLTDDLVVLLETMYTNDTIGALDLKEELLSLHKEHHFDQIVIGMESTSMYSFHPAMYFQFDDDLQGIGAITTIEDPHRIKQYTKMFDTDKTDTIDAFMIADYLRIQRFTNSPIREEKYMALQRLTRARYQMVQQLVTTKQHFIENLSYKCNTLRKELRDAELSTSVFSATLLSLMTEEMTLDTMAEMPLEDFAAFLQKKGHGRFSDPEKLGKTIKKAIRSSYRLGQVMADSIDVVLGIVAREIRGLEKAIKDYDQAIIDLVQAIPEYKCLTSIPGIGPVYAAGMLAEIGQIERFDDQTKLAKYAGLAWKRSQSGNRESEQTPLSKKGNRYFRYYLVEAANSVKKELPEYKDFYKKKYAETPKHQHKRAIVLTARKLVRLVDTLLRNRQLYTPPRSVTEK

SEQ ID NO: 501934 - protein, 343 aa, unidentified
MHTITTIGLDIAKSVFQVHGTDAAGQVVIRRQLKRRAVLAFFQKLPPCLVGIEACASSHHWSRELQALGHAVRLMPPAYVKPYVKRQKNDMADAEAICEAVTRANMRFVPTKTPEQQGCLMLHRTRHLFIRQQTAVINSIRAHLAEFGIVAPVGRKGVMELLQVVADPSDKRVSEVTRACLTALGNQLLSLKEQILEFDRMIMAWHRSNEPSKRLRYIPGVGPMLATALVASVADPKTFRSGRNFSAWVGLVPKQHSSGGKDRLGSISKQGDRYLRSLFVAGALSVIRYAKIHGTKHRPWLTALLARKPTKVAAIALANKLARMAWAMMARGERYRNPVALAA

SEQ ID NO: 501935 - protein, 366 aa, unidentified
MIVIGTDTHKSTHTCAAAKAGTGELAGELTAAARKRGFRELLDWGRDLDPERIWALEDCRHVSGSFERFLIGQGERVIRIPPKLMGASRKGERTRGKSDPIDALAIARAALKDGPQTFPAAHLDERSLELKLLLDHREDLVRARSADQQRLRWHLHDLWPELELPAGCLDRALWLDRIARKLARAEQGARVRVSRELVRAIRERTRRASGLEGEIAALVRAQAPELLALPGCGPLSAAKLLAETAGVERFSTDAKLARLAGVAPIPASSGRTDRHRLDRGGNRQLNCALHRIAVTQGRVHPPARAFLDRKQLEGKSRMEALRALKRHLARAVWQALRAARSRESINSLSQLTDSPNLRPAAGLALT

SEQ ID NO: 501936 - protein, 342 aa, unidentified
MEYYVGLDVSLKQTSICVVDQAGLVVREGVVDSDPEAISVYVRSKAPDAVRIGLETGPTSTWLWTELKRLGLPVICIDARHAKAVLKMQINKSDRNDAIGIARIMQTGWFKEVHVKDIDSHSVRALLASRALLVKIKRDLENHVRGLLKNLGLVIGRAKFNVFAVRAEELIEGRPELIATIRPLLEARNAVGQQVSELDRKVMNLARHDAQVRRFMTVPGIGPITALAFKATIDDPTRFARSRSVGAYVGLTSRRHASGEVDWSGRISKCGDAMLRSYLFEAAGVLLTRVPKWSAVKAWGVRLAKRNGLRKAKVAVARKLAVILHRMWIDGTEFNWSKEIAA

SEQ ID NO: 501937 - protein, 398 aa, unidentified
MHKDIHVAVVIDCWTNILGEITFENRPSKFDKFMQDVKKIYKDLTPCFGLEDTRGFGRNFASYLLGHKFTVKHVNPAYTDAMRSSAPMSKKNDAFDAFCVAKVLRDMVDTLPDEEHNDLHWTIRQLVKRRNSLVKGIVIAKNQLNSNLTNVYPSYKKYFCDVDNKTALLFWEKYPHPQYLKGVTPELLLEELRTIHKGMKQEQAEMILTLSEQNSPKEKDFQYERDLIIKSLVREIRFKKQENEEIDNELERLVDLTGYKLQTMPGINLITASNIISEIGNVQRFPNSDKLAQFCGVCPVNFSSAGKGKDQRSRQGNRVLNAIFHFLAIQLVQISPSGKPRHPVFRKYFEGKIKEGKTKPQALVCVSRRAVRIIYGMMRTKTEYKPFEKVQEVTGIQK

SEQ ID NO: 501938 - protein, 383 aa, unidentified
MDASHFESEVSGELGEGSGPSEPTASKCPRWKVFSLHRQPGGSEMNRIVVGVDTAKRVFQLYWVEAETGEIVALQLKRERFLEHFATRSHCLIGMEACGGSQHWARSLQKLGHEVKLLSGRMVKPFVVGNKNDAADARAIWTAVQQPGIKAVAVKSEEQQAVLALHRMREQLVKFRTAQINGLRGLLTEYGEVMPQGRAGIKRDVPGALGRLADRLPAIVIETLREQYARLGELDEQIGQIEQRLRRWLREDSAAQRIAAIPGVGLLSATAAMATMGDAKVFKSGREFAAWLGLVPRQTGTGGRVRLLGISKRGDKYLRTLLIHGARAVLMHSKSPPEWLSELMKRRPKNVAVVAMANKMARTIWALTAHERAYQSGYVSRPA

SEQ ID NO: 501939 - protein, 342 aa, unidentified
MKEVSIIGLDLAKNVFQVHGNGADETPVVRRKLRRAEVLPFFAKLPACLVGMEACGGSHYWAREIAALGHDVRLIPPSYVKPFVKRGKTDAADAEAICEAVSRKSMRFVPVKSADQQSTAMVLKVRELLVRQQTQATNALRAHLSELGIIAATGIAKHAQLISIVHDQADSRVPDAARFALKALVGQIEALSGELKRLERGIVATAKHDPDIQRLATIPGVGAITAASIKALVPDIGGFKSARHFAAWMGLTPKPHSSGGKERLGGISKMGNPTLRKLLVLGAMAMLRRAKNNEAGLDWVRRLLTRRPGKVVAVAMANKTARVAFALLSKGEVYRKPATMAA

SEQ ID NO: 501940 - protein, 392 aa, unidentified
MIYVGIDIAKDKHDCFITNSDCEVLFKSFTISNNRDGFETLFQKIQSVSDDLTKVKVGLEATGHYSYNLLGFLLDKGLPTYVINPLHTNLYRKSLTLRKTKTDKVDSRTIATMIMSDMNLKSYSDISYHNEELKSLTRYRFDKVKERAKLKTSISRLVNILFPELEKLVPSLHLSSVYALLSEFPGAAQIAASHLTKLSNLLSQASKGRYGKETAILFRETARSSIGSVMPAKSLELKHTIKLIQELTAEIDEIEAAIKQIMDEEIHSPILTIPGISYRMGAMILAEIGDFNRFDSADQILAYAGMSPSTYQSGQLNNCYSHMEKRGSRYLRYALYNATKYVCQWDESFSAYLAKKRSEGKHYNVALSHATKKLVRLIFAMEKSGRTYQPAA

SEQ ID NO: 501941 - protein, 415 aa, unidentified
MEVLHPRCAGLDVHRDSVVACARLVRPGGVERHVETFGTTTSELERLARWLDGHAITHVAMEATGVYWKPVWAVLAEMFEPVLANAAHVKNVPGRKTDVSDAMWLADLLAHGLIRSSFVPPLAIQALRDLTRTRKQLTREKASHVQRIDKLLQAANLKLGSVLSDIMGESGRAILDALAGGESDPERLAGLVRARLRASRADLVEALRGRLAAHQRLLLGLHLGQVDAIDAAIARIDAELGDRLEPFRDAVARLTSIPGVGALSAAVIVAEIGLDMGRFPTAAHLISWAGLCPRHDESAGKRRSTRLRPGDPWLKTLLVQVAWCATRAKDTYLRALFGRLRARRGPRKAIVAVAASILTAIYWMLRRGVAYQDLGADHFERRDRARLAARLTRKLRELGFDVTLAEPAPRMTVSS

SEQ ID NO: 501942 - protein, 323 aa, unidentified
MTDSQRSAQPILIGIDVAKDKLDLARSDRDELTTWVNEDHGIAGLVKVLRAARPELIVVEATGGYERPVVDALLDAGLPVAVANPAHVRHLARGLGILAKTDAIDAKVLLAFARHARPRLTEKRSQNRVELEALVTCRRQLLHTRTEQTNRRGVTASARARQALDAVLTTLDKQIERLDEQIAKLIKDDDDLNWMDQIIRSVPGAGPVLSATLLAELRELGSLDRRQAAALTGVAPFNHDSGRFKGQRSIRGGRASVRSVLYMATLAAIRFNPIIRRFAQRLQQQGKTSKVVIVATMRKLLTILNAMLRDRIVWSQLKLVQNI

SEQ ID NO: 501943 - protein, 381 aa, unidentified
MIRYHVGIDVGKNKHHACVHDTVEDRFTKVFPFTVNREGFERFLLFLQRQGPAEEVLVGVEASGPYALTIGHFLLEYGYTVVELKPFQASQFRKAQGKKAKTDRVDARSLADFLAVGSYKPLALGDPLRENLRELTRFRADLVKDRICQVNRLQETLAIAFPELGAHLASLDSPTALALLAAYPGPQVLVEAGTQAVGACLIEASHRRLGSAQAQAIVSAAGTTIGLLQRQQSLAIKLEVLAQGIISINAQLQRVEVAIEELFHRLHYDRMDFPVGGIQSLASILAEIDNIHRFPTLKQFLSHFGWCPQTFQTGGFRQEHPRMSHAGNRYVRRMVWMLAIMAVKTVPAYRDYFHRRTAAGKKKMNTIVAVGRKLLSVFMLF

SEQ ID NO: 501944 - protein, 395 aa, unidentified
MFIVGIDVAKRSHEVCMITSDGQTVQRPFSIRNNCTGYNLMLEKIRKHTNIKSQIVFAMESTAHYWLALFTRLRKDGYHVILLNPIQTSAMRDMFIRKIKTDAKDSFIIAELIRFGRYAESNVAQDRLLALKELCRNRFYLVDMAGDLKRKLIALIDRVFPEYEAQFDTIFCKSSVALLKKYPTPQKLSNAHLDKLTELLWNSSNGHFGDWKARELRELARNSFGVEDCDGAYSTLILLMLDQIQSLSGKADALEKEISRLFQSFDTTVTTIPGVGPIIGAVILSEVGDISRFSSADKLAAYIGVDPSVNQSGEFQAAHAHMSKRGSPYLRRCIWMASQVAVQRDPMFRAYYEKKAAEGLKYMTIIGHVTRKMTAVVFAILRDHKVYEPVLPTAA

SEQ ID NO: 501945 - protein, 459 aa, unidentified
MEIVTLGIDLAKNIFALHGVDAGGKVVLQRPAVKRAKLLELTASLPPCRIGMEACSGAHHWAREMTRQGHDVRLIAPKFVTPYRMSGKRGKNDAADAAAICEAVSRPNMRFVPVKTIEQQSELCLHRARQGYVEQRTGLINRIRGLLSELGIVLPQKAETIRRELAHLLEDLPGHCNTVVADAITDLERLDARIAEYDRHIAQCAKANADARRLMQLSGIGPTTASALVATIGDGHDFTSGRQLAAWIGLTPGQHSSGGKARLGRITKAGDRYLRTLLILGARSVLQSGRKKDDAISRWTQDVEGRRGYWKAVVAMAAKNARLAWAVCCGAGRVSGCTDRGRWRARSAAGHGSTHRPDTLHKVSPDGCVDGNRFKTCAGECSLNSRSLPAGRMSSTDEGSPRRASFIRVCCTRAASMTVCSVAVANLVPQACAVPAKPEQQHRNSRCAPRGRDSTTPNT

SEQ ID NO: 501946 - protein, 400 aa, unidentified
MLSIGIDVSKGKSTVCGMKPGGEIVYTPFEVQHTREGMSELVSLLRSSGEEVRAVLESTGSYHCPVVAALLENGIFVSVVNSLRMKRFCSQSIRKVKTDRIDAMQIALYGLAYWQELQPARLPEDTYRELQLLARQYYQMTSILIKAKVDFNAICDQVLPGMQELMNDHAGRHKLSDFVLRYRHTTHILEMGETRFRKDYCKWAEKKGYRNCERMAAHIFATAQNGIPVLPNAPSTQIVITEAIRVLHTVEASRDAILTQMQALAKTLPEYSLVREMPCIGDTLAPRLIAEIGDVRRFHSKRALIAYAGIDAPPYQSGKFCANNRHISKRGNRYLRKTGYEVMQSYVMHKPANDPIFTFIEKKRSEGKCGKLAMVAGLNKFLRIYYGKVTELYRSLPAIE

SEQ ID NO: 501947 - protein, 359 aa, unidentified
MDAQEAAVRRIVGGVDTHKDLHVAAVVDEQDRVLGTQSFASTRQGYRQMLAWMRAFGEVQRVGVESTGSYGAGLLRFLQQAGITVLEVTTPDRQDRRRRGKNDDFDAQNAAHAAFAGIRTVTPKSRDGMIEALRVLSVCRKTAVAARRIALQMIQNTIVCAPESLREMLRRMTRMQLVRTLAAWRPDLTAYRDVEAAYRISLKSLARRYLELHDEIADLDAMITAIVEELAPNLVARNSIGHVGAAQLLLTAGDNPQRLRSEAGFAALCGVSPVPASSGKTARHRLNRGGDRAANSALHIIAIGRLRTEARTQTYVAKRIGEGHSKMEAIRWLKRYIAREVFMLIKQRQKEINQTRIAA

SEQ ID NO: 501948 - protein, 402 aa, unidentified
MAESPTRYIGLDIHKEYFVAIGVNEQREIVFGPRRVSVYQLEDWILRHLTGEDAVVLEMTTNTYFFYDALLPHVHSVLVVHPPHVALVTKVSVKTDKKAALALAQLHAAGLLEGVWIPPHAVRDLRALLAQRQKMVRLSTMAKNRLHSLLHRNHLVLPGKPFSPDQREWWHDLALSETEQVMVNSDLDTLEFAQKQIEKIEECLKQESVQDPRIPLLIQLPGVAVLTAITILAAIGEIERFPNTKKLVGYAGLGTRVHDSGMKHATGRITKAGRKDLRRAMVNAANHAVLHHVHWKKELQRLEPRLGRSKAVVTIARKLLVAVWHVLHEEVADRFADPHTVAVSFLDHAYRLGVKKHLKGKSALAFTREQLDRLELGQKLETVRWGSNRYKLPPSRLLPQKE

SEQ ID NO: 501949 - protein, 326 aa, unidentified
MQGKEASEQETKTKSNVGIDVSKDWLDVHVLPADERLRVPNTCEGIRQLKRWLMRLDLALVAVEATGKWHRQVQRSLVESAIAVAVVDPFRVRMFAKAHGIFAKTDRLDARVLAMFAALMAPSARPPAPQALTELAELVTARMTAVDAQTALKNQRSAATVKFLQRQLDRGIERADQDIEALDAAILKRIKLDEGLARRYTILTSIPGFGFVTAAVLIACLGELGGITAKQSGMLAGLAPIADQSGKREGARVIFGGRAPVRRALYLAALSAARFNADMRAFYQRLRDDGKPAKVALIAVARKLVVLANTLIGHDRMWQPTPPKCA

SEQ ID NO: 501950 - protein, 411 aa, unidentified
MNPVYGVVAGIDVHKRMLAVVVAVLGEQEIEYRRRKFGTTYGELDQLVEWLRQQQVSEIAMESTAQYWRPAWIALEGSFRLHLAQPRSTLAPRGRKSDFADATRIVRRLLAEDLTLSYVPDREQRQWRTMTRMRVRMSTQQVRLRNQMEGLLEEGRIKLSSVISDLLGVSGRSILWAMVHGTSDPAQLAALANHRLTVPADQLQEALRGQLDPSQRLLLKMLLEQWEQLAAHIERLEIQMTQALQGWEPAASRLREIPGISHVAAQQIIAEVGPEATAFLAPEKLSSWVGVCPGTQQSAEVSYSSRSAKGNPMMRRLLTQCAWAAVKVKGSIFEQKFRTLLPRLGARAAIWAIAHRLLRVIWKLLHDKVRYIERGILDNAAVERRRKRYVRQLRKLGFAVSLTPIAAEPPL

SEQ ID NO: 501951 - protein, 344 aa, unidentified
MNNVSILSIDLAKNVFQLLGIDQSGKSCLSKRLSRAKLHEALFNLPACEVVMEACSSSHYWGRVCLSAGHQVHLIPAQHVTPFVRGNKNDKNDCMAIYEASRRPNIRFVPVKTEQQQAILILHRMRERALASRTACINQTRSLLLEFGIHIPKAYSIFKQNIHELLSESIQPVIRLMLLEVHEELEGYDKRIRLLDSLFRQSNAQNSSAGIMQSIPGVGPIIASAFSASIDKGQAFKCAKDFSVWLGLTPKQYASGEISRLSGITKRGDCYLRKQLIHGARTVVSHAHKKDDDLNRWITALKQRRGVNKAIVATAHRLARLMWILLQKNEFYRPMFNNTVEKHA

SEQ ID NO: 501952 - protein, 369 aa, unidentified
MDKSTTVIGLDVHKDSIVAAILPSHADRATKVISLENQPTALRRFMQRLEDRGMRVFVYEAGPCGYTLQRDLVAQHERVVVVAPALTPVRPGDRVKTDRRDAEKLARLYRAGELTPIRVPTRTEEAARDLVRIREDILIDRLRARHRLSKFLLRNGRLYHATKAWSVGHRKWLYTQRFDLAPLEHTFTAYLRTLEETEARLATVTQQIEDLAHTAPYRLLVQALRCLKGVDTLSAFTLVAETQDFRRFPHAPAYMSATGLVSAEHSSGARQYRGSITKTGNAHLRRALVEAAWSYRSRNRVSPVLAKRRQGCAAPVIQIAQRAQDRLHRKFWRLMSRGKTSQVAVVAVARELAGFVWAIAQLVPPATVA

SEQ ID NO: 501953 - protein, 356 aa, unidentified
MRSDIKYIGLDVHKEAIVIAVLNDNGKLVMETVIETKASSILQFLHGLRGELHVTLEEGTWAAWLYDLLQPQVQQVLVCDPRRNALLKEGSKSDKVDARKLAELLRAGLLRPVYHGENGLRTLRELARSYQTISQDLTRVMNRLKAVYRGWGIPCAGTKVYAARYRKEWLKKIPQAGVCRRVELLYQQLDGLQALRRKVRAEMLAESRKHKAAKLLRQIPCIGPIRAARLIALMQTPHRFRSKRQLWTYSGLAVETHDSAQFRFVRGQLQRSKKPQQLRGLNHNHNHEMKELFKSTATTASRGAGPFHDFYAGLLAKGIEPEMARLTLARKIAAVTLTLWKKGARFDAKQLNAQAA

SEQ ID NO: 501954 - protein, 367 aa, unidentified
MEKSSTTFVGMDVHKESIDVGIAAAGEARHYGRIAGDAASVDKLTRKLRSVHRDLVFVYEAGPCGFWLYRRLKAQGLECMVVSPSMTPRNAADRVKTDRRDSLKLARLARAGELEPIYVPDARDEAMRDLVRTREDAVCMQRQARQRLQALLLRNEIRYVGKSAWTQAHRRWISGLKLPNAAQQIAFEEYVQAVHEASERLERLAKAITAELEHWRWRPVVEALQALRGVSAIHAVRIIAELGDLARFESPRKLMGYLGLIPSEDSSGPRRRQGSITKAGNSSARRALVEAAHGYAYPARVSWVIARRQTGLSKSICDTAWKAQLRLCARFRRLAARRVPRNKIVVAIARELSGFVWAIARQVKPAL

SEQ ID NO: 501955 - protein, 340 aa, unidentified
MEVSTIGLDLAKRVFQVHGASATGMVVFRKKLRREQVLLFFASQPRCRVAMEACASAHHWARAIGELGHEVRLIPPAYVKPFVKRQKNDMADAEAICEAAQRPTMRFVTVKSEAKQASSVIFRTRDLLVSQRTQIINALRGHLGEYGVIAPQGPVHVERLICEVEDPSSAVPAAARSCLRRLIGILHGLQTEIAALDAEIAARAKRDDVARRLMTVPGIGPVIATALEALAPPPETFKSGRDFAAWIGLTPVQKSTGGKPRMGRTSRMGERTLRRLLIIACSGVVRWAKRKGTPNGSWLARMLARKPPMLVIVALANKTARIAWALITKGETYRAPAVAA

SEQ ID NO: 501956 - protein, 411 aa, unidentified
MNAVGIDVSKGKSMVSILRPLGEVALTPREFPHTAIGLEKLADAIHDAEKLGGETRVVMEATGRYHEPVASALHEAGFFVSVLNPILIHQSGGGSVRKVKNDRKDSIKIAKYGLDNWTKLLEYTPMDSVRQQLKLFSRQYNLYMKTEVALQNNLISLLDKTFPGVNELFTSPEKADGRKKWVDFVASFWHCECINHIGPGAFAERYRKWCKRNGYNFSAVKAEDVYASSLGQWTTLPKSTGTKLLITSATAELTAVSKTLATIKAEIIRLAAQLPEWDTVRAMYGAGDITAAQLMAEIGDIRRFPNRSSIVAFAGIDPEVDSSGKHNPVSKPTTKRGSPHLRKTLFQIVSTYLKRSPANEPVYQFLDKKRSEGKHYFVYMTAAANKFLRIYYARVKECLNDLESDSASDIT

SEQ ID NO: 501957 - protein, 392 aa, unidentified
MGCPMPQRNDLSRSLVPFQQDGTLVAVIELSRSSWLVAGIVPGLERHPLKKLAPDEDALLRLLHRWRDEAAKAGCAITRLAVAFEAGRDGFWLARWLRAREVEAHVIHPTSIAVSREHRRAKTDRLDTGLLKRAFLGWLRGEPGHCSMAAVPTLEEEDARRPSREREGLVGERTRIVNRMRGCLARLGIRGFGPASRGAPDRLEALCTPEGVALPPNTLAELRRDMARLRFVSDQIAEIEAARRERLRQAPAEDRPHAMVRLLARVIGVGVETADMLVHEVLRRDLRDRRAVARYAGLTGSPEESGARRREKGLAKAGSARVRRGMVQLAWRFLRFQEGSGLAGWYRARTADARAGTRKTMIVALARKLLIALWRLVTTGEVPEGVVLRPAA

SEQ ID NO: 501958 - protein, 438 aa, unidentified
MNTQKAIGIDPDSQKIVCVMVDSLVPSKKFNRTFSLTNQGLENFIKWVQEENAIIALEGLNGQSCCVEETLRKNDIIFHSFKPGDVEIFRRAVLGRNKNNKRDAESVARFALALEGQGKLKDYKRVWFPDATLQNLTREHQRLTKKITIEVSSLWKAVKSVSSDLYLFLGGNHPDSEIKTNILKQKGILTLLAYKTDISEWKNMSEDEILSAMGGKRYKNREKTITELKKIVSKIYSVSPADMLVVKNTVARLLLDKVQKHDVEQMIAQVTENNKSVKILSELNGIGVITASIIVAETVDIRRFINDDRYASYSGFGMHQKSTGDETKTQRLVHTKKFNHRLKNAFMMAAKNIVLHNPDLHIAGYFNNLRKKGLSIIESRKRVARALIRKFFKMLRSVTQVEILNIVDLKQKSRKGMASGQDRSGNSTISNIPLSAYK

SEQ ID NO: 501959 - protein, 415 aa, unidentified
MQSCLFVGVDTHKRTHTAAVFSGYFSLLATITFDNSFLGFSKFLTELENISGSNTLIFGLEDSQGLGNFLAEFLLKKGFDVMDIDPVLTDRGRRRTTHKDKSDDRDACLIAKTLISKKDSLHKVTISKNSLAIRELVKYRELLVGESTRIKNRLHVLIFNQYMEISSVFPDLFSKCALAFFARYPDPFKLKGESLDSLTVLLKSNSKGRHGKKMATEILSLASTDNMPDILTAARSSIIKKHIDRLSAIQEELKDILGILSELVLQSSYDSLTSIPGVNIVTAAKIISQVVDINRFSSPSKLAKFIGVAPVEKSSGRKIRYRKSKHGKRYLYSAIFFIALNHISRTRDGRDNNPISRAYYLKKISEGKTKKEAITCLARRLTDVIYAIMRDGSMYSFSKVESVCNNCEILETIAS

SEQ ID NO: 501960 - protein, 403 aa, unidentified
MNNVAGIDVSKGKSMVSVLRPFGEVVAKPFSVGHTGSELKELADYLKSLDGETRVVMEHTGRYYEPVARFLHDEGVFVSAVNPKLIKDYGNNTLRKVKTDKADSRKIARYGLDNWAELRQHTPMDTIRMQLKTLNRQQSLYTKTKTMMKNNLIALLDQTYPGVNALFDSPVREDGSQKWVDFATAFWHVDCVRNMSLAAFAERYRKWCKRHGYNFSQSKAVEVHAGAQDLIAMLPKDALTKTMVRQAIDALNAVSASLERLKAEMQALAAQLPEYPVVMAMHGVGDSLGPQLMAELGDVARFTHRNAITAFAGVDPGADQSGTHEAKSTRVSKSGPPELRRALFLVMDCLLKTMPQDDPVYRFMDKKRAEGKPYLVYMTAGANKFLRIYYGRVKEYLAQLENS

SEQ ID NO: 501961 - protein, 410 aa, unidentified
MSTQIEFEQVIHRGCGLDVHQKTIVSTVSGIDVATETRTFGTFTSQIEELKVWLNSLSITHIAMESTGVYWKPVYNILEEDFKIILVNARHIKHVPGHKTDKKDSEWIAKLLLSGLLKGSFVPAEWIRELRDLCRYKRKLIAQRVAQRNRVHKILEDANIKLASVASDIFGVTGTLIIDALIQKQEDAEYLANLAKGSLRKKMADLKLSLQGRLTEHHRFMLSTLRDSMDSINSQIGDIEARIETYAVEVQQEVELLQTIPGVGKETAINMLAESGIDMEVFPDHKHLASWAGVSPGNNESAGKKKSTRITHGNKYLKTALVEAAWAASHTKDTYLSRKYGAIAARRGSKKALIAVAHKIVIALYYILKNKEPYLEPDDTVYQQKRKQAQIKKSLERLRGLGVQVDIRPN

SEQ ID NO: 501962 - protein, 420 aa, unidentified
MKALCLTDYAAIIGIDWADQKHDIYEVSTETQAHHYSVVSSKPEAIQSWALDLQQRYPNEQVIVVCELKKGPLVYALMKYPHIAIVPVHPTSFARYRKTFQPSGAKADPSDARLQVEMVTAHPDKFSLITPQSPEVRALSQLVESRRKLVQDRVDLTNSITWHLKNYFPQALDWVAEKDSYLFIDLLHRWPTLKHIKGARTKTLTDFMHQHNVRDKDLIDARIKAIKQAVSLTDDEGVIVPNQLMVEAISAQLRVLMEAIERMDKEIRTRYAGMADKAIFDSLPGAGAQLSPRLFVAFGADRDRYNNASEVQKYSGIAPVTESSGKKSWTHWRYNCPKFLRQTFVEWAGQTVRYSFWARAYYEQQKENGKPHNTIIRSLAFKWIRIVFRCWKDGVPYDEAKYLQSLRDRGSPLLKFAAKI

SEQ ID NO: 501963 - protein, 343 aa, unidentified
MDKIDYCGIEVSSEALLVALRRNGQTLPLKSFPNTESGHRALAAYLVRKGRRVRVCMESTGVYGLDLALLLHRQAGIEVMVANPRAVRHFAQALMQRSKTDPLDAVMLLEFAARMEFRPWQPPSLPVLHLCALSRRLEALTELCTAEKNRLHAAQAAQALPGVIRQDLQRSIAFHQRAAERLARQAMKLIVADPRLRERFEELDSLPGVAETSAIPLLAELAMLSPDLDARQWGASAGLDPREYSSGRSVHKKVRISKTGNRHLRRALYMPALVAVQHDPFLRAFYEHLLAKGKLKMQALVAVMRKLLHAIFGMFKHHQLYDGSQLFPLLAPVRTAPASAEVA

SEQ ID NO: 501964 - protein, 421 aa, unidentified
MSPDEKRLFARTFPVHIGVDTGKTFHVLVAQGPDGRRTESHRVDVSRAAFEQADAQIRTWFPAVRRDQMLIGLEFAGHHGFTFARYLAGRGYHVVNVLPAHTKRAKELEDNSPLKSDPKDAATVCGLLGHGIFVRFPFLQRPYLELRLLTTHRQRLTVEATRFKNRLQSLLDLAWPEFVAQFSALEKATPLAVLDRWPLPVDILAASARTVRTHIHAASRGHVGPERVKALLTSARETLALPDAAEERRLEIHNLLARWALVREQLADLDERITALVAICPEAKILLTVPEVSAVCAATIVAELGTPSDFDHPRQMLKLAGMNLVSASSGQRDQARVPKWQSKRGRPALRRQLFLLAGRWCQQDGLYRADYEALLARGSTRTKAVCSIARKLVPLLLAVMRSGEAFEVTRWMAHRHQRAAA

SEQ ID NO: 501965 - protein, 417 aa, unidentified
MLTAGWFVGIDWASEAHEVCVLDREGQVCDRRSVPHTATALQAFVDALLERAHGDASMVAIGIEVPRGALVDVCVERGFGVYAINPKQLDRFRDRFTAAGAKDDRRDAHVIGDSLRTDPQAFRQVRLDHPLVIQLREWSRVDEDLAGDLTRLTHQLRDLVYRIAPGLLTLCPAADERWLWTLLRDAPTPADHRRLSLRLLERLLRDHRVRRLEATRVREVLQQPSVYTAPGVVEAVTAHIQLLLPRVDLLAGQRRDAEKQLERLLEALDAQEPAAGDQREHSDVAIVRSMPGIGTRVAARMLAEASQPLVDRAYHVLRATMGVAPKQSGRRRTVSMRYACNARLREAGYHWARTGAQKDPSSRTYYAQLRARGHSHGRALRSVADRLLRVLVTLLNRGQLFDPTHSQHAPVAVGAGA

SEQ ID NO: 501966 - protein, 324 aa, unidentified
MTASMDEEAPAMESMRWVGVDVHTKESLAAVLDPASGEISTQRITGRPGEAVVEWLSTVAQPFRAVYEAGPTGYGLVRRARERGLDVVVCAPGHILKNATDHIKVDKRDAVRLARLLSAGELRLVRVPEPDEEQLRDLVRSREDLRVDPTRIRNRIGKFLLRREIYAPQHTETWGVRHRKWLHGLLFDDRASELVFEDAMHAHDILVARREQLERALAEIAETSAWARTIARLRCLRGIDTLSALGLVAEVGDFRRFQHPRFLASYLGLVPSEHSSGEKRRQGGITKAGSKHARRLLVEAAWQYRHDRAPRTTSPSANRARTHA

SEQ ID NO: 501967 - protein, 413 aa, unidentified
MKRRQRTIQEDTLLVGIDIGMERNTAYCTNMSGNGTKTIIFTHTREGYEKLMEYMLMMQRKLGCTGCLVGYEPTGPYGEPLIHYLIHKGVPLVQINPMHTKRLKELNDNSPLKTDKKDSRVITDIKRLGYTLNVVVPEGDAAELRRLMNLRDRHIDERVALMNYLRQLIFLIFPEFFQAIKSLRSTTAMMIVREYLATGSLWKTDHESLGRAIRTTSMGKLGHGEAMRLLHAAHTSIGITKGVSGIMMDMSHVALQIAMIHSLIQEAEHCIEKILKNIPSARYIRSIPGIGSITTAGIIGEIGDFNKFRTQGEVVKFSGLNIYEVSSGKHTGKRKISKRGRSRIRNLLYLAALGTVKKQGIMHAYYTRLLGNSLHKTSALVAVARKLLKIIHAVVRDECMYVREEKEVEQKAA

SEQ ID NO: 501968 - protein, 318 aa, unidentified
MAMKTRHVMLGVDVSQGWLDIHQDGQEAVERIANERRAIDAFLKRFRDAAIAVEATNTYHELVVERALRLGLVVYLVSGYQIKHYGNAIGQRMRSDEIDARLISRFLSREIDRLKPYEPKSPQHALLWKLLKRRATVVQSRQQLQQSLAGIELLGETTRLVNSFARVLAELDRRIAELVKSLGWQAEVSRVQRISGVGPLTAQALVVAYHSGTFIHHDPFIAYLGLDVRAKDSGKFRGQRKLSKRGDGEYRRLLYCAALAAGRMPGYFRDRLQALMARGLSSTAAHVVVARKLATIAFNLLRKGVDFDPARLASGATS

SEQ ID NO: 501969 - protein, 365 aa, unidentified
MLIIGCDFHPSWQQVSWLDTETGDTGERKLVHGSGDAQQFYEQLAAPVLIGMEATGNSQWFIELVEDMGHEVWIGDAAQIRASYVRKQKTDKRDAMHILKLVVQGRFPRLWTPDREQRDLRQLVLHRHKLVEIRSRVKNELQHLSMNKGVQRKHKLWSQAGQRMLRELPLKPWAACRREDLLGLLSMLSQQIGKLDAAVQKAGEENPQAKLLMTQPGVGPNTALAFVLTIGDVSRFRRGKQVASYLGLIPREESSGGRQKLGAISKQGNRMLRSLLVEAAQTAVRLDPGMRKQYLHRCHQKPKGVAKVAAGAQVSRTPLLDAAHECGVSRDRWHREQLAGGPGRRKLDRRIDWALSHPAPGGMFA

SEQ ID NO: 501970 - protein, 339 aa, unidentified
MGAAYDGKQFVGIDLHRRRSVISRTDQHGEVLEAVRIDNDPKLLAEVMGRAGEQPEVVLEATYGWYWAADVLTTIGATVHLAHPLGVKAFADRRVKNDFRDAADLADLLRMGRLPEAWIAPPQVRDLRQLVRHRAKLVAVRSAWKCQVHAVLAACGVPVRMSDLFGQAGSELLDHLQLPTTFAARVNSLRRLLDPLDAEIALFGGMVAARLARHPGYRAIQHIDGLGPVLEAVLVAEIGDVTRFPGPAQLASWVGLTPRHHESDTHVHRGKPTKQGSRLARWAAIEAVQRIGPQTRLGQVRERVASRRGRNIGVVAAARELICLAYYGLRDGHIRRLAA

SEQ ID NO: 501971 - protein, 387 aa, unidentified
MRKEPVVRKDTRYVGLDVHAETIAAAVAESDGEVRDLGVIPNRPELIRRLMKRLGPARQLKVCYEAGPTGYVLYWQLRGMGIHCEVVAPTLVPVKAGDRVKTDRRDAMKLARSYRSGDLTAVWVPDAAHEALRDLVRAREAAQSDHLRARHRLQKFLLRHGRRAPERIKRWTERQLDWVRHEVSFEAEAQQAVLTDYLSEVDHARERVRRLERAIDEAIEAAPATQRAVIEALQSLRGIAKVSAVSIVAEVGQLSRFARPRQLMGYSGAVSREDSSGGRIRRGSITRTGNAHLRRIVGEAAWAYRHKPSVQGSLRVRQEGLPEPVKEIAWKAQHRLHGRYRRLLGKGKAKQQVITAVSRELLGFIWAMGVHVERAMAVEGGKKHRAA

SEQ ID NO: 501972 - protein, 403 aa, unidentified
MNNVAGIDVSKGKSMVSVLRPFGEVVAKPFSIGHTGSELKELADYLKSLDGETRVVMEHTGRYYEPVARFLHEEGVFVSAVNPKLIKDYGNNTLRKVKTDKADARKIARYGLDNWAELRQHTPMDTIRMQLKTLNRQQSLYAKTKTMMKNNLIALLDQTYPGVNALFDSPVREDGSQKWVDFATAFWHVDCVRNMSLTAFAERYRKWCKRHGYNFSQSKAVEVHTGAQDLIAMLPKDALTKTMVRQAIDALNAVSASLERLKAEMQALAAQLPEYPVVMAMHGVGDSLGPQLMAELGDVARFTHRNAITAFAGVDPGADQSGTHEARSTRASKSGPPELRRALFLVMDCLLKTQPQDDPVYRFMDKKRAEGKPYLVYMTAGANKFLRIYYGRVKEYLASLEEN

SEQ ID NO: 501973 - protein, 373 aa, unidentified
MEKNITKVALDTHKKQHTAALLDCETGETEVFTVKNTLKDIKKMVAKIKKRFSGTIHFCYEAGVCGFVLKRRLEALGCQCDVIAPSLVPTKAGDRIKTDRRDAQKLLGQFIAGELTVVYPPDPEQEAAREITRCRHAAQEDLKRIRHQLLKLLNRHGYLYPEGRHWTKKHLEWLKALEFDQSDLGLVFESYFTELHHCVSRLQGLDREVGSLAERPQYREVVGLLRCFRGIDTLTAITTVTEIIEFGRFESPRKLMCYLGLVPSEYSSGEKHNRGGITKAGNKRVRRLMVESAWHYRHRPWVSKDLKRRRKDQPQWAIDIADKAMARLYKRYWNLVNRGKMPTKVCIALSRELAGFIWSILHELQNRKMCQPS

SEQ ID NO: 501974 - protein, 350 aa, unidentified
MKIIGCDFHTRYQQIAMMDEATGELIERRLDHQSGEAEEFYRELQGPVRVGIEATGPIRWFERLLADLGHELWIGDSAKIRASEVRKQKTDERDALLILDLLLAKRFPKIWVPTPAERDLRQLLWHRHKLVCMRTMLGNQLHALAMSEGLCRKKKLFTKKGRMELAHVGLAPWASRRREELLKLLDHLEPVIAELDRAVMEEANLREDAVLLMTHPGIGPVTSLAFVLAIGPIARFARSRKIVSYLGLNPSEESSGGRRRLGAISKQGNTMVRWLLIEAVYPAVRKDPALRQDYQRLKFRRGHAVAKVAIARKLAVRMYWMLRSGAAYAQLVRRQGSPGATLVDASSSLG

SEQ ID NO: 501975 - protein, 441 aa, unidentified
MPVHFLFQPKGGDTMDNALTTTLFIGIDVSSKSNYVFALDFFGKKLLSFEAKNNLPGSEEIVANIITCLKQNNLTHLTIAMESTSFYSWHIANTLATHDALIWFKPKIYCLNPRVISAYKKSFVDIDKTDPKDAFVIADFARVGKISTAPWSGGQYIALQRLTRCRLHLMENIAREKNYILSNIFLKFSELAVLDKSENPFSNTFGASSLATLTDYMSIEELANSSIEDLVSFLVEKSKNRFSNPEATAKLLQKAARDSYRLDKSLYDPLNATIAASLNCIKALEKEVKGLDKAIEKAIKRIDNHQFQCLLSIPGIGPVFAAGIVAELGDITKFTNQAAVAKYAGLTWRKKQSGNFVADNTFLTKTGNKYLRYYLLEAAASVIRYNKEYLDYYHKKYDEALKHKHKRALALTGRKLVRLVFALLRNNQLYTSNEVVEKAKI

SEQ ID NO: 501976 - protein, 321 aa, unidentified
MAMSVQPLLVGVDVSKAELVICLDPQQPPEVLPNQTKAIGQWFDSLPGAPLCLAVEATNTFHLALVEQAYQRGHTVYLVDGFRLNRYRESVGGRAKTDASDARLLWRYLDRERADLRPWSPPAKGYAEVQRLLHRRATLVKAKVTLTQSLREFTELKPTADALFRQLAQLDRLIQNRLRRLIQQHQWADMVTRCQAIEGIGPLTAAALTMAFHRGDFRSSDAFIAFLGLDVRVRDSGKLRGRRRLTKQGDPELRRLLHLAAMQACRSASWQAFYQRYLDRGLSKIQALVILARKLARVAFALLKNNTSYQPKCRQEGCMAT

SEQ ID NO: 501977 - protein, 325 aa, unidentified
MDTKMLCCGIDVSHLTLDVTYQNNLGDLFYLQVGNNIAGFKKILEHTGTDYHFVMEATGVYYIRLAFYLHGQGCRLSVVNAMSIKRYIQMHLERNKSDKKDSGWICKYAIEQRPCFWEMPDSAYFESKQMFNTIREYAEQVKRFNNQLHSLKLLPVPSKETIRSIEKMKANLEKEMALLEKKLEACLKQWQPDQYKSISSIKGLGKRATALLIIYTQGFRHTRNHRQLISFAGLSPTEYSSGSSIKGNNRIYKKGGKAIRDVLYMCAMNAKQTNVACKQLFERLKANGKTGKQALIAVMNKLLKQVFAVVKNNSLYQPNYCSAKP

SEQ ID NO: 501978 - protein, 351 aa, unidentified
METQITARPKLYIGLDIHKRSWKIHCSTDLFSGKTFSMGPDPEQLRAYVEKHFVGYEVGIAYEAVCCGYYAHRCFEGYGWQSLVVNPADIHRKGKEKYTKTDHIDAQLISRELKDGRLESIHIPSVEREELRSLFLRRNDLVKGFRRIKSYIKMQLLYFGIKEPLELDNGHWSHAYRNWLDAMVFEHPTAKATLESRMRFFRFVDKELRDVSGQIRAYCRKYHKKDYYLLRSIPGMGGIVACGIICELGDLRRFNNIKHLAGHVGLAPGAYQSGGNYKTLGITMRAHRLIRSYFVEASWQAIRAGPVMQAYYRKHQGKNVKSVIIKVARKLLSRTLAVIKTETPYTIGVIE

SEQ ID NO: 501979 - protein, 348 aa, unidentified
MNKSKDIVLAVDYHDENLVIRWLDCASGEERVLKRVTEAEAILGVVRSAKERAELSGGRAVWIMESTTGWARVKCLVGPWAQFVVANVVQMPLPPKARRKKTDKVDTQRLLREYLNGQLPVSFQPERPLRELRRLVGSRESLVSRRTAVRNWINRYLAHETWLLRAGLWSQRGTARLGELARSLKGLDGVTLKIKLEELEGLEERLERVEKEMLKVYRAWPLAQWVDEIDGIGPIAAVSILARIGPVERFADAEELIAYAGLAPGLQESDQHRRNGTVGGGGTDKHLRHYLMEASVWARRIPRFHATYERVRSKRGKKIGRLVVARMVLRSIYKMLRNGVRFIAAPAA

SEQ ID NO: 501980 - protein, 347 aa, unidentified
MIIIGCDLHTRSEQIAMLDTETGEFEERRLEHEDGEARRFYTGLKERALVGVESTGYTRWFAEMLAELGHQLVVGEAGKIRAKETRKQKHDRRDAEHILNLLLRGDFPQIWLPSAEERDVRVLLEHRHQLVELRTRAQNGLQAIALSYGLRRRRRLWSERGQEELKKLPLREGMGRRRADLLRLVQQLDIWVQGLDRRIEQEVAQREEAQRLMTHPGVGPQTALAAVLVLGPVERFPDDRHLTSYLGLIPQEDSSAGRQRFGHLTKQGNRLLRWLLVEAAQTASRYDPRLRRAYRRLAFRKGRAVAKVAIARKLAIRLYIMLRDRIDYQEFCRRGSHAGMLGDVALV

SEQ ID NO: 501981 - protein, 355 aa, unidentified
MTSTKYIGMDVHKESISIAVLNFAGKVVMECVIETKASTILQFIHGLRGDLQVTFEEGTWAGWLYDLLKPHVTELVVCNPRKIALLKDGSKSDRIDARKLADLLYMNKIKPVYHGEHGLRMLKELSRSYLTISKDLGRVMNRLKALYRSWGVPCAGTQVYATHYRSEWLSKITEAGVRRRAELYYQQLDALRLVRQQARKELLVEARKHRATKLLRQIPGIGPLRAAHLVAVMQTPHRFRTKRQLWTYSGLGLETHDSAQYRVVERQLQRSNKPVTLRGLNTNHNHDLKDIFKGAAMRASTAAGPLHDFYEALLAKGRKPTMARLTLARKIAAITLIVWKKEVRFDANYLKQQAA

SEQ ID NO: 501982 - protein, 375 aa, unidentified
MKKFNKYVGLDVHKETIAVAVAEAEGGEVRYHGEIANTPAALDKLIKQLRKGDAALSFCYEAGPCGYGIHRQLTEQGWDCQVVAPSLIPKKAGDRVKTDRRDSLMLARLHRAGELTAVWVPDTAQEALRDLTRAREDLKHLQRQAKQRLLAFLLRHGQRYAGQSRWTQAHYRWLETVKLAHPVQQIVFQEYIDTVKTLNKRVDTLDQQIASTAAESVFWPVIQGLMALRGVNLLTATTLVAEIGDLKRFASAPQLMAYLGVVPSEYSSGGSKSRGGITKTGNGHVRRVLVEAAWCYRFPARKTAVLQRRAEKASDAVQDIAWKAQTRLCGRYRLLEARGKLKVQACTAIARELAGFIWAIGQTVSPATASAEYSP

SEQ ID NO: 501983 - protein, 352 aa, unidentified
MSNQASFPKLTIGLDLGDKVSRTCELDGAGKIVKTAAVATTTEAIERYFGGRPPCRVVLEVSTHSPWVSRQLEALGHAAVVANTSEIFSRRRRKRRNDKLDAEFLARQGRADVQLLYPIRHRGAEAQQDLAVLRARDQLVQARTHLINHVRGAVKSLGARIGTCDADVFAKRAPAQLPEPLRPALAPLVETIGVLTRQIRAMDRDVDRMEERYPEVARLQQPKGVGPLTALAYVLTVEDAGRFKRSRDVGPFFGLVPRLDESSDSSPQLHITKAGDALVRRYLVGAARYILGPFGPDCDLRRHGEAIAARGGKNASKRAAVAVARKLAVLLHHLWVSNADYEPNWLESRRAA

SEQ ID NO: 501984 - protein, 311 aa, unidentified
MTDDTIGIDISKATLDIHRLNDGKTMSFSNCPAGFKALSRFCAKTAVARVVYEATGAYHGGLERALGAHLPLVKVNPLQARRFAQAQGVRAKTDAVDAKMLAEMGNAFALEPDEPASGIQHDLKELRAFRSGLIKDRTSIINRLKTQTLSITSRQSKARLAQVDKQIAEISAELDRLISSCDTLAHSMKILRSIPGIGAVSAATILIEMPEIGRLDRKQVASLTGLAPMARQSGQWRGKSFIQGGRKIVRDALYMPALVAMRHNPDLKAKYQALIKAGKPPKVALTALMRKLIELANALIKVDRNWVKRGA

SEQ ID NO: 501985 - protein, 357 aa, unidentified
MESQEVKYVGVDCGKKSIEVVRINSENSLERRQFSTTESGINNLLQWLTLNDIVGLEAGSQSFRIAKSILNKGVQVIVLNPGNLATIYQSLKKTDKEDSLKIARLIQRHPIEELPTVPIPNDEEEDNRRLCTEQENWTRQLTQSKNRLHSLFTQAGLTHITKKHLRTKANREISVALLPSRYQKEAERILKVLDLVEQNLKLIEKEIQEALKKNKAYVQTIMSMPGIGMITSLAIMSYMGDCKRFSSAKQAAYYAGLVPRVDISGDTVRYGRIINRGCHSIRRVIVQAAWSLVRCQHGGKVKEFYQRLYLKKGAKKSIIATSRKMIEVLYAMIRTGKLFDSMPENILNRKLTQYGLM

SEQ ID NO: 501986 - protein, 396 aa, unidentified
MLYLGIDIGKNTHVASLIDDNAKLLFKAFSFGNTTEGGESLISKLASHLPSISEVEIGMEATGHYWLSLYSFLVGKGYVIHVVNPIQTDGWRKGTEIRKRKTDIIDSVLIAELIRYGDFLETSLADENTMSLRNLTRFRHYLVASIGDLKRKAICVLDQVFPEYQSVFSNIFGQTSKELLLQLQSPDDFQSITAEKLENILKSITLKKFAKNKISTISELAANSFGLSFCRDSFSLQLKLLLEQIKFIEAQVADVEAEIRQLLEKINSPITTIPGIGPITGATILGEIGDISRFSTPAKLVAYAGIDASVSQSGMYQSTNNKMSKRGSPYLRKALFQAALVASNCDPTFKAFYQKKRIEGKHHLTAVGAVARKLCYTIHAILKNNCPYKVQTVSSD

SEQ ID NO: 501987 - protein, 325 aa, unidentified
MAVIGIDVSKQKLDCAWLRDEATGKVKTRVFGNRRQDFPRLLEWLEHQTGEPLDQLHVVMEATGIYHETLAYWLHAAGIQVYVLNPAQVRDFSRSLGVRGKTDKKDSVVLARYGATQRPDAWQPEPEEVRKLKALAARLDALDKDIQRERNRREKAEFVMATDILRSIDDILSALTRERDRLQREIDDHLDQHPGLKQDRALLQTIPGVGPAVSLRLLAMLRSRAFESARQAAAFAGLVPVSWESGSSVRGRPRLSKAGNPKLRQSLYMAAVVGLRRNPDVSALYQRLTGNGKSKMAALGAAMRKLIHIAYGVLKTQTEYRPQTA

SEQ ID NO: 501988 - protein, 415 aa, unidentified
MDTIFAKVAGLDVHQKFITVGIRCRLETGKLFAEVRTFGTMTRDLMALADYLEALGVTHVAMESTGVLWKPVWNILESRRFTLFLVNPRHVKQVPGRKSDVSDAEWIAQLLQCGLLQSSFVPRRELRELRDLTRYRAQLVSEQTRVANRIHKILEDANIKLGAVASDILGKSGRAMLGVLVGGQQDPEKLADLAEGRLRAKIPDLKLALEGHFSEHHKFLVEHLLRHLDDLEHQTEQISQRIAERLRPILDDKRLERLDAISGVNRTTIENVVAEIGADMSQFPDEHHLSSWAGISPGNEESAGKRLRNRTTRKNRWLRRAIIEAAWAAGRIKNSYLGAQYRRLAARRGKKRALIAVGHSLLVIFYHMLKYDVEYQDLGVDYFDERDPEHLRHYLVKRLERLGYQVSLTPQTEAA

SEQ ID NO: 501989 - protein, 404 aa, unidentified
MSTTSTRSPEASTAHVRPLYLAFELGDRHWTLGFTIGLGQRPRRRVIAARALDALGEEIARAKTRFGLPAEAPVVSCYEAGPDGFWLHRALGAQGITNVIVDASSIEVNRRARRAKADGLDVEKLAEMLLRYHAGERRVWHVVRVPSVADEDRRHLERERQSRVQEHTRLLNRIRGLLATQGVVLPLRGDGPGALARVQLWDGSGLPPGLVARLTREWQRVEAVAAELRTLEAERRALLSGRTARRTPAPAGASARDDTGARTCARRLVQLRSVGPTLAWALSTELFAWRQFRNRREVGAVMGLVPTPYQSGTSHHEQGISRAGNARLRGLAVELAWLWLRHQPESALSQWYRQRFAHGGPRLRRIGIVALARKLIIALWRYVQDGRVPEGAQLKPTTPAARAA

SEQ ID NO: 501990 - protein, 322 aa, unidentified
MAHVFIGVDIAKSSFHAHILGEATASFEAKNTPAGFERIARRVPEGAQVFLALEATSTFHEALADWAVEQGWTVFVVNPAKLKHYVRSQSSTHKDDAIDARLIARYISKHHEHLHAYRPLSKAQRQLRSLTRRRDQLKRMMTQESNREGHLTDLDELTRESHQRLQAALKEELVLVEAAMAKVCKEDKVLDGKRRRLESVPMIGKVIASVLLAEMGDEARFENAKQVTAWSGLVPLHQRSGSSLEKKGRISRAGNKRIRQLLYMAAMGAMRHAAWQPWIKARQKNGKNGKVLLVAIMDKMLRICWGLLKHDTDFDPKIAFAA

SEQ ID NO: 501991 - protein, 455 aa, unidentified
MKKKLEKNRVVKMGSGLPVFNPHAAGIDIGDTMHCTAINDGSGGHEVKTTSAFTCDLQEIVDYLIVNGVTTAAMESTGVYWLSLYMLLEEAGIEPYLVNASHVKNVTGRKKDDTDAIWIQKLHTCGLLQKSFQPDNEVRILRDYSRQRKNLIVLSSDSVRRMQKALELMNIKIHTVISDILGKTGMNMVKAILAGERNPEILCKLCDPRIKASREDIIKSLEGIWRDEYLFMLDQAVENYEFHQKQIKSCEERIKEQLLKQVAIINQGDITFLNADPNKKAKAKPKVKKNQFDFSVSPYLKAITGVDLCKIPGISDVTALEFIAEVGVDMSKWKSAKHFAAWLNLTPNTKITGGKIVSSKLMKKRNKAGQCLRQAASSLSTNKTPIGDYHRRMRGKLGGRGATLNTAHKLARIIYTMLLNKTEYNVVMVNDNHENYKQDKIMKLEKQIARLRQAS
